United States Patent Application Publication US 2004/0166519 A1 - sequence listing, part 5

SEQ ID NO: 5780 - DNA, 40000 bp, Homo sapiens
  misc_feature (1)...(40000): n = A,T,C or G, or insertion/deletion polymorphism (see Tables 1-2)
cgaaacatatgagatagatatatatatataccctgtgtatatgtatgaagggagggaatgaaggaagaaggaaaaagacagaaaggaagacagaaagacagaaagaaagctgagcataaacaaaccctgtgatccaggatgtccattcctagatatgtactcaagttgagtatttacacatacttaagttcaccaaaacatgtaaaataatgttcatagcaacactatttgtaatagcatgaaactgtaaacaacccaaatgtccaactacagaggaatagacagtgttatatttgcatagagtagaatattacacaaactatgctataacatgcaaccacatgggtgaatcacagaaacgtggtggatgaaaaaagccagaaatgaaaaaatacttactgtatgattttgttatgaaatgcaagaacagaaaaaaaattagtctatgcaacagaagtcagaaagaggctaccctctggggaggtattattgaccaggaagggacatgcaggagctttcaggagtgctaaaatgttctatatcttgatctatatagatgtatacatatgtaaaaatcattaatacacttaagatttatgtacttacaaagtaaaaaaaacaaaaataaagctccacaggtgattctgatgccccaccaacactggaaaaagcaacctattttacccacaccaaaaaaaaatttattattcttaatattgctaattaagagctaaagcttccaacagctcaatctgctttgttctgaaatcataatcggcaaaaaattgagcttgtaaaataaattagttggtgattatttgctttgcagaagtgttcaccatagggtttctttaaatgacggactcccttaagtacatttaaaaaataagatctaagttgccaaaggctatttattcacaaatrttaacagatgtatgaagtgatcctgactgtttcagtgtttgggtgggtggggagtggatgaaatcttaatactccagacagaagtcagagcttctcaaagctataagaaagtgccatcctgaaactgctctgtgttttgagtattgttttatatgggtggagggaacacactcagagaatgttagaaaaggaccacagaaaatccaattgtctcaaaaatgtaatgggctcaatgtggaaggatgaaggtggcataacacagtacatttcaaactgcaacatgcattggaatcacctgtgatctcgctgccatgcagatgctgagaaggaatgagattctgcatttccgacaagctccagggtgaagctgatgctgctggtctatgtaccacattttgagtaggaagracacaagggagctaactcacatggattagcttacttaatcctcacaaccatgctctaattataggctattatccccattttatagataaggaagctgagacagagaatggctaagtcactcagctaaggtgggatttgaattcaggcctgtctgacccttgtttttgctgccaacacaacaagggwcagagcaaagcttgagctgacaaagcctttcttctccaccctgtcctcccaaccctcacgcctcttcctcccatcatcccacagctctgaaggtagacagtcggctagctttcagccagccagcttgactgtctccgattatattcaattagaatcagtaggctattcttggtgatcaaatataaatgagtaccttggtaatgtcctctcccctgcctgtagccctctacacccttgttgaggctcaaactccagaagaataccaataattatgagacggccagatgccaagatgcagaatttaccctcactccttcaggaatgaccttggtcccaattgcctgtgtaagtccttcttgcaatgttgcaggtccttcatgcatctgttaacatttgaatcttgcaatgtttccccttcccctccaggccatcccacaattacacagcagtggagagtataaaagtgcttctttttaaaacattgcatttacagctaaattctctacttttcctcttgtgcacgcaccacatgccattttaaaaggtcagttcccagggtgtcaaatggtctccatggtgaaaagaggttgtaaacacagagtgattaaacttccaaggtacaacagcatccaaaactgtggtggccacccaccactcctgtctcactctgagaactctaaccacagacataacagtgcctgcaggtggctgtgaatctcaaacaggtgctggttccaccggcagtgctgggcgtcactggaggctctcattccaggttcccatattgcaatgcacaaggttctgagttgacaccactgcaaaggcattggctgtataatgtttagaaaaagagattcctccctctgcttcccctgggccttcttggtaggtacatacatcgagggtaccagaaacataccaaccaaaaacaaaaacaaaaaaacctggagtaactatattaatttcatacaacactgactttagaacaaagtttcatggagagaaataaatcaaatggctttgcataacagtagaggtgtcaattttctaagaaggcataacacttctaaacatgtatgtacccagtaacagagcatcaaactacacaagacaaaaagtaacagagttgaaaggagaaatagacatatccccatatagttggacacgtcagcattcctctcttaatgactgattcaacaaataggcaaaaaatcagtattgacagagaagacaaacaatatcaccaaccaactggatctaatgaacatttatagaacactctgtccaacaacagaagaatgcacacttgcctcaagtgtgtgtgaaacacccaccaagatatacacattcatcataatctggtccataaagcaaaccttaacaaatgtaagagaattgtaatcataataattatgctccagaattataacaaaactggtctagaaaccaataagagaaagacagctggaaaatcccccaaatatttgaaaattaaacaatacatttctaaataactcactgagactcaagagaaaatggcaagggaaattcaaatatatttggatggaatgaaaatgaaaataaaacaccaagatttgtggaatgcagctaaagccatggttagatggagatttacagcattaaaatgtttatatttgaaaagaagaaaaagctaaaaacagtaaccaaagcttttacttcaataaactagagaaagaaaagtaaatttaaactcaaaggaagcagaaggaaagaaataatgaagagaaaagcagaaatcaataaaattgaaaacagaaaagaatgaagacaaataataaaaccaaagctcattcttagagaagatggataaaactgataaatctctagcaagagtgaccaagaaaagagacaaaggaaacaaattagcaatacctgaaattaaagagggcacatcacttctgaagccacagacctaaagagataataaaggaatactgtgaccaactccacttccttaaattcaacaacttagatgaaatgaaacagttcctcgaaagataccaaatatcaaaactcaagaagaaacggataacctgaattgtcctatgtctattaaagaaactgaggccaggcacggtggctcatgcctataatcccagcactttgggaggccgaggcagatggatcatgaggtcaagagatcgagaccatcctggtcaacgtggtgaaaccccacctctactaaaaataccaaaattagccaggcgtggtggtgcacgcctatagtcccacctactcgggaggctgaggcgggagaattgctcgaaccctggaggcggaggttgcagtgagccgaaattgcaacactgcactccagcctggtgacagaaggagactccatctcaaaaaaaaaaaaaaaaagaaaaaaagaaaaagaaagaaaagagaaaagaaattgaatatggagtttaaaaccttccagaaaaaaagaaaagaaaagaaaaaaaaaaaactccaggcccagttggttttactggcaaattcttccaaaaatttaaagaaaaaaataataccaattctataaaatctcctccagaaaacagaagagaatatttcccaacttgtttgataaggccagcattactctaataagaaaccagacaaagacattgtaagaatacagaccaaaaaaacaaaacaaaaacaaacaaaaaaaaaccccaaaaaaacccaacattattctctcagcacggcgtgttctctcagcattccttgtggctggggcctcatcacgtgacacagactccaccaatcagatagcaccatgtgatatttcaattgagaagtgagcaaatggcccggcacagtggctcacacctgtaatcccagcactttggaaggcccagatgggtggattgcttgagcacaggagttcaagtgcaggagttgcttgggcaatgtgatgaaaccccgtctctacaaaaaataaaaatattagctgggcatggtggtggcacttaacatggtgtagtcccagttacttgggaggctgagatgggggcatctcttgagaccaagaggcagaggttgcagtgagctgagatggcgccactgcattccagcctggacaacagagtgagaacctgtctcggaaaaaaaaaaaaaaaaaaaaaaaagtgagcaaatgaagacattggtgtccagagaatctaattcctatggaggatgtatggctttcaggggcagcaaaggctgtggtattcagtgaaactgtagctttattcctggttgcatagttcccaggctgactctgatactcctgcagatgctgtgagctacgtaatctcctttagttctcttcctgcttaagtgctagagtagattctgttatttgcaactaagaagccagactgacaagagggaaaagacagtgaaacagaaaactatgaaacagtgtgataaggaatttaagaaggggatgttcaggctatagatgaagagaatggtcccccgtgagtcactgcagcagactggtcatgagcacggttcttaaggtcaaagttctggattcaaactctggctctgctattacttagctgtatagtattagctcagttgctcaacctctctgaacattagtttccttttctaaaatgggacaatgatacctaactcagaggaggattgtaataatagaataacctttgtaaggcaaaggcttattaaccatggttaaaaacccattaaatagcagttattaaatagcattatcaccaacccagttagcaatgctggggaaaagtcagggaaggaatgtcagaggagagcacatttaagccagttattgaagaatcagcctaagaacacagcacatgactgacaagcctatggcattggattatctgggaaaaggagattggtatatggatgcaacagaactaaatcttatcttaaaaacaacatgaatcacaaaagcatttatgctgaatgaaagacgccagatacagaagagtacattgtgtatgattacatttatatgaaaccctaaaacaggcaaaatagatttatactgatagaaagagcatggtagttgcctaaggcagtttgcagggggtgacacagagcaagaggactctttgtggagtgacagaccagcttcacatcttgatcatggtggtggttacatgggtgtatgcatttgtcaaaactcagcctgtgcaagtaaatgggcacattgtattgtatgaaaattatactaaaaacccagaatcctctcacctctatcccttgacaacccctaccaatggcagttacattttcacttctgccctctctaccagcaaattgatagctccaagctacacagttcccagcacatcattacagcttgttaacttggagtcacccagacaaatttctctccctcccattcaattttgaattaagtcagaaaaagacagattagcaaaacattaccagagatagaatttatgacaagcagctaatttttccaggactttcactaacatctcccctcagagatgactcaatagaagcactcaccccctggctgcctgcccccaacatcttccccgactgcatcaatcatagtttcactccataaatgctttgtagagcacctactatgtgccagacactagagtctggggatgcagtggtgattagtgggtgtttggggtacagtggggcacatggacaagttaaaactgagattataggacagcatgggaattgttgtgttagagaacagatcaaagcattgaaggaatgcagagaagtagggggaaaagaaatcaaggaagccatctggaggaggtgacccttgaggtaagttttgaaggaggagtaggagctggataggtcctgctttttgagagactaygaataactattctttggggagttcctacgatgtgccaaattctggactgggctctttamatagtttatctcatttctatgatcacaactactctccccatcttccagatgaagaaactaattctcaaaggaaaaatggcttcttcaaggttactcagatgatgaagattagtacttacggctaacaatttcaaactactttctctttgccatgtcctggctgggcacagtggctcacgcttgtaatcccagcattttgggaggccaaggcgagtggatcacttgaggtcaggagttcaagaccagcctggccaacacggtgaagccttgtctctactaaatatataaaaaattagcctggtgtggtggtgcatgcctgtagtcccagttacttgggaaactgaggtgggagaatagcttgaacttgagaggcggaggttgcagtgagccaagatcatgccactgcactccagcctgggcaacagagggagattctgtctcaaaataaaaataaaatraaataaaactagttagaaatgtttgccaggtcccaatctgagttattgcgcaaaatgcttttgacagtcctgcaaggtagatattattattagagtctttttatacgtgaagaaactgaggctcagaaaggttaagtgatttaccctaggttctgtggctaaaagcaatggatctggggcacaaactcaggtagtctagctccaaagcacacattctcaagcatgacactatactgccagacttactccagggtctgtgttctcagccatgaaaataaatctcttaggaaggtgatgtacaggttaaatgaggtagaccctgtaaagctcttagcatgcgtgtggcaccccacaagcaccctgtcctcctggctgctgttactaaggattgatactcagctactaaaagtgacccatccatccaacacatgcttaccgaatgcctgccacatgccaggcaccatgctaggtactgcaggtgcagcgatggagaagagtccaagagccagggagcttgcagtccacagagtgtgtgcaaccccatccaagattgcttgcatcctaaggatgaaccaacactcactgcaggaggtacaactggattcctactctggtctcaagatacattttttcaaaaaagctcagcagagaaaaaagtctgggaaaagaaatactgcaaaatgctaataatgattgcctttgggtggcaggacgatggatgagtttttttttctctttaacgctttcctgcattttacaatttttctccaagggaaaaatgtcaaaaaggtgagaaatgaggatagtctaggagcaaggacaaaagggcctgtgggcatgtccctgattgcctatctgacctgctctgtcctcacaaccctgctactggcatcagttcttggaggagccgaggccacttccccacccaagcccccttctctggtcttctgcagtacgagtgacacacttgcctcgtgttccatctccaagtctcccccttccctttagttttctccctttcttgacattcaatttcatccagaaaaataatgagacacgggtttctaaattggaatgaataaatgacattcctattcattatttaatctgctctcagacttgaatgaacacttccaggggtaattactgcaagactccaaattcatttctaggaagcagttgccggcggcctgcgcagaaggtaccgacgccattcaatatttatgaagcaacattccccaagaatatcaggccaggaaggcaactgtagaaacatcacccagtgaatatgaaaaccrtttgctcggggttttttttccccctagtgtttcggcaaagaaaaggacttagttctctcctcccctctccccacggcaaacacacaaacacactgatttgggctcttcatcagcctggctcctagtgtgttaggggaccagagttaggagcagccatacaacatggaccccaaataccaaagagagtccagggaggtcatctcttcataggttgtcgcaccataactactctgatggaattcaaccactcaaacatttcctgattatctacacagcaggtgcatagtatgttttaaaaacatgacataaaagcaccaaccataaaagaagaaatggataaattgatcttaatgaaaattagaaacttctgttcatcaaaaggtcccatgaagaaaataagaaggcaagccacaaactgggaggaaacattcacaatacatttatctgacaaaagacttgtatcctgaatatctaatgaagtcttgcaactcaatgagaagacaaaataccaatagcagaaaaaacatttgaacagacgcttcaaaaaagaaagtgtacagatggccaataaacacattgaaaagatgctcagtatcttcagtcatcagggaaacgcaagctaaaactgcaatgaaatactgccatatatcattagaatagcaaaagttttaaagatacctgacaataccaagtgttggtgaagatgtggggcaactggaacttccatacattgtaggtggaaatgtaaaatggtaaatccactttggaaaacagtttagcatttactgtaaaggtaaatatatacttatcatataaccaagcaatttcacttttaagtatttatactagagaatgaaaatatatgtccacagaaaggcttgtccgtgaatgttcatagcagctttactcataatagccaataactggaaacaataratagaaatcagcagtttgagatataagatggaatatgacttagtaataataaggaacaaactaccagtataagcagtaacatgaattatgcatgaaacataatgctgaacgaaaaaagcccgatagaaagagcccaagtggtaagactccatacatataaactttaagaacaggcaaaactaacatataatgacagaaaatggattggtggtcaggtgtggtggctgatgccagcactttgggaggccgaggcaggaggattgcctgaacccaggagttcgagaccagcctgggcaacatgatgagaccctgtctctctttttaaaaaaggaaaatggattggtgggtgcctggagtaaggtgggggatgggggttgtccaccaggggatactggggaatttttctggaatgatggaaatgttctacatcttgattgagatgatggttacaagagggttgacatttgttaaaatttatcaaactcatatttaaagtgtgtgccttttaggatatatgcatcatacctaataaagtcaataaaatttcaaaaagaaaagccatttcctccagttctaagatttaataattttttttttttgagatggagtctcactccgtcacccaagctggaaagcagaggcgcaatctcagctcactgcaacctctgcctcagcctcctgagtagctggggttacaggcgggtgccactacgcccggctaatttttgtacttttagtagagacagggtttcaccatgttggccaggatggtcttgaattcctgacctccagtgatccgcccacctcagcctcccaaagtgctgggattacaggcgtgagccaccacacccggtcagatttaataaattctaagagttatctagtattctccttataagaaaatgaagtgggctgtacacacagaccaatactttccaagcatgcccaagcccaaaatctataactcaatactctatgagcttttgttaaatcctaactgtgtgttgcgtgtcaggaagcaacgcagcaaaacagtgaagagcacagttttgggagcagataattctgcatccaatttctgcttttcacaatactggtgggcaaagaacattgagattataggagtcccttctggtatgcagtagttgttaagccttcttctatggtaacagaccactaaactttggctgggaatatggcttcctagaatgaagactacatttcccaggcttccttgcatcttagcgtggccctgcactattggccagaattagtgagaagtagagttatatcaggcctcttccggaagcctttttaagagatggtgtgcatgtccccttggtcctcgccattcctttctctgtctcgtgggcctggaattcacatgcttccatactgggtcaagaggccacacacagcagggcaagagtcaaggtgtctatggcattgactctgagaaccgccagacctcccagccctgggttcctgcactcggataattgcagcagagaaataagcatcccttttccttgttttgaatttctgtcaacttgagctcaacccaatcataactgaaatgcctgtgtctctgcaaatttgtatgtgtaagatctgggtttataaaggcatgaaagggcttaacaagctgtttaaggagttgaaagcagctcaacctgtctggaacatggcatttgagggaggaagtaaggaggataaggggagaaaggcaactagggagattggcaaagacaatccacccagggccctgcgggcaggttaatggttggatcttgatctgaaaagcaatgaaaaacagcagctgactaatcagcatttttagaccaatccctctatctgctccatggagaaccaactgtagggagtgatgtagggagtgatgcagggaggcagggaggcacggagtctaggcaggaggctcctccagggcccaggtggccttggccaggctgccctcttgtcttccatgcagtgtggcagctaatgaaagacctcatttaccattccttagggaggcagacgtctcaaacccacatgcccacagaggccctgtagagaaagcaggtaggaggaaggacaaggttgagggtctgggagcattagttgctggacagcctgcacccctgacaagacagcccccctggctcccacccacccgtcagttgttgccctgcagaagacagtcctggagtccctgaggctgccagtttttcagagaagctcaaaagatggattattatgggaacctaattttttttttttttaaggcaggcagaccgttcctgtgagtagcaaaacaaacttgtccttgggcagaagctgaccggcaggctgccagtttaggcctcaaactaccttcccttctctctctttctgcttctcccaagcccacctccaaaatttcaatgggaaactctaaaacttgccgcaggggcagtaaatgcagataacactttctttgagatcaacaactccagggttccawtcagtatgctggataacttcttttttaggaaattaacacaaaggagaaattgatatttccctctgaaattccaaggatgctcagaaaccctgggaatgtgctatctgctatacaggaggcttggcccccaggaacagggacrccggccctgcctaacccacactctccacctgagatctctctgctcccttcctctctcactgaacgggtccctgaaggcagttagctgaggacagaggtgatgctttgtcgatacatcatgatctcctgcaactgcctgtgggaactacctgcgccagacacagtctgatamccctcttgttccagatgtattacgacaaaactgaaaacatgggcctctagggagactctaatccagctgagcagatggagaagtagcacacagacattccatgggtatagacccgggatcaggccacaggccaaacctggcctactacctgattttgcaaataaagttttattggcacacagctgcacctttgttacgtgtcatccatggctgctttcttgcaacracggcagaattgagaagtggcaagagaggctggcaatatagcccccaaagcctaagatatttgttatctggtcctttatagaacatgtttaacctggaatagagcaaagaacaacaggtattcagggtggactgtgtgcccattgctgtgttagggatagcacacacattggatcatttaaccctcaaacaattctttagagggaaggtttattatttcccccattttattttacttatttttgttttatttgtttttagagatggggtcttgctctgtcacccaggctgtagtgcagtggtgctatcacagttcactataacctcagactcctgggctcaagcgatcctctcacctcagtcccagagtagctgggactacaggcatgcaccamcacacttgctcattttttaattttaattttgtagacctgggatcttactatgttgcccaggctagtatcatgctatcctcctacctcagcctctcaaagtgctaaggttatatatgtgaaccaccatgcctggcatatcccaccatgttagagagaagaggttcggtgaggctagctgactcaaggatgacacagggtatcagtggagggttcatactaagcccagcctttccactacaccagtgggcatcaacagaaatggaactgcccccaatagggcattttgaaaattcacaggagcattttaggggcaccattggcatttagagggtgagcgcgagggctatcgactgccctgccatgcacatcacagtcctgcggaaaagagaattgccccaagtcccccatactccccaagtaaaacacatgtttagaagtatctgaggccaagtctgawtccgttctgcacaaagtattctgggcatggtttctatccacatgattctcccaggaatgcaactcccattaccatgtaaacaagcgagtattgtactttcttttgctcagaattttaccaaaatttactcaccatttcatcaaatcatgtccctgtcagcaacatcgcttgtggtatttgagccacagaacacacctgtgttaaagcaacatttctaagctgattctaattcggtagacctggagtctggcttgggggtttattattaatgttttagtggccctctactcctgagtcattctggtgctgctggacaatggaccacactttgaaaaaatgctgttttaaggatgccagactagtgttttgattcgttttggttttgctggaatgtcaggatctctctgggttaagaaaagaagggaatgtcatacacagaaagagctactgagtgacagggagagggtctttagctaggttaggatttccgtcaaggccaccgtggtccatgcttgttatcctggagggtcaaaggggaaggagcaatgccagcctgtccaagaaacctgctgagtaaaagccatccttgaaatttgcccctcgtgtttggtggagattattcaacaccagtgccatcagacaggctctttgccaccatgagctggagagaactggaatccctgggaccagaactcagtgtccagaacaagcacatctcactgagacttcacaaaacgactttccatgatccttgcttgtacccaggagccatagaccatttggaacttctctgaggacaaactcaggcttaatgatccatttyccttggaaaatggtctcaaggcacacaagagtcaattaaaatcagagtccaccaacttgaatgaaatagccctgggccaccaagacaagtcccaagcctggctcctaccccaggcagagcragcagtagcctcgggagaaaagcaattatttagggttgcagcaaggacgtgtgctactatcgaggagcctctaagttccctccccatcccagcagcctctgcaaacatccaagctcccggatactgaatgcccaggcgggagatcattaaaccatgttccccatgctggcctcagctttgaagaacagtccacaatcacactaatacccaaggtccagccaggacataagctggtctgctcaaccctgactctctccctgcgacaggaactgatatttagtgaaactcccaatgcaccagctccacacacaccatctcattgaactctcaggataatcgtttcaagtgggtacagcactgtccccattttatggatggtcacactgaggctcagacaggttaaacaatatttccagggtcatagggctcgcaaatggctaagcctgggctcttcaacagcctgctatattgcttatttcagtggacaagggcatgagatctagaggcaggatgcccgcactcaaaactgtggctcttacgttggctctgtaaccctgggcaaactactttccttctctgtgccccagtgacctcaactgtaaagtgggaatcatcttacacacgtcataagtatcacgttgattgaataacccacatatactgcttggtacagagcccagcactttctaaggacataataaatatgaattggatatagtttgggtgtgtgtcctctgcaaacctcatgttgaaatgtgatccccgatgttggaggtggagcttggtgggaggtgttttggtcacgggggtggattccctcatgaatgacttggcgtcctccctgcggtaatgagtcagttctcactctattaattcacatgagagctgctgtttaaagagcccggcacctcctcccttttctcttgctccctctctcaccatgctacacacctgctccccgttcaccgtccactataattataagcttcctgaggctctccccagaggcagatgctggtgccatgcttcctgtacagcctgcagaacagtgagccaaataaacctctcttctttgtaaactacccagcctcagatattgcttcatagcaatgcaaaacagacggaggcagttcttgcgataacaggggttcgactgctagaacccgtttatgccaaatgcagccctgacttagaagaggaaggcctggaagtggccagcgccgtcaacacagagccattcctctcatctcaccagaccaactaagcgacaaccacgaagtgttcccagctctatgaaggagaggaagggcacatggcacgttcctggatgtgcacacggtacactggttgcagtcatttaattaaacagtgctacaagggggcactttgtttgacggggcaagctgtcctaggggaaacatttttaagaaaatggcaggagggcttttactttaaaaagtcatcctccctctacttctacgtaaacatatatccaaaagaactgaaagtagggactggaacagatatttgttcgcccagcactttgaaagcctgaagtgggcagattacttgagcccaggagttcgagaccagcctagacaacatggtgagaccccatctctataaaatttatacaaagttaatacaaaaattagccagtgcggtgatgcatgcacttatagtcccagctattcagaggcttaggtgggaagatcacctgagcctgggaggtggagattgcagcgaactgagatcgcaccactgccctccagcctgagcaatgatagtaacaaccaccaagttaagatggtaaatttgaygttacatgtattttactacattaaaaaaatacaaataaaaaacacacttgctaagtaaagaagccagtcacaaagactacgattccatttatgtgagatgtccagataggccaatccatagatacagaaagcggatcgtggttgccaagggttgagggagttggcacaacggagtgtgactgccaatgggcacagggtttctttcttgggataccgaaaaatgttctggaattaatagtggctatgtctgcactactgtgaatgtactaacaactcctgaattctatactttaaaggagggaatcttatggcatgtgaattctatcttaatataattggctatgaaaaggaaagttgctgtcgggaaaaaaaaaaaaaatcatcctctcctctgctcactttccccccagcggtccctgagctcttgaggcttgaggcctttgcaaacgccattctctctgcctggaacgcctttcactcccggtccacacctacaccatgcgtggttcatactttctcatccttcaagcgtaagcttcatttccaggaacctccctgtctccgtgggacctggagtgcctggaactccccttcaaagactcacaggctcatatgtgttccctcctcccagcrgcaacaccaaggcaacatcacgctccacaaatgaatgactccacctctcagcaattacggggctggagggcaagttacaggattccctggcctcgttcttcctcacctgtaagatggagctaacactgcttttctcatggaagtttatgagcggtggccaggcgtggtggctcactcctgtaatcccagcactttgggaggccaaggtaggtggatcacttgaggtcaggagttcgagatcagcctgaacaacatggtgaaaccccatctctaataaaaatacaaaaattcaccrggcatgatagcccatgcctgtaatcctagttacgtcaggaggctaaggcaggagaatcgcttgtacctgggaagcggaggtttcaatgagccgagatcatgccactgcactcctacctgggtgacagagtgagactctgtctcaaaaaaacaaaaaacaaaaaccggtggagcccttctcaagtatctgcagttggtgacttcataaacagcaggaaaagagccccatttggtgatgaacccgagaggaaatgagcaacgtataagtcagtcaaggctgaattccggggtcaagtggggctggatgtgcgtttttaattcaacttgtctttcaaggattatctattgagcaaacattatgtgccagacacggtctcaggtactgggggcacagtagtgaacaaaacagacaggacagattgcacaggggtgcggtgacgggcgagggcaagggatgttcatccactcaacaatactgctgagctcccactcggtcggggccctgctctaggcactggggagctggcagtggccaagagagggaagagctcctgccctacagagctggcacccagtgggaggacagatgacacagcagcaagtccacttcaaattgtgtcaaattccacgaagcaagtgaacaaaatgacagtcagaaaataaaccggagcagtggaatarcttgcaaagaaacagccttttggaggagtctcactgaagctgaagtaagacccgggcatgtgaagagatgggacagagaattccaggacaaagaaacagccagtgcagaggtcctgaggcacgaactgcttactttgatgggggcaggagatgttgttggaaaagtgggcagagtgcagatgccatcagcctgaaaagacatggtgaggagtttgagttttatcccaagagcaatgggaacacattaaaaaagttaaaatgaaaagaactcagggtgttccgagaacaacaagatctgccttctccgagacagcatatgtctggggaaatgaagtgaactgaggcctggtcatttatattttatgcttgcagaaccaaagacactagtgttctttagcagcacgagcaatgccggatttcaacattactaagcaggatgaataggggcagggagagactggagtcagggaggctggggaggcacttctattagatcaactgagaattgatggagacctggatgagcgggggtggtgggtcggctggaggggaagggagggagcaaagcctggactaagggattaaagaattgggaagaactgaagatggaagccagggacaggtttggtcaccagcaaacgaaaaagccccagatacccctggcgtcctggggagggtgtgtaggactggactcatctggaaagagagactctcatgtctccttttactatcaaaacacaygcacagaccaaaatgcacagatgcatgggacatactgggctgaaataaagattctgggaatctctcaattatttaaaagtatttaaattatttaattattccttagcaacaggggaagcctagatggaaatgtgtactaacacacygtgatatgttatttaaaatcccaggcagtcctttcctttccctctgtgaccaaatcaagcaacgccagatgctttctgtaggtcatatcttttcatcttcacagtaaccaaaaatyaggtcttagaggctatttctgctcctcttcctctccagcccaactctgcattctcacttccagctgaaagctttgcctgccatttaaaaaatccttgccagacccatgtgaaccctcagctactatcctacttctctgatcccattgacagatgaacaccttatcacagcggactctatttgctgcctcctggtcgcctccccacattgtgtcttgggcccactcccattgggcattcttccccattcacaaggagacagccttagttaaggtcaccagtgacttctgtgttgccaatccaatggttccttctcaatgataagaggggggtagtcgatggttcaattaacrgagttgtcctgggccasgtgtggtggctcatgcctatagtcccagcattttgggaggccaaggtgggaggatcactcaggcccaggagtttgagaccagcctgggcaacataacgagaccccacgtctatttaaaaaaaaaaaaaagagagagagacaaaagagttgtcctgtgtgttgagcacatgaacagtgacagttatgcccatttgacaaatgaggaaacagaggtgacacagagataagaaggcatttgcctgagattggacgtcgaatgagttctaggcaccaagggaagcagggaagggagtgatacccaatgcatgaggtgcagacctgmccccaaggaagtttccagcaaccttgctgcaggacaggcaggccataaccccatacagattccccagtagtgttcaaatcacaccacaggcccaacccgtgctatagcagaaaaagcaaggggcagaagactgtggcttaagtcccaggaccactcatgtcactgcctcttgatgtggggaccctgggcaagtcacctggcatctgagtctcggttctggaatttgcaaaatgagatgtgacttctggtcctgccttcctcacaaaggggctgtgacagtccagggagatgacgcgagtgatgagtgtttggcacactaggaagtggcggaatatgactatttccgcgccggccccatctgccgctctgctcagcacccacagcggcagatatgtaacatgacgtttccatgaattcttgccattaggaattcccaacacccacgctttttcccttctgaaagttctgctgcataaaagaggcagagaacaagccacccsctcctccgcttctctggataattctacaccactcccccctgcccatcaagtgtctgtggaattccagcttcaagccaccccctcctctgcttctctggataattctacacctctcctccccgcccatcaatcatctgtggaattccagcttctcaaacatacaaacagttcataccagagatgaccagtggtttggaaaagccagatcatttgccatttctcctttttaaaaggtctttggggacatgattaacaaaagctaagatgggaggaaaggacagaaatgagagcctcaaggtttgttttttttttttttaatgttttcaacgagntgtgacttgaaacaagaggccagacctgggcagccagcaaactatgatgaataaygctgccaatgagagtgctttttttgttcattaacatcccgcttgtgccctaagaccagggagtgatgtatggcaattgtatcaatgttccccacagggcaggacaccacgtggtttagtaagtggctagagtcatcccacccaagctggccatttgctcctgtgtgcagactgcacctctgaacaggcctcagtgcctctcaacaaactccatgacaagagccgatattaatggatcacctccgaggtgccaagcgtggttagaggtacctaccacgtgttagtgtatttaataaatcttcaccaatttctctttcaggtcggaatatcgctcccattttatcgctggagaaactgaagtctggagaggggcagtcacaggggccagggtcatggggttaccatcagtcaaggctgggacttaaacccakgtcatgtgcctccaaaaaccatgctgctgtcaaatactccaccaagggaattcagactccagtgctctctggaacaggcaggtaaagtgaagaccaggtggggactgtggtgaactgatgacacacacccatctaaggggaaacgcagccactctgaggcacccacaatgatttgcatgaatctcaagtgcattcagccacaggtgaaagaagccatcttgcaaaagcaaaactgtatgacccaaaaacagatgaagtggctgctaggagctgagggtcggggagagcttgaccacaaagaggcagcaggagggaatttgggggatggtgaaaacactctgcaccttggtgatggttgcacaatgggatgttcaccaaagatcccatgaccaaaagctaaaaagcctgaaattaaccatatgtaaagtagatcttaaacaaaatgggacgaaacagcaaatctgtggactgggtccaagctgtgggctgctgttttgtaatctctgccccaccttccacatcattaatacctgtcacacacagcgatgaacatgcagggctggtgggtgtgactgataggggaagaggtgaggggaaggtgctgactcgccgggacttgaaccctttctagttctatcacttactgctggggtgaccctgggcaaatagctttctctctaagcctcagtcttctctgtttcaaacaggggtgaggacacttttctttgcattgctgttgtcaaaattagatgagatcctagagataatactcccagcacacggcagatgctcaataaattctcctgtccttggaaatgtccatgtcctcccaggagtcacgtgggcccagcaatcatccccttttatgaccagatttcgcaggggcccctcctaggtcatcttagcccacctagaagctgggaaaaagccaactaggcccaggacttgctctttctcctcctagctcccctggggagtccctagcgtggccacccacagagaccaggtgggatacgtcgctgcccacccccagcccacattgctacaggtgagttcatcggaccagctggctgtgggacttaacaggaagacagaacggcaagtaagagcgggggctccggaggcaaacagacctagtgggttgaagtcttttttcgttttggtttttggatatagagtcttgctctgtcacccaggctggagtgcagtggcgtgatctcggctcactgtaacctctacctcccaggttcaagcaattcccatgcctcagcctcccgagtagctgcgattacaggcataagtcaccacacccggctcatttttccgtttttagtagagatggagtttcgccatgatggccaggctggtctccaactcctggcctcaagtgatccgcccacctcggccttccaatgtgctggaattacaggtgtgagccacggcaccttgctgggttcaagtctcaactctgccacttgttagccaaaagacattgaacaattggcttatgctccctgagctttgatttctcatctataagacagggatgcaaggagcacccggttctcagacctgtggagaggataagtgtgatgatgctgccatgtccgggcacaccatagagcccagacgacttacccggatcttccagatcaaatgctgctgagtattactctgcccaggaatccctctgtggatgagtatttacaaggattacatgagacaaagttcccagtgaggtatgtggcacttaatagatgcttgataaattgcagctatttttatgatgatcttgttgctactagtgaaagatcacgctccagaggcatcagagcaggcacaggccatgtccaaatgggatagctggctgggcacagtggttcacatgtgtaatcccagcactttgagaggccaaggtggcagatcatgaggttaggagttggagatcagcctggccaacatggcaaagacccatccctactaaaaatacaaaaattagctgggcatggtggtgggcacctgtagtccccactactyggaggctgaggcaggagaattgctcgaacccgggaggtggaggttgcagtgagccgagattgcgccactgcattccagcctgggcaacacagtgagactccatctcaaaaaaaaaaaaaaaaagaaaaaaagggatagctggattcttgaatccaaaatgccagaaacacaattactacagaaacaaaaagtacctgggccttatcacagtcccacatatgaatcaaaagagayctggggcctccaaatatccagcagacactaaacattgatccccccaagaatgaaaggacaatattccagaaacagactcccccttacaggaggtcactgagtgagtcagaaacaaaacccacaaaaggagatggggtccctgacttcccgcaacaggagagagcctcagtttcttgactgaggcacagagtacagccagctcctcccagattgtcacaagcaggccacccctgccctcatgaagggaatccataatcatagtaggtaggataattaggcagtcgcagaaaggaagcctgggagaaaaaaatcagattatcagctgcaccgactgccaggaaggaaatctttctcctccatcttgggtcgttaaccagctgtgtgtgttcaactcgacactcagcaggagcccatctgggcaatagtatcactgyatgttcttttctaactcaaacaatattatgcaagcttgagtagaggtctctagggtcacgcatggcattaggacgatggatggatttgggttttactacttagacttcgttggctgagcatttttctcccrgaccgagggagggaaatgtctaacactcttccaccttccttgctgaagttatttctatctctgcaatcaacgcacccctgggctgcacccttcgcacccccaatacacacacaccagctgggagggaacaggcgrgaacaataaggaaggctgctcagtacacagggactctgtccagtgcctcccttacttgtcacaagtcaggtggggaagatgagggaatatttggttttaagccactatgctctctgaccatctaaaaatattcctttttcttatttgccagtctcctgggcaaccctgggataagccaaactctctctggctgtcttttctgctcagtctagcgctcatcattcaagtctgtccaaaaacctcctcctccaagaagtccttcttgactctttcactatggatctcatctttccttcaaaaatattttttttcaagattttctaaaaaccgttgtacaagtgtcaagatctctgtgtataacaatgaacaagacacatccctgcccaggaggtgctttctgaaaattgggtcccatgtgactcagcctctggttccatcccatcttatggtgtctccatctggcacaggtggtgtgggtgagcaggagagtcaggaagatccaaggttcaagtattagctctgcttcctccttcctgtgtgactttaagcaagcctctgagcctctctgactctctctccctcgcttggaaaaatgtggataatagtaattaccacttagggttgttgtaaccaatgggttaatgcaggtcaaaggcttaaaatactgcctggtacatgataagtgctcagtaagtattatcctgctatccttgtaacagstgcttgatacattgttaatayttttactagtaaatttcaatttaataataaatgattcccttcaactgtcttgtcaattccttatcagcagtaacagtcctctgtcccctacaatgcctgccagcagaaaacacagccatttggagtttaatatttgttgatggtaaatgagcttttgctccagtttaaagattaatagctgcaagtgttttcctaataataagcagccagtctttgttaacatgcgctggcttagcatgtggtttgttatttacagacatcatgtcacggagccctcaaagtggtcctaggaagtttgttcctggactccaggtccgaggycagagggacacttcctctcttgcactcccacaacctttcctgcctgggcctctcagtcttctggaatttttatgtcccccttccccaaccccttacctggataagaccacaggctctggagtcaggcagacctggttggaatccagctctaagcatgtttcaaagggagctatccaaatgctttctctaaaaaggtagctaaagatgatatgacttaacgcatcagtgaagcctggtacatagtaaatgcaataaatgttaactgtcattattggtgtcattgccctaattggtggtgtcagtagtatttacagaattaaggccaaggactgcgtcttgtttctctgtaagacaaggcattaaagacttttctctataacccacgtctgcatgttgacacggtccccaggtgattcatgtgcatgttcaagtttaagaagcactgacacagaaggccaaagttgcaaactcatatgtctgcagcggctagaagcagctggaataaattaatgaagtgatcactgagggctttgagcagattaagcaatgtgactcctcacagctccttcagattggactaaaggtaggcacctgacttaaagccagaaaatccattggctggcctggagccaatcagattgagtctcttgttcaactctgggagaggaggagagggatgttgttggtcagacccaggtgggcctgagattgagatgagtaggcttgggccctgggcattcccacrgtctggggaaatcaagccagagacaggagcaggcccgcaggtagcagcagaagtgggcaaccatgtagccccctggaaagacagataacaggctctgctgaccttcattcctsagatggagcacctgattcctaggagtgtcccttggtcccattcaaccaaacaatctctccaagcacttcaaaatacccttcaggcgtgagaaggtgggaattaaataaatcccttaaatagaaaattattcagtggttaaaagagataaggataatcctcgcatactggcacacaaagatcttaaaggctttatttacaagtaaaaagttggccccccatagtggctcwstcctgtaatcccagcactttgggaggctgaggtggtcggatcacctgaggtcaggagttcaagaccagcctgaccaacatggcgaaatcctatctctactaaaaatacaaaaattagccaggcatgctggcaggagcctgtagtcccagctactcaggaggctgaggcaggagaattgcttgaacccaggaaatggaaggttgcagtgagccgagatcgcgccactgtactccagcctgggcaacaacaagactctgtctccaaaaaaaaaaaaaaaaaagaaaagaaaaagaagaaaaatactttatttactttataacctcaggggccgacagttgaggtaagcacattcaacaagtattaaatatatgtgttaatatatgcattaaaaatattttttaaattggcttcagtgattgagttactccaacttcttcaaactcctttcttctccacaggaaccattttcaatctctttagtcatcttggccacacctccctgggcccctatccatgtcttagcattttttttttttttttaaacaagtgaccaaagcagggtttggaattccactgaaagcctgcctggtgcagggtatggctttattcatcacgatctttggaacacgcccccagaatcttgctgactccattcagggacagtcaccaatgaccatcacccycaatttcaatttggggggattttgtctgatccatcctcttttatcctgcctccggattgcatgagctttgttgtggctcttttctgggcacttggggatattattaaaattaagtgacatttatcgagtcccttctatgtgcaagaactgtgccacacccttcacgtatataaactcgtttggtccttccagcaacaactctgtggggggtaacattatctgtttcctaggtgaagaaactggggctcagtgagctgtgacatgtcattggtcacacagctggggagggacagagccggggtttgaacccatgttcttcccactccacgtggaaaccactgtttttgttcataaaacactataaattcatctcattctgtttttagaatatcattttcctcagttgttcaaagctctttgaattctatttctgtcttccaggatattaacgctgcctcttaaatatcatctacatgtttaatgaagcagattctcaaatccttcatccaggttgtcagcaagaacattaagcggaagagttcccaggagtttttggagagtcaattactatttggttgagattttcaaaccacttkttcactaacctatcaatcactttgtaatatttattgaccacttcctgggcctctgctaggaggtgtcaggagtagccctcagctacaagaatctcatagtctaattgcacaatgcagtgtggttaggaccacatttgcccacagggccaataaaaatgacagggaaaaatgttcactgtaacattatctataatagtaagctctctaaatatcaaattagtaaactatggtatgcctatttcatggaaggttagacagtcattatgatatttttgcaagcatttgaaacatggagaaaaaaatgttaaggcaacagtattatttatatggtatgtttgcaggcacctcctgtaatactgagcaatggtcgaaagtaaaatcccagtgttaaaatattagattacaaaagtaaaatacataaggtaattaaataccttgacaaactttaagtatataaaacccaacaaaatgtaaaagctgtgtgatagataaaactttggtgagatggtgtttaggtgagctgggctgagacttaatatatcaattcaatgaaatgtggaccaaagatatcctttctgccaatttccctaaagcgagcagaagcattcatcaatgtttcagagaatttccgtttgcattcaaaattagtgtcagctgtctctaaaattatcttgaccaatcaagccacattttgagtagcaagattccctataaggcacataaccttggccttaatattgtaataacaacaacatcaccaattagaatgataacaaggtcttctctgatcgcgcttttaaaattgcaatcccccaaatgcttccccgttatccctgcactgtgtttccccaaagcacttaccacctctgtcacatcaccatttttcattgtctcttgagatgcctgttgctgtgagacacaccattattttatgtaccactaacagtgaaaacaaaaatgccatttaaatgacatgaagccttaacaatagtagcattgtcctgaatccaaatgaatcagttccatcagcctctcaatgttttaaaagttttttcatctttccaagggatttgatcatttcccttgtctttactcatgctgatgggctaatggtaagcgagcgttctgcactatttatctcaataatcaaatgcaacgcagttgcatcttccttgagtaccttccttgcttatgtcttacaaagtacataggtgttggtttacaagaaaaaaatggaattatgattggcactccaatgataaacattggcttcactaacatcagacaaatgccctgctgtctgttcccctgcccttctgcatacatagtaccattgctgagtcagatgggtatagcgttaagatatcttaaatggaaattaaaattcccacacataataattctaacagtgcattcagcccaacaaaagcaacagccatctgaatgaccttaatgatgatttcacaggaacatgcgatgacaaccataacttgactactgcccccaccatgagcaggcatgagacagcagcagttccatcgactgcaaaattatcccagtttcaaagatattacaatgggggatggggctgcatttcagaatttatgaaatccgccatttatgttatttgttttcattccctgccccagcttagaayggaagctctatgaggcaacggattttcatgtcttctattctctgctatattttcaaaccctagaacagcaaccgggacagagcagtcaatatctgctgaatgaatggctcaattttgccctcgatctggcccactgtcagaactgtgtctgttcagattgtattctatggacagtcctacattcaagctttgctccctacygtgcaaatcttgtttataataatttggcacatagatacctcatgcatcagatgtcgtgtaagattatgccaacataaaacttttacatacaaataaaatttgaagtttattttacaaggtttgcattttgacctcgaacacaatcattgaccaacatttgttgaatgcggttgttatattcaggatgcaatactacattctcagggtgtaaatggcacaagcaagtgagagagtcaaagcrtgtttgtaaaaatacrtggactggcacaactcccgttctgtgctgacccaagccagcactggccacacctgttgtccttgctgttctccctagcctcataccctcaaaagaggaccttgaaatcccccctccaaacagccactgcccctgtgccaattgcaggggaaggatgtggagggtgaaggccaatgctgagcagacccagctatcatttctagaaccatcctctgcttttcaaaatgtcaagtctgttctactggaatagagtcacagccttttccattccccacccgacatttctcctaaacccaatttgcattttataattacaaaaacaatgcaatcttgrgagtctataattatttcaaaattaaaaagtgacacatgctcattgaattaaaattataaaaattaaacaagcaaatatgaagtgaaagtttcccatccatctctcagaggcaaaccctgtttcatttgttaaatgtccttccagacttctttctatgtgtacccaatttgtgtaagttctcctgttgtgaaagtggaaccattctatacgcactattctggaataaactctcaccatttattgaaggcatcacatccatattcatatccatgtctatagtacagatatatctgtactatatcygtatctatactatagctatstatatctacagccatagctacagctacctcatgtttttcctttatacatccttcattgggaagctctgtaaaacttgtatttctgttgtatgcctgtaccccaagtttattcaagcaagtcttctgtatggatcatttccacaggaggcgataaatcacatatactcatataaattttgccttttgtatttctgtaaaatacatttctagaagtaatttctaacgtgcatttttcaattgatgatactgatcaatcaccctccaaaaaaactgcactgtgaggtccctttttttttttttttttttttgagatggaktctggctgtcacccaggctggagtgtagtggcatgatcttggctcattgcaacctccgcctcccaggctcaagcaattctcctggctcagcctcccgagttactgggattataggcacatgccaccacgcccagctaatttttgtattttcagtagatacggggtttcaccatgtttgccaagctggtctcaaactcctgatctcaagtgatctgctaaaatgcctcctaaagtgctgggattccaggcgtgagccactgtgcccagcctagatccccattcttttcatgtgcattgaaataccaatggagtaccttctgtgtgccagattctcttcctggtgctggggaaaacagctgcgaacaaaaggaagtccctgccctggtggagcttgtcgtctagagaagggaactggacagtgaacaaatacagaagctacaggtcacatgatgatagaagctatggaaaaaaagcagagtaagggatgggragtagctgggagagtgggggccattcagatgaaagagccaggatacctccttgagaagtgaaggaactggggctggagagatgcaggtatctgggggaagaacattccagacaaatggaaagcatgcccaccaaacaagccaaggctctctaccaaaactctcaccaacgtggccatagtcgtgacttctctatcttcagaagttggaggtaaaatagatacatatgatttgaagtaaaacatttttttcctcatttcgtgatcatttataatctgtttttgggaattgcctgtttggtgacctttgccatttttctctagcggtgtctgattttccctcacagatttctaagagtgctttctacttgaaggatattaagactttgtcaattagggtgcaaatatttcccagatctgcgatttttcttctgacttgatcctcatgcctttttccatagggaaattgaagttttatgtaaacaaatttgacaatcttggattatttgggattttgtggytttttaaatggcctttcccagcccagaattatatgaatgctttccaaaaatttgagtccttttgtattttaatacaaaaggattaaactcaccacaggtagttctaatgtgtgttaatatgtttaagactggaattttttgtgggggttggtagaagtatatggtatgaggtgggaaatttcactttttttcaggggatatgccaattattctaactttgcttctcaaacaataactgggtggtttgaactctgaggctgggttatctcagctagaaaatagctccacccttcaccagctttgggacctcaaagatgtcccttcacctctgtatcccagaactctcatctgtaaaatgggttaataccagtatctgctccttaggttgtacctacctacaatggacctacaataacgtgggactccagtgaggctcaaagtgagcacaaggtgagtcttgcaacttgcatcagtgcaggacacacgtcctattgaagtcagagcttgcttcagactcagaaagcaatgccattctaagaaacatgaacaatcaaagctgtgttaatcgcctgtattagccaaccatttatgctgaaaatgatcctatagaagggaagggaaagacagggcactccagggttccttttcctctcagtccttccttaatcatcagcaagccgaagatggggagttggtaacatgtgagcacagcaagaagtgaaataaaggcagttgttagttttggacaagtgttaactcttctgctaggaatgaaatatatatccatgtacagactacacaataggaagtgtgtgttttcaatgattccatatatgagttaactccttctatatttgcgttcttaacgggcgtataatataaagatgaacagtaaaattcatgctaaacattktttctttacttggaaggacactaaataacaaaaaactctatgatgagagacaaaaagagagactatgaaagaaaaagaaacaatgttttcgtacctttagtgatacctttttttgctttttgatcaagagtcttayattttcatttcacactggcccctactaattatgtagccagctccatcctggcacatagcaggcactccataaatgtctgaataaatcaatgaatgcccctgcagtaaatactgataaagccyaggggaatgggggaagtagctggcacaagtaaggtgaatgtgtgcatctctgccagctctcagacagcagcacaaccattaacccagctccatgctctgttatcagcagaagtccacgtggggcaggaacttctctaacaagagcattttctatttatttatttatttatttatttatttatttatttatttatttattttgagacagagtctcactctgtttcccaggctggagtggagtggcgcaatctcagcttactgtaatctccgcctcccagcttcaagcaattcttctgcctcagcctcctgagtagctgggactacaggcacgtgccaccataccaggctaatttttgtacttttagtagagacggaatttcaccatgttggtcaggctggtctcgaactcctgacttcaggtgatccacccacctcccgaagtgctgggattacagrcgtgaaccactgtccctggctcaaagccttttctatccattgccattctccttgcaaatccccacaggccaacaggagctacttacagagctcgggggcttagacgtgaagaacaccttcctggtaagatgctccccaagatttgtccccatctctgaactccctgtgcctcgtggctgttcactgtagccttcaattcccaggcccgccactctgcagactgcttcctatctgctcctctgagtcaaggactgctcttgtgcgttttctaaaagggctaaaagccacatgatggcctgggcatggtggctcacacctgtaatcccagcactttgggaggccgaggtggatggatggcttgagtccaggagtttaagaccagcttgcgcaacacgatgaaagctcaactgtacaaaattatatatattttgtatatatgtgtgtatgtgtgtgtatatatatacacacacacatatacacacacatatacatatgtatatacacacatatatgtacacacacatttatacttatatatatgcacatacatatatgtacatatatgtgtgtgtatatatatacacacatacatatacgtatatgcgcgcgcrcacacacacacacacacacacacactcaaaaattagccaggcgtggtggtgcaggcctgtagtcctagctacttgaaaagctgagtggggaggatcacctgagtccagggaggcagaggctgcagtgagcagtgaytgtgctgttgcactccagccagagtgacagagcaagactctgtctcaattwaaaaaaaaaaaaaaaaaaaagtgaaagccacatgatgatctgcccaattcattgagcaacctggagacgccatggacttcatgctttcaacctcctgtatctttaaccagatcccattatcagccagccgtctagctgggaagtgctccagccagctatttgtggcktatctttgctgaaaagactaaagaaaagaaaatagactccttcagactcttcacttagtggtttccccttccagacacagaggagcagtctttcctcccacttccctctgttcctccacccagcatcgtggaacaatgtgcttttgtgttctttctgtcctttgcaggttgtagctttggcctttctaatttaccctcccagaggagtgctatttagttaggagcatttctaacaaaagccaggtttctgtccacttcccctggcattctggtttgcccttgaactcagcatcaagttctggggttagcccgtgtggcatcttgctcgcctcctactgatcttcttgcaccaccatagtgaggaccacatgtgcacaggcacgcgcagagagatcctatcagtcgcagcaaccatgggctgagcctactgagtgcctggctgtctacacgcatcatctcattgttttctcagaacaacccctatgaggggaaagattataatccccatttcacagaagaacgaaccaaagctcagagccattaggaaactgctcgtgagtgatgggtgggaaacaaayccaggaccctgactctcaagtccatgccactccactccccatgctgttccatccacacctgggcacatgcacgcctgagcatccccagtggccaagcacgaggtctcccttaacagtagctcctcctggccccgaaatcattctgcattcttcccagtatccttgcattctcctttacytagtgacactcactaggtgcagatttaagaattcgtcttccttgtgttagattttcccttccatcccataaatctgtttgaatccaaccctctccagcactttcccagaccaggaagtgcctcmgagcacacggggaaccccatcacaccccaatacggatccctggagccccagatccactgagtggggacctcaaggtgagcccaggaatctgcattttaactcacatcaaggactctgccccagcaggtgcacatacactggcgtttgggaaccactgagtcstttacctcattggtgctacgcaggaatcacctggagttcttactgaaatggagattctggttcagcagggctggggctgggcctgggcctgaaattctgttgatgcagcagattccggggccacacattgagtagtgagggtttaggttagtggttctcagccctgactaaatattggcatcacctggggagcacttcgatctaagctgccggggccctgcccccaggaatcatacaattgttttagaatcaaaccagtgtccccttgctcaatgtgctgaatctgacttgtgctggcttgggaaagcctaatgttacatttttaggaattgtgtgaaccagttgataaacagaaccactattaaccatcaaattatataaacagaattaaataaggtatatttaaaagaaagatagtacataattacaacccagcacttcctaatcattttactacatttcactccttctatgctcctaaggttatttgtgtctatttgattatttgcgtacctgtgtgctggaagggctacttcgtctttcttcccaactctgcgcccagtcagtgacatcagccttggtgggagcgtttctgcctcggaaaactgcagacgctacggatcagggtttacttccccagaaagctggttgttagacatttaccagtgcacctgcagccctcatcacccacaaacaccacaatcaccggcggtgcttgataaaagtgcagacagctggcatctacctaagactcccgaatccaactctctgggcatgggaaatggggatctgggaagtttttagaataagtgacccaggtgatttcttatctacagtgaagttattttagaataatgatcaaatcttcctaattagcaaaactcaagttggattaagatactcactgggcacccatttgtttttgctctaagaaatcatttccaaggccttttgaaagcctttttatctgaaatccttattccatcaaaattctgggcagagcactttttctccccsagacatgagcaggatgttgtatcaggaatctcagtggaggccttgtcacctggttgtccttccatctgacctcacacccaaaagcattggcctctcagttttccctaataaagatggtgtgttggccagaattttccatgctccaatgtctcatcaggcttgtgtccaagctcagacccttttgaaatggttagaaagaaccaagtcaagaaactaggctattaaataaaagttctgccagccaggtgtggtggtggatgtctgtaattgcagatcytcaggagactgaagcaggaggattgcttgagcccggggtttaaggctgtgctgtgatggtccctgtgaatagccactgagctctggcctgtgcaatatagcgagatcccatctttaaaagataaagaagttctgccaagttgtatactrtaaatcttaattgaaatttgtcaaggtttgcccatccctgggatmgtgaaactggggaaaagtggtgggaatgatcctataacccttgtgttctaaccaacagttactaagcccaatatttccctcactttaggtaagaatttacatttatttcctcacttgttcctccagcaaactgacaaatgggtattaccatgttacaaatgaggaaatggtttaagaaatttgccaggtgagtgacattcctcaagtcttaacctttaactatatatatatcagttttctatttctacataacaaattaccacaaactcaacaacttagaacaacacatatttaatatcttatagtttccacaggtcttgggtccaggaaaaaagggttaattggatcctctgctctggggcttcccaggctgaaatcaaggtgttagctgaagttgcaattccyatctgagtttctgctaaagccaagtaccacttagattattatttacttaaatttttcattaataaactcactttttataaaactcagtcttgccctaagcaataatatccattaaattgccaagtttgatcgtcaaattttcctttttttaatatgctcaaataaacatatcactatttaaaaagttttaagtgttgtctctaaaatygtgtgcactgattgtacccacaccacactttacaattatttcccataccacacctggacttcatgaccctacatcctacactaacagcctcaggtaccttacaaatgatttctgttgccaagcagctacagagaatctataaggtccaggacccaggtaagtggggagcctgcagacaggtgcatgctttttcataaagagacctccatacatttgatacacacattatcagcatcggaaattaattttcgcaacgtgtcctcaagtgtatgcagacgttttgagaaacttagaaggtatcttccaatatgccatgtcatttaatcttcacaaattgtgaggtagtcaccatcatccccacctcataggtaaggaaattgaaacttgagaaagttataggacagactgaagtgcaaacttataggtcctctgattccattcggcaatgttttccacagcatcatcactctttccaaacaacctgctagttctccaccagcgaccatttttctttctttcttagtgacagagctcacattcctagyagctatgcgttgtggctgagcacatggccactaggaataaagactgcatttctcagctttctttgtagctaggagtggtcatgtgactcaatgctggccaatagggatgtgagtggaagagatgcctgcaacttctgggaagagtccttcaagtgagtgatctgtctttgtcctttctccttcctgatggctggaatgcagccatgatggcaggagctgtaacagccctcttggacaatgaggtgaccttgggaaatggaagatatgcacagggaagcaacaggccacctggagactttgtggagcagaactgccctgccagccctacactgcctccctctggactgttacaagagagtgagataaacttctaccttatttcagctactgttatctgggtctctgttattcacagccagaccttttcataacaaatataaagtcgtaatgaggaaggaaaatgccaaagtttcaatgtccccattttacggaacaagtcccttttttctttgaaacagaacacctgccccacagtgggactgtgggagaagagaggtgacttgagtcaggaccccccgatggcactcrgtaaacatttacccactcaggtagagcctggacccaaggcttcagcacctgccacctacaagcaatctggggccacaaagcagtttgttctgacagctcctcttaatgatgtgtttcctgcaagccagctcctcaccaggaactcagaaacacaaaatcaaagcagcccaaccaggcacyggcaaatatctatcaaagccagtgaggctggcagaattctgatacctccttccctgagcttgcctgagaatttgggaaatagtacatgacaataataaagagcaattgaaacttcattaggggatggagggaaaatgagcccaagccaaataatgccccccagagatggcagggagacagggagtcatttttggcaggaacatgttggacaggcatggaagttgatgttggatagaggaaggaaagaatggacgtttcttgaaggaccttcaacgttgactcaactttattgggtctgtagagctggtccagcccctggagttctactgtggcattttctcacttctcaagttgttatttcgcacatcaacaacaactggatgtggaatccttcccaatagcagccacctctagtcccagatccccactgaattcctcccaggcagctttccatgatgctgccaatatgtgatttctatattattgattctcactgccattttccattagctccaacaagggagatgagactggtgacctggtagaaagaaaagcaatctaytggatatcagtattcagaactggggaaatacckatgctgtttgacttaggatggggttacatcgtgataaacccactgtaagttgaaaatactgtaagtctaaaatgcatttaacacacctaagcaactgaacatcatagcttagcctagcctatcttaaatgtgctcagaacacttacattaacctacagttgggcaaagtcatctaacacaaagcctattttataacaacatcttgaatatctcatgcaatttatcaaatactgtactgaaagtgaaaaacggaatcgttgtatgggtatggtttcttctgaatgtaaattgcttttgaaacatcataaagtcataagtcaagtggtcataaatcaggggccatctgtaatggtaaccattacattactatttatttattgctcacaatgtgtcagtcattgtgttgggtaattgatatctttattggctaatgtttatgaagtatttactatatgccagacccttgttaaacacacattttgcatgtattaactcatttaatcctctcaatagccctaaaaggtaggtactattcttatccctatgttactgatgaggaaactggggcatagcagtgggggaatttctcaatcacaaagctaggaggtggataaagtcaagactgacccatacaaagcacttcctgccacctgaggggcgtaaaacatgaacaagtacagaactgttcattcagtgaaaaattagcttggggctgagcgagtaagacatagaaacatttgcacacccatgactacatcctcttacccagccttatctttctcagaacttaccactataatatgaattgttcatggtcatgatcctaccttcacatatcaactccatgaaggcaatatttttttkcctgttttcttttcttttctttttattttttatttttttgacagagtcttgctctgacacctaggctggaatgcagtggcgcagtctcggctaactgcaacctccacctcccaggctcaagtgagtctcrtgcctcagcctcccaagcagctgggattacaggcrtgcaccaccatgcccagctaatttttgtatttttagtagaggtggggtttcatcatgttggccagactggtctcgaactcctggcctcaagcaatcagcccaccttggcctcccaaagtgctgggattataggtgtgagccactttgcccggcctttttttcctgttttcttcagtgctatttcctcagctcctaggacagtgctaagcacataactgagcacattgagatgcccagttaatgttggaggaaggagaaagaaagagggttggaggaaggggagaaaatgtcaaagaatgtttaagagcatgaagaaaaagaagctctgaggacagacagcattatggggaaaggggataggcaagtaggtcacagaataagccactgggcccacacttgagt

SEQ ID NO: 5781 - DNA, 201 bp, Homo sapiens
cttgaaggagtaattggccccagattacactgcctataaggattcaaatccaggtttgtttggctccaaaaactggctcctaattttcagaaggagaagcracccagggcaatgcccaattttgcttcttaggcaatggaggaatccacaatcggaaggagttttcagcagtgccccatttggggtgggttgaatttgagg

SEQ ID NO: 5782 - DNA, 201 bp, Homo sapiens
tccccgcaaaagtcaccatcagttgggctcaactccaatcagtcatggtaggtcagggtccatctcattgtctccatcactcatgcccacccagggtaagwctaatcatgttcaccaatcagaacctctgccacatcagctctgtgggtttcctctcatgccatctgtaccaacaatgagcacagtctgggtttcctgatg

SEQ ID NO: 5783 - DNA, 201 bp, Homo sapiens
cggggcatggtggtgcacgcctatagtcccatctactcaggaggctgaggcaggagaatcacttgaacccaggaggtggaggttgcagtgagctgagatcrtggccactgcactatagcctggagacacagcgagactccgtctccaaaaaaaaaaaaaaagaaggcagaaggtgaatagttcaagggtgggtttaggact

SEQ ID NO: 5784 - DNA, 201 bp, Homo sapiens
aacataattactgctttttctgtgggcatcatattggtccagatcatgtttaaccagaattgaagatgtaaaatcctagaactcactaatctattttagtrggtcacaggaagcatgcaaaccataaaaaccgcaatgaaccaaaagcatctgtgttgacaagaggcaagaatttctctattttctaaaggcactaactga

SEQ ID NO: 5785 - DNA, 201 bp, Homo sapiens
tttgacttgacggttgtgtggttatttgccacactcccccagatccactctgagtcccaggatgctgattttaggggctacattgcctagactgtccattrttccctcttcccatctggttcagtcactgggaagcactggtaggaggtcagagtgggagaaggaggttaggatactttctgcccctgctgtcctactgct

SEQ ID NO: 5786 - DNA, 201 bp, Homo sapiens
aactatatttttctgattttttttttcaaatctttaccattagttgccctgtatctccgccttcactttctgcaggaaactttatttcctacttctgcatrccaagtttctacctctagatctgtttggttcagttgctgagaagcctgacataccaggactgcctgagacaagccacaagctggtgagttgtaggcattt

SEQ ID NO: 5787 - DNA, 201 bp, Homo sapiens
aaaggcaaatcaggaactggcacacatgctttcagggagatggctgcaagggagagggcaaagactgggaagttgcttatgtggtgccagactatttggargatcatggattgcggtgtttgtgttgtgtggtcatcattttgttctttgtttacagaacagagaaagtggattgaacaaggacgcatttccccagtacat

SEQ ID NO: 5788 - DNA, 201 bp, Homo sapiens; identical to SEQ ID NO: 574

SEQ ID NO: 5789 - DNA, 201 bp, Homo sapiens
cctcactcttctcttttccccacagcctttttcacatagctcttggctgtaggattgccccactccaaaaaccagtgtgtggaggtccaggagtgagaccrggaaagaatgtgaaagtgactacacaaggactcctcgatggtcgtggaaaaggaaagtcaattggcagagcccctgaagccagtcttcaggacaaagaag

SEQ ID NO: 5790 - DNA, 201 bp, Homo sapiens
tttacagaacagagaaagtggattgaacaaggacgcatttccccagtacatccacaacatgctgtccacatctcgttctcggtttatcagaaataccaacragagcggtgaagaagtcaccaccttttttgattatgattacggtgctccctgtcataaatttgacgtgaagcaaattggggcccaactcctgcctccgct

SEQ ID NO: 5791 - DNA, 201 bp, Homo sapiens; identical to SEQ ID NO: 569

SEQ ID NO: 5792 - DNA, 201 bp, Homo sapiens; identical to SEQ ID NO: 570

SEQ ID NO: 5793 - DNA, 201 bp, Homo sapiens
tctttaccattagttgccctgtatctccgccttcactttctgcaggaaactttatttcctacttctgcatgccaagtttctacctctagatctgtttggtycagttgctgagaagcctgacataccaggactgcctgagacaagccacaagctggtgagttgtaggcattttttccattactttctgattcataggctcaa

SEQ ID NO: 5794 - DNA, 201 bp, Homo sapiens
cattgtttcaatggggccttagggttgactggattctggagggccctgcctagaggagggggtgcattctgtccctatgtcccctcctgctccatcctccrcagcacgtgcctagtggtctaccttgtggggaattcttgtacctccctcttctaggcatggactagcattgagaagtgggagaggagtgttaggaaaaag

SEQ ID NO: 5795 - DNA, 201 bp, Homo sapiens; identical to SEQ ID NO: 590

SEQ ID NO: 5796 - DNA, 201 bp, Homo sapiens
tttccattactttctgattcataggctcaacgcacctcaaagctggaaatgccgggtctgggtacaccctggggaactgcaaagcctgcacacttgggggraatgatcaagatgagaggcaggggtggggatggcatgtgcaccaggagatgttagagaaaccctgaggaagagcagcgtgcagcaggtgatgggggagag

SEQ ID NO: 5797 - DNA, 201 bp, Homo sapiens; identical to SEQ ID NO: 592

SEQ ID NO: 5798 - DNA, 201 bp, Homo sapiens
aggagatgttagagaaaccctgaggaagagcagcgtgcagcaggtgatgggggagagtgggcagcaagcgaggccaggacagccactctgctcagtcaccwgtccacacacccaggggctcactctgcccctctgagcacccaaggacgttaaagagctggaactgttagtctaaatataggaccatccaagctctgaacc

SEQ ID NO: 5799 - DNA, 201 bp, Homo sapiens; identical to SEQ ID NO: 584

SEQ ID NO: 5800 - DNA, 201 bp, Homo sapiens
aagcatgaaggaaatggtgagtttagggaaaatgaagagaagatggctgtgactgaagcacaggatttgggattggagaagggactggaggtgaggctgaraagaggcaaactcagaaaagatgttgtgctgggcagtctggacattatctttgaagcccaccacatataagtcatagggctactggaggttttaagctaa

SEQ ID NO: 5801 - DNA, 201 bp, Homo sapiens; identical to SEQ ID NO: 572

SEQ ID NO: 5802 - DNA, 201 bp, Homo sapiens
aagaggcaaactcagaaaagatgttgtgctgggcagtctggacattatctttgaagcccaccacatataagtcatagggctactggaggttttaagctaaragtgactattcaatttcaacttaagagaagataggttgagagggaacatggcttgagatgagccatgagcaaaggaaagactacaacaaagccaggagtg

SEQ ID NO: 5803 - DNA, 201 bp, Homo sapiens
tagggcttatagttcttattataaagagttttatgtactcattcagtgaacatttattggtgcctcctttagccaggtactatcataagagctgaaaataraagcataatccagtccttgatcttgaggaacatgctgtgtgtagcagataacataataagtgcttatctagatgcatgcagtgttatgtgataagagtaa

SEQ ID NO: 5804 - DNA, 201 bp, Homo sapiens
gaggcaggagaatcacttgaacccaggaggtggaggttgcagtgagctgagatcatggccactgcactatagcctggagacacagcgagactccgtctccaaaaaaaaaaaaaaagaaggcagaaggtgaatagttcaagggtgggtttaggactcagtgataataggattctgcctggcttctcatggttctctaggtct

SEQ ID NO: 5805 - DNA, 201 bp, Homo sapiens; identical to SEQ ID NO: 575

SEQ ID NO: 5806 - DNA, 201 bp, Homo sapiens
tcacaatctggatgtttggtatcatgagacaatctccctgccctggcttggggggccacccatgggttaaggcataagtaacaattcctgacaagagtggrgtcattaatgtctggagcaggaagctgaggggagttgtgtttttctcttgcctcaacattgtaggaggagagagaatcctttctaggcatcagggtcatc

SEQ ID NO: 5807 - DNA, 201 bp, Homo sapiens
cattctgggcttgttgcagaatgtgcctgcccgaagggaaacccaggagtcccccaagccctccctgtcttgattgcccagcccctgccaggggatagccmtggcaagcaatgcccccactgccaatgctactcactcctcaagtggacataaaatgtactccaaaagccacagatccctgcccagcaggctgtgctagct

SEQ ID NO: 5808 - DNA, 201 bp, Homo sapiens
gcctacctacccaggaaattgcggcagcccccagccgtggagccgcgaacccagcttccctgatggaccgtcacctcccatttgtggatcgcgtcttcctycagggcatcgggagtgaggttgcagatctccactttatcaaagtgggccttgaagtcctgaaatgccatcctgcagcaaagcggagagacacgatgcaca

SEQ ID NO: 5809 - DNA, 201 bp, Homo sapiens
catggctgtgttgcaataaaacttgtttacacaaacagatggtggtccagcccagatttggcccatgggctgtagtttgccaatccttggaacagataaaygttcatgctattatttgtttagtaagagtattctttagttgccaggttgaccatgaactaccataaatagagagctcctggaatgtacattggaaaagtt

SEQ ID NO: 5810 - DNA, 201 bp, Homo sapiens
acattggaaaagtttttctttttgtccagtttttcaggatcacagctgttatacaaagctctgtgtaccaacaatgcatatatcaccaggctcatatacarttttcttagaggagctcaataccctgtggacttaaattaagaaccataaaactgcttgagagtggacaaagagaagataaccatttttcctatcttactg

SEQ ID NO: 5811 - DNA, 201 bp, Homo sapiens
tatcccaatagcacctgcctgactaatacatcatgctctgctgactccatatgtggctggtttcctggatccgattctgactgatggtatctgttctcacrctgctaataaagacataccagagactgggtaatttataaagaaaaagaggtttaatggacttatgtgttccacgtggctggggaggcctcacaatcatgg

SEQ ID NO: 5812 - DNA, 201 bp, Homo sapiens
ccaaaccatatcagatggcttatttggtttctatgtagaacctctgcttttcattcaacagtcttcatttagccacagataagctctgtccctaacttccrctgatggaatgtacacataagaaacttccactgatggaatgaacacagaaggtgcctactgggaagaaaactggcctgaatctgagctgggtcaaatgtc

SEQ ID NO: 5813 - DNA, 201 bp, Homo sapiens
tgcagtcagtttgaatggctgctccttatgggaataatttacattctcaataaaattctctagcaattttctgattgattttaatgagctttaaagccttmcgtagaagatcccccagctgatagtcagccttgggcatggattaagggcttttaaccaatcttgcaacaagtttaagcagatattctttattgggtccaa

SEQ ID NO: 5814 - DNA, 201 bp, Homo sapiens
ggtcctgaaattttattttcttttacaccactttccagcatgttacctgatcagttgtttattatctttgctgttgaatggagtgatcattccaagggccygaggcaggaggcccaggcacagtggaaactctcccaaagaccaggatctttgttttgttccctgacatatgctgagcaccaggaatagtgaatgaatgaa

SEQ ID NO: 5815 - DNA, 201 bp, Homo sapiens
caagggcccgaggcaggaggcccaggcacagtggaaactctcccaaagaccaggatctttgttttgttccctgacatatgctgagcaccaggaatagtgartgaatgaaacaaattgtgaggctttaaagagccgaaatatttaaacactgggcacaaggttgttgcttaatcagtgctagatccttacctcccccttgtg

SEQ ID NO: 5816 - DNA, 201 bp, Homo sapiens
aacaaattgtgaggctttaaagagccgaaatatttaaacactgggcacaaggttgttgcttaatcagtgctagatccttacctcccccttgtgtccaggtsgacttgttactgcagttaaaccacttgctgatcctcaaacaactagttagtggcacagccaggcctaggaccccagtctctactgttccaactaacccat

SEQ ID NO: 5817 - DNA, 201 bp, Homo sapiens
gggtttagacaaatctgcagacaggaggaagaatgagatgaatggcacttaagtgttattcctctccagatcatgattctcccagtttgaattaagactcktctctgagttttggaggagagatgcttggaaaggatgattgaagagattcattcacccattagactccctactattgattaaggatgtaatgaagtgata

SEQ ID NO: 5818 - DNA, 201 bp, Homo sapiens
tctctctcagatgtaactgagctgtgggctaggaggaaaaggccgggaggaggcacggtgatgactgaaaaacctctcccctctcataagaccagtcatcyggacgcgggctttcccccactcggtgcccacctggggtcttacaggaggagctgctcctcctcagcaataggacaagatggtcaggtcttcctgcttccg

SEQ ID NO: 5819 - DNA, 201 bp, Homo sapiens
atcagggaaacctcagggaaggtgaggactatggtgaggtcagaggggttgatatgagaacagtgccctgcaaatggcaggcaccacaggagcatgagccrtcatcttcacctttagcattcagcccgggagaagtagggagacatagaaggggcaggtgctggccaagaggcaggggcaggagaggagaaggcggagggg

SEQ ID NO: 5820 - DNA, 201 bp, Homo sapiens
aactcagaaactctccaagtaaacacaaattagccatcgggtataaattggggaggtgtctggatgtgtgaccgactcctctgtgggtcagtgtttctggkaattggtgtgcacacgtgccagtcacagggggttctgcggacgcatgtgtggaaggggcagctaggcggtgggcctgggttagatgcctgggagtggtgt

SEQ ID NO: 5821 - DNA, 201 bp, Homo sapiens
tgtggtcccccgcaatccagcacgtcaagggctcctgatggatcaagataatctgatcgagcaaagtgagagtcggtggcgtccctggcaagatcagggtkagtggggtggtggggcacactcatagctgagtggagtcgagagagtaagggagaagaggaactggcgggcttgctgtagaggacaggagagagctgggtt

SEQ ID NO: 5822 - DNA, 201 bp, Homo sapiens; identical to SEQ ID NO: 593

SEQ ID NO: 5823 - DNA, 201 bp, Homo sapiens
ctcccacgctctctggacttcacagaactggatgttgctgctgagaagattgacaggttcatgcaggctgtgacaggatggaagactggctgctccctgaygggagccagtgtggacagcaccctggctttcaacacctacgtccacttccaaggtaaggcaaacctctctgctggctctggccctaggacttagtatcca

SEQ ID NO: 5824 - DNA, 201 bp, Homo sapiens
tcctcccacctctgccttccaaagtgttgggattaaaggtgtgagccactgcacccagccacagattgcttaaagcattcatttaacaaatacttgttgargatttgctacttgtaagactttaagcctggcatctcagaggaggccagaggagggctgtataggccctgcctccaggcttttaaaggtcaatgggcaaat

SEQ ID NO: 5825 - DNA, 201 bp, Homo sapiens
atagggacagaatttcagttttgcaagatgaaaaagtgctggagatagatcgtggtgatagctgcacaacaacatggatgtacttaatgctactcaactgmacacttaaaaatggtaaaatttatgtcatatacattttatcatatacgattatttatcgatatgtcatatacgactttttaaaaataaaaaagaagcatc

SEQ ID NO: 5826 - DNA, 201 bp, Homo sapiens
agggaaacgtgctccacaaggtaactcagggaagcctcggggctctcagaggacagaggtcactggggagcggagagcaggccttgcctggcagtgagggmaacagggctggtgaagctaggagcaagcatgatgagcccagcctgcagagtttggggcaaggaacgaggatggggcggttggcttggcatgagtgttgaa

SEQ ID NO: 5827 - DNA, 201 bp, Homo sapiens
caagatgttaacctcgtgagggacagagagccaggcgggaggtgaaagacaagactgtggagaaagaggttcagtggcgcatagtgatttttcttaccacracaacctccttgaggtctttcccttcgggttcagggggaggtgatagatggggggattgctcagccctggcactgactggtcacaggggcagaggccagc

SEQ ID NO: 5828 - DNA, 201 bp, Homo sapiens
ggaggtgaaagacaagactgtggagaaagaggttcagtggcgcatagtgatttttcttaccacgacaacctccttgaggtctttcccttcgggttcagggrgaggtgatagatggggggattgctcagccctggcactgactggtcacaggggcagaggccagcccgagggttgcccggttgagggtggcagcacactgtg

SEQ ID NO: 5829 - DNA, 201 bp, Homo sapiens
gcacagctgtgtttgacaagaaggtggtgctgaggaggagggccgtccagccccacggtcccacgggctgctgagacgtgcaccgtgtaatgctgagtccyactgcaaatgatgcccaagccacagaggtctgcagggaacctggcaatgcttgtgatttccctatggcccgctaccccccggctccctgcgactctatgc

SEQ ID NO: 5830 - DNA, 201 bp, Homo sapiens
ggtctttcccttcgggttcagggggaggtgatagatggggggattgctcagccctggcactgactggtcacaggggcagaggccagcccgagggttgcccsgttgagggtggcagcacactgtgcagggcagagcagggacacatggacttagcctgctgtccctaggagaagtgctgggaggagcgctcactgagaagga

SEQ ID NO: 5831 - DNA, 201 bp, Homo sapiens
gcagaggccagcccgagggttgcccggttgagggtggcagcacactgtgcagggcagagcagggacacatggacttagcctgctgtccctaggagaagtgytgggaggagcgctcactgagaaggagggtcctgcagaaggcaaaggcaagaaagccagtggcatctgaaatgggtctcccttcgaaagagagcacatcca

SEQ ID NO: 5832 - DNA, 201 bp, Homo sapiens
cctgccccacttcctaactttgctggcctcagtttccgtcaaaggaggcagccacttcctgcccacatggtctgtccagtgaggagatcgggggctgtctmgggacctctaggtttccctttagcaatgatgttctatttacatgacctcagcaggcagctagatgtgtcccactagagaggacctgaggatctggggcct

SEQ ID NO: 5833 - DNA, 201 bp, Homo sapiens
tgaagcagcccagcagggagcctctcttcaaagccttctctagaatctcatagaagttctcgggggcctctttagtttggaaggtctctgccacacccccrgtgaagtcttccatggcctcgatggcgctgcctcccttcagagcttcatagctcccatttagcctgcaagggtggcaagagagagaggagagagtcaggg

SEQ ID NO: 5834 - DNA, 201 bp, Homo sapiens
aggaaaaaactcagaaactctccaagtaaacacaaattagccatcgggtataaattggggaggtgtctggatgtgtgaccgactcctctgtgggtcagtgyttctgggaattggtgtgcacacgtgccagtcacagggggttctgcggacgcatgtgtggaaggggcagctaggcggtgggcctgggttagatgcctggga

SEQ ID NO: 5835 - DNA, 201 bp, Homo sapiens
cgtaccaactgtgcctgcagctgccaccgcctcccagctcctatcttgcaattggttgttttgttcaggagaggtctgtttttgtttttgttttaaaccaratcgcacccaatgaggagaaaaatacaaaaggaaaaaactcagaaactctccaagtaaacacaaattagccatcgggtataaattggggaggtgtctgga

SEQ ID NO: 5836 - DNA, 201 bp, Homo sapiens
aagctttccacggtagactgggatgatgcacctcagttgcactgagcgtagccggcccctccccagcacccctgtttccacttcctgcgggggctgctgarcctcggcctcatctatgctccttcccctgctcgccccactcacccctggtcgtttccacacaaaggggatctgcggcctctcactgtagaacagggagga

SEQ ID NO: 5837 - DNA, 201 bp, Homo sapiens
ctgagcatggggcgctggccctggtggtttccatgacaccaggtcctgacttgacctcgacagatttacctagcctccggatgagaatggtgagctgtgcrtgtcagacgagcagagggaagacggcagccactctcatgtcaaatcccagcgtcttttgggaggcagcttcccttttttagtttagtttgttggaagaaa

SEQ ID NO: 5838 - DNA, 201 bp, Homo sapiens
ccctggaatgtgggagccacactgtcctgcccaggctgggggcggggtggggagtagacacacctgagctgagccttgggtgcagagcagggcagggccgyggtggcacggggctgggcaggcggcctgtgtgtctgtctaccagtcctccatccagccagcacccagctctccagttagtgtctgtctttcaagtgcagg

SEQ ID NO: 5839 - DNA, 201 bp, Homo sapiens
ggagtagacacacctgagctgagccttgggtgcagagcagggcagggccgcggtggcacggggctgggcaggcggcctgtgtgtctgtctaccagtcctcyatccagccagcacccagctctccagttagtgtctgtctttcaagtgcaggcaaggtaaaggaggagaggaagaatgctttttctacacttacacttgcct

SEQ ID NO: 5840 - DNA, 201 bp, Homo sapiens
cctttgctaggaagcaggtccaggccctcagcctggtggggagatggaagtggggcatgtcctacctcaccagcgacttgttcaaacagagcccgaaaccrctgctcctcctctgtctcctggtcaggtggagttggctttggaggctaaaaaacagccaaagaaacttgcacaaaatgatccacaaaaaagaaacatgac

SEQ ID NO: 5841 - DNA, 201 bp, Homo sapiens
ctggaaatctgctcccagaggcaggcattgagtgacacgatggcttgacatcaactctgggtgttttttatgttttaaaaattgtgatggtaaaatatacrtaacaaaatttgccatcgtaaccattttcgagtgcacagttcagtggtactaggcccattcacactgttgtgcagccatcacccccgtccatctccattt

SEQ ID NO: 5842 - DNA, 201 bp, Homo sapiens
tgttttttatgttttaaaaattgtgatggtaaaatatacgtaacaaaatttgccatcgtaaccattttcgagtgcacagttcagtggtactaggcccattyacactgttgtgcagccatcacccccgtccatctccatttatcttctcaacttcccaaactgaagctctgtcctgctgaaacactaactctccatttcccc

SEQ ID NO: 5843 - DNA, 201 bp, Homo sapiens
gcctcgatggcgctgcctcccttcagagcttcatagctcccatttagcctgcaagggtggcaagagagagaggagagagtcagggacctagggaggccacyggggcaccctgctttcagagcttttctaactaagcctgaagcatctcccagggcttgccctggctgggtggtgtggaaggaagacgggaagcaagttatc

SEQ ID NO: 5844 - DNA, 201 bp, Homo sapiens
ctgcagcacttctggtctaaaacatggaaagagcagagtcacacccaccgtctaagtcaagcctcccctgctggatcagacccagctacatgcctggcccrgtcacaacctccagccccttctgctgccccaggtgcaggccatgtgcgtgggctatgcacggggctcccctaggatgtttagcagtgacatgaagcaagt

SEQ ID NO: 5845 - DNA, 201 bp, Homo sapiens
gcaggaataaacactgcccccaagagttatgcccctccttgggtgtggctggggtacctggtacagccccagcatagtgcctggaatgcactatgcagccycagcatagtgcctggaatgggagcccatgagcaacttacatcaatgaagcagcccagcagggagcctctcttcaaagccttctctagaatctcatagaag

SEQ ID NO: 5846 - DNA, 201 bp, Homo sapiens
gtggctggggtacctggtacagccccagcatagtgcctggaatgcactatgcagccccagcatagtgcctggaatgggagcccatgagcaacttacatcartgaagcagcccagcagggagcctctcttcaaagccttctctagaatctcatagaagttctcgggggcctctttagtttggaaggtctctgccacaccccc

SEQ ID NO: 5847 - DNA, 201 bp, Homo sapiens
cggtctcccttttgtcttccttttcgtcttgggtggaagcacggtggtactcccgtaagcatcggaatagcatgatgctgttttcccttctcccctgtccraatacaattcctctagcctatagcctgcagcctgctgcaccattttaaatcccctctgctctaggttcactgggtcccccagaggccaagccctgctcca

SEQ ID NO: 5848 - DNA, 201 bp, Homo sapiens
gactgggatgatgcacctcagttgcactgagcgtagccggcccctccccagcacccctgtttccacttcctgcgggggctgctgaacctcggcctcatctrtgctccttcccctgctcgccccactcacccctggtcgtttccacacaaaggggatctgcggcctctcactgtagaacagggaggaattgctggctgggaa

SEQ ID NO: 5849 - DNA, 201 bp, Homo sapiens
cagttgcactgagcgtagccggcccctccccagcacccctgtttccacttcctgcgggggctgctgaacctcggcctcatctatgctccttcccctgctcrccccactcacccctggtcgtttccacacaaaggggatctgcggcctctcactgtagaacagggaggaattgctggctgggaagtctgcatcctcaaacag

SEQ ID NO: 5850 - DNA, 201 bp, Homo sapiens
agacatggtgccggacttgtcagcatcaaaccgaaggaaaaggttctaaagggtggagagcagaagccttgagaaggagcgtgcctgaaaggcatcgctgrtggcagtaaatgggtgacagccagcccgggggagctaccctctaggggccgcagaggccacagttggactgggccttccaaaagaagtcggtctcccttt

SEQ ID NO: 5851 - DNA, 201 bp, Homo sapiens
gaaggatttttcccacctcttcccacttttccaggcaccaggactgaggaggggcctgggctggaggtggaaggttccagcagtgtctgggcggacgccaygtggggagctcaagctgcgccgccttccccgagagacctctgctttgaattgtcttcctcaggcttctcagcaccctgcttctcctctcatcttgtgtcc

SEQ ID NO: 5852 - DNA, 201 bp, Homo sapiens
ttcaggagagttttgcaaattgcatttgaggaagagacaaaccataaaccaggagagaaaagagcgaggatggagagggaaggggtgggatggggcaaggstagctacagcagtcagcaggggaggcgtctctgggggaagcagaggagcacagacctaaacaaagggagggagggagggagggagggaggaagccgggcc

SEQ ID NO: 5853 - DNA, 201 bp, Homo sapiens
atgccagaggagataatactaaggaagacagccccttggagcagagatctgggactctagagtcgctgggcaggccttggtggccctggtcccaggagggragacttctgaagggggagacaaagatgccctccatgctggtttgtgcgtccagcttttatcttggagaattctaactttgacaaaaagtaagtgagttgt

SEQ ID NO: 5854 - DNA, 201 bp, Homo sapiens
ccagcctgtggtctggccaagtgatgtaaccctcctctccagcctgtgcacaggcagcctgggaacagctccatccccacccctcagctataaatagggcmtcgtgacccggccaggggaagaagctgccgttgttctgggtactacagcagaaggtaagccgggggccccctcagctccttctcggccttgtctctctca

SEQ ID NO: 5855 - DNA, 201 bp, Homo sapiens
gtggatcgcgtcttcctccagggcatcgggagtgaggttgcagatctccactttatcaaagtgggccttgaagtcctgaaatgccatcctgcagcaaagckgagagacacgatgcacaggagggcaagagtgagggcatcatccattcactcattcattaaatcattcacttattcattaaatcatcttgttcctgtccgc

SEQ ID NO: 5856 - DNA, 201 bp, Homo sapiens
gaccacttaggagaaaaggagaagggagaacttccagtattttatccaaattctttattcgtcactcagctagcccagacgtcttcttaggaagcattggragatatgagagagtggtgtggggtgggaagcaaatggttggggagacatagcatctggcttttttgggaagccctgctgggtttagacaaatctgcagac

SEQ ID NO: 5857 - DNA, 201 bp, Homo sapiens
ccggaaagttcacaaaaacagaactctgttcccttggatgggatcccaaagtggcaagaagacccccaagtcccttcaaaagctccccacccccaccactrggcagtcttgtgcatcttgattctgatccaatttcagcatgggggtcccccagctttgggttattttctgtgaagaagactattctgctggctaaggatg

SEQ ID NO: 5858 - DNA, 201 bp, Homo sapiens
ggatgaaggcctcacccagcgtttggggcaatgccagaggagataatactaaggaagacagccccttggagcagagatctgggactctagagtcgctgggsaggccttggtggccctggtcccaggaggggagacttctgaagggggagacaaagatgccctccatgctggtttgtgcgtccagcttttatcttggagaat

SEQ ID NO: 5859 - DNA, 201 bp, Homo sapiens
catgctcatcctcagcccttttgttcctgattttacagaaatctgtaagatatgatgtaaagctcctaactcccctaaataagaaacagataggggtacgrgaatgaggaccagaccaaagggacaatcttcagttgcagacaaaggaaaaggcagaacagattctgaaaatgagtctgtgggaacgacagcaacacagta

SEQ ID NO: 5860 - DNA, 201 bp, Homo sapiens
cctcgatggcgctgcctcccttcagagcttcatagctcccatttagcctgcaagggtggcaagagagagaggagagagtcagggacctagggaggccactrgggcaccctgctttcagagcttttctaactaagcctgaagcatctcccagggcttgccctggctgggtggtgtggaaggaagacgggaagcaagttatca

SEQ ID NO: 5861 - DNA, 201 bp, Homo sapiens
ccaagcggtccctgaaggtgggcaggcggtcatcgatcaccacgtccagccactcactgtgctgccagaactgttgcccaggaaaaagacagaaatgatgygagtcagctacatgggagctccaggccctgtttgtaaatgttgatcctgttgcttttttcccctctgaccaagctacccatagacagctttgaaaatcac

SEQ ID NO: 5862 - DNA, 201 bp, Homo sapiens
ccgcttgagccctgagagggttgggtcctgccgagcctcacctgcaaacccagagccctgattttttcccagcccttagatgctcactacaaagactagtrtagagactcctgtcgggaggctgcctgagctggggaagctgtcactcacttggcgtaggctttttccagcaaggcgctccagaactcgttgtggtcggca

SEQ ID NO: 5863 - DNA, 201 bp, Homo sapiens
gaaacttgcacaaaatgatccacaaaaaagaaacatgacaaaaatagcaggaaagaagccaggagcctgtgtgcccagccccatgtcaccctcctgaggcrgtgtgcacaagctgcgtcctgtagcgtgaggaacattttctcatgaaggctcttttagaaggtgagactagaaggactttattagctggacctgtggagc

SEQ ID NO: 5864 - DNA, 201 bp, Homo sapiens
attttaaaaaatatcattagacttctatctgctatttttttcatagtacatgaaatgaaaaaaaaaaaacaaatttcagaaaactagataggaagatcccrtttcagtaaaatcaaaccaactgaccttgatgtttgtgtgtggaagtgtgtgcctgtttgtacgagcagatagagagctgggaaggatacaggccaggtg

SEQ ID NO: 5865 - DNA, 201 bp, Homo sapiens
atagagaaaattttaaaaaatatcattagacttctatctgctatttttttcatagtacatgaaatgaaaaaaaaaaaacaaatttcagaaaactagatagraagatcccgtttcagtaaaatcaaaccaactgaccttgatgtttgtgtgtggaagtgtgtgcctgtttgtacgagcagatagagagctgggaaggataca

SEQ ID NO: 5866 - DNA, 201 bp, Homo sapiens
tataagtgtgtgtgtttgtatgcatagagaaaattttaaaaaatatcattagacttctatctgctatttttttcatagtacatgaaatgaaaaaaaaaaaacaaatttcagaaaactagataggaagatcccgtttcagtaaaatcaaaccaactgaccttgatgtttgtgtgtggaagtgtgtgcctgtttgtacgagca

SEQ ID NO: 5867 - DNA, 201 bp, Homo sapiens
aagaaatgttatcaagaaaatcatagggaagaggaaatacatttactatttattaagtggaactgggtcattgtaaaggtcttcatccttattatcttcaygttgagtaggctgagaaggaggaggaggagttggtcttgctgtctcaggggtggtagagatggaagaaaatccccatataagttcaagcctgtgttgctc

SEQ ID NO: 5868 - DNA, 201 bp, Homo sapiens
ttgtgctctgcccaccctccccaagcacagctgtgtttgacaagaaggtggtgctgaggaggagggccgtccagccccacggtcccacgggctgctgagaygtgcaccgtgtaatgctgagtcccactgcaaatgatgcccaagccacagaggtctgcagggaacctggcaatgcttgtgatttccctatggcccgctacc

SEQ ID NO: 5869 - DNA, 201 bp, Homo sapiens
ggccaagtgatgtaaccctcctctccagcctgtgcacaggcagcctgggaacagctccatccccacccctcagctataaatagggcatcgtgacccggccrggggaagaagctgccgttgttctgggtactacagcagaaggtaagccgggggccccctcagctccttctcggccttgtctctctcagatgtaactgagct

SEQ ID NO: 5870 - DNA, 201 bp, Homo sapiens
ctgagatcacatcatggcactccagtcttggtgacaaaagtgaaactccatctcaaaataataataataataataaacaatttctaagtattattcttagyagtcacctacgcatggcactttgtgcagatgactcctgcatgtgtcagggtttttcttgcgggcaatgcagtctgatcagtataaactaggcagagaggt

SEQ ID NO: 5871 - DNA, 201 bp, Homo sapiens
cgggagaagtagggagacatagaaggggcaggtgctggccaagaggcaggggcaggagaggagaaggcggaggggcactcagggcgagggtgtcaggcccrccaccccagagcaccattactcccaggacgcggctgcgtgcagacctggaaccagcctagggagcagccgcagatcacaactgagaacaaacgacagtct

SEQ ID NO: 5872 - DNA, 201 bp, Homo sapiens
tactgtattcttacaataaataagccagagaaaagaaatgttatcaagaaaatcatagggaagaggaaatacatttactatttattaagtggaactgggtmattgtaaaggtcttcatccttattatcttcatgttgagtaggctgagaaggaggaggaggagttggtcttgctgtctcaggggtggtagagatggaagaa

SEQ ID NO: 5873 - DNA, 201 bp, Homo sapiens
tacagcagtcagcaggggaggcgtctctgggggaagcagaggagcacagacctaaacaaagggagggagggagggagggagggaggaagccgggccggtcycgggagaggtaacagccaatcctgtggcagcgaggcacgttctggctcaccctgcaggggtggtgagttaactgggccggggcctgcagaggagtgaagg

SEQ ID NO: 5874 - DNA, 201 bp, Homo sapiens
cccttcaatcaagaagagtcagatgaaatgaattagcagggccagcccaagaacctcttctgggggtctcagggtagctttcatttgtagcagctgaggckgaagcccagctgcaaggcctttgagagaacgtggtgctggacccgtgtctagggcaggggttctaaaccctgcttacatatcagagtcacctgagaattt

SEQ ID NO: 5875 - DNA, 201 bp, Homo sapiens
aatgtggctttagcatggtttaggaccatatgtcacacagatctgatgacatttttttctagggttaccaggcagtgtggaaatgcacctgccctcatgcygggccccagagaggtaaacccactggcccagggctccctcttacctggaaatggaatatcccggcataaccagggccaaagctttggtcctgggggatga

SEQ ID NO: 5876 - DNA, 201 bp, Homo sapiens
tatgtcacacagatctgatgacatttttttctagggttaccaggcagtgtggaaatgcacctgccctcatgccgggccccagagaggtaaacccactggcycagggctccctcttacctggaaatggaatatcccggcataaccagggccaaagctttggtcctgggggatgactctggccagtgctttttgattaagcgt

SEQ ID NO: 5877 - DNA, 201 bp, Homo sapiens
gtgagccccacatcacaggcatgtctgactctagaggaacggaggtgcaggggcttgaggccactggactccattcagagggagtgaggaagcagaggccraagcagtgttgttcccccagccccgtgcctcttgggtcctcagggaccccatgctgcagttgcttgcctgtcccagtgactcaacctccctctcgccatg

SEQ ID NO: 5878 - DNA, 201 bp, Homo sapiens; identical to SEQ ID NO: 608

SEQ ID NO: 5879 - DNA, 201 bp, Homo sapiens
cagaggccgaagcagtgttgttcccccagccccgtgcctcttgggtcctcagggaccccatgctgcagttgcttgcctgtcccagtgactcaacctccctytcgccatgctccatccacttacactcacccagctctccctggcagatatcagtcctggtggcccctccaagaatgaattctgggtttttcacgatttcct

SEQ ID NO: 5880 - DNA, 201 bp, Homo sapiens; identical to SEQ ID NO: 611

SEQ ID NO: 5881 - DNA, 201 bp, Homo sapiens
gaggccgaagcagtgttgttcccccagccccgtgcctcttgggtcctcagggaccccatgctgcagttgcttgcctgtcccagtgactcaacctccctctygccatgctccatccacttacactcacccagctctccctggcagatatcagtcctggtggcccctccaagaatgaattctgggtttttcacgatttcctgg

SEQ ID NO: 5882 - DNA, 201 bp, Homo sapiens
aaccagatgccccgggtccccaccgcagagcatcccaggcctgtacattattttctgcctccaaactgcaaagctttccacggtagactgggatgatgcamctcagttgcactgagcgtagccggcccctccccagcacccctgtttccacttcctgcgggggctgctgaacctcggcctcatctatgctccttcccctgc

SEQ ID NO: 5883 - DNA, 201 bp, Homo sapiens
gcctactcaacctgaagatgataagaatgaaggccttgatgatgatccacttccatttaatggagagtaaatatgttttctctttgttacgattttcttartaacattttattttctgtagcttactttgtgcacagtatataatatacacagtatttaatacctacgacataaaaatatgtgttaatcaacattagatta

SEQ ID NO: 5884 - DNA, 201 bp, Homo sapiens
tcaagacggacagtaactgttaccaactgagtcagcttttcccctaaagatggtatcgtgaagccaatacatgaaacccaaagcgagcctcaagcagtgcrgactttattcaatggccaaagaatggagaagcaggagcatggccgcaagtcaacttcttgtctagtgagaggtgagggggttaaaatatagggtatcctg

SEQ ID NO: 5885 - DNA, 201 bp, Homo sapiens
accaatgcacccactctgatccagctgtttcccttctagaaatttatctttatcctgatgatagagccgcaccccgaaaagtgaaaggtataccagcttgytcatttcatggtggcattgtttacattaaaaaaggttggaaagcacttagtgccctctgttgggggaatggtaaagaaaattatggtccagctaatcatg

SEQ ID NO: 5886 - DNA, 201 bp, Homo sapiens
ttctctgggggtcatcagacgggtgaaatttgagctgagatatgagtgatgaggagccgctgcacaaagatgctggatagagggaacagcaagatttgtgycttaggaagctttgagtttctgtgggttttgttgttgttgttgttgttattattttttttgagatggagtctcactctgtcacccagtttagagtgcagt

SEQ ID NO: 5887 - DNA, 201 bp, Homo sapiens
acaaataaacaaacaaacaacaaaaaataatgctttctgtacataaaccagcacataagtaatataatttcatgggatgatagtcactatagagaagatargggtggtgcagtggaataaggtgagatagggttggtgggcagggctcttctctgggggtcatcagacgggtgaaatttgagctgagatatgagtgatgag

SEQ ID NO: 5888 - DNA, 201 bp, Homo sapiens
cagccctaccctgctcttggtgggcacagagagttgtgagacctacctctggccagacactgttctatgtgtggaaatattgcaatgaagaagatcaaccmtccaaatgctcactgtggccaggctcggtggctcatgcgtatcattccaactctttgggaggccatggtggaatgattgcttgaggcccagaatttgaga

SEQ ID NO: 5889 - DNA, 201 bp, Homo sapiens
gaaacactgagtttcagagctgatagtaatgctgtatcatttcaatcagaaaggaattttgcaaaaaggaactgacttttttgtttgtttgtttttgagayggagtttagatcttgttgcccacgctggagtgcaatggcgcaatctcggctcactgcaacctctgcctcccaggtttaagtgattctcctgcctcagcct

SEQ ID NO: 5890 - DNA, 201 bp, Homo sapiens
accctgtctccaaaaaaaagtaaataataataaaaaaaagagtggggctattggttagtggaaggaagaccggagaggtaaagctcccctctcatctcatsatatcaagagtacctgccgtccacatgccttaccacagctgatgctggccttgatcacctggctaaggtagtgttagtcaggtgtctccactggaaagtt

SEQ ID NO: 5891 - DNA, 201 bp, Homo sapiens
actattctaagaacctcgtaaaagtggaatcatatagcatttgtcttgttgtgactggtttatgttacttagcataatgtcttcaaggtccatccatgatrtagcatatgtcagaatgtcctttctattttgcttgaataatattccatcgtatggatatgtcatattttgtctttctatttatctgttggtggacacttg

SEQ ID NO: 5892 - DNA, 201 bp, Homo sapiens
aaaaaaaccagccagttatatttaccagctattaattaaatttttcactggaagcagtcttgccttgtacatagggatgaaacacacacacacacacacamatacacacaccatatatatatttataaatgcatatataaaaattatggtaaaatacatgtaacataaaatttacaaccttaaccatttctaagtgctcag

SEQ ID NO: 5893 - DNA, 201 bp, Homo sapiens
tgggactatagtcatacccagctaattaaaaaaaaaaaaaaacctgtagaggagggagtctcagtatgttgcccacactggtcttgaactcctagcttcawatgattctcctgccttggcctcccaaagtgctggggttacagatgtgagccactgcacctggccttattatgtttaattggagggaacattgataaagtc

SEQ ID NO: 5894 - DNA, 201 bp, Homo sapiens
agttgagcagcccatactgctgctctacctacggagtggccattctttctttacgtctttataaacttgctttcgatctatagactcgtcctgaattcttycttgcgtgaggtccaagaaccctctcctggggtctggatcaggacccctttccagtaacaggtccacttttccccaaataagtgatcttcctcctccttc

SEQ ID NO: 5895 - DNA, 201 bp, Homo sapiens
aatgataaatatacctgtctgccttctgctaactctctgggatttctttccctggagtttgacctcagcccaagacgatttcctttctccttctcatctasgagctggaggttgatgctatgcacagatcttaggatgacttgaatcacaggtgcagcaggataggaatttactctccgcagtttagggcccaaaaaaatc

SEQ ID NO: 5896 - DNA, 201 bp, Homo sapiens
aattgaacctttcctcaaacacaaggcacaaacctgccccagcccatcatcctcccacagaggcactgtgaatgtataaagaaaggcgatgctaagaaacrtgctgcaggggaggctggcacattctgctccttagctaaccgcacaggcccatgggtccacacacatcagaccatggctctctgtggtctatctttgcca

SEQ ID NO: 5897 - DNA, 201 bp, Homo sapiens
taaaaagtttctaccaatgttcacagtggtttaaaatgagggccctggtgtcaggaagtgagtcctgggtctgaaccctggtgccaccactccaagggccrtgaccttaagaatcaccaactgggctcagaggcccacctcctgggcagcagagagaagacctgccatctgctcaggttgcccacaggcagtacctggcat

SEQ ID NO: 5898 - DNA, 201 bp, Homo sapiens
caggttgcccacaggcagtacctggcatgcagtcagccacctgtactccagtcttttctttacctgcagctttcagtgcagtccgtagttcataggtagayatggtgccggacttgtcagcatcaaaccgaaggaaaaggttctaaagggtggagagcagaagccttgagaaggagcgtgcctgaaaggcatcgctgatgg

SEQ ID NO: 5899 - DNA, 201 bp, Homo sapiens
tgtccctcacatagtattgcaaatgacatgaaggatttttattgtaggttttgctgaaattttccccaagggggaggatgacttagttgggtgatgggggkagcaaacatccctgtcgtcagggttgggtgcaaggagcataagcctgcctggcctctgggagagccctcactgtgtggcctggagccttcctaactgtgc

SEQ ID NO: 5900 - DNA, 201 bp, Homo sapiens
gccgcagaggccacagttggactgggccttccaaaagaagtcggtctcccttttgtcttccttttcgtcttgggtggaagcacggtggtactcccgtaagyatcggaatagcatgatgctgttttcccttctcccctgtccgaatacaattcctctagcctatagcctgcagcctgctgcaccattttaaatcccctctgc

SEQ ID NO: 5901 - DNA, 201 bp, Homo sapiens
cctacaaatcagccctgggaagcagatctgcggctcggaggagcagggaggggacccaggcagtgtggtcgcttgtccctccataggtgccccaggacccygatggggttggcacttactcttttgcagcacagcatttaaaacatactcaagttcctctgctgtcacctccatgtcctgttgaagtggagacaattgttt

SEQ ID NO: 5902 - DNA, 201 bp, Homo sapiens
gtcaggcgtggtgggggtgcctgtaatcccagctacttgggaggctgaggcaggagaattgcttgaacccgggagtcagaggctgcagtgagccgagatcsagccacggcactccagcctgggcgaggagcgagactccatctcaaaaagaaaaagtaaaacacccccctacttgctgaagggagtgtaaattggtgtctc

SEQ ID NO: 5903 - DNA, 201 bp, Homo sapiens
tttctcttcttcttgttcatcttgaagggcagcaggaggtgaacatagtgcctgggtggctctgggatgccatggggcaaaaccccaaggacaaatgctcrgaagcttcacatgggtgcagggagatgacctctaggaccccacccggtccaggccttacagcagggcctgggttttgagggatatgccaaacagcctgga

SEQ ID NO: 5904 - DNA, 201 bp, Homo sapiens
ctgctgattcctccctttcccctatcctctctgcaccccctgcccctcccacagatgctgctgaatttcatggtctccttctgagcctgacttgcctcaamttgcaaggcatctcttttgtctctttgtttgcacaatgaaggactttggaactggggtcctctggctgggaccagagtgcagttctggccagtccaaatg

SEQ ID NO: 5905 - DNA, 201 bp, Homo sapiens
ggtgatcttgggcgagttatccatgctgtctgtccctgcttccaagctgtgaatcaggataatcggtgctgcctgctagaggcatggcgggtttgtggaarcaaagccacttgcaaagtctggcacatggaggggatcaggagctgctgattcctccctttcccctatcctctctgcaccccctgcccctcccacagatgc

SEQ ID NO: 5906 - DNA, 201 bp, Homo sapiens
gaaatgataaatactggaggggatagatagcctaaataccccaactcgatatcacacattctgcacatgtaacaaaatagcacatgtaccccatcaatacrtacaaatattatgtatcaataaaaataagtcaataaaagtattagtcaccacgtgaaaactctgatgttctaagcactttataatgatttctgtgtgatt

SEQ ID NO: 5907 - DNA, 201 bp, Homo sapiens
ccatagagtctcgctgactttacaggaagctttgtttgggggaacttaacactgggtggtgtctgagccccaagttcattcctacaccagcctcccctcgygttctatgtctcaggtcacttccagctgtggccctagaaagtttcttggaggggatgctgctgcccacggagaatgatactctgccagggcccattccta

SEQ ID NO: 5908 - DNA, 201 bp, Homo sapiens
gataaatgtgtttgcccatagaaatgattatacaggctgggtgtggtggctcacacctgtaatcccagcactttgggaggccgaggagggttgatcacccraggtcaggagatcaagaccagtctggccaacatcatgaaaccctgtctctactaaaaatacaaaaaattagcccggtgtggtggcggatgcttgtaatcc

SEQ ID NO: 5909 - DNA, 201 bp, Homo sapiens
caaaggcaggtgggggttagatttcatccaacctgacccctgatagaggagaactcacagaggacatcggctcttcctctagggcacatgtgcctctttcrttctctagacatcatattaataaagttccttgttgttatagtcctacaaataggatctcacgtctgagaaaaaacaaatgttagaggatggaggtggttt

SEQ ID NO: 5910 - DNA, 201 bp, Homo sapiens
ttcagcactggggtcagcaaaccttttctgtaaaggcccagaccatgaatattttcagctttgtgggccacgcaaagtctgtgctgcaactactcaacttwgctgttgtagtgacaaagcagccgtagatgtgacacagatgaatgggtgtggctgtgttccaataaaactttatttacaaaggcaggtgggggttagatt

SEQ ID NO: 5911 - DNA, 201 bp, Homo sapiens
agcaaacatccctgtcgtcagggttgggtgcaaggagcataagcctgcctggcctctgggagagccctcactgtgtggcctggagccttcctaactgtgcrtcatctccccaggaccatccacctgaccatgccccaactggtgctgcaaggatcttatgacctgcaggacctgctcgcccaggctgagctgcccgccatt

SEQ ID NO: 5912 - DNA, 201 bp, Homo sapiens
gatggggttggcacttactcttttgcagcacagcatttaaaacatactcaagttcctctgctgtcacctccatgtcctgttgaagtggagacaattgtttkttatagcccttggcaccttcttttatagtttatttttgttttaaatcagttctgagcttcatttggctccagtgacagaccagccttcaggaccctgctg

SEQ ID NO: 5913 - DNA, 201 bp, Homo sapiens; identical to SEQ ID NO: 606

SEQ ID NO: 5914 - DNA, 201 bp, Homo sapiens; identical to SEQ ID NO: 607

SEQ ID NO: 5915 - DNA, 201 bp, Homo sapiens; identical to SEQ ID NO: 610

SEQ ID NO: 5916 - DNA, 201 bp, Homo sapiens; identical to SEQ ID NO: 612

SEQ ID NO: 5917 - DNA, 201 bp, Homo sapiens
gctccagtgacagaccagccttcaggaccctgctgtgggcagatgtacctatctcctgtgtagctgcagctatgtgtctcatatgtcacatgttttagggrcatgccagcccaactaggagagagcctaacttgagagacatcccaacccaggaaagcgcatgaaaagctgggcagggcaaggcagtggtttcccagcttc

SEQ ID NO: 5918 - DNA, 201 bp, Homo sapiens; identical to SEQ ID NO: 615

SEQ ID NO: 5919 - DNA, 201 bp, Homo sapiens
tggtcttactttgcaacaagctccatcatgcctcaggatgacgttgctgaccaaccccacgactgcaaccctttgctaggaagcaggtccaggccctcagsctggtggggagatggaagtggggcatgtcctacctcaccagcgacttgttcaaacagagcccgaaaccgctgctcctcctctgtctcctggtcaggtgga

SEQ ID NO: 5920 - DNA, 201 bp, Homo sapiens
ggaagctgttcctctgactcaccgggtaatggcttttttctctgaaaagattctcagacagaaatcagcttcctggtggggctcaaaagtgctgggaatcmggatgtactccccagggggcagcttgaaccggtcggagacttctctcaggttgatgaacgtcttgcttctggcccgagaagcgtggtatctgaagaagtc

SEQ ID NO: 5921 - DNA, 201 bp, Homo sapiens
gcctatcacctgctgacaagacccactctgactccaggtcctcagcctcggtgggagtcagacagcttggagccggggagcgggtacaaccagatgccccsggtccccaccgcagagcatcccaggcctgtacattattttctgcctccaaactgcaaagctttccacggtagactgggatgatgcacctcagttgcactg

SEQ ID NO: 5922 - DNA, 201 bp, Homo sapiens
ccacacacagggtgggggcctgtccttgtggataaggttttgattcgtgcctatcacctgctgacaagacccactctgactccaggtcctcagcctcggtrggagtcagacagcttggagccggggagcgggtacaaccagatgccccgggtccccaccgcagagcatcccaggcctgtacattattttctgcctccaaac

SEQ ID NO: 5923 - DNA, 201 bp, Homo sapiens
acccagtgaccagctggtgcctcttgggacgacacctccagactgtcagaggtggggcactgttcaccctgatctctgggaatggggggtgcatggttctygggagaagattcctgcttcccttgtattccatctgtcacccggttgctgagaccttgctgagccaaacatccatccacactgagcaccctcagctctggg

SEQ ID NO: 5924 - DNA, 201 bp, Homo sapiens
cgggcactcaggatctcacttgtaggaccagcatcccttgtactgcccctccttgcccaaaagcaaccggaccccacaggagccactcccaggcccgtacmcacctggagggaatggaagccagcccagctggcgccgggtcagaggtagagccctgactaatccagcaccgcaaatattgacatggcgtcccaggcacaa

SEQ ID NO: 5925 - DNA, 201 bp, Homo sapiens
cattagccattattgttcccattttacaggtgaggagactgaggctcagggaaatgaagtgatatgactatatgcatgagacaaattgtcaggataagacrggcactcaggatctcacttgtaggaccagcatcccttgtactgcccctccttgcccaaaagcaaccggaccccacaggagccactcccaggcccgtaccc

SEQ ID NO: 5926 - DNA, 201 bp, Homo sapiens
taatcattgtaatgatgataataatagtatcagtaatagtaataatgtgacaatagctgtaatgtactggaaaccttctgtgtgctagacattggcctgcrttagccattattgttcccattttacaggtgaggagactgaggctcagggaaatgaagtgatatgactatatgcatgagacaaattgtcaggataagacgg

SEQ ID NO: 5927 - DNA, 201 bp, Homo sapiens
tggggcaaggctagctacagcagtcagcaggggaggcgtctctgggggaagcagaggagcacagacctaaacaaagggagggagggagggagggagggagraagccgggccggtctcgggagaggtaacagccaatcctgtggcagcgaggcacgttctggctcaccctgcaggggtggtgagttaactgggccggggcct

SEQ ID NO: 5928 - DNA, 201 bp, Homo sapiens
aggagggagattaaatttccctctaatctgggtgtatatgaggagtctgagacagatgaatttgatttgccaaaaatggagagagaaggctgggcgtggtrgctcatacctgtaattccagcactttgggaggccaaggtgggtggtttctctgaggtcaggggttcgagactagcctggccaacacggtgaaaccccatc

SEQ ID NO: 5929 - DNA, 201 bp, Homo sapiens
ataggtttagagacagaatcttgctgtgtcacccaggctggagtgcagtgacatgatcatagctcactacagccttgaccttctgggctcaagcaatcctyccacctcagcctcccaagtaactgggactacagacgtgagtcaccacgcccagccactttttaatttttttttttttttttgtggagatgggggtctcgc

SEQ ID NO: 5930 - DNA, 201 bp, Homo sapiens
acctttcagaaggaaaattggctaaatgtgaaaaaagcaataaaagtgggaatacgccttcatccatttattctagttctaagaaccccgagcaaagaatwacatatgaagatttttgtcatcatattatttatagtggcaaaaatttggaagtgaaataatgaccaatagagaggcatggtcaataccttaggctatgtc

SEQ ID NO: 5931 - DNA, 201 bp, Homo sapiens; identical to SEQ ID NO: 609

SEQ ID NO: 5932 - DNA, 201 bp, Homo sapiens
agtcctccctttcctcctcatcccctgggcatccataacataaccctttcagaacttctgtttgtttaatcaggagtctgtctgagagctaaaccaatgcraacacagctcagtgtgaatttttgttaccaagctacagagctgattcttatactcaatatcatagcagattaaagaatcttgttcagagcaagattgagt

SEQ ID NO: 5933 - DNA, 201 bp, Homo sapiens
cgcgaacccagcttccctgatggaccgtcacctcccatttgtggatcgcgtcttcctccagggcatcgggagtgaggttgcagatctccactttatcaaaktgggccttgaagtcctgaaatgccatcctgcagcaaagcggagagacacgatgcacaggagggcaagagtgagggcatcatccattcactcattcattaa

SEQ ID NO: 5934 - DNA, 201 bp, Homo sapiens
gtcaggagaaggtgacactgtctggggtggaaggtcaaggaatgcctactcggtgcctggctctgtgccggctcctgtgtgtgatgccatttagctctacrggaagcctgcagggaactgtcagtctctccttttttcagacgagtgtagaaaggtttaatgtcactaagaaaattgtctgaggtcacccacctaagtaag

SEQ ID NO: 5935 - DNA, 201 bp, Homo sapiens
aaacgggctggccctgagtggtggcctgtgagtcaggagaaggtgacactgtctggggtggaaggtcaaggaatgcctactcggtgcctggctctgtgccrgctcctgtgtgtgatgccatttagctctacgggaagcctgcagggaactgtcagtctctccttttttcagacgagtgtagaaaggtttaatgtcactaag

SEQ ID NO: 5936 - DNA, 201 bp, Homo sapiens
cctgagctacatgtgacctgctcactctctttgcctttgaaacacttctgtgctattggtgacagggcttgagagtacctctgcttatcagattgcaggcytcagggacagaagaaacgggctggccctgagtggtggcctgtgagtcaggagaaggtgacactgtctggggtggaaggtcaaggaatgcctactcggtgc

SEQ ID NO: 5937 - DNA, 201 bp, Homo sapiens
acaaagactagtgtagagactcctgtcgggaggctgcctgagctggggaagctgtcactcacttggcgtaggctttttccagcaaggcgctccagaactcrttgtggtcggcagagtggaggaaaaccaagcggtccctgaaggtgggcaggcggtcatcgatcaccacgtccagccactcactgtgctgccagaactgtt

SEQ ID NO: 5938 - DNA, 201 bp, Homo sapiens
tcctgccgagcctcacctgcaaacccagagccctgattttttcccagcccttagatgctcactacaaagactagtgtagagactcctgtcgggaggctgcytgagctggggaagctgtcactcacttggcgtaggctttttccagcaaggcgctccagaactcgttgtggtcggcagagtggaggaaaaccaagcggtccc

SEQ ID NO: 5939 - DNA, 201 bp, Homo sapiens
aaagttagagtgctgttgtaaaagtctttcttgagaatcaaccttgatgcaaggtgggcctgagggctgaaaggggaggaagaaggggcacctcagaatcrggacaggatcctgagtcagagcccgggaggatagtagacaggccactccttcacatgtctgcacaagccagctctggccccacacgccccgggaaccagc

SEQ ID NO: 5940 - DNA, 201 bp, Homo sapiens
ggaggaagaaggggcacctcagaatcgggacaggatcctgagtcagagcccgggaggatagtagacaggccactccttcacatgtctgcacaagccagctytggccccacacgccccgggaaccagccagagaggcaggatagggtgactgacctgtcgctccacgacccgttccactcaacctggccccaagggttccgg

SEQ ID NO: 5941 - DNA, 201 bp, Homo sapiens
ggggtttcaccatgttgaccaggctggtcttgaactcctgacctaggtgatccgcctgtctcggcctcccaaagtgctgggattacaggcgtgagccaccrcacccggcctatgattccttttatataaaatattcagaatatgtaaatagaatctatagagaaagtagatgagtggttgcctggggctgggggaaatggg

SEQ ID NO: 5942 - DNA, 201 bp, Homo sapiens
tgcatactcaagtcccacagtaagccctgtggaatctgcctataccaagtcagccctctgtatatgcgggtttcaaatcctggaatagtatattttctccyttccttccttccttccttccttccttccttccttccttccttccttccttccttccatcctccctccctcccttcctccctctctcccttccttctttcc

SEQ ID NO: 5943 - DNA, 201 bp, Homo sapiens
agcacgggctgggcgagcagacatttcatagctgccacccaagtggttcggcagtacttgggagggtggttagaaatctccctgcagccccaacccagacwcagcttaattacagataatggtatctccgtggtggctccatttgctttaaattatcttgcattttcaagatttattgactgacctactgaacttcccagc

SEQ ID NO: 5944 - DNA, 201 bp, Homo sapiens
ttgccaaaacatcacttatagttttaaatgtatgctccataaggattcaccgtgcaatgccgttaatgttcttctgaggcatttagctgttattccatgataaaatgtggctttagcatggtttaggaccatatgtcacacagatctgatgacatttttttctagggttaccaggcagtgtggaaatgcacctgccctcat

SEQ ID NO: 5945 - DNA, 201 bp, Homo sapiens
catgacaggtatgtgcactgtttgtggtttatttatacattgcatgtgtgaaagcatgtgtttgctcacatgtgtgcatgtgtgtgcatgtatgtgtgcaygcatgtgtttgcaagtgcttctacacacgtgtgtgtttgagcacatgtatgcatgtgtatgagcttgtgtgtggtctgctgggaacaggaagggaggttg

SEQ ID NO: 5946 - DNA, 201 bp, Homo sapiens
tggttaaaacttgtgttttatttatttatttttattttattttattttattttttatttatttatttatttatttatttatttatttatttatttattatwctttaagttttagggtacatgtgcacaacgtgcaggtttgttacatatgtatacctgtgccatgttggtgtgctgcacccattaactagtcatttagcac

SEQ ID NO: 5947 - DNA, 201 bp, Homo sapiens
cccgcccagggctgcgctcagccaccttcctgctgtgctttaagcagtcacatgagcccccattttctccatccgatcctgtggtcccctaatctccctgycttgcctgtttattgcagtgcctaatatactaccatcagacagcccctaggtttagatatcacccctccaggtgacccctttcataattcaggaacccca

SEQ ID NO: 5948 - DNA, 201 bp, Homo sapiens
ttggttaaaacttgtgttttatttatttatttttattttattttattttattttttatttatttatttatttatttatttatttatttatttatttattatactttaagttttagggtacatgtgcacaacgtgcaggtttgttacatatgtatacctgtgccatgttggtgtgctgcacccattaactagtcatttagca

SEQ ID NO: 5949 - DNA, 201 bp, Homo sapiens
aagcatgatggcatgtgcctatagtcccggctactcaggaagctgaggtgataggatctcttgagcccatgagtttgaggctgcagtgagctaggcttatrccactgcactccagccagggtaaaagagtgagactctgtctaaagcaaaacagaactaaaaaacaaagcgtctgggcctattccaagcttctttgggctc

SEQ ID NO: 5950 - DNA, 201 bp, Homo sapiens
gcttggttaaaacttgtgttttatttatttatttttattttattttattttattttttatttatttatttatttatttatttatttatttatttatttattatactttaagttttagggtacatgtgcacaacgtgcaggtttgttacatatgtatacctgtgccatgttggtgtgctgcacccattaactagtcatttag

SEQ ID NO: 5951 - DNA, 201 bp, Homo sapiens
agtatctcagggcctcttgcgagtcctccagcccttggacgagggtaaagccacccccatgtcaccccttccacaccacataacataggggagatgtaatrtgttcccctgagtccacagtaaaaaacatctccctgcctctctggttttcttttcattgattagatttcttaaaatacaattaaaagtctacccacttca

SEQ ID NO: 5952 - DNA, 201 bp, Homo sapiens
catgcttggttaaaacttgtgttttatttatttatttttattttattttattttattttttatttatttatttatttatttatttatttatttatttatttattatactttaagttttagggtacatgtgcacaacgtgcaggtttgttacatatgtatacctgtgccatgttggtgtgctgcacccattaactagtcatt

SEQ ID NO: 5953 - DNA, 201 bp, Homo sapiens
tcccattgcagtgctttatccctaaataaatagcttttcttttagagagtgtctctgtgtttgttatttcagttgacagtagcacagaggaagatgacatsgaacagaactttataccaagcacccacctcactcccatgccaggtccttgtggactagaagagcacagactagaacacacacatcttggtctccaggagg

SEQ ID NO: 5954 - DNA, 201 bp, Homo sapiens
ccatgcttggttaaaacttgtgttttatttatttatttttattttattttattttattttttatttatttatttatttatttatttatttatttatttatttattatactttaagttttagggtacatgtgcacaacgtgcaggtttgttacatatgtatacctgtgccatgttggtgtgctgcacccattaactagtcat

SEQ ID NO: 5955 - DNA, 201 bp, Homo sapiens
actttggctgctgtcatgggttgttgagtacctgtggcttttccaggctcaaggtgcaagctgccagtggatccaccattcttgggtctggaggatgatgrccgccttcccacagttccactaggcagtaccccagtggggactctgtgcgagaccttgaacctcacatttccccatctgcatagccctagtagaagttct

SEQ ID NO: 5956 - DNA, 201 bp, Homo sapiens
gcgtctctgggggaagcagaggagcacagacctaaacaaagggagggagggagggagggagggaggaagccgggccggtctcgggagaggtaacagccaawcctgtggcagcgaggcacgttctggctcaccctgcaggggtggtgagttaactgggccggggcctgcagaggagtgaaggatttttcccacctcttccca

SEQ ID NO: 5957 - DNA, 201 bp, Homo sapiens; identical to SEQ ID NO: 613

SEQ ID NO: 5958 - DNA, 201 bp, Homo sapiens
acaggccactccttcacatgtctgcacaagccagctctggccccacacgccccgggaaccagccagagaggcaggatagggtgactgacctgtcgctccaygacccgttccactcaacctggccccaagggttccggattcggatgagctcgattctctggcctcggaagcttacctagaagggaaaagcatgagggaagt

SEQ ID NO: 5959 - DNA, 201 bp, Homo sapiens
ctgcagttggagttcaagtcgcctacctggtcaattcccgttacactgtaggcatgacccttaataagaccaaacggcgtccgggcctcagattctgcagyacttctggtctaaaacatggaaagagcagagtcacacccaccgtctaagtcaagcctcccctgctggatcagacccagctacatgcctggcccggtcaca

SEQ ID NO: 5960 - DNA, 201 bp, Homo sapiens
ggggcagcttgaaccggtcggagacttctctcaggttgatgaacgtcttgcttctggcccgagaagcgtggtatctgaagaagtctttgttcaggtgttcrtctttgtcagggcactgcaatgggcaagaaagggaggggtttcctagggaagttcctcttggcttttcggacacaattcatggactcttggttgagtctc

SEQ ID NO: 5961 - DNA, 201 bp, Homo sapiens
cctacctggtcaattcccgttacactgtaggcatgacccttaataagaccaaacggcgtccgggcctcagattctgcagcacttctggtctaaaacatggraagagcagagtcacacccaccgtctaagtcaagcctcccctgctggatcagacccagctacatgcctggcccggtcacaacctccagccccttctgctgc

SEQ ID NO: 5962 - DNA, 201 bp, Homo sapiens
tcaattcccgttacactgtaggcatgacccttaataagaccaaacggcgtccgggcctcagattctgcagcacttctggtctaaaacatggaaagagcagmgtcacacccaccgtctaagtcaagcctcccctgctggatcagacccagctacatgcctggcccggtcacaacctccagccccttctgctgccccaggtgc

SEQ ID NO: 5963 - DNA, 201 bp, Homo sapiens
ccaccatgcttggttaaaacttgtgttttatttatttatttttattttattttattttattttttatttatttatttatttatttatttatttatttatttatttattatactttaagttttagggtacatgtgcacaacgtgcaggtttgttacatatgtatacctgtgccatgttggtgtgctgcacccattaactagt

SEQ ID NO: 5964 - DNA, 201 bp, Homo sapiens
ctgtatccgagccccgaggtgagtctgcacctttgagggagctcccaggcagctgaggagagggctcagaagaggaagccactgtttcactcctcaaagckggggtccccagacccagtgggactgctgcccttggtgtgaatgcagcgtgagagtgtgaatctgtggtgcaggggcgagtgtgcgggggactctcaggcg

SEQ ID NO: 5965 - DNA, 201 bp, Homo sapiens
ggcagcgtagattggtgcttcagctcgtggatgacagagtcagggggcctggttctgagtcctagttctgtctcttcccagctgtgtgacgttgaacaagycactggacctctctgttcctctgcaaaacagcatgaaccaattcattaactacttctccaggatgcagtaggtcccagggactatcctaggaatgtgggc

SEQ ID NO: 5966 - DNA, 201 bp, Homo sapiens
gttgctcaagggtcaactgtgtgatgtagatagatagatagatagatagatagatagatagatagatagatagatagatagatagataggtgtgtgtgtgtttaattgtatgtatatatatttggttccctagtgattctatttctctgaagaatcctgactaacacaggactgaaggagaattgggaaagaaaggaaatt

SEQ ID NO: 5967 - DNA, 201 bp, Homo sapiens
tgttgctcaagggtcaactgtgtgatgtagatagatagatagatagatagatagatagatagatagatagatagatagatagatagataggtgtgtgtgtgtttaattgtatgtatatatatttggttccctagtgattctatttctctgaagaatcctgactaacacaggactgaaggagaattgggaaagaaaggaaat

SEQ ID NO: 5968 - DNA, 201 bp, Homo sapiens
gttcaagcctgtgttgctcaagggtcaactgtgtgatgtagatagatagatagatagatagatagatagatagatagatagatagatagatagatagataggtgtgtgtgtgtttaattgtatgtatatatatttggttccctagtgattctatttctctgaagaatcctgactaacacaggactgaaggagaattgggaa

SEQ ID NO: 5969 - DNA, 201 bp, Homo sapiens; identical to SEQ ID NO: 600

SEQ ID NO: 5970 - DNA, 201 bp, Homo sapiens
agttcaagcctgtgttgctcaagggtcaactgtgtgatgtagatagatagatagatagatagatagatagatagatagatagatagatagatagatagataggtgtgtgtgtgtttaattgtatgtatatatatttggttccctagtgattctatttctctgaagaatcctgactaacacaggactgaaggagaattggga

SEQ ID NO: 5971 - DNA, 201 bp, Homo sapiens; identical to SEQ ID NO: 601

SEQ ID NO: 5972 - DNA, 201 bp, Homo sapiens
taagttcaagcctgtgttgctcaagggtcaactgtgtgatgtagatagatagatagatagatagatagatagatagatagatagatagatagatagatagataggtgtgtgtgtgtttaattgtatgtatatatatttggttccctagtgattctatttctctgaagaatcctgactaacacaggactgaaggagaattgg

SEQ ID NO: 5973 - DNA, 201 bp, Homo sapiens; identical to SEQ ID NO: 602

SEQ ID NO: 5974 - DNA, 201 bp, Homo sapiens
tataagttcaagcctgtgttgctcaagggtcaactgtgtgatgtagatagatagatagatagatagatagatagatagatagatagatagatagatagatagataggtgtgtgtgtgtttaattgtatgtatatatatttggttccctagtgattctatttctctgaagaatcctgactaacacaggactgaaggagaatt

SEQ ID NO: 5975 - DNA, 201 bp, Homo sapiens
atcctaagtggctcacacccagataattggcctgacaggctggccatgcggtgccttcaaccctactcacatgtcaccagcagcacagcgaagtcagggartcgggatggcgcctgcccctcccatcacccatggaggctgcatgagtggaagacaaattttattccagccttggctctcagtcactttcttgatttctac

SEQ ID NO: 5976 - DNA, 201 bp, Homo sapiens
gaaatgatagtgttggagtgctaaggggaatgattcagaagaaggggggaattcatacgtaaggggagagaagagagttgcaggaggtacatcctagagcyggtgaagaatggaaagaggctacacagggcttcagagtcaggattccaggaggaagggctccacgcacagagtgcatgatttaacaccacccatcacctt

SEQ ID NO: 5977 - DNA, 201 bp, Homo sapiens
acagggaatattgagacaatgaaagatctggttagatggcacttaaaggtcagttaataaccacctttcaccctttgcaaaatgatatttcagggtatgcrgaagcgagcaccccagtctgagatggctcctgccggtgtgagcctgagggccaccatcctctgcctcctggcctgggctggcctggctgcaggtgaccgg

SEQ ID NO: 5978 - DNA, 201 bp, Homo sapiens
atataagttcaagcctgtgttgctcaagggtcaactgtgtgatgtagatagatagatagatagatagatagatagatagatagatagatagatagatagatagataggtgtgtgtgtgtttaattgtatgtatatatatttggttccctagtgattctatttctctgaagaatcctgactaacacaggactgaaggagaat

SEQ ID NO: 5979 - DNA, 201 bp, Homo sapiens
gtggctcacacccagataattggcctgacaggctggccatgcggtgccttcaaccctactcacatgtcaccagcagcacagcgaagtcagggagtcgggayggcgcctgcccctcccatcacccatggaggctgcatgagtggaagacaaattttattccagccttggctctcagtcactttcttgatttctacctctgtg

SEQ ID NO: 5980 - DNA, 201 bp, Homo sapiens
gaggctacacagggcttcagagtcaggattccaggaggaagggctccacgcacagagtgcatgatttaacaccacccatcaccttgggcaggctcagcccwggtgttggggctgctccttcaagaggggcagggcaatggatcactcacatggacgctcttctttgtggagcttcctgctgtgaatttccgagtttcctct

SEQ ID NO: 5981 - DNA, 201 bp, Homo sapiens; identical to SEQ ID NO: 604

SEQ ID NO: 5982 - DNA, 201 bp, Homo sapiens
catataagttcaagcctgtgttgctcaagggtcaactgtgtgatgtagatagatagatagatagatagatagatagatagatagatagatagatagatagatagataggtgtgtgtgtgtttaattgtatgtatatatatttggttccctagtgattctatttctctgaagaatcctgactaacacaggactgaaggagaa

SEQ ID NO: 5983 - DNA, 201 bp, Homo sapiens
caacccatctcagctcatctctgccaatgcttcttggttctcagaaggcggcagccaaggccagagcagaggatggtgggacgagagcctccatggggacmatgacagcctggaaagcacaggcctgtgtgccctgccctcacgctggggtctggctaatacagcagcggctgcaccatgtctggtgacctggtagctgtg

SEQ ID NO: 5984 - DNA, 201 bp, Homo sapiens; identical to SEQ ID NO: 605

SEQ ID NO: 5985 - DNA, 201 bp, Homo sapiens
caagggtgcttctgggtgacatgaaatttaagttgattgagtaaaacagattgccctccccagtgtaggtgggcctcatctcatctgtgaagacctgaccwgaacaaaaaggcagaggaagggggaattcactctctcttcctgggtgcctgagctgggacatccgtctctcctgccctcagactgggacttttaccattg

SEQ ID NO: 5986 - DNA, 201 bp, Homo sapiens
caagttctagactagcttcagatttccccagaagctcaggggccatggatgtggcaggaaagggcttcaggagcccaacaagcagcggacgagcaacagcytcaggcaggccctgccacgcacccacacaaacatccctggttcttagtcacctggtccacttcccaagggaccagagctggaggagctgtggggacacac

SEQ ID NO: 5987 - DNA, 201 bp, Homo sapiens
gtgccggtcaagaaggaacagctcagagggccactgggctgagtggccctcacctccacctattttctgggcacctccctgttagactgagatgggacacrccctgatggaaaacagcagagagagccctctgcccactctgcactcctgcagactcagaggcagctctggggcctggcacattccactcagaggcggcac

SEQ ID NO: 5988 - DNA, 201 bp, Homo sapiens
gcagaaataagcaattggcttgcttaaatccctttcatgttaggaggggcattactgaaaaccctctactacaaagattgttgatttttttttttttttttattgagacagggtcttgttctgtcacccaggctgcagtgtagtggtgccatcattgctcactgtagccttgaactcctggcctcaagcgatcctcccacc

SEQ ID NO: 5989 - DNA, 201 bp, Homo sapiens
catggtagtttctctgtgtatcctgcagtgacccacctcctacccgttccttctggttcagttggcctgagagcgatcctaaggtaacctctaagagtaaraagaaaagggttgaaagaggagggtaggcacagtggttttgggagccatttatttacagctttgctgtgtcatcctgagcatcttgctgcatcagtgatt

SEQ ID NO: 5990 - DNA, 201 bp, Homo sapiens
ccatttgcaatttgtacagcataaacacagaacagcacatctttcaatgcctgcatcctgaaggcattttgtttgtgtctttcaatctggctgtgctattsttggtgtttaacagtctccccagctacactggaaacttccagaaggcacttttcacttgcttgtgtgttttccccagtgtctattagaggcctttgcaca

SEQ ID NO: 5991 - DNA, 201 bp, Homo sapiens
ttgtgtctttcaatctggctgtgctattgttggtgtttaacagtctccccagctacactggaaacttccagaaggcacttttcacttgcttgtgtgttttycccagtgtctattagaggcctttgcacagggtaggctctttggagcagctgaaggtcacacatcccatgagcgggcagcagggtcagaagtggcccccgt

SEQ ID NO: 5992 - DNA, 201 bp, Homo sapiens
tttacttctgagtcaagatttttagaaagtgagagtgtctttttcaatgttttattttattcttctcttctgctggctatgtgcagatgatgacgtgaccytagaagatggcagagccacacaatagaaggcgtttgggttcctgaatcactgtatgaacagagccacccacagaatatgaacatcctccctggactgtca

SEQ ID NO: 5993 - DNA, 201 bp, Homo sapiens
gcctgcctggcctctgggagagccctcactgtgtggcctggagccttcctaactgtgcatcatctccccaggaccatccacctgaccatgccccaactggygctgcaaggatcttatgacctgcaggacctgctcgcccaggctgagctgcccgccattctgcacaccgagctgaacctgcaaaaattgagcaatgaccgc

SEQ ID NO: 5994 - DNA, 201 bp, Homo sapiens
tggtcagtgaccatcagagagaatcctatagttacatgctaggtaatatttcagggattccgacactccaaatacacacacacacacaaacacacacgcayttatgcatatgcacactgcttactggagttactcacaactacagataaagcttttcaccatatcactgggttataaacatcaccatgggaggtaacacat

SEQ ID NO: 5995 - DNA, 201 bp, Homo sapiens
aagaaattagtccatatgaatctaaaaatgggtttctctctagacttggatctccctagaggcaggagccaagtcttaggcatcttcagcatctagcagartgaatggtaaagagtagtcctcaaaggtgctcatggaactattactgaactttcttcatcctagcatcccatgcacagatgaatgataagaaaataagca

SEQ ID NO: 5996 - DNA, 201 bp, Homo sapiens
ctagcctggccaacacggtgaaaccccatctctactaaagatacaaaatgagtcgggcgtggtggcgcatgcctgtactctcagctgcttgggaggctgargcaggagtatcacttgaacctgggaggcagaggttgcagtgagacgagatcgcaccactgcactccagcctgggcaataagaacaaaactccgtctcaaa

SEQ ID NO: 5997 - DNA, 201 bp, Homo sapiens
ctgaactttcttcatcctagcatcccatgcacagatgaatgataagaaaataagcacatgttggggatttaaacacaacaataaacaaaaacagcttttaygtcttctagacccaatattctccttatttcaggtgtctgtgaggattcctgctgttcacctcaatcacccttgagcctgtgtgccctcaggctctgcctg

SEQ ID NO: 5998 - DNA, 201 bp, Homo sapiens
gccaggctggtctcaaactcctgacttcaggtgatcctcctgcctcggcctcccaaagtgctgggattacaggcatgagccaccgtgcctggcctaaagaycaccttttgaagctgcatccctaactcctgcctctcatcacagatgtaaattcctgattccactggtggggttggggagggatgggtgtctctgtgctta

SEQ ID NO: 5999 - DNA, 201 bp, Homo sapiens
caaggaaaacttggaacttcaaggatccatcatgggatgcaggacagtaggctccacccctcttcctgctttccagtaaatgatgttcagggctcacatgyctcttccaaggcatgatgtggggttgcagttctgatcccagcagagaacaaggctcctgtgaaacaattagttttggctcagaggcaaaaaatggaaacc

SEQ ID NO: 6000 - DNA, 201 bp, Homo sapiens
tgtgtgccctcaggctctgcctgggagcagggacaagggccaatgcatttgagaagggttttagaggagagagagtgaaagtaaaagacttctagttatcractaaccagaaactgtagcagtcagaatgttttatcctcatgcatttggcataaattatattttggatgtgtaaaaattcaagtaacatcaactcttcgg

SEQ ID NO: 6001 - DNA, 201 bp, Homo sapiens
catatctgttggagaccattcagcctattgagtggtaggcactggggagggggtgcattttaaaagattacaaagttgaatcagaaccaaaaaaaccaccwttttttttagacggagtctcactctgtggcacaggctggagtgcaatggcatgatctcggctcactgcaacctctgcctcctgggttttaagtgattctc

SEQ ID NO: 6002 - DNA, 201 bp, Homo sapiens
aaaaaagaaagaacaggctgagaatggtggcttatgcctgtaatcccaacactttgggaagttgaggtaggaggatcacttgagaccagtagttcaagatmagcctgggcaacatagcaagaccctatctctacaaaaaataaaaataaaaaaattagccagatatggtagcatgcacctgtagtcctagttactctggag

SEQ ID NO: 6003 - DNA, 201 bp, Homo sapiens
cgactaaccagaaactgtagcagtcagaatgttttatcctcatgcatttggcataaattatattttggatgtgtaaaaattcaagtaacatcaactcttcrgagtccaagatgtggcttgtggctcaccattaaaggggctcatttaatttgaaaggttcagggcaggtgagttccttgtaggggggagaggaagcaaaat

SEQ ID NO: 6004 - DNA, 201 bp, Homo sapiens
tcacttccacattttcagttatctttataacaatgccccactcttctgtaccaattttctgtattaggctgttcttgtactgctataaagaaatacctaasactaatttacaaagaaaagaggttcaattggctttacaaagaagcatggtgtattccctagaagttaacttaactccttgacttctagggagacctagga

SEQ ID NO: 6005 - DNA, 201 bp, Homo sapiens
atatacgatgaacaagtctagagatccagcgtacaacatgaggactatacttaaaaatgtcacattgcacttgggatttttgctaaaagagtagactttaygtgtccttgccacctaaatgagtaactgtgagatgatggatatgttaattttcttgactaccataatcattttactatcttcatatcaaaatatcatgct

SEQ ID NO: 6006 - DNA, 201 bp, Homo sapiens
taggggggagaggaagcaaaatcaagcaaaccaagatgatgagaggtttctgttgttacgtggaatacgtagaagatctaacctagaaacatcacatgccygcttgagtgagcaatctgcaagtcatctatggatggtgaaggaggacaaaggagccaacacaaatagctaacattctaaagaatcccaaagagtccaacg

SEQ ID NO: 6007 - DNA, 201 bp, Homo sapiens
ctcgaaaaagctttttctttctctgctatatagccaggctgcaaattttccaaatttttatgccctgcttcccttttaaatgtatatattccagctttaastcatatctttgctcccatatctgagtataggttgttagaagcagccaggtcacatcctgaatgctttgctgcttagacatttcttcttccagatacccta

SEQ ID NO: 6008 - DNA, 201 bp, Homo sapiens
aacatggatgactggaagacattatgctaaatgaaacaaggcagatacagaaaggaaaatactgcatgacctcatttatatgtggaatcttttttttttttaaagtgaatatacagagatagagaatacaacagtggttaccaggagttgaggaggagagcagggaggagatgtaggtcaaatgatacaaagcagcagata

SEQ ID NO: 6009 - DNA, 201 bp, Homo sapiens
ggggttggggtgccaaccctcctgcattgtcaaaaaatcttgtattccctaaagctgaactccgaatagcctaccattgaccagaagtcttatcgataacrtaaagaaccaattaacatgttttataattatttatattatatactgtattcttacaataaataagccagagaaaagaaatgttatcaagaaaatcatagg

SEQ ID NO: 6010 - DNA, 201 bp, Homo sapiens
agtaccccagtggggactctgtgcgagaccttgaacctcacatttccccatctgcatagccctagtagaagttctctgtgagggctctgtccctgcagcargcttttgcctaggcatgcaggcttttccatacatcctctgaaatctaggtggaggctgccaagcctcattcagtcttgcactctgtgtgcctgcaggctt

SEQ ID NO: 6011 - DNA, 201 bp, Homo sapiens
caacatggatgactggaagacattatgctaaatgaaacaaggcagatacagaaaggaaaatactgcatgacctcatttatatgtggaatcttttttttttttaaagtgaatatacagagatagagaatacaacagtggttaccaggagttgaggaggagagcagggaggagatgtaggtcaaatgatacaaagcagcagat

SEQ ID NO: 6012 - DNA, 201 bp, Homo sapiens
tgtcctacatccagggaacactggtacaaagggtgggatcccaaggccttgggaagctctgtccctgtgactttggctgctgtcatgggttgttgagtacctgtggcttttccaggctcaaggtgcaagctgccagtggatccaccattcttgggtctggaggatgatggccgccttcccacagttccactaggcagtacc

SEQ ID NO: 6013 - DNA, 201 bp, Homo sapiens
aaaagccctcaacagatttctgtttgtctcattggtcagaactatcttacttgaccactaatggttacagaggagagcagtgatgcaggatttttctcggyccctttgccagtcagggacctcttgctggtgatgctggaggccttgcttggggcacactacctgtccctggaggtgcctcacccaatcggcccccctggg

SEQ ID NO: 6014 - DNA, 201 bp, Homo sapiens
gtccttctcacactgcaaaatataattatgccttcccaataacccccaaagtcttaagtcattccagcattaactcaaaattccaaagtccaaagtctcayctgagataaggcaagtcccatcacctatgagcctgtcaaatcaaaatcaagttccaagatatacaaattccattttatacttccaaaatacaatgggagt

SEQ ID NO: 6015 - DNA, 201 bp, Homo sapiens
attctttgcttgctggcttttggtccttacacttgttgcctcatggttgcaaaatggctgttttgtctccagacattacatcaacatttgaaggaggaagmagggttagtgtctgagccactgactctgctgataaaaggacagagaaagctctcccaaaagccctcaacagatttctgtttgtctcattggtcagaacta

SEQ ID NO: 6016 - DNA, 201 bp, Homo sapiens
ctcccaaagtgctgggattacaggcgtgagccaccgcacccggcctatgattccttttatataaaatattcagaatatgtaaatagaatctatagagaaartagatgagtggttgcctggggctgggggaaatgggtacagggttaacactgttaatgggtaaagggtttcttgttggagtgatgaaacattctaacatta

SEQ ID NO: 6017 - DNA, 201 bp, Homo sapiens
ttctatcattctttgcttgctggcttttggtccttacacttgttgcctcatggttgcaaaatggctgttttgtctccagacattacatcaacatttgaagraggaagaagggttagtgtctgagccactgactctgctgataaaaggacagagaaagctctcccaaaagccctcaacagatttctgtttgtctcattggtc

SEQ ID NO: 6018 - DNA, 201 bp, Homo sapiens
ccgaaaagtgaaaggtataccagcttgctcatttcatggtggcattgtttacattaaaaaaggttggaaagcacttagtgccctctgttgggggaatggtraagaaaattatggtccagctaatcatgaagtggaacagtgtacagccataaaacggaacaaggaaactctgcatacactgatgtgggaaggtccctggga

SEQ ID NO: 6019 - DNA, 201 bp, Homo sapiens
atgctttgcttcctttttaaacataagttcctatttcagatcatttctctcaagttcaaagttccccagatcctaaaggcaggggtaaaatgctgccagtytctttgctaaagcatagcaagagtgacatttgctccagttcccaataagttccttatttccatctgagaccacttcagactgaacttcattgtcaacatc

SEQ ID NO: 6020 - DNA, 201 bp, Homo sapiens
catttcctagaagatgagaactagatcttcacccagaccttgcttccctatccatcccctcccaaggtcattggtaagcctgacatcaggtgagggtctcmctttcttcatccagggacttgtccatccctggaacactcctagtttcacccctgtcctagtgggcactcattcatgaaccataacaaatcttttcttcag

SEQ ID NO: 6021 - DNA, 201 bp, Homo sapiens
cattacttatgcaaatttgtgcagctggcttgaatttctcccaagaaaatggttcttttattttctaccccatcatcaggatgcaaatattcaaaactttyatgctttgcttcctttttaaacataagttcctatttcagatcatttctctcaagttcaaagttccccagatcctaaaggcaggggtaaaatgctgccagt

SEQ ID NO: 6022 - DNA, 201 bp, Homo sapiens
aaatcttctaaaattgactgtggtggtggttgcacaactctaaatatgctaaaaatcattgaattgtacactttaaataggtgaattgtatgtacagtatmtgaattacatctcaaagctatcttaaaaagataaataagctctgtgcctcattttgcctcctacagtgtttcgtaaagttgtagtactaaaagggagatt

SEQ ID NO: 6023 - DNA, 201 bp, Homo sapiens
gaatgcatgtgcgcacacatgtgtatacatgtgcatacaggcaggcatgacaggtatgtgcactgtttgtggtttatttatacattgcatgtgtgaaagcrtgtgtttgctcacatgtgtgcatgtgtgtgcatgtatgtgtgcatgcatgtgtttgcaagtgcttctacacacgtgtgtgtttgagcacatgtatgcatg

SEQ ID NO: 6024 - DNA, 201 bp, Homo sapiens
ttgagccctgagagggttgggtcctgccgagcctcacctgcaaacccagagccctgattttttcccagcccttagatgctcactacaaagactagtgtagagactcctgtcgggaggctgcctgagctggggaagctgtcactcacttggcgtaggctttttccagcaaggcgctccagaactcgttgtggtcggcagagt

SEQ ID NO: 6025 - DNA, 201 bp, Homo sapiens
tacctggaaatggaatatcccggcataaccagggccaaagctttggtcctgggggatgactctggccagtgctttttgattaagcgtaagggaggcgatgrcggctaatagccagcagtctcctgcaaaatggaagccataaatcacaattttcattgctatttcacagcaaataggaaaactctgtgtcagaaggggatg

SEQ ID NO: 6026 - DNA, 201 bp, Homo sapiens
aagtgctgtcggcacagccagaattcccctccgcttgccttcccagctcttccaaaggccagattcatggcccagggagaaaaagggtcatgaatgtagcsactgctcccaaagatgggcacatctaggctacgacaggaaaaccacctccaaccccgcttgagccctgagagggttgggtcctgccgagcctcacctgca

SEQ ID NO: 6027 - DNA, 201 bp, Homo sapiens
tctgcccgtctatcataaacagctgttgccttcttggcactgttataggacatgcttacttgggtttcagacatatggctgcctgatgcatcagctctgtraattccagcaactccctttccagaggaccaagactgcatacatcagtgtcagcacgggctgggcgagcagacatttcatagctgccacccaagtggttcg

SEQ ID NO: 6028 - DNA, 201 bp, Homo sapiens
acattttatcatatacgattatttatcgatatgtcatatacgactttttaaaaataaaaaagaagcatcccgtaggacggacaattgatgtctctatatcmacgtgcgtaatagcccagatgtttgagccatgccagtgtccgagggaagtgtgaagcactaagtgctgtcggcacagccagaattcccctccgcttgcct

SEQ ID NO: 6029 - DNA, 201 bp, Homo sapiens
ttacttgggtttcagacatatggctgcctgatgcatcagctctgtgaattccagcaactccctttccagaggaccaagactgcatacatcagtgtcagcaygggctgggcgagcagacatttcatagctgccacccaagtggttcggcagtacttgggagggtggttagaaatctccctgcagccccaacccagactcagc

SEQ ID NO: 6030 - DNA, 201 bp, Homo sapiens
agctgaaggtcacacatcccatgagcgggcagcagggtcagaagtggcccccgtgttgcctaagcaagactctcccctgccctctgccctctgcacctccrgcctgcatgtccctgtggcctcttgggggtacatctcccggggctgggtcagaaggcctgggtggttggcctcaggctgtcacacacctagggagatgct

SEQ ID NO: 6031 - DNA, 201 bp, Homo sapiens
tgccgcctgtgtaagcagatatctgggaggatccatttatccgaatcacctttatccagattcacttgttttcagtagacaacatcaacgtcatcagaacmtaaaagcccatcacactcagcttggcagtttctgagttcacatttctggaaagcaccgtatgtcactgggcttgggacattgtaatatggccctttctgg

SEQ ID NO: 6032 - DNA, 201 bp, Homo sapiens
ggatgtacttaatgctactcaactgcacacttaaaaatggtaaaatttatgtcatatacattttatcatatacgattatttatcgatatgtcatatacgaytttttaaaaataaaaaagaagcatcccgtaggacggacaattgatgtctctatatcaacgtgcgtaatagcccagatgtttgagccatgccagtgtccga

SEQ ID NO: 6033 - DNA, 201 bp, Homo sapiens
gggggtacatctcccggggctgggtcagaaggcctgggtggttggcctcaggctgtcacacacctagggagatgctcccgtttctgggaaccttggccccractcctgcaaacttcggtaaatgtgtaactcgaccctgcaccggctcactctgttcagcagtgaaactctgcatcgatcactaagacttcctggaagagg

SEQ ID NO: 6034 - DNA, 201 bp, Homo sapiens
gcctgtgtaagcagatatctgggaggatccatttatccgaatcacctttatccagattcacttgttttcagtagacaacatcaacgtcatcagaacctaaragcccatcacactcagcttggcagtttctgagttcacatttctggaaagcaccgtatgtcactgggcttgggacattgtaatatggccctttctggctgt

SEQ ID NO: 6035 - DNA, 201 bp, Homo sapiens
ggcctcaggctgtcacacacctagggagatgctcccgtttctgggaaccttggccccgactcctgcaaacttcggtaaatgtgtaactcgaccctgcaccrgctcactctgttcagcagtgaaactctgcatcgatcactaagacttcctggaagaggtcccagcgtgagtgtcgcttctggcatctgtccttctggccag

SEQ ID NO: 6036 - DNA, 201 bp, Homo sapiens
tcagaacctaaaagcccatcacactcagcttggcagtttctgagttcacatttctggaaagcaccgtatgtcactgggcttgggacattgtaatatggccytttctggctgtttgacacaggcaagagagactcgccagggctgaacatcgggaaagctaattccgaatcgccctggttctggctttctgagaggtgtcac

SEQ ID NO: 6037 - DNA, 201 bp, Homo sapiens
agttcacatttctggaaagcaccgtatgtcactgggcttgggacattgtaatatggccctttctggctgtttgacacaggcaagagagactcgccagggcygaacatcgggaaagctaattccgaatcgccctggttctggctttctgagaggtgtcaccagcagagtacaagccacccccagccttagctggagcacaga

SEQ ID NO: 6038 - DNA, 201 bp, Homo sapiens
tttttttttttgatagagatgtggtcttgctatgttgcccaggctagtctaaaactcctgggctcaagagatcttcccacctccccctcccaaagcgctgygattacaggtgtgagcactctacatgaccagatgttctagttcttattgtgggtggcaacagatcacggctgttcattttcttgttattctttataacat

SEQ ID NO: 6039 - DNA, 201 bp, Homo sapiens
ctttctctgtctcctccacactcaggcctgtggcgaactccctttgtttctcttcttcttgttcatcttgaagggcagcaggaggtgaacatagtgcctgsgtggctctgggatgccatggggcaaaaccccaaggacaaatgctcagaagcttcacatgggtgcagggagatgacctctaggaccccacccggtccaggc

SEQ ID NO: 6040 - DNA, 201 bp, Homo sapiens
agcctgtggtctggccaagtgatgtaaccctcctctccagcctgtgcacaggcagcctgggaacagctccatccccacccctcagctataaatagggcatygtgacccggccaggggaagaagctgccgttgttctgggtactacagcagaaggtaagccgggggccccctcagctccttctcggccttgtctctctcaga

SEQ ID NO: 6041 - DNA, 201 bp, Homo sapiens
aatgcacctgccctcatgccgggccccagagaggtaaacccactggcccagggctccctcttacctggaaatggaatatcccggcataaccagggccaaakctttggtcctgggggatgactctggccagtgctttttgattaagcgtaagggaggcgatggcggctaatagccagcagtctcctgcaaaatggaagccat

SEQ ID NO: 6042 - DNA, 201 bp, Homo sapiens
ccctcctctccagcctgtgcacaggcagcctgggaacagctccatccccacccctcagctataaatagggcatcgtgacccggccaggggaagaagctgcygttgttctgggtactacagcagaaggtaagccgggggccccctcagctccttctcggccttgtctctctcagatgtaactgagctgtgggctaggaggaa

SEQ ID NO: 6043 - DNA, 201 bp, Homo sapiens
aagtgatttctacatgaaatgaacctgacctggcatctggggccttcctggcctctcttttctgtgctgttctttctctgtctcctccacactcaggcctstggcgaactccctttgtttctcttcttcttgttcatcttgaagggcagcaggaggtgaacatagtgcctgggtggctctgggatgccatggggcaaaacc

SEQ ID NO: 6044 - DNA, 201 bp, Homo sapiens
actaatacatcatgctctgctgactccatatgtggctggtttcctggatccgattctgactgatggtatctgttctcacactgctaataaagacataccagagactgggtaatttataaagaaaaagaggtttaatggacttatgtgttccacgtggctggggaggcctcacaatcatggtggaaggtgaaggaggagcaa

SEQ ID NO: 6045 - DNA, 201 bp, Homo sapiens
ccatattggccaggctggtctcaaaactcctgacctgaggtgatccgctcaccttggcctcccaaagtgctgggattacaggtgtgagccacaccgcaccyggccaataatacattttagttcaagattagtgagagctaaggagaaatgagaatgctgattgttctgaaattcagtctccacatgaaaaccagctgaggg

SEQ ID NO: 6046 - DNA, 201 bp, Homo sapiens
ctataaatagggcatcgtgacccggccaggggaagaagctgccgttgttctgggtactacagcagaaggtaagccgggggccccctcagctccttctcggycttgtctctctcagatgtaactgagctgtgggctaggaggaaaaggccgggaggaggcacggtgatgactgaaaaacctctcccctctcataagaccagt

SEQ ID NO: 6047 - DNA, 201 bp, Homo sapiens
gcctgggtgcacaggtttggggccctggggaagtggttttaatgattaaaccacaaatctctgaagaggggaaacggcagaagtggaatgggggtggtccyggaaagttcacaaaaacagaactctgttcccttggatgggatcccaaagtggcaagaagacccccaagtcccttcaaaagctccccacccccaccactag

SEQ ID NO: 6048 - DNA, 201 bp, Homo sapiens
ctgtgctgttgtagcacaaaagcatcctggactattcataaactaatgagcatggctgtgttgcaataaaacttgtttacacaaacagatggtggtccagyccagatttggcccatgggctgtagtttgccaatccttggaacagataaatgttcatgctattatttgtttagtaagagtattctttagttgccaggttga

SEQ ID NO: 6049 - DNA, 201 bp, Homo sapiens
aatacagtagatgtttctaaagctaatttttaaatgaaaggacaatatataagtctatagctaactcctctgtcatgcacaatctgagttaacagaatagwttaggggttagcaagctttttctataaagggccatgtaataaatatttcaggctttgcagttcatatgttctctgttgcaacaactcaactgtgctgttg

SEQ ID NO: 6050 - DNA, 201 bp, Homo sapiens
acaggaatggaataataaaattatacattaaataagtgttgtaaatacagtagatgtttctaaagctaatttttaaatgaaaggacaatatataagtctakagctaactcctctgtcatgcacaatctgagttaacagaatagattaggggttagcaagctttttctataaagggccatgtaataaatatttcaggctttg

SEQ ID NO: 6051 - DNA, 201 bp, Homo sapiens
ggtggagttggctttggaggctaaaaaacagccaaagaaacttgcacaaaatgatccacaaaaaagaaacatgacaaaaatagcaggaaagaagccaggascctgtgtgcccagccccatgtcaccctcctgaggcggtgtgcacaagctgcgtcctgtagcgtgaggaacattttctcatgaaggctcttttagaaggtg

SEQ ID NO: 6052 - DNA, 201 bp, Homo sapiens
atatagggtaggtatcaataattactcataaaagatgagaattattggttccctagaagtcattttcccattctaggcatggtgccttttaggggacatarctctgactgaactttatatgtcctccttagttagttacttagggtcttgatttcttctggaggctgtatttgtcatttaaattttgctagatattatgca

SEQ ID NO: 6053 - DNA, 201 bp, Homo sapiens
ttatatagggtaggtatcaataattactcataaaagatgagaattattggttccctagaagtcattttcccattctaggcatggtgccttttaggggacakaactctgactgaactttatatgtcctccttagttagttacttagggtcttgatttcttctggaggctgtatttgtcatttaaattttgctagatattatg

SEQ ID NO: 6054 - DNA, 201 bp, Homo sapiens
tcttgtctagtgagaggtgagggggttaaaatatagggtatcctggctgggtaccctgcctcacgcctgaaatcccagcagtttgggaggccgaggtggayggatcacttgagatcaggagtttgaggctagcctggccaacatggcaaaaacccatctctactaaaaatataaaaaacaaaacaaaacaaaaaaatagcc

SEQ ID NO: 6055 - DNA, 201 bp, Homo sapiens
gcggactttattcaatggccaaagaatggagaagcaggagcatggccgcaagtcaacttcttgtctagtgagaggtgagggggttaaaatatagggtatcytggctgggtaccctgcctcacgcctgaaatcccagcagtttgggaggccgaggtggacggatcacttgagatcaggagtttgaggctagcctggccaaca

SEQ ID NO: 6056 - DNA, 201 bp, Homo sapiens
ggcacattccactcagaggcggcacctctgcttagtgcgctcagggggcctcatgggagagagaggattgcttcagaaggaaaaggagcaagaaacccaastggtccaggaggtggctttacggagaagtgcacggtgtggtcttgagtcccatctcctgcatcagagaatggcagagttttgtagtcggaagggaggttg

SEQ ID NO: 6057 - DNA, 201 bp, Homo sapiens
gggtgagagagcaagaccctgtctccaaaaaaaagtaaataataataaaaaaaagagtggggctattggttagtggaaggaagaccggagaggtaaagctsccctctcatctcatgatatcaagagtacctgccgtccacatgccttaccacagctgatgctggccttgatcacctggctaaggtagtgttagtcaggtgt

SEQ ID NO: 6058 - DNA, 201 bp, Homo sapiens
caaaactttgaaaaacaaaggagccagtagaatgatttcctattggatagcaatggaggactacggggtcgaggggaagggaggcagaggaagagggggasaggtgggcagcggcagggaggatctcctggagaaggaccacctgaatgtaaaccttttgaaaagtctacattgtatctagaatatggcatacatggggga

SEQ ID NO: 6059 - DNA, 201 bp, Homo sapiens
atttgagaccagcctgagcaatatagcaaaactctgtctctacaaacaaacaaataaacaaacaaacaacaaaaaataatgctttctgtacataaaccagsacataagtaatataatttcatgggatgatagtcactatagagaagataggggtggtgcagtggaataaggtgagatagggttggtgggcagggctcttct

SEQ ID NO: 6060 - DNA, 201 bp, Homo sapiens
cagctagaaataagtcagggtccacacaagcttgcagtggtttgttctctaggctgatttcactggtattttttaaaagaaagtctctcgctctctcactytctctgtctttcatagatagaacaaaggtaaacccagcccagttggattaagtcctaaaatgcaggacccaatttgagtgacttgaggtgcactcaggtt

SEQ ID NO: 6061 - DNA, 201 bp, Homo sapiens
acctggtcaattcccgttacactgtaggcatgacccttaataagaccaaacggcgtccgggcctcagattctgcagcacttctggtctaaaacatggaaaragcagagtcacacccaccgtctaagtcaagcctcccctgctggatcagacccagctacatgcctggcccggtcacaacctccagccccttctgctgcccc

SEQ ID NO: 6062 - DNA, 201 bp, Homo sapiens
attgcttgaggcccagaatttgagaccagcctgagcaatatagcaaaactctgtctctacaaacaaacaaataaacaaacaaacaacaaaaaataatgctytctgtacataaaccagcacataagtaatataatttcatgggatgatagtcactatagagaagataggggtggtgcagtggaataaggtgagatagggttg

SEQ ID NO: 6063 - DNA, 201 bp, Homo sapiens
ggtgtaggagagcccgaccaacgctgctgggtgtcactttcctctgtaaactccggggctgtgagccccacatcacaggcatgtctgactctagaggaacrgaggtgcaggggcttgaggccactggactccattcagagggagtgaggaagcagaggccgaagcagtgttgttcccccagccccgtgcctcttgggtcct

SEQ ID NO: 6064 - DNA, 201 bp, Homo sapiens
acaacctggaggagtgacagacaccaggggcgcctgcccagggagagctatgtgtggcattagtgtctaaaatactcaagaaagcttggccaggagaattkctgaagaacacggggtgtttttagatgcgccaaaaccccaggcccggcagaagtaaggacctcccaaatgctggcctgtcctctgccaggtctcacacgt

SEQ ID NO: 6065 - DNA, 201 bp, Homo sapiens
gcgcaggagtttgcaggtggctctgagctgagcccagaaggacaatgcaaaccaggaccatgtcagtgggcctcaatagagtcccaggaatagcctgcccsgctcagcagtagggttcagggtgggccatttaacttctcacggctgcatcctcatctgtcaccagcttagacattctgggcttgttgcagaatgtgcctg

SEQ ID NO: 6066 - DNA, 201 bp, Homo sapiens
aggaatagcctgccccgctcagcagtagggttcagggtgggccatttaacttctcacggctgcatcctcatctgtcaccagcttagacattctgggcttgytgcagaatgtgcctgcccgaagggaaacccaggagtcccccaagccctccctgtcttgattgcccagcccctgccaggggatagccctggcaagcaatgc

SEQ ID NO: 6067 - DNA, 201 bp, Homo sapiens
gtccctgagcagagggtctggattggccatacctcatttatattgagatgaatgaactccttgttctttgtactgagagcctggaacacccctgataggaragaagggggaaaggcatccttttaaagacaattcctttaccaagtttgtttcccagcgaccaaagggccttccagtggagcctgtggggaagctgctcca

SEQ ID NO: 6068 - DNA, 201 bp, Homo sapiens
agcctccatggggaccatgacagcctggaaagcacaggcctgtgtgccctgccctcacgctggggtctggctaatacagcagcggctgcaccatgtctggygacctggtagctgtgtctggactgaagacaaacactggctcagttttaaccaagttctagactagcttcagatttccccagaagctcaggggccatggat

SEQ ID NO: 6069 - DNA, 201 bp, Homo sapiens
accagcagggactgacttttaacagatcagttatttaagcttgtcctctgtgcctgggatggttttaggtacctgtctgcattcactgtgttaatacagtrtagtcctcaaataccgttggtccttgaacaacacagatctgaactatgtggggccacttcttggattttcttccacctctgccacccttgagacagcaag

SEQ ID NO: 6070 - DNA, 201 bp, Homo sapiens
cctctgcccactctgcactcctgcagactcagaggcagctctggggcctggcacattccactcagaggcggcacctctgcttagtgcgctcagggggcctmatgggagagagaggattgcttcagaaggaaaaggagcaagaaacccaactggtccaggaggtggctttacggagaagtgcacggtgtggtcttgagtccc

SEQ ID NO: 6071 - DNA, 201 bp, Homo sapiens
cagggggcctcatgggagagagaggattgcttcagaaggaaaaggagcaagaaacccaactggtccaggaggtggctttacggagaagtgcacggtgtggycttgagtcccatctcctgcatcagagaatggcagagttttgtagtcggaagggaggttggtgaatgaaagcaggatgcattatgtgaacacagctggcac

SEQ ID NO: 6072 - DNA, 201 bp, Homo sapiens
caactggtccaggaggtggctttacggagaagtgcacggtgtggtcttgagtcccatctcctgcatcagagaatggcagagttttgtagtcggaagggagsttggtgaatgaaagcaggatgcattatgtgaacacagctggcacagctcctgcacaggcaatcccatagtgattcagcactggggtcagcaaaccttttc

SEQ ID NO: 6073 - DNA, 201 bp, Homo sapiens
tgactctagaggaacggaggtgcaggggcttgaggccactggactccattcagagggagtgaggaagcagaggccgaagcagtgttgttcccccagccccrtgcctcttgggtcctcagggaccccatgctgcagttgcttgcctgtcccagtgactcaacctccctctcgccatgctccatccacttacactcacccagc

SEQ ID NO: 6074 - DNA, 201 bp, Homo sapiens
agccctcactgtgtggcctggagccttcctaactgtgcatcatctccccaggaccatccacctgaccatgccccaactggtgctgcaaggatcttatgacmtgcaggacctgctcgcccaggctgagctgcccgccattctgcacaccgagctgaacctgcaaaaattgagcaatgaccgcatcagggtgggggaggtatg

SEQ ID NO: 6075 - DNA, 201 bp, Homo sapiens
cgctgggcaggccttggtggccctggtcccaggaggggagacttctgaagggggagacaaagatgccctccatgctggtttgtgcgtccagcttttatctyggagaattctaactttgacaaaaagtaagtgagttgtagagtacagattacactttaaactagatgatgtcaatatagactgcaaggatgggggccctcc

SEQ ID NO: 6076 - DNA, 201 bp, Homo sapiens; identical to SEQ ID NO: 616

SEQ ID NO: 6077 - DNA, 201 bp, Homo sapiens
cacccatcaccttgggcaggctcagccctggtgttggggctgctccttcaagaggggcagggcaatggatcactcacatggacgctcttctttgtggagcytcctgctgtgaatttccgagtttcctctgcccggcttctcccaccgtctgcaccagaccttctttccactagcctgacctcaggtagcctctcaaactct

SEQ ID NO: 6078 - DNA, 201 bp, Homo sapiens; identical to SEQ ID NO: 617

SEQ ID NO: 6079 - DNA, 201 bp, Homo sapiens; identical to SEQ ID NO: 618

SEQ ID NO: 6080 - DNA, 201 bp, Homo sapiens
ttacgccccagggccatgggacttgctcgtatctgcagttaacacaggaacaagcacggtaccagaattccccatcatccagagcagtgtgacacagacgyttctgctcagctggaccaacagaacgccactccggagaactaggagtaaacaaaattggtgttcaggcagaggtcatgatgaagagcaacaatggccttg

SEQ ID NO: 6081 - DNA, 201 bp, Homo sapiens
tgatggaccgtcacctcccatttgtggatcgcgtcttcctccagggcatcgggagtgaggttgcagatctccactttatcaaagtgggccttgaagtcctkaaatgccatcctgcagcaaagcggagagacacgatgcacaggagggcaagagtgagggcatcatccattcactcattcattaaatcattcacttattcat

SEQ ID NO: 6082 - DNA, 201 bp, Homo sapiens
ggtcaaagggcatggtggtgccctgcatggcagatggtggagaaactgcaccaggcaggtgcctcaggctttctgggtcaggggagagggtcaggtggccyttgaagttctgtttgctgttagcctgactgagttaactgcatgggtacctgactgtctttgctcagtctcctagtggacaaccacatttccggaaggctt

SEQ ID NO: 6083 - DNA, 201 bp, Homo sapiens
ctaggcatggtgccttttaggggacataactctgactgaactttatatgtcctccttagttagttacttagggtcttgatttcttctggaggctgtatttstcatttaaattttgctagatattatgcatattacttaagttttcacacttaatggcataaatctgtccctagtattccctctcaattttctaatctcctc

SEQ ID NO: 6084 - DNA, 201 bp, Homo sapiens
tgtccctagtattccctctcaattttctaatctcctctgtaactgcagtctatttatatgtcctcagtaaatatttgttgagtctgatagtttttggttaygatcatggactagtgcagtgagggcagttggatattttcctcctgggaggacatctgggattcacaatctggatgtttggtatcatgagacaatctccct

SEQ ID NO: 6085 - DNA, 201 bp, Homo sapiens
gtctgaaaaatgaaggtctccacccaagaatgtcttgtgagcatgactctgggaccagtagaaaacagcaacttttcaatggtttgcttgagggagcgaggagcagagctagaagggatatgtgccttgccttgcagataagctaagaaagtgtcctgcagcctggcgtggtggctcactcctgtaatcccagcactttgg

SEQ ID NO: 6086 - DNA, 201 bp, Homo sapiens
ctcagtgcactccttgccctgggctcccttgagggcaagcctggctgtccactgccctccaatgtccccttggctttgtgctctgcccaccctccccaagyacagctgtgtttgacaagaaggtggtgctgaggaggagggccgtccagccccacggtcccacgggctgctgagacgtgcaccgtgtaatgctgagtccca

SEQ ID NO: 6087 - DNA, 201 bp, Homo sapiens; identical to SEQ ID NO: 639

SEQ ID NO: 6088 - DNA, 201 bp, Homo sapiens
ggcccttccctgaatgtctaagaccaacctggtccccacatccaaatgcacagacacagctgaggatggagaaggctaaagagggacagaggtagagacayaggctgagaggaggcagttgtaggttgagctagggctaaggtgttttccccatattccatcttaccccacactcaggccaggccttagagttgtggaagg

SEQ ID NO: 6089 - DNA, 201 bp, Homo sapiens
tttccctccttggagacagggccctgtcggtttattcactgtatgtccttggtgcctggagcctactaaatgctcaataaataatgatcacaggaatgaaygcatgctgaaaagaccactcttttgcacaccatctgctcaaagctcctcttgtctgtcctgtccgctttcagcctccgtctgtccacttattaagtttgc

SEQ ID NO: 6090 - DNA, 201 bp, Homo sapiens
aaaggctttcagacttctctggagagtcctggagctttgaggggctctttaggggccatctgggttcggagattagcacactctgccccacagtggctcarcttttatctgcttcacatactgggcttctgggaagatcttatttcagtaaactatttcacaataggaaatatatttgaaaactcttgaatgattctgtgg

SEQ ID NO: 6091 - DNA, 201 bp, Homo sapiens; identical to SEQ ID NO: 641

SEQ ID NO: 6092 - DNA, 201 bp, Homo sapiens; identical to SEQ ID NO: 644

SEQ ID NO: 6093 - DNA, 201 bp, Homo sapiens; identical to SEQ ID NO: 646

SEQ ID NO: 6094 - DNA, 201 bp, Homo sapiens; identical to SEQ ID NO: 647

SEQ ID NO: 6095 - DNA, 201 bp, Homo sapiens
cttgctttgaagtcagacagaccaggatggaaatactggctcttctttactagtttgtgatcttgggtggtgataggaaagcatttttctattctatgcaraacacccagtgccacgaagaaagccgtgacaggtgcagcctgaatgccagtcaactggcaaattgtggcatctcttaacatttatcaaaatatccttatc

SEQ ID NO: 6096 - DNA, 201 bp, Homo sapiens; identical to SEQ ID NO: 651

SEQ ID NO: 6097 - DNA, 201 bp, Homo sapiens
tctgtggggtagggctgcttggcttgactttattttggaaaatgtattcatttctgtgggagctgaggatttctgctgcccgcttcctctcttgtgaccascactcatacatggagttagcaggtgaagaggacagcctcctcatcccctctttttataccttgcccttttgtgggaagaggctgaccattccccaatttg

SEQ ID NO: 6098 - DNA, 201 bp, Homo sapiens
tgatgtcctgtcctgaaagaaagaaaaataaaggaaagtgggcatctgagcactcatttgaaggaaatcctccggaatcgattcagaaatcctcatgaagkacccagaattccctgctttggagccagccagaccaggatgaactaaaagtgactgaacacttattatctgccaaccactttacatatattaactaattga

SEQ ID NO: 6099 - DNA, 201 bp, Homo sapiens
tcaggccaggccttagagttgtggaaggtggagaacactgggaagccaacctccgaagaagaccaggttggagtcaaaggaggaaggagagctctcattgycaaaccaacagggaagccaaggatatcccagtaactgctctcacatcattgatgagaatgccttgaatccgagctactaaatcacatttccttccttcta

SEQ ID NO: 6100 - DNA, 201 bp, Homo sapiens
tgaggatttctgctgcccgcttcctctcttgtgaccaccactcatacatggagttagcaggtgaagaggacagcctcctcatcccctctttttataccttscccttttgtgggaagaggctgaccattccccaatttgatgtttattgcttcaccttaagactttgtcttcagtgaaaatgcaaatactggtagggaggga

SEQ ID NO: 6101 - DNA, 201 bp, Homo sapiens; identical to SEQ ID NO: 642

SEQ ID NO: 6102 - DNA, 201 bp, Homo sapiens; identical to SEQ ID NO: 643

SEQ ID NO: 6103 - DNA, 201 bp, Homo sapiens; identical to SEQ ID NO: 645

SEQ ID NO: 6104 - DNA, 201 bp, Homo sapiens
gattagcacactctgccccacagtggctcagcttttatctgcttcacatactgggcttctgggaagatcttatttcagtaaactatttcacaataggaaawatatttgaaaactcttgaatgattctgtggattttttcaggggtggagggtttcagggaccaagatggagactttatcttctcaaatacttaaaactcct

SEQ ID NO: 6105 - DNA, 201 bp, Homo sapiens
ttcttacagccacattgtgctgttcacatggtctgtgcagaagtcatcatgtttaaaacagagtggtaagaagatgtcacccaaagagatactacattttsccagttgactggcattcgggctgcacctgtcacagctttctttgtggcattaggagctctacatggaatggaaaaatgcttctcagcaggaacattctag

SEQ ID NO: 6106 - DNA, 201 bp, Homo sapiens; identical to SEQ ID NO: 648

SEQ ID NO: 6107 - DNA, 201 bp, Homo sapiens; identical to SEQ ID NO: 650

SEQ ID NO: 6108 - DNA, 201 bp, Homo sapiens; identical to SEQ ID NO: 649

SEQ ID NO: 6109 - DNA, 201 bp, Homo sapiens; identical to SEQ ID NO: 652

SEQ ID NO: 6110 - DNA, 201 bp, Homo sapiens
aagctatgtgagctcaccagtccctccccaaatgctttccatgagttgcagttttttcctagtctgttttccctccttggagacagggccctgtcggtttrttcactgtatgtccttggtgcctggagcctactaaatgctcaataaataatgatcacaggaatgaatgcatgctgaaaagaccactcttttgcacaccat

SEQ ID NO: 6111 - DNA, 201 bp, Homo sapiens
agactctgcctgcccagcacgccccaagctctgctcctcatctcttctctgtatccacccccgacctggtgtttccctcagattcacacgggaggcagctsaggactgcgaggtgctggggcagcgcatccccgcaggcgctgtgctagagatggccgtgggtgccctgcaccatgaccctgagcactggccaagcccgga

SEQ ID NO: 6112 - DNA, 201 bp, Homo sapiens
caagctctgctcctcatctcttctctgtatccacccccgacctggtgtttccctcagattcacacgggaggcagctcaggactgcgaggtgctggggcagygcatccccgcaggcgctgtgctagagatggccgtgggtgccctgcaccatgaccctgagcactggccaagcccggagaccttcaaccctgaaaggtgagt

SEQ ID NO: 6113 - DNA, 201 bp, Homo sapiens
ctaagggtaactgagaattcgcatgtcacgagttccctggaaagattctgctgagagccagcgtggaaagccccggcacagtgagtgttcctgttggtccyctctctgaccacctcagactgactacatctccaggctcgaaggacctggcccctgaacccccaccctccactgctttatttttctctgtggaactatcac

SEQ ID NO: 6114 - DNA, 201 bp, Homo sapiens
ctagtgaacccaaaagtgacttaaaagtaaaaatcattattagcaagagattaagaacataacttcattgagaggtcaatgttaagagaacagttcattaraagtttctgtttaaaaagaaaaggaaaggcccaaatagccatttcaaggcagagcaggtgaaaggcctggaacactcctgtgcgctcactgtcggctgct

SEQ ID NO: 6115 - DNA, 201 bp, Homo sapiens
tagacactgttaatcacctcactcttcttgaatcactcccctcccttcacatccttcacatgcatgcttgtttagttttttttgttttttttttttttgtwttttttcccaaaattcctagtccttcctcctttcacatgcttgtttaggtttttgtttttgtttttgttttcaatactcctagcctgccttcctgccttc

SEQ ID NO: 6116 - DNA, 201 bp, Homo sapiens
tctggtcattttggggggcattaaaaagtccaggccagtctggcccagatgaaaacttcaggctcaaatccaatcagtgcccttctgttctcttagctcargctgacctgtggcctgaggatgccgccctgcgggaggagaggtctgttttttcccctccttctacccctcccccacccctgctgggcccctttctcctcc

SEQ ID NO: 6117 - DNA, 201 bp, Homo sapiens
gcatgtcacgagttccctggaaagattctgctgagagccagcgtggaaagccccggcacagtgagtgttcctgttggtcctctctctgaccacctcagacygactacatctccaggctcgaaggacctggcccctgaacccccaccctccactgctttatttttctctgtggaactatcaccagctaacattccattttgt

SEQ ID NO: 6118 - DNA, 201 bp, Homo sapiens
gtgtggtggcttatgcccaaaatcccagggctttgggagggcaaagtgggaggatcacttgagcccaggagtttgagaccagcctgggcaacaaagagagwccctgcttctaccaaaaaaaaaaaaaaaaaaacaaatcaaaaattagccaggtgtggtggtgcgagtctgtaatctcagctacttgggaggctgaggtcg

SEQ ID NO: 6119 - DNA, 201 bp, Homo sapiens
gtagtggaagaaggaagtgataagtttcattagtggaaattaatttttcatttgttggtcaccagtttagagcactttaaggcattaattttttcattttwaaaaaaaacccagaaatacgtttaaataccttcccccacccccagcagctgacccttacttattcagaaaaccctcctctgacatcagccccaaaatatt

SEQ ID NO: 6120 - DNA, 201 bp, Homo sapiens
ctagaacttatcttagcaattttccaagtttctaggcagcctgaccaagtaggaagaataatttggtcaattccatgaagaggttccctcttttgaaatgyatgattctaatccgcagctctttcatcaaagcaaaggcagtgaataacacagcccaaactgattttgttggtaaacaccacccaactgttttcttattag

SEQ ID NO: 6121 - DNA, 201 bp, Homo sapiens
caaataaaaatgtcattatccattcagttcgacagacagcaagcagagtatcgcagaaaattacaatcacgtcaggcagcaacaaaggattctagtcaaargcacgtagaagacccgatggtgggcagctggcctgggctctctttcacactgtccaggaatatgtttggattcagaatgggtggccccctctttatacac

SEQ ID NO: 6122 - DNA, 201 bp, Homo sapiens
ctgtttagatggatagggttatgcaaaaaagaccctctccttccctctctctgtgtaggaaatatgttttccctagcactcagcattgtccaaactttcargaactccaaaggcttaaagatggtgggttttttctttctcaagtttatgacataagatctgcacagaatgacctagaagtgaataaactaaggagcaaag

SEQ ID NO: 6123 - DNA, 201 bp, Homo sapiens
tttcaacatctaaatctgccaaattattgaagctagcacagagaactttctgggcattggccagggaagccagcaatgtggatggaaagatttatcacccsctctcataaccaaacctccatcgtatctccctgcaagccttgaaactgctcactggacccactcagacaacagagctatgggatctagaaggtgaaatgt

SEQ ID NO: 6124 - DNA, 201 bp, Homo sapiens
aaaagccataaacaagaatgttcataaggctttattcataatggcccccaacctgggaacaactcaaatgtccattgacaaggaaaaggatggataaatcsgggcagctcacccaatggagcaccaaatcatgaggatgaacacaccacaacacacaacatgggtgactgtcacagacatgaaactgagcaaaagaaggca

SEQ ID NO: 6125 - DNA, 201 bp, Homo sapiens
ggctggagtgcagtggcgcgatctcggctcactgcaagctctgcctcccgggttcatgccattctcctgcctcagcctccggagtagctggcactacaggygcccgccaccacgctggctaattttttgtattttttttagtagagatggggtttcaccatgttagccaggattatcttgatctcctgacctcgtggtcca

SEQ ID NO: 6126 - DNA, 201 bp, Homo sapiens
ttgggagggcaaagtgggaggatcacttgagcccaggagtttgagaccagcctgggcaacaaagagagaccctgcttctaccaaaaaaaaaaaaaaaaaamcaaatcaaaaattagccaggtgtggtggtgcgagtctgtaatctcagctacttgggaggctgaggtcggaggatctcttgagcccaggaggttgaggata

SEQ ID NO: 6127 - DNA, 201 bp, Homo sapiens
ggaagcattaaggttcaatgcttggctctgtgcttgtttttcttacccctatcccagaggactcatccccgtctgtgcgacaccatctccccacttctacrccaagctgctcacggtctcacccaggtggggtggtggagggggcctccagcaaaatcctgcaaaagctgatctccttcccctggaagatgctgccccacc

SEQ ID NO: 6128 - DNA, 201 bp, Homo sapiens
ccaagtgaggtcaaggggcagacggaggagcagccccactgcatcggggcttccacgtgtgcggggcttgtctcacttccccacgatctcaacatacagtrcagcagccagaccagtctcccaaaacgctgcttatgcctggcactccccggcttaagaaccagccaggagtcaagggctccccgttcttccttgtctgct

SEQ ID NO: 6129 - DNA, 201 bp, Homo sapiens
gtggcatagtctcagctcactgcaacctccgcctcccgggttcaagtgattctcctgcctcagcctcctgagtagctggggctacaggtgcgtgccaccayacccagctaatttttgtatctttagtagaggtggggtttcatcatgttggccagtctggtctcgaactcctgacctcaggtgatccgcccacctcggcct

SEQ ID NO: 6130 - DNA, 201 bp, Homo sapiens
tgcagatgggtgatgatgcgctcctgcctcccttcagtttgttctgttctcccaaattctttcagtgtgcctggtagaagcagtctgccagtctcccctcrctccctctcattcatcccctctctaactactcatcctgcgaccccactgacttggttttggccttgtccctgccacagttgacaaatataatggcgcgtc

SEQ ID NO: 6131 - DNA, 201 bp, Homo sapiens
tgcccaggctggagtacagtggcacaatcacagctcactgcagcctcaacctccccaggctcggggaattctcccaccccagccccatgagtagctgggastacaagcgagcactaccaccccaggctattttttgtatttttttgtagagacggggtttctccatgttgcccaggctgggaactctggatcttaataaaa

SEQ ID NO: 6132 - DNA, 201 bp, Homo sapiens
gtggagtcagaatctttctttctgggactgatgccatggggcctggctccacccccacaactgcatggcacagcactgccttttccttggccatgggctcrccctgcagatgggtgatgatgcgctcctgcctcccttcagtttgttctgttctcccaaattctttcagtgtgcctggtagaagcagtctgccagtctccc

SEQ ID NO: 6133 - DNA, 201 bp, Homo sapiens
atctcttctctgtatccacccccgacctggtgtttccctcagattcacacgggaggcagctcaggactgcgaggtgctggggcagcgcatccccgcaggcrctgtgctagagatggccgtgggtgccctgcaccatgaccctgagcactggccaagcccggagaccttcaaccctgaaaggtgagtactgccccttttaaa

SEQ ID NO: 6134 - DNA, 201 bp, Homo sapiens
gtctcaagctcttggcctcaagtgaccctcctacctcagcctcccaagtagctgggactataggtgcatgcaaccatccctggctaattttatgttttacttatttatttatttatttatttatttatttgtaaagacaggattttgctatgttgcccaggctggtcttaaacgcctgaggtcaaatgatcctcccacctc

SEQ ID NO: 6135 - DNA, 201 bp, Homo sapiens
ttcccgtcacgtttatttggcctggcagagtgaccaggatctgctaaggtcatgaggctgtccctgggtgggtgggggcgtggccatgctgcatcagaccrgtccagaggtggagggcaccttggggtctctcgtgtggctctcctgttgatgagggacctatgaatatcccacagcgaccttttcagatgctccataacc

SEQ ID NO: 6136 - DNA, 201 bp, Homo sapiens
acccccgacctggtgtttccctcagattcacacgggaggcagctcaggactgcgaggtgctggggcagcgcatccccgcaggcgctgtgctagagatggcygtgggtgccctgcaccatgaccctgagcactggccaagcccggagaccttcaaccctgaaaggtgagtactgccccttttaaaaagctctgaagggatgt

SEQ ID NO: 6137 - DNA, 201 bp, Homo sapiens
tctcaagctcttggcctcaagtgaccctcctacctcagcctcccaagtagctgggactataggtgcatgcaaccatccctggctaattttatgttttacttatttatttatttatttatttatttatttgtaaagacaggattttgctatgttgcccaggctggtcttaaacgcctgaggtcaaatgatcctcccacctcg

SEQ ID NO: 6138 - DNA, 201 bp, Homo sapiens
gataaaaaataaattccagtgcttaaagctcttatctttgtttaccatttccccaaacagctagtgacctgctctctgactcctacagcaaatcatcaacragatgcacacgaagatgagggatgggaaatgcaggaggggtgtgcggagggcaagttgatggctctccgccttcccgtcacgtttatttggcctggcaga

SEQ ID NO: 6139 - DNA, 201 bp, Homo sapiens
gactgcgaggtgctggggcagcgcatccccgcaggcgctgtgctagagatggccgtgggtgccctgcaccatgaccctgagcactggccaagcccggagamcttcaaccctgaaaggtgagtactgccccttttaaaaagctctgaagggatgtgagtgtgtgggatagaaatttaccagtggaggcagcagccgggaggc

SEQ ID NO: 6140 - DNA, 201 bp, Homo sapiens
ctcaagctcttggcctcaagtgaccctcctacctcagcctcccaagtagctgggactataggtgcatgcaaccatccctggctaattttatgttttacttatttatttatttatttatttatttatttgtaaagacaggattttgctatgttgcccaggctggtcttaaacgcctgaggtcaaatgatcctcccacctcgg

SEQ ID NO: 6141 - DNA, 201 bp, Homo sapiens
ccaggctggtctcaaactcctgacctcaagtgatctgcctgccttggcctcccaaagtgctgggattacaggcgtgagccattgtgcccagctgctcttcyctttttactgtcctatgactggtctcccaatgccagctgagagtgttggtctgatctcttttcttctaagctggccacacaaatggacctcagttactca

SEQ ID NO: 6142 - DNA, 201 bp, Homo sapiens
tcaagctcttggcctcaagtgaccctcctacctcagcctcccaagtagctgggactataggtgcatgcaaccatccctggctaattttatgttttacttatttatttatttatttatttatttatttgtaaagacaggattttgctatgttgcccaggctggtcttaaacgcctgaggtcaaatgatcctcccacctcggc

SEQ ID NO: 6143 - DNA, 201 bp, Homo sapiens
atggcttcctcctccttcccaaggggctgccccaccgctttgccctcactagccagagcaatctaccttgttcactttgcccaagacacagggaggacccytgtggtctttgcaggggcttcacccagttgagctgggaagagacctcacagcatcctccccatctccctggcccgggtttagaatactgaagacacatag

SEQ ID NO: 6144 - DNA, 201 bp, Homo sapiens
gctggagtgcagtggcatgatctctgttcactgcaagctccgcctcccgggttcacaccattcttctgccttagcctcccaagtagctgggactacaggcrcccaccaacacacctggctaattttttgtatttttagtagagacagggtttcactgtgttagccaggatggtctcaatcttcttacctcgtgatccgccc

SEQ ID NO: 6145 - DNA, 201 bp, Homo sapiens
gttaactctctgaattacaataaccatcaactagatacctttttaaaagaattgtaatactttctttataaaacgttatctttggccaggcatggtggctsacacctgtaatcccagcactttgggaggccgaggtgggtggatcacttgaggttaggagttcgagaccagcctggccaacatggtaaaaccctacctcta

SEQ ID NO: 6146 - DNA, 201 bp, Homo sapiens
gcaggggtggctcagctggagcacagggctgcagaggggagggagcgggtgttctgggccagccctgaccacacggacctgcaggttcacggctgaggccmggcagcagcaccggcccttcacgtacctgcccttcggggccggcccacggagctgcctcggggtgcgtctagggctgcttgaggtcaagttgacactgct

SEQ ID NO: 6147 - DNA, 201 bp, Homo sapiens
gggctgcttgaggtcaagttgacactgctccacgtgctgcacaagttccggttccaagcctgccctgagacccaggtgaggcccccctgctcagaggcagrggcaggggcaggggtgggagggccaccccagttctctgcgtgagagcaggccagcctgggggcaacatcaggctctgcctccgtgagcttgggcaagctc

SEQ ID NO: 6148 - DNA, 201 bp, Homo sapiens; identical to SEQ ID NO: 661

SEQ ID NO: 6149 - DNA, 201 bp, Homo sapiens
ccacttcggataaattttcttttatttccatactcttttgtgacatgtgtggcacaagtattcaatctcacagggatgttaaaacccacactcgaagggtktccagtgtgcttaggaaatgtgggtttgcgcaatcacaggccaagcctgggggtcctcggggaagctactcctccaggtcacctgccaggtggatgcact

SEQ ID NO: 6150 - DNA, 201 bp, Homo sapiens
cagaacatttcatccaataaccgcagaatacacattctattcaacatcatatggaactttctccaagatcgaccatatgataggccataaaacaagcctcwataaatttaagaaaattgaaattgtatcaagcactctctcagaccacaacagaataaaactggaaatcatctccaaaaggaactttcaaaaccatgcaaa

SEQ ID NO: 6151 - DNA, 201 bp, Homo sapiens
ttaagtgttacatgtgccatccagccaggtgagatggcagcagagaacctaaaccctgagaaggtgaaatcaaatgggctgggcgcggtggctcatgcctrtaatcccagcactttgggaggccaaggcagacagatcacttgaggtcagaagttcgagaccagcctggccaacatggtgaaactccatctctactaaaaa

SEQ ID NO: 6152 - DNA, 201 bp, Homo sapiens
atcctactctcttctgcttggtgaattcatctgcacagtctaagctcaaatgtcattagattcaaaccttttgccgatctcctgtcctcctgtttgtgtcygctctgtgccctgcatgtatttgtgtgccatcataactataagacggacggaacttaggtgattatatgtctatttccttatcctggaaggtgagctcct

SEQ ID NO: 6153 - DNA, 201 bp, Homo sapiens
gatgggggcacctgattgatgttgacacgccaatgttgggctatcatcggaggaggtctgtattaattttaacaatgaaaatagacgggttacagttaccytaaatagcatcaagtcaccccacttcataaagcccttcaatggctttcctttccttttggaaggaagtagtgcatttttcacatggtccactgggtctta

SEQ ID NO: 6154 - DNA, 201 bp, Homo sapiens
tgctattcattctttcccccaactctcttcttttgtttgtttgttttttgtttgagatgcagtctcactctgtcgcccaggctggagtgcagtggcactaycttggctcactgcaacctccgcctcccaggttcaagcgattctcctgcctcagcctccctagtaactgggattacaggtgcacgccaccatgcccggcta

SEQ ID NO: 6155 - DNA, 201 bp, Homo sapiens
ccaagggccaaatcagatgaaatgttcaatttataaaggtcaacaaatatttattaattagttcctgttgttaaggagtttataatgtagaagagaaacamggtacataaatcactgcattattaccaatcgtggaaggtggtgacagagctggggtcctgctttgagcatcagaagccactttggcagggaggaagcagt

SEQ ID NO: 6156 - DNA, 201 bp, Homo sapiens
tgttacatgagtgacagacacacttctgtagtgtgaagctcttgagatttgggggcccctcattacaacacttatgctattcattctttcccccaactctsttcttttgtttgtttgttttttgtttgagatgcagtctcactctgtcgcccaggctggagtgcagtggcactatcttggctcactgcaacctccgcctcc

SEQ ID NO: 6157 - DNA, 201 bp, Homo sapiens
ttgcaattaggggtggtcatgtttccaaagagtgtgtacaccacctccaggcctggcctgtaaaattcttcctcatatcatcttctctgttttccacttgycagctggttgtggatgatccagcagaggcatctgaggttccagtggacgacagggttacaagatggaaaaagcctgaattcctgagtcactgcatggaag

SEQ ID NO: 6158 - DNA, 201 bp, Homo sapiens
agttctccaagaaatcctgtctctgactcccccatccaggcttggaaccctggaggcttcctcgtagggctgcgtagagcaggtggggagggcaactccasagccctagtcacctgtgagctgcgtagacaagagaattttccagcaagtagaagtcaagtgtcctggggaaggtctgatttgcagagtcagggtttagtt

SEQ ID NO: 6159 - DNA, 201 bp, Homo sapiens
atgagctttgatctacaaatgcaggtcttgcttcaacttaaaaatattttcttttctaatatctttaaatagctcttctgttctttttttctctctccttyaaaactagatttctatcacctgtctttctatgtctagaccttgtttctgatagttttgatctctttgtcctttttttttcttttttgtgaggcaggttct

SEQ ID NO: 6160 - DNA, 201 bp, Homo sapiens
atcttctccactcagtccaccaactcacatgccagtctcttctgaaaacaccctcacagacacacccagaaagaatgcttcaccagctatctaggcatccsttgagccaatcaaggtgacacctaaaattaaccatcatagtgataatttaaggcattaaggacatcatttcatgtcctgcagctctttaagcccaggctt

SEQ ID NO: 6161 - DNA, 201 bp, Homo sapiens
acggtcaagcggagatagtcattctctccctgtctccttgaaagggagtatgagggtttgtgagcaataacccttacaccaacatatattgctattagtcyattgatggcatctgtttacctctcagttgtaggtgcttcaaaattaaagaaaatctatttcttgaaaagtgcacaataaatcaagctttaaactcaattt

SEQ ID NO: 6162 - DNA, 201 bp, Homo sapiens
caagtcacccaagctacacaccatcaacgtttggggcttatctctgtttagatggatagggttatgcaaaaaagaccctctccttccctctctctgtgtargaaatatgttttccctagcactcagcattgtccaaactttcaggaactccaaaggcttaaagatggtgggttttttctttctcaagtttatgacataaga

SEQ ID NO: 6163 - DNA, 201 bp, Homo sapiens
ggaactcatctcctcccaaacctccttctggtaaacaataaccacctcctagtccttcagctccagccattgcaggtcaactgccaggacccattgtttckttgttgttgttgttgttgttttttgtgtgatagcttttcacattcttccattcctcttcctttctactgccagtacctgattgagcctatccctacctcc

SEQ ID NO: 6164 - DNA, 201 bp, Homo sapiens
ccccgagcatctctcatttcttcccttccactccatcctggctaatttactgtccacaattcacagagtattgtctccactctgcgcagccacagaatggrtgtggtaacgtctccatggcatttatggtttctacaaatcacaaatcacatatgaagggctccaagaatattagaggaatgagccagttaactcagcgcc

SEQ ID NO: 6165 - DNA, 201 bp, Homo sapiens
aacactcttgctcagggtgctgtgcgatgggccattggtaggtagtcccagctggtctggtgtgtgaggggagaggcaggttcacccagctgtctgtgccygggcagggcaactcccgaagtgggctgagggagagctctccgtgatctctaaggagggaggcagcgcattgcagggttagcaaacctttagaagatcctc

SEQ ID NO: 6166 - DNA, 201 bp, Homo sapiens
attcacgtttgatgttctatgatgatgaaattacttcttggaaattggctctgaaacccagcctcagtcccagtgctgtttttctttttaactggtttaattttttttttgaacttttttatctcattgtagcttaccttggattgaaactggccacatgtaaaaccaagagcaaatggtagctccttccctacccccagc

SEQ ID NO: 6167 - DNA, 201 bp, Homo sapiens
tcgaggacaaggagcaggcatcccgtgtggcgggagcaggaacactcttgctcagggtgctgtgcgatgggccattggtaggtagtcccagctggtctggygtgtgaggggagaggcaggttcacccagctgtctgtgcctgggcagggcaactcccgaagtgggctgagggagagctctccgtgatctctaaggagggag

SEQ ID NO: 6168 - DNA, 201 bp, Homo sapiens
acttttagaaatgtgaaatgctctggaaagtctcagcaatagaacaagtagaagaaggaaattcagagctcaaagacaaggtctttgaattaactgaatcyaacaaagacaaagaaaaaaaataaaaaaatatgaacaaagcctccaagaagtctgggattatgttaaatgaccaaacctaagaataattggtgttcctga

SEQ ID NO: 6169 - DNA, 201 bp, Homo sapiens
tcagaaagaggcagcccacaagctgagcacagctgcagaggttttagcttgcttactacatttgaattaattgccaaacttttaaactcaggggaattccrcaaaaatctaggtaccagcttttcttgaagacaacggaagctcaggccaccctgaggccatcacctctggcagtcacctgccaagcacgtggctccagct

SEQ ID NO: 6170 - DNA, 201 bp, Homo sapiens
tatgaagccagtatcaccccaataccaaaactaggaaaggacacaaccaaaaaagaaaactacagaccaatatccttgatgaacatagatactaaaattctttttttttttttttttctgagacagagtcttgctctgtcgcccaggctggagtgcagtggcgcgatctcggctcactgcaagctctgcctcccgggttca

SEQ ID NO: 6171 - DNA, 201 bp, Homo sapiens
aggccctagggggcagtagcaccaccatgcagatcaccagttccacaaaagaacggaactccaccagtacctagtgttattagtataagttttgggaaagrtccttcttttcttagctcattagaaaaacaatcacagcatcctatggactgggccaaagtgggcagacattgcagtccagcccaaagaggcctgtcccag

SEQ ID NO: 6172 - DNA, 201 bp, Homo sapiens
acaggtgccctgaggaatgaatgggtggacggcgcttacagactcgggtgccacttcctcttgtccagctccatgccctcccccatagtgtgtggaccatygggggcctagaactgaggtcctggttggtagcacccaggagcctgttcccaacatggccccatggcagggcctggtctccaggtgtggcatgaggtgcta

SEQ ID NO: 6173 - DNA, 201 bp, Homo sapiens
atctgaggacctgggaggatttcagaaatcgctggtcagtcccagcaactaaggctcaaatgccctccccaggattctgctggagatcattctgccagtcrctccaggagcgaggggctcacctcttcctaaggcaggactttccacgaggctagaccagaccagtgtcctccaattaattcatttccctgtgtcttccat

SEQ ID NO: 6174 - DNA, 201 bp, Homo sapiens
tgacacagttccccctaagcctcgcttcttcactgtttaaaggggataataatagcatctgctctgttagactgagggctggttaagtggaataacatacktagcacatagcctggtacccacttattttttttattttgctactttgtttcaaatcttcaaatcttcctattattccttttttacagagccatgtcagaa

SEQ ID NO: 6175 - DNA, 201 bp, Homo sapiens
cttcagacctcaggtgtcccccagaggtgccatctttgaatctaatgtgtagattcttattcagttggtctgggtagggtgtgggctttagaattttaaargatctccctggtgcttctaatgcacaggtagggttgagaagcacactgttctcaaagagtggtcccagaccagcagcatcagcatcacctgggaaattgg

SEQ ID NO: 6176 - DNA, 201 bp, Homo sapiens
aaactcaatttgttttccagaaatttttcaaattttcccatgacaaaatttacatttattttctgattttaacagtaagagtaccattctaattttcatckggtctttgcttcattggttgacatttgccttgcccttggacttgagaacttgaagtatcaatgaggcatagcacatcagtaaataagccccgctaagcca

SEQ ID NO: 6177 - DNA, 201 bp, Homo sapiens
tcctgggccaggcccaggcccccactgtgtgcagcctaggaacttggtgctgtgagtcccagccactccagctgtggctaaaaggggccaaggtaccactwggacttgtggcttcagagggtgcaagtcccaaatcttagcagcttttacatggtttgagcctgcaggtgcaaaaaagtcaagaattgaggttggggaacc

SEQ ID NO: 6178 - DNA, 201 bp, Homo sapiens
aattttcaattattttttctttaagctatttcattgaatatttctcccattcaatattgggggattgtgttgggagaggagggtctccctttcccacttcygcaaatggggcactcacagtatttggagtgtcttctgggtcctgcaggagcagtctggttccttcagagagtctgtgggtccttttgggattgctggttt

SEQ ID NO: 6179 - DNA, 201 bp, Homo sapiens
tggaaaattttcagcctgatgatgcaatagaaaagaaaaacccattttctggagagaaattcaagcctgctgcagaaatttgcataagtaaggagcccaaygttagtcaccaagacaatggggaaaatgtctccagggtatgtcagagacctttgcagcagcccctcccctcacaggcccagaggtctagggggaaaaaat

SEQ ID NO: 6180 - DNA, 201 bp, Homo sapiens
tagtttaaatattgttttaagtgttgttcaaatgtatttccattttctacagtaacattttttctttaaaatattcaattttaacacttcttgagtgctaygtgtatccattttctcgttacagaatagttgcataggttacacgtgatatagtttggctgcatccctaaccaaatctcatcttgaactgtagctcccata

SEQ ID NO: 6181 - DNA, 201 bp, Homo sapiens
aataccacattacttctgcaagaatggccataatcaaaaaataagaaaacagtagatgttggcgaggatgtggtgatcagggaacacttccaccctgctgrtggggatgtaaactagtacagccactatggaaaacagtgtagggattccctaaagaaccaaaagtagaactacctaccatttgatccagcaattccgcta

SEQ ID NO: 6182 - DNA, 201 bp, Homo sapiens
agcctcccgagaagctgacaccacaggtgcacgccatcaagcccagctaattttttttttttttgagacagtctcactttgttgcccaggctggagtgtartggcacaatctcggctcactgcaaactctgcttcccgggttcaagcaattctcctgcctcagcctcccccaagtagctgggactataggcgcacgctgcc

SEQ ID NO: 6183 - DNA, 201 bp, Homo sapiens
agggccgagcacagtgcctggcacgtgagaaataggtgttgagaaaagttatttcactcttccttttctaactggaaaccaactccaagcacagatttgasgggggacgagcagggaggcacagtagataaagcctgtgagttactgcgcccagcgagaaaggggtcggtggagtcaaagagagaaggcactgcgtgggga

SEQ ID NO: 6184 - DNA, 201 bp, Homo sapiens
cttactatgtgccaggaatggtgaggagtaccgagagggagtgagacatcacccctgctctcagaagcagcagtgcggcggggagggcaggactccaaaamggctccgattccaggcccgcgtttgcttcccgggaacaggcgtctaatggccctggtttattatcacccccttttcaatgccacttttgtttttctcttt

SEQ ID NO: 6185 - DNA, 201 bp, Homo sapiens
tgacgtattgtttccttcagggcacagaaaatatggagtctagcgaacagaagcagggcccatgcgtaggggtggtccaggtttacaccaaagaaaatgartactactcacagctgtctggcaaggtggcaagagagcgcctcggaggtcgtgagtgtccctcaccatccataggaatgccacaaaagcccttgctgccag

SEQ ID NO: 6186 - DNA, 201 bp, Homo sapiens
ttttccatgatgatcatttgatttaaaccgaccagtgtgtggctgagctctgtgaactggggcatcaggggatcagggctgcaccaccagggctggagatggagctggggatagagactgtattagctggaagtacatggagcacatgctaagacgattaacacacaagataacacattttaaaaactaattttttcccat

SEQ ID NO: 6187 - DNA, 201 bp, Homo sapiens
aaagtgtttaggaaattaagtctaaatcaagcccttcttggagattcatagaatatcaaaggccctgaaaggttctttaataaagaaacctgttcagcttyatttaacccagtgttttcgcagcgtctttgctaaagtactgctgcatatggccgtggtgggttgggcaactagacccgctgagatggtcccttgaaaacg

SEQ ID NO: 6188 - DNA, 201 bp, Homo sapiens
tcaagtctcattctaagaccagtttaaattgaaatgtgattggtgattattaagatttaagactatcacagattattaagacttaagtttaccactatgcstggaagttcctttcccagagagtttcttctacatgtaagaactggactctaattctagacccacatctactccagactatatttagaaggcaccattggg

SEQ ID NO: 6189 - DNA, 201 bp, Homo sapiens
ccacctctctgggcttgatcacttttccatacggtcaagcggagatagtcattctctccctgtctccttgaaagggagtatgagggtttgtgagcaataamccttacaccaacatatattgctattagtccattgatggcatctgtttacctctcagttgtaggtgcttcaaaattaaagaaaatctatttcttgaaaagt

SEQ ID NO: 6190 - DNA, 201 bp, Homo sapiens
gcctcccaggttcaagcgattcttctgcctcagcctcccaagtaggtgggactacagatgcacgccactgtgtctggctaatttttgtatttttagtagaratggggttttaccacattggccaggttggtctcaaactcctgacctcagatgatccacccaccttggcctcccaaagtgctgggattacaggtgtgagcc

SEQ ID NO: 6191 - DNA, 201 bp, Homo sapiens
tgtaaattcacccttaagtcttaaggataggtacgagatccaatcagccttcactcttatctctaatttattctgtctcatcagaaccagaaaacatcacygcactttccttggaggtaagtgctttattccatgtagtgtgccacaggactgcatcttgccactacataaatacacataatatatgatttcctccttcaa

SEQ ID NO: 6192 - DNA, 201 bp, Homo sapiens
cccggtgtagaggtggctgtgccctccctcccatcattactcctacactacctcagcaaagccatagccaagcctcagggaccacaatgatatcacacccygaggaccttcagagggactgactgagaggtctgggggtgctctggggtcctgtgctggtgtcccagagctgagggagcaagggatgctcacttcccctgc

SEQ ID NO: 6193 - DNA, 201 bp, Homo sapiens
gccttaccagtcatgggcctgagacaatgagaggggtctgggagctgtcccatttggctagagatagtgtgcattgtattttatttatttaataagcacaytagcagtcagtgttctaaggagtttaatcaatcatttaaaaaaatcacttttttttttttttaacagtacatggaactctaggttgccaaaataccattt

SEQ ID NO: 6194 - DNA, 201 bp, Homo sapiens
tattaggctatcaaccactgtttgctgactgagaaaaaaatgaatgaccaatagaacacagaaacattatggcaggcatgctcctggaagcagttctcctrgcacacgcttctgaaggcctttcctttttcccccttccctctccctccacccatacaagggtccagacgagtgagtcttctgtcaacttcgggtccaacc

SEQ ID NO: 6195 - DNA, 201 bp, Homo sapiens
gccagacgtggcggtgggcacctgtaatcccagctacttgggaggctgagataggataatcgcttgaacccaggaggcagaggttgcagtgagccgagttytagtgccattgcactctagcctaggcaacaagagctaaattccatctcaaaaaaaaaaaaaaaaaaaaaaaggcagaaaggcatcaattggatttagcaa

SEQ ID NO: 6196 - DNA, 201 bp, Homo sapiens
cagtaggtgctcaatcaatagacgcagaaaaatgagcttcagtcttcatccacttcggataaattttcttttatttccatactcttttgtgacatgtgtgrcacaagtattcaatctcacagggatgttaaaacccacactcgaagggtgtccagtgtgcttaggaaatgtgggtttgcgcaatcacaggccaagcctggg

SEQ ID NO: 6197 - DNA, 201 bp, Homo sapiens
cttcgatttaataactcagtgatgagcttggagataaaattgagcctgctgtgaaaactaggtctgtggcttccttgaggaccatttctacagaatattattttttttgttttctctctcttaaatggttatacacaatatccctatccttctcctcactttattgattttccagaatgagagtacgaggtatgactataa

SEQ ID NO: 6198 - DNA, 201 bp, Homo sapiens
ggtttcatcatgttggccagtctggtctcgaactcctgacctcaggtgatccgcccacctcggcctcacaaagtgctgggattacaggcatgagccacagygcccggcccactttattttatagcttatgcatgtgacctatcttcttggcttgactgtaagtccctaagaggagggcccacatcttaagccagtgagtgc

SEQ ID NO: 6199 - DNA, 201 bp, Homo sapiens
gggggtgaatgtagggagagtgagcatttttattttattattttatttcatctcaaaaagcgtgttgacttttcccaagtgctgacacaacttggacttaytcataaaagaaaatcagaatcgcccttgtgggaaacacagcagccctgtctgagcgccactgaggtgactcccggatgctgtgcggtgcagttctgaagc

SEQ ID NO: 6200 - DNA, 201 bp, Homo sapiens
gtttcatgctttaggcgtgaggtttcaggactgtagtctaattatttcttccagtggagtagaatgtctgaaaggatttggagtaacagggctgatgaagyggcaaggaaggtgagtagctatctaggcaagtatgtgaacacagcctggaagggcttgtagtaccaagctgctcttaaagctcaggtaccaagacccaga

SEQ ID NO: 6201 - DNA, 201 bp, Homo sapiens
ggagtgcagtggctcgatctcagctcactgcaacctctgcctctgggttcaagcaattctcctgcttcagcctcccgagtagctgggactacaggtgtgcrccaccatgcttagcaaatttttgctttttttttttttttttttgagatggagtctcgctctttcacccaggccagactgcagtggcgctctcttggctca

SEQ ID NO: 6202 - DNA, 201 bp, Homo sapiens
agtctttctgcatcttttgtatttctttaatgagtgtgaatatttagcaaaaaagagaaattttactaaaaagagtgggaaactgctcccttctagtggtraaggggaaagcagtttcatgctttaggcgtgaggtttcaggactgtagtctaattatttcttccagtggagtagaatgtctgaaaggatttggagtaaca

SEQ ID NO: 6203 - DNA, 201 bp, Homo sapiens
tgggttcaagcaattctcctgcttcagcctcccgagtagctgggactacaggtgtgcaccaccatgcttagcaaatttttgctttttttttttttttttttgagatggagtctcgctctttcacccaggccagactgcagtggcgctctcttggctcactgcaagctccgcctcctgggttcacaccattctcctgcctca

SEQ ID NO: 6204 - DNA, 201 bp, Homo sapiens
ggtgacctcacacactctaaagctttcaccgccatccacactggtgtgtggtccctggcctcagcccagatgtctcccaaacttcctttgaacagtgattrtctgccgaatgcttctacctagggggttcacaaactggacagcacacactcccatatggaacactgcactggtcaccttttctcattgaatgtgccttcc

SEQ ID NO: 6205 - DNA, 201 bp, Homo sapiens
gcaatctcggctcactgcaacctccgcctcccgggttcaagtgattctcctgcctcagcctcccaagtagctgggactacaggtgcccaccatcatgccckgctaattttttgtatttttagtagagacagggtttcaccatgttggccaggatggtctcgatctcttgacttcgtgatccacccacctcagcctcccaaa

SEQ ID NO: 6206 - DNA, 201 bp, Homo sapiens
gagacaggaccaataggagataggtagatagatagatagatagatagatagaaccaataggagatagatgatagatagatagatagatagatagatagatdatagatagatagatagatagatagatagatagatagaaccaataggaaatagataggtagatagatagacacaaccaataggagattagatagatagata

SEQ ID NO: 6207 - DNA, 201 bp, Homo sapiens
acttcctggttggctactgagagaaatgagtctcttgagcaattatcctttgcaggtagcttccatgaagaacccagtttttgagtgcctctagcagagamtaagcttcaaacctcattaaccatggatccaatccaatatggcagcttgtatgttctccattctcaaagcccaatataaatgatgggctttcttcattca

SEQ ID NO: 6208 - DNA, 201 bp, Homo sapiens
gggaggggctgccgcgcagcgcggggggactgggcgcagggcgggccccgggtagtgggtgagagggccggcctggacccggcgggcgcacggctccgagyccagcgcagccgagccggtctgcagaggggcccccagaactttgtgtgtgtgtgtgcacgcgcgcgcgtgtgtgcccaggtgcgagggtgcgcgcgtgtg

SEQ ID NO: 6209 - DNA, 201 bp, Homo sapiens
acattggttcggactctggctcttgaaaatgggcctgcgcattctgagagcatgtgtgtctggagatgttctccccagcccagctcccatagagcccggtrcagggtgaacccacaatggaagctgagaagctgaacccagccagtgcccctctccaggggagatgaggggttcctgactctggcagcccgatccccagca

SEQ ID NO: 6210 - DNA, 201 bp, Homo sapiens
tcagtaaagcggtgcctggctgagtatttacttaggttcatgcacagatagcccaagatccaaaaacagtgatgatgaatgattctgcggctacctaaacyagctgtccagtggaggggcacaaggctctgcaccagggcctgcctacagaccaatgaactgaagggaggcttagaaggcacacttactacattgcagata

SEQ ID NO: 6211 - DNA, 201 bp, Homo sapiens
ttgcaggttcaattctctcctatcataaaacaaacaactgagccagccaactaaccaaccaaccaaccaaccaaccaatcaaccaaccaactcactaaccrcctcttctttgactccaccccaggcaccactccacttatccttctcttcccagcctagtgacttgaaagaggactttgtatttgctcactttctcacctc

SEQ ID NO: 6212 - DNA, 201 bp, Homo sapiens
tcatcatagagaatttccattaatttctggccgtgtgccactgcaaccagctttcaccctgacttgtcatataacaaaatatcattaaattgaactctagtttttttttttttttttttagacagggtcttactctgttgcccaggctggagtacagtggcacaatcacagctcactgcagcctcaacctccccaggctcg

SEQ ID NO: 6213 - DNA, 201 bp, Homo sapiens
tctctgacggaaaatgtataaataatgtgatcccctggggacccaggttagcactagatttatttttaaattttataactcatctgaaagagagagaacayagtggaatctatatatttgtatattcctctaagctgttctgatttgaaagatattaaatcaataggaataactttctgagactcttgtaagattgcataa

SEQ ID NO: 6214 - DNA, 201 bp, Homo sapiens
ttgttagctcattgtttctgtgggtcaggaatcctggcatggcttagctgagtgcaaaggctgagtccagagggactgagggctgaggccagagggatcarggtgtcttggagtagtagtcaaatggctggcctgatctgtggtctcatctgaaggcttgactgggggaagatctgcttctaagcctcatcacacggttat

SEQ ID NO: 6215 - DNA, 201 bp, Homo sapiens
ggctcttttgagtccctcttcgtgtgtggatcaacaagtcacccaagctacacaccatcaacgtttggggcttatctctgtttagatggatagggttatgyaaaaaagaccctctccttccctctctctgtgtaggaaatatgttttccctagcactcagcattgtccaaactttcaggaactccaaaggcttaaagatgg

SEQ ID NO: 6216 - DNA, 201 bp, Homo sapiens
tcatcccataacacagtattaggctatcaaccactgtttgctgactgagaaaaaaatgaatgaccaatagaacacagaaacattatggcaggcatgctccyggaagcagttctcctggcacacgcttctgaaggcctttcctttttcccccttccctctccctccacccatacaagggtccagacgagtgagtcttctgtc

SEQ ID NO: 6217 - DNA, 201 bp, Homo sapiens
agaagaggacctgtgcagggaaactcccctttataaaaccatcagatcttgtaagacttattcactaccacgagaacaacataggaaagacgtgaccccaygattcaatttcctcccaccaggtccctcccaccacacgtgggaattgtgggagctacaattcaagatgagatgtgggtggggacacaaccaaaccatatc

SEQ ID NO: 6218 - DNA, 201 bp, Homo sapiens
gtgacctcagccagggtggcagctgtggggatggaaagagttggccaaagagagatttaataattgtgactgacaggattgtagttgagagagagagaacwactcctaggtttggggtttgggttagttttggtttttcaagcttttttgactatgatctacagtaagaaacacattcacattttgatacagaatacacac

SEQ ID NO: 6219 - DNA, 201 bp, Homo sapiens
tttattggagtgtgatgacagatagtgaataaattaacataaatttgcataatacaatacagctgttaatttatgatcatattaaaacacaaagttttgtmgtttgaagcagttaaaagtcttaatcttctgaaaatttccctcttgtttgttatttgtttatgagttacttagggttattagataaaatacaggcttctg

SEQ ID NO: 6220 - DNA, 201 bp, Homo sapiens
ctgtcagttaaacttattagagttacccattcaatcaaaagcacctggatttagatggctctggcttttgagggcaaagtgagtggaaaaaataatggagractggagtccgaacagaattttaatttatgttttcagtagtaataaagccttctctagattaataactgggaaagcactttgaaaagcatcaagcattat

SEQ ID NO: 6221 - DNA, 201 bp, Homo sapiens
gtgcagctcctacaaaatttgagaccctgaaaggatctcaaacttgaactccgagttgctcccctgtggttttgttaattcaacagcaaattttcctaagsctgactctggtgtctgtaggtcgaaggcctcataatatgctacatttatgcatattcgccctgtcagttaaacttattagagttacccattcaatcaaaa

SEQ ID NO: 6222 - DNA, 201 bp, Homo sapiens
gttcctaaggatcacttttttaaaaaatcttttttaaatgggagtaagctgttatctgcacaaagcccttggggtgaagtccagtcaacagggcttccctyaggagatgttctctaaactgtgttcatgaaagtgaataagagttagcaggcaaaggagaaagggggttggagagggatctagagtttcagagaaagagaa

SEQ ID NO: 6223 - DNA, 201 bp, Homo sapiens
aatttaaggaaaagacaaaatgctgtgagatttgggctaacacgaacttctccctttgtcacgacccctccatcagatggcccctgagttctgcagcctcraggaaggcctgccctatctggacatggtgattgcagagacgctgaggatgtacccgccagctttcaggtgtgtggtagccccctcccctgcccgagtccc

SEQ ID NO: 6224 - DNA, 201 bp, Homo sapiens
agagctattgtattttatgaatatttgtgaattttaggatcttcttcttgaatcttagctgtgtgaaaaatatcttccaaacagtgttcattttcccagamagcactacatataacctcttcatctgcagccaatttaggtgtactcccggcatggtgccctaattacacctttgttatccattatcagatggttcccctc

SEQ ID NO: 6225 - DNA, 201 bp, Homo sapiens
aaagagtaagatggtgctccccattccagcaaacactggccacagtggacagtccaggagagagctgtgcaccaggaaggtgtcagctggacagtagtcargcgtccagtaaagcagcgatgaggaggctgtcagtggacaccagggccccactagtgggtggttcaggaacctgagaagcccccggccctgagaaaggag

SEQ ID NO: 6226 - DNA, 201 bp, Homo sapiens
tttcttcttcccattttccctcttctaagccatagctcagtagtatggtgaaatgtctttgattttagtttaaagaaatgaaatcagattccagatttgcwacctcttattagttgtgtggccttcagacaatcctttaacctcctgattctcaatttcctcctgtgtaaaatacattagactagctaatccctaaggtct

SEQ ID NO: 6227 - DNA, 201 bp, Homo sapiens
gtggcgccatgggcccaggtgagggtgatcaccaaaccctggggttcagggatgccgtgtttagactctgattgtgggcggcggtgagtctgtgggcttaytagccacacactgaattcctaaggagaggcagggagggagctgtggacattccaggtgattctgcgaattcagctctgcctctggggctgtgcaggaaga

SEQ ID NO: 6228 - DNA, 201 bp, Homo sapiens
gggtcatcctatgggaggggaggtggcgccatgggcccaggtgagggtgatcaccaaaccctggggttcagggatgccgtgtttagactctgattgtgggyggcggtgagtctgtgggcttactagccacacactgaattcctaaggagaggcagggagggagctgtggacattccaggtgattctgcgaattcagctctg

SEQ ID NO: 6229 - DNA, 201 bp, Homo sapiens
cctttgcccaagcggtcactttcccacccactttcccagaggggtaccttctccatcttctctctttaagcagattctacctgtgcctggctcacctcctmcacaaaacagcccgagatagcgtgggagtaagtcagacctaggttcaaatcctagctcttccacttaactatgtgatcttggtcaaaatgcttaacctct

SEQ ID NO: 6230 - DNA, 201 bp, Homo sapiens
attgcctaattgtctctcctgtcagatagtcagacccttggaaactgtgactgggtcttgatttgctttcgtgcccccagtacttttgtaagtataatatsacatgtgtttacgcactatctccagttagagttcacgccaccagctgactgactgactgagcctttcatccatattttcattaatgtcattaagtatctg

SEQ ID NO: 6231 - DNA, 201 bp, Homo sapiens
cttcctcggaccatccttgagagtcacgtcttcttggcagtgtcccatagactgtgaatggtgagtgagatcactttagaaggtacacggactttaaaaawctttcattataaagcatttatttattttttaatttttaattttaattttttattttgagaaggagttttgctctcgttgcccaggctggagtgcaatggc

SEQ ID NO: 6232 - DNA, 201 bp, Homo sapiens
ggaactcagcactcccccagcaccatgcttggtatctgctctctggccatggttttgaactatcagctgagcccaagcaaccttgcagaccacattttgaytatgtcttcctcggaccatccttgagagtcacgtcttcttggcagtgtcccatagactgtgaatggtgagtgagatcactttagaaggtacacggacttt

SEQ ID NO: 6233 - DNA, 201 bp, Homo sapiens
ggccttccaaagtactgggattacaggcatgagccaccatgcctggccgctttgcaacatttgattctgttaattttgggtatatgtcaaagctgtcagtyacgtaggggtagaaaaaaagttgtgcatcattgattataatgccagggccccattttacagatgtgaatatggaggtccagagaagttatgtgatctgat

SEQ ID NO: 6234 - DNA, 201 bp, Homo sapiens
tggctaattttatgttttacttatttatttatttatttatttatttatttgtaaagacaggattttgctatgttgcccaggctggtcttaaacgcctgagstcaaatgatcctcccacctcggccttccaaagtactgggattacaggcatgagccaccatgcctggccgctttgcaacatttgattctgttaattttggg

SEQ ID NO: 6235 - DNA, 201 bp, Homo sapiens
tcagtcagtggggatctacaaatgtttcagcaaagcattactgaaataacaagtatttttggaagatctggccaggcatggtggctcatgcctgtaatccmagaacttcaagaggccaaggtgggaggatcgtttgaacccaggagttcaagaccaacttgggcaacatagggagaccccgtttctacaaaacattaaaaa

SEQ ID NO: 6236 - DNA, 201 bp, Homo sapiens
tatttttggaagatctggccaggcatggtggctcatgcctgtaatccaagaacttcaagaggccaaggtgggaggatcgtttgaacccaggagttcaagaycaacttgggcaacatagggagaccccgtttctacaaaacattaaaaaaattagccagctgtggttgtgtgtgtctgtagtcccagatattaatacttgag

SEQ ID NO: 6237 - DNA, 201 bp, Homo sapiens
tccagaatgatgagaggataatttctgttgttttaagccacccggtttgtggcaatttgttagagaagccctgggtaactagtctggtctccttgctcccrttggtcttactgagccaaagcatcccattggccttactgagccaaagcatcccattgcatcatgtttgttactgtaaccctcaaatctttttcttgacct

SEQ ID NO: 6238 - DNA, 201 bp, Homo sapiens
ggcagatcctatctactctcttagtgatgcacaatgacatctgggctagtgcctgacacagagtaggcactaaatatatttttatggaataaagaatggamcaactacattgtttcaatatctaatcaaaggaggaaatagcttacagattttatgaggcttagtaaccagcttgatacactcaaggtgaaactttggaaa

SEQ ID NO: 6239 - DNA, 201 bp, Homo sapiens
gtacagatatccaaagtagagcctttgggtatttaaaaataatttgtaaatgccaaattaagagtttaaagggcactgtatgaactagttgtgtgtgtgtragagagagagagagagagagaaggagagagagagagagaatgacagagaaaaagagagagagagaaaaggagagagaaagagacagagaaagagatagaa

SEQ ID NO: 6240 - DNA, 201 bp, Homo sapiens
agtgaagcagaatggctttttatcccttgtgtatgatcatcaagacacaggacagcacagagattcaaaatacaatgcattccccttgctcgtctggtcargctcaccttcctattgcacagggttgattggttggaggccgccaacctctagctgaaaggcagagacagtctcccctgttatttcggtaccaagctgtgt

SEQ ID NO: 6241 - DNA, 201 bp, Homo sapiens
tggttgctgcatattttaatgactactgctatctaagtctttgtgacccaccctcataaagatcaagaacctgtattaattccctcttctttgggtagaarcatccaacagggcatgatagcttacagtagaaatctgcagttaaaatcccagcttcaactttctttctctctactgcttgttaccttaatggatttaggc

SEQ ID NO: 6242 - DNA, 201 bp, Homo sapiens
aagcagagtatcgcagaaaattacaatcacgtcaggcagcaacaaaggattctagtcaaaggcacgtagaagacccgatggtgggcagctggcctgggctytctttcacactgtccaggaatatgtttggattcagaatgggtggccccctctttatacacagggcatgcctctgaagagttgtgtgtaaatcacatttta

SEQ ID NO: 6243 - DNA, 201 bp, Homo sapiens
ctgttggtgtttgggggcagagcctgtctctgtatgcagcacctgctcacactcacacagctcagagtcaggtaccaagggttgcctgtttagactaacayactgcctcttcaccacattcctgcgagataaataccatcatccttattattaccatcccattttacagaggaggaaactaggcacggagagattaagtag

SEQ ID NO: 6244 - DNA, 201 bp, Homo sapiens
aaaatatagttctctggagttccaatgagagagttccaaggcctcactgaattagggccttggggaaatatgacacagattctagagctgagcaacaagasaaagcatgtctaatgagaaagtgagctccccagaattggaggatttcaagcagagaccaggtacctaggtgccaggggtgctatgaaggtagaagactgg

SEQ ID NO: 6245 - DNA, 201 bp, Homo sapiens
tattaggtgtatgcgtgaatttggaaaaaagacaaaaaaaatctttcatttaaaaagacactgttttaaactaggcacagtacactttgatcgttttcccraaaccgcgttggacaccatttttccatgatgatcatttgatttaaaccgaccagtgtgtggctgagctctgtgaactggggcatcaggggatcagggctg

SEQ ID NO: 6246 - DNA, 201 bp, Homo sapiens
ccagcctgcaggtcagggccctcctccatcagttaccacttgtgtttctggagggcaacgcctgagtcctgggttcctttgtatccccatggcacctcagrtatctggcccgctttcctacaggttaacaaccttctcaaagcttcacaggcattttcttaacaccgccttcctccccagcccaagctggccctttggtct

SEQ ID NO: 6247 - DNA, 201 bp, Homo sapiens
ctggccagaaactctgctgagatctgttggagagtttcctgcaaagataagagttaacaagcccccagattcccttccccgctcaggaggggccctcactrtcagctttggggctgatagaagcacagttccaagcgcctggcttcctcctcctccccagtggataaaatgctggaactccgtcaggcaggactgccataa

SEQ ID NO: 6248 - DNA, 201 bp, Homo sapiens
tttgaaatatggaggaccgaaaaggccccatagtcaaataatttggtgaaatattacaaactatattcttcaagattcaccatgtacctgagcatatgaarggcttgagaaaggcctgcagtaaagaaacctgcttaactttgtttattctgggctcaaataggttttcaaaaggagagaacgtgggttgttaacttcctg

SEQ ID NO: 6249 - DNA, 201 bp, Homo sapiens
gggattacaggcatgagccaccatgcccggccaggatgttctgaatattaaactagctgaccggtggacattagctgtgctgtggaaaagtgaagcagaawggctttttatcccttgtgtatgatcatcaagacacaggacagcacagagattcaaaatacaatgcattccccttgctcgtctggtcaggctcaccttcct

SEQ ID NO: 6250 - DNA, 201 bp, Homo sapiens
atggatgtaaaaatccattggtgagcaataaagtgtttcacaaggcaaaacactattattattctagatctctgcagacagcaatttctgcagcaggtcarcactgtcagtgaagctcagcccagagccatcatggagaagactgatgccccgtgggttgtgtgtttgtgtgcgcacgcagcctggtttatgttttttcat

SEQ ID NO: 6251 - DNA, 201 bp, Homo sapiens
tccaagttggtagaatgaaagaagggctggaaataagggctataagattttgagtttaagtgcccaccttataaatcattagcaaaagcagaatataaccytttctccaattctgtatgggtgacacccaccagtctggtaaatggaggtcgttagtgtgatggggtgtcattctcactttgtttagcacccccactagat

SEQ ID NO: 6252 - DNA, 201 bp, Homo sapiens
gcaaacatgagttagttagacactgttaatcacctcactcttcttgaatcactcccctcccttcacatccttcacatgcatgcttgtttagttttttttgttttttttttttttgtattttttcccaaaattcctagtccttcctcctttcacatgcttgtttaggtttttgtttttgtttttgttttcaatactcctagc

SEQ ID NO: 6253 - DNA, 201 bp, Homo sapiens
acagaaaaggaagcccatagctacccctgctggcttttggtgtccatttgcatgaagtgtctttttccacccctttactttaagtttacatgagtccttawgtgtcaggtgagtctcctgaaggcagcagatagttagttggtgagttcttatccattctgcagttctgtatcttttaagtgcagcatttaggccatttac

SEQ ID NO: 6254 - DNA, 201 bp, Homo sapiens
ggaaactttctcccctagcttggctactgcactgcaaccccggtcttagcttgggctgtcataaccaaacaccattgagtgtgtggcttaaacaacagactttttttttttttgagatggagtcttgctctgtcacccaggctggagtgcagtggcgtgatcttggctcactgcaacctccacctcccaagttcaagtgat

SEQ ID NO: 6255 - DNA, 201 bp, Homo sapiens
tccaagtcatcaaaggatgaatgagggaggagagaagggtatactttcatccctgtcctccaaaagagatatcctggaaaatgcacttttaaagtcataastatcatttgaggcccaggtaagagaacatcaataggaaacaaagcaagatggtaaaggaaaagaagagcaataagaatgcttggtgcgaagtagggtcat

SEQ ID NO: 6256 - DNA, 201 bp, Homo sapiens
tcaggtgtggagaagcgctagggtaggtctcagacagacagtcggaaagacctatgcccctgagtgcacattaggacagccagggggctaaaaagggagarctggtgcccaggccccacctcagaccaacactggggagtagggcccaagcatccatctatactaaaacatataaaaatctggctgtttctggctgggcgc

SEQ ID NO: 6257 - DNA, 201 bp, Homo sapiens
ggacaaatagccagtcctctttatctgcagggatgagggcagggacagaaatcagactccctgtctgcttttactcataggagactgagtttgcttttcaytgggtcctagacttccaagtcaaccctactacatccaagtcatcaaaggatgaatgagggaggagagaagggtatactttcatccctgtcctccaaaaga

SEQ ID NO: 6258 - DNA, 201 bp, Homo sapiens
accttgacctcttgagggccagatggaagtgcagactcgattaattgcacagatgtttattgagtgcttactatgtgccaggaatggtgaggagtaccgagagggagtgagacatcacccctgctctcagaagcagcagtgcggcggggagggcaggactccaaaacggctccgattccaggcccgcgtttgcttcccggg

SEQ ID NO: 6259 - DNA, 201 bp, Homo sapiens
cagtggtgctcggaggccacgtaggactgtgccaggggctgtctggaggatgcaggaaggggaagtgtagcaaatggggcctcggtggaaagctggggggygggggagggtcagaagcaaaacttctctattttctgcctaagtttggaaccaactgaggtatggaaagaggttttaggcaaaggaaataaaattttctct

SEQ ID NO: 6260 - DNA, 201 bp, Homo sapiens
gaggcaggagaatcacttgaagcagggaggcggaggttgcagtgagcaaagattgtgccattgccctccagcctgggcaataagaaagaaactccgtctcaaaaaaaaaaaggaccacatgttattatggggctgtacagactgttgcaaagcactgagaccccttggtcaaataaacacattacagcaggtcaaattttt

SEQ ID NO: 6261 - DNA, 201 bp, Homo sapiens
tttggctgagatagaaagaagaagagtagaggccaaatgtgtgctaggaaaatgtgatgtttggggcacaagtagagaggacaaccttggcagtggcagaygagagagaacctcaggactggtgctaaggaggtgggttatttaaagaaagttgtgcaggtatagagtggagaaggggtgcagggggaggatggaattgag

SEQ ID NO: 6262 - DNA, 201 bp, Homo sapiens
agttgcatcctgaccactaatatcagaaaggcccctcctcccagcccgtgaagaggggcctctctgggtgtgtacctggaaccctatcttggaagttaagwtttgtggtcactgctaccaacacaccaactcccaggacacaggatactagggacttctgtgccccatcagtggacaagtcacaagttcccaaagcagggt

SEQ ID NO: 6263 - DNA, 201 bp, Homo sapiens
gagagaacctcaggactggtgctaaggaggtgggttatttaaagaaagttgtgcaggtatagagtggagaaggggtgcagggggaggatggaattgagttaaaaaaaaaaactagcaaaaaacattctgatagcacaggtgagagagataagagtgatttagattatcagaaatggaaggaaaagaaggagaattttatag

SEQ ID NO: 6264 - DNA, 201 bp, Homo sapiens
ccctgttatcagctgcttccaaaggccagggtggtcgttagtgcatcattaataacccattatcgggttgtcatctctgaatttatctaaatttatctcamttattgtaaccctgtagactgataagccctataagtataaaatacactggatgaaaaagctacttcctattatttgttctaaaaaattaactccttcaag

SEQ ID NO: 6265 - DNA, 201 bp, Homo sapiens
ctcccgagtagctgggattgctggcacgggccaccacacctggctaatttttgtatttttagtagagagggggtttcaccatgttgaccaggctagtcttraactcctgacatcaagtgatccacctgccttggcctcccaaagtgctgagattacaggagtgagccactgtgccaggcccagacatgtattttctcacag

SEQ ID NO: 6266 - DNA, 201 bp, Homo sapiens
gctgaacaatgagaacacatgcgcataaggaggagaacaacacacactgaggcctgttgggggaggggggaggaagagcatcaggataaatagctaatgcytaatacctaggtgatgggttgataggtgcggcaaaccaccatggcatatatttacctatgtaacaaacctgcatgtcctgcacatgtatcccaaaactta

SEQ ID NO: 6267 - DNA, 201 bp, Homo sapiens
agcctgggtgacagaatgagatcctgtctcaaaagaaaagaaaagaggccaggaagctctttcaaagaactttctttagtacacctgggtgtcaggcactrtcaaagtcctaagactacaaagatgcttaggctatagtcttttttctcaagaaggaagatgacaaccatattccaggtgacaagtagcaacacctgaact

SEQ ID NO: 6268 - DNA, 201 bp, Homo sapiens
aagtgtggctgtagtcatcaatacttcagagtccaaaaatacattggccttgcctgaccagttgcccattttctggaatagctgggtatttatctagcagygagagaccattatcctgagacacagtcgtgttccaccgacacctgatctactaattaaaatcactatcatgatggactgtttaaattctggtttaaatgt

SEQ ID NO: 6269 - DNA, 201 bp, Homo sapiens
gctgaaaggcagagacagtctcccctgttatttcggtaccaagctgtgtttcttaggcattaaaatggagggaaagcaaccactggcccctcactgggatygttcttgaggattccagacagaccataagtaattcattgagtcgctcacaaagggcctggccctgaaggtttgtggctgcagcatccaggcgagccaaag

SEQ ID NO: 6270 - DNA, 201 bp, Homo sapiens
ttgggacatacttatactaaaaagttaatcttattgtatatctgaaattcacatttaactgaatggttatattaatatttttatttgataaatcaggcaaytctgtatttcataagcagtttaacctctctctactggctcttctctggcagggcagaggggtgctgttttatggagaaaggcacttactgctgggacctt

SEQ ID NO: 6271 - DNA, 201 bp, Homo sapiens
agaaagatagaaatttaagtattcttctagaaatgttatgttcatatacaagcatatatagtctaccctttaaaagtaaagcataaatgagattgtgccaktgcccttgggtaaaatgaacaatctgatcaaatattttcctctctgggagaagaagctatcggtagagacatagacaacagggaacagattttcaaaccc

SEQ ID NO: 6272 - DNA, 201 bp, Homo sapiens
aaatgtatttaaatattgggccaggcagagtggctcatgcctgtgatcccagtactttaggaggctgagactggaggatcactggagtccaggagttcaasacaagcctgggcaacatagtgagatgtccccgcatctctacaaacaaacaaaaaacaattagacaggcatggtggcttgcacctgtagtcccagttactc

SEQ ID NO: 6273 - DNA, 201 bp, Homo sapiens
gagccatgattctgccactgcacttcagcttgagcaacagagcgagaccctgtccgagagagagagagagacgcaagagagagaaacagagagagatggcrgtataaattctcgtggttattctagttcttttggttccatatatctgtttacaggaatcagcttgtcaatttttaaaatgtttaatttttgtgagtatat

SEQ ID NO: 6274 - DNA, 201 bp, Homo sapiens
tctcccttggaatttctcttccttagtcattttcagaaagttaggagtcggcaaccttaaggaggagtttcctatcatctctcctccacttcctcccctcrtttcctccccgtcttctccttggagtccttcatcaatgtctctattttctgttcaggataaacaaagagtccctcttacctgcacaggcctcacctgcct

SEQ ID NO: 6275 - DNA, 201 bp, Homo sapiens
gagctcctgggagttatcttgggaatgactgcaaggtctgaggtagatcgttccaggagcaggtgcttatatacagtggaatggcacccactggcacaccrctaggaattctgttttcttaccaccaccggagccaggtctctgtcacggtgatgagaagttcccaaagtcatttctcctctctagggtgtcccctctctg

SEQ ID NO: 6276 - DNA, 201 bp, Homo sapiens
tctccactgttattgatgatgatgatgataaatgaatgtttctgtgccagatcctaaactaaacaaaagttaacttgatactcacaatggctgtatgaagygggagttatcaccatccccatttcatcagtggggaaagaaaggctggattagtcagggatctccagaggaaccgaactaataggacagagacagaaagac

SEQ ID NO: 6277 - DNA, 201 bp, Homo sapiens
gataatctcctcaaagtcagctgattttaagtgttaaccatatctaccgaagaccttcccagcaaccctgggattcatgtttgattaaataactgcacacwatagcctagcaaagttgacacaaaagactaaccaagctaaataacttgagaacataagataataccctaggacagggcctaggtcggattggcactcacg

SEQ ID NO: 6278 - DNA, 201 bp, Homo sapiens
attcttttcaaccttgtctctaatattccatgattccatggttctgatgccattcctcagcgctctgctgttcttgcctgaccaagtggatcaatggtggctctggcatttctataaaggggatttcagggctgcctgctggggagggaggcttgaagctgtgtctgcactgcatcttcacagcactgagaaaatgccagt

SEQ ID NO: 6279 - DNA, 201 bp, Homo sapiens
gatcacatgggcttgctatgctaatacttcacccagaatgggacaattgcaggggggtggcagatgccatcggggctggcccgcggcccacatgtgctcarttccttcctccaagactgggtctgatacagtgtagacagcaggagatggagagtgacttagatgcagcggttggccagtggggcccaccgggatcacttg

SEQ ID NO: 6280 - DNA, 201 bp, Homo sapiens
tgcccaatgtcacacagtattgaagcttaggaataggtctcgtggctcccactctagtgttttttgctccacaccggtcatttatctccttcccttctatyctccctgcaatctttaactttagtcttggcccaggtcatcctaaatattgccatcttcataatacgtggttctggccatgccacgctcctggctaacatc

SEQ ID NO: 6281 - DNA, 201 bp, Homo sapiens
tacccaagctctttaaactgtctgccaagctcaaaggcaaaattggtatttcccaggccttttggacgggtcatagtgcaatagaaaggtggaaatattgsctgggtttatgaagacataacttcttatccaattggcaaacattttttaaatgcctactcggctgggtacaaaagaacctagaattattctgagcaccca

SEQ ID NO: 6282 - DNA, 201 bp, Homo sapiens
cctcccgtgaagctgggattacggacatgtgccaccatgcccggctaatttttgtatttttagcagagacggagtttctgcatgttggtcaggttggtctygaattcctgacctcaggtgatctgcccaccttcacctcccaaagtgctgggattataggcgtgagccaccgcgcccagccgagaactttttcatatgctc

SEQ ID NO: 6283 - DNA, 201 bp, Homo sapiens
aacccatccctaccatccagaggaaaccactcctctgacatcaatttgtatagatttctcttttcctgctgttgaacttcatgtaaatgtaaacttacagyatgtatccttttgttctggcatcttttgctcaacataatgtctgtaagagtcatccataccacgtatttagattaatatagccaggtgtggtggctcagt

SEQ ID NO: 6284 - DNA, 201 bp, Homo sapiens
agtcacttccatacacaaaccttgagtgtaaagctcaatgtattattgtctatgtattcccctatgtgacaccacccagatcaagacacaaacatttccarcactccagagggttccctcatgcctcttctcagtcaacccatccctaccatccagaggaaaccactcctctgacatcaatttgtatagatttctcttttc

SEQ ID NO: 6285 - DNA, 201 bp, Homo sapiens
tcctctcttacctgttgtcacccctctaatgacttttcactttctctgctcaccttctccttcctgcctcttttagaaatgggaaacaaagggcccatagrccctaaaaggggccaccctttgaaggaggagacatgaccacaaatgtcaccctttgatatcctaatgggatccatgttaaaaaaggaagtttttaacctg

SEQ ID NO: 6286 - DNA, 201 bp, Homo sapiens
gccataattagaagaggcccctttccagcagctgaagctgactaggcagatagagcccaaatttgtttttagccaccacatgcccctgagctgacccctcragctgtggacacatctcacaacctcacccggaggccattctctcaggccagtcacactctcccacagagagagcgaagatgatgtcaaatctatggccac

SEQ ID NO: 6287 - DNA, 201 bp, Homo sapiens
gcccagttcacgtgaccgttggcagccacagggagccacggagtcccaccagcgtcccatagagccacttggagcttcaggtacaaggaacaagcccctcktaggccccctcaggaaaatttattctcgcagccaagcatgtcaagtgcaatatcaggaacacccttgtccttcttgaacactgcttctggccagaaactc

SEQ ID NO: 6288 - DNA, 201 bp, Homo sapiens
gaggtggggagcccaggccaccaggatgcagacagaggaaagcttattgggtgtgaggtgcttggggctgagtcttaaagaaattagagaaagtccccctscctgtgttccgaactaggtgagccatccagagtgtgtccttgtcatcgcaagagcttatgagatgagtacaattatcatctctattttatagacaaagaa

SEQ ID NO: 6289 - DNA, 201 bp, Homo sapiens
gttcacgcagctatcatagaaggcgttgctccagccctccttggccggcggacggacaaaggaggcattgcccctgacgaactcgcccaccagcacccggrccaggaacatcgtgtgggtctgcgtgtcggatttgctgtagtggtgggaatatgcagcatctcgggcaaagtagctccctgaaatgacacacgagggctc

SEQ ID NO: 6290 - DNA, 201 bp, Homo sapiens
aaccatttttggggggttccaattagacctcacttttcattcttttagggaagtacgtattcattcttttgttgattatgtggcaaactttttcatacctrccatatgccaggcactgtgtaggtgctgactgtaaagagacagtgtccctcgaggaactctcggtttagtgagggaggcagacaaggaaagggaccagca

SEQ ID NO: 6291 - DNA, 201 bp, Homo sapiens
aactacaatcacttctggttagtccactagtgaacccaaaagtgacttaaaagtaaaaatcattattagcaagagattaagaacataacttcattgagagrtcaatgttaagagaacagttcattaaaagtttctgtttaaaaagaaaaggaaaggcccaaatagccatttcaaggcagagcaggtgaaaggcctggaaca

SEQ ID NO: 6292 - DNA, 201 bp, Homo sapiens
atcatctccctttcctttctgtttggagaacatccttcagccattctttaagggtaaatatgtgagtgacaaaatctcttagttttccttcatcagagaaygccattatttccacttttctcctgaaggatactttcaccaaatagatgacttgtgattgacagctatttcctttcagcacttgaaaaatgtgccacttcc

SEQ ID NO: 6293 - DNA, 201 bp, Homo sapiens
ggtagacctggtgtttctcaaagatcacaaagatggaggggtcggacacactgttcacgcagctatcatagaaggcgttgctccagccctccttggccggbggacggacaaaggaggcattgcccctgacgaactcgcccaccagcacccgggccaggaacatcgtgtgggtctgcgtgtcggatttgctgtagtggtggg

SEQ ID NO: 6294 - DNA, 201 bp, Homo sapiens
atatttggtagaattcttcattgagaattctacattagagaattgtactctctaagtacattgagtaccacatcatagggtggtgtaatttttgcttcaamcatcaagtatgatttaagagactccaaggtatcctggcctggagatgtgtttttcaggaaattttaaattatgaattcaaataaaaaatatgaataatta

SEQ ID NO: 6295 - DNA, 201 bp, Homo sapiens
ctgtgagctggttctacctcattggtgtgctatggataacattcccatgaattcagatagatagaggaattgccccatttgaaattgaagagcaagactgyaaaaggaggggatgatggaatgcaggacccagccacttagaatacgtggtacatgggggtatatagagcactcaaagtctgagtggggtatcctgacacc

SEQ ID NO: 6296 - DNA, 201 bp, Homo sapiens
aaggggcctttccaaaatgtgtgcttatggcccagacactcctttaaccctaggttttccagaaagtctgttttgccccaggactgtggacagcattatgktttgtttggtgagctttcttttttttttttttttaggttgtattttataactgaatatggcatgtgtgaaaatatcagctaccagactctgttagtccag

SEQ ID NO: 6297 - DNA, 201 bp, Homo sapiens
ataaatctcagtggtttcctgatcattccataatcatgatggcattcactttattgagtgggagatgaagtgatgcaggaatgagccaatcctaatacatkttagaagtgtattaatcctaaataaagcctaaaatcatctattttcttcagtaattgtttccatggtgggaggttagggggagcttttgaggtgatttaa

SEQ ID NO: 6298 - DNA, 201 bp, Homo sapiens
gtgtgctggacatggcaagtatgtattcctcatgacatttaatgtgctcatgttcttcagtggtttaccttttgctaataaatctcagtggtttcctgatyattccataatcatgatggcattcactttattgagtgggagatgaagtgatgcaggaatgagccaatcctaatacattttagaagtgtattaatcctaaat

SEQ ID NO: 6299 - DNA, 201 bp, Homo sapiens
cctgcctcagcctcccaaagtgctggaattacaggcgtgagccaccgcgcccggcttcaatccactttttaattcatgcccccagactgattctttctggrccacatgtgttttcttccaaatcgtcttgtttgggaattttatctggcctctcctcctcttgtcccaccatcaaaattcagtgtaaaatcttctttctca

SEQ ID NO: 6300 - DNA, 201 bp, Homo sapiens
gtgcccttctgttctcttagctcaggctgacctgtggcctgaggatgccgccctgcgggaggagaggtctgttttttcccctccttctacccctcccccamccctgctgggcccctttctcctccaggagtggggcctgtgaacggatccccaaatcctgcctacctggagctgccctcagtgccttccctgcggggcttc

SEQ ID NO: 6301 - DNA, 201 bp, Homo sapiens
ctctcttaaatggttatacacaatatccctatccttctcctcactttattgattttccagaatgagagtacgaggtatgactataaagtaacgtgactgaytattttagcatacactccaatacttatacagccaaatgaattttatgaccttcggaggcattttcctgataggctaaacccttactgcagatatgccact

SEQ ID NO: 6302 - DNA, 201 bp, Homo sapiens
gtatggcttgattcaggggctcaagccctgtccaagttgttctctctccccatttctcagctccggtttctctgggcacactcccttctcaggcacatctyccctaggggtctcaagccagctgtgtaaccagtgttttgaacagtctcaactcagtgaggtaccaacttgaaaccatttggtgttttttgtttcattttt

SEQ ID NO: 6303 - DNA, 201 bp, Homo sapiens
catgatgaggcaagaacagatggctccaatggggagttgtccctgaggaacaagaaaagagaagagaatgattccagtagtccaaaccagcctgggaggayggatccctccagaggacaactaccatgtttacaccactccctgccttctgtgccaagtgttttgcatattttgtttctaatctttgtcacgactcttcaa

SEQ ID NO: 6304 - DNA, 201 bp, Homo sapiens
agaaagagcagatatgtgcatggcatcagttcagactcttctgtggacagtgataaaaaaaactcagcccagattgtctcagggagtttactgacccctayaactgaaaactccagagggcagagctgccttcaggtatggcttgattcaggggctcaagccctgtccaagttgttctctctccccatttctcagctccgg

SEQ ID NO: 6305 - DNA, 201 bp, Homo sapiens
aggaacaagaaaagagaagagaatgattccagtagtccaaaccagcctgggaggatggatccctccagaggacaactaccatgtttacaccactccctgcyttctgtgccaagtgttttgcatattttgtttctaatctttgtcacgactcttcaagggaggtattattttcatttttgcagatgaggaactagactcagt

SEQ ID NO: 6306 - DNA, 201 bp, Homo sapiens
cagggtcctgacctcaggggttccgattccataagtctgggctgggacccaggaacccgcattttattttattttattttttgagatggagtctcgctctrtcatccaggctggagtgcagtggcacaatcttggctcacagcaaactccgccgcctaaggaacccacgttttaaataaatgtttccagtgattctgatgc

SEQ ID NO: 6307 - DNA, 201 bp, Homo sapiens
gcctgcagggcagtagaaggcagaagataatcaggtctagaatgtgtgatgtcatttagagagccatggggcgataggagtctgtcccaccagctataacmatagtcacatccagttatgtcagtctgccaggaggacacagcaagtgctcatgttaggccaggcacagtggctcatgccagtggctcatcccagcacttt

SEQ ID NO: 6308 - DNA, 201 bp, Homo sapiens
cacctgccctttccacaccagagccccagggtcccggggagactaaagctggggtctatttctattcccccaaccaagacgggagcttcacatccccacayactgagaggccagaatgggtcagaccagagtgagtgtgctctggctaagactggccgacagctctgttcccctggggtggggactggacgtggccctttg

SEQ ID NO: 6309 - DNA, 201 bp, Homo sapiens
ccccaaccaagacgggagcttcacatccccacacactgagaggccagaatgggtcagaccagagtgagtgtgctctggctaagactggccgacagctctgytcccctggggtggggactggacgtggccctttggtttaactgcattttactctttccagcctgtctggccattattcttgcaggagcacgcaggactaaa

SEQ ID NO: 6310 - DNA, 201 bp, Homo sapiens
attttaggtaccgctgcagctagaatccaaatctgccctaggtccaaaaaatggtgtctatatcaagatcgtatcccgctgacacagaaggctgccgggtsgggggagggcacccccaaattcaaagaaaaccctaagtgtggatgttcagaattttggaaaaatgtcactgaagtgattgaaagagtgcctggcatgcaa

SEQ ID NO: 6311 - DNA, 201 bp, Homo sapiens
ttttttcaaaattgatttagttattttaagttctttgcctttccatataagttttggaataagtttgtctacacctacaaatattcttgctgagactttgrttggaattgcattaaactgatatgccagttttgggagaattgatatttttacattgtggagtcttccaatccatgaacatgatatgtttctccacttagt

SEQ ID NO: 6312 - DNA, 201 bp, Homo sapiens
agagagagagagagaaggagagagagagagagaatgacagagaaaaagagagagagagaaaaggagagagaaagagacagagaaagagatagaaagagatagagaagatagaagagggggagagagagagagagaggagagagagaggtggagcgaattggtttccttgacaacaggatatccaatcaactttttcctcca

SEQ ID NO: 6313 - DNA, 201 bp, Homo sapiens
atattatcttctagaatttttatagtttcaggtcttaggtttaagtctttaatccatcttgagtgaatttttgtatgagagatgaagatccagtttattcycctacatgtggctagccaattatcccagcatcgtttattgaaagggtgtcctttccctacttcatgtttttgtttgctttgtcgaagatcagttggttgt

SEQ ID NO: 6314 - DNA, 201 bp, Homo sapiens
agtgaatggccccatggtgacggtggccctgtcagtggctctcttggccctcctgaaatggtaagtgcagccagccctagggactgtgacagcgtcagccrtctcaccctggagccttgctggtgccatggcggggtatgtgggagtgtgtttttcttcttttctaatctagcgggagtgagtattaacacagcttcagaa

SEQ ID NO: 6315 - DNA, 201 bp, Homo sapiens
gagagagagagagaaggagagagagagagagaatgacagagaaaaagagagagagagaaaaggagagagaaagagacagagaaagagatagaaagagatagagaagatagaagagggggagagagagagagagaggagagagagaggtggagcgaattggtttccttgacaacaggatatccaatcaactttttcctccaa

SEQ ID NO: 6316 - DNA, 201 bp, Homo sapiens
aagtgaatggccccatggtgacggtggccctgtcagtggctctcttggccctcctgaaatggtaagtgcagccagccctagggactgtgacagcgtcagcygtctcaccctggagccttgctggtgccatggcggggtatgtgggagtgtgtttttcttcttttctaatctagcgggagtgagtattaacacagcttcaga

SEQ ID NO: 6317 - DNA, 201 bp, Homo sapiens
agagagagagaaggagagagagagagagaatgacagagaaaaagagagagagagaaaaggagagagaaagagacagagaaagagatagaaagagatagagaagatagaagagggggagagagagagagagaggagagagagaggtggagcgaattggtttccttgacaacaggatatccaatcaactttttcctccaactt

SEQ ID NO: 6318 - DNA, 201 bp, Homo sapiens
tttcgccatgttggccaggctggtctcaaaatcctgacctcaggtgatccgcaagtgctgggattacaggcgtgagccactacgcccggcctgtgcatgcstttctgttccttctgctgatgtggggggtgttgggctcctgtcaggggcctcctgatgccccgttggggcacttcctcgctcagcttcctcgtccctgac

SEQ ID NO: 6319 - DNA, 201 bp, Homo sapiens
cagcctcctgtctcatctggaagaccaccactctggggtctcagaggaatgatggaagccttggggtttctaaaattggaagtgaatggccccatggtgayggtggccctgtcagtggctctcttggccctcctgaaatggtaagtgcagccagccctagggactgtgacagcgtcagccgtctcaccctggagccttgct

SEQ ID NO: 6320 - DNA, 201 bp, Homo sapiens
tttctagtttctttaaattttatttttaaaatatagaatgtttgatatatcaggaatttatttggaagatggagttagggacacaccctttttcccccccyccaggagggtagagttccatctggaaattcatccttttccaaatgatttgaaatgtcacttttatcatttattaattcctaggtgtatttctgatttctc

SEQ ID NO: 6321 - DNA, 201 bp, Homo sapiens
tccatgagccaagcagggacagagccccaggactctggggaccctgctttctccatggcaccctgtggaccatccagccccggaggagcgcctgtgagtcraatgcccaggtactcccagcactggacttctccttaactttctctgaactttctggaagttgagcatctcagacactcacaactgtgatctgcagtagcg

SEQ ID NO: 6322 - DNA, 201 bp, Homo sapiens
ttcagaattttggaaaaatgtcactgaagtgattgaaagagtgcctggcatgcaaggataagaggttctttacataacatttcctaaatgcttaataaacrtttgttgcacttggttttgacattgccaatggggtttgaaccagtgctctctctaaatgaagaattgctgataaataagtgaaaatgtagttttgacaaa

SEQ ID NO: 6323 - DNA, 201 bp, Homo sapiens
aggctgtcagtttattggcctatttataaaggtctgactctctgacatgttctccaggctccccacattaaccactaaggaggcactctttgcagatgaatttttttttttttttttttttttttggcctcggcttaaagaggaacctattaacctttgcccggaatctatggctggtgaatggcttgtcatagcatgtta

SEQ ID NO: 6324 - DNA, 201 bp, Homo sapiens
acactgcgttgacatcatggaattcccactgcatgcttaacaccataatgaacactagacatcaaagataagaagacaagatgtgtttccaccactcacaracgagcagaaagacagtcaggaaaaaaattacaattactagagaaccactaggagtcaaccaggcaagaaaagaggagccgttccaggcaaggcaggggg

SEQ ID NO: 6325 - DNA, 201 bp, Homo sapiens
caagacagagctatacggttactaagaaaacttgctttaaaaccatctaaagtctgtatacattccatcaagcagatgtgtgtttgcgcagtgaaaatgcrgcacagatgttaaaaggtaaatatttttctaagctctagccgatgggtggattagacacctacatctatcagggtgcgtattttccttggataggaccat

SEQ ID NO: 6326 - DNA, 201 bp, Homo sapiens
aagtgggaggtgatctgagggttctgtatgctgagcttccccacagaggactctttgccccgctagacctgagactggctggggccagccacaaaggcagscccatggctgatggagccaacagggcacctctgcagggggcacctctccagggtggtaggagtgaaatagagcaggccccaagttttagaaaatgaccag

SEQ ID NO: 6327 - DNA, 201 bp, Homo sapiens
caatttttgtacttttagtagagacggggtttcgccatgttggccaggctggtctcaaaatcctgacctcaggtgatccgcaagtgctgggattacaggcrtgagccactacgcccggcctgtgcatgcctttctgttccttctgctgatgtggggggtgttgggctcctgtcaggggcctcctgatgccccgttggggca

SEQ ID NO: 6328 - DNA, 201 bp, Homo sapiens
gcagcagccgcgtcctgtgcagcttcacgcccggagaactgtgcagcaaacgtgtctagatccagaaggcatgggaaggtgtaggcaagcttgcagccccytcggcccacaccactgtgaactcaactcgcatgtccttggaggtgcgggaagaagcagctaactggcatccctgccccagctctgaagcctaaaaggaca

SEQ ID NO: 6329 - DNA, 201 bp, Homo sapiens
aaaacttgagcacctacctatctcacaggtctgacatgagactcaaaggagctctcagagccctcccagggcagactgtccaagtatcagggattccaacygggattccactgctccttggtgttcttgtagccagcctgcatcttggggagtctgccgaattcagaagccccatacctcaccagctcggggtgagcttct

SEQ ID NO: 6330 - DNA, 201 bp, Homo sapiens
atgtcttgatgtcatcacatcatgggaactctagttcaaatgaagtttttggcagaatcaccaggttgaagtgggaggtgatctgagggttctgtatgctsagcttccccacagaggactctttgccccgctagacctgagactggctggggccagccacaaaggcaggcccatggctgatggagccaacagggcacctct

SEQ ID NO: 6331 - DNA, 201 bp, Homo sapiens
gattcgacccatccatgagcatgggatgtgtttccatttgtttgtttcatctatgatttctttcagcagtgttttgtagttttccttgtagagttctttcsactccttggttaggtatattcctaagtatttttatttttttgcagctattgtaaaaggggttgagttcttgatttgattctctgcttggtcattgttggt

SEQ ID NO: 6332 - DNA, 201 bp, Homo sapiens
tgccaccacccacgcaccacaccattgctgcagacccagtcctttgcagagcaagcattttgcatgttttccatgggtgtggctgggttggggtggttagmaaagtgtgcagaagatggtgtgggagaagggcagggcatggagaatcacagtggggtctcttcatgcttgtggactctcctggtggagctggttctctgg

SEQ ID NO: 6333 - DNA, 201 bp, Homo sapiens
acgattgtattgtcagcagtgacagtttgacttcctctttagcgatacggatgctctcctttctttcttccttccttccttcattccctccctccctaccytctctttctctttctctctttctctctttctttctttctttctttctttctttctttctttctttctttctttctttctttctttcttctctctctctct

SEQ ID NO: 6334 - DNA, 201 bp, Homo sapiens
agtctcccccaaaatgaagaaactctggtttgagaatgtaaatcactaggtaaagattctgtttattttctttatttccatgtttcccaatatttaatttkcaaccctctaagagcagttattttataaaataagtcccagctgaaatgaatttgataggattttagaatttctttctcccttaacacatcctattagcct

SEQ ID NO: 6335 - DNA, 201 bp, Homo sapiens
ccctgctctcaccacttagaaaccaacccagggaccaaccaagcatattcccagcagtaggcaagaagatccctaaagaagggaagtgagacctgcgtttwttcccctgatacttgggaaatctagcagatatagagacagtgacccaggtatccaagggattggtccaaattcaccatcctgtaactcgaaatgcaatgc

SEQ ID NO: 6336 - DNA, 201 bp, Homo sapiens
attgtattgtcagcagtgacagtttgacttcctctttagcgatacggatgctctcctttctttcttccttccttccttcattccctccctccctaccttctctttctctttctctctttctctctttctttctttctttctttctttctttctttctttctttctttctttctttctttctttcttctctctctctctctc

SEQ ID NO: 6337 - DNA, 201 bp, Homo sapiens
tattgtcagcagtgacagtttgacttcctctttagcgatacggatgctctcctttctttcttccttccttccttcattccctccctccctaccttctctttctctttctctctttctctctttctttctttctttctttctttctttctttctttctttctttctttctttctttctttcttctctctctctctctctctt

SEQ ID NO: 6338 - DNA, 201 bp, Homo sapiens
cggctccgagtccagcgcagccgagccggtctgcagaggggcccccagaactttgtgtgtgtgtgtgcacgcgcgcgcgtgtgtgcccaggtgcgagggtkcgcgcgtgtgctggcggggagggaaccgacccgaaagagagccccacgctggcaaagtggctcgcccatctcacagccggttggcgctcgcggaggtagg

SEQ ID NO: 6339 - DNA, 201 bp, Homo sapiens
gcacgccgcggaaatgcagcccccggggtggtcgctgggttcctgccggagtctggcttccacgccaccctgatcttctcctcctcgcgtctacactgtcycgagggccgccactccatcacttgaatgggagctcacaactctctgggtcctcgcttttctcagcgctctctcctatcagggcttccgctaaacactctc

SEQ ID NO: 6340 - DNA, 201 bp, Homo sapiens
tttgggccagtcaatcttggcctgcagggctggctacaggatctgtgaggcccagtgagaaataaaagcgtggtagcctttattcccaaagcagggggacrtgtccatcgtggtactcagcgagcttctttgtttcttctgcagtctctttttcgacttgtcatggtgctttttattttccatttactgttgttctaagta

SEQ ID NO: 6341 - DNA, 201 bp, Homo sapiens
tgaagcaggagaatcacttgaacccgggaggtggaggatgcagtgagccgagatcacaccactgcactccagcttgggcgacagaaaaagactctgtctcaaaaaaaaaataaataaataaaagataaagttatgaagactctcaagacagcgccacagaggattaacccccgcacagagcccttttcattggtcacttgc

SEQ ID NO: 6342 - DNA, 201 bp, Homo sapiens
gccccctctccccatgccagcattaagacctgatgtgcagcccttccctgatctcctttggagcctcttgcaaactgtcatccaattctttcttttattcttttttttttttttttttgagatggagtcttgctctgttgcccaggctggagggcaatggtgtgatcttggctcactgaaacttctgcctcttgggttcaa

SEQ ID NO: 6343 - DNA, 201 bp, Homo sapiens
atgagctggaaaaaaagaaaaaaaaaactcctgctgcaataaattacatcacagtggagatctctttctacccagaaaattctgagcccagacaatggctyatttatttcagacaatattcaatacaacagaattccaggtcaatagaaggatttctgcaggttcttagagttggtagcaaagggatttaacccacggaga

SEQ ID NO: 6344 - DNA, 201 bp, Homo sapiens
cctccaagtttcctctttcccaccagctcactgtggcctttgtgtctcacataaattttgtcttctgtgtctgaaactcttactgacttctgcttccttgytccctgggtctacactgttccttctcttcctggaactgacccttcgatctctgggcttcctaccttgagtaatttgtcaaaatcctgttcttgcaattgg

SEQ ID NO: 6345 - DNA, 201 bp, Homo sapiens
ttggtcctgggccgaacctggggacgtacctaggaatttctagccaaataagcaatagagggaagggtctgactgatgacggagcatgagcacactctagraagggcaaagaattgatctgggggatgggatggggcggggccctaagatttcaactccaccctggaaaagcaggacttaggggaggcatgtctgaagttc

SEQ ID NO: 6346 - DNA, 201 bp, Homo sapiens
gcaaagtaaataaccctcaagacccttaaatcttcaaccttcaggatcagatgaaatcacattcagtagtctcattcttgttttcactctagcagggaaaygtgtaatcagttgtagaaacgttttcaataaaagcagtgtgaattttaaaagtcatctggaaacgtcatgtattccttaatgataagttagtggttatag

SEQ ID NO: 6347 - DNA, 201 bp, Homo sapiens
aagttgacactgctccacgtgctgcacaagttccggttccaagcctgccctgagacccaggtgaggcccccctgctcagaggcaggggcaggggcaggggygggagggccaccccagttctctgcgtgagagcaggccagcctgggggcaacatcaggctctgcctccgtgagcttgggcaagctccttaacctctctcgg

SEQ ID NO: 6348 - DNA, 201 bp, Homo sapiens
caagtgattctcctgcctcagcctcctgagtagctgggattacaggcttgtaccacccatgccccatgcccggctaatttttgtatttttagtacagactrggtttcaccatgttggccaggctggtcttgaactcctgacctcaggtgatccgcctgcgtcggcctcccagagtgctgggattacaggcatgagccacca

SEQ ID NO: 6349 - DNA, 201 bp, Homo sapiens
attttcttccctttaaaaaatacttgaggccaggctcagtggctcaccgctgtaatcccagcactttgggaggccgaggcgggtggatcatgaggtcaggmgttcgagaccagcctgaccaacatggcgaaaccccgtctgtactaaaaaaatacaaaaattagcctagtatggtgccgcgcacctgtaatcccagctact

SEQ ID NO: 6350 - DNA, 201 bp, Homo sapiens
ttgtcatggacctgtattgccaccaaggtggctttggctccctgagtcctgaccctctgcttgttacttcccaacaggcgtcgggtttggagttcaagtcrgtagccgacagcgttctgtttttacgtgacaaaagatgggaagaggtcagaggtgccctgatgtctgctttcagtcctgaaaagctgaacgaggtaagac

SEQ ID NO: 6351 - DNA, 201 bp, Homo sapiens
taagggacatgttctcctgatacactagctgggctccactcacccaagtcattaattggagtcttattgggctactgcctcatatcctactcccgaagagytgatacctcccataacctcattcttagggtcagctggccgtaccagaaagagcactggattaggagccagatctgggttctggtcttagctcagctatcc

SEQ ID NO: 6352 - DNA, 201 bp, Homo sapiens
attgtcagcagtgacagtttgacttcctctttagcgatacggatgctctcctttctttcttccttccttccttcattccctccctccctaccttctctttytctttctctctttctctctttctttctttctttctttctttctttctttctttctttctttctttctttctttctttcttctctctctctctctctcttt

SEQ ID NO: 6353 - DNA, 201 bp, Homo sapiens
tatcaattcagtagttagcccatcaaagtaaaaaattgaattacactgtgtaaggccaccttgggatccaaaagataaaagagaagataagggacatgttytcctgatacactagctgggctccactcacccaagtcattaattggagtcttattgggctactgcctcatatcctactcccgaagagctgatacctcccat

SEQ ID NO: 6354 - DNA, 201 bp, Homo sapiens
gtcagcagtgacagtttgacttcctctttagcgatacggatgctctcctttctttcttccttccttccttcattccctccctccctaccttctctttctctttctctctttctctctttctttctttctttctttctttctttctttctttctttctttctttctttctttctttcttctctctctctctctctctttctc

SEQ ID NO: 6355 - DNA, 201 bp, Homo sapiens
atttccaaaagcaatagagaagcactgaatatttttgagcaggagtccaagttggtagaatgaaagaagggctggaaataagggctataagattttgagtktaagtgcccaccttataaatcattagcaaaagcagaatataaccctttctccaattctgtatgggtgacacccaccagtctggtaaatggaggtcgttag

SEQ ID NO: 6356 - DNA, 201 bp, Homo sapiens
ggctaatttgggtaatggtactattttactggagacaaataaaaggaattagggggagagtctcatattaaaatagagggttggataaggggagtttatamtctttccccatcagtggcttttatgctctatcaattcagtagttagcccatcaaagtaaaaaattgaattacactgtgtaaggccaccttgggatccaaa

SEQ ID NO: 6357 - DNA, 201 bp, Homo sapiens
agcagtgacagtttgacttcctctttagcgatacggatgctctcctttctttcttccttccttccttcattccctccctccctaccttctctttctctttctctctttctctctttctttctttctttctttctttctttctttctttctttctttctttctttctttctttcttctctctctctctctctctttctcttt

SEQ ID NO: 6358 - DNA, 201 bp, Homo sapiens
ggttttaccacattggccaggttggtctcaaactcctgacctcagatgatccacccaccttggcctcccaaagtgctgggattacaggtgtgagccaccaygtccagtcacattattttcttaactgtgtcaactctctcatatcactttgttggcttatctcattcttaccttttatttcatggagtctgagatttttat

SEQ ID NO: 6359 - DNA, 201 bp, Homo sapiens
ttccttttattcccagtgttctctcattccccttcccatccccaatagtcaaccattccaattgtgtttaatgtgtttttttttcacatgttcttgcaaaytgtgcattatcatttcgtggatattatccttagtttatgccaatagtactgccgtagatctcattctattccttagttttttcatttagcactgtgcttt

SEQ ID NO: 6360 - DNA, 201 bp, Homo sapiens
acagtttgacttcctctttagcgatacggatgctctcctttctttcttccttccttccttcattccctccctccctaccttctctttctctttctctctttctctctttctttctttctttctttctttctttctttctttctttctttctttctttctttctttcttctctctctctctctctctttctctttctccctc

SEQ ID NO: 6361 - DNA, 201 bp, Homo sapiens
atcctgttcaagagggctctgccctcatgacccatttgtcccccaaagaccccaccttctaatactgtcatctgggggtttaagatttcaacatatgaatytgttggggggatggatacaaacattcagaccatggcagagctgctaaggagacattgggtgcaaggtgacttaggaatgaagcactcagaggatcaggaa

SEQ ID NO: 6362 - DNA, 201 bp, Homo sapiens
cagtttgacttcctctttagcgatacggatgctctcctttctttcttccttccttccttcattccctccctccctaccttctctttctctttctctctttytctctttctttctttctttctttctttctttctttctttctttctttctttctttctttctttcttctctctctctctctctctttctctttctccctct

SEQ ID NO: 6363 - DNA, 201 bp, Homo sapiens
tttgacttcctctttagcgatacggatgctctcctttctttcttccttccttccttcattccctccctccctaccttctctttctctttctctctttctctctttctttctttctttctttctttctttctttctttctttctttctttctttctttctttcttctctctctctctctctctttctctttctccctctctc

SEQ ID NO: 6364 - DNA, 201 bp, Homo sapiens
ctttttaaggctgagtaatattccattgtaagcctattctgccttttgtttattcgtttgtttgtagatggcggagtgtgttacttccagcattgagctamtgtgaataatgttacttgaatatggatgtggaaatacctctttgagaccctgcttttagttcttttgggtatatatgcagaggtggaattgccagatcac

SEQ ID NO: 6365 - DNA, 201 bp, Homo sapiens
tgacttcctctttagcgatacggatgctctcctttctttcttccttccttccttcattccctccctccctaccttctctttctctttctctctttctctctttctttctttctttctttctttctttctttctttctttctttctttctttctttctttcttctctctctctctctctctttctctttctccctctctctc

SEQ ID NO: 6366 - DNA, 201 bp, Homo sapiens
gacttcctctttagcgatacggatgctctcctttctttcttccttccttccttcattccctccctccctaccttctctttctctttctctctttctctctttctttctttctttctttctttctttctttctttctttctttctttctttctttctttcttctctctctctctctctctttctctttctccctctctctct

SEQ ID NO: 6367 - DNA, 201 bp, Homo sapiens
gcacaaagtcagaggggatggtttccccatgtcttgaagtgctcactgctggccctgctccagatgttgtccactcaacagacatttcagtctttgctacrtgtacagcatggagctcatggcagtgggagagactacccatcccctccagaaaatgtatcattcatgtctcttttcccaaagaaagctgacatctaattt

SEQ ID NO: 6368 - DNA, 201 bp, Homo sapiens
tataaacggcagttcccctacatatactcacttgcctgccaccatgtaagacatgcctttgctcctcctttgctttccaccataattgtgaggcctcccasccatgtgaaactgtgagtccattaaacctctttttctttataagttactcagtcttggtatttcttcatagcagtatgaaaatggactaatacaacatgt

SEQ ID NO: 6369 - DNA, 201 bp, Homo sapiens
ttccctccctccctaccttctctttctctttctctctttctctctttctttctttctttctttctttctttctttctttctttctttctttctttctttctttcttctctctctctctctctctttctctttctccctctctctctctctctctttctttctcttgtctgattgttctggctaggacttccagtactatgt

SEQ ID NO: 6370 - DNA, 201 bp, Homo sapiens
gacagagagcttcactgggagctcctcagtggtccaggcgagagagacagggcctgaagccagttggcattagacgttggagctggaatacagcacactgygttgacatcatggaattcccactgcatgcttaacaccataatgaacactagacatcaaagataagaagacaagatgtgtttccaccactcacaaacgagc

SEQ ID NO: 6371 - DNA, 201 bp, Homo sapiens
tccctccctccctaccttctctttctctttctctctttctctctttctttctttctttctttctttctttctttctttctttctttctttctttctttctttcttctctctctctctctctctttctctttctccctctctctctctctctctttctttctcttgtctgattgttctggctaggacttccagtactatgtt

SEQ ID NO: 6372 - DNA, 201 bp, Homo sapiens
accactcacaaacgagcagaaagacagtcaggaaaaaaattacaattactagagaaccactaggagtcaaccaggcaagaaaagaggagccgttccaggcraggcagggggaacagcatgtgcaaaggcatgggagtgagagatcatggagggtttcagtcggtatgatcaggattggctcttggcggtggggtggggagg

SEQ ID NO: 6373 - DNA, 201 bp, Homo sapiens
cctctttcagcctctgtttcagcctctgcctcagtccttgccagagacgtcaggcttagcacagagcagctgggagccttcagcagagaaggaaggcaccrcttagacatctgcacgggcagtttttaaacatagggaacatgaaggaaataccacagaatttatggagtgaaagctttaaaaagaaacacaagtctgaag

SEQ ID NO: 6374 - DNA, 201 bp, Homo sapiens
tcagtgcctgccatgtaggaacaccacaccattcagcagggcagctatgtgtttgctgtctattcttgggccatattaataacctggttcaaagatgcagrgattaagataaatgtaccaagcagaagtggtaaacaggaagtgagagctgacttctatttgttattgcaaaaatatttattaacctgttaatgtgtgccc

SEQ ID NO: 6375 - DNA, 201 bp, Homo sapiens
agctgctaagataatttctgcccacattctattggctaagcaatccacatgcccaaggttaacattaatggggcagggaagaagactctgtccactgtagygggaggcactgcacagtcatggagcaaggggcattgatgtagaattttgatacagatggggcatgaagcatcaggagcagtgattcactctacctcatgc

SEQ ID NO: 6376 - DNA, 201 bp, Homo sapiens
aaatggatgcatgaagggatggatgagtacattttcatcaaggaccaagtgagcctagcctcggggctgcaggctcctgggcagtgagtggtaatggggtrggggcttggtcaccctgggaagggggctgagcagggggtcctctgtccccagcctcattccacacaccatgctgcctgcccctgatccccttcacactca

SEQ ID NO: 6377 - DNA, 201 bp, Homo sapiens
aaagtactaagcatagtgcctgagacacaggaaactaaaaactattgtaaattataataatagtaatgattgtgtaactcttgtatgtcaatatacatgtwtaatatatttttcttgtgcagtgacaaagttattgtcaggctaatgactgcaatgactatgtctttgtggtacctacattattggtgaaagaactgaaca

SEQ ID NO: 6378 - DNA, 201 bp, Homo sapiens
tttccctccaggtactccacatcagcattctcaagactggagaagttaggcctcagacatcccaagccttctcctttcattggaaacttgacatttttccrccaggtaagggctgtcttccattggcttccatcataaaatatgctgagggccaggcacagtggctcatggctgtaatcccagcactttgggaggccgaag

SEQ ID NO: 6379 - DNA, 201 bp, Homo sapiens
ctcctcatctcttctctgtatccacccccgacctggtgtttccctcagattcacacgggaggcagctcaggactgcgaggtgctggggcagcgcatccccrcaggcgctgtgctagagatggccgtgggtgccctgcaccatgaccctgagcactggccaagcccggagaccttcaaccctgaaaggtgagtactgcccct

SEQ ID NO: 6380 - DNA, 201 bp, Homo sapiens
aataacaaggtcgtttcaacactttttaaagctcagcttccatggtgccatccattaggagagtctgtgttctggaagtgactaaggtgtgaacacttttygtgtaattgctcttaaccatcatgtttatgtactatttagatggggttgaagaacagcatagagatggtttactttaatactggcagatggctatgtgag

SEQ ID NO: 6381 - DNA, 201 bp, Homo sapiens
gagcatcccatgagcaagaagcctcagctctttgtcctcctctgtgtaggagcccacaaggatgctttatctccaatctggaatggacacttagcatcctkagttctgccctgctcaaaatccatacctgttcatgagtaccagggcttcagggcccgagaacccacagctaacacccataggagaaaggtttcatatgag

SEQ ID NO: 6382 - DNA, 201 bp, Homo sapiens
tgaatggctcttccatttgcctttgaagattgcttgtaactcttcaagttcacttcttcatctcactgccagaccacagcttgagactgatgattgacatkgccactaggttcttcccaaagactccagcctaaagattgttagctgcttcccccaaaggcttagccttctctgctagagttttggttctttggagcatcc

SEQ ID NO: 6383 - DNA, 201 bp, Homo sapiens
cactaaggaggcactctttgcagatgaatttttttttttttttttttttttttggcctcggcttaaagaggaacctattaacctttgcccggaatctatgsctggtgaatggcttgtcatagcatgttagtttgatgaggcaattgtggtcttttttgttaaaacaccccccagcacctcttgatactacttggcctactg

SEQ ID NO: 6384 - DNA, 201 bp, Homo sapiens
ctccctccctaccttctctttctctttctctctttctctctttctttctttctttctttctttctttctttctttctttctttctttctttctttctttcttctctctctctctctctctttctctttctccctctctctctctctctctttctttctcttgtctgattgttctggctaggacttccagtactatgttgaa

SEQ ID NO: 6385 - DNA, 201 bp, Homo sapiens
tagggcaaaaggtaaaggaatctaaatgtctaaaaccaaattaactccagatactagtgtgaactttcaagcaaaaaaagtcacacaccaccgcatacacstttgaaattctactaaattttgaatgtttgacgttagcctttaaactggaacatattcttctttcttccttaggatctttaaatcttttaaagtttgggt

SEQ ID NO: 6386 - DNA, 201 bp, Homo sapiens
tctctttctctttctctctttctctctttctttctttctttctttctttctttctttctttctttctttctttctttctttctttcttctctctctctctctctctttctctttctccctctctctctctctctctttctttctcttgtctgattgttctggctaggacttccagtactatgttgaagaggagtggtggga

SEQ ID NO: 6387 - DNA, 201 bp, Homo sapiens
ggcccaggaccagaagccagacctaatctccgatatcagtcagggtggacaggtccatcatggttggaacagatccatgctggagaggcaccgagtctcaygatgtgtggctggaggttgttcctgcttctggggccagggctgggcctgcagatgagggacagagcacctggctagaaaggagagaggactgcagcggct

SEQ ID NO: 6388 - DNA, 201 bp, Homo sapiens
tctttctctttctctctttctctctttctttctttctttctttctttctttctttctttctttctttctttctttctttctttcttctctctctctctctctctttctctttctccctctctctctctctctctttctttctcttgtctgattgttctggctaggacttccagtactatgttgaagaggagtggtgggagt

SEQ ID NO: 6389 - DNA, 201 bp, Homo sapiens
tctctgtaagatttttgcattgggtgtaaatatctaagtaattcatgtggatatcttctcccaggtaggtgtggccagctgattacttattcccagggagytggagcagcaggaaggaatggcctggaaactggaaataatcccatttgccggggtaagctagctgtggaaaactgaccaggctgtgggtaccgagagagc

SEQ ID NO: 6390 - DNA, 201 bp, Homo sapiens
aatattcttgctgagactttgattggaattgcattaaactgatatgccagttttgggagaattgatatttttacattgtggagtcttccaatccatgaacatgatatgtttctccacttagttcttcttttatttctttcatcaacattgtaaatggcaatgtgctttcatttggtttacacatgttcattgttagcatgt

SEQ ID NO: 6391 - DNA, 201 bp, Homo sapiens
aaccgaactccagtggaagcacttctcctgcagagaccagctcccgcacctgactgtgggcccaggctgggcacctcccacccagtagcaccttcttgttytttaaaatcacaagttcaactattattgaaattatttccaagccttaactcggaatcatgctaagaagctaacacaaatatattaattgaccatttaaga

SEQ ID NO: 6392 - DNA, 201 bp, Homo sapiens
atattcttgctgagactttgattggaattgcattaaactgatatgccagttttgggagaattgatatttttacattgtggagtcttccaatccatgaacatgatatgtttctccacttagttcttcttttatttctttcatcaacattgtaaatggcaatgtgctttcatttggtttacacatgttcattgttagcatgta

SEQ ID NO: 6393 - DNA, 201 bp, Homo sapiens
ttgatttcatgaccactagtgagtcaaaatcagcaatttgagaagcaaagggccagatgatatctgaagtcctttccagttgtaaactggatgactacaarccaatgagacagcccctatcagtgtgcatcagaaaattgttagaggccattgtgtttgcctctttgtggtttaagattctgagaaacctctgtcaaagtc

SEQ ID NO: 6394 - DNA, 201 bp, Homo sapiens
tattcttgctgagactttgattggaattgcattaaactgatatgccagttttgggagaattgatatttttacattgtggagtcttccaatccatgaacatgatatgtttctccacttagttcttcttttatttctttcatcaacattgtaaatggcaatgtgctttcatttggtttacacatgttcattgttagcatgtag

SEQ ID NO: 6395 - DNA, 201 bp, Homo sapiens
ctttcatttttctagtttctttaaattttatttttaaaatatagaatgtttgatatatcaggaatttatttggaagatggagttagggacacacccttttyccccccctccaggagggtagagttccatctggaaattcatccttttccaaatgatttgaaatgtcacttttatcatttattaattcctaggtgtatttct

SEQ ID NO: 6396 - DNA, 201 bp, Homo sapiens
agtttgcaaatacttcctcccagtctgtggcttgtctcttcactttgctgattgtttcctttgctgtgcagaagttttttaacttgatgcaatctcaatcrtccatttttgcgttggttgcctgtgcttgtggggtattactcaagaaatctttgcccagttcaatgtcctagatattttctcaagtgttttcttttagta

SEQ ID NO: 6397 - DNA, 201 bp, Homo sapiens
gcctgggcaacaaagcaagactctgtctaaaaacaaaaaaaaagaaagaaagaaagaagaaggaaagaaagaggaaagaaagaaggaaggaaggaaggaargaaggaaggaaggaaggaaagaaagagaaggaaggaaagaaggaaggaaggaaggaaagaaagagaaagaaagagagaaagaaagagagaaagaaggaaa

SEQ ID NO: 6398 - DNA, 201 bp, Homo sapiens
tgggcaggacaggcctgcgcctaaggacagggatggggggaaagttcaagcattttcacttcaagaaaaattgtggtgcacctcagcccagaagctataayttagtggtggacaccaaatttaaataactgattatctggcttttcgtcattttgtaactaaaaggtttttgctttaaaaaaacatctttagtctaagttt

SEQ ID NO: 6399 - DNA, 201 bp, Homo sapiens
gaattggtttatggccttattgagttgttttttgttttcttggttaaaatcagtaaaagcaaacaaacaaacacaaaaagtagttagtattcttttctttytttgtaccacatctgttgaattcctgtttctcaaagattttcctgacaattttggaaaatacgatgactcaggtaaatgttttccaagtgcctaatatgt

SEQ ID NO: 6400 - DNA, 201 bp, Homo sapiens
ggcggatcacctgaagtcaggagttcgagaccagcctgaccaacatggtgaaaccccgcctctactaaagatacaaaaattagccgggtgtggtggcacaygcctatagtcccagctactcaggaggctgaggcaggaagatcacttgaacctgggaggtggaggttgcagtgagccaagatcacaccattgtactccagc

SEQ ID NO: 6401 - DNA, 201 bp, Homo sapiens
gggagtgagagatcatggagggtttcagtcggtatgatcaggattggctcttggcggtggggtggggagggggaccgggggcaggcaggcggggggaatarggaggcacaaggccaaagaacaaggcagggagcagggtgtgaaggacatcatgtgccacatgctaaagacttggcaaaccattgaagggtgttcagtaaa

SEQ ID NO: 6402 - DNA, 201 bp, Homo sapiens
agtgagagatcatggagggtttcagtcggtatgatcaggattggctcttggcggtggggtggggagggggaccgggggcaggcaggcggggggaataaggwggcacaaggccaaagaacaaggcagggagcagggtgtgaaggacatcatgtgccacatgctaaagacttggcaaaccattgaagggtgttcagtaaagaa

SEQ ID NO: 6403 - DNA, 201 bp, Homo sapiens
tccacctcttccacacccatccaaactcttgctgttcttcaagacactcctcagatactgcctcctccaggaagccttccctgcctccatccacatgcacytttccccttccctgaactctggcagcgctcaccatgtgtgtcactcgttgtcacagttgatccccttgtgccttccagtatttacagtgaaggaggatat

SEQ ID NO: 6404 - DNA, 201 bp, Homo sapiens
gtactatcttggtcgtcggatgtttattgttatttctgagccagacatgatcaagcaggtgttggttgagaacttcagtaactttaccaacagaatggtaygtagttttctttccgcatatagatggatggggaattgttctcagatggagacactgcatgtcagatccaatggggatgcaatcaggcctctgatcaggtt

SEQ ID NO: 6405 - DNA, 201 bp, Homo sapiens
ctgtgttcatgaaagtgaataagagttagcaggcaaaggagaaagggggttggagagggatctagagtttcagagaaagagaaaaacagctcacgagaagkaccacaccctagagagatgacatggtcaagggtctaacggaataatgcgacatcatctcaacactatgtgccaaggactgtcctgaaagctgtgtcataa

SEQ ID NO: 6406 - DNA, 201 bp, Homo sapiens
gtttatgcggatattaggttgcctcagtcaacaatgcttgaaaatggctttaaaatgagcatcatatcatgaagccatatttgtatttaaattaaaattgtttttttttttggtctatgtcataccagggataatatagagcaacagagaaccagggaaaatgtgattcatgcatctccaagtcaggaaaaagagactatt

SEQ ID NO: 6407 - DNA, 201 bp, Homo sapiens
ttaggttgcctcagtcaacaatgcttgaaaatggctttaaaatgagcatcatatcatgaagccatatttgtatttaaattaaaattgtttttttttttggyctatgtcataccagggataatatagagcaacagagaaccagggaaaatgtgattcatgcatctccaagtcaggaaaaagagactattggaatcatagcca

SEQ ID NO: 6408 - DNA, 201 bp, Homo sapiens
agccagacgtggcggtgggcacctgtaatcccagctacttgggaggctgagataggataatcgcttgaacccaggaggcagaggttgcagtgagccgagttctagtgccattgcactctagcctaggcaacaagagctaaattccatctcaaaaaaaaaaaaaaaaaaaaaaaggcagaaaggcatcaattggatttagca

SEQ ID NO: 6409 - DNA, 201 bp, Homo sapiens
caccaaccctgactgccaagagaagcttctgagagaggtagacgtttttaaggagaaacacgtgagtacaagttggatccagttacccatgggatatccayaggacaattgattttgtgtttgtgggagtgaaacttatttttaatgacttgctaatatcacattctaagcttataagatgaaatagggtcattgcttggc

SEQ ID NO: 6410 - DNA, 201 bp, Homo sapiens
tgccagtggagaaagtctcctccaaccctcaggctcagcaccactcagggccagtgagatgcacaaacagcatcttgcaggtaccacaatgccttcatcasttgtatcttccccgaccctgtgatgaagtaggatgaagatggctgagggtatggacgttgggcccacctccctggcttaaagctgctggaccccttaccc

SEQ ID NO: 6411 - DNA, 201 bp, Homo sapiens
gtggtcactgctaccaacacaccaactcccaggacacaggatactagggacttctgtgccccatcagtggacaagtcacaagttcccaaagcagggtgaccaatcgatctggatcaggtggcagggcctcggatcttaactgtccatttcattgttatgcacacaaacttatcttagagatccggccatctgcctgttccc

SEQ ID NO: 6412 - DNA, 201 bp, Homo sapiens
agtttgagtttcaatacacacagaaagctagattgtactgatagtctccatgtttttccttgcccttaaattgtgatttggctgatctctgcgtgatgctwaacaaccagtttgactcattaattttgctgaactaactgaacttttgacctaattggctgctggttagggatcagagccatatgtgcaggtttttctaag

SEQ ID NO: 6413 - DNA, 201 bp, Homo sapiens
tcaggaaaatgaacgaggaggttttttaaaatctactttacaaacgaggaaatgtatcgggttccttaagagcctttccaggaaaatttttgctcatttgyggccaaactcgaaataaaacttaggtcccccaactcccaaccctgcgttttctggtttccttccaccactctttctagtatccattttcctggtctccaa

SEQ ID NO: 6414 - DNA, 201 bp, Homo sapiens
ggtcactgctaccaacacaccaactcccaggacacaggatactagggacttctgtgccccatcagtggacaagtcacaagttcccaaagcagggtgaccaatcgatctggatcaggtggcagggcctcggatcttaactgtccatttcattgttatgcacacaaacttatcttagagatccggccatctgcctgttcccgt

SEQ ID NO: 6415 - DNA, 201 bp, Homo sapiens
ctggttctcccttgtgaccactttaaaaatcgactcatttggccaggtgtggtggcttatgcctttaatcccagcactttgggaggccaaggcaggaggaycgcttgaggccaggagttaagaccaacctggacaatatagggagaccctgtctctacaaagaatctgaaatactagttgggagtggtggcacatacctgt

SEQ ID NO: 6416 - DNA, 201 bp, Homo sapiens
cccacatgttgaaaaacactgggttagagggtcacagttcaggaaaatgaacgaggaggttttttaaaatctactttacaaacgaggaaatgtatcgggtyccttaagagcctttccaggaaaatttttgctcatttgtggccaaactcgaaataaaacttaggtcccccaactcccaaccctgcgttttctggtttcctt

SEQ ID NO: 6417 - DNA, 201 bp, Homo sapiens
gtcactgctaccaacacaccaactcccaggacacaggatactagggacttctgtgccccatcagtggacaagtcacaagttcccaaagcagggtgaccaatcgatctggatcaggtggcagggcctcggatcttaactgtccatttcattgttatgcacacaaacttatcttagagatccggccatctgcctgttcccgtc

SEQ ID NO: 6418 - DNA, 201 bp, Homo sapiens
agataggagaattgcttgaacccaggaagcagaggttgcagtgagccaagattatgccactgcactccccattctgggcaacagagcaagattccatctcaaaataataataataataataataataataataataaataaatagcaaaagaaagaaaaaaccctcagctaagaagtatactgttgtgttttttggggttt

SEQ ID NO: 6419 - DNA, 201 bp, Homo sapiens
ggaaaaaaaacaacaggccaggcatgatggcttacacctataattcttttgggaggctcactttgggaggctgaggtaggaggatcacttgagcacaggawttctcgagaccagcctgggcaatataggaagtctccgtctctacagaaaatacaacaattagccaggtgcggtgacatgcatctgtggtcccagctactc

SEQ ID NO: 6420 - DNA, 201 bp, Homo sapiens
ataataatagtaatgattgtgtaactcttgtatgtcaatatacatgtataatatatttttcttgtgcagtgacaaagttattgtcaggctaatgactgcartgactatgtctttgtggtacctacattattggtgaaagaactgaacaccagccagatatttatgtatttattgagtagtcttctattttttttccagagg

SEQ ID NO: 6421 - DNA, 201 bp, Homo sapiens
aacaggaagctcagggtaactcacagtccccaccccagacacttcttcttttcaggcacacttcaaaataaaatcaggatctacatacactataagttggygtggtagctgaatattggccccctaaaatgtcgatgtcctagcctctggaacttgtgaatgcaaccttagatggcagaactgattttgaagatgtgatta

SEQ ID NO: 6422 - DNA, 201 bp, Homo sapiens
gataggagaattgcttgaacccaggaagcagaggttgcagtgagccaagattatgccactgcactccccattctgggcaacagagcaagattccatctcaaaataataataataataataataataataataataaataaatagcaaaagaaagaaaaaaccctcagctaagaagtatactgttgtgttttttggggtttt

SEQ ID NO: 6423 - DNA, 201 bp, Homo sapiens
tatctgctctctggccatggttttgaactatcagctgagcccaagcaaccttgcagaccacattttgattatgtcttcctcggaccatccttgagagtcaygtcttcttggcagtgtcccatagactgtgaatggtgagtgagatcactttagaaggtacacggactttaaaaatctttcattataaagcatttatttatt

SEQ ID NO: 6424 - DNA, 201 bp, Homo sapiens
ataggagaattgcttgaacccaggaagcagaggttgcagtgagccaagattatgccactgcactccccattctgggcaacagagcaagattccatctcaawataataataataataataataataataataataaataaatagcaaaagaaagaaaaaaccctcagctaagaagtatactgttgtgttttttggggttttt

SEQ ID NO: 6425 - DNA, 201 bp, Homo sapiens
aagtcaagatgtgtccatctttaccataaaaaaaaacaaaaaacttgcttcaataaccaataaacagatcaaacaacagaaaaataaatagcaaaagactkcagggctcgatggctcacacctgtaatcccagcactttgggaggcggaggtgggtggatcacctgaggtcaggagtttgagaccagcctgaccaatacgg

SEQ ID NO: 6426 - DNA, 201 bp, Homo sapiens
tccatcacaggcccacaccttgtctcagaattaagaggaaatgcttctggctgccaggggtggggtggggtaggatgcagagcctctccctccaccaccayctccatccttttccctttctctgaaaatctcatttgatgattccccagcctggctgcaaattaaagatttgtagacctgaaagatgctaccgatggttat

SEQ ID NO: 6427 - DNA, 201 bp, Homo sapiens
ccctcctgcccctccagccaaaattacctttttgatgtcccatttccccaggacactattttgtcctagggatcaaaaataaaaaaataagaaagaaagaragagagagagagagagagagagagaaagaaagaaagggaagggggaaagaaagaagaaaagaagaagaaagaaagaagaaagaaaaagaaagaggaagga

SEQ ID NO: 6428 - DNA, 201 bp, Homo sapiens
ttttagaaaagtccctcatcagattatcaggaagtcgtgggttttccgtgatcatgctgtggtcagatccagcccaaccagagagccaaaaacaaaacaarcatacaaaacaaacaaacaaacaaacaaaacccaaatccctggcaagccccacgaaatgactgctctgataacattcagcagacaagcctgtttgaaatc

SEQ ID NO: 6429 - DNA, 201 bp, Homo sapiens
aataatcgtctccagttccacccacattgctgcaaatgccattaactcattcctttttatggctgagtagtattccatcatatatatatatatatacatayatatatatatatatgtgtgtgtgtgtgtgtgtgtgtgtgtgtgtgtgtgtatatatatatatatatatacaccatagtttctttatccactagttgatgg

SEQ ID NO: 6430 - DNA, 201 bp, Homo sapiens
taaaagaggcccttccaccgcgtagggttacagtgagaagactgaatctatgaggaagcaggaggttgcactttatagactccaaacccggtaaataaacrtctgctgttgatgagccgtccagtcaatggtgttttgttacagaagtccaaatgaacaaaggcaatccctgactctcagaaaaacgcctggcactcagta

SEQ ID NO: 6431 - DNA, 201 bp, Homo sapiens
catggcttacgcctataatcccagcactttgggaggccgaggtgggtgaatcacctgaggtcaggagttcaagaccagcctggccaacatggtaaaacccygtctctataaaaatacaataactacgtgggcatggtggtgagcgcctgtaattccagctacttgggaggctgacgcatgagactcgcttgaacccgggag

SEQ ID NO: 6432 - DNA, 201 bp, Homo sapiens
aaagcaatgagtgaaatggcaggatcagtcaggctgtgaggaaatttggagggggttctgaaaatcataccatgggcaaccatgtggctgacccagctgcwgggtgaagctgtgttgttcttgctgttcctctggtcatttaccttggctctcctccagcttgactgcacttgcctgtgttaaggtttcagatcactccaa

SEQ ID NO: 6433 - DNA, 201 bp, Homo sapiens
ccacaggagacacgtacagccccaagcactaagaccctggtgactctttgctgtcacattagccactggctcatcattttactcagctccagaggaaaccsaactcctcgagtaattctttggtttttcttcaaagtccccagtccaccactggctctgccttttaagctggacataggaaagctttctggatgtcagtga

SEQ ID NO: 6434 - DNA, 201 bp, Homo sapiens
cgccccccttgaactcattcctacacctgtaaccactgacagtttttgaaaactgttcacctggagttcctggttctctttctcttaaatcaaacattgartaaatgaagacactcagatgttcaaacatgtgcatcaagattttacttgtgagagtggttgccatgcatgacctagggaagctctcatggcttcagtcaa

SEQ ID NO: 6435 - DNA, 201 bp, Homo sapiens
ggttgccatgcatgacctagggaagctctcatggcttcagtcaaaccttgccaactttttttagctgtgcatttcttgagaaaggtcaactcacattacgrgtctacagctctgagcaagggagaagttcttcctgaaagcacaaacagactacagagggcagtgaaaccagaaacacaggtgtgcaacctcatttgcctg

SEQ ID NO: 6436 - DNA, 201 bp, Homo sapiens
ctaacttgttggccactgatggactttaaccagggtgtttgtcatggacctgtattgccaccaaggtggctttggctccctgagtcctgaccctctgcttrttacttcccaacaggcgtcgggtttggagttcaagtcggtagccgacagcgttctgtttttacgtgacaaaagatgggaagaggtcagaggtgccctgat

SEQ ID NO: 6437 - DNA, 201 bp, Homo sapiens
cttcatctgcagccaatttaggtgtactcccggcatggtgccctaattacacctttgttatccattatcagatggttcccctcatcagccaagcctgcgamcttctcctggctcatttaaaacgctatgcggaatctggggacgcatttgacatccagaggtaaggctgctgcattacagatgagaaatcgagtttttgaa

SEQ ID NO: 6438 - DNA, 201 bp, Homo sapiens
gcttgtcctacagaaggtggggacacttcctctggctcctcctgacagagcaaggtgctgtctgcttggaggggaagctgaagggtttcagctccttgaasggtacccccagctttgccttccccccttgtgcagacactcacgtgtccccatggccacagcctggtccctctcacaggtggtgacacagcctcttcccaa

SEQ ID NO: 6439 - DNA, 201 bp, Homo sapiens
cattgtgggtagcccctgccagagtcctttcagatctctgtgctcccatctcccgtaggtgctactgcaattacaccacagatgtggttgccagcgtcgcstttggcaccccggtggactcctggcaggcccctgaggatccctttgtgaaacactgcaagcgtttcttcgaattctgcatccccagacctatcctggttt

SEQ ID NO: 6440 - DNA, 201 bp, Homo sapiens
acaatgtatgttttctgtaataatatacagatgttcatgaagcctgccttaaagtttgtcttgtgtttatttgagtgctaagagcccttgctttttgttcrttgctattaagaaaactgtaaaatcattaagaggaagagggagacaaagttaataaaactagataattaggttgttaattcatcaaggacaatttgatgt

SEQ ID NO: 6441 - DNA, 201 bp, Homo sapiens
ttaataacccagtttttagctttttggaaaagaacttaatctgactactcctataagataacaaaaagaatcatttgagtttaaaatggccttttgagggsgcagctttcctatagcctaagaggttaaattttctggagctcctgccagacacttttccttctgtttgtttctaaagcacaatgtatgttttctgtaata

SEQ ID NO: 6442 - DNA, 201 bp, Homo sapiens
ttttttaaggctcaacaaatatccaatagtcagacagaagagtgatcaaaatagaaagcatgtatttaaactgggactgacaggtgacaggggatgcctcwtagccacaatgatcataatgtaaatgcttaattaactgtttgtcagtagccattgaatgtctgtctggtccactaggctgtaagtgccacagagcaaggg

SEQ ID NO: 6443 - DNA, 201 bp, Homo sapiens
aggagacattgggtgcaaggtgacttaggaatgaagcactcagaggatcaggaagctgcattaggaaggagagaggaatgggagctccagggtaggcctgraatccggaatctccacctcccaccctccaacaatcgaatggggtgtttcccgcagtgtgtccttgagaccatcgtttccactgacagtaataattgttac

SEQ ID NO: 6444 - DNA, 201 bp, Homo sapiens
cttgggggtgggatgggcattttaaagcactcttgagaaagtagaacacactccattttaaggcagtttctttgcagtgcttcttcgtacacatcaacccyatgctcactctgccccatggcctccaggtgacccatctgttccaaggcagcagcctttccagtgccttcacctgctatggtgccacaacatggctctcgt

SEQ ID NO: 6445 - DNA, 201 bp, Homo sapiens
ataaaaacaaaggattaactgcagatgactaagcccacatgatggaaacagaatcaggtacagtaaataatgaacgtagacaggattagattcctacaaayaatacattgtgttctcctgctcttcattggcaatcatccccagtagggaatcagtggaactctttgagtggccaaggaaaacatctccatgtgcccagga

SEQ ID NO: 6446 - DNA, 201 bp, Homo sapiens
ttgggttccgcccctggagattcgatttagtgggtctggagtgaggcctgggcttcttagaagccccagcggattctaaaatgcagccaggaggaagaacsttgccagaatcccatgaggcacagatgcaaatgtgcatagtgacattgggttgcattatcaatggcaggactgactttataaacctccacatccttactg

SEQ ID NO: 6447 - DNA, 201 bp, Homo sapiens
aacactgtgatgaccaaggcggagattagagggatgcatctacaagccaaagaccatggattgccagcaactaccaggagatggacagaggcaaggaaggrgctcccttcgtgtcttcagagggagcatggccctgctgatgtcttgacctcagaattctgaactccagaatgatgagaggataatttctgttgttttaag

SEQ ID NO: 6448 - DNA, 201 bp, Homo sapiens
ggagaattgcttgaatctgggaggcggaggttgcagtgagccaagatagtgccactgcactccaccctgggcggcagagcgagactctgtctcaaaaaaarcaaacaaacaaacaaaaaaaacagtcccctaaacaatgaagaataaaaaaaaaagaaaaaaaaaggccccctgccattctccatcccaatcccatcccct

SEQ ID NO: 6449 - DNA, 201 bp, Homo sapiens
gagctgacctagaagaggtcaatgatttggcctgctaggggcagacatactcaatgcacatgtccaagcaaggaggacacaataatattgccctcagcttygatcaatttatcctccaagccatttgtctgccgtttctaatttctttcaccatcccctcacccacccctccacgcagactaggtccagtgccccaaactc

SEQ ID NO: 6450 - DNA, 201 bp, Homo sapiens
agccctgtcctcgccacagtgcccgcatcttcattggttcacctttgcaggtatcatctgtgacctgtcatccaggctctgagccctgaggataataagtytccctcgaaggtcctgggtttgttggagctttttctccctcttgccatgtccttttcacggtccatcctctgagtttgtgaattatctttcttcgtggcc

SEQ ID NO: 6451 - DNA, 201 bp, Homo sapiens
gtgatcttgcttatgaagtgataacctagcttcaagagtgttgaagcagggtccagagctcagtgtaggggccaggttggtcctgggccgaacctggggaygtacctaggaatttctagccaaataagcaatagagggaagggtctgactgatgacggagcatgagcacactctaggaagggcaaagaattgatctggggg

SEQ ID NO: 6452 - DNA, 201 bp, Homo sapiens
agcaggtgaatctgggtaaacgatacatgggtatctaatgtactattcttcaacttttctgtaagttcagaattatttcctaatgaaaattaaaacagaaaaacaaacaaaccaaagaaatgtgcaagaggaagacaatcaatgacatagacagaccaagtcagatgaagactgaggagtattcatcagatgtacccataa

SEQ ID NO: 6453 - DNA, 201 bp, Homo sapiens
agaggctggggtgagaggatcagttgagcccaggatgtggatgttgtagtgagccaagatcgcaccactgcacttccaacagcaaagaccctgttcccccmaaaaaaacacaaaaaacaaaaaacaacaaaaaaaaaacaacccaccaaaaaacagaaacaacagatagtgatgcagaattttcccactgagacactgaca

SEQ ID NO: 6454 - DNA, 201 bp, Homo sapiens
gcaggtgaatctgggtaaacgatacatgggtatctaatgtactattcttcaacttttctgtaagttcagaattatttcctaatgaaaattaaaacagaaaaacaaacaaaccaaagaaatgtgcaagaggaagacaatcaatgacatagacagaccaagtcagatgaagactgaggagtattcatcagatgtacccataaa

SEQ ID NO: 6455 - DNA, 201 bp, Homo sapiens
ataagcagccagagatgagagaaacgggggtcctcacccagatcctgcccactcccaagctctccctccttcctgacatctggctacgtctctgcacagcrttagctattccctgcctatcctgaccactgctgtcccctgcacctatcctcatgcttgtcctgccacccggaacccactgttcagctgcagacctggaca

SEQ ID NO: 6456 - DNA, 201 bp, Homo sapiens
ttcaatattctagtgaaagatctaaaatacaatcggaatacacaagcatagacttgggttaattccagggattgtgcatatggattaggctttatttactygctaatgctaaccaaatgtcatgaaactgagtactgattctcagttttgtctaagcacttaatgatcattttcataattatttcaccgtattcactgtaa

SEQ ID NO: 6457 - DNA, 201 bp, Homo sapiens
attaatttctggccgtgtgccactgcaaccagctttcaccctgacttgtcatataacaaaatatcattaaattgaactctagttttttttttttttttttkagacagggtcttactctgttgcccaggctggagtacagtggcacaatcacagctcactgcagcctcaacctccccaggctcggggaattctcccacccca

SEQ ID NO: 6458 - DNA, 201 bp, Homo sapiens
caggtgaatctgggtaaacgatacatgggtatctaatgtactattcttcaacttttctgtaagttcagaattatttcctaatgaaaattaaaacagaaaaacaaacaaaccaaagaaatgtgcaagaggaagacaatcaatgacatagacagaccaagtcagatgaagactgaggagtattcatcagatgtacccataaat

SEQ ID NO: 6459 - DNA, 201 bp, Homo sapiens
aatgccaggcgcatgacaggtgctcactcattcattcaacaaacattaatgagcaaatggataagcagccagagatgagagaaacgggggtcctcacccakatcctgcccactcccaagctctccctccttcctgacatctggctacgtctctgcacagcgttagctattccctgcctatcctgaccactgctgtcccctg

SEQ ID NO: 6460 - DNA, 201 bp, Homo sapiens
ctcttctgcatctcctaggttcttgccccaatgtacctggtaccttccctctctctcatcacttacctggctccccaagggcaggattggtccttcctcakctttagctgagcactcagcattgtgccaggggcactcaacacacttctgttgagtaataggcacgcagttacttgttgaaccaaactgcgttagaagaga

SEQ ID NO: 6461 - DNA, 201 bp, Homo sapiens
tggtggctcatgcctgtaatcccagcactttgggaggccaaggtgggcggatcacaaggtcaggagatggagaccatcctggctaacacggtgaaaccccrtctctactaaaaatacaaaaacttagctgggcgtggtggcgggcacctgtagtcccagctacttgggaggctgaggcaggagaatggcgtgaacccagga

SEQ ID NO: 6462 - DNA, 201 bp, Homo sapiens
aggtgaatctgggtaaacgatacatgggtatctaatgtactattcttcaacttttctgtaagttcagaattatttcctaatgaaaattaaaacagaaaaacaaacaaaccaaagaaatgtgcaagaggaagacaatcaatgacatagacagaccaagtcagatgaagactgaggagtattcatcagatgtacccataaata

SEQ ID NO: 6463 - DNA, 201 bp, Homo sapiens
attataccattttttagccacgcgtggtggctcatgcctgtaatcccagcactttgggaggccaaggtgggcggatcacaaggtcaggagatggagaccaycctggctaacacggtgaaaccccatctctactaaaaatacaaaaacttagctgggcgtggtggcgggcacctgtagtcccagctacttgggaggctgagg

SEQ ID NO: 6464 - DNA, 201 bp, Homo sapiens
ggtcactttccctttctgggtttctgttttcacctctgtaaaaaagagtaaggcttggtcagtgtttctcaaagcactctccttggaaaactacatctggkatatgttataaatgtccctgaagaggcctttgtggtaaaatacacttgagaaatgcagctctctgcatcgtgctcttggagatttccaatgcatattagc

SEQ ID NO: 6465 - DNA, 201 bp, Homo sapiens
aggaaataattataccattttttagccacgcgtggtggctcatgcctgtaatcccagcactttgggaggccaaggtgggcggatcacaaggtcaggagatsgagaccatcctggctaacacggtgaaaccccatctctactaaaaatacaaaaacttagctgggcgtggtggcgggcacctgtagtcccagctacttggga

SEQ ID NO: 6466 - DNA, 201 bp, Homo sapiens
ggtctcatccccaggacctgaaacattaatttatgagggtgaccttgacctcttgagggccagatggaagtgcagactcgattaattgcacagatgtttaytgagtgcttactatgtgccaggaatggtgaggagtaccgagagggagtgagacatcacccctgctctcagaagcagcagtgcggcggggagggcaggact

SEQ ID NO: 6467 - DNA, 201 bp, Homo sapiens
ttgcaagacataatttccaaaggaaataattataccattttttagccacgcgtggtggctcatgcctgtaatcccagcactttgggaggccaaggtgggcrgatcacaaggtcaggagatggagaccatcctggctaacacggtgaaaccccatctctactaaaaatacaaaaacttagctgggcgtggtggcgggcacct

SEQ ID NO: 6468 - DNA, 201 bp, Homo sapiens
aggtacaagtcagactggggttcagtacagagaccaccagtacagacagggatggaactaggatcagtaaagacagggacttggctaaatgttcaaggtaygaaggtgttggccaggctgttctctaactcctgacctcaagtgatccacctgctttggcctcccaaagtgctaggattataggtatgagccaccacgccc

SEQ ID NO: 6469 - DNA, 201 bp, Homo sapiens
cccaaatagtcaaaagttatggcaattcagatagatgtttgcaagacataatttccaaaggaaataattataccattttttagccacgcgtggtggctcaygcctgtaatcccagcactttgggaggccaaggtgggcggatcacaaggtcaggagatggagaccatcctggctaacacggtgaaaccccatctctactaa

SEQ ID NO: 6470 - DNA, 201 bp, Homo sapiens
agtacatatatatatgtagatagatagacagattttcttttaccatgttactattcctctgaagtaaatttaaaaggtatttaggtttatgggattttatkaaactaggattcagttgtaccactaaacttattaagataatcgaaggaagatagccagtaaagctagttataaaaatgtggcttagactgtactgacttt

SEQ ID NO: 6471 - DNA, 201 bp, Homo sapiens
tttgctcacgcaagcaaaccattgtcctgataggaaagtggtttgctcagacaaattagtttgcattaatttcctgaagccaacagtgaagctgtttcttsgttcagaggtttatcttcctcggcaagaattttctggagcagagaggaagtcactgacacaggtggtctcgatgctcactccaagagttgagttgtgtgg

SEQ ID NO: 6472 - DNA, 201 bp, Homo sapiens
atctgcagccaatttaggtgtactcccggcatggtgccctaattacacctttgttatccattatcagatggttcccctcatcagccaagcctgcgaccttmtcctggctcatttaaaacgctatgcggaatctggggacgcatttgacatccagaggtaaggctgctgcattacagatgagaaatcgagtttttgaatcac

SEQ ID NO: 6473 - DNA, 201 bp, Homo sapiens
catcaggtggaggaggcggccctggagagaggcctggtttccatcccagctctcccaccatctgcctgtggcctctgcaagctccccaagccctgggggcyttcgtttcctccctgcaaagggagctgccctcagaagcactcagctcggttcttggcatggggagtgattagctctgcacaaacctggtagtttcacgag

SEQ ID NO: 6474 - DNA, 201 bp, Homo sapiens
tgccctgccaccttcccctgggaagcattaaggttcaatgcttggctctgtgcttgtttttcttacccctatcccagaggactcatccccgtctgtgcgayaccatctccccacttctacgccaagctgctcacggtctcacccaggtggggtggtggagggggcctccagcaaaatcctgcaaaagctgatctccttccc

SEQ ID NO: 6475 - DNA, 201 bp, Homo sapiens
ttttgtttttctctttcaagtatcatttccatccataatggtcccactggcccggattttgcccaataagaaccgagacgaactgaatggcttttttaacraactcattaggaatgtgattgccttgcgggaccagcaagctgccgaagaggtaacgtattttaataggacacagccttgaaatggaatggagccgacttt

SEQ ID NO: 6476 - DNA, 201 bp, Homo sapiens
tctctttcaagtatcatttccatccataatggtcccactggcccggattttgcccaataagaaccgagacgaactgaatggcttttttaacaaactcattrggaatgtgattgccttgcgggaccagcaagctgccgaagaggtaacgtattttaataggacacagccttgaaatggaatggagccgactttggcatcact

SEQ ID NO: 6477 - DNA, 201 bp, Homo sapiens; identical to SEQ ID NO: 656

SEQ ID NO: 6478 - DNA, 201 bp, Homo sapiens; identical to SEQ ID NO: 659

SEQ ID NO: 6479 - DNA, 201 bp, Homo sapiens
acacagagatactaagaataaatcaggatagtcatacttatttttcttttttgagtggacttccagataggtagatgaggtaaatcacatttctgtttctrcaaatcatttgacaaagtcttccccagctgactcatcagtaaagcggtgcctggctgagtatttacttaggttcatgcacagatagcccaagatccaaaa

SEQ ID NO: 6480 - DNA, 201 bp, Homo sapiens
attttccagtggtgctcggaggccacgtaggactgtgccaggggctgtctggaggatgcaggaaggggaagtgtagcaaatggggcctcggtggaaagctrgggggtgggggagggtcagaagcaaaacttctctattttctgcctaagtttggaaccaactgaggtatggaaagaggttttaggcaaaggaaataaaatt

SEQ ID NO: 6481 - DNA, 201 bp, Homo sapiens
aattgacgttttaaaaagcacaactgtagatttagattttcacagtcttttgctagattctttaccaaagactattagtgagtagtaaccctgggattgtrtaaaactttattaaggatgagggaataaataggtttaatttcaggaaataaaactggggctaaattagtacttctctgacggaaaatgtataaataatgt

SEQ ID NO: 6482 - DNA, 201 bp, Homo sapiens
tagaaaatgaccaggggctgggtgaattttggaagcaagataaatgtggataaagagaaaaaaggattctgaggtttcaagtctggcttcagagttgaaasctccttctgccaggaggagtaatagggaagccaagaggataaaatgatttcccagtcctggaaaggcagcttaaaaccatccttccacttgctcttaagg

SEQ ID NO: 6483 - DNA, 201 bp, Homo sapiens
gatccatgttaaaaaaggaagtttttaacctggtctcagaggacacttgcaagagatgccaaggaaggcagtgtgatcatcccaagtcaagcagcctaacrtgagcctgtgagagagaaactgcaatccacccgcaacgtgtggtcatcaaagggcggcaaccccagttaccagcttgagattaaaaacccaaattaaaac

SEQ ID NO: 6484 - DNA, 201 bp, Homo sapiens
gttactggaaccattaaaaaatgtttcatacaatgaactgaaaaccacttcccgggaaattctacttctttattctactggggaagtaaaggcaaagtcartgtctcttcttcacagcagtttttaaatatttgaaaactgcattcactgtgttactaattaattgtcttaactttaggctcaacatgagtttatggtcaa

SEQ ID NO: 6485 - DNA, 201 bp, Homo sapiens
gagttttcctaattccaaaagcagctcccctttgcatatgaagagcagagggtttgaggctctaagccatggtgtagacaggatgcaggaaatgacagggrggctgcttctgggctgtggaagatgggtggaggggacaaaatgagaagtgtcctatattcctccccaaaacctcctggtttctggatgcttcctcaaact

SEQ ID NO: 6486 - DNA, 201 bp, Homo sapiens
cagcttcagggcattttcttctagatgaggcccctcttgatcgcttatagcagatataacgagggtgctgagcaaggctactttatcacctcattttttcytctagatgcttgtgtgtgtataactttgactcatgagttgtcaaagagattcatttttaaaatctgtactttaaaaggaagaccaccacagtggaatcct

SEQ ID NO: 6487 - DNA, 201 bp, Homo sapiens
ctgaggaggaggctcacaaatggaataagggaagatggggcccgtcagcgcccaggccagcttcagggcattttcttctagatgaggcccctcttgatcgyttatagcagatataacgagggtgctgagcaaggctactttatcacctcattttttcctctagatgcttgtgtgtgtataactttgactcatgagttgtca

SEQ ID NO: 6488 - DNA, 201 bp, Homo sapiens
cgacccaatggcggctgctgcttcttctgcctgggcacctcatcatccccagcagtagttcctaggtgtgagcgtggcaaggagcccagaaatacagaagsagcgtttaggggcctcacggtagcttcatgcctgactcttttctctcctcttccggcctggcctctaggcctttctggatcgccagccagtcagactcta

SEQ ID NO: 6489 - DNA, 201 bp, Homo sapiens
ctgagcccctgtaacttacagaaagcaccaaattgtcttttgtaggaaaatgatgtttaatgcatggtgaggcagaccctggcttgtggtgggcgaggagmctccccttggaggaggctcttggtgaaccacctctgggtgctcccttgcccagcctgctgccttgtttaggaatggatcttggttaacggcaaaggttat

SEQ ID NO: 6490 - DNA, 201 bp, Homo sapiens
gtgcgatctcagctcactgcaacctcctcctcccgggttcaagcgattctcgtgcctcagcctcctgagtagcagggactacaggcgcacgacaccatgcytggctaatttgggtatttttagtagagacggggtttcaccatgttggccaggctggtctccagctcctgacctcaggtgatccacacacctctgcctccc

SEQ ID NO: 6491 - DNA, 201 bp, Homo sapiens
cacagaaactgatcaatggacacagtacttcctggacctaaactcagccacgaatccatcagacaagaccttattagctgtcatgttgaataacaaagggrttaggctcttcaacatgaaaatgcggtggccgattctccactgacccgttataaacagcagagcagaaaaggaagttggtgcaggtggaccaggaagctg

SEQ ID NO: 6492 - DNA, 201 bp, Homo sapiens
tgcaaactgtcatccaattctttcttttattcttttttttttttttttttgagatggagtcttgctctgttgcccaggctggagggcaatggtgtgatctyggctcactgaaacttctgcctcttgggttcaagagatcctcctgtctcagcctcccaagtaactgggattacaggtgcccgccactatgcctggctaatt

SEQ ID NO: 6493 - DNA, 201 bp, Homo sapiens
ctcactttgagagctggctgagatcccaggcagggtggccagtggctgctccagggctgtgaagggctccccctgcagacggaggaactaggcctcccagygcctgtaactggaacgttggcggcttgagaatggacttgccctgaaggccggcctcctgctgctctgggaaaaagagggaacagaagaaagcaatccgcc

SEQ ID NO: 6494 - DNA, 201 bp, Homo sapiens
aaaggggtggtggcatgctggctcctccaaccccagctgtgagctgaaatactgtctcaaatccaaactgtctacatgatactgataagaaacaggattckaatctcaattttgctacccaaggattttgatgtaagagaatgtaaatttaaaaccaacattaggactgtgagtttgagactaaaactctggccttgctgt

SEQ ID NO: 6495 - DNA, 201 bp, Homo sapiens
ggccaggcctttgactgtggatgagattgtgggccaggccttcatcttcctcatcgctggctatgaaatcatcaccaacacactttcttttgccacctacstactggccaccaaccctgactgccaagagaagcttctgagagaggtagacgtttttaaggagaaacacgtgagtacaagttggatccagttacccatggg

SEQ ID NO: 6496 - DNA, 201 bp, Homo sapiens
cagcactttggaaggccgaggcaggcggatcacttgaggtcagaagttggagaccaacctggccaacatggtgaaaccccatctctactaaaaatacaaargttagccaggcatggtggcagatgcctgtaatcccagctatttgagaggctgaagcaggagaatcacttgaacccgggaggtggaggatgcagtgagccg

SEQ ID NO: 6497 - DNA, 201 bp, Homo sapiens
ggaaaagacaaaatgctgtgagatttgggctaacacgaacttctccctttgtcacgacccctccatcagatggcccctgagttctgcagcctcgaggaagkcctgccctatctggacatggtgattgcagagacgctgaggatgtacccgccagctttcaggtgtgtggtagccccctcccctgcccgagtccccacctcc

SEQ ID NO: 6498 - DNA, 201 bp, Homo sapiens
aacttctccctttgtcacgacccctccatcagatggcccctgagttctgcagcctcgaggaaggcctgccctatctggacatggtgattgcagagacgctraggatgtacccgccagctttcaggtgtgtggtagccccctcccctgcccgagtccccacctcctacccctaccccctgccccagcctgcaggtcagggcc

SEQ ID NO: 6499 - DNA, 201 bp, Homo sapiens
gactggcccaaggccatggctaagggttacagacccggaacagaaccctgccctttgcctcccttgtgggacccaaagccaggccaaggtcaaggggaggsgctgcagggggggcttcctcattgggtgtggacagcaaaggttgattttgagatttccccccagctctaattctcagtaatttggcctttgaaacaggag

SEQ ID NO: 6500 - DNA, 201 bp, Homo sapiens
cagcaaaccagcatggcacatgtatacctatgtaataaacctgcatgttcagcacatgtatcccagatttgaaataaaattcttttaaaaaagggggggggatttaaagacagagacaggcatgtatacagagaggaaaccatgtgaacatggaagcagggattggggtgaggctctactgaccaagggctgccaaactat

SEQ ID NO: 6501 - DNA, 201 bp, Homo sapiens
tacccgacaggagtgggacttggctaagagcctacagaaaaccatccaagcagcgaggtctgagaattactctctgaccgacttctgggcctacatggttrtctctaagcaaaccagagaagtaagtcattcccagctggggacctggggtgggggtaggagcaaggggtctcagggtgtggggttaccaaagatgctgac

SEQ ID NO: 6502 - DNA, 201 bp, Homo sapiens
tgcatgaggcagaatttgacgctccagtctggaggtagaatttcttcttctctagaaactgttttgccctcaaagccttcaactgagtagatgagacccasccacattactgagaataatcttcttgaagtcaactgattttagctgtcaaccacatctacaaaataccttcacagccacatctaggctagtgtttgatta

SEQ ID NO: 6503 - DNA, 201 bp, Homo sapiens
ggacttggctaagagcctacagaaaaccatccaagcagcgaggtctgagaattactctctgaccgacttctgggcctacatggttatctctaagcaaaccrgagaagtaagtcattcccagctggggacctggggtgggggtaggagcaaggggtctcagggtgtggggttaccaaagatgctgaccagcaccacctttta

SEQ ID NO: 6504 - DNA, 201 bp, Homo sapiens
ggttgattccatgtctttgctattgtgaatagtgctgcaatgagcatacgcatgcatgaggcagaatttgacgctccagtctggaggtagaatttcttctkctctagaaactgttttgccctcaaagccttcaactgagtagatgagacccacccacattactgagaataatcttcttgaagtcaactgattttagctgtc

SEQ ID NO: 6505 - DNA, 201 bp, Homo sapiens
gcaatcctccaactactgggttcaagtgatcctcctatctcagcctcccgaagtgctgggattacgtgtatgagccactgcatccagcctatcctaacacwtcgggtttttgttgttttttgtttgttttgtttattcttgagacagggtttcactctgtcgcccaggctggagtgcagtggtgcaatcacagctcactgc

SEQ ID NO: 6506 - DNA, 201 bp, Homo sapiens
ctgggtgacagactgagacccctctaaaaaaaaaatgtggcctacgtgcagaggttccaccctgtgggacccacatgcctccctcacactgtcttggcacmttctcccaaagctgccggagtctcatttgtccaatatgaagaagcccgtggaagaagggacactaccctacccgatatttgcagccattgacaatgacct

SEQ ID NO: 6507 - DNA, 201 bp, Homo sapiens
atgcctccctcacactgtcttggcacattctcccaaagctgccggagtctcatttgtccaatatgaagaagcccgtggaagaagggacactaccctacccratatttgcagccattgacaatgacctgcaaccttcctggcaggaggcaagagcaccaggtaagcaaacatttagagggagggagaggtagtaagggatgg

SEQ ID NO: 6508 - DNA, 201 bp, Homo sapiens
taccctacccgatatttgcagccattgacaatgacctgcaaccttcctggcaggaggcaagagcaccaggtaagcaaacatttagagggagggagaggtartaagggatggaacagcacggagtggaatggaagaatgtttccctgccctccccttggggagcccaggaagagggaagggctcaggattgcagaaaacagg

SEQ ID NO: 6509 - DNA, 201 bp, Homo sapiens
tttgcagccattgacaatgacctgcaaccttcctggcaggaggcaagagcaccaggtaagcaaacatttagagggagggagaggtagtaagggatggaacrgcacggagtggaatggaagaatgtttccctgccctccccttggggagcccaggaagagggaagggctcaggattgcagaaaacagggtgctcagcttaga

SEQ ID NO: 6510 - DNA, 201 bp, Homo sapiens
agccattgacaatgacctgcaaccttcctggcaggaggcaagagcaccaggtaagcaaacatttagagggagggagaggtagtaagggatggaacagcacrgagtggaatggaagaatgtttccctgccctccccttggggagcccaggaagagggaagggctcaggattgcagaaaacagggtgctcagcttagacgaga

SEQ ID NO: 6511 - DNA, 201 bp, Homo sapiens
caagaaaacctttaagaggccaacatggtggctcacgcttgtaatcccagtggtttgggaggctgaggtgggaggatcgcctgaaaccagaagttggagaycaccctgggcaacatagtgagatcccatctcaaaacaacaacattaaaaaacaaaacaaaacaaaaaaacacaataaattagccaagcatggtggcagga

SEQ ID NO: 6512 - DNA, 201 bp, Homo sapiens
acagagtggatgagagtacagactcccttggaaggaatgttgctctggtacatgtaagctttgtgacctccgaaaagttacttaacctctctgtgcctcgktttctgcctctgtgccatgcgggtgataataacagtagttatgaatatttgatgagttaattcattgaaagcttgtaggacagtgcctggtagataacgg

SEQ ID NO: 6513 - DNA, 201 bp, Homo sapiens
ccaggttcacgccattctcctggcccagcctcctgagtagctgggactacaggcacccaccactgcgcccagctaatttttttttttttttttttttttgkatttttagtagagaccggtgttagccaggatagtctcgatctcctgacctcatgatccacccgcctcagcctcccaaagtgctgggattacaggcatgag

SEQ ID NO: 6514 - DNA, 201 bp, Homo sapiens
cctcccgagtagctgagattacaggcatgcgccaccacacccagctaatttttgtatttttagtagagacggggtttcaccatgttggccaggctggtctygaactcctgaccttgtgatctgcccgcctcggcctcccaaagtgcagggattacaggcgtgagccaccacgcccggccaataaacagaaatttaagcaag

SEQ ID NO: 6515 - DNA, 201 bp, Homo sapiens
tgggtctccaggccccaggggtcttctggaggggtcttctggagaggtcttgcaaccatttcttattgcctccttctcagaccatccgggctaccactgaytactgccgccgccacaagatcccctttccccaagtagaagaggctgagctggatttgtggtccaaggcccccgccagctgctacatcctgaaaggagaaa

SEQ ID NO: 6516 - DNA, 201 bp, Homo sapiens
gcacccgccaccacgcctggctaattttggtatttttagtagagacagggtttcactgtgttggccaggctgatcttgaactcctgacctcaagtgatccrcctgcctcagcccccaaagtgctgggatttcaggcgtgaggcaccgcacccagccagggcttcaacatatgaatctgggaagagagagaagtcagctcct

SEQ ID NO: 6517 - DNA, 201 bp, Homo sapiens
ttacctggtccctcatttaacatttaacccctttaataccctaagaggcagacgcttttgtcccttccattttgctgagatccaccaagtcgtgggaaggrtgcgtgactcacccacactgctggtcagtgagtgcagacgcggggatctataggagaactgggtggtggatctctaggggaatagtgtggtggttctgat

SEQ ID NO: 6518 - DNA, 201 bp, Homo sapiens
tcagcctcccagtgtgctaggattacaggcataaaccaccacgcccgggctgatgttgttctttgacattggtgttcaccatagcttggttaaaaacaaamctaaaaagggaatctatctatatccaacctccaaatggctaactaaaggtgtgagatgggtctgagtgttacttctccagtgggtctgctaagctttctc

SEQ ID NO: 6519 - DNA, 201 bp, Homo sapiens
gtaaaaagttataacatgtacaatattttaattataaggatcaacactgctactattaggtaataatatttttaaatattaagatttttttgtttttttttgaatttttacttcaatagcttttggggtacaagtggtttctgttacacgatgaattatgtagtagtaaattctgagactgtagtccacccatcagtgtat

SEQ ID NO: 6520 - DNA, 201 bp, Homo sapiens
ctctctcggtcttgcatgtttatgcatgttgctgcctctctctgcagccttcttgtcctacctgaatatccaaccccttccacctgggcatcccacattcytcatccagtctcaggtgagcagctgcttggaaggcctagcatccaggatgggtggtcctccggggcctgattgtgccacttcccacagtgggctcctttt

SEQ ID NO: 6521 - DNA, 201 bp, Homo sapiens
cgcccgggctgatgttgttctttgacattggtgttcaccatagcttggttaaaaacaaaactaaaaagggaatctatctatatccaacctccaaatggctractaaaggtgtgagatgggtctgagtgttacttctccagtgggtctgctaagctttctctctaaaaaacaaaaacaaaattcctgatatgtagtgtttgc

SEQ ID NO: 6522 - DNA, 201 bp, Homo sapiens
gccacttcccacagtgggctccttttagcttgtcaatcgtgtctcctgcgatgagactcccattagggataaattgtgtctgttttcttccttcatttaaygaacatttattggttacctatgctgcatcagccatggttccaggagaggcaggctagagtagtaaagaagacaggaagcagggggccaggcgcggtggct

SEQ ID NO: 6523 - DNA, 201 bp, Homo sapiens
ggttaaaaacaaaactaaaaagggaatctatctatatccaacctccaaatggctaactaaaggtgtgagatgggtctgagtgttacttctccagtgggtckgctaagctttctctctaaaaaacaaaaacaaaattcctgatatgtagtgtttgccaattcctgtggtgtaaatgttcccaccgtggccaacttcaggcta

SEQ ID NO: 6524 - DNA, 201 bp, Homo sapiens
cacaccattgcactccagcctgggcaacaagagtgaaacacagtctcaaaaaaaaaaaaagaaaaaagaaaaagaaaaagaaaaaaaagaaatgaaacaamcaaaaaaaaaaaaaaaaagaaaagaaaatcaacaacaacaacaaaattctctgtgacccaatttctcctttgtaaaatggatacaatagtgcatagcccc

SEQ ID NO: 6525 - DNA, 201 bp, Homo sapiens
ttcatttaatgaacatttattggttacctatgctgcatcagccatggttccaggagaggcaggctagagtagtaaagaagacaggaagcagggggccaggygcggtggctcacgcctgtaatcccagcactttgggatgccaagccggggcagatcacctgagatcaggagtttaaggccagcttggccaacagggtgaaa

SEQ ID NO: 6526 - DNA, 201 bp, Homo sapiens
aattcctgtggtgtaaatgttcccaccgtggccaacttcaggctaccaacatgaggtcactgagcacagagttggaagagaggtgcaaaattggctctcgrgagccattggctgccattggagcccatggctgccatttctattaatgaaatatccctgcaggtcatctgtattttttatattataactagggactttgtt

SEQ ID NO: 6527 - DNA, 201 bp, Homo sapiens
accctgaaaggtaagcatcctacttcatcatgaatccctgatgataatggggaccgcacacttgcttgaggccagccattgtcctaggaacattacatgtrtgattcatttggtgcccatttgaattctttatctggtatttcaaagatttcatcttgatttggatctgttgctggagaggtagtgtgatcttttgggggt

SEQ ID NO: 6528 - DNA, 201 bp, Homo sapiens
atcgaggcaatcacacttttgacatattgcatgagatgaaactttttcctacaaattgggtggttacaaagtaataaacagaattttttttttttttttttgagacagagtctcgctctatcacataggctggagtgcagtggcacaatctcggctcactgcaacctccacctcctgggttcaagcaattctcctgcctca

SEQ ID NO: 6529 - DNA, 201 bp, Homo sapiens
atgccaagccggggcagatcacctgagatcaggagtttaaggccagcttggccaacagggtgaaaccccgtctctattaaaaaatacaaaaaattagccargcgtggtgatgcacgcctgtaatcctagctacttgggaggctgaggcaggagaatcgcttgaatctaggaggtggaggttacagtcacccaagattgtgc

SEQ ID NO: 6530 - DNA, 201 bp, Homo sapiens
gagtcttcgtgtgatggctttctcatatgctggttgtagaagcgatgtgctcactgtgtgagcaagttcactgttgcctacagggctggaatggtagaagwctcttgaagcttaactcattccccacaaggcatgcaattttttccccagtattttattgactggtttgatggttcaggcttcaggtctgtaggggagtgc

SEQ ID NO: 6531 - DNA, 201 bp, Homo sapiens
gcctgtaatcctagctacttgggaggctgaggcaggagaatcgcttgaatctaggaggtggaggttacagtcacccaagattgtgccattggactccagcstgggagacaagagcgagcctctgtctcaaaaaaaaaaaaaaaaaaaaaagaaaaaaggaccggaaggggcatggatcataaaaatatagataaatccata

SEQ ID NO: 6532 - DNA, 201 bp, Homo sapiens
gagtctctgcaccatgcctggtccatagctggtgttctggattaacaacaatgcttatctggtgatgatgagaatagcaagagtaataggaagaaaaccggcagcatttgttaaacttcaatcaaagacgacttcagagacctaagctgtccactacagtggttgccggccacatgtggcacttgagcacttgaaatgtgc

SEQ ID NO: 6533 - DNA, 201 bp, Homo sapiens
aattttattgctcttttcttggcaggtttatggggaagtgctcttggtaacactgaagtcattagggaatacatttttggtgagtatttggggaacagaamggtcaaaccctagagatattttatgcaaggagattcacagtacttttcctactcatggcagaagagagacctgtgtgtaattgttctagcaactgctttt

SEQ ID NO: 6534 - DNA, 201 bp, Homo sapiens
tttgggaggctgaggtgggaggatcgcctgaaaccagaagttggagaccaccctgggcaacatagtgagatcccatctcaaaacaacaacattaaaaaacmaaacaaaacaaaaaaacacaataaattagccaagcatggtggcaggaacctgaagaatctacccaggagactggggcaggaggatcactggagcccagga

SEQ ID NO: 6535 - DNA, 201 bp, Homo sapiens
ataaattagccaagcatggtggcaggaacctgaagaatctacccaggagactggggcaggaggatcactggagcccaggaattcaaggcttcggtgagctstgattgcaccattgtactacagcctgagtgacaaagtgagaccctgtccccccaaaaagaagaaagaaaaaagaaaacagaggagaggagggacaaaaga

SEQ ID NO: 6536 - DNA, 201 bp, Homo sapiens
ctggaagtcattatcctcagcaaactattgcaggaacagaaaaccaaacaccacatgttctcacttataagtgggagctgaatgatgagaacacatggacrcagggaggggaacaacacacactggggcctgttgggggcgggtggggagaagaagagcaccaggaaaattagctaatgcatgtggggcttaatacctatg

SEQ ID NO: 6537 - DNA, 201 bp, Homo sapiens
atggtggcaggaacctgaagaatctacccaggagactggggcaggaggatcactggagcccaggaattcaaggcttcggtgagctgtgattgcaccattgyactacagcctgagtgacaaagtgagaccctgtccccccaaaaagaagaaagaaaaaagaaaacagaggagaggagggacaaaagacaaaaaggggccggg

SEQ ID NO: 6538 - DNA, 201 bp, Homo sapiens
ctgccaccagcagcgtagactcaggtctgaggatgagatccccagtggtttctgataccacacagtccatctctaacattctcctgtcatggttgtaattyctcattaatagatttctttttcctgcatacccgctacattcctggttctgtgctgggactcacttgccgttgtatttcctctgcagagacctggttcgag

SEQ ID NO: 6539 - DNA, 201 bp, Homo sapiens
gacccctctaaaaaaaaaatgtggcctacgtgcagaggttccaccctgtgggacccacatgcctccctcacactgtcttggcacattctcccaaagctgcyggagtctcatttgtccaatatgaagaagcccgtggaagaagggacactaccctacccgatatttgcagccattgacaatgacctgcaaccttcctggcag

SEQ ID NO: 6540 - DNA, 201 bp, Homo sapiens
gacaaaaaggggccgggcgcagtggctcacgcctgtaatcccaggactttgggaggccgaggcgggtggatcacgaggtcaggagatcaagaccatcctgrctaacacagtgaaaccccgtctctactaaaaatacaaaaaattagctgggcgtggcggcgggcgcctgtagtcccagctgctcgggaggctgaggcagga

SEQ ID NO: 6541 - DNA, 201 bp, Homo sapiens
tgactctgatgaggcctttctcccatcgtgctctcattttcctgcctgtgaaatggaaggattgtcccagatgattttgagtcctccttcgaacttgatcrttctgcagttgtatttatttaatggaaattttccgtttcctctgtgtgtcgccctctccatgaggcaggtgttcctgtgaaggacctccttgcacacatc

SEQ ID NO: 6542 - DNA, 201 bp, Homo sapiens
atccacccgcctcggcctcccaaagtgctgggattacaggcatgagccaccgcacccggccatctctcactttttagatgtcttccttctccataggtccrattatcacccaaatgctggcagctctccagacattccagtttctcttttgagctcatctctctcctgagatccagacctccttaccctatttcctaagca

SEQ ID NO: 6543 - DNA, 201 bp, Homo sapiens
gagtgtaatggcacgatctcggctcactgcaacctctgcctcccaggttcaagtgattctcctgcctcagcctcccaagtagctgggattataggcatgcrccaccacgcctggctaatttttgtatttttagtagggatggggtgtcaccatgttaatcaggctggtctcgaactcctgaccttaggtgatccactcacc

SEQ ID NO: 6544 - DNA, 201 bp, Homo sapiens
cagctgactccgtcctttccataagccccacaaattcagtcattcccagacctagaaatcaccccctcctcattttcatcctttgtgctcttctacatcayccccagaccaggtctcccagtctcctgggagactcttgtaattagttcctcactggcccgcccatcccaagctgtccacctccttccctggctacctgat

SEQ ID NO: 6545 - DNA, 201 bp, Homo sapiens
gcatacccgctacattcctggttctgtgctgggactcacttgccgttgtatttcctctgcagagacctggttcgagttcacccctcaccacgctggcttcyctgcactgggggcctttgtttccataacccacttcggaagcaaattcaagaagggaagactggtcagaactcaccctgagagagacctgactttcctgag

SEQ ID NO: 6546 - DNA, 201 bp, Homo sapiens
cccaccaaaagatgtggccattgtaacccccagtgcctgtgaatgtgaccttgcatggaaataaggtctttaccaatgtcatcaagtgaagatgaggtcaytcgtgtggaccctaatccacaatgactagtgtccttatgaaaaggagagatttcgccgggcgcagtggctcacgcctgtaatcccagcactttgggaggc

SEQ ID NO: 6547 - DNA, 201 bp, Homo sapiens
tggaaggaatgttgctgtggtacatgtgagctttgtgacctctgaaaagttacctaacctctctgtgcctcagtttctgcctctgtgccatgtgggtgatrataatagtagttatgaggattaaatgagttaattcatcaaaagcacataggacagtgtctggtagataaaggcactcagtaaacattagcaatctggctg

SEQ ID NO: 6548 - DNA, 201 bp, Homo sapiens
ttcctgcatgtggcagaaaagaggcctgtgtataatggttctaacaaccacatttcctgacatttattctcatacactgaacattgattatgggcagccasgaagaccacagagtggatgagagtacagacacccttggaaggaatgttgctgtggtacatgtgagctttgtgacctctgaaaagttacctaacctctctg

SEQ ID NO: 6549 - DNA, 201 bp, Homo sapiens
agctgcagtagtagcagtgggatattcacttgccctatgttgcccagggtggctactcttgtttctcaggcaatgggcagagccacagagttcccaaaagyttccgtcctttgtattaaagccaccagggcgggtggcagggcaaagccaggtgtgggctgggtcaggcagttttgtgctctaactctccctgtgcagggc

SEQ ID NO: 6550 - DNA, 201 bp, Homo sapiens
agccttgacagaggtggctggaggagctctcagtgagttgcatcgagattttttttttttttttttgagacagagtttggctcttgttgcccaggctggartacaatggcatgatctcagctcaccccacaacctccgcctcccaggttcaaggaattctcctgccgcagcctcctgagtagctgggattgcaggcacttg

SEQ ID NO: 6551 - DNA, 201 bp, Homo sapiens
tcatattaccaaagttacttttctgattccttctcatttgagtagactatttcttttaattattcttgaatttatgttggatttgactgtgttttttttttcttttttccgcttaaggatgtgactttaatgtccctagctaattatagcctaatttggtccttggtgctttcaggggtgaagattgtaagagttccttgg

SEQ ID NO: 6552 - DNA, 201 bp, Homo sapiens
ggaccgcaggagtctccatcccgcttccgcaggtggatagtgacaagggcatctcccttcgcttccctcggtttattcgagtccgtgaagacaagcagccrgagcaggccaccaccagtgctcaggtgaggtcctgggaagcaggggtgggccgcccagctgcttggccctaccagctttttagcgtggtggcctctctgg

SEQ ID NO: 6553 - DNA, 201 bp, Homo sapiens
ctgaggtgggaggattgccggagcccaggagtttgaggctgcagtgagctatgatggtaccaccccactccaggctgggcgacagagcaagaccttgcctytaaaaaaaaaaaaaaaaaaaaaaaaattaagctgaaagcttaattaagctgagtcatgcaagaaactgtctttccttttgttcctaagccacagataaaa

SEQ ID NO: 6554 - DNA, 201 bp, Homo sapiens
ctcctgggctcaagcaatcctcttgcctcagccttttgagtaagctggggcaacaggcatgcaccatcgtgcctggctaatttttaattatttttttttttgtagagacagggatcttgctatattgcccaggctggtctcaaactcctgagctcaagcaatcctccaactactgggttcaagtgatcctcctatctcagc

SEQ ID NO: 6555 - DNA, 201 bp, Homo sapiens
ctcctccatccttagcatattaagtcaccctcatgctgaactcctccacaccacgggatggcggctgcatccaatgaagctgcaacttttttttttttttttgaagtcagggtctctctctgtcactcaagctgccgtgcaaaagcacagtcatagcccaatacaggtcttgaactcctggcctcaagtgatcttcctgcc

SEQ ID NO: 6556 - DNA, 201 bp, Homo sapiens
ctataggtgcataccaccaggcctggctaatttttgtattttttagtagagatagggtttcaccatgttagccaggctgactttaaactcctgacttcaawtgatccgcccacctcagtctcccaaagtgttagcattacaggcgtgagccaccgtgcctggctgattattcattttttatgtctccctgtatcatataca

SEQ ID NO: 6557 - DNA, 201 bp, Homo sapiens
tctgcttggccatttgatgtcttgaattcactattttattttatttcattttatttttgagacagggtcttgctctgtcacccaggctggagtgcagtggygagatcatggctcactgcagcttcgacctcctgggctcaagcaatcctcttgcctcagccttttgagtaagctggggcaacaggcatgcaccatcgtgcc

SEQ ID NO: 6558 - DNA, 201 bp, Homo sapiens
gtagatagcacccgataagcagcattaagaacatcaaaaatttttattgagcccgggcacggtggctcacacctataatcccagcattttgggaagctgakgtgggaggattgcttcaggccacaagtttgagaccagcgtgggcaacatagtgagactccatctctacagaaaataaatttaaaaatgagcagggcatgg

SEQ ID NO: 6559 - DNA, 201 bp, Homo sapiens
gtggtgcatgcctgtaatcccagctagtcgggaggctgaagcaggagaatcacttgaatctgggaggcagaggttgcagtgagccgagatcacaccactgmactccagcctgggcaacagagcgagatcccatctcaaaataaataaataatacaaagttaggtggctggtgacattggtttagctgtgcaacattaagca

SEQ ID NO: 6560 - DNA, 201 bp, Homo sapiens; identical to SEQ ID NO: 740

SEQ ID NO: 6561 - DNA, 201 bp, Homo sapiens
aaatgaaataaatattttaaatcatgctagccacacttcaggggctcaagagctatgatgtatgtttaatacattggatggtgtgagggtagatagcaccygataagcagcattaagaacatcaaaaatttttattgagcccgggcacggtggctcacacctataatcccagcattttgggaagctgaggtgggaggattg

SEQ ID NO: 6562 - DNA, 201 bp, Homo sapiens
caggtttattctagattttctgctcctccatccttagcatattaagtcaccctcatgctgaactcctccacaccacgggatggcggctgcatccaatgaarctgcaacttttttttttttttttgaagtcagggtctctctctgtcactcaagctgccgtgcaaaagcacagtcatagcccaatacaggtcttgaactcct

SEQ ID NO: 6563 - DNA, 201 bp, Homo sapiens; identical to SEQ ID NO: 745

SEQ ID NO: 6564 - DNA, 201 bp, Homo sapiens; identical to SEQ ID NO: 748

SEQ ID NO: 6565 - DNA, 201 bp, Homo sapiens
tcctccatccttagcatattaagtcaccctcatgctgaactcctccacaccacgggatggcggctgcatccaatgaagctgcaactttttttttttttttkgaagtcagggtctctctctgtcactcaagctgccgtgcaaaagcacagtcatagcccaatacaggtcttgaactcctggcctcaagtgatcttcctgcct

SEQ ID NO: 6566 - DNA, 201 bp, Homo sapiens
ttgccccattgcactccagcctgggcaacagagcaatactctgtctcaaataaataaataaataaataaataaataaataaataaataaataaatgggagmctttgcctccaaccctgaagaaaataagcgtgcaaaagatgagtagaggtggaggcagagatgaaggagctagaaaaaagaggccagaaagtcagagaga

SEQ ID NO: 6567 - DNA, 201 bp, Homo sapiens
tgctcttttcttggcaggtttatggggaagtgctcttggtaacactgaagtcattagggaatacatttttggtgagtatttggggaacagaaaggtcaaascctagagatattttatgcaaggagattcacagtacttttcctactcatggcagaagagagacctgtgtgtaattgttctagcaactgcttttcctgacat

SEQ ID NO: 6568 - DNA, 201 bp, Homo sapiens
actttcctttctccccaggctctactacccgaaggatagtgcccgaagttgctgcttggcatagatgagcctcagcttccagggcactgtgggcctgttgrtctactagggccctgaagtccacctggccttcctgttcttcactcccttcagccacacgcttcatggccttgagttcaccttggctgtcctaacagggcc

SEQ ID NO: 6569 - DNA, 201 bp, Homo sapiens
atgtgctcactgtgtgagcaagttcactgttgcctacagggctggaatggtagaagactcttgaagcttaactcattccccacaaggcatgcaattttttycccagtattttattgactggtttgatggttcaggcttcaggtctgtaggggagtgcataggaagtgattgtggccaaaacatgtgagtaaatgcaacacc

SEQ ID NO: 6570 - DNA, 201 bp, Homo sapiens
tatcagtctattcgaggaacagaaggaaagctgttattgctggatcagggtaggggaagcacggaatgaaatgtgattggagagatggacagagatcagawcttgtgaattctggcaggtatcatgacattcgatgtaggccaaagagttacctcctagcccagctcctgatacatgcttaataagcgtagtgttggataa

SEQ ID NO: 6571 - DNA, 201 bp, Homo sapiens
ttgggaggcccaggcggacagatcacttgaggtcaggggttcgagtgcaagctgggtaacatggtgaaaatgcgtctctactaaaaatacaaaaattagcyaagtatggtggtgcacgcctgtgatcccagctactcaggaggttgaggcacaagaatcgcttgaaaccaggaggcaaaggctgcagtgagctaagatcac

SEQ ID NO: 6572 - DNA, 201 bp, Homo sapiens
atgaacgtggccgggtaggtgggagaccatagtcgctctgatgcctatgctcgttcagtaagtatctgttggagaactttctctgcaacaggcaggagggytgcatgggtgaaaaaagataggcagtgtctcccctacttgagcttgcgtctcagcaggggacagaccatgaacagggtcaggagtgaatggttttctgaa

SEQ ID NO: 6573 - DNA, 201 bp, Homo sapiens
aaaaaaattaaaaaataaagaaatgaggggccgggcgcagtggctcacacctgtaatctcagcactttgggaggctgaggtgggcagatcacctgaggtcrggagtttgagaccagcctgaccaacgtggagaaaccccatctctactaaaaatacaaaattagccgggcgtggtggtacatgcctgtaatcccagctaca

SEQ ID NO: 6574 - DNA, 201 bp, Homo sapiens
tgaagtttccataattcctgggctccagaaagaagaaaaggcggccgtggagagacgaagacttcatgtgctgaaagctctgaagaagctaaggattgagsctgatgaggtaagtgaggggaggagggtggccccagagatcccagaatcgccccctctgtgcccagtgtccagggcccaactcagccagggagagctgga

SEQ ID NO: 6575 - DNA, 201 bp, Homo sapiens
gctgaggcaggagaatctcttgatctcgagaggcggaagctgcagtgagcggagatcgcgccattgcgctccagcctgggctatctcaaaaaaaaaaaaaattttttttttgaggaacgaccataccattttccacagtggctgtaccattttatattctgcccaatggtgtcccaggtttccaatttctccacgtcctca

SEQ ID NO: 6576 - DNA, 201 bp, Homo sapiens
agtgaaaccccgtctctactaaaaatacaaaaaattagctgggcgtggcggcgggcgcctgtagtcccagctgctcgggaggctgaggcaggagaatggcrtgaacccgggaggcggaggttgcagtgagctgagatcgcgccacagcactccagcctgggcgacagagcaagactccgtctcaaaaaaaaaaaaaaaaaa

SEQ ID NO: 6577 - DNA, 201 bp, Homo sapiens
ggcttttattacattgaagtatgtctcttgtataccgattttgttgagggctttaatcataaagggatgtgggattttgtgaaatgcttctgcatctcctrtgatttttgtttttaattctgtttctgtgatatatcacatttgttgacttgcatatgttaagccatccctgcattcctagtatgaaacccacttgatcac

SEQ ID NO: 6578 - DNA, 201 bp, Homo sapiens
tgattgcaccattgtactacagcctgagtgacaaagtgagaccctgtccccccaaaaagaagaaagaaaaaagaaaacagaggagaggagggacaaaagamaaaaaggggccgggcgcagtggctcacgcctgtaatcccaggactttgggaggccgaggcgggtggatcacgaggtcaggagatcaagaccatcctgact

SEQ ID NO: 6579 - DNA, 201 bp, Homo sapiens
atcttgagactggtgccctgcgagctccaccccacccctccatgcagttccccatgggccccgcctgcatcttcttgaggaaaggcattgctgagaaacascgggtgaggtggggagtgagggggaagggcggtgggcggggcaaagggagcaggggtgtgggacaaagaaggggacatgatggtgccacagaaccagggg

SEQ ID NO: 6580 - DNA, 201 bp, Homo sapiens
ccagcctgggcaacatagcaagagcctgtctctatcaaaaaataaattagccgggcatggtgacatgcatctgtagtcccagctacttgggaggttgaggygggtggattgcttgagcccaggaggttgaggctgtagtggcccattattgtaccactgcactccagcctgggtgacagactgagacccctctaaaaaaaa

SEQ ID NO: 6581 - DNA, 201 bp, Homo sapiens
tggagtgcagtggtgcaatcacagctcactgcagccttgacctcctgggctcaagcaatcctcccagctcagcctcccaagtagctgggactacaggcacrcaccactgggcctgacaaatttttttttttttttttttttttttagagatagggtttcgcttttttgctcggggtggtctccaaatcctgggctcaagtg

SEQ ID NO: 6582 - DNA, 201 bp, Homo sapiens
ggcgttttatactgagcgcattccaagttggatgcagaagtctcattagatgttaaaggaggcccggggcagtggctcacacctgtaatcccagcacttcragaggccgaggcaggtggatcacctgaggtcaggagtttgagaccagcctggccaacatggtgaaaccctgtctctactaaaaatacaaaaattagctgg

SEQ ID NO: 6583 - DNA, 201 bp, Homo sapiens
gaatttaattcatagttaaactttgagacaaagaaaactgacccccagtccttgttgagagattgaagccacattcatttactttttatttatttatttakttttgagacagagtttcactcttgttgcccagactggagtgcaatggcatgatctctgctcactggcacctccacctcctgagttcaagtgattctcctc

SEQ ID NO: 6584 - DNA, 201 bp, Homo sapiens
gggcgtggtggcgggcgcctgtagtcccagctactccggaggctgaggcgggagaatggcgtgagcccggaaggcggagcttgcagtgagccgagactgcrccactgcactccagcctagggcacaaagcgagactccatctcaaaaaaaaataaaataaaataaaccaatcaaaccaaattccaggccaccctcaggacc

SEQ ID NO: 6585 - DNA, 201 bp, Homo sapiens
ctggctaacacagtgaaaccccgtctcaactaaaaatacaaaaaattagctgggcgtggtggcgggcgcctgtagtcccagctactccggaggctgaggcrggagaatggcgtgagcccggaaggcggagcttgcagtgagccgagactgcgccactgcactccagcctagggcacaaagcgagactccatctcaaaaaaa

SEQ ID NO: 6586 - DNA, 201 bp, Homo sapiens
ttttttattttattttattttatttatttatttattttttttgagacagcatctcgctctgtcgcctaggctggagtgcagtgacgcgatctcggctcackgcaagctccgcctccggggttcaagcgattctcctgcctcaacctcccgagtagctgggattacaggcgcacaccaccacacccggctaatttttgtatt

SEQ ID NO: 6587 - DNA, 201 bp, Homo sapiens
tgtgcctggcctgaagtcacattcataagacaaggttagaatcatgaaggtgctggaactttgctaaagaacagtcgtgggttgaagaatgacctgccatyccttagcttccttttctatatgtgctccagagtcacgtaaccaggggtcgcatgatttataacttccccagctacttctataaataatatcactgtcgtg

SEQ ID NO: 6588 - DNA, 201 bp, Homo sapiens
gtttcctctgtgtgtcgccctctccatgaggcaggtgttcctgtgaaggacctccttgcacacatctttccccagtcttcatcgtccacacttaaaatgcycaactcactctcttcctctgtcctccagggcaatatcttctctctacaccaatgatggtgacatggaagctctcgaggctgacctgaaacatcgatttac

SEQ ID NO: 6589 - DNA, 201 bp, Homo sapiens
aatgatggtgacatggaagctctcgaggctgacctgaaacatcgatttacccgacaggagtgggacttggctaagagcctacagaaaaccatccaagcagygaggtctgagaattactctctgaccgacttctgggcctacatggttatctctaagcaaaccagagaagtaagtcattcccagctggggacctggggtggg

SEQ ID NO: 6590 - DNA, 201 bp, Homo sapiens
atttacccgacaggagtgggacttggctaagagcctacagaaaaccatccaagcagcgaggtctgagaattactctctgaccgacttctgggcctacatgkttatctctaagcaaaccagagaagtaagtcattcccagctggggacctggggtgggggtaggagcaaggggtctcagggtgtggggttaccaaagatgct

SEQ ID NO: 6591 - DNA, 201 bp, Homo sapiens; identical to SEQ ID NO: 746

SEQ ID NO: 6592 - DNA, 201 bp, Homo sapiens
ctctgctcactgagataaatgcgtatctgattgcctccagttggaaaggctaatggaaactctaaagaatgttggccggcccgtggctcacgcctgtaatsccagcactttgggaggcagaagcgggtagatcacgaggtcaggagttcaagaccagcctggccaagatggggaaaccctgtctctactagaaatacaaaa

SEQ ID NO: 6593 - DNA, 201 bp, Homo sapiens
gggggcaacatgacataaacaggtaaacaaagaagtcaacaggatggccatggagagtaagtgccatggagacgaccgaacgtgcggtgtgctgaggagtraagtgaaagctttttaggaaagggtctgggggtctgggaaggcatcctgagggagagacctttcacctggggctgaatactgagaaggggtggccatgag

SEQ ID NO: 6594 - DNA, 201 bp, Homo sapiens
agtgagcccagatcacaccactgcactccagcttcgatgacagagcgagaccctgtctcaaaaaaaaaaaaaaaaaaaaaagtcacatactcacaggctcyagggattaggatagggacatcattaggagacattattcaacctgccacaaagacacagacacaaccagatgacagaagccaggggaagagttggaatatt

SEQ ID NO: 6595 - DNA, 201 bp, Homo sapiens
atttttttgtttttttttgaatttttacttcaatagcttttggggtacaagtggtttctgttacacgatgaattatgtagtagtaaattctgagactgtartccacccatcagtgtatgttttagagtatgttgcattcaatatgtagttttttggttttgttttttgtgacagtctcactctgttgcccaggctggagtg

SEQ ID NO: 6596 - DNA, 201 bp, Homo sapiens
agaaaactgttagactcaaatattcaactcaatataaaataagaagaagccgggtgcggtggctcacacctgtaatcccagcactttgggaggtagaggcrggtggatcacctgaggtcaggtgtttgagaccagcctggccaacatggcgaaaccctgtctctactaaaaatacaaaaattagccaggcatggtggcacg

SEQ ID NO: 6597 - DNA, 201 bp, Homo sapiens
gggtgatggcagaggcttactctttcccttacagaagatgttgtccctgtccaagctgacccttgctctgttgtgtgtctgggctgttagctgaggtcccrttgggtctccaggccccaggggtcttctggaggggtcttctggagaggtcttgcaaccatttcttattgcctccttctcagaccatccgggctaccactg

SEQ ID NO: 6598 - DNA, 201 bp, Homo sapiens
aggaagaaaaccggcagcatttgttaaacttcaatcaaagacgacttcagagacctaagctgtccactacagtggttgccggccacatgtggcacttgagsacttgaaatgtgcctggcccaagttgaagtgtgctatgaagataaaatacacctcggattttaatgaccgagtatggaaaacgcatgtcaaagaccttat

SEQ ID NO: 6599 - DNA, 201 bp, Homo sapiens
caccaacccattcatgaaggatccactcccatgatccaaacatctccctctgggccccacctccaacactggggatcacatttcaacatgagatttggagrggacgaatttccaaactatatcagtctattcgaggaacagaaggaaagctgttattgctggatcagggtaggggaagcacggaatgaaatgtgattggag

SEQ ID NO: 6600 - DNA, 201 bp, Homo sapiens
cacatttgttgacttgcatatgttaagccatccctgcattcctagtatgaaacccacttgatcacatcatggcaaatttcaagctaccaacatgaggtcascgagcacagagttggaagacgggtacaaaattagctctccagaacccgtatcaacagactccaacccatggctgccatttctattaaagagacgtcgctg

SEQ ID NO: 6601 - DNA, 201 bp, Homo sapiens
tcccatggtcccagctactcaggaggctgaggcaggaggatcacttgagcccaagaggtcgaggctgtagtgaactatgattgtgccactgcattccagcstgggtgacagagcaagaccctgtctcgaaaaaataataaataagtaaattatatggagagacaaggagaggcgagagcaggtatccggtgaaaaattctg

SEQ ID NO: 6602 - DNA, 201 bp, Homo sapiens
ttattcttgagacagggtttcactctgtcgcccaggctggagtgcagtggtgcaatcacagctcactgcagccttgacctcctgggctcaagcaatcctcycagctcagcctcccaagtagctgggactacaggcacacaccactgggcctgacaaatttttttttttttttttttttttttagagatagggtttcgcttt

SEQ ID NO: 6603 - DNA, 201 bp, Homo sapiens
tacgtgtatgagccactgcatccagcctatcctaacacttcgggtttttgttgttttttgtttgttttgtttattcttgagacagggtttcactctgtcgyccaggctggagtgcagtggtgcaatcacagctcactgcagccttgacctcctgggctcaagcaatcctcccagctcagcctcccaagtagctgggactac

SEQ ID NO: 6604 - DNA, 201 bp, Homo sapiens
gtggcgagatcatggctcactgcagcttcgacctcctgggctcaagcaatcctcttgcctcagccttttgagtaagctggggcaacaggcatgcaccatcrtgcctggctaatttttaattatttttttttttgtagagacagggatcttgctatattgcccaggctggtctcaaactcctgagctcaagcaatcctccaa

SEQ ID NO: 6605 - DNA, 201 bp, Homo sapiens
gagcagccccatgaggaccccgaaaggaaaggtaccatgtgtagtgtgataagtgtcatcaacagtaagtgccaccaaccttctcccccctcttgctcttycccacccctgtgggccagtcctgcaggggacatgaccagatgtcccactggtacagtttggatatttgttcccttccacatctcatgttggaatgtaatc

SEQ ID NO: 6606 - DNA, 201 bp, Homo sapiens
catttgagcctgggggtttgagactgcagtgagccaagatcatgccactgcactctagtctgggcaacagagcaagacctgtctcaaaaaaaaaaaaaaawatatatatatatatatatatagactctatgtgacacaccagctcccttgccttctgccatgagtagaagctttttgcaccatgcttcttgtacagcctgc

SEQ ID NO: 6607 - DNA, 201 bp, Homo sapiens
gtggcctctctggaaccttgtggaggtgggagcagccagggagcttctgaccaccccgtcccaccctctctccgcaggtggcctgtttgtaccggaagcaragtcagattcagaaccaacaaggcgaggactcaggctctgaccctgaagatacctactaagccctcgccctcctagggcctgggtacagggcatgagttg

SEQ ID NO: 6608 - DNA, 201 bp, Homo sapiens
cacgatgggagaaaggcctcatcagagtcaaatgttttttgcagccagcatttattaaaggtttacatgtgacagcaacaaactgtgctgatctcacaggrctgtttgagaattaaatgatgaaacacatgcaaatcgtcccaacctgagctatcaagtagagctatgtaacatgagccacatctattctatcattttaaa

SEQ ID NO: 6609 - DNA, 201 bp, Homo sapiens
agagcttgggagtgggaaaggtcctgcagagtcacaccggacccctctattcctccaaggctcatctaacatgttgagtgacatggcgtgggggtttagcygtactgcacattgcagaactccagggggcgctattgagataggaaccccatgatttcttctggaatctttccgagactgctgtggttaaaaaggcaggcc

SEQ ID NO: 6610 - DNA, 201 bp, Homo sapiens; identical to SEQ ID NO: 739

SEQ ID NO: 6611 - DNA, 201 bp, Homo sapiens
ggagctccaggtcttctcaatgaatgaaagaatggatgaatgtctttctcctaagtcatgtatgacctgtagaggcttccaggtcttctaatcttatccartgtgcaacactgcctacaaagcacagtggtaacttctaactttcctttctccccaggctctactacccgaaggatagtgcccgaagttgctgcttggcat

SEQ ID NO: 6612 - DNA, 201 bp, Homo sapiens
gagaggcaagaattttccttctgagggtctagtttgcccagctcttaaatttcttgggggaaagaaaaggacttggtaggcttccagaaagaggaatggtrtattccttctgctgagtcttcagtgtctctcaaaggtctccttaatgcggcagatacctgatatcctatcaaacaatccaggagagggagcttaatagag

SEQ ID NO: 6613 - DNA, 201 bp, Homo sapiens
gctgaggtcccgttgggtctccaggccccaggggtcttctggaggggtcttctggagaggtcttgcaaccatttcttattgcctccttctcagaccatccrggctaccactgactactgccgccgccacaagatcccctttccccaagtagaagaggctgagctggatttgtggtccaaggcccccgccagctgctacatc

SEQ ID NO: 6614 - DNA, 201 bp, Homo sapiens
gttggaagacgggtacaaaattagctctccagaacccgtatcaacagactccaacccatggctgccatttctattaaagagacgtcgctgcaggtaatctrtattttctataactagtgactttacagttaaacattccccctgcctctgctcttttgcagcccgattactgaggctgcaagaaagttcacaaggggaaca

SEQ ID NO: 6615 - DNA, 201 bp, Homo sapiens
attacactggacttgtagattgcttttggcagtatggtcattttcacaatattgattctacccatccatgagcatgggatgtgtttccatttgtttgtgtyatctatgatttctttcagcagtgttttgtagttttccttgtagcagtctttcacctccttggttaggtatattcctgagtattttattttatttttttgc

SEQ ID NO: 6616 - DNA, 201 bp, Homo sapiens
ccctggggagcagaggttgcagtgagcccagatcacaccactgcactccagcttcgatgacagagcgagaccctgtctcaaaaaaaaaaaaaaaaaaaaargtcacatactcacaggctccagggattaggatagggacatcattaggagacattattcaacctgccacaaagacacagacacaaccagatgacagaagcc

SEQ ID NO: 6617 - DNA, 201 bp, Homo sapiens
gatcagagtaccagtagggttggattctggggaaccctcttctgggttgcagagagccaacttcttgccacatggcgggctttaatgttgttttttgacaycagcattcaccatatgctggttatagacaagtctggaaggagaatctatctccaacctgcaaatggctaactaatgttgtgggatggtaggctggtgatt

SEQ ID NO: 6618 - DNA, 201 bp, Homo sapiens
accttggctgtctcggcttctttccctaggctcactcagtaacttgatggattttgtgaagaaaacaggcatttgcgcttcaaagtgggaatgggggaccmctcacaacttcctgtacaaacacggtgagaagaccctcttcccaccgccctggtctgtccttgcgtgtgaatgggctggagtaggggaagggggtgggcc

SEQ ID NO: 6619 - DNA, 201 bp, Homo sapiens
agtgggagctgaatgatgagaacacatggacgcagggaggggaacaacacacactggggcctgttgggggcgggtggggagaagaagagcaccaggaaaaytagctaatgcatgtggggcttaatacctatgtgatgggttgataggtgcagcaaaccgccatggcacatgtttacctgtgtaacaaatctacacgtcctg

SEQ ID NO: 6620 - DNA, 201 bp, Homo sapiens
tacaggcacatgtatgttcactgcagcactattcacaatatcaaagacatggaatcaacccaaatgcccatcagtgatagactggataaagaaaatgtggyacatatacaccatggaatactatgcagccagaaaaaggaacaagatcatgtcctctgcagggatatgggtggagctggaagtcattatcctcagcaaact

SEQ ID NO: 6621 - DNA, 201 bp, Homo sapiens
caacaacaacaacaacaaaaaagaaatggcaaccccaaggtgatggtattaagagatggggcctttgggaggtgttgagaccatgagggtggagccctctwgatttggattaatcccttataaaagaagcctcagagagctcactccaaggaatgcggtgaaggttgaagggtagaatttatgcaaaatgccaagatgagc

SEQ ID NO: 6622 - DNA, 201 bp, Homo sapiens
aaaagaaaaagaaatgtaatccccagtgttggaggtggggcctggtgggaggtgattggatcatgggggcggatccctcatgaatggcttagcgtcatccycttggtgattagtaagtgcttgctctgagttcatgtgagatacggttgtttagaagtgtgtggcaccttccccctcgctctcttgctcctgctctcggca

SEQ ID NO: 6623 - DNA, 201 bp, Homo sapiens
ggatcatgggggcggatccctcatgaatggcttagcgtcatcctcttggtgattagtaagtgcttgctctgagttcatgtgagatacggttgtttagaagygtgtggcaccttccccctcgctctcttgctcctgctctcggcaagtgatgtgcctgctccccattcactttccatcatgattggaagcttcctgaggccc

SEQ ID NO: 6624 - DNA, 201 bp, Homo sapiens
tcatgaatggcttagcgtcatcctcttggtgattagtaagtgcttgctctgagttcatgtgagatacggttgtttagaagtgtgtggcaccttccccctcrctctcttgctcctgctctcggcaagtgatgtgcctgctccccattcactttccatcatgattggaagcttcctgaggccccaccagaagcagatgccagc

SEQ ID NO: 6625 - DNA, 201 bp, Homo sapiens
ggatgcctagtttgcaaatatttgctcgcattcagtgggttgtgtgtttactctgataattacttcctttgctgtacagaagctttttaatttactcaggkcccatatatttgtttatttttgagacggagtctcactccatcacccaggcttcagtgcagcagcacgatctcggctcactgcaatctccgcctcccagac

SEQ ID NO: 6626 - DNA, 201 bp, Homo sapiens
ggcatgaatgttgagcctggctggcctgatttgttttcatttctgtgctcaaagtttgatctggagctgggttctgagctggatgtggaggatgaggttcmtggaggcgacagcatgaagagcagagctgcagagcttgggagtgggaaaggtcctgcagagtcacaccggacccctctattcctccaaggctcatctaac

SEQ ID NO: 6627 - DNA, 201 bp, Homo sapiens
tcagattgctttctgacacataaatgggattatttttttcctcctgacaccaaatgtgtgtggttttttccaacgctgcttctcgagctctctggtactarctgggtgtcctacaattctgagcaattctgacgctggctacctggagttcacatcagattccacaggtgaaaggggctcagtcccaaaaaactgctccca

SEQ ID NO: 6628 - DNA, 201 bp, Homo sapiens
ggtggccccagagatcccagaatcgccccctctgtgcccagtgtccagggcccaactcagccagggagagctggaccgaaggatatgaacttctatgggayagaaatagaaggatatgaacttctatgggacaggcattgcccctgcctaagggagatcctaggtctcctccttctcctcctcctcctttctttttctttt

SEQ ID NO: 6629 - DNA, 201 bp, Homo sapiens
cttgttcagcaactgtgtcctggtaagttctcacgatacatcaggcaatgttaccagttacctgtggttgggcgtctcctggcatctcaaggctcagaagyccccagtgtgaatggtgtttgtctgtttgtttgtttgagacagagttttgctcttgttgcccaggctggagtgtaatggcacgatctcggctcactgcaa

SEQ ID NO: 6630 - DNA, 201 bp, Homo sapiens
acccacctcaccctcccaaagtgctgggattacaggtgtgagccaccgcgtctggccccaaaattaaccattttgaaaagtgaataattgactggcattcratgcattcacagtgttgtacaaccatcacctctatctagtttcagaatattttcctcaccccaaaaggaaaccatgtacccgtgggctggtggctacctg

SEQ ID NO: 6631 - DNA, 201 bp, Homo sapiens
actgtgttggccaggctgatcttgaactcctgacctcaagtgatccgcctgcctcagcccccaaagtgctgggatttcaggcgtgaggcaccgcacccagycagggcttcaacatatgaatctgggaagagagagaagtcagctcctagttggcaacctcacaactgctgtctacactgacaacgatcattttcccatccc

SEQ ID NO: 6632 - DNA, 201 bp, Homo sapiens
ttactttcttcaagtgcagcaagtagacaattgaaaagtacctttacggccgggcgcggtggctcatgcctgtaatcccagcactttgggagactgagacyagcggatcacctgaggatcaccaacctgaccaacatggagaaaccctgtctctactaaatatatgaaattagccgggcgtggtggagcatgtctgtaatc

SEQ ID NO: 6633 - DNA, 201 bp, Homo sapiens
tggtcgctgaagccactgccttcctgagatgacccaggtacagccagtctcacccccagacatccaacctctcacctctgtgatgacccggtgtccaggcrcagacacacccagagtcctcctgaccagctcatcagcagctcaccaaggaaaggaaatcaaggtgtactctcttcagactctagatttcccttcctcctc

SEQ ID NO: 6634 - DNA, 201 bp, Homo sapiens
ttgttctgtggattaaattaatacttgttaatacatgtgaagtgcttagcacagtatctgccacttactgtggggtttataaacattttcctcccctcccytcccctcccctcatggcctcctttcgagactgggtcttatggtgtgatcatagctcactgcagcctcaacctcctgggctcaagcgatcctcccacctca

SEQ ID NO: 6635 - DNA, 201 bp, Homo sapiens
agcaaaccagcatggcacatgtatacctatgtaataaacctgcatgttcagcacatgtatcccagatttgaaataaaattcttttaaaaaagggggggggwtttaaagacagagacaggcatgtatacagagaggaaaccatgtgaacatggaagcagggattggggtgaggctctactgaccaagggctgccaaactatt

SEQ ID NO: 6636 - DNA, 201 bp, Homo sapiens
tgacctcctgaggctgtgtcacggttgtgcatccttaaccttggcaaaataaactttctacactgaccgagacctgtctcagaaacattgggttaacaacrctctcacatattgctgctgagaaggcagcttcatttggaacttcacgccaaaaaccccattttaccttaattacctctttaaagaccctgtctccaaata

SEQ ID NO: 6637 - DNA, 201 bp, Homo sapiens
ttggtagggtacttggacagtgtctgagaccacctggatttcttgacgtagatgaaggcggtgagcctgaacacacctggctgactgagatgctcgagaaytggaccaggacctccctggaaaagcaggagcagccccatgaggaccccgaaaggaaaggtaccatgtgtagtgtgataagtgtcatcaacagtaagtgcc

SEQ ID NO: 6638 - DNA, 201 bp, Homo sapiens
tgcccaatggtgtcccaggtttccaatttctccacgtcctcatcaacacttattgttttctggggttttttggataccagccatcctaatgggtgtgtctwtttttttttttttttttttttttttgagatggagtctcactctgtctcccaggctggagtgcagttgtgtgatctctgctcactgcaacctcccaggttc

SEQ ID NO: 6639 - DNA, 201 bp, Homo sapiens
tgctctgagttcatgtgagatacggttgtttagaagtgtgtggcaccttccccctcgctctcttgctcctgctctcggcaagtgatgtgcctgctccccaytcactttccatcatgattggaagcttcctgaggccccaccagaagcagatgccagcaccacgcttcctgtacagcatccagaactgtgagacaattaaac

SEQ ID NO: 6640 - DNA, 201 bp, Homo sapiens
tgggtaatggagagagatggaatgtgccacacgaagcctcactatgactttctataatgcctggctcctgtgctgaaatgagaacatgcatcctagccggscatggtggtgcgtgcacctgtagtcccagctattcggggaggctgaggtgggaggattccttaagcccaggagttggaggctgcagtgagctatgaatgc

SEQ ID NO: 6641 - DNA, 201 bp, Homo sapiens
gataatggcttccagctccatccctgtccctgcaaaggacatgatcttgttcctttttctggctgcatagtattccatggtgtatatgtgccacattttcyttatccagtctaccattgatgggtatatttggttgattccatgtctttgctattgtgaatagtgctgcaatgagcatacgcatgcatgaggcagaatttg

SEQ ID NO: 6642 - DNA, 201 bp, Homo sapiens
gaggattccttaagcccaggagttggaggctgcagtgagctatgaatgcaccactgcactcagagtgagacccccatcccttaaaaagttttcttttaaaraacgtacttttttttgttttgttttttgtttttgtttgtttgtttgagatggagtctcgctctgtcacccaagctggagtgcggtggtgcaatcttggct

SEQ ID NO: 6643 - DNA, 201 bp, Homo sapiens
gaggttgcagtgagctgagatcgcgctcctgcactccagcctggggacagagcaagactccttctcaaataaataaataaatacataccatcaggtctcgygagaactcaactcactgtcacgagaacagcatgagggtaaccacttccatgcttcaattacctcccacgacacttggggattatgggaactacaattcaa

SEQ ID NO: 6644 - DNA, 201 bp, Homo sapiens
acttactataagatatacttgagcccaggtattcaagactagcctggaaaacactgtgagacctcatcttttttaaacaaaattaataaatagataaaacrtttaaaaaagccaggtgtgatggctcacgcctgtagtcccagctactcaggaggctgaggcgggagggtcgcttgaggccaggagttcaagaccagcaag

SEQ ID NO: 6645 - DNA, 201 bp, Homo sapiens
tcccaggttcacgccattctcctggcccagcctcctgagtagctgggactacaggcacccaccactgcgcccagctaatttttttttttttttttttttttgtatttttagtagagaccggtgttagccaggatagtctcgatctcctgacctcatgatccacccgcctcagcctcccaaagtgctgggattacaggcatg

SEQ ID NO: 6646 - DNA, 201 bp, Homo sapiens
gttcaagaccagcaagcctgggcaacgtagtgagacctcctctctaaaataaataaataaaaatataagatagaatggccgggtgtggtggctcatggctktaatcccagcactttgagaggccaaggtgggcggatcgcttgaggtcaggagcttgagaccagcctggccaacatggcaaactctgtctctactaaaaat

SEQ ID NO: 6647 - DNA, 201 bp, Homo sapiens
acgtagtgagacctcctctctaaaataaataaataaaaatataagatagaatggccgggtgtggtggctcatggctttaatcccagcactttgagaggccraggtgggcggatcgcttgaggtcaggagcttgagaccagcctggccaacatggcaaactctgtctctactaaaaatgcaaaaatacaaaattcgccgggc

SEQ ID NO: 6648 - DNA, 201 bp, Homo sapiens
acattcataagacaaggttagaatcatgaaggtgctggaactttgctaaagaacagtcgtgggttgaagaatgacctgccatcccttagcttccttttctrtatgtgctccagagtcacgtaaccaggggtcgcatgatttataacttccccagctacttctataaataatatcactgtcgtgaaacacagaactcagctt

SEQ ID NO: 6649 - DNA, 201 bp, Homo sapiens
cactcttgacctcaagtgatctgactgcctcggcctcccaaagtgctgggattacaggcatgagccactgctcctggcaataatgtttcgttttgtttttrttttaaaaaaaagaaattgtctttgagatagttttcagagtgagcattttggcagaccaagagctaccacctggtcctgagacccgctcccaggaactga

SEQ ID NO: 6650 - DNA, 201 bp, Homo sapiens
tcactgcaacctccggctcatgggttcaagtgatcctcctgcctcagcctcccaagtagctgtgattacaggcacccgccaccacgcctggctaattttgrtatttttagtagagacagggtttcactgtgttggccaggctgatcttgaactcctgacctcaagtgatccgcctgcctcagcccccaaagtgctgggatt

SEQ ID NO: 6651 - DNA, 201 bp, Homo sapiens
gcttcctacaaggcacacaggacttcagctgtgtctgcgcaccatgccatgcagctgccgggtcttatggcctcggaatacaccatcaagcatcaagtcastggatcatggcgatgagtgttttagcatcaaatttctccctgaaggggttggatgaagtcgctttctcagtagcaatatatgagagtgtaaaccaaaaat

SEQ ID NO: 6652 - DNA, 201 bp, Homo sapiens
ttagtagagacagggtttcactgtgttggccaggctgatcttgaactcctgacctcaagtgatccgcctgcctcagcccccaaagtgctgggatttcaggygtgaggcaccgcacccagccagggcttcaacatatgaatctgggaagagagagaagtcagctcctagttggcaacctcacaactgctgtctacactgaca

SEQ ID NO: 6653 - DNA, 201 bp, Homo sapiens
acctgtattagtccatgctcacactgctaataaaaacatacctgagactgggtaatttacaaaggaagaaggtttaattgactcacagttcagcatggatkgagaggcctcaggaaacttacagtcatggtggaaagcgaaggccaagcaagtcaccttcttcacaaggcggcaggaaggagaagtgagtgccagcagggc

SEQ ID NO: 6654 - DNA, 201 bp, Homo sapiens
gtccaagctgacccttgctctgttgtgtgtctgggctgttagctgaggtcccgttgggtctccaggccccaggggtcttctggaggggtcttctggagaggtcttgcaaccatttcttattgcctccttctcagaccatccgggctaccactgactactgccgccgccacaagatcccctttccccaagtagaagaggctg

SEQ ID NO: 6655 - DNA, 201 bp, Homo sapiens
tgatccgcccacctcagtctcccaaagtgttagcattacaggcgtgagccaccgtgcctggctgattattcattttttatgtctccctgtatcatatacaratgtgtttggctaaaagtcactaaccaaccacagtgccccgaggacatgtgggattaattttcttacaaaagaaaaagacagactgagcaccgtgactca

SEQ ID NO: 6656 - DNA, 201 bp, Homo sapiens
agaagaaaaggcggccgtggagagacgaagacttcatgtgctgaaagctctgaagaagctaaggattgaggctgatgaggtaagtgaggggaggagggtgsccccagagatcccagaatcgccccctctgtgcccagtgtccagggcccaactcagccagggagagctggaccgaaggatatgaacttctatgggatagaa

SEQ ID NO: 6657 - DNA, 201 bp, Homo sapiens
gtattttttagtagagatagggtttcaccatgttagccaggctgactttaaactcctgacttcaattgatccgcccacctcagtctcccaaagtgttagcrttacaggcgtgagccaccgtgcctggctgattattcattttttatgtctccctgtatcatatacaaatgtgtttggctaaaagtcactaaccaaccacag

SEQ ID NO: 6658 - DNA, 201 bp, Homo sapiens
agcctcccaagtagctgggactataggtgcataccaccaggcctggctaatttttgtattttttagtagagatagggtttcaccatgttagccaggctgaytttaaactcctgacttcaattgatccgcccacctcagtctcccaaagtgttagcattacaggcgtgagccaccgtgcctggctgattattcattttttat

SEQ ID NO: 6659 - DNA, 201 bp, Homo sapiens
acttattgttttctggggttttttggataccagccatcctaatgggtgtgtctttttttttttttttttttttttttttgagatggagtctcactctgtckcccaggctggagtgcagttgtgtgatctctgctcactgcaacctcccaggttcaagttattcccctgcctcagcctcccaagtagctgggactataggtg

SEQ ID NO: 6660 - DNA, 201 bp, Homo sapiens
ccccgcagtcttcacccgcggagattccggctgaaggagctgtccagcgactacaccgctaagcgcagggagcccaagcctccgcaccggattccggagcmcaagctccaccgcgcatgcgcacacgccccagacccaggctcaggcaagccgtgggggcagggagggctgtttcatcccgctggggcggccataaccaag

SEQ ID NO: 6661 - DNA, 201 bp, Homo sapiens
ggctatctcaaaaaaaaaaaaaattttttttttgaggaacgaccataccattttccacagtggctgtaccattttatattctgcccaatggtgtcccaggkttccaatttctccacgtcctcatcaacacttattgttttctggggttttttggataccagccatcctaatgggtgtgtcttttttttttttttttttttt

SEQ ID NO: 6662 - DNA, 201 bp, Homo sapiens
tccccaagtagaagaggctgagctggatttgtggtccaaggcccccgccagctgctacatcctgaaaggagaaactggaccagtggtgatgcattttcccytgttcaacatagatgcctgtggaggtaggtgcaggggaggagcaggtgagaagccacctgtattagtccatgctcacactgctaataaaaacatacctga

SEQ ID NO: 6663 - DNA, 201 bp, Homo sapiens
tttttttttttttttgagatggagttttgctctttttgcccaggctggagtgcaatggcgcgatctcagctcaccgcaacctcggcctcctgggtttaagygattctcctgcctcccgagtagctgggattacaggcatgcgccaccacgcccggctaattttgtatttttagtagagacagggtttctccatgttggtca

SEQ ID NO: 6664 - DNA, 201 bp, Homo sapiens
acccgggaggcggaggttgcagtgagctgagatcacgccattgcactccagcctgggcaacaagagtgaaactctgtctcaaaaaaaaagaagaagtatgkagtcctcaggccacatttagttttctttaacatgttaaatattaaagggctatcaaagcaatgtaggtgtgatttgcttttctgctgctaaactcttgta

SEQ ID NO: 6665 - DNA, 201 bp, Homo sapiens
ttccgcaggtggatagtgacaagggcatctcccttcgcttccctcggtttattcgagtccgtgaagacaagcagccggagcaggccaccaccagtgctcakgtgaggtcctgggaagcaggggtgggccgcccagctgcttggccctaccagctttttagcgtggtggcctctctggaaccttgtggaggtgggagcagcc

SEQ ID NO: 6666 - DNA, 201 bp, Homo sapiens
gtttccatttgtttgtgtcatctatgatttctttcagcagtgttttgtagttttccttgtagcagtctttcacctccttggttaggtatattcctgagtaytttattttatttttttgcagctgttgtaaaaggggttgagttcttgatttgaatctcagcttggtcattgttggtgtatagcagtgctactgatttgtgt

SEQ ID NO: 6667 - DNA, 201 bp, Homo sapiens
ccacccgccctctctccccttccttctctatctgcgaggctttgctctctgccgtgcaagtctgtgccaggcttactttgctgtctgtcactgtgactcakcctccctgtctctcttcctgtgtctccatcatggtctcttgtgcacacaatctcttgggcattctgtttctatttgttgtagcccaagaagacaacattg

SEQ ID NO: 6668 - DNA, 201 bp, Homo sapiens
ttattttcttacaattctgcaggcaggaagtccaagatcaaggtgccagtggggtcagtttctcctgaggcctctctccatggcttgcagagggatggccrccttctcaccgcatcctctcagcccagcctttcctcagtgcacacgcattcttggtattcttggtgtcttcctttttttcttttttttttttttttagat

SEQ ID NO: 6669 - DNA, 201 bp, Homo sapiens
ctgtccaagctgacccttgctctgttgtgtgtctgggctgttagctgaggtcccgttgggtctccaggccccaggggtcttctggaggggtcttctggagaggtcttgcaaccatttcttattgcctccttctcagaccatccgggctaccactgactactgccgccgccacaagatcccctttccccaagtagaagaggc

SEQ ID NO: 6670 - DNA, 201 bp, Homo sapiens
atggattttgtgaagaaaacaggcatttgcgcttcaaagtgggaatgggggaccactcacaacttcctgtacaaacacggtgagaagaccctcttcccacygccctggtctgtccttgcgtgtgaatgggctggagtaggggaagggggtgggcctgaaacaatcccaggctggtccttccccagagctttggaggggggt

SEQ ID NO: 6671 - DNA, 201 bp, Homo sapiens
attggtgcagcaaaccagcatggcacatgtatacctatgtaataaacctgcatgttcagcacatgtatcccagatttgaaataaaattcttttaaaaaagkgggggggatttaaagacagagacaggcatgtatacagagaggaaaccatgtgaacatggaagcagggattggggtgaggctctactgaccaagggctgcc

SEQ ID NO: 6672 - DNA, 201 bp, Homo sapiens
gtccttgcgtgtgaatgggctggagtaggggaagggggtgggcctgaaacaatcccaggctggtccttccccagagctttggaggggggtggtgtcaaagkgcccagggatctgattaggggaactttcgctcagtggtgtggtccatactgaaaaatgtgtggcctcgctgcgagtcccagtcatcgtgaaaagcctcac

SEQ ID NO: 6673 - DNA, 201 bp, Homo sapiens
gctgtgtgtggcctgggaagggaaccctggctggatgtcagtcctgctcacctctcctggggtgcttcctacaaggcacacaggacttcagctgtgtctgmgcaccatgccatgcagctgccgggtcttatggcctcggaatacaccatcaagcatcaagtcactggatcatggcgatgagtgttttagcatcaaatttct

SEQ ID NO: 6674 - DNA, 201 bp, Homo sapiens
agctgggcgtggtggcgggcgcctgtagtcccagctactccggaggctgaggcgggagaatggcgtgagcccggaaggcggagcttgcagtgagccgagaytgcgccactgcactccagcctagggcacaaagcgagactccatctcaaaaaaaaataaaataaaataaaccaatcaaaccaaattccaggccaccctcag

SEQ ID NO: 6675 - DNA, 201 bp, Homo sapiens; identical to SEQ ID NO: 755

SEQ ID NO: 6676 - DNA, 201 bp, Homo sapiens
agtagagacaggatttcaccatgttggtcaggctggtcttgaactcctgacctcaggtgatccacccaccttggcctcccaaagtgctgggattacaggcrtgagccaccgtgcccggccaaaatagagtaattatgaaaattaatcctttatcacaaatacttgtagcagagcacatctccccatgtttttttgttgttg

SEQ ID NO: 6677 - DNA, 201 bp, Homo sapiens
tgttgttgttttcctatatataacaaaaggaggaggtggttgcatttctcctcttactttccgtaacaccctactctgtggagtaacgattctttcacccytttgctttcttaacagacttgctttcgctttgcactgtggactcaccctgaattctttcttgtatgagatccaagaaccctttcttggggtctggatcgg

SEQ ID NO: 6678 - DNA, 201 bp, Homo sapiens
caaaaaataaattagccgggcatggtgacatgcatctgtagtcccagctacttgggaggttgaggtgggtggattgcttgagcccaggaggttgaggctgyagtggcccattattgtaccactgcactccagcctgggtgacagactgagacccctctaaaaaaaaaatgtggcctacgtgcagaggttccaccctgtggg

SEQ ID NO: 6679 - DNA, 201 bp, Homo sapiens
atctgggaagagagagaagtcagctcctagttggcaacctcacaactgctgtctacactgacaacgatcattttcccatccccctctctgccttccatttmcaagtcttgctttcagtccccagaagcagctgatcctctttcttcctgggcaccacaggtggcatccgggacaagataatgagcagccggaagcacctcc

SEQ ID NO: 6680 - DNA, 201 bp, Homo sapiens
gctgtagtggcccattattgtaccactgcactccagcctgggtgacagactgagacccctctaaaaaaaaaatgtggcctacgtgcagaggttccaccctstgggacccacatgcctccctcacactgtcttggcacattctcccaaagctgccggagtctcatttgtccaatatgaagaagcccgtggaagaagggacac

SEQ ID NO: 6681 - DNA, 201 bp, Homo sapiens
gggaggttcacctcatcctctccttcgacttcagtgccggagatcctttcgaggtaatcgagaagggctttggggccggtcctgggtgggaggtgggctgyggcgaagctgactttgcggaggaactgaggacgcgggctgggaagcgggcaatggggaggtgctggctgggaagtccagagagccaaatcaactcaccca

SEQ ID NO: 6682 - DNA, 201 bp, Homo sapiens
caaatctttagaaggtacttatgacagtaaattcctctgtaatacaggtatgaagcaccttcatgatatttctgttttatgtgtagaaaagtggctgggtrcggtggctcactcctgtaatctcagtgctttgggaggccaaggtgggaggatcacttgagatcagcaatttgagaccagcctgggcaacatagcaagacc

SEQ ID NO: 6683 - DNA, 201 bp, Homo sapiens
agtgtttgattaaataactggttactgtggcccagcctagttgacatgttaaaccatcctcccaacatcctaagtgctataggcaggctcttacttattcytcataaatctataagggataggtgttactctcttcctggttttacagatgagaacagagatgttaagtaacttgctcaggggcccggtgcagtggctcat

SEQ ID NO: 6684 - DNA, 201 bp, Homo sapiens
ttgtctcaaaacaaacaaacaaacaaacaaacaaacaaaaaactagaatgtgttttgggcaccagcaaagcaaggggcatacaattttttttaaatggggyatttccagaaaaaattacaacaaaaaccaaaaacaaaacagtcatagtgagtaaaatcagaacttgattaaatgtccttgactgtagcttacacactggt

SEQ ID NO: 6685 - DNA, 201 bp, Homo sapiens
atttatgcccacagacaatcctccatgcaatcgtgtggctacactcttcccttgcactccaggattccatggagttgcagccacaatgagatggaagagaraggcagggctgagggttcaagctctggaaaatattggaaacaggctgctgtggaagttatgagctgccaccagcagcgtagactcaggtctgaggatgag

SEQ ID NO: 6686 - DNA, 201 bp, Homo sapiens
ggagtgtaatggcacgatctcggctcactgcaacctctgcctcccaggttcaagtgattctcctgcctcagcctcccaagtagctgggattataggcatgygccaccacgcctggctaatttttgtatttttagtagggatggggtgtcaccatgttaatcaggctggtctcgaactcctgaccttaggtgatccactcac

SEQ ID NO: 6687 - DNA, 201 bp, Homo sapiens
ggtgttgagaccatgagggtggagccctctagatttggattaatcccttataaaagaagcctcagagagctcactccaaggaatgcggtgaaggttgaagkgtagaatttatgcaaaatgccaagatgagcctggcaggtgacgttctcagcaaacgtgagcagagctattatcagtgtgtgtgtgtgagagagagagagt

SEQ ID NO: 6688 - DNA, 201 bp, Homo sapiens
agatttatgcccacagacaatcctccatgcaatcgtgtggctacactcttcccttgcactccaggattccatggagttgcagccacaatgagatggaagaragaggcagggctgagggttcaagctctggaaaatattggaaacaggctgctgtggaagttatgagctgccaccagcagcgtagactcaggtctgaggatg

SEQ ID NO: 6689 - DNA, 201 bp, Homo sapiens
agcagagtcttccctaactcccccggggaaagggagactccctttcctggtctctaggcactgacgcaaccgctagaccaaggtccgctaggcaatgggcrtcttcccagacgctggcgttaccccaagaccaaggggccctctagtggccctattcgggcatgacagagggctcacacttgtcttctggtcactcttgac

SEQ ID NO: 6690 - DNA, 201 bp, Homo sapiens
gttcatcatttaaccctttgaatgacctgaagaagtggatgctgttgtcccctccattttgctgagagccaccgggtcatggaaaggatgcgtgactcacytatgtaactggttggtgagtgcagacacagggatctataggggaatcgtatggtggttctgatccaaagcctgtctgcctgaatccacatcccagctcca

SEQ ID NO: 6691 - DNA, 201 bp, Homo sapiens
gcgtagagagagaggatagcttatgtcattatttcttttatgttcttttcagaaagatcaaagactttaatattttaatactttcactaattctgctactsctatctagagggtgcagccaggtatacagagtggaacaggaaagtgaaacaggagtgtgaccactgaagcacagcatcacagggagatggtcaggcctct

SEQ ID NO: 6692 - DNA, 201 bp, Homo sapiens
gactgagaattttctgaccgcagtgcaccatgggaaggtaagtcctcttagagctgaccactatggggaagcagagcatttgtgtaatggaatgcatagtragtgtcaagaggtgagggctgtgacagttcctctcgcttggtggagatagatggaaagagctgaaggttgggcatggtggcccatgcctgtaaccccagc

SEQ ID NO: 6693 - DNA, 201 bp, Homo sapiens
aggaactgaggacgcgggctgggaagcgggcaatggggaggtgctggctgggaagtccagagagccaaatcaactcacccatcgctcccgaagcacccgcrgtcggccacatccaacgaacttctgatccaaagccatcccagaccttcccgggcccctcttcctggcagatgactctccccgcttctgcgtcctgcctgc

SEQ ID NO: 6694 - DNA, 201 bp, Homo sapiens
caccacccaaggctaggattacaggcacaagccgccctgcccagctattttattaaaaaatatatacacctacataatatataactatatctattacatgrtacataccaatacatagtagtatatataaaataatcatggtaaaacatatcatctattatatttatgtgtaatgtaatatatatttatattcacacactt

SEQ ID NO: 6695 - DNA, 201 bp, Homo sapiens
atatttatgtgtaatgtaatatatatttatattcacacacttctatcagtttacattctgtaatatgaattaggaacatccatcctcctccccataccatratccagaaccaacttgtcaccatctttctagacccttggcccaggaatacccaggctttctggtcttaggatttctgctgaaataaatatcccaagacaa

SEQ ID NO: 6696 - DNA, 201 bp, Homo sapiens
atgagatccccagtggtttctgataccacacagtccatctctaacattctcctgtcatggttgtaattcctcattaatagatttctttttcctgcataccygctacattcctggttctgtgctgggactcacttgccgttgtatttcctctgcagagacctggttcgagttcacccctcaccacgctggcttctctgcact

SEQ ID NO: 6697 - DNA, 201 bp, Homo sapiens
ccacatgtggcacttgagcacttgaaatgtgcctggcccaagttgaagtgtgctatgaagataaaatacacctcggattttaatgaccgagtatggaaaaygcatgtcaaagaccttattcgtaattggtatattgacatactaggcagggctctccagagggacagaaccaataggatctatgtctagatgaaagggagt

SEQ ID NO: 6698 - DNA, 201 bp, Homo sapiens
tcttgggcatcagagattttgaaattgtcactcccaggtactccctataacattattatttccttagatgtatgtatcacctactgaagggattctgtacrtgtattttatccctcccctcacacaccagggtgctttttatttattattataaaataaacataacataaaatttgccattttaaccattttaaagtgtca

SEQ ID NO: 6699 - DNA, 201 bp, Homo sapiens
cctgtatcatatacaaatgtgtttggctaaaagtcactaaccaaccacagtgccccgaggacatgtgggattaattttcttacaaaagaaaaagacagacygagcaccgtgactcacagctgaaatcccagcactgtgggaggccgaggcgggcagatcacttgaggtcaagagttcaagaccagacgggccaacatggtg

SEQ ID NO: 6700 - DNA, 201 bp, Homo sapiens
tgaagtgtgctatgaagataaaatacacctcggattttaatgaccgagtatggaaaacgcatgtcaaagaccttattcgtaattggtatattgacatactwggcagggctctccagagggacagaaccaataggatctatgtctagatgaaagggagtttcaggatcacaaggtggagtcctacaataggccgtctgcgag

SEQ ID NO: 6701 - DNA, 201 bp, Homo sapiens
tgtatcatatacaaatgtgtttggctaaaagtcactaaccaaccacagtgccccgaggacatgtgggattaattttcttacaaaagaaaaagacagactgrgcaccgtgactcacagctgaaatcccagcactgtgggaggccgaggcgggcagatcacttgaggtcaagagttcaagaccagacgggccaacatggtgaa

SEQ ID NO: 6702 - DNA, 201 bp, Homo sapiens
tagagttgcatgccaccatacctggcctgctccttctgagaaggagaacaagcactttgcagaagtccccccagcagtgtgcatggaccagagcttgaccktcccctagctgcaagggaggctgggaaatatttgcccttcctgcctgtgtgctgagaagggttggcatggacaggagcttgaaatggccttggggtagcc

SEQ ID NO: 6703 - DNA, 201 bp, Homo sapiens
caggcatgcgccaccacacccagctaatttttgtatttttagtagagacggggtttcaccatgttggccaggctggtcttgaactcctgaccttgtgatcygcccgcctcggcctcccaaagtgcagggattacaggcgtgagccaccacgcccggccaataaacagaaatttaagcaagacatatctgtaacaatttaac

SEQ ID NO: 6704 - DNA, 201 bp, Homo sapiens
gcagtgtgcatggaccagagcttgaccgtcccctagctgcaagggaggctgggaaatatttgcccttcctgcctgtgtgctgagaagggttggcatggacrggagcttgaaatggccttggggtagccagtctacagtgcccggctggctccacccatagaaggttcgtgaggacaaggaccttatctgtcttgtttactg

SEQ ID NO: 6705 - DNA, 201 bp, Homo sapiens
gcccggctaattttttgtaattttagtagagatggggtttcactgtgttagccaggatggtctcgatctcctgacctcgtgatccacccacctcagcctcycaaagtgctgggattataggcatgagccatgagccaccatgcccagcctctttcttgctcttgtcacccaggttggagtgcaatggcgctatctgggctc

SEQ ID NO: 6706 - DNA, 201 bp, Homo sapiens
gagaagggttggcatggacaggagcttgaaatggccttggggtagccagtctacagtgcccggctggctccacccatagaaggttcgtgaggacaaggacyttatctgtcttgtttactgctctattccaacagccagaagagtgccgggtgcccactaattgcttcataaatatttatggaatggaagaaagatctttct

SEQ ID NO: 6707 - DNA, 201 bp, Homo sapiens
gacaaggaccttatctgtcttgtttactgctctattccaacagccagaagagtgccgggtgcccactaattgcttcataaatatttatggaatggaagaawgatctttcttcctgctgcagatccctgcagtgctttatgccagtctgctggtgctttgaatatcaaacatgacagtcacgtgatggagaatgtttgaatt

SEQ ID NO: 6708 - DNA, 201 bp, Homo sapiens
aattgcttcataaatatttatggaatggaagaaagatctttcttcctgctgcagatccctgcagtgctttatgccagtctgctggtgctttgaatatcaarcatgacagtcacgtgatggagaatgtttgaattttattgctcttttcttggcaggtttatggggaagtgctcttggtaacactgaagtcattagggaata

SEQ ID NO: 6709 - DNA, 201 bp, Homo sapiens
ccgatgagtagatagaaatgaggacgtaaaacaatactgatggtaggcaactctttcctgagtttggctgtgaatggtagttgagagaaagggtggtaagsgaagaggggaggggaaggagatttgagattcaagggagatatttgggagttattaattttttgtcgttatttttaggatgggaatgtgggtgcatatttt

SEQ ID NO: 6710 - DNA, 201 bp, Homo sapiens
agtgcagtggcgcgatcttggctcactgctgcaacctccgcctcccgtgttcaagcaattctcctgcctcagctttcctgagtagctgggactacaggcaygcaccaccacacccggctgatctttttagtagagacgggggtttcaccatattgaccaggctgggctcaaactcctgacctcgtgatctgcccgcctcgg

SEQ ID NO: 6711 - DNA, 201 bp, Homo sapiens
aaagggtggtaagggaagaggggaggggaaggagatttgagattcaagggagatatttgggagttattaattttttgtcgttatttttaggatgggaatgygggtgcatattttaatacctgtatataaagaaaggatttaataaagagggaaaggttgtagataggaaggaaataatcaactgcgtaaggtctttgagaa

SEQ ID NO: 6712 - DNA, 201 bp, Homo sapiens
tctttctttctttttctttctttctttctttctttctttctttctttctttctttctttctttctttctttcttttttggaaggtcattgaaagtcatgaraggatatagtaaataagtcaggtatttagagagatgagcaaagagcccatgtgggtaagagaatataagaacagagaaaagccacagatgaagaagagta

SEQ ID NO: 6713 - DNA, 201 bp, Homo sapiens
ttatttttattttacagttaaggaaattaaggtatagagaggttaagtaacttgccccaaattacacatatattctaattccagaacctacactctttacstatatactgttattactgcccagaagtgcaaagcagatgggccttttttcttttcctatttccttcactcagtgggcaacgaagtgaaaatggaatgttt

SEQ ID NO: 6714 - DNA, 201 bp, Homo sapiens
cccaactccggcgccgggctagagctggcctcctttcctggatcccgcggactgggtgcaaccagcatctgggcggaggaaaaaggggtgtcagccgtgcmgccccgagaacagaccgccgagcccacgtcggggaaagccgaaagatttctccagaagttcattccggagccccaatccaacccgtctagttcagcggcc

SEQ ID NO: 6715 - DNA, 201 bp, Homo sapiens
acagtgatcctcaaacttttttttttttttttttttttttgagacagagtctcactctgtcgcccaggctggagtgcagtggcgcgatcttggctcactgmtgcaacctccgcctcccgtgttcaagcaattctcctgcctcagctttcctgagtagctgggactacaggcacgcaccaccacacccggctgatcttttta

SEQ ID NO: 6716 - DNA, 201 bp, Homo sapiens
attcattcaagtaatagtttaatttcaaattatctgaagagtggcagtatagtgaggctgaaagggaacagtaaaacttaggagtcttgagatagagtccraattcttttattaaataactataattaaacttaattccatccaggaaaatgtttttgttatctgtgaaatgactaagttggacaggatttttctatttaa

SEQ ID NO: 6717 - DNA, 201 bp, Homo sapiens
gaagttcattccggagccccaatccaacccgtctagttcagcggcctgcagtgggacccgggagcctgcgttttgggaggaggtggtcaccccctgggccsggctgcaggagcgcgggctgcgatctgtgtcccagttcgagctgtgaacccggcgttccccacggcttagactcgccgcgcggtagtgaacttgggaccc

SEQ ID NO: 6718 - DNA, 201 bp, Homo sapiens
cactaatttggatatgaagagtaacaattcacttacttttcctattgcatatatatatttttaagatgttctcattccggaggggaagaacgtctagaaaytccttctgctaaaaaattaacagatataggaattcgaagaatcttttctccagagcatgacattttccggaaaagtgtaaggaagtttttccaagaagaa

SEQ ID NO: 6719 - DNA, 201 bp, Homo sapiens
taatttcaaattatctgaagagtggcagtatagtgaggctgaaagggaacagtaaaacttaggagtcttgagatagagtccgaattcttttattaaataastataattaaacttaattccatccaggaaaatgtttttgttatctgtgaaatgactaagttggacaggatttttctatttaaggtgctttccaattttaag

SEQ ID NO: 6720 - DNA, 201 bp, Homo sapiens
gtgctttggccaatgaaagtgttgcaatatacaaaaaagatatttgaaaaagaggcagaatacctacatcctcattccagtctgccaatgatgtgttgttrgtgaccattaaatagcaaccattaattaggaaatatattaacttctctctactttagttcctttaccagggaaacagtattaacatttatccctccccaa

SEQ ID NO: 6721 - DNA, 201 bp, Homo sapiens; identical to SEQ ID NO: 801

SEQ ID NO: 6722 - DNA, 201 bp, Homo sapiens
ctaaaacacttataccaaggccaggcatagtggctcacacctgtaatcccagcacgttgggaggcctaggcaggcagattgcttgagcccaggactttgasaccaacctggacaacgtggcaaaacctcatctctacaaaaaatacaaaaattagccaggtgtggtggtgtgtgtctgtagtctcagctactcaagaggct

SEQ ID NO: 6723 - DNA, 201 bp, Homo sapiens
aagaggctgaggtgggaggattgcttgaacccaggattttgaggctgcagtgatccatgattgtgccactgcacaccagcctgggtgacagtcctgtctcaaaaaaaaaaaaaaaaaaaagcagaaaaaaggaggaacagaagtgataaaagagtcagaggcaaatagaagcatatggctaatgtaaataactacctttaa

SEQ ID NO: 6724 - DNA, 201 bp, Homo sapiens
aaattgtgtgaaaatcacttgcataattagagtaatgtttaagacctaatttttgtgttataggaaaggctgttaattgctgatgtggcaatttcagctastgaattcatgtttgaagaaaccaggaactatgttaaacaaagaaaagcttttggcaaaacagttgctcacctacaggtaagcttgtcactgtggtttagt

SEQ ID NO: 6725 - DNA, 201 bp, Homo sapiens
ctctggccttatctgtggttaagtgtatataattaagaaggaaacctgagaatgaagatggagaaaataagcagatttctttctttctttctttctttttytttctttctttctttctttctttctttctttctttctttctttctttctttctttcttttttggaaggtcattgaaagtcatgagaggatatagtaaata

SEQ ID NO: 6726 - DNA, 201 bp, Homo sapiens
gtaatatccaatcaaagcttataaagtaagtaggaaaaacagatatttcagttctgtgattccttcttagaatgattttagcttcttaactacaattcaaraacttttagctctttgtaaggaaatgtcttgcaaaacatttgatagtttgccagtttttaaataataactgtgaatcaaagggaaaagtataaaattcag

SEQ ID NO: 6727 - DNA, 201 bp, Homo sapiens
gcggagggtgacacacccgatgagtagatagaaatgaggacgtaaaacaatactgatggtaggcaactctttcctgagtttggctgtgaatggtagttgaragaaagggtggtaagggaagaggggaggggaaggagatttgagattcaagggagatatttgggagttattaattttttgtcgttatttttaggatgggaa

SEQ ID NO: 6728 - DNA, 201 bp, Homo sapiens; identical to SEQ ID NO: 799

SEQ ID NO: 6729 - DNA, 201 bp, Homo sapiens
ttgcctcctaagggtaatgtgttcaactgtaatttgatgggtgtaactctagaaacacatactacgctcctggcaatatgaaggaagtgttaccacttgawatcactctgattttctcaactgtacccaaagtggaatgagtatcatttgcttctgaaatccaaccaccaccacttaaacatcaaaaatgtttactaaaac

SEQ ID NO: 6730 - DNA, 201 bp, Homo sapiens
tgcatattttaatacctgtatataaagaaaggatttaataaagagggaaaggttgtagataggaaggaaataatcaactgcgtaaggtctttgagaaaggstgagtttgtggatgctgacacatggaaagataggccttcccatcaacaggagagggattccttcatttgcacaggaagaaaggagcaaaggacatctatg

SEQ ID NO: 6731 - DNA, 201 bp, Homo sapiens
cctcctaagggtaatgtgttcaactgtaatttgatgggtgtaactctagaaacacatactacgctcctggcaatatgaaggaagtgttaccacttgatatcactctgattttctcaactgtacccaaagtggaatgagtatcatttgcttctgaaatccaaccaccaccacttaaacatcaaaaatgtttactaaaacact

SEQ ID NO: 6732 - DNA, 201 bp, Homo sapiens
ggaatattgcctggcaaagtaagcccacattaaaattagctgttatccttattttattccttacataatgccttgctccattttgtttcaatatgggagamctttttaccatctacttcctcttgctcttgatctagaccctctctttgtcgttttgggaactgtttgctaccggtattgtcatcaaattaactttttcca

SEQ ID NO: 6733 - DNA, 201 bp, Homo sapiens
tgctcagactgatatggaattctgccaattttaagctcagccttgagggtcttaaaggaagaaatctgtgaaatgaaaaataaaagtgagactccactttaaaaaaaaaatgctaaaaagttccattaagcatatgtataatgtgctaaaaatgtttcaagttggtatttaatttttttatcctaataggcaagcaaagtt

SEQ ID NO: 6734 - DNA, 201 bp, Homo sapiens
catctcaaaaataaacaaataaataaataaataacaatagagaaagtccttgaaagacaggtgagtgaaggaggcatggaggtgttgcagaagggtgaggsaggtatgaaatatcttcttcagaatgagaaactaaactactttctgctttttgtgtatcaatcagctttatgataagagtttagcttcccaggtacaaac

SEQ ID NO: 6735 - DNA, 201 bp, Homo sapiens
gctctgtcacccaggttggagtacagtggcatgatctgggttcactgcaacctccaccttccaggttcaaataattcttgtgcctcagtctccagagtagstggaattaacaggtgcgtgccatgacacctggctaatttttttgtatttttagtagaggtgtggttttgccatgttggccaggctggtctcaaacccctg

SEQ ID NO: 6736 - DNA, 201 bp, Homo sapiens
agaataaatgaaatcttgatttatctctaatttatacatgcaaacaaaggttcatgtgatttttgtttaaagtctctggccttatctgtggttaagtgtawataattaagaaggaaacctgagaatgaagatggagaaaataagcagatttctttctttctttctttctttttctttctttctttctttctttctttcttt

SEQ ID NO: 6737 - DNA, 201 bp, Homo sapiens
attcatcacctttcaaacagttcatgtgacctgattcttcctggatgctgggcaagaacccaggtgccgagagggcaggggctgccaccctgaccctccamtaagctggttggcacttggccatcctggatgcagagctgaaagagcattggttgaatacacttgaacaccactacagggttcgcacggagcctgctccca

SEQ ID NO: 6738 - DNA, 201 bp, Homo sapiens
  misc_feature (1)...(201): n = A,T,C or G, or insertion/deletion polymorphism (see Tables 1-2)
agggatacagtgaggtttgaaatgttatgtgagtcccactggggtctcgaatgttagttgggctttgttatactactgtataaaacctggctaatttatanaataaatcttaatcatatatttatttgtataagtgctttagaatataatagatcagcatggtttttcagtgcaattgtgtgaacattcttaatactcagc

SEQ ID NO: 6739 - DNA, 201 bp, Homo sapiens
cagattaagcactttattccccagatgactgcaggcaaatgtattggtgcaatagcaatgacagagcctggagctggaaggtaagttaatatttagttggytttggattcttggaagcagtgccttaacattttcttagtacttggttaatacatagactgagctatatgctaggaggaaggcaaagatgaacacgggata

SEQ ID NO: 6740 - DNA, 201 bp, Homo sapiens
tctttcatattgtaaagacagtgcataaattcccaaatgtggcatcatgtaggcaaaaaaatatcttgagacttgttggatccacccttattttccaaatraagtgtcatacatagtgtcattgaactaaactaggagtaggcttagaaaccatcttcagggattttcatggaatactcatctgttttcgatatatagatt

SEQ ID NO: 6741 - DNA, 201 bp, Homo sapiens
ctgagaaggtgacttttctttaggatacatacttaactcttccttggaacattataagacagtgatcctcaaacttttttttttttttttttttttttgaracagagtctcactctgtcgcccaggctggagtgcagtggcgcgatcttggctcactgctgcaacctccgcctcccgtgttcaagcaattctcctgcctca

SEQ ID NO: 6742 - DNA, 201 bp, Homo sapiens
ctttttttgttccatctttatattgtctaagagtaaacttcaatgtgtgggttgggagtgggaaactttgtgctgattaaagggtagatatttgacctaaktaaatatatgatgaatagaaatggagatagaaaaaattaagggaaacaataagcggggaagaaagttttgatgtgacccagcatgttcagaactagaggc

SEQ ID NO: 6743 - DNA, 201 bp, Homo sapiens
gaagatggagcaagagagacagaaggattgagagttttaaagaaatctagacatgagtaggaagagaagtcagttggaaaggctgtaggaaaggagaaagwagttagtaatgtcaaggccaccgtgatgttgagaatggagaagaggttttggcaggcctgatgatcctttgtgatttcagtggggtggaggggcagaagt

SEQ ID NO: 6744 - DNA, 201 bp, Homo sapiens
accacacaggaaaagtaccactgactctgtttcaaaaactctattagaaatagcaaaaaactgaaagcaagtaaaagtaaaggaatgggtaagcaaatacrgtgcatctgaacgaatgtgcagccattaacactagcaacacaaagtttttaacagtacaggaaataattatacattaagtgaaaaaacaggatatagaat

SEQ ID NO: 6745 - DNA, 201 bp, Homo sapiens
gaacatttttactatattaaaatttaaaaatatgagaaaggaaattatcaatgatagttgtattatgtacttatggagaattatattttcctttttcttthgaactttacattctctatacaatatctgcaatgattttctgttattttataagcatttaatatcctcctaccacccaaaaatgttggccctcattaggga

SEQ ID NO: 6746 - DNA, 201 bp, Homo sapiens
ggagggtgacacacccgatgagtagatagaaatgaggacgtaaaacaatactgatggtaggcaactctttcctgagtttggctgtgaatggtagttgagaraaagggtggtaagggaagaggggaggggaaggagatttgagattcaagggagatatttgggagttattaattttttgtcgttatttttaggatgggaatg

SEQ ID NO: 6747 - DNA, 201 bp, Homo sapiens
aattcctgcctgagtccctagatttaatagaattaatgagttgtctttgagacattgttacccatggcatgactctgaaaagaagggctatagaagtcctyttttacacaccttgcttccattgagaatccagtcacttccatcctttttagcatttgtttttattccctgtaagtcactgtaattgaaagaaaagataaa

SEQ ID NO: 6748 - DNA, 201 bp, Homo sapiens
ttattgtataatttctgatatgttaagtgggttgaagtttatatttctaccatgctcacttttttcttttatttcctttaaattcaagacagtgcaacatmaattagcagaattaaaaacacatatatgtgtaacccgagcatttgtggacaactgtctccagctgcatgaagcgaaacgtttggactccgccactgcttg

SEQ ID NO: 6749 - DNA, 201 bp, Homo sapiens
attaactactccaacttggcttccaatttgtgttttgtttttttggaaaaaataatattcacttcaatattcactgggttattggaagatttaaatgagaycattctctacattttttgtatggtctcttaggataccgcagaactattctttgaagatatacggttgccagctagtgccctacttggagaagagaataaa

SEQ ID NO: 6750 - DNA, 201 bp, Homo sapiens
gggatcaattgctgcttaggggaaaaataagacgaagggcaaagagtgttcattgaatacaatgatatggagattatttagtaagagccattaatggaggyggagggtgacacacccgatgagtagatagaaatgaggacgtaaaacaatactgatggtaggcaactctttcctgagtttggctgtgaatggtagttgaga

SEQ ID NO: 6751 - DNA, 201 bp, Homo sapiens
tttactaagcttgctagattctaaaaggtataccttatttggccccttttccccatttaggggaacaagggtgttggggctgggaagtagataagaggtgagtaagtcatccaaagcatatgtcttcattagcctccctgtatgaaaagctgatttctgtagagtgttggaggcctactttcagaatctgtcatatgttaa

SEQ ID NO: 6752 - DNA, 201 bp, Homo sapiens
aatgtctaaaatatggaaacttggtttatgagatctactctgccatttttatctgggctttctcttccttttgtctctgttgtacctgtcctgcttggttytgatttaaccccagtggtttctcctgaatgtggagccttctcctagaaggcagcctcggctagtcccagggttcagagtagccagctgctctcttcacct

SEQ ID NO: 6753 - DNA, 201 bp, Homo sapiens
agtcacatattcttgtatgtgtacaaaaaatacacactggatctctgcaagcatagccaagcaactggaaatatgtttttaaaaacttgcttttcattctrtctcttctagtactgttttgatgctctttgaaaacaatctaattgctgtaacaaatgaccatacgtaggccgggtgtggtggctcatgcctgtaatccca

SEQ ID NO: 6754 - DNA, 201 bp, Homo sapiens
gctatgacatcacttggtgataggaatttttcagctccattataatcttatgggaccactgttccacatgtgctctgtcattgacagaaatgccgttaagyaccacatgactattttttttggtggtctgttcctttttattattacagagtattccacagtatggttgtaccacagtttaactgatcacctgttgaagaa

SEQ ID NO: 6755 - DNA, 201 bp, Homo sapiens
aaagaagttaatatggagaagtggcaagtcttttcttctctcttctcttctcttctcttctctcttctttttcttttttctttttttctctgtcagatacygttgtaaagactttgcttttaccggaaactgatacgttgggtcatgtaccctggccagtcagttctctttattctaacacttagccgatcagttagattt

SEQ ID NO: 6756 - DNA, 201 bp, Homo sapiens
tataaagggaaagaatgtgatatgtcacccaggctctggagtacagtggcatgatcataggtcacagcagcctcaaagtttccagttcaagcgatcctacytccttggcttcctgagtatgtggcactacaggtgcatgccaccatgcccagctaacttttttgtagagacagggtctccctatgtttcccaggctggtct

SEQ ID NO: 6757 - DNA, 201 bp, Homo sapiens
atgaggggaagggacagttaatccctactgatcagataaaacctcattgtttcatactaataaatggtttttttatgcttatgaaaggaaaagccagaagkgtaatttttagtgtttagagagctagtgattctagttagggaacttaatacctttgaagttattagtttgcaagcaatagaatctactactaccaaggtg

SEQ ID NO: 6758 - DNA, 201 bp, Homo sapiens
gtgttttcaagaaccctctttattagctaagtggtgagacatgccacctggtggttatagtagtatcatttttctcactgttcttggtgcttttcttctcsttctgattccagttatactaggacaactgctataaacctggaatgtttcacactatattatttcagtaatttcaaaaacagcagaaatcactaagctgtt

SEQ ID NO: 6759 - DNA, 201 bp, Homo sapiens
agtgtctttaaataccccttacctttaaagtaagaaatattaaaatcaagcagaatataataatgaaaaattcttaagatatacttactaaaaacttatcsttcggttaatacactgtatgtaggttgtacatacaatatgaaaaagtatatttttgtagcctacttttaaatccagaatagaggaggttaagaaggttgt

SEQ ID NO: 6760 - DNA, 201 bp, Homo sapiens
ctattattgacattattcctttctgtggtctgaggtgcctcccatgaaacttgcttctaggacactaggattgagaaccatcagcgtaacatatctgttaygctacaatagtttattttcatattttagctactttacatactcgggtataatgaactttattcatagcttctgaagcagttggcacatttgagatatttt

SEQ ID NO: 6761 - DNA, 201 bp, Homo sapiens; identical to SEQ ID NO: 815

SEQ ID NO: 6762 - DNA, 201 bp, Homo sapiens
tcctcctatgtcatttttttcttcttatttttcttgactgtataagagagaatgtatgacatttcctgcttgaccgctgagtttgattataaattaaaatacacaatattttatacaaattgttttgtagaagatttatttacagatgctcattcacaggtaaaattgacttatgaaaatagttttcatgacaaatgtatc

SEQ ID NO: 6763 - DNA, 201 bp, Homo sapiens
ctcctcctatgtcatttttttcttcttatttttcttgactgtataagagagaatgtatgacatttcctgcttgaccgctgagtttgattataaattaaaatacacaatattttatacaaattgttttgtagaagatttatttacagatgctcattcacaggtaaaattgacttatgaaaatagttttcatgacaaatgtat

SEQ ID NO: 6764 - DNA, 201 bp, Homo sapiens
taagcatcttcctcatgctttcagtaaattggaaaacccacggaggttaaatattaccttttttttttttaacttaaatcaattctgtttatttttttatyacattttcctatatgtgaagaatactattcattaaggctgactcatagaaatttgcttgaatacacacacacagactgatgcataaatttgagaaatatc

SEQ ID NO: 6765 - DNA, 201 bp, Homo sapiens
ctctcctcctatgtcatttttttcttcttatttttcttgactgtataagagagaatgtatgacatttcctgcttgaccgctgagtttgattataaattaaaatacacaatattttatacaaattgttttgtagaagatttatttacagatgctcattcacaggtaaaattgacttatgaaaatagttttcatgacaaatgt

SEQ ID NO: 6766 - DNA, 201 bp, Homo sapiens
cctctcctcctatgtcatttttttcttcttatttttcttgactgtataagagagaatgtatgacatttcctgcttgaccgctgagtttgattataaattaaaatacacaatattttatacaaattgttttgtagaagatttatttacagatgctcattcacaggtaaaattgacttatgaaaatagttttcatgacaaatg

SEQ ID NO: 6767 - DNA, 201 bp, Homo sapiens
ctgggtgctaaggctgtctgcaggctactaatatgcataataacaatcctgaaaaagaaggaaaagtatactgtgccttactgaagaaggcaggacagcckttggtatttgttagagtaaatattagttatcttacataaagcatgttatattccctgatgtcagggcctgataaatgagcccttacactcttgatagtca

SEQ ID NO: 6768 - DNA, 201 bp, Homo sapiens
cctactaaactatttgcatataattttaacatttgagtggctgtatataaagctaaaagttctttataagatttatagcatcttagaatgtttaaattagrtaacattagtgtgcttttagtttttgaatttaattttgctcttgattttgtttgtgttaatgtagactttgtctacgtaagcttgagcccaactttggag

SEQ ID NO: 6769 - DNA, 201 bp, Homo sapiens
cccgccccaaattttcttttaacttaaagtgttaatgtttgtttgttcccaatatttttatatatgtcaaggctttttcattatatacaggccagctcttkggagttctgcatagtgtttcttgtttaaaccacacctataatgtaccatctacaatttccaattctttaagacagagtgaaaaattaagacacctgaagc

SEQ ID NO: 6770 - DNA, 201 bp, Homo sapiens
gtgccttgatgctagagagtagcctgcaagctgtaattatatatgggcattagggaatgaagaacagccttaatactattgatcttttaagtgaaggtcascttagaaagcttttacttgttaaaaagcttcacagtttgtccttgtagttaatgcaattgaagttgaattaatctttcttaattttttttttagggtttc

SEQ ID NO: 6771 - DNA, 201 bp, Homo sapiens
ctgcacctggccttggatttcgtgatttgactgacatcttttacaccaattattgccatttttttattgggtactaattattagtattgctttctttattygttaaataagaagtaaaagaacttttaaaaaataaaataactttttttcctagtacaaagcttattttcaattttttttattgcttaaattttgcaggtt

SEQ ID NO: 6772 - DNA, 201 bp, Homo sapiens
ggcttcaggtgatacccgagtggagtttttactccatttccattccgtaaggctataggcatttgaaagaggaaacttttctttggcaaccttccaccttyctttctacagaatatttcagtatttctagctcataggttttctaaaatattctctgtaatttattttgaaatggagtttttttatcgtttacagatatga

SEQ ID NO: 6773 - DNA, 201 bp, Homo sapiens
ttgtacgttgcttaaatctgagaaatcctcagatcacctgtactggttttgatcgaccaaacctgtatttagaagttaggcgaaaaacagggaatatcctkcaggatctgcagccatttcttgtcaaaacaaggtaaggatttaatggttgatgaattttggtaatgatttcctttttttttttttaacaacttatgtatt

SEQ ID NO: 6774 - DNA, 201 bp, Homo sapiens
tcgaaaactgtatcttcgggcaccaaagagcattgttataatcaagtaccagttgaattaagtacagagaagaaggtttgttttaaagaaattgttctgayttatttcattctttattgattcaaattctgtttaaaattttatattttaattcctttccaattaaagagaaaatggcatatataacaaagcataaaattc

SEQ ID NO: 6775 - DNA, 201 bp, Homo sapiens
cttccttattaaatctctaaaagcaggaatgctctggaacaatgaacaattagaatgtggtaatgtaattttgggccaaaaaatactttgtagaaatgtgrttctcttacttggaatagaaagaattctgactcgaaaaagtgcagttaatgtatgcttttctgggtaagatttgtgatagattttgattgagatttaaaa

SEQ ID NO: 6776 - DNA, 201 bp, Homo sapiens
tacaatattaatttcataaaggtaaaggcatatctgttttgttcctatttgattccttgtgaaagcacaatgcctagcgcacaatagacacttaaacttayctgttgaatggacaggtgaatgcttttaaagtctttccatatagaaaattaagtttcattacatttgacttgatctaggttttcatttcatagaatggag

SEQ ID NO: 6777 - DNA, 201 bp, Homo sapiens
tcattgtatttttagtttgcttttccctaatgactaattatattgagcatttttcatacacttattggccatctgtatatcttctttgagggagtatctgytcaaatcttttgcctattttttcttagtgagttttgatagtcatttctatattctgaatataaattatttatttgatatatgctttgcaaacattttctc

SEQ ID NO: 6778 - DNA, 201 bp, Homo sapiens
agagggtcagtttactctttctgatgttgtcctgccggcctctccctatccagacttcggctatctttaggaagcggccccgggagctttgcttcacgtcyaggtaaaacctctttttctggatgtccactcgtttggaggccagctcctggatttcggctgcgcccccggcctgattaggggtggctgaggccgcgtagt

SEQ ID NO: 6779 - DNA, 201 bp, Homo sapiens
gaagttagaatgacccttgaattacaatcggccacattcatcacaaatacattaaataagagtaatttgccataaagctctatgtttgtatacttctttgktttttttttttttttttttttttttttttgagacagggtctcactctgttgctcagtctgtagtgcagtggtgtcatcatagctcactgcagtcttgatc

SEQ ID NO: 6780 - DNA, 201 bp, Homo sapiens
catttttgctttttccctatttcagtaacatttttcgctatttcagtaacattacatgtcaacaagagaatggtgggtattttggggggggttgggtgggragaaattttactaagcttgctagattctaaaaggtataccttatttggccccttttccccatttaggggaacaagggtgttggggctgggaagtagataa

SEQ ID NO: 6781 - DNA, 201 bp, Homo sapiens
taacagagttgggagtattaaaaagatgtaaagagccccttaaaattttgttgctgggaattttagtgttctactgatgaaggaaatagacactggaaggygttgtttctattaggtaacttagatatcatactgaagacttcaaatacttattgttgacactcaaaagacacacttagtgtaagtaagcatttccccgct

SEQ ID NO: 6782 - DNA, 201 bp, Homo sapiens; identical to SEQ ID NO: 817

SEQ ID NO: 6783 - DNA, 201 bp, Homo sapiens
aaggcgatcctcctgccttggctttccaaagtgccgggattacaggcgtgaaccaccgcacctgatgcagttgttgttgttgttgttgttttaatatctgrttattattttattgtatttcattgaatatagcacagtttgtttttacattttcttattgatagacacctaggctatttttctggttttggactgttacta

SEQ ID NO: 6784 - DNA, 201 bp, Homo sapiens
gtttgtattggaattaaaaaatagaaaacattaacccatggtagctgtcactgtattctttcaaagaagccaatgaaataaactgttttctccctctatgkggtgtttttctacttgaacataaatgcacattttattttatttccagactttttgtggccagcacccaatgaagagcaagttacttgcctcaagatgtac

SEQ ID NO: 6785 - DNA, 201 bp, Homo sapiens
ttcccaccagcagtgtatgagaggtccagttcctccccatccttgctatcacttagtctggctgatctttaacttaagccattctaatagtatctcattgkatttttagtttgcttttccctaatgactaattatattgagcatttttcatacacttattggccatctgtatatcttctttgagggagtatctgttcaaat

SEQ ID NO: 6786 - DNA, 201 bp, Homo sapiens
atggtacctgttacagtgctagttatgaaagaaagaaagagagagagagagaaggaaggaagggagaaaggaaggaaggggctgggagtggtggctcacasctgtaatcccagcactttgggaggccgaggcgggtggatcatgaggtcaggagatcgagaccatcctggcgaacatggtgaaaccctgtctctactaaaa

SEQ ID NO: 6787 - DNA, 201 bp, Homo sapiens
gcatgaacccgggaggcagagcttgcagtgagccgagattgcgccactgcactttagcctaagaaaaggaaggaaggaaggaaggaaggaaggaaggaaawatcagtcactcactcaggtttagtttcaaaagccaaaacagtgataatattgaattttttccagccactcagtagtacccagagaattttgatacaaata

SEQ ID NO: 6788 - DNA, 201 bp, Homo sapiens
ttccttattaaatctctaaaagcaggaatgctctggaacaatgaacaattagaatgtggtaatgtaattttgggccaaaaaatactttgtagaaatgtgawtctcttacttggaatagaaagaattctgactcgaaaaagtgcagttaatgtatgcttttctgggtaagatttgtgatagattttgattgagatttaaaac

SEQ ID NO: 6789 - DNA, 201 bp, Homo sapiens
cctttaaaaatataaagagttacatttttcactggtgggccataacaaaacaggctgtgggccatatttgtccgaatgtcttctcagtgatctttcatccrtatgtccttttactctaggatgctgtgaaatcctggttaccccttcttgtatcacattgaaaacctaaagtttgaactattctatagaaattttattaaa

SEQ ID NO: 6790 - DNA, 201 bp, Homo sapiens; identical to SEQ ID NO: 807

SEQ ID NO: 6791 - DNA, 201 bp, Homo sapiens
taggaatttttcagctccattataatcttatgggaccactgttccacatgtgctctgtcattgacagaaatgccgttaagtaccacatgactatttttttyggtggtctgttcctttttattattacagagtattccacagtatggttgtaccacagtttaactgatcacctgttgaagaacttttgggttgttttccagt

SEQ ID NO: 6792 - DNA, 201 bp, Homo sapiens
gttttgttttgttttttgctttttaactgcagtattttgaggagtcttggagtagcaagctaatctttggaagaaaggaaaatataaacctgaaaactaayaatttaaagaacgtcttttcaggttgtcatttgaaaaatacttgatttctgatcactgatttgaattgagtgtcaaatatttgatatgttttgtaaatta

SEQ ID NO: 6793 - DNA, 201 bp, Homo sapiens
aggaatttttcagctccattataatcttatgggaccactgttccacatgtgctctgtcattgacagaaatgccgttaagtaccacatgactattttttttrgtggtctgttcctttttattattacagagtattccacagtatggttgtaccacagtttaactgatcacctgttgaagaacttttgggttgttttccagtt

SEQ ID NO: 6794 - DNA, 201 bp, Homo sapiens
ttgtctataggatgttctcccatacttctctcagatctcttggatttaggcctcctgggccaccatatttgaaatatcagattagttccccctcccccatyattcagcattcctcgtaaatctttgctgttttaaaaatagcactatcactgtctaacttactgtgttatattttgttaattttctgtgagttcttcttca

SEQ ID NO: 6795 - DNA, 201 bp, Homo sapiens
ctgcagtattttgaggagtcttggagtagcaagctaatctttggaagaaaggaaaatataaacctgaaaactaacaatttaaagaacgtcttttcaggttrtcatttgaaaaatacttgatttctgatcactgatttgaattgagtgtcaaatatttgatatgttttgtaaattaggtgaagatgagtgagtaggttctaa

SEQ ID NO: 6796 - DNA, 201 bp, Homo sapiens
tctcctcctatgtcatttttttcttcttatttttcttgactgtataagagagaatgtatgacatttcctgcttgaccgctgagtttgattataaattaaawtacacaatattttatacaaattgttttgtagaagatttatttacagatgctcattcacaggtaaaattgacttatgaaaatagttttcatgacaaatgta

SEQ ID NO: 6797 - DNA, 201 bp, Homo sapiens
aggctgtaaacctgtacagatgttactgtaatgaatattgcaggcaattgtaatacaatggtaagtatttgtgtatctaaacttatctaatgtagaaaagrcacagtaaaaatacagtataaaagataaaagatggtatacctgtatagggtgcttcctgtgaatggagcttgtaggactggaagttgctctgagtgagtg

SEQ ID NO: 6798 - DNA, 201 bp, Homo sapiens
tgaattcactcttttgtgaggtttatctccaaaaaaggcaatattcacatatttgcaaagcatttagtactataacttcttgaatgtctgagcagtcctgrcattagggtgggatccatcagggcccaagatgagtgtttcatctttgttacttgtggcaaagcagcccttacttcttttactttgtagcattgctatgta

SEQ ID NO: 6799 - DNA, 201 bp, Homo sapiens
agcacagtcagaaaatgttctaacagatattaaattgtgagtaatttttttccctcaacttttattttggatttatgggggtgcatatgcaagtttgttaygtgggtgaattacatgttgctgaggaagttgtgagtaatttatgtcatttctaatcatgtggtcagatgtctgtggtatatgagagaattttgtatacaa

SEQ ID NO: 6800 - DNA, 201 bp, Homo sapiens
tgtatttctgagtgggggcatgattttagggattcattcaggaagttgggctccctaaagacagcactgccaatggtaagctttgccaagtctgatgtccygaaattacattcttaataaggagagcattcaggattggggagtggtaaagaagctgaagacttcactataaaagagcaaatggataatgtaaaaagagaa

SEQ ID NO: 6801 - DNA, 201 bp, Homo sapiens
ttcagtagaaatttgctgactctttttatctcttttaatagctaatgcatgagataaaattgaaggtattaccaaggagaaatgcaggtggatagttttgraggcaaagtcacagtaagcaattcatctctccaaggaatagtgatgaaagctgagatccaataaatgtcttgtttggattaatacataaatatttccttt

SEQ ID NO: 6802 - DNA, 201 bp, Homo sapiens
gtttgtactgatttggaaagacattctcatttaggggatgaaatagaaagtcaatgaggagaaagaaaagcttttattatttattttcttttaaatatttyagtatcatggtacagtcaccagaaaaagcttacagttcctcacagcctgttatttcggcacaagagcaggagactcaggtaaggcttttgtaaaaaggta

SEQ ID NO: 6803 - DNA, 201 bp, Homo sapiens
ccatttcttgtcaaaacaaggtaaggatttaatggttgatgaattttggtaatgatttcctttttttttttttaacaacttatgtattttatgttatttaygatttccttctaatgcatatttaacatatttcaaattccacctagttttggttcaagtcaagcatgatgttatataatcaattcagtgattgagactagt

SEQ ID NO: 6804 - DNA, 201 bp, Homo sapiens
tggtaagttgtacttaagcaaaacctaatcctttaaaaaaataaaacataaagagtttgaaatgcttaatctttcattaaactctcaaaatacaaatgcarctacaaatgatgtaaactatagaagagagtgaacaaagaacagatgctcagatttatgtatcaattagcttttaggaagatagcatactagtattgacca

SEQ ID NO: 6805 - DNA, 201 bp, Homo sapiens
gtgaaaaaaaattggaaacaactgcacagcagcggaaatgtcctgaatggatgaatgtgcagaataaaagatgtgctgtagaagaaagaaaggtatgttgytcattgactattctttcgggtgagaaatttaatttatatttgactgtgcaaagagtcagttgttacttgtaaacttcaagtcattgtttaggtcagagtt

SEQ ID NO: 6806 - DNA, 201 bp, Homo sapiens
ttagcacaaggaaagacattcatcataggtttgtaagagatgaaattcaggtatgaggatcaatcatcattgctctccgttgctcatagtggaagtggatrtttctcaaatgtttatttaccagatctttattgaatactttctttgtgttgaacataaagcagtccctctgataaatgtgggagaacaaacttgcagatt

SEQ ID NO: 6807 - DNA, 201 bp, Homo sapiens
ctttaaatatgtatgtttggttttcattcatattgacagtactacctctcagttttctttcagatattgttttgtatttacccatgaagacattgtttttyggactctgcaaataggacatttcaaagatgagtgaaaaaaaattggaaacaactgcacagcagcggaaatgtcctgaatggatgaatgtgcagaataaaa

SEQ ID NO: 6808 - DNA, 201 bp, Homo sapiens
aaactgaagcttagagagttaaataaagagctcaaaatctcacatctagtaagtggcaaaaacaggatttcagctcaagcaatctgattccaaaacagacytttttcactgtgctgccattcttttgcctggtttttctgttaacttcttaaatatatgtcatgtttcatgcttacttcctcattttcataaatatattac

SEQ ID NO: 6809 - DNA, 201 bp, Homo sapiens
tcaaagatgagtgaaaaaaaattggaaacaactgcacagcagcggaaatgtcctgaatggatgaatgtgcagaataaaagatgtgctgtagaagaaagaarggtatgttgttcattgactattctttcgggtgagaaatttaatttatatttgactgtgcaaagagtcagttgttacttgtaaacttcaagtcattgttta

SEQ ID NO: 6810 - DNA, 201 bp, Homo sapiens
aaagattcctttcaaaatgttattgctcattgacaacacttagtcaccaagagccgtaatggagacatacaaggagactaacgttgttttcatgcctgctygcttaacatccattctgtagctcatggatcaagaagtaaattaaccttttaagtattattatttaagaaatacagtttgtaatgctttagcttctgtaga

SEQ ID NO: 6811 - DNA, 201 bp, Homo sapiens
atgattggttgaaatcacattgaattccactttgtgccagggacttaagttaacgaacaaattattcttacaaaaaggtataaatgtaaggttttcattcygctaaatatgtttgtcaaactgtgttgtgatttgttctcagtgtgtcatagctaccatagcttttggaatgggcattaataaagctgacattcgccaagt

SEQ ID NO: 6812 - DNA, 201 bp, Homo sapiens
gtaatgagaagtttcgattatacaaattaaagatgatggcaaagatggaaaaatatcttcattctagcagatgtaggagacagtatgtattatttattttrtgccaatagtatggatttatggatgatgctcttttaagacaacaatttggctaaataattatcagtattttgaaaaaatattttgttgctgttacatgtg

SEQ ID NO: 6813 - DNA, 201 bp, Homo sapiens
acagctgataatttagaaacaactgtaagacagtccactttttctgattatgaaataataccatagttaagtgtaatttcctataatagaataaaaacacsagttctagttttaggggaggcatgttgttactgtaccttagaatttctggaagatgacatattcatgcttttcctgataactgctgagtctcctgctctg

SEQ ID NO: 6814 - DNA, 201 bp, Homo sapiens
tttttgttgctatttatgtgattcaaattataccagtttataggcctctcacaagtaaaatgaattacctgtttgtttttgtatgcctattttagtcagtytgggggaagggatctgtgaggaaaggataagtcatagagcacttttcttttttaagagacagagtctctctgtgttgctcaagctggagtgcagtggtgc

SEQ ID NO: 6815 - DNA, 201 bp, Homo sapiens
gctgataatttagaaacaactgtaagacagtccactttttctgattatgaaataataccatagttaagtgtaatttcctataatagaataaaaacacgagwtctagttttaggggaggcatgttgttactgtaccttagaatttctggaagatgacatattcatgcttttcctgataactgctgagtctcctgctctgtct

SEQ ID NO: 6816 - DNA, 201 bp, Homo sapiens
gtccactttttctgattatgaaataataccatagttaagtgtaatttcctataatagaataaaaacacgagttctagttttaggggaggcatgttgttacygtaccttagaatttctggaagatgacatattcatgcttttcctgataactgctgagtctcctgctctgtctgccaatccagtcaagaagcctttgctagc

SEQ ID NO: 6817 - DNA, 201 bp, Homo sapiens
atatagtatgttattgattatctcagtaccactgaagagaggttatctgggtcattggagctttgcttctagatttgtgaagccataaacctatatatttmaaataggaggccaaaaaaaaacgaccattgctttatatagttagattttcagtgaattgagagtttatcatttgtaattatacattaatcaaatataagg

SEQ ID NO: 6818 - DNA, 201 bp, Homo sapiens
ttttcatgcacttaaatatatcattatttttgataggctttcttcctttagtcttttctttagaaggtagaaaggaagaattaaataagataaaaccaaaygggtctgaagcatgtataaagtatatatgtttgctcttttgttcttctttttctttagttcccactgggaatttgaaggtccaacaatcatctactgtcc

SEQ ID NO: 6819 - DNA, 201 bp, Homo sapiens
atatgagacattctatcaattttaccctcttaaagatgcagagataatgcattatgtttcatcccaccatctttaatgagaagcttccatcttagattaayattagagaatgttaaaatactctgcaatcaggtaaggacgcttgaaacttcattataatgcaaaagttttctttaacacaataaatattttgaacccttt

SEQ ID NO: 6820 - DNA, 201 bp, Homo sapiens
tgtttcatcccaccatctttaatgagaagcttccatcttagattaatattagagaatgttaaaatactctgcaatcaggtaaggacgcttgaaacttcatyataatgcaaaagttttctttaacacaataaatattttgaaccctttttgtgtcttgtattcataggagttcagatagaccactttatttactatttttta

SEQ ID NO: 6821 - DNA, 201 bp, Homo sapiens
aatattagagaatgttaaaatactctgcaatcaggtaaggacgcttgaaacttcattataatgcaaaagttttctttaacacaataaatattttgaacccyttttgtgtcttgtattcataggagttcagatagaccactttatttactattttttatagagagtgaacagaaatcccatttctagtcaccagtccttaat

SEQ ID NO: 6822 - DNA, 201 bp, Homo sapiens
ctgaggtcaggagttcgagaccagcctggtcaacatggtgaaaccctgtctctactaaaaatacaacaattagctgggcgtggtggcaggtgcctgtaatsccagctacttgggaggctgaggcaggggaattgcttgaactcgggaggtggaggttgcagtgagccgagattgtgccattccactccagcctgggcaaca

SEQ ID NO: 6823 - DNA, 201 bp, Homo sapiens
atgatgaataaattctaagcaggggaagtgtttgggaaagcagggcaggctttgtgctgttgatggcaaatgatgtaccagacaggatgaagttgagaatytggaagttgatcactgattagaaaggcttacattttattttggccgggggtggcagctcatgcctgtaatcccagcactttgggaggccaaggtgggcgg

SEQ ID NO: 6824 - DNA, 201 bp, Homo sapiens
tttttcttgtcatttatcaatcaggactgtttgctttagttaagaaatactcaaggtcaatgtgtttctgaatttaaaattactgttaaatacaaatttayacataaacatggtatgtataagaagtaggacataaatccatcatacttgacagaacttatggaaataacaagaaaatgttacagtttttccccagggatt

SEQ ID NO: 6825 - DNA, 201 bp, Homo sapiens
ttctaagtatgtttgtggacttgaataaaataaaacaaacagaaacacttctttcttctgccttcaggcttgaaatgaacatacttttttttaaaaaaaaaccttcaaaatgaaaatattaaataaaagatttaataaaaagagaaagtaaaaactgtagtttaataaagtcttcctgtctcttcatagttaaaaaatgtt

SEQ ID NO: 6826 - DNA, 201 bp, Homo sapiens
agggaatacatttgttgcttacttttttgtacctttacatgtgattgatcacttgtgagttttttctttcaaacatcttaaagcttccagagctttttctrgaaaaaaaaaccagttttaagaatcaccagttctaaaagggtaatatcttattcatctttctgagaatggagtatcatgattcatgaattagatacttgc

SEQ ID NO: 6827 - DNA, 201 bp, Homo sapiens
aatatcttattcatctttctgagaatggagtatcatgattcatgaattagatacttgcatcttaacatttgaaataatttaattttattattttttagttygaaaactgtatcttcgggcaccaaagagcattgttataatcaagtaccagttgaattaagtacagagaagaaggtttgttttaaagaaattgttctgatt

SEQ ID NO: 6828 - DNA, 201 bp, Homo sapiens
ttgttgcttacttttttgtacctttacatgtgattgatcacttgtgagttttttctttcaaacatcttaaagcttccagagctttttctagaaaaaaaaaycagttttaagaatcaccagttctaaaagggtaatatcttattcatctttctgagaatggagtatcatgattcatgaattagatacttgcatcttaacatt

SEQ ID NO: 6829 - DNA, 201 bp, Homo sapiens
ttttgtttgccagccggtcttcagcattttaaggcaacattattattacagttgtaatacgaatataattaccagagaaaaaactcaggaaaataaatgcytttatgaaaatgggattagaggtttgaaaataaacttgttaggagaaataatttcacaatgggatggttttttctttgttaagttttctttatgacttca

SEQ ID NO: 6830 - DNA, 201 bp, Homo sapiens
cttgtgacctgggtacattttgcaaagccacaggtttgcagtgttacacaagggccaaaggaggccatgagttgtctttggttgtggggccggagggtaaytgttcatgaaaatagtgagtgtctgaagattaagaaaatcatgctgcagcagaggagaagggagaggaaggcaggaagggaaaggagatgcctgagggtc

SEQ ID NO: 6831 - DNA, 201 bp, Homo sapiens
attgaatgcttcagtgaactttattatttcagtgaacatttgttatttgatgtgaactttgtgcctgttttgaaatttactaaactcaaggcatgtgttcrgaagagtgtttttgaagatgacctccccttcttagaattcactggatccattgtgtatagttacgatgctagtgattgctctttcctgtcagaagatatt

SEQ ID NO: 6832 - DNA, 201 bp, Homo sapiens
caacattaactttgttgaattttttgtttgccagccggtcttcagcattttaaggcaacattattattacagttgtaatacgaatataattaccagagaaraaactcaggaaaataaatgcttttatgaaaatgggattagaggtttgaaaataaacttgttaggagaaataatttcacaatgggatggttttttctttgt

SEQ ID NO: 6833 - DNA, 201 bp, Homo sapiens
agatgttaacctgttcctttatgacaatgtcctgtttaccaattaacagtgtgtttttgtggtgatgggggcaagacaaatctttaaatggtggaaagcaragaaagaaattataaaacatgattagttgtattatacgttgtttttggttgttggaaaaactatacatttattgagagaatcattaggaagctgaacatc

SEQ ID NO: 6834 - DNA, 201 bp, Homo sapiens
tagccaccgcgcccagcctgaaagatgaactttaaaatggggaaggatactagtaaagccatttcttactcatgtatacatttttccctccatgaaattaragcagccaccttttacatgacttttacatgcatttcagatttttgtactagcaattaaaatatctactggatgtaaatcacatgtgcttaatgctttgct

SEQ ID NO: 6835 - DNA, 201 bp, Homo sapiens
gtgtgtttttgtggtgatgggggcaagacaaatctttaaatggtggaaagcaaagaaagaaattataaaacatgattagttgtattatacgttgtttttgkttgttggaaaaactatacatttattgagagaatcattaggaagctgaacatcagctatattgctggagtgatactgtttcagtggtttcttgaccttttt

SEQ ID NO: 6836 - DNA, 201 bp, Homo sapiens
cttcttggttccagtctagagcccatatagcaggtgggctttaagagataattatccagctcagaccgggagtgagacgggactgttttttcattctaatrcctctctgggcctgataatttaaaggggcttgcattcttcagctaaaattttattttcttttattttttttcccccacagtggtctccctttattaatcc

SEQ ID NO: 6837 - DNA, 201 bp, Homo sapiens
attctgaaaatgaaaaacttaagtaaaggtttagttcattgtttatttcacactgagcatttactacctgaatgttttggacattttatttccatgactgragtggacacttttacaactcactgggttctttgctgatctttctctagaagagcatagctgagagcaggattctgcctctcatgacaattggcatgcact

SEQ ID NO: 6838 - DNA, 201 bp, Homo sapiens
attgtttatttcacactgagcatttactacctgaatgttttggacattttatttccatgactggagtggacacttttacaactcactgggttctttgctgrtctttctctagaagagcatagctgagagcaggattctgcctctcatgacaattggcatgcacttatcccaagcggtgaaagctggctgcccccttgattt

SEQ ID NO: 6839 - DNA, 201 bp, Homo sapiens
gggacaccttccttaaagcgcattggacattggctttgtgggtaactgatctttacctgaatgaaatttatcagtactgtattaagggtctagggtggaayggatgctagcaaggcaaccgttaacatccacttactgatgaatcctataaaattttatttcaggccatacgaagtaacagtaataaatataaaaggaaaa

SEQ ID NO: 6840 - DNA, 201 bp, Homo sapiens
cattgaaatgacatactgccctctctttgtcttctaagttttggatacttttttttttttttttttgacacaaagctgcattagaacctaggtttcttgaytttcagtccagatttctttccactctacttcctgcttcttcatagtataattttcaacactagagcagtctgcataacttttgcaaaatcagctagtctt

SEQ ID NO: 6841 - DNA, 201 bp, Homo sapiens
gaaaggaatacaacagaactttctgagatgctagaaatgtttttttatcttgatggggtgtgggttttgtagataatgaaaaataaacagtaaaaaataaktaaaaaaaaaagtaagaaagttgccaatacagttttacatattcctgtgatgtttttaatcgacaggcaccttcttactgagatacgtaatgagaagttt

SEQ ID NO: 6842 - DNA, 201 bp, Homo sapiens
atacggttctcttgaggtgaatttctactctatcaagagtgaagtagagtatggcttaaaagttaagtgattaaaaagctaccctttcttagctaatttgkaatgtaattggtcttaatttttctaaattcgttctaaccaaaatcttattggcgtgatttctattgacatgaactagaagtgacttcagcagacaacttg

SEQ ID NO: 6843 - DNA, 201 bp, Homo sapiens
acaactgcacagcagcggaaatgtcctgaatggatgaatgtgcagaataaaagatgtgctgtagaagaaagaaaggtatgttgttcattgactattctttygggtgagaaatttaatttatatttgactgtgcaaagagtcagttgttacttgtaaacttcaagtcattgtttaggtcagagttgctgttgtctaaatgca

SEQ ID NO: 6844 - DNA, 201 bp, Homo sapiens
ggtgcgttggctcacgcctgtaatcccagcactttgggaggccgaggctgggggatcacgaggtcaagagattgaaaccatcctggccaacatggtgaaaycccgtctctactaaaaatacaaaaatcagctgggcgtggtggcacgcgcctgtagtcccagctacttgggaggctgaggcaggagaatcgcttgaacctg

SEQ ID NO: 6845 - DNA, 201 bp, Homo sapiens
ccactttgggactcattatactgaattagtttcacagaggaggtaaaatctgttgtttatgattacatattaactctaccattttaccttcagcattgctrtagtatgtcatatctgaaggcaattagcacaagtgacttgaagaattgtagttttgatgacttatatgtattttataaaaggcaggcagagtttttgtgt

SEQ ID NO: 6846 - DNA, 201 bp, Homo sapiens
agccgagattgggccactgcactccagcctggcgacagagcgacactcttgtctcaaaaaaaaaacaaaaaaaaaaacaaaaaaaaaaactagtaagaggkcccagtggctcacacctgtcattctagctctttgggagactgaggagagaggatcagttgaggccaggattcaagaccagtctgggcaacataacgagac

SEQ ID NO: 6847 - DNA, 201 bp, Homo sapiens
tctccgaggatctgtaagtatatatctgtgaattcccttcatagatcttcttttacttctattacacttttcttcagaggtttgcagtattatgattgtarctttgacttcagatgggtgactaggaactcatagagtcttactaagttccagttaaacactacattcattactttggataaaacccgtgtgtatggcatc

SEQ ID NO: 6848 - DNA, 201 bp, Homo sapiens
ttaatttttttgtaggtatggggtctccccatgttgccctgcctgtctcaaactccagggctctcaggtgatacccaccacccttggcctcccaaagcacygagagtcactgtgccaggctgagtttaaaatttcttgagttggagtttatggctattttttccactagttattaaacatgtatttttgtataaggcactg

SEQ ID NO: 6849 - DNA, 201 bp, Homo sapiens
gtagcagagaattagataagggacgtatgaatacatataaatgctgttgaagttctgaagagagagagtgtttagagaaattagaggagtctttgtgaagktatcactagaacttcctatttttgtggaatatatagtagattttggtgtgatactgtggatttggacattcactcagagaaggaatgagggaagaatggt

SEQ ID NO: 6850 - DNA, 201 bp, Homo sapiens
tatttcctacagacttcatctgcagagagaaagagacgattacctgtgtggtttgccaaaggaagtgataccagcaagaaattaatggacaaaacgaaaasgggaggtctttttagttaagctggcaattaccagaacaattatgtttcttgctgtattataagaggatagctatattttatttctgaagagtaaggagta

SEQ ID NO: 6851 - DNA, 201 bp, Homo sapiens
ttagagtagtcacatgttataatacttatagttgatcaaaaaattgattcctaagtgttcttattaaagacacacaccacacacacacacacacacacacmttctctctctctctctctctcacacacacacacatgcacacacacttatgtactttcttgctttttttgacctaagatcttagataactattacagatta

SEQ ID NO: 6852 - DNA, 201 bp, Homo sapiens
gatacaaataactgactttgaccccatgtttagtaggttttttttttgtttgtttgtttgttttttttttttgtctttcttctccacactctcttaggackgttgtagcttgtaatgttagtgaattgtaattgtttatttgcatgtctgtctcctcttttagaattgtgaactcctcaggtcatggattgtattttatta

SEQ ID NO: 6853 - DNA, 201 bp, Homo sapiens
cttttttttttttttattttgagacagggtctcactctgtcacccaggctggggtgtagtggtgccatcttggctcactgcaaccttcacctccagggctsaagtgattctcctgcatgagcctcctgagtagctgggattacaggcgtgtgccaccatacccggcttatttttgtattttttgtagagatggggtttcac

SEQ ID NO: 6854 - DNA, 201 bp, Homo sapiens
tttatctcccaatgataatgaaaacgatacgtcctatgtaattgagagtgatgaagatttagaaatggagatgcttaaggtatgtttacaattataaaaayattacttcaagttctttccaaaggacatttaattaagtaaaatattaactaattctaaaccaggttccaccacaatgaaattgctactaattatgtaaca

SEQ ID NO: 6855 - DNA, 201 bp, Homo sapiens; identical to SEQ ID NO: 812

SEQ ID NO: 6856 - DNA, 201 bp, Homo sapiens
tttggttctttgtttctttgttcattcttctctctctcccttttttatctatcatataaatatgtaaatatatattatatatccattagggaagaggaagytgtctaaagatatctagtatataggagctttgttctgcagaaaagaggatatgaagtcaattatattggaaattaatgcttaatacttttttttaaagca

SEQ ID NO: 6857 - DNA, 201 bp, Homo sapiens
aaatcagtggatgtcaaggaacaactattgttctttgtacggcatttttcaacattgtgaagagttcttatactcaaaaagtttgggagacacagtgtgayattgtttaacctgagttgaacttgtcattttgtattcttgtttagagcagggattttattttgtctctttatctaactttgtattcctaactatttcttt

SEQ ID NO: 6858 - DNA, 201 bp, Homo sapiens
atttgacatggagtggccaccattatacaatagagggaaacttggcaaagttgcactaattcagttgtgtgtttctgagagcaaatgttacttgttccacrtttcttccatgtcaggttggtatctctacatttcatttttatatggctgataattgtaatatgtcaactttatccctataaaattaagttcttttattag

SEQ ID NO: 6859 - DNA, 201 bp, Homo sapiens
ttttaaatcagtggatgtcaaggaacaactattgttctttgtacggcatttttcaacattgtgaagagttcttatactcaaaaagtttgggagacacagtktgacattgtttaacctgagttgaacttgtcattttgtattcttgtttagagcagggattttattttgtctctttatctaactttgtattcctaactattt

SEQ ID NO: 6860 - DNA, 201 bp, Homo sapiens
agatctttaaattgaacatgttttatttgggaagcaagaattaaatttgaggcatatacacagactgggtgtccttggtatctctgaagaacaaagagaaktttggaggttatagaaaaaggaaaatgtgacattgtttttccagaaagttctttggcactagtaaattttggggagttggaagctctgatgggttagtga

SEQ ID NO: 6861 - DNA, 201 bp, Homo sapiens
acataccatgcgggcatgagttttagcacaaggaaagacattcatcataggtttgtaagagatgaaattcaggtatgaggatcaatcatcattgctctccrttgctcatagtggaagtggatatttctcaaatgtttatttaccagatctttattgaatactttctttgtgttgaacataaagcagtccctctgataaatg

SEQ ID NO: 6862 - DNA, 201 bp, Homo sapiens
agacagatctttaaattgaacatgttttatttgggaagcaagaattaaatttgaggcatatacacagactgggtgtccttggtatctctgaagaacaaagrgaagtttggaggttatagaaaaaggaaaatgtgacattgtttttccagaaagttctttggcactagtaaattttggggagttggaagctctgatgggtta

SEQ ID NO: 6863 - DNA, 201 bp, Homo sapiens
agaactttctgagatgctagaaatgtttttttatcttgatggggtgtgggttttgtagataatgaaaaataaacagtaaaaaataagtaaaaaaaaaagtragaaagttgccaatacagttttacatattcctgtgatgtttttaatcgacaggcaccttcttactgagatacgtaatgagaagtttcgattatacaaatt

SEQ ID NO: 6864 - DNA, 201 bp, Homo sapiens
tttcagatttttgtactagcaattaaaatatctactggatgtaaatcacatgtgcttaatgctttgcttcataatatctgttgaagtcaattaaaatataragacagatctttaaattgaacatgttttatttgggaagcaagaattaaatttgaggcatatacacagactgggtgtccttggtatctctgaagaacaaag

SEQ ID NO: 6865 - DNA, 201 bp, Homo sapiens
aatagagaggggcgaggattgaattcttcggtaaagctgggtgattttgttttattcaatacagtataataagtataaaaagtagaacctatagagagctrtaatgggggtagttttaaagaaattctgaaaatgaaaaacttaagtaaaggtttagttcattgtttatttcacactgagcatttactacctgaatgtttt

SEQ ID NO: 6866 - DNA, 201 bp, Homo sapiens
taaaatgtgaattcactcttttgtgaggtttatctccaaaaaaggcaatattcacatatttgcaaagcatttagtactataacttcttgaatgtctgagcrgtcctgacattagggtgggatccatcagggcccaagatgagtgtttcatctttgttacttgtggcaaagcagcccttacttcttttactttgtagcattg

SEQ ID NO: 6867 - DNA, 201 bp, Homo sapiens
cttttattagctggccgttctctcattatctcaaatttatttaagtatttatgttctacctgattcactcacattccttgttttatttaattttcacaacrtacctgtgaggcattgacattttttctgttttagagaagagaaaactgaaattttaagaggctaaatgaccaggatatgtactgctattgctagcaggag

SEQ ID NO: 6868 - DNA, 201 bp, Homo sapiens
tggatgaatgtgcagaataaaagatgtgctgtagaagaaagaaaggtatgttgttcattgactattctttcgggtgagaaatttaatttatatttgactgygcaaagagtcagttgttacttgtaaacttcaagtcattgtttaggtcagagttgctgttgtctaaatgcaccaggacctagttgttgaaagggtaaactg

SEQ ID NO: 6869 - DNA, 201 bp, Homo sapiens
taggttgaattccatgtttgggtgctttgtgaatcattctcttcgatttttctgaagatgggacttactgttttatttcggtgatctttagcatacttttwaaatttttctgtttttttataggctggttttattatttaccgaaatttagagattttggatgatactgtgcaaaggtttgctataaataaaggtatgtta

SEQ ID NO: 6870 - DNA, 201 bp, Homo sapiens
atacttacgaagctcatcattgtatgctgggttctttgctaatactttcttataaaaattaaatacctccacaatcatgcatgctagcagaaacagcagasgagtagccttagcctcacttcctgcttatacctgtcatgcaaatatacagaacccagaaccctagctgaaagggagtttgagaactagtatttgtattgt

SEQ ID NO: 6871 - DNA, 201 bp, Homo sapiens
tactttcttataaaaattaaatacctccacaatcatgcatgctagcagaaacagcagacgagtagccttagcctcacttcctgcttatacctgtcatgcaratatacagaacccagaaccctagctgaaagggagtttgagaactagtatttgtattgtcccagattctgcagtggaagaattcatagtggatggaagtta

SEQ ID NO: 6872 - DNA, 201 bp, Homo sapiens
ggaaggctttttcccgtcagctgatcactgagggattcttggtagaagtttctcggtataacaaatttatgaagatttgcgcccttacgaaaaaggtaaayggtgtaggagtctgcctgtttgacttaattttgtttcccactccacattaaaagatcctttttgcttttaatagggtagaaattggcttcataaagctaa

SEQ ID NO: 6873 - DNA, 201 bp, Homo sapiens
gaaggctttttcccgtcagctgatcactgagggattcttggtagaagtttctcggtataacaaatttatgaagatttgcgcccttacgaaaaaggtaaacrgtgtaggagtctgcctgtttgacttaattttgtttcccactccacattaaaagatcctttttgcttttaatagggtagaaattggcttcataaagctaat

SEQ ID NO: 6874 - DNA, 201 bp, Homo sapiens
ctttttgcttttaatagggtagaaattggcttcataaagctaatacagaatctcagagcctcatccttcaagctaatgaagaattgtgtccaaagaagttkcttctgcctaggttcatttttcagtttttttcttgtaacttctgcattttttgttgctatttatgtgattcaaattataccagtttataggcctctcaca

SEQ ID NO: 6875 - DNA, 201 bp, Homo sapiens
tcatttttcagtttttttcttgtaacttctgcattttttgttgctatttatgtgattcaaattataccagtttataggcctctcacaagtaaaatgaattrcctgtttgtttttgtatgcctattttagtcagtttgggggaagggatctgtgaggaaaggataagtcatagagcacttttcttttttaagagacagagtc

SEQ ID NO: 6876 - DNA, 201 bp, Homo sapiens
tacagaacatgccaccatgctcagctaatttttgtattttttgtagagacagggttttgccatattgcctaggctggtcttgaactcctaagctcaagcartcttcccgcctcagtctccaaagttctggcactacaggtgtgagccactgtgcctggcctctttttctcatttaaatacttttcataccttttgtaaaac

SEQ ID NO: 6877 - DNA, 201 bp, Homo sapiens
gcaagctccgcctcccgggttcacaccattatcctgcctcagcctcccgagtagctgggactaccggcgcccgccaccccacctggctaatttttttttttatttttagtagagacggggtttcaccgtgttagccaggatcgtctcgatctccggacctcgtgatctgcccgcctcagcctcccaaagtgctgggattac

SEQ ID NO: 6878 - DNA, 201 bp, Homo sapiens
agaatttgtgttggtaatttttaatgcaacttggacaatttctgaaagatgtaactttcttttttttgagacgagtctcgctttgttgcccaggctggagkgcagtgacatgatctcaggtcactgcaagctccgcctcccgggttcacaccattatcctgcctcagcctcccgagtagctgggactaccggcgcccgcca

SEQ ID NO: 6879 - DNA, 201 bp, Homo sapiens
tttcaccatgttagccaggttggtctcgatctcctgacctcgtgatccacccgcctcggcctcccaaagtgctgggattacaggtgtgagccaccgcgccyggcccaagagtaaccttttcaaaagcagctttgctctactgatttgggtaaaagcttagttgcagttggtttgggaggaaatgggagcagaaaatttgag

SEQ ID NO: 6880 - DNA, 201 bp, Homo sapiens
tttaatctgggaggtggaggttgtagtgagctgagattgcaccattgcactccagcctgcacaagagcgagactctgtctcagaaaaaaaaaaaaaaaaaagttagctagctgaagagtataggaaagaatgggtacaggaaattacaggtgccaagttacagaggtgagagaaattatggtatctataggtaattgaaag

SEQ ID NO: 6881 - DNA, 201 bp, Homo sapiens
ctttaatctgggaggtggaggttgtagtgagctgagattgcaccattgcactccagcctgcacaagagcgagactctgtctcagaaaaaaaaaaaaaaaaaagttagctagctgaagagtataggaaagaatgggtacaggaaattacaggtgccaagttacagaggtgagagaaattatggtatctataggtaattgaaa

SEQ ID NO: 6882 - DNA, 201 bp, Homo sapiens
ctgtgcaaaggtttgctataaataaaggtatgttaagatccataaataaaatgtgaattcactcttttgtgaggtttatctccaaaaaaggcaatattcayatatttgcaaagcatttagtactataacttcttgaatgtctgagcagtcctgacattagggtgggatccatcagggcccaagatgagtgtttcatctttg

SEQ ID NO: 6883 - DNA, 201 bp, Homo sapiens
ttctttttttctttttgagacagagtcttgctctgtcgcccaggctggagtgcagtggtgcaatcttggctcactgaaacctctgcctcctgggttcaagygattctcctgcctcagcctcccgagtagctggcactacaggcgtgccaccacacccagctaattttttgtattttttttagtagagacgaggtttcaccg

SEQ ID NO: 6884 - DNA, 201 bp, Homo sapiens
cctaatcagaatgttagttcctgaaaacattgacacgtaccttatccacatggcaattgagatccttaaacatggtcctgacagcggacttcaaccttcaygtgatgtcaacaaaaggagatgttttcccggttctgaagagatctgttcaagttctaagagaagcaaggaagaagtaggcatcaatactgaggtattaat

SEQ ID NO: 6885 - DNA, 201 bp, Homo sapiens
ctttgaggaattgctacacagttttccacaatggaaagcctttagttctaatccatgtcttggcatagagtttcttttctttttttttttttttttgaggkggagtttcgctcttgttgcccaggctggagtggaatggtgtgatctcagctcactgcaacctccacctcctgggtttaagtggttctcctgcctcaggct

SEQ ID NO: 6886 - DNA, 201 bp, Homo sapiens
ataattctcatggttctagtctcgagctgtaggattttgatcactgtttcaaacaataatgtgagtttgctaagaggtctaaataacaaaagctaagtgttccaaacacatatccaaacctatacactgggcaatgcatctgaattatatgtgaaatttcctgccattatttaagacacaaaaggaacattattttgataa

SEQ ID NO: 6887 - DNA, 201 bp, Homo sapiens
ttcattgtcagttgtatgtgctccagataacttgaacagtctgtggttgccttttaatttttgaattatgtctttagttatgcagaagtttaaaattttarcataaattaatttacactatttttctcactttagcatgagtctatcagatggggatgtggtgggatttgacatggagtggccaccattatacaatagagg

SEQ ID NO: 6888 - DNA, 201 bp, Homo sapiens
cgaatgagtgagcccctaaacaggaccaggagtggcagaagaaagaggcagcaactgagatgtgttttttctaagctgaaaggctttttttttttttttttgcaacacacctttaacactaaagtccaatatttatataattggtcaagtaagtggagctgttctagctataaatatggcaactctgcttgctcgtcctat

SEQ ID NO: 6889 - DNA, 201 bp, Homo sapiens
accttcaagagttcagtggaaagtgattcattcagtattagaagaaagaagagataatgttgctgtcatggcaactggtaagttgtacttaagcaaaaccwaatcctttaaaaaaataaaacataaagagtttgaaatgcttaatctttcattaaactctcaaaatacaaatgcaactacaaatgatgtaaactatagaag

SEQ ID NO: 6890 - DNA, 201 bp, Homo sapiens
ccgaatgagtgagcccctaaacaggaccaggagtggcagaagaaagaggcagcaactgagatgtgttttttctaagctgaaaggctttttttttttttttttgcaacacacctttaacactaaagtccaatatttatataattggtcaagtaagtggagctgttctagctataaatatggcaactctgcttgctcgtccta

SEQ ID NO: 6891 - DNA, 201 bp, Homo sapiens
gcaaaacctaatcctttaaaaaaataaaacataaagagtttgaaatgcttaatctttcattaaactctcaaaatacaaatgcaactacaaatgatgtaaamtatagaagagagtgaacaaagaacagatgctcagatttatgtatcaattagcttttaggaagatagcatactagtattgaccattcatctgtataagtac

SEQ ID NO: 6892 - DNA, 201 bp, Homo sapiens
ggaaacttggcaaagttgcactaattcagttgtgtgtttctgagagcaaatgttacttgttccacgtttcttccatgtcaggttggtatctctacatttcwtttttatatggctgataattgtaatatgtcaactttatccctataaaattaagttcttttattagctggccgttctctcattatctcaaatttatttaag

SEQ ID NO: 6893 - DNA, 201 bp, Homo sapiens
cccgaatgagtgagcccctaaacaggaccaggagtggcagaagaaagaggcagcaactgagatgtgttttttctaagctgaaaggctttttttttttttttttgcaacacacctttaacactaaagtccaatatttatataattggtcaagtaagtggagctgttctagctataaatatggcaactctgcttgctcgtcct

SEQ ID NO: 6894 - DNA, 201 bp, Homo sapiens
ctgtttatgtaggcaagattggccttgttatctctccccttatttctctgatggaagaccaagtgctacagcttaagtaagtcatgttatcattgccacamtatcaccctctttttttcttctgtgggtgaaacatctgatccatcatgcatgttaaaatctagttcacaataacacatttctgcaggtattgctttatct

SEQ ID NO: 6895 - DNA, 201 bp, Homo sapiens
ccccgaatgagtgagcccctaaacaggaccaggagtggcagaagaaagaggcagcaactgagatgtgttttttctaagctgaaaggctttttttttttttttttgcaacacacctttaacactaaagtccaatatttatataattggtcaagtaagtggagctgttctagctataaatatggcaactctgcttgctcgtcc

SEQ ID NO: 6896 - DNA, 201 bp, Homo sapiens
agggatatgttctgagaaatgtgttcttaggacattttgtggttgtctgaacatggacttacacaaacctacatgataaagcttactgcacacctaggctrtatgatagagcctattgctcctaggctgtaaacctgtacagatgttactgtaatgaatattgcaggcaattgtaatacaatggtaagtatttgtgtatct

SEQ ID NO: 6897 - DNA, 201 bp, Homo sapiens
gtaggcttaatttaataagacaaagtaaatggcatttggaaacctcatggatttaatgttttatttaaatgatttctgatttttaaaaagtaaatattgtwtccagaaggctgagaaacaagttagtagggagattttttctttgcaaaaaaattttacagttgtgtctttaacattgtaccacaaactgttgtcctacca

SEQ ID NO: 6898 - DNA, 201 bp, Homo sapiens
ggtatgactatggaattgagtggctaaggtctgttgaagaaaagattgtcggaaatgcaggggtcaaggaactggcctgtggatgttgaagtcactggcastgatcaaggaatagtagtggagtgaaagtagttaatgaatcaggcactaagatctccaagggatgaaaggatgcagtttggagatgacaagataactgta

SEQ ID NO: 6899 - DNA, 201 bp, Homo sapiens
taaacagtattattaagtagcagcatacatggtgttatactgacttctgattttgcaatagtacagacaggttcagattctcatttccaccttctccttcygcctaggtgaataactgctgggttatagtacagatgactgcagatcatttggaatttactttaaatgtaaacagtaaaaatttgaaagagagggaaagtg

SEQ ID NO: 6900 - DNA, 201 bp, Homo sapiens
ctgggattacaggcgttagccaccgcgcccagcctgaaagatgaactttaaaatggggaaggatactagtaaagccatttcttactcatgtatacattttyccctccatgaaattagagcagccaccttttacatgacttttacatgcatttcagatttttgtactagcaattaaaatatctactggatgtaaatcacatg

SEQ ID NO: 6901 - DNA, 201 bp, Homo sapiens
cccgacctctacaaaaacaatttcttaaaattagccaggcatggtggtgctagcctgtaatcccagctatttaggatgcttaggcaggaggattgcttgarcccggggatttgaggctgcagtgagccatcattgtgccacaatactccagcctgagtgatagaaaaaaaaaaaaaaagtgtctttgttatattccaaact

SEQ ID NO: 6902 - DNA, 201 bp, Homo sapiens
aattatcttttgtgttgatgtgagagtttagctctgagattcttccacatgtaaaatgtaatcccccaaagtatttggcaagcacattttattgccttggstcagataattgaaacattaggcatcatatatatagcatgtaaaaagtaaaacagaaacatttatgtttctcaccaagcagtaaattagtactcaactaat

SEQ ID NO: 6903 - DNA, 201 bp, Homo sapiens
actagtgcctgtgttacacacctcttgttcaggttttatcatttaaaataaataagaataaacagtccatagcttatcttacttactgaataaatgctctratttgacagtcatgtttcttaaagttccttacaaaggccattgcccaagaaaccaaataattccattatactatttttgaaatagaacacataataaatg

SEQ ID NO: 6904 - DNA, 201 bp, Homo sapiens
attatcagcatgctggatctcattgacctttttagaacattctacccaacaacagtagagtacacattcaagtgcagatgcagtattcatgaacatggatyatattcagagtcataaaacaaaccttaacaaatttaagaatcttgtatttgtatattttttgactagaatggaattaaactagaaaacaataacagaaag

SEQ ID NO: 6905 - DNA, 201 bp, Homo sapiens
ttatttggttgtattttattgtgtgatatggtggtataattatccttacctcccaggagtttgagagggtcttgccagttaaccgcagaattaaacatgcytaggactaattaatcaggagcaatactacaattaattggaggtaatttgaaacctggtttcaaataaccctgatattatgcacacatggtgcacactttt

SEQ ID NO: 6906 - DNA, 201 bp, Homo sapiens
tggtagagacagtctcagtatgttgcccaggctggttttcaaactccttgcctcaatcagtcctcctacttcagcctcctaaagtgctgggattataggcmtgagccatcacgcttgactaatgtttttgtaaataaagttttctcagaacacagccatgccttttgtttatgtgttatgtagggctgcctgagttaagta

SEQ ID NO: 6907 - DNA, 201 bp, Homo sapiens
aaagttataatttaaaaaaattataataaaatcagaaaataaaggtctgagatggaaaattaaaagaccaaagccacccataagcacaataaatccctccycccaaaaaattatatctattaaaaaaaggtgttgcgccaggcactgtggctcatgcctataatcctagcactttgggaggccaagacgggcagatgactt

SEQ ID NO: 6908 - DNA, 201 bp, Homo sapiens
ctctactaaaaataccaaaattagctgggcttggtggcacacacctgtaatcccagctacttgggaggctgaggcaggagaattgcttgaacccccatggraggtggaggttgtggtgagccaagattgtgtcattgtactacagtctggacaacagagtgagactctgtctcaaaaaaaaaaaaatagaatttgtgcagt

SEQ ID NO: 6909 - DNA, 201 bp, Homo sapiens
accacgtttgagagattcttattcactgtattttctttaattatacttgaattttggtttacattgaggagtgccctcaaagatattaacagatttttaaraaatcctctaaaaaactcattcttagggaaatttgttcacttactaggtgaggagcaaaataaaaatccttaatatagaagagctattatctgtcttcaa

SEQ ID NO: 6910 - DNA, 201 bp, Homo sapiens
acagtctctgttgcagtaactcagttctgttattgtagtgtgaaagcagccacagacaaatgtaaacaaatgtgcctgtctttcaataaaactttatctasaaatacagatagtgggccacatttggcttgcgagctgtagtttgctgttcctgacttagtatgatatgcagcattgtgtagtggaaagattttatagtat

SEQ ID NO: 6911 - DNA, 201 bp, Homo sapiens
cttttcctaaatctaaaatagtatagtcttttttatattgtcagcataaatgaatgcacttatgtaaatgaatatttttaggcgttaagtaaaatattctrtggaaattgaacatttaagttgtttatacttctatggaaatcgtttacgcttttaataaagaagcacaagtttctacaaaatacattctaacagatgttt

SEQ ID NO: 6912 - DNA, 201 bp, Homo sapiens
ctctgttttaattctgtttttttttttttttaatgttacttgttttagtttggattcctagttgaaaagggaatatgattcctttaaaacaaagatactcygctttaaagcaaaggtatatcatcctcttcatggtgattgccatggaaacaagacaatgtaaatttattcaaatagtacacagtttttatagttattgat

SEQ ID NO: 6913 - DNA, 201 bp, Homo sapiens
aaaatgtcaggaattcataatgattcatatacccaaggattttcattgatagtgaggtaaggttattcttgagaaagactcaaagtcataaaataatagamtttcgaaactaccagaattatacaagtcaattaaaatgactgatttgttttaagaggaagaaatactaaatgtataattattagatgcagcatattgtat

SEQ ID NO: 6914 - DNA, 201 bp, Homo sapiens
gccccgaatgagtgagcccctaaacaggaccaggagtggcagaagaaagaggcagcaactgagatgtgttttttctaagctgaaaggctttttttttttttttttgcaacacacctttaacactaaagtccaatatttatataattggtcaagtaagtggagctgttctagctataaatatggcaactctgcttgctcgtc

SEQ ID NO: 6915 - DNA, 201 bp, Homo sapiens
ttgataggctttcttcctttagtcttttctttagaaggtagaaaggaagaattaaataagataaaaccaaacgggtctgaagcatgtataaagtatatatrtttgctcttttgttcttctttttctttagttcccactgggaatttgaaggtccaacaatcatctactgtccttctagaaaaatgacacaacaagttacag

SEQ ID NO: 6916 - DNA, 201 bp, Homo sapiens
tgctggcctagaccatggtgttgccatagtggggtgaccagtctgaatagccaacaatgcttcctcagtaaatacccattttgtcttggtgggatttctayaaattgcaaaatgcagctattatgaagctgtaaaagagaaacagaaacatgtaacacctgggactgttttattaggcccaccgtatgctcagaacatgaa

SEQ ID NO: 6917 - DNA, 201 bp, Homo sapiens
tgtcactgtattctttcaaagaagccaatgaaataaactgttttctccctctatgtggtgtttttctacttgaacataaatgcacattttattttatttcmagactttttgtggccagcacccaatgaagagcaagttacttgcctcaagatgtactttggccattccagttttaaaccgtgagtataatctcatttaatc

SEQ ID NO: 6918 - DNA, 201 bp, Homo sapiens
ttctttttctgttaagcctccctgttaagtaatagcagcaagtttagtttggccatgaatatcttctagagattgtatcggggtactgataaacacatttrtagctcagggatactgcatcagccatattttaaaatgggactaacagtttaaaaactataaatattcacagtgttaagaaacaatctcaagatgcattaa

SEQ ID NO: 6919 - DNA, 201 bp, Homo sapiens
tgggaggcggagacatgggacttgcatgaacccaggaggcagaggttgcagtgagctgagattgcgacactgcattccaacctgggcgaccgagcaagackcggtctccaaaaaaaaaaaaaaaaaagaccatatgtaatgtttcttcattgttctaagataaatctttaaggctgttgaggttttttgtatacaaaatgg

SEQ ID NO: 6920 - DNA, 201 bp, Homo sapiens
agtaaagccatttcttactcatgtatacatttttccctccatgaaattagagcagccaccttttacatgacttttacatgcatttcagatttttgtactarcaattaaaatatctactggatgtaaatcacatgtgcttaatgctttgcttcataatatctgttgaagtcaattaaaatatagagacagatctttaaattg

SEQ ID NO: 6921 - DNA, 201 bp, Homo sapiens
catctctgacattatttttcaattatatagagaatgctttttgtaaaatactgatttatttaaagatattacaatcatagtagttttttgcaatctttttwaaatcagtggatgtcaaggaacaactattgttctttgtacggcatttttcaacattgtgaagagttcttatactcaaaaagtttgggagacacagtgtga

SEQ ID NO: 6922 - DNA, 201 bp, Homo sapiens
cagacacacgggatggggtgggggaggggtgttgagaacaatcgcagacgcccctcggcctgaccgccccgccgccgcccgcgacccccacgccgggcccrgctcccccggcgccgcagcgcggggctccagccactgccggccggttggcggccgccgctccggctctgcccgcgctccccgcatccctccgccgccccc

SEQ ID NO: 6923 - DNA, 201 bp, Homo sapiens
attttggtttacattgaggagtgccctcaaagatattaacagatttttaaaaaatcctctaaaaaactcattcttagggaaatttgttcacttactaggtraggagcaaaataaaaatccttaatatagaagagctattatctgtcttcaaaattaagtctttgagtagatttgtgaataaatctaatagttttgctgaat

SEQ ID NO: 6924 - DNA, 201 bp, Homo sapiens
aacattggcaatagactgaataaataacatctctgacattatttttcaattatatagagaatgctttttgtaaaatactgatttatttaaagatattacartcatagtagttttttgcaatcttttttaaatcagtggatgtcaaggaacaactattgttctttgtacggcatttttcaacattgtgaagagttcttatac

SEQ ID NO: 6925 - DNA, 201 bp, Homo sapiens
aaatgaaaggtttataatctttttgtcatattttacagtcgttagcgtttaacaatttatagcataggatttgggtttttttttttttcattttaaagaaraagtttatttaagcaagacacttgactaagggaagactatcttggagttattattactagagtaatttatttctacttaaagacagattgccccacaagt

SEQ ID NO: 6926 - DNA, 201 bp, Homo sapiens
aataattctcatttgaatttatgatagtttcagatctacccaaagggtgacttaggaatttaacttctaaatctatttaaatgaaaggtttataatctttktgtcatattttacagtcgttagcgtttaacaatttatagcataggatttgggtttttttttttttcattttaaagaagaagtttatttaagcaagacact

SEQ ID NO: 6927 - DNA, 201 bp, Homo sapiens
acctgggaggcggaggttgccgtgagccgagattgggccactgcactccagcctggcgacagagcgacactcttgtctcaaaaaaaaaacaaaaaaaaaaacaaaaaaaaaaactagtaagagggcccagtggctcacacctgtcattctagctctttgggagactgaggagagaggatcagttgaggccaggattcaaga

SEQ ID NO: 6928 - DNA, 201 bp, Homo sapiens
tcgcttgaacctgggaggcggaggttgccgtgagccgagattgggccactgcactccagcctggcgacagagcgacactcttgtctcaaaaaaaaaacaamaaaaaaaacaaaaaaaaaaactagtaagagggcccagtggctcacacctgtcattctagctctttgggagactgaggagagaggatcagttgaggccagg

SEQ ID NO: 6929 - DNA, 201 bp, Homo sapiens
gaatcgcttgaacctgggaggcggaggttgccgtgagccgagattgggccactgcactccagcctggcgacagagcgacactcttgtctcaaaaaaaaaamaaaaaaaaaaacaaaaaaaaaaactagtaagagggcccagtggctcacacctgtcattctagctctttgggagactgaggagagaggatcagttgaggcc

SEQ ID NO: 6930 - DNA, 201 bp, Homo sapiens
tgatggggtgtgggttttgtagataatgaaaaataaacagtaaaaaataagtaaaaaaaaaagtaagaaagttgccaatacagttttacatattcctgtgmtgtttttaatcgacaggcaccttcttactgagatacgtaatgagaagtttcgattatacaaattaaagatgatggcaaagatggaaaaatatcttcattc

SEQ ID NO: 6931 - DNA, 201 bp, Homo sapiens
gctgaatttacttagatcttaagacagaataatcatgtagaaaatttaaaatgtcaggaattcataatgattcatatacccaaggattttcattgatagtraggtaaggttattcttgagaaagactcaaagtcataaaataatagaatttcgaaactaccagaattatacaagtcaattaaaatgactgatttgttttaa

SEQ ID NO: 6932 - DNA, 201 bp, Homo sapiens
tattttcttcatgtacatatggatgatattttcgaatgaccacttttctcttttgctttttattattagactgtttttttcttcttgttaaaggataaaargattagaacataaaaggatatttacacattgtttccccattgacttattcccaagatggtagctaataaacaccaaatgatatagtagttaaagatacat

SEQ ID NO: 6933 - DNA, 201 bp, Homo sapiens
ttttgtagagatagtattcgccatgttgcctaggctggactcaagccagcctcctgccttagcctcccaaagtgctgggattgctggcacgtaccgctacrtccagccagggctgagtttctgaatcatcattgcagcaagagaaattggattacctttagaccactggctctactgtgggctgggagtgggacaccttcc

SEQ ID NO: 6934 - DNA, 201 bp, Homo sapiens
tccaggaattacacaatcacaaaattgctgatttttcttcttattcatgttacataaacttatcctgtccgaaaagactgtatttgaacttactatgtaaratttgctttaggtaaatttatggctgcttccagaattgtgtattaattttccagtttcttttttaccagtctccacttttacctttccctcttcccccta

SEQ ID NO: 6935 - DNA, 201 bp, Homo sapiens
taactatacctatcagaagcctatgttttaagtccaatgtataggcactgctctgtttgtctctggtgggaacttaccctgctttacctaatttcatcctrgcttcctttttgtgaaagatcacccttgcttagcctattttttggcaaatctacaccttggaaatagtagtaaatgacataagcatattaatatttatga

SEQ ID NO: 6936 - DNA, 201 bp, Homo sapiens
gtccattaacactcaactcaaataccatcaatttgatttatatctaacaccacaaagttaggtgttgagttacatgtggttatattgtaactaatagtcarcccttcatggacttctattctttgatgagactcttcttgtaggagtagtaggtgccttaaagcaccttttcatagttgtcagattgaaatccttcaccag

SEQ ID NO: 6937 - DNA, 201 bp, Homo sapiens
aaaaattgcgtatatgttgatgggtcttttctggcagaccagtagagaggaaaaagttgatgatgtaggagatgggaaaatgtctttgagtagatgtcttygagaaaatgtctttgagtagatgagaggtttgcacacatggagaggttggatgtaggagtactgatagttcatccatagttacataagaaaaggtagatg

SEQ ID NO: 6938 - DNA, 201 bp, Homo sapiens
caagtacaaaaagcctccttgggaattatgggaactgaaaaatgctgtgataattgcaggtccaggtaaagatttcttattatagatggacattctaaaastctttctttctcttccttttcatgtttaactgaatttttgttgaatgataagtatttcagttttttaaacaaaacaatgaatgtgtttagatatgagaaa

SEQ ID NO: 6939 - DNA, 201 bp, Homo sapiens
attatgcagaggtatttaatcagtcagaaggttgaatagtcaaattattagtgagtgaagtctattttgatgaggattttactaatgctgtcccttagatrttataagtaaatcgttgttttcttttgaaatatctgaaacctagttaacatggactttcatttgttcttgtaaagatatgcaaagctatttgggagattg

SEQ ID NO: 6940 - DNA, 201 bp, Homo sapiens
ttactttttctattggagttttaagtaaattcttgtatattagtgtgatacattttaagttatttttgtatatggtgtgaggtaggggtccaacttcactsttttccatatggagatccagttgtcccagcaccacatgtttaagagtctattctttccccactgaatggacttggcacccttgtcaaaaatcaattggtg

SEQ ID NO: 6941 - DNA, 201 bp, Homo sapiens
atgatgttgagcatcttttaatgtgcttattggccattatatgtcttctttgggaactgtctattaagtcctttgcccattttttaattgagtttttttttctgttgaattgtgggagatctttatatattctgaatattaaacccttattgggtgtatgatttgcaaataatttctcccattttgtgggttttcttcact

SEQ ID NO: 6942 - DNA, 201 bp, Homo sapiens
agaatgagcacgatgggtataacatttttgtaggtttttaaagttgaaatttagtgtaaatccaaagaatcaatagacaagtctgtgttttacttaacctrtatgtttaaattagcatttttagatactgattttattcctaatttcagaattctcagcgtcttgccgatcaatatcgcaggcacagtttatttggcactg

SEQ ID NO: 6943 - DNA, 201 bp, Homo sapiens
tgaacaagccaggcatactctgtttcctgaggggcctacagttttattggggatatagatgagtgaagaaagcaattgcagtgtagggagatgagtcttaygtcatgggaaaacaaggtgctgtagttgacacaccgagaggcatctgacacattgggggaaatattctagaatatttcctggagaaagtgcaggtaaaag

SEQ ID NO: 6944 - DNA, 201 bp, Homo sapiens
tttacaatacactcagcccttgtggcttaagatcaggggctcagaggctgtgacaactcatgatgctgaaaatgtatccaatgaaaacgaagtactagctygtttagtagtaacgaagtactattaatttttaatatagtctgatactttattttctaattgtagaagcaacattcttagctatatctttctagaatgttg

SEQ ID NO: 6945 - DNA, 201 bp, Homo sapiens
taaggtcaacggtatgactatggaattgagtggctaaggtctgttgaagaaaagattgtcggaaatgcaggggtcaaggaactggcctgtggatgttgaastcactggcagtgatcaaggaatagtagtggagtgaaagtagttaatgaatcaggcactaagatctccaagggatgaaaggatgcagtttggagatgacaa

SEQ ID NO: 6946 - DNA, 201 bp, Homo sapiens
tgcactgagtagtaagaatatataatggtgtgtggtatttcccaagttaaaaaggtcagataaggcttccttgtggaagtgatagttcaaatctgaaagartaggaattaattaggtaaaaatgtttgatgcaaattttaagattttccttctgagtagtcagtagcttttccttcttaacatagaagatgacaaaaccat

SEQ ID NO: 6947 - DNA, 201 bp, Homo sapiens
caattaacagaggaggccttgttcagagtgagaaatcattaagcatttgttgttgaaatttcttactgtactctgttttaattctgtttttttttttttttaatgttacttgttttagtttggattcctagttgaaaagggaatatgattcctttaaaacaaagatactctgctttaaagcaaaggtatatcatcctcttc

SEQ ID NO: 6948 - DNA, 201 bp, Homo sapiens
tgcccaaatccgtaagctatgttctgtatagcagctttttcatcataggcagtttttactcttatcagtggacaacctacaaaattaactaaacacttaarcaattaacagaggaggccttgttcagagtgagaaatcattaagcatttgttgttgaaatttcttactgtactctgttttaattctgtttttttttttttt

SEQ ID NO: 6949 - DNA, 201 bp, Homo sapiens
tacaatatgaaaaagtatatttttgtagcctacttttaaatccagaatagaggaggttaagaaggttgtgataaccatgagctctttttttttttttttgrgacaaggtcttactctgtttcccaggctggagtgccgtggcacaatcatagcttactgcagccttgaactcttgggctcaagcaagccttccacttcagc

SEQ ID NO: 6950 - DNA, 201 bp, Homo sapiens
tcagataccgttgtaaagactttgcttttaccggaaactgatacgttgggtcatgtaccctggccagtcagttctctttattctaacacttagccgatcarttagatttccacattccatgatatgtcagttttggtgacccttatttttccacctggtttataaagggaaagaatgtgatatgtcacccaggctctggag

SEQ ID NO: 6951 - DNA, 201 bp, Homo sapiens
acataaacatagtaacatagtcatttattatcattttcaagtattatatactgtacataattgtacatgctagacttttacacagctggcagcaaggtgartttgtttacaccattaccaccacaaacacatgggtgatgctttgcattgtgatgttacgatggcatgatgtcactaggtggtaggaacttttcagctcca

SEQ ID NO: 6952 - DNA, 201 bp, Homo sapiens
tataacgtacctgcatatgtacccttgaaactaaaataaaagttaaaaaatttatcttcttttgccaataataaattaaccttagcttactgtaatgattyttctttatgaattaaaatctttttactcttttgtaataacacttggcttaaaacacaaacatattgtacagctatacaaatatattttctttatatcctt

SEQ ID NO: 6953 - DNA, 201 bp, Homo sapiens
cttgaacccccatgggaggtggaggttgtggtgagccaagattgtgtcattgtactacagtctggacaacagagtgagactctgtctcaaaaaaaaaaaaatagaatttgtgcagttccccccacccccttttttttttctgttggcatttttgctatcatttagctgccttctttatatcctgaaacttacaggtggtgt

SEQ ID NO: 6954 - DNA, 201 bp, Homo sapiens
ataagctgtgatcatgccactgtgctccagcctgagtgacacccagagtgagaacctgtctcaaaaggagaaaaaaaaaaaagtaacagtagacgctgggractactgaggggagggaaggaacaatggttgaaaaggtgggaagggacagtggttgaaaaactacgtgttgggtactatgctcactatctgggtgatggg

SEQ ID NO: 6955 - DNA, 201 bp, Homo sapiens
aaggatttcctgtcactttgctgcagaacctcagctcgcggagagcaagcccctttgcttgccctgtagaaatattttaaattattatcctttttttttttaacagaagtaaataggagatacgttagaggattttctctcctagatgtgtaaatacaaacttggggtcttataactcaataaatctgataaatttctttt

SEQ ID NO: 6956 - DNA, 201 bp, Homo sapiens
tgtgttgtttttaagcttcactctagtttatatattttaaatgtcataaaataccacatacttataagagaaaaggttctattcattgctgaagtggaagyttatcattaatttttatttatttatttttttttccagttttggaattcttattactttgaacccaagaaccactgataactagcacaatccagtgaaaca

SEQ ID NO: 6957 - DNA, 201 bp, Homo sapiens
cttggctcgctgcaacctctatctcccaggttcaagtgattctcttgcctcagcttcctgagtagctgggactacaggcgtgtgccaccatgcccagctaytttttgtattttttgatagagacagggttttccatgttggctaggcaggtctcgaactcctgacctctgatgatccgcccacctcagcctcccaaagtgc

SEQ ID NO: 6958 - DNA, 201 bp, Homo sapiens
tagaattttctcccctcagaaaattaagaggaaataaaagtctgtagcaaatcacttggcaaaataatggctccttttgtaataggaatttttactctttygatttatctgttacataagttcaaatttttacatattttccaccttttttaaaaaagagtgatatgtagtcaatatcaatttgagcaacactgttgcata

SEQ ID NO: 6959 - DNA, 201 bp, Homo sapiens
ataattatccttacctcccaggagtttgagagggtcttgccagttaaccgcagaattaaacatgcttaggactaattaatcaggagcaatactacaattarttggaggtaatttgaaacctggtttcaaataaccctgatattatgcacacatggtgcacacttttctagtagacatttaatgaaagtaatttaaaaccta

SEQ ID NO: 6960 - DNA, 201 bp, Homo sapiens
tctttttctttagttcccactgggaatttgaaggtccaacaatcatctactgtccttctagaaaaatgacacaacaagttacaggtgaacttaggaaactkaatctatcctgtggaacataccatgcgggcatgagttttagcacaaggaaagacattcatcataggtttgtaagagatgaaattcaggtatgaggatcaa

SEQ ID NO: 6961 - DNA, 201 bp, Homo sapiens
gcaccatttcaaatgtaatgttaaaaaataataaatggagaagtagatagctaacaagtaggcttaatttaataagacaaagtaaatggcatttggaaacmtcatggatttaatgttttatttaaatgatttctgatttttaaaaagtaaatattgtatccagaaggctgagaaacaagttagtagggagattttttcttt

SEQ ID NO: 6962 - DNA, 201 bp, Homo sapiens
ggaaaaatacatttaagattataagtctggttataagcttaaaaagtgacccagaaagggatatcattgctaaaaaaaaaaatccccttgtgacctgggtrcattttgcaaagccacaggtttgcagtgttacacaagggccaaaggaggccatgagttgtctttggttgtggggccggagggtaactgttcatgaaaata

SEQ ID NO: 6963 - DNA, 201 bp, Homo sapiens
tcttcaaataatatttttctcagactggaaatttgtattctaaattatttttagaaaaaaaaaatccccaccccctccagaattaaaacacctgtaaaatwcaggattatattggaagtgttgacatggttttaagggtagcaattgcaaaagtgctactaaaatatattattacaggtatatttttatatcagttaattg

SEQ ID NO: 6964 - DNA, 201 bp, Homo sapiens
ggaatggggagcagctgtaaagaaaaatgaagcttcgcttgcttgcctgctgctcacctactgctttgtggcctggttcctaacaggccatggactggtamtaatctgtggccctggggttgggaacctctagccctgaccaatgttagggagcttttttcctgtgttttcttcaagtggtttcatggtttggggtcttac

SEQ ID NO: 6965 - DNA, 201 bp, Homo sapiens
ctggttataagcttaaaaagtgacccagaaagggatatcattgctaaaaaaaaaaatccccttgtgacctgggtacattttgcaaagccacaggtttgcartgttacacaagggccaaaggaggccatgagttgtctttggttgtggggccggagggtaactgttcatgaaaatagtgagtgtctgaagattaagaaaatc

SEQ ID NO: 6966 - DNA, 201 bp, Homo sapiens
gtgggttttcttcactttttgatattgttctttgattcacttttaaatttttatagagtccagtttatctgttttttcttttattacctatgcttttggcrtcatacctaattcccaaatccaatgccatgaagattttctgttatgttttcttttaatagttttatagttttactttttctattggagttttaagtaaat

SEQ ID NO: 6967 - DNA, 201 bp, Homo sapiens
ttgttctttgattcacttttaaatttttatagagtccagtttatctgttttttcttttattacctatgcttttggcatcatacctaattcccaaatccaakgccatgaagattttctgttatgttttcttttaatagttttatagttttactttttctattggagttttaagtaaattcttgtatattagtgtgatacatt

SEQ ID NO: 6968 - DNA, 201 bp, Homo sapiens
actaattcttccctaaaatttcccacaattgtgtaaacttacctcagtatattcatagatatgagacattctatcaattttaccctcttaaagatgcagarataatgcattatgtttcatcccaccatctttaatgagaagcttccatcttagattaatattagagaatgttaaaatactctgcaatcaggtaaggacgct

SEQ ID NO: 6969 - DNA, 201 bp, Homo sapiens
ctgagtgggggcatgattttagggattcattcaggaagttgggctccctaaagacagcactgccaatggtaagctttgccaagtctgatgtcccgaaattrcattcttaataaggagagcattcaggattggggagtggtaaagaagctgaagacttcactataaaagagcaaatggataatgtaaaaagagaactatttt

SEQ ID NO: 6970 - DNA, 201 bp, Homo sapiens
ataaggcattgtttttttttctccccatttcagtgatcttggtatcctgggatattgtttttaaaattatcgttataattcctttgagaatttagtgaaaygttccctttaaccaacttaggaaaaattaatatctttgtacatgattttgagctgtaaaataaacattttaaactgggaataattggagtttagttaaag

SEQ ID NO: 6971 - DNA, 201 bp, Homo sapiens
attctgcaaattgaaatgaattatttaaaaaaaaacaactttaatgtttattaagcaagttttgttattcatgagtttcattagccttttattttttttttaaattttgaagtaaaatttcttgctgtcacaatacacattaaaaattacaaatatgacacatattaaacacattaagatggccgaataggaaaaatatgc

SEQ ID NO: 6972 - DNA, 201 bp, Homo sapiens
atacttgggttattctgcaaattgaaatgaattatttaaaaaaaaacaactttaatgtttattaagcaagttttgttattcatgagtttcattagcctttwattttttttttaaattttgaagtaaaatttcttgctgtcacaatacacattaaaaattacaaatatgacacatattaaacacattaagatggccgaatag

SEQ ID NO: 6973 - DNA, 201 bp, Homo sapiens
tatgaaacctttatgaaccttctggatagagaagatgactgctgatttctgtgattagaaattatacttgggttattctgcaaattgaaatgaattatttwaaaaaaaacaactttaatgtttattaagcaagttttgttattcatgagtttcattagccttttattttttttttaaattttgaagtaaaatttcttgctg

SEQ ID NO: 6974 - DNA, 201 bp, Homo sapiens
gtaaaacatctcccagaacatgaaagaatacaaactttattcatgttacgttgtgacaggagactttgttggatgcgcctgattttcctgccaattcacarcttcattaaaacagtaatgctttgaaatatggcttaggaaacttcacaatgatcattaattacacctaatttctggaagagtatatgcatgtatgtgttg

SEQ ID NO: 6975 - DNA, 201 bp, Homo sapiens
tttaggcttatgaaacacttagctacttaaattatttaattttttttcatgtgcagatggtattgtacccaaacactacctttgtgtgtgtgtgtgtgtgygcctgtgtgtgtgtttttgagacagggtcttactctgctcaggctggagtgcagtggcgtgattatagctcactacagccttgacctcctgggctccagt

SEQ ID NO: 6976 - DNA, 201 bp, Homo sapiens
ttagagtaaaacatctcccagaacatgaaagaatacaaactttattcatgttacgttgtgacaggagactttgttggatgcgcctgattttcctgccaatwcacagcttcattaaaacagtaatgctttgaaatatggcttaggaaacttcacaatgatcattaattacacctaatttctggaagagtatatgcatgtatg

SEQ ID NO: 6977 - DNA, 201 bp, Homo sapiens
gattaatacataaatatttccttttaaaattcttaaggcttttattcatatatctcccctctccctatttccaataatgatttttggtgttaatatgatgrtatttatgcttctgtttttataggaaccaaatactttgatttggttatttattctcctttggagatgtagatgagtttattttttcctttcgagctttat

SEQ ID NO: 6978 - DNA, 201 bp, Homo sapiens
gaaatggagatgcttaaggtatgtttacaattataaaaacattacttcaagttctttccaaaggacatttaattaagtaaaatattaactaattctaaacyaggttccaccacaatgaaattgctactaattatgtaacattagatttcacattttccaattcatgtttcttttatgtagtctatgaataatgggttagag

SEQ ID NO: 6979 - DNA, 201 bp, Homo sapiens
aatcacatatttagtattctctttaaaacaagggaaaaggcaaataacctgtctgcttaacagcaacagcacaacttcactatagttatacatgccacackgtattttctgtgtgactacaaaattatttcaaagtgatatttatataaaattcatttctgcaaattgtttttataagtgaggaaaaatggttttccttta

SEQ ID NO: 6980 - DNA, 201 bp, Homo sapiens
ccttgtcaaaaatcaattggtggtaaatgtatggatttactcctggaatctcaattctattctattgtatttatatttctgtccttatgcctgtaccacamtgttttgattacagtagctttgtagtaagtttagaaattgggaaacatgagtcctccaactttgttcttcttttcaagattattttggctatttggggtc

SEQ ID NO: 6981 - DNA, 201 bp, Homo sapiens
gatcatcagctaagagtgacgatcggtggaggagatatgaagtttaagtggagaggagaaggtataaaatagtcttaggaggggaggatagtaaatagatkagggaaaagttgtaggattgccaggaagtagtaagggcccacttgaggctggtggtcacaaatttaaggtgagaccagtcaaaatggttgtgcttttcac

SEQ ID NO: 6982 - DNA, 201 bp, Homo sapiens
tgcagtgagccgagattgcgccactgcattccagcctgggtgacagagtgagactctgtctcaaaaaaaaaaaaaaggaagggcttacattttattttggwgctgactgggaatgaaggcaatgagggatgactgttggagaaggctgtgcttactaaacagtattattaagtagcagcatacatggtgttatactgactt

SEQ ID NO: 6983 - DNA, 201 bp, Homo sapiens
ttctatgaaaacaccttcagggtggtttcttgtatgcttgtaagatggctacttgcatcaaccatgaccacatctagcaggagcaaaagcatcctttcccrtaccagaggagagtcccgaaatttgttgcaattggactgccttggaagcaataattatggccaggagatggaggctagagaactgagacctgatcatagc

SEQ ID NO: 6984 - DNA, 201 bp, Homo sapiens
gcaattggactgccttggaagcaataattatggccaggagatggaggctagagaactgagacctgatcatagctcctatccttgaatcagttgtatagcarggggaattggattttccttaagacagttggatttcacctgtagtcttggtgatgaggtcagttccatccataaaactttgctgttacacattttgggatg

SEQ ID NO: 6985 - DNA, 201 bp, Homo sapiens
cagtgagctgtgactgagcaacagagctagactctgtctcaaaaaaaaaaaaaaaagagatgggttttgaaattcagtactttttttgagtgaggtccaatgggtcagaaagaagcattggataaatgaatccattttctcttctctgtttgaatttgtaatttgaaagaatattctacctataaagtacttcagtgctta

SEQ ID NO: 6986 - DNA, 201 bp, Homo sapiens
aataaagtgacttgtccagggtcacatggatactaagtgaccaagtgtcaaagcagaattttccaaataacttaaagataattcttgtacaaatatagaaygaacacatgtcatatgtgttgtgttaatgagggaaccagaaggatgacaacattggttcagagagatgcaaagataaatatagacattggaggaaaaagt

SEQ ID NO: 6987 - DNA, 201 bp, Homo sapiens
ctttttaaaaagagtgggatactttattcagtttagccctcaagcaattaggcaagtcagttaccatggtaacagtaggtattaatttccttacctagttrgaggttttatgaacaaagaaatctctgagttcatccaccaaaacccaactttctcttgagactggcctcttgagactggtgttaaatttgtctattttct

SEQ ID NO: 6988 - DNA, 201 bp, Homo sapiens
gaacaaagaaatctctgagttcatccaccaaaacccaactttctcttgagactggcctcttgagactggtgttaaatttgtctattttctagaagatgacrctattctaagtggaaaatacggttctcttgaggtgaatttctactctatcaagagtgaagtagagtatggcttaaaagttaagtgattaaaaagctaccc

SEQ ID NO: 6989 - DNA, 201 bp, Homo sapiens
tacatattttttcactacatatgacgcatgtggcaaccccaagagttgagttgtacccatcggcaaactttgatcatgattctgtgaatataggcaagcascaattgcaggtagaacattctttttttgagtcccaaaccgtgagaaacaaattacagaaatgtacctttcttttgcattaggacacgttgtagttttgta

SEQ ID NO: 6990 - DNA, 201 bp, Homo sapiens
tgtattagtaattattcatttagagtaaaacatctcccagaacatgaaagaatacaaactttattcatgttacgttgtgacaggagactttgttggatgcrcctgattttcctgccaattcacagcttcattaaaacagtaatgctttgaaatatggcttaggaaacttcacaatgatcattaattacacctaatttctgg

SEQ ID NO: 6991 - DNA, 201 bp, Homo sapiens
tttcttctatcttaatgtattagtaattattcatttagagtaaaacatctcccagaacatgaaagaatacaaactttattcatgttacgttgtgacaggaractttgttggatgcgcctgattttcctgccaattcacagcttcattaaaacagtaatgctttgaaatatggcttaggaaacttcacaatgatcattaatt

SEQ ID NO: 6992 - DNA, 201 bp, Homo sapiens
gtgaatccctagactagtcttgcttaggataattaggaaaagttaactttcattgtatcaagggacaggtagaacaaaattgtccttttgtccaggaaacyattaaattcttcaaggaaaactttagttatagggattattttttaaatgtctaatttcagtaacaatatttgggacatatttatttttccttctgtttcc

SEQ ID NO: 6993 - DNA, 201 bp, Homo sapiens
cattgtcacggatgattttacaataacatccttttctgacatgcattacaacacactattgattccgtttcaatgtttgtgtctggtatgggggcggagtrgagaggctactacaggaagaaagaacaaataacatttcttcttactactttgtgcatcatgtgatttagctcctcccataccattttacattagaaaatg

SEQ ID NO: 6994 - DNA, 201 bp, Homo sapiens
gacgtcattggatcattttcatttcttgggaggattaataaagcacattccttctgttgggcctccagtgcggggagggtgttggccgagcagtggctgaraaaacgtttttcccctggtgttttcaagaaccctctttattagctaagtggtgagacatgccacctggtggttatagtagtatcatttttctcactgttc

SEQ ID NO: 6995 - DNA, 201 bp, Homo sapiens
ttgcattttcttaaattagagccttaatatataggatattacaatatctaggttttgttgagtagttttttcttctttgaaaacatgtttttaaaataagrtttttttttttttttttttgacatggagtcttgctctgtcgcccaggctgtaatgcagtggcgggatcttggctcgttgcagcctctgcctcctgggttc

SEQ ID NO: 6996 - DNA, 201 bp, Homo sapiens
ggcccgagaggttgaggctgcagtgagccttgatcacaccattgcactccagcctgggcaacagggcaaaaccctgtctcaaacagacaaacaaacaaacraaaggcagaggtaggttaagctatttattaatggtcttctactggtatagatataagctagaaataacattcaagtgtttttacttttactacagttatc

SEQ ID NO: 6997 - DNA, 201 bp, Homo sapiens
tgtctgaaaatattatataatgttattttgcccatttaaaaactttaaaaaatgctaacaaactgtgtactctgtaacttgtcttttttactcaacactaygtttttgagaatttttcttgttgatctgtgtagttccattttaactgttatatcttactatgtttcattatgcaacagttggttcaatccattctcttgt

SEQ ID NO: 6998 - DNA, 201 bp, Homo sapiens
tcatggcttctattgcaaatgcccctatttcccaccttcagttggcctaaccaaatttaatttttcaatatcatatgatctttttgtataattatgtattmaaataattccagataggttaggttttcgaattgcaacgtctcatttaatggttactttcatataactgtaggaaagcatttgataatttttccaacaatg

SEQ ID NO: 6999 - DNA, 201 bp, Homo sapiens
gtagctggcactacaggcgtgccaccacacccagctaattttttgtattttttttagtagagacgaggtttcaccgtgttagccaggatggtcttgatctyctgacctcatgatccacctgcctcggtctcccaaagtgctgggattacatacagtttctttaagcaagccttctcttttccttcctcccagttcttggta

SEQ ID NO: 7000 - DNA, 201 bp, Homo sapiens
taattttatttgtggtatgttcatttgatatcatttggtaatacctgaaaacaggaactgattttactgtgttgctttttcatcatttctagctgaaatgyacagagacctggagccttaacagtctggttaaacacctcttaggtaaacagctcctgaaagacaagtctatccgctgtagcaattggagtaaatttcctc

SEQ ID NO: 7001 - DNA, 201 bp, Homo sapiens
ttcttttactttgtagcattgctatgtatttggcttctagagttggggctttgtggctttcttattgcagtgacacaaccagctttctcctagtctggagrttatacatccttgctataagtatttaaaatgctttctatataatgctttaaaacatgtaagatggcttatccccaagatggtagctaataaacactaagt

SEQ ID NO: 7002 - DNA, 201 bp, Homo sapiens
ttgagaccagcctggccaaaatggtgaaacaccatctctactaaaaatacaaaaaattagctgagtgtggtgacgggcacctgtaatcccagcttcttggraggctgaggcaggagaatcgctttaatctgggaggtggaggttgtagtgagctgagattgcaccattgcactccagcctgcacaagagcgagactctgtc

SEQ ID NO: 7003 - DNA, 201 bp, Homo sapiens
gctgaggcaggggaattgcttgaactcgggaggtggaggttgcagtgagccgagattgtgccattccactccagcctgggcaacaagagcgaaactctgtytcaaaaaaaaaaaaaaaaaaaaaaaaagtgaatttttacatgaatattctacatgattggcatatttacatgaatggtttaaaaacccacaataatagca

SEQ ID NO: 7004 - DNA, 201 bp, Homo sapiens
ggaggctgaggcaggggaattgcttgaactcgggaggtggaggttgcagtgagccgagattgtgccattccactccagcctgggcaacaagagcgaaactytgtctcaaaaaaaaaaaaaaaaaaaaaaaaagtgaatttttacatgaatattctacatgattggcatatttacatgaatggtttaaaaacccacaataat

SEQ ID NO: 7005 - DNA, 201 bp, Homo sapiens
agagaaattatggtatctataggtaattgaaagtaattcagtatagtgaacattgaatagggctgggcggatgaaggcaaagcagaaaaaggaaagcagawgggccatggtaaggagtttatatctcctcccaagagcaatcgaagtgactgagagttttaaacacagcagtgaagtgaattacattaaaaaaataagaac

SEQ ID NO: 7006 - DNA, 201 bp, Homo sapiens
ctcacgcctgtagtcccagcactttgggaggccgaggtgggtggatcacctgaggtcaggagttcgagaccagcctggtcaacatggtgaaaccctgtctytactaaaaatacaacaattagctgggcgtggtggcaggtgcctgtaatcccagctacttgggaggctgaggcaggggaattgcttgaactcgggaggtgg

SEQ ID NO: 7007 - DNA, 201 bp, Homo sapiens
ggctcacgcctgtagtcccagcactttgggaggccgaggtgggtggatcacctgaggtcaggagttcgagaccagcctggtcaacatggtgaaaccctgtytctactaaaaatacaacaattagctgggcgtggtggcaggtgcctgtaatcccagctacttgggaggctgaggcaggggaattgcttgaactcgggaggt

SEQ ID NO: 7008 - DNA, 201 bp, Homo sapiens
aaagaagcacaagtttctacaaaatacattctaacagatgttttctataacattcagtctcaagattactagtaaatacttctttgaactgtaaaagcaatctttcaatattataagaaagctcttgctttagtaaacatttagaaactcagctttattatcataagcaagaataagaacagtgtaacaagttttatgcac

SEQ ID NO: 7009 - DNA, 201 bp, Homo sapiens
tactggtactgctgaggcagagggcagtaattggttctttgggataggagaaggggcagttgctgaaatacaaaattaatagtcagcatcccaagttcctyaattgcagccaaaatacatgtgttcaggcctttcggcagtaccgcccccagaactaccagctgtagtgtggtctattcccagacagcaacatgcaagaat

SEQ ID NO: 7010 - DNA, 201 bp, Homo sapiens
ggggaaggatactagtaaagccatttcttactcatgtatacatttttccctccatgaaattagagcagccaccttttacatgacttttacatgcatttcaratttttgtactagcaattaaaatatctactggatgtaaatcacatgtgcttaatgctttgcttcataatatctgttgaagtcaattaaaatatagagaca

SEQ ID NO: 7011 - DNA, 201 bp, Homo sapiens
catcgaagtcaatctaaacatattattggccatttagttaaaaaaagaaagaaaagaaaagcaatatgcttgtggacatacaccagttactttatgtgcartaaaagagtaggaaggggaaggtgaaagaatagagaaaactatgtagtcaggatgtggtggaaccaaattgcaactttcttttttttttttttttttttg

SEQ ID NO: 7012 - DNA, 201 bp, Homo sapiens
attaaagagtttaaggatatccaaaatacttggcaaagtaatctgaaataatactcttaggaaggtagggcaagaatgtgattctagtaagcaaaaatgtratcaaatcgtattctagtcccagctactcgggaggctgaggcaggagaatggcgtgaacctgggaggcggagcttggagtaagccgagatcgtgccactg

SEQ ID NO: 7013 - DNA, 201 bp, Homo sapiens
gggaggcggagcttggagtaagccgagatcgtgccactgcactccagcctgggcgacagagcgagactccatctcaaaaaaaaaaaaagactatatgaacwtgtatggcataaatatgtacaaatattatttattttaaaaaaattcaggggtagggacagggtagttagaaaatatctaaggatgttcatgaaataatac

SEQ ID NO: 7014 - DNA, 201 bp, Homo sapiens
ccacgcccagctaatttttgtgtgtttagtggagatgtggtttcgccatgttggccaggctggtctcgaactcctggtctcaagtcttccgcccacctcakcctcccaaagtgctagaattataggcatgagctaccacacctgacctcaaaatacatttaatagagcaagcatgagccactatgcccagcctcaaaatac

SEQ ID NO: 7015 - DNA, 201 bp, Homo sapiens
gttgtctagtatctgaaacagttgttttatatgttttgtccaagtttagatttgtttgtggtgggagggtgagtctggcctcccttgttatatcatgttgkcctgaagcagaagctgagtttcttttattttttaaatatagtttcaatttttaacaactattaaataggcaagtatcaacaacaatagataacaatataa

SEQ ID NO: 7016 - DNA, 201 bp, Homo sapiens
catgaacccgggaggcagagcttgcagtgagccgagattgcgccactgcactttagcctaagaaaaggaaggaaggaaggaaggaaggaaggaaggaaaaatcagtcactcactcaggtttagtttcaaaagccaaaacagtgataatattgaattttttccagccactcagtagtacccagagaattttgatacaaataa

SEQ ID NO: 7017 - DNA, 201 bp, Homo sapiens
gctagttatgaaagaaagaaagagagagagagagaaggaaggaagggagaaaggaaggaaggggctgggagtggtggctcacacctgtaatcccagcactytgggaggccgaggcgggtggatcatgaggtcaggagatcgagaccatcctggcgaacatggtgaaaccctgtctctactaaaaatacaaaaagaaaaaat

SEQ ID NO: 7018 - DNA, 201 bp, Homo sapiens
tgtaaaatactgatttatttaaagatattacaatcatagtagttttttgcaatcttttttaaatcagtggatgtcaaggaacaactattgttctttgtacrgcatttttcaacattgtgaagagttcttatactcaaaaagtttgggagacacagtgtgacattgtttaacctgagttgaacttgtcattttgtattcttg

SEQ ID NO: 7019 - DNA, 201 bp, Homo sapiens
aaagcttctaccaatacaaacacaaaacaagcatagacaaatagagtttaaagaacatcattggtgttttcctctaaagggaatattgatgctaggccaaraaaatcctggagttattcttgaggaccttaaggaataattgaaatgtaggatttgctcctggctttcttgtcctatattcagaataaaacaagaatggat

SEQ ID NO: 7020 - DNA, 201 bp, Homo sapiens
aatcctatgcaaatgtttctttctgtttttcatgttgactctgctaattgaggtctttgttactttttagccgagactattataatttccccaacagatayccctctccccagtgccccttgttgctttctatgcagtttacaaattattgtctgcaaacacatccttaagtctggaatacctttctggaactccttacta

SEQ ID NO: 7021 - DNA, 201 bp, Homo sapiens
tttcctttcagattgttcatttctggtgtataacaacagctgatatttcaacgttgatgttgtactctgaaactttgttgaatttacttattagatctagwagctttctttgagatttttatatgggattatgtcatctgtatatagagatagttttacttcttcctttccattatggatgccttttatttcttttccatg

SEQ ID NO: 7022 - DNA, 201 bp, Homo sapiens
aataggcaagtatcaacaacaatagataacaatataatagatatgcatattcctcccactttatcaaatcttaattttcttcaatttttttttttttttttaatagggtctcactctgttgctcgtgctggagtgacagtggtgtgatcttggttcgctgcaacctccgcctcttgggctcaagtgatcctcctgcctcag

SEQ ID NO: 7023 - DNA, 201 bp, Homo sapiens
aaataggcaagtatcaacaacaatagataacaatataatagatatgcatattcctcccactttatcaaatcttaattttcttcaatttttttttttttttttaatagggtctcactctgttgctcgtgctggagtgacagtggtgtgatcttggttcgctgcaacctccgcctcttgggctcaagtgatcctcctgcctca

SEQ ID NO: 7024 - DNA, 201 bp, Homo sapiens
tgtatcatgtgcaaaagcacagtaaaaacaaaaatgcattggaagctgtgagttgttgcactgcactcatggatgaatagctgttggttcgcattgcgttkttttgttttgttttgttttgtttttttgagatggagtcttgctctgttgcccaggctggagtgcagtggcgtgatctcggctcactgcaagctctgcctc

SEQ ID NO: 7025 - DNA, 201 bp, Homo sapiens
tgagccttgatcacaccattgcactccagcctgggcaacagggcaaaaccctgtctcaaacagacaaacaaacaaacaaaaggcagaggtaggttaagctrtttattaatggtcttctactggtatagatataagctagaaataacattcaagtgtttttacttttactacagttatctggccactttgggactcattata

SEQ ID NO: 7026 - DNA, 201 bp, Homo sapiens
atttgctaagaactaagccttgaactaaggctattttatttgagtatgagtcatatcagggtacggatccattttactattaacaaaacaaatatgttctkttttttttttttaaatgcacacaccacgtttgagagattcttattcactgtattttctttaattatacttgaattttggtttacattgaggagtgccctc

SEQ ID NO: 7027 - DNA, 201 bp, Homo sapiens
caggatacatgtgcaggacgtgcaggtttgctacataggtaaatgtgtgccatggtggtttgctgcacctatcaatctgtcacctacatattaagccccgyatacattagctgtttttcctgatgctgtccctcctccaggacccagtgtgtgttgttccccatgtattctcatcgttcggctcccacttataagtgagaa

SEQ ID NO: 7028 - DNA, 201 bp, Homo sapiens
atgtatatgtatctagatacacaatctgtgtgtgtgtatatatatgcatgtgtgtgtataaatgtataaattagttactagtatatacgtaagtataaaamctcaatgtgcaaggttacattttcagaaaatatgtaatataataaaagaaatcaagcccagaatttttaaaaagtttattgcgctttctgttaaaaatga

SEQ ID NO: 7029 - DNA, 201 bp, Homo sapiens
caggagaataccttataaatgatatcttctgcaataaactatagattgtatatatgtatatgtatctagatacacaatctgtgtgtgtgtatatatatgcwtgtgtgtgtataaatgtataaattagttactagtatatacgtaagtataaaaactcaatgtgcaaggttacattttcagaaaatatgtaatataataaaa

SEQ ID NO: 7030 - DNA, 201 bp, Homo sapiens
catttgagcccaggatgttggggctgcagtgagctgagatcacaccactgtactccaggctggatgacagagcaaggccccgtttcaaaaaaaaaaaaaaagcttctaccaatacaaacacaaaacaagcatagacaaatagagtttaaagaacatcattggtgttttcctctaaagggaatattgatgctaggccaagaa

SEQ ID NO: 7031 - DNA, 201 bp, Homo sapiens
aaatgttaaatagaaaattccagaaataaacaatttataaattttaaatcagtggtggctttgagtactgtaatgaaattttgtgccatcccactcagtckgcctcgacttcccttagaatcatccctttgtccggtgcattcacgttgtatttactccctgtctgttagtcacttgttgcagtatcacagtgcttgtgtt

SEQ ID NO: 7032 - DNA, 201 bp, Homo sapiens
tcacgcttgactaatgtttttgtaaataaagttttctcagaacacagccatgccttttgtttatgtgttatgtagggctgcctgagttaagtagttggctrcaaagcctatcatggcctataaagcctgaaatacttactatctggtcctttatagaaagtgttttctgaccctgtactagactagcttgtctcaaaattc

SEQ ID NO: 7033 - DNA, 201 bp, Homo sapiens
atgaattgttagtacacagtgtttctcagtaaagtattattaagcaacagttatctagttttcaaatgtacatcttaagaagcttttaagatggaaggatmcactaaatcccccaataccctttttagttggggaaggttagtacttctgtgaattctgagatatcatatttgtgttagtgactgttcataggttccttgc

SEQ ID NO: 7034 - DNA, 201 bp, Homo sapiens
aatgtttctgagattctttcatgctgttgcatgtatcagtagttttttgttttgttttgttttgtttttgttttttcagagtcagggtctccttctgtcayccaggctagagtacagtggcgcaatcatagcttactgcagcctctaactactgggctcaagctatcctcctgcctctcaagtaggctaggctgcaggtat

SEQ ID NO: 7035 - DNA, 201 bp, Homo sapiens
ttctgaatagtataaacagttatgtagcctatctaggagtttgtgaatagagtttaaaattttgttttgaagctgcaaatttgattagaaattaaacagtraagttattacttaaggaacttcgttttagctgtctgaacaacttactgtataaaaatctttaaacattctgtataaatatgtgataagatatgcaatgac

SEQ ID NO: 7036 - DNA, 201 bp, Homo sapiens
tggagatgagattttgctatgttgcccaggttgctctcaaactcctgggctcaagtaattgtcccacctcagccttccaaaatgctgggattacaggcgtsagccactctgcccggcctattatctctgttctgcccacttccaaccactaatctactttctgtctctatgatttgcctattctggatgtttctataaatt

SEQ ID NO: 7037 - DNA, 201 bp, Homo sapiens
tccatatagaaaattaagtttcattacatttgacttgatctaggttttcatttcatagaatggagagcagactctgtaaatattttgccccagacctagcyttattacaaacattgtcttaattaggattctgtctacccagaatagaaattaactcaagctagcatgagtgtatattgaaatttatattaaggataaagg

SEQ ID NO: 7038 - DNA, 201 bp, Homo sapiens
aggagttcaagaccagcctggccaacatgatgaaactccgtttctactaaaagtacaaaaattagctgggcgtggtgttgggtgcctgtaatcccagctaytcaggaggctgaggcaggagaattgcttgaacccaggaggtggaggttgcagtgagtcaagattgtgccactgcacttcagcctgggagacagagcgaga

SEQ ID NO: 7039 - DNA, 201 bp, Homo sapiens
agttttaaagaacaagtttgattgaaatctaaactttgtacaatcctgaattgagaagtttcctgtattttattatgacacaatatttacctaaaaatagrgtaattatgaattgagaaaacatagctattaatttcatactcttatttgttaagtagattttgtctggaaaactgttcatatttaaaggagctttgtacc

SEQ ID NO: 7040 - DNA, 201 bp, Homo sapiens
tgaattgagtgtcaaatatttgatatgttttgtaaattaggtgaagatgagtgagtaggttctaaactgcttgggtttaccgcactctggagcattgcagragaatgtgatgttggaaggaagtgctgaaacataattattggcttgcctataggagggtgctacataattttagaaggtgtcaagaaagtgacacagtct

SEQ ID NO: 7041 - DNA, 201 bp, Homo sapiens
gagcattgcagaagaatgtgatgttggaaggaagtgctgaaacataattattggcttgcctataggagggtgctacataattttagaaggtgtcaagaaaktgacacagtctgaattagttctgttgagttgcaaaaaatgtaaagtttcttgattctgaaaataagaaatatgttcccagaaatctcatctagttaatgt

SEQ ID NO: 7042 - DNA, 201 bp, Homo sapiens; identical to SEQ ID NO: 816

SEQ ID NO: 7043 - DNA, 201 bp, Homo sapiens
aaatttagtattatgttagatggtacgttttattaaaatcaaatgcttcaaaaataattgctctgtgtatggcatgagataaatagcaatcagatatattrtttaataatatgactctattaaatgatggcataaatttgaaaatttgaccttcggtatcttccgggtctaaaattatatgactccattataaatattttg

SEQ ID NO: 7044 - DNA, 201 bp, Homo sapiens
ggagaggtggcttgatttacatttaatctctgcaatttattagagtcctgtagttggatttactttgaagagagtttcccagaagaataaaatttgctgcrttgctttttgggtgtgagctgcttttgtatttgcctaatgcctttaatgcaaatttctttctttctctcttgcttttttttaaaaaaaatagaaatgttt

SEQ ID NO: 7045 - DNA, 201 bp, Homo sapiens
tttcttaagattatctatggatggttctccaactaggattgcgtatgggacacaagggagctctggttactctttgagattgtgtaacactggggacaackctggtgagtaacctcactttttcgtggacctgtcagggatgtctgtcatgttgatagtttgcttagtcttaaggaattatgtgtcttgttctccttggtt

SEQ ID NO: 7046 - DNA, 201 bp, Homo sapiens
taaagcggggatggtattcacaacatttaacttatagggtccaagcactgaccaacctgaccattagaacagagtgtggtctctgtacagggcagatggcrctgagtgggtattctccacagaaagagaaacgaagacagtaccccactcctccaacccaccacccaccaccaatcccaccaccaattccaccaccaatcc

SEQ ID NO: 7047 - DNA, 201 bp, Homo sapiens
gaagattaagtgacacatttaaaatgcttagtactgtgtgtagaacataaacacttcaaaaaatgtaaactgtgatttctatattcaataagaaatgtagmaatggacaaagcatataaaaagcaaaagaaatactagaagacacttgatttttctcaaaaataaacacaccaagtatttttgttttagtgaaattcatgc

SEQ ID NO: 7048 - DNA, 201 bp, Homo sapiens
tttaacttatagggtccaagcactgaccaacctgaccattagaacagagtgtggtctctgtacagggcagatggcgctgagtgggtattctccacagaaasagaaacgaagacagtaccccactcctccaacccaccacccaccaccaatcccaccaccaattccaccaccaatcctgccacccaccaccaatctcaccac

SEQ ID NO: 7049 - DNA, 201 bp, Homo sapiens
tacattttttgaaataaaaatactagattcaaaggtgtgaatatttttgaaggttttgtggtgtggtatcatgaaattaggtttcagaaagtttactccayagttgactttttctaccagctaataagagtgctcatttaccccacttaggccaactctaacaggcttctgttgctttgcatcctgacatatttatctttc

SEQ ID NO: 7050 - DNA, 201 bp, Homo sapiens
caaataagtaatatattttggagcttgctattcttctctttttatggtatttttgtgtgcacattcttatgctcttattcagttatttctgtagaatacawtttttgaaataaaaatactagattcaaaggtgtgaatatttttgaaggttttgtggtgtggtatcatgaaattaggtttcagaaagtttactccatagtt

SEQ ID NO: 7051 - DNA, 201 bp, Homo sapiens
accttgcatgtgactttaaggtggttggcctggaagaaaagtcccaagatgggaaatagtaggtgtcttttttactaaatgcactccaatttgggaccaaraattttcattcttgaaggctcagtattgtgagtttataagagataatagacataaaagtgtaatgatttcattgcaaataaaaaaaggcccctttgcacc

SEQ ID NO: 7052 - DNA, 201 bp, Homo sapiens
cctcccgggttcaagcgattctcctgcctcagcctcctgagtagctgggattacaggcgcgcgccacacctggctaatttttgtatttttagtagagacgrggtttcatcatgttggtcaggctggtctcgaactcctggcctcaagggatccacccacctcggcctcccgaagtgctgggattacaggtgtgggccactg

SEQ ID NO: 7053 - DNA, 201 bp, Homo sapiens
gcgcgccacacctggctaatttttgtatttttagtagagacgaggtttcatcatgttggtcaggctggtctcgaactcctggcctcaagggatccacccayctcggcctcccgaagtgctgggattacaggtgtgggccactgtgcccagctgtatagagatattttaaacaacactaaagtcctcctactttgactaatt

SEQ ID NO: 7054 - DNA, 201 bp, Homo sapiens
gaattagaagtgaatcaaagtcccttctaaccaaggagaacaagacacataattccttaagactaagcaaactatcaacatgacagacatccctgacaggwccacgaaaaagtgaggttactcaccagagttgtccccagtgttacacaatctcaaagagtaaccagagctcccttgtgtcccatacgcaatcctagttgg

SEQ ID NO: 7055 - DNA, 201 bp, Homo sapiens
atagagaagctctttcattcaatgcgaaaggtcaaaggcacatcagtttctttaataatgcaaacctcagcacacattatcagtgtcctcattattattgscttgtttatttcccactgctcattgataatttcaacgtgaaatttacctgtattgctgcatgcatcttgcagtttaagaagtgaagtaacccaatttcaa

SEQ ID NO: 7056 - DNA, 201 bp, Homo sapiens
ggcacatcagtttctttaataatgcaaacctcagcacacattatcagtgtcctcattattattgccttgtttatttcccactgctcattgataatttcaaygtgaaatttacctgtattgctgcatgcatcttgcagtttaagaagtgaagtaacccaatttcaaagctagtgctttagggaaaatattggattgtattta

SEQ ID NO: 7057 - DNA, 201 bp, Homo sapiens
cccaatttcaaagctagtgctttagggaaaatattggattgtatttacttcaagcagagttcgataatttatgtacataataaaaattttaaatcccttasttaatatagcagttgccaaaactgggctattatcattctaaactaccaacccaaatggtagtgggtatctaatctacctctagaaagaaaatggactgta

SEQ ID NO: 7058 - DNA, 201 bp, Homo sapiens
tggagtggatgtcaggtggatcagagagatacagtcatgggggtgggggccagcctaaaacagtaaggtcaagttgtttgaacagaaaggctacagggcgyggtcctggctcttgtgtaagaattttgactgcgcagccctgcacttcggctgtgtgtaatgaaaagggttgggatgagttagggagagctagtgtgggag

SEQ ID NO: 7059 - DNA, 201 bp, Homo sapiens
attatttatgatatatgtcacaatctatgcatgtgctatttaagaggggcaaatatacatgcaataattgtgctagaatataaaaacattagacttctttrtcattgggatgatgatatcaagatttctttgttagatttatttcagatagaaaaggggatacgaaaaatgcaggcacatgagatacttggagaactttaa

SEQ ID NO: 7060 - DNA, 201 bp, Homo sapiens
ttcaaaatcaattgtctataaatgtaagagtttatttttggaccatcagttctatcctgttgacctatatatgcctatcctaatgccagttacacacagtyttgattaccataactttgcagtaagttttgaactcagacagtctgagtgcttttattttgtcctttttcaagattaatttggttattccggatcttttgc

SEQ ID NO: 7061 - DNA, 201 bp, Homo sapiens
ttggccagatttctggcacttgaaacaagatcctgatggaggaggtcctgtaggaatgcttgaccactgcagtttaggcattttgaagtttttgtgtgtgstggagatgtggctgggttttgtctcacagcagaggcaaggaatcgcaactcagaaatacattgctacttggctgcctctattattgtacaccttgaaggc

SEQ ID NO: 7062 - DNA, 201 bp, Homo sapiens
cctgacttcttgacagttctgaatttagtggagcaatgaggttcagctttggtgaatgagcttaatttttccatgataaactgctagtttcttcccactayagtgtctctcaaaaatgggacagcaacattctttttgttttcacttgcagtaagcatgatgcaattacataaatgtacacttttcaatttgttaaataga

SEQ ID NO: 7063 - DNA, 201 bp, Homo sapiens
gcaacacagtgagaccccgtctctacataaaattagaaaaaaacaattaactgggtgtggtggtgtgcacctgtagtcccagctagtcaagaggctgagayaagaggatctcttgagcccaggagctcaaggctgtagtgagccaagatcgtgccactgcacacaaacaattatgtgacctcgggcaagttgctttacctc

SEQ ID NO: 7064 - DNA, 201 bp, Homo sapiens
ttagagcctttctgtttctctcaatagggttggagagttatccttatcttctttttattggggcttaagaagagagatgaggttccatggagtaaacaatwcaaggatataaggacctcatataatctcacgtatccattttccatgaaagccattcttggcacgaatttgccattctatgtttgagcctcataaaaggca

SEQ ID NO: 7065 - DNA, 201 bp, Homo sapiens
ctcttaatttccttatctgtaaaatgaggatgataatttcttcctgggtctgttgtaataattaatacatcaaagcacttcatgtctggaacagtgaagayaccctgctatgactattaaggatagtatacatggaataagacacaggaacttctaaatgcttttgaccatagatttaggttctgagttttaagaatttaa

SEQ ID NO: 7066 - DNA, 201 bp, Homo sapiens
gtgacaaaatacaagcaaatttagcctcgtgtcatttcctaaggaacatcttctctctgtgagttcacaggttgccacatgaacatcttccagcatcttgmgttctcagatgtggatgttgccagggttctcactccagatgcttttgtgtgtcggaccatctgcacctatcaccccaactgcctcttctttacattctat

SEQ ID NO: 7067 - DNA, 201 bp, Homo sapiens
aaggctcagtattgtgagtttataagagataatagacataaaagtgtaatgatttcattgcaaataaaaaaaggcccctttgcacctgatatctccatcatttttctagaattttgtgcacacatgccttgcactacttggtgatgataaagatttccagatctttgcacagaataaggctttgctttagatcagaatttt

SEQ ID NO: 7068 - DNA, 201 bp, Homo sapiens
tgaatatataaagcaaaaaaatgaaaagtgagaacttccaggctttggattgttgtaggtgataaatataaaatgggatttctggggggctgctactgagwtgaggggatggcagaaaacatggaagcaaggtctctggtcagcccagggtgctgggcttgtcccaacaccacgtaggcaataagaggacagtacagggtg

SEQ ID NO: 7069 - DNA, 201 bp, Homo sapiens
cacgtaggcaataagaggacagtacagggtgccgtctctctccctcttcctctctctgtctctctctctgtgtgtgtgtgtgtgtgtgtgtgtaacactaycttcccaatttttactgtctatttgtattcaaagataaggtccttatgaaaaatacactgctctgattcactttaaaacttatttccatatttattattt

SEQ ID NO: 7070 - DNA, 201 bp, Homo sapiens
tccagcctgggcgacagagcaagactccatctcacaaaaaaataataaaaataaaataaaaaaaaaaaagaaaggctgtctttctcctttcccattggccrtctttctccattccctactcctccaatcccctggcaaccactaaatctactttccatgtctgtggacttgactcttcgggacattttacataaatggaat

SEQ ID NO: 7071 - DNA, 201 bp, Homo sapiens
actgtctatttgtattcaaagataaggtccttatgaaaaatacactgctctgattcactttaaaacttatttccatatttattatttattgtgggaataayaatattcccaatattattatttattatttaagttattattattaacttccctctgaggttatatattggttactcacaggtgaaatccaaaatattctac

SEQ ID NO: 7072 - DNA, 201 bp, Homo sapiens
ctcacaggtgaaatccaaaatattctacaaaaggtaaatattcctttggtaacaaatgaagaatgccagaaaagatatcaagattataaaataacccaacrgatggtctgtgctggctataaagaagggggaaaagatgcttgtaaggtaactcatgagattatgaaaaacacaataggctgcttgagaaaattcatttca

SEQ ID NO: 7073 - DNA, 201 bp, Homo sapiens
ttgtaaggtaactcatgagattatgaaaaacacaataggctgcttgagaaaattcatttcaaaatatattttccaatagcataatttaatcatagtttttwaaaaaattcagagacaaatgatctgataaattgataagcaacttttaacaaattgaatatacataatatatatttatattatttatgatatatgtcacaa

SEQ ID NO: 7074 - DNA, 201 bp, Homo sapiens
gcagtcacttatttgaatcccattgtcgtaactttctactattttatttttccactgtgactcagggagattcaggtggtcccttagtttgcaaacacaayggaatgtggcgtttggtgggcatcaccagctggggtgaaggctgtgcccgcagggagcaacctggtgtctacaccaaagtcgctgagtacatggactgga

SEQ ID NO: 7075 - DNA, 201 bp, Homo sapiens
tattgtacaccttgaaggcgaggttaattaagtcctcttgtggggtttgagggctggaatctaatttttggagttttttgttttttgttttttgttttttkttttttaatgtcaggagctgactgggtgataaaatgcatattgagaataagaggccttctgacccttctgggtctagggctgtaaagcgtctcagggttg

SEQ ID NO: 7076 - DNA, 201 bp, Homo sapiens
ggcacctcagaccgtttgcccattttatgacaagaattatctagatcttgtaggatggaaaaatcgaaagtgccgttttctggctatttggaaccattgtygagtttgtattggggttaagcagcattgcagaagaaaataaggcatttaggttttaggtcaggtgtgagttgaagaggttttaagttcttgagaacatag

SEQ ID NO: 7077 - DNA, 201 bp, Homo sapiens
gagatactttaaaggacattttttcacttaggatgtttagtactatgaataataaatagtcacaatttccttaactatggtgacaaaatacaagcaaattyagcctcgtgtcatttcctaaggaacatcttctctctgtgagttcacaggttgccacatgaacatcttccagcatcttgcgttctcagatgtggatgttgc

SEQ ID NO: 7078 - DNA, 201 bp, Homo sapiens
tttaaaggacattttttcacttaggatgtttagtactatgaataataaatagtcacaatttccttaactatggtgacaaaatacaagcaaatttagcctcrtgtcatttcctaaggaacatcttctctctgtgagttcacaggttgccacatgaacatcttccagcatcttgcgttctcagatgtggatgttgccagggtt

SEQ ID NO: 7079 - DNA, 201 bp, Homo sapiens
gtagaagctagtcattttctattcaaagcctcaaaatgcttgaatatcattgggctaagggattgtctcaagaaagagtctaacaggtgaacatttcatcygaataaagaaacagatttaactgtgtgacccatgatcacattagcggatagcacagtccaaagaaaataacataagacaagcattttgctgagaatgtaa

SEQ ID NO: 7080 - DNA, 201 bp, Homo sapiens
tagtcacaatttccttaactatggtgacaaaatacaagcaaatttagcctcgtgtcatttcctaaggaacatcttctctctgtgagttcacaggttgccamatgaacatcttccagcatcttgcgttctcagatgtggatgttgccagggttctcactccagatgcttttgtgtgtcggaccatctgcacctatcacccca

SEQ ID NO: 7081 - DNA, 201 bp, Homo sapiens
cactcctccaacccaccacccaccaccaatcccaccaccaattccaccaccaatcctgccacccaccaccaatctcaccaccaatcccaccaccaatcctrccacccaccatcaatctcagcaccaatcccaccaccaatcccaccaccaatcccaccacctaccccaccaccaatcccgccacccacgaccaatcccacc

SEQ ID NO: 7082 - DNA, 201 bp, Homo sapiens
tagagctgggaataattccaaacagcaaatagttcaaaatttattttcaatttagcatatgcatgcatttgcttaaactgtcttaaaaatgagtaaaaaayactgtcagtttgtttcaatcatactgagatgaggaacaatgtttagcattgcatgctagaaaaggacacaggattgggagtcagggctgggtgaccgtca

SEQ ID NO: 7083 - DNA, 201 bp, Homo sapiens
gttgaggggatggcagaaaacatggaagcaaggtctctggtcagcccagggtgctgggcttgtcccaacaccacgtaggcaataagaggacagtacagggkgccgtctctctccctcttcctctctctgtctctctctctgtgtgtgtgtgtgtgtgtgtgtgtaacactatcttcccaatttttactgtctatttgtatt

SEQ ID NO: 7084 - DNA, 201 bp, Homo sapiens
tcccatctgatatctttttgtgtttataattgacacagaaccctgccattctaaaatttacccgggagttgactttggaggagaagaattgaatgtgactkttgttaaaggagtgaatgtttgccaagagacttgcacaaagatgattcgctgtcagtttttcacttattctttactcccagaagactgtaaggaagagaa

SEQ ID NO: 7085 - DNA, 201 bp, Homo sapiens
tttcatagcatgtcaggcaacaggaaaaaactaagttaggattttattttattgtggggaatttatgtgcaaattattgtgcaatttaatgaaaataagccaatgttttatacagaagtacccagaaaattaaataacactatacattgttcaaatagttgccttaatatattttattttctcagcataattagagttgta

SEQ ID NO: 7086 - DNA, 201 bp, Homo sapiens
taaaacttagtatccaaaggcggaagtacttaaccatacctaggaagaaaaggagttgttttgtagaaggggttggggtttgggagatgagccagacacartcagcagggagagcacatgtgttttcatgaagaattatgccgagataggtaatggatgaggaagaaatttgggcttgactgaagtaatgggggctgtcct

SEQ ID NO: 7087 - DNA, 201 bp, Homo sapiens
aggaatggcaagaggagtggctaaaggatttaggatctttggggtcagctagctttgcttttgtgagtttatataatggtttagtcaggatggtaaaactwagtatccaaaggcggaagtacttaaccatacctaggaagaaaaggagttgttttgtagaaggggttggggtttgggagatgagccagacacaatcagcag

SEQ ID NO: 7088 - DNA, 201 bp, Homo sapiens
tcctgtaggaatgcttgaccactgcagtttaggcattttgaagtttttgtgtgtgctggagatgtggctgggttttgtctcacagcagaggcaaggaatcrcaactcagaaatacattgctacttggctgcctctattattgtacaccttgaaggcgaggttaattaagtcctcttgtggggtttgagggctggaatctaa

SEQ ID NO: 7089 - DNA, 201 bp, Homo sapiens
ggctaagggagaagaaggaggaatggagggtggaaagttgcctatagtgaaggaggcaagcccagagaaaagagagggtagagacatggagagaaggggtsggggggtgcttgcccccaggaaagtggttcttgccactaagggtgaaggatcaaggcaggcattcgcgcggtgatcagatacctctgaaacgtgggtgaa

SEQ ID NO: 7090 - DNA, 201 bp, Homo sapiens
gggaggtcccctgatctgagtcacagcaccaaatatcacgtgtgtccatgcgaagagaccaccaaacaggctttgtgtgagcaagaaagctttttaatcayctgggtgcaggcgggctgagtccaaaaagagagtcagtgaagggagataggggtggggacgttttataggatttgggtaggtagtggaaaattacagtca

SEQ ID NO: 7091 - DNA, 201 bp, Homo sapiens
aggtaagcatgacgctttaaatattgcttctagagtaagtctcacatgttgaaatacatggagtgggtcgttttaatcggtttctgtctgaaattatatckaaactctttatctttcctatctatttattcccaaatatttattcagttattcttaaaaaatgtatttttgctttggcttgaaaaaaaattttagggagac

SEQ ID NO: 7092 - DNA, 201 bp, Homo sapiens
atggtgtgtgtgtgtatgtgtgcttgtgcttgtgtgaatatgtattattaactggaaatttgtaaaagtattggaaaaatagtacttacgattttgtgtgygtgtgtgatggagtctcgctttgtagcccaggctggagtgcagtggcgtgatctcggctcactgcaacttccacctcccaggttcaagcgattctcctgc

SEQ ID NO: 7093 - DNA, 201 bp, Homo sapiens
caagtaattcacatttttagattttttattggtaatctgagacaagaagaaatttaaagtaatcttcactaagccatgaaagctcccaacattgttctccrtgagagatgctggcctgcatttattcaaaaacaaaagacccctctgttgccaaagctcggagggcttttcagaaacgatatagttgtaaattataatttt

SEQ ID NO: 7094 - DNA, 201 bp, Homo sapiens
cttttatctcagtctttgagtattgatcatggggtgttggaacaggactttggaatgcttgcagggtaaacctttggcctctgttagtcagggaatgaccyagtttggcaaaacagaggagagttttgaaatatggaactttcccgaggcatacattgtcattttaaagtggtcaatcaaagcccagtaggactgggctgg

SEQ ID NO: 7095 - DNA, 201 bp, Homo sapiens
tgatatccggttgcttctcactaggagaaggatgaaagatgacagagcatttataaccaccatttgttattttcattatcaactgacactggtgtttctcygcccggagcgattttgtcctcccttcacctcaggaaacattcggcaacgtctagagacacttttggttgtcctaatgggagagggtatgcaactggctgt

SEQ ID NO: 7096 - DNA, 201 bp, Homo sapiens
tccaaccattagcgtcaacgctctcttttcagtctgcacaacaaaaacaagcacacgcattgttggaggaacaaactcttcttggggagagtggccctggyaggtgagcctgcaggtgaagctgacagctcagaggcacctgtgtggagggtcactcataggacaccagtgggtcctcactgctgcccactgctttgatgg

SEQ ID NO: 7097 - DNA, 201 bp, Homo sapiens
ctatgtatttccttcccagttctttgaaagagagtgataggaaaaaggaacactattgaaggaaggactgcccagtttcaaacaggtatttatttttctcycctaggcttcccctgcaggatgtttggcgcatctatagtggcattttaaatctgtcagacattacaaaagatacacctttctcacaaataaaagagatta

SEQ ID NO: 7098 - DNA, 201 bp, Homo sapiens
aacccatctctacaaaaaaatatgaaagtatctgtgtgtgtgtgttgctgtgtagtggactacagaactttagaggcagtcacttatttgaatcccattgycgtaactttctactattttatttttccactgtgactcagggagattcaggtggtcccttagtttgcaaacacaacggaatgtggcgtttggtgggcatca

SEQ ID NO: 7099 - DNA, 201 bp, Homo sapiens
aatccccagggggtaggatagtgcagagaagatggcactctccagtgcttaataaaatgcacgtggtctaagctgcccactccctcaaaggcaataaaaawtaggtactatttaaattgaagagtaactactgccccagggaatggacaggttgtcattggaatagccatggttaatggtcccagttgacaactgaaatga

SEQ ID NO: 7100 - DNA, 201 bp, Homo sapiens
ctccatgttttgtgcatacatgaaatctaggcaatacacttgtattcccaaaagcttccacttgaagagatctgtgctctttccaaatataaaccttaccygagaggtggtcatcttggccacacctcagagagggagagaggcagtcttgttgggttgggtggtcataatggggctcagggccaaatccccagggggtag

SEQ ID NO: 7101 - DNA, 201 bp, Homo sapiens
actttatgagaaaattaatcatttatattctaatttcctgagtatgtagagagtatagataatgttcctttatgtagaaatatttaaatgtaagatgattytaaatcagaaagaatatttgattgatttaaaatttttaaatgggctttaatattttcagaggttttctttacttagggatttttggactgacattattgc

SEQ ID NO: 7102 - DNA, 201 bp, Homo sapiens
gcaaaataaatcatgattatggctaggaaaatcagggatgtaagtaagcaaaaatttagaaactacatattgcatgtagtccccaaattcagaaacagtcrtcgttaaacatcttttatttagtctttcagatatttttctacatatacctatttgcacatttcacaaaaaagagttattaactgtggacactctttgact

SEQ ID NO: 7103 - DNA, 201 bp, Homo sapiens
aactccgtggtttttagtatatccacctgattgcacaacgatcaccactgtctagttccagaacatttttatcaccacaaaagaaaggctgtatccaggcygggcacggtggctcacgcctgtaatcccagcactttgggaggctgaggcgggcggatcacggggtcaggagattgaaaccatcctgggtaacacggtgaa

SEQ ID NO: 7104 - DNA, 201 bp, Homo sapiens
ccactgtctagttccagaacatttttatcaccacaaaagaaaggctgtatccaggctgggcacggtggctcacgcctgtaatcccagcactttgggaggcygaggcgggcggatcacggggtcaggagattgaaaccatcctgggtaacacggtgaagccctatctgtactaaagatacaaaaaaattagctgggcatggt

SEQ ID NO: 7105 - DNA, 201 bp, Homo sapiens
gtgctatttctgattgttgtatcttgtagcaaaatttaaagaaaaagtaatttgtgcctttctcaatattcctgttattgttcatgtattctaaaactcastgttactcacttagcttgcttttaatgttttttaaagtgaaaaattgttcccaagtacataaaatctctacactcaagaacaattctagtcaaaagcatt

SEQ ID NO: 7106 - DNA, 201 bp, Homo sapiens
ctgaggcgggcggatcacggggtcaggagattgaaaccatcctgggtaacacggtgaagccctatctgtactaaagatacaaaaaaattagctgggcatgrtggcagatgcctgtagtcccagctactcaggaggctgaggcaggagaatggcctgaacccaggaagcggagcttgcagtgagccaagattgcgccactgc

SEQ ID NO: 7107 - DNA, 201 bp, Homo sapiens
ctttttaagtaaatgaaagtatttgcaaaaataattaccaattgagaacatagttgcctgaaagtttaagaacacaggaaaaatcattaactctttaatayggttgatttcctgtacttaaaaaatgtgagtgtaaagaaaacgcagtgatggagttagatattatggggtgttataaaattagctctaagagtgttcttt

SEQ ID NO: 7108 - DNA, 201 bp, Homo sapiens
cagttacttcaggccatctggatgtatgcatgtaggcttgggcccagaggcctgacatttaacatggataaatgtaaagttcttagaatcatacatacacwttggaaaagatggggcttaatcgcactttataagacttgaaggatgtttgagaatcactatgaaactgctgaaaataccaagaaaatttaattcttatgt

SEQ ID NO: 7109 - DNA, 201 bp, Homo sapiens
tgtgatgaaacccatctctacaaaaaaatatgaaagtatctgtgtgtgtgtgttgctgtgtagtggactacagaactttagaggcagtcacttatttgaaycccattgtcgtaactttctactattttatttttccactgtgactcagggagattcaggtggtcccttagtttgcaaacacaacggaatgtggcgtttggt

SEQ ID NO: 7110 - DNA, 201 bp, Homo sapiens
ggctaagacaggagtagccaagcaagtggcaccacccctggagaaagctattgaacatacagcttcgggggtggagattgtccctgatgattcaggacacrtgtctatttaatgttccacaacaaggaccacttgtcaggtatattgctgtagacatatgttgcagaccagaggaaggagctcagaagtaggaatgtcttg

SEQ ID NO: 7111 - DNA, 201 bp, Homo sapiens
gcaggcacatgagatacttggagaactttaagaaagagtgagtgtgtgtgtgtgtgtgtgtgtgtgtgtgtgtgtctggcaagcaaggtcttgcacacacrcagcactttgggaggccaatgcaggtggatcacttgagcctaggaatttgagaccagtctgggcaatgtgatgaaacccatctctacaaaaaaatatgaa

SEQ ID NO: 7112 - DNA, 201 bp, Homo sapiens
tctggaggtctcaatttgtatcttgggaagcattataaattttccaactccctagacacaaatgtaccaaaaaaaaacccttgttttctataccagtaatygtgtgctttgtcttgcaattcagacatttacaagaaaatctaaatcaccttaaattaagatttatgttaaatgtggtctaaaaccagcagagttatgtat

SEQ ID NO: 7113 - DNA, 201 bp, Homo sapiens
aatgaacaataaacacaacagtagtctggaggtctcaatttgtatcttgggaagcattataaattttccaactccctagacacaaatgtaccaaaaaaaamcccttgttttctataccagtaattgtgtgctttgtcttgcaattcagacatttacaagaaaatctaaatcaccttaaattaagatttatgttaaatgtgg

SEQ ID NO: 7114 - DNA, 201 bp, Homo sapiens
aatttttattaggtcagagagatgcttattaatcacgagccacagtttcttcttaatgatttttccttttgattaatatccagagtaagcttttctttgttgttcccatttccatgttcataactctttactcatcttcactctatgtgagtttaccaactagaaattggatagtcattctctgatcccacatgttaaact

SEQ ID NO: 7115 - DNA, 201 bp, Homo sapiens; identical to SEQ ID NO: 865

SEQ ID NO: 7116 - DNA, 201 bp, Homo sapiens; identical to SEQ ID NO: 868

SEQ ID NO: 7117 - DNA, 201 bp, Homo sapiens
ggagaaaatgtgtcctatgtatttccttcccagttctttgaaagagagtgataggaaaaaggaacactattgaaggaaggactgcccagtttcaaacaggwatttatttttctctcctaggcttcccctgcaggatgtttggcgcatctatagtggcattttaaatctgtcagacattacaaaagatacacctttctcaca

SEQ ID NO: 7118 - DNA, 201 bp, Homo sapiens
gggggaaaagatgcttgtaaggtaactcatgagattatgaaaaacacaataggctgcttgagaaaattcatttcaaaatatattttccaatagcataattyaatcatagttttttaaaaaattcagagacaaatgatctgataaattgataagcaacttttaacaaattgaatatacataatatatatttatattatttat

SEQ ID NO: 7119 - DNA, 201 bp, Homo sapiens
acattttacataaatggaatcatgcaatgcagcacattttgcatctggcttttttcacctggcgtgttttcaaggctcattcgtattctagcatatatcartactttgttcctatttaggactaaataagattctattgtatgaataaaacatattttgtttatatacttagtttgatgaacatttgagttgtttctggat

SEQ ID NO: 7120 - DNA, 201 bp, Homo sapiens
tacatttaggcatttgatgcattttaaattaaattttgtatatggtgtaaagtagcaatccaacttaattcttgcatgtgggtattcagttattccattgycttgaaacccttttcaaaatcaattgtctataaatgtaagagtttatttttggaccatcagttctatcctgttgacctatatatgcctatcctaatgcca

SEQ ID NO: 7121 - DNA, 201 bp, Homo sapiens
gcttgccatcgagacatttataaaggagttgatatgagaggagtcaattttaatgtgtctaaggttagcagtgttgaagaatgccaaaaaaggtgcaccartaacattcgctgccagtttttttcatatgccacgcaaacatttcacaaggcagagtaccggtgagtacaattcaaggtgtgtgttctttgtattggtgcc

SEQ ID NO: 7122 - DNA, 201 bp, Homo sapiens
tttcccagaagaataaaatttgctgcgttgctttttgggtgtgagctgcttttgtatttgcctaatgcctttaatgcaaatttctttctttctctcttgcttttttttaaaaaaaatagaaatgtttgtcttcttaaaacatctgaaagtggcacaccaagttcctctactcctcaagaaaacaccatatctggatatagc

SEQ ID NO: 7123 - DNA, 201 bp, Homo sapiens
ttacacacagtcttgattaccataactttgcagtaagttttgaactcagacagtctgagtgcttttattttgtcctttttcaagattaatttggttattcyggatcttttgcatttccatatgaattttaggatggttgtcaatttctgcaatagaaaagcagcaggattttgatagagagtgcattgaatctgtagacca

SEQ ID NO: 7124 - DNA, 201 bp, Homo sapiens
caggacttcacttggtcccagcactactccgggggccacaccatgaccaacaagttcactgttggcaaggaaagcaacatacagacaatggggggcaagaygttcaaggtgagaggccactggctgtccccctccttccccaggcctccatctgacttctccttctcaaacatggcctccccgctcccgagctgaggcttc

SEQ ID NO: 7125 - DNA, 201 bp, Homo sapiens
aaaatggtgctgacagatttgttccacatggggttgccacaaacatttgatgtgtgaaaaacacagtttctcagggacactgaggctggaaggtcacctgrgcctagagttcaagactgaagtaagctatgatcatgccactgcactccatcctgggcaacagagccagatcccatctctaaaaaacctaaaaaataaaaa

SEQ ID NO: 7126 - DNA, 201 bp, Homo sapiens
gaaccctggaggcggaggttgcagtgagccgagattgtaccactgcattccagcctgggtgacagagtgagactttctctcaaaaaaaaaaaaaaaaaaaagacttgagacttgaggacaggtacttggtatttccagaacccagtgaactagagatgctcaggtgatgtttgttgaatgaatcaatggtgtgtctgaagt

SEQ ID NO: 7127 - DNA, 201 bp, Homo sapiens
gagcttctcaaggctgctgagcagtacaatcactggggagtttgtcaaaatgcagattctagggccccaccccagacctaccaaaccagaattttgggggstcaggtcacagggatttctatttttcacaagccctcccttcctacatccccagtagcgtatgaacacagccttacagcctattccacatagatctgaaca

SEQ ID NO: 7128 - DNA, 201 bp, Homo sapiens
gggtcttactatgtaggccacactgatctcaaactcctggtctttgattcttgagagtaaaactagaagtatcatcatgggaaaatattgttctcagaggytccagttagctctgacattctagggatcgatgccagctagtatttcagattttagtggaggaaagaggaaggggagtttaatcaaggaattgataactct

SEQ ID NO: 7129 - DNA, 201 bp, Homo sapiens
tgatgagctgcgaagctggaagcttcattcaatggggtgagacaattttgtcttctgctgtgtatctccatcccctaacacatagccttgtgctagtaagwacttattgagtgaatgaaatgatgaatatatgacttacagttctcattgtaattttttttttttttttgagaccaagtctcactctgtcacccaggctgg

SEQ ID NO: 7130 - DNA, 201 bp, Homo sapiens
agatgggaggtagaaggacaaatgctttcttgtgtgtaaggatggggcctgggaagccaatgtggcggaaggacattgagggtcctggcagagtagggatrcatccatgggctggataggaaagcagatgaggctgagtaggggatgaactggggaaaattgatgagctgcgaagctggaagcttcattcaatggggtgag

SEQ ID NO: 7131 - DNA, 201 bp, Homo sapiens
gatcacagaaagggctctgacctcaagaaacatgtgatctaggtggaagcatgagtcacatatgcatgaaaaacacagcaggcaatgaatgacaggtaagstggaaagagaattcacctggttaccaggagatatgggctctgttcctagttctggcacccagtgatgaccttgggagcccagtggcttcacctctgtgaa

SEQ ID NO: 7132 - DNA, 201 bp, Homo sapiens
gtctcagccttctcagaatgtccaatccttttcataatttaaccgcttgctctgcataattacttttctcctgcttatgagcttagagcaatagtagttcmcaataactagagatttaataaggctaaattacaacgagtgtcctgcagaattacacaccgcattaacaccaaatgagttcattagaaattcattaggaat

SEQ ID NO: 7133 - DNA, 201 bp, Homo sapiens
atctttctaagaacaatacacagcctctccccacccacccatccagcaaggacccatgaattccaccattttgccaagacttattactaattaagtgaacyaggtaagcattaaactagcagtgttgctgtttcccctccagaatgaataattactcataatgagcttggataataagtctctaaataacagagttaacta

SEQ ID NO: 7134 - DNA, 201 bp, Homo sapiens
ggttttaatgacaataattgagaagctgtgatcatcagatgagataacctatcagtgactgctctctgaactgtggtacaagttacctttcaacctggaayagcacctcaaacatgaaggaatctatccctatggtggaaattcaggcccaagcagtgggcaagtggggtagatcatgtggggacaaggccacctttggtt

SEQ ID NO: 7135 - DNA, 201 bp, Homo sapiens
ggcgggtggatcacttgaggccaggagtttgagaccagcctggccaacatggtgaaaccctgtctctgctaaaaatacaaaaattggccgggcatggtggygcgcaccagtactcccagctacctgagaagttgaggcaggagaattgcctgaacctgggaagcagaggttgcagtgagccgagatcggaccactgtactc

SEQ ID NO: 7136 - DNA, 201 bp, Homo sapiens
ggcaggcggatcgcctgaggtcaggagtgtgagaccagccaggcctacatggtgaaacctcgtctctactaaaaatacaaaaattagtctggcatggtggygcttgcctgtaatctcagctaccggagagggtgaggcaggataattacttgaacccaggaggtggaggctgctgtgagctaagatggtgccactgcattc

SEQ ID NO: 7137 - DNA, 201 bp, Homo sapiens
ttcccactgtgccagggcacctgcctccctcctggcaagctcctttagtgaacttgggagctactcatagcatctttaaagatcaccactagggccgggcrcagtggcttatgcttgtaatccaagcactttgggagactgaggtgggcagatcgcttgagctcaggagtttgagaccagcctggacaacatggtgaaacc

SEQ ID NO: 7138 - DNA, 201 bp, Homo sapiens
taaacagtagttcaaaataggcagctaggctggacgaattgccagtgagtgagaataacagtagatatccttcaacaatcacctgtgaaatgctagatccygtactaagcacttttgctatgtactttcatttaatctcattaaaactctggaagatcggtatttttttccccatataataatgaatgaggccaggtgatg

SEQ ID NO: 7139 - DNA, 201 bp, Homo sapiens
agggttaggagtgcctctgtcactaacttgtgagtcactggacctctctgagcctcatcttggtcatgtgtaaaatgaattagtaagaccttcccttcctyggtcacagaggagttacaaggataaagggtaaaaatccttgctttgggaggccaaggcgggcagaccattgagccagaagttcaagaccagcctgggcaa

SEQ ID NO: 7140 - DNA, 201 bp, Homo sapiens
ctggtctttgattcttgagagtaaaactagaagtatcatcatgggaaaatattgttctcagaggctccagttagctctgacattctagggatcgatgccarctagtatttcagattttagtggaggaaagaggaaggggagtttaatcaaggaattgataactctgatagttcacttactctatgcaagacctgtaaggtc

SEQ ID NO: 7141 - DNA, 201 bp, Homo sapiens
gcattccagcctgggcgacagagagagacccggtctcaaaaaaaagagctctggggccaggcacaggggctcacacctgtaatcccagcactttgggaggstgaggcaggtggatcacctgaggtcaggagttagagaccagcctggccaacacagtgaaaccccatctctactaaaaatacaaaaattagccaagtgtgg

SEQ ID NO: 7142 - DNA, 201 bp, Homo sapiens
ctcttctttatctctattggggtatagttgttctattggttctattgcctcataaaacttcactgtgatatggaggcagtttgagttcattcacccctccrgggaggttctcaatgagggtctgaacaaataggtaaacccaggagaaggggggaagaggcgggcatgggtggatggaaggtggagggtcagatgtacact

SEQ ID NO: 7143 - DNA, 201 bp, Homo sapiens
ccctcactgtgagcctgtgacctgggccagagaccctctggggtcccgtgtaggtctagaaagggcccttccctcctccctgaagctctccagcagggaasacatgatgagggaggcagtgtttgtgtgacccctttgcttctccttctttgatccttctctctctctctctctcattctcgctttcttgtgcccacatct

SEQ ID NO: 7144 - DNA, 201 bp, Homo sapiens
ttgatgctaagtagcctgactgcagcactcacactcaaccgcttctgggacacgagactggaagcccggaagatccttcccagaatataaataaaggaggyggtccaggtgggctcctcaaaggacagccaccactccattccttttccatgagggacatcaggccccttctaccagatcttctgatttatcaagagaagt

SEQ ID NO: 7145 - DNA, 201 bp, Homo sapiens
acagggataagtgagggagcacacagatttgacgacagagctgaggtttgatgctaagtagcctgactgcagcactcacactcaaccgcttctgggacacsagactggaagcccggaagatccttcccagaatataaataaaggaggtggtccaggtgggctcctcaaaggacagccaccactccattccttttccatgag

SEQ ID NO: 7146 - DNA, 201 bp, Homo sapiens
caggtgtgaaccagcccacctggctattttttcctttattattatttttcttaggtccatgaaggttcatattgcaagaagtccacagggtatagagcaaygtggctccctctttctcttccccagagggagctgctgcatggtttccgtgtgctgtcttccactttgctgcatcttcacttcagggaggcctgcagtctg

SEQ ID NO: 7147 - DNA, 201 bp, Homo sapiens
ttctattgcctcataaaacttcactgtgatatggaggcagtttgagttcattcacccctccggggaggttctcaatgagggtctgaacaaataggtaaacycaggagaaggggggaagaggcgggcatgggtggatggaaggtggagggtcagatgtacacttagactctagggaaggggtgggagcatggctgagtcagt

SEQ ID NO: 7148 - DNA, 201 bp, Homo sapiens; identical to SEQ ID NO: 885

SEQ ID NO: 7149 - DNA, 201 bp, Homo sapiens
caatgggggtgataggagggacaggagggactggagtgtcctggttttgactcatagggcttgggcggggtgcctgggaagaactttgagaggctatgggyggctgggaagggggggcggggtcacccagacatcaggtgcctggtgtcctgggttgagaagcattctgaggcagcatttgggtttggcagctgtcctggg

SEQ ID NO: 7150 - DNA, 201 bp, Homo sapiens
cagaggttcagaatggagtgatggctatcgtcaagaccagacacactcagacctctcacctctcaggctctgcattcttgtctagattgcacttcttctttttttttttttttttagacagagtttcactcttattacccaggctggagtgcagtggcgccatctccactcactgcaacctctgcctccctggttcaagtg

SEQ ID NO: 7151 - DNA, 201 bp, Homo sapiens
tttttttttttagacagagtttcactcttattacccaggctggagtgcagtggcgccatctccactcactgcaacctctgcctccctggttcaagtgattmtcctgcctcagcctcccaagtagctgggattacaggtgcctgccaccatgcctggctaattttttgtatttttagtagagagagggtttcatgttggcca

SEQ ID NO: 7152 - DNA, 201 bp, Homo sapiens
acagaggttcagaatggagtgatggctatcgtcaagaccagacacactcagacctctcacctctcaggctctgcattcttgtctagattgcacttcttctttttttttttttttttagacagagtttcactcttattacccaggctggagtgcagtggcgccatctccactcactgcaacctctgcctccctggttcaagt

SEQ ID NO: 7153 - DNA, 201 bp, Homo sapiens
caccaaatgagttcattagaaattcattaggaatgatttctgcggctgccacaggaattaatcacggtttgccagcggcaggagagggggcaatgaatgaytgcatgggagcgggacgaccttttgccatctgactttcttctgaagcaatatctttcaagggtcatgggctgctttggtagggagattgcttggacgttg

SEQ ID NO: 7154 - DNA, 201 bp, Homo sapiens
tcacttgaacccttgaggcagaggttgcagtgagccgagatcatgccactgcactccagcctgggtaaaaagagtgaaactctgtctcagagaaaaaaaaraaaaaggtgacggtggccaggcatggtggctcacacttgtaatcccaaaactttgggagactgaggcagaaggattgcctgagcccaggaggttgaggtg

SEQ ID NO: 7155 - DNA, 201 bp, Homo sapiens
gacagaggttcagaatggagtgatggctatcgtcaagaccagacacactcagacctctcacctctcaggctctgcattcttgtctagattgcacttcttctttttttttttttttttagacagagtttcactcttattacccaggctggagtgcagtggcgccatctccactcactgcaacctctgcctccctggttcaag

SEQ ID NO: 7156 - DNA, 201 bp, Homo sapiens
ctgaactgtggtacaagttacctttcaacctggaacagcacctcaaacatgaaggaatctatccctatggtggaaattcaggcccaagcagtgggcaagtsgggtagatcatgtggggacaaggccacctttggttggcccttaaaaataccagaacacaggggcagcctgcacagctctaacactgcagaacagaagtca

SEQ ID NO: 7157 - DNA, 201 bp, Homo sapiens
tttggggtaccataaattccactcatataagagtgaatttttgcccgcccttccttccttccttccttccttccttctttccctccctccctccctccctctctccttccttccttccttccttccttctttcctttcttacttcttcctttttttttgacaaattctcgctctgttgcctaggctggagtgcagtggcac

SEQ ID NO: 7158 - DNA, 201 bp, Homo sapiens
ttttggggtaccataaattccactcatataagagtgaatttttgcccgcccttccttccttccttccttccttccttctttccctccctccctccctccctctctccttccttccttccttccttccttctttcctttcttacttcttcctttttttttgacaaattctcgctctgttgcctaggctggagtgcagtggca

SEQ ID NO: 7159 - DNA, 201 bp, Homo sapiens
gttttggggtaccataaattccactcatataagagtgaatttttgcccgcccttccttccttccttccttccttccttctttccctccctccctccctccctctctccttccttccttccttccttccttctttcctttcttacttcttcctttttttttgacaaattctcgctctgttgcctaggctggagtgcagtggc

SEQ ID NO: 7160 - DNA, 201 bp, Homo sapiens
tgttttggggtaccataaattccactcatataagagtgaatttttgcccgcccttccttccttccttccttccttccttctttccctccctccctccctccctctctccttccttccttccttccttccttctttcctttcttacttcttcctttttttttgacaaattctcgctctgttgcctaggctggagtgcagtgg

SEQ ID NO: 7161 - DNA, 201 bp, Homo sapiens
tgaatgaatcaatggtgtgtctgaagtctcagagctaagacatgagaaggctgagtgactctaaagcccaggttcccccactgagtcattacaaagagaargtacaggctctggggatttttgcaagggacaatctctacaggttggactaatcaaaaaagcctgattggaggaggcgggggtgaaggacaattagaattc

SEQ ID NO: 7162 - DNA, 201 bp, Homo sapiens
ataactcacaatcttcctgtgcccagctatcatcacctccactgatagaaaaatgtaagttatctcaccataacctttgctttgtcagtactgcacaaaamccgcttcagcacacagcataagcaacagtctataaactctccagcaagactttgtctccttgcagtcagctcctctcttgctgtcctgcccagtgcaccc

SEQ ID NO: 7163 - DNA, 201 bp, Homo sapiens
tcataaaacttcactgtgatatggaggcagtttgagttcattcacccctccggggaggttctcaatgagggtctgaacaaataggtaaacccaggagaagrggggaagaggcgggcatgggtggatggaaggtggagggtcagatgtacacttagactctagggaaggggtgggagcatggctgagtcagtcagctgagtg

SEQ ID NO: 7164 - DNA, 201 bp, Homo sapiens
gttggcggcagcagggtaaagcaaaaaaggagagcagataagctgtaagtctgcctttcttcatggtccagaacacatagccctcctgtgcaaataactcrcaatcttcctgtgcccagctatcatcacctccactgatagaaaaatgtaagttatctcaccataacctttgctttgtcagtactgcacaaaacccgcttc

SEQ ID NO: 7165 - DNA, 201 bp, Homo sapiens
ctatcattaggcctctggtgacccatgtggagttctaataatagaaaaggagtcaggttggcggcagcagggtaaagcaaaaaaggagagcagataagctrtaagtctgcctttcttcatggtccagaacacatagccctcctgtgcaaataactcacaatcttcctgtgcccagctatcatcacctccactgatagaaaa

SEQ ID NO: 7166 - DNA, 201 bp, Homo sapiens
aatgtatacatatttgcgtgcatttatacatatatctctgaaggatacataagaaactagtagttttgagttgggtgccatggcttacacctgaaatcccwacagtttggtaagctgaggcaggaggatcacttgagcccagaagttccagaccagccttggcaacatggcaaaactccatctctaaaaaaaaaatacaca

SEQ ID NO: 7167 - DNA, 201 bp, Homo sapiens
aaggagacctgcagagaatgaaacagacacataaaggaaaggtatggggtagaagaagggagggaagggttcctgacgtttttcagattctggttctagtkcctcatgaacctagactttgtgtcctatccctgggctccttgagatccttctgcattgttagaatattaggttgcaccatctgaaattgttgtttttata

SEQ ID NO: 7168 - DNA, 201 bp, Homo sapiens
gatggattgggaggaggaaagatttcatagaaggcacatgagctgggtagaatctttggggagaggtaactgtcacggacactctttgggcacctatccarcccacagtcccttcttcaagaactgtccacccagagcagttggccctcacggtcgagatggttggtaccacatgacgcttttggtgggatcaagcatctg

SEQ ID NO: 7169 - DNA, 201 bp, Homo sapiens
cggcctcccaaagtgctaggattacaggtgtgagccactacgtccagccctcctatgcaagttctaagtggaaaagagccaggatgggatggattgggagsaggaaagatttcatagaaggcacatgagctgggtagaatctttggggagaggtaactgtcacggacactctttgggcacctatccagcccacagtccctt

SEQ ID NO: 7170 - DNA, 201 bp, Homo sapiens
acaactggctaatttttatttttattttttggagacggagtctcactctgtcaaccaggttagactgcagtggcacgatctccgctcactgcaagctccgyctcccaggttcacgccattctcctgcctcagcctcctgagtagatgggactacaggcacccaccaccacgcctggctaatttttttgtatttttagtaga

SEQ ID NO: 7171 - DNA, 201 bp, Homo sapiens
agggttttaccatgttagccaggttggtctccatctcctgacctcatgacctgcccatctcagcctcccaaagtgctgggatttcaggcatgagcttctgygtctggccctacaactggctaatttttatttttattttttggagacggagtctcactctgtcaaccaggttagactgcagtggcacgatctccgctcact

SEQ ID NO: 7172 - DNA, 201 bp, Homo sapiens
ttaaacgttttttaaataggaatggtagccaaatgcaatgccatacaattaaataacaaaataataagtaaagtcagagttgggggaggagccaggtgggwttccctctccccttctcatttctcacccttcttctttcttcctctttcccctccccctcctctctttcttcaggaagccacctgtcctgttttctccagc

SEQ ID NO: 7173 - DNA, 201 bp, Homo sapiens
cccttcttctttcttcctctttcccctccccctcctctctttcttcaggaagccacctgtcctgttttctccagcccacagtgaggtttctttgaactcaytcattcattcacttatttatttattttttgcgacagggtcttactctatcactcaggctggaatgcagtatatgatcatggattactgcagcctccacct

SEQ ID NO: 7174 - DNA, 201 bp, Homo sapiens
gaccaggggagtcttgcagctccattctctgtaccaaggcaagtcaaacaggtaaagcagatcacagaaagggctctgacctcaagaaacatgtgatctakgtggaagcatgagtcacatatgcatgaaaaacacagcaggcaatgaatgacaggtaagctggaaagagaattcacctggttaccaggagatatgggctct

SEQ ID NO: 7175 - DNA, 201 bp, Homo sapiens
atgttgcctaggctggtcttaaactcctggccggaagtgattccccagccttggcctctcaaagtgctgggagtacaggcatgagccactgcgtccagccyttttctatgtctatatatacagtctcaggtattcagctgtagcaacagaaagcaacctaagacatacattttaatcaaaagtataataagaaaatttcag

SEQ ID NO: 7176 - DNA, 201 bp, Homo sapiens
tatgacagaagatgaggtagggaaatgggcaagggccacgaacctagatttacctctaaactcccatggcccaatccattcatccgactcccagggtcacrtgactttgctcccaggcctgcatcttccatccatcagctttttcatgccaaacacccaaattaaatggataaccaagacattttaggagacaaggtagca

SEQ ID NO: 7177 - DNA, 201 bp, Homo sapiens
ataatattctacatgtatccgcagtgattcaaacttaatatacacagagaaaagtatacatcctcctaggtacacagatagaaggacacatatacatcatrtttcatacatgcatgcaaatctatgtatagtacaacagacataaatgcacacgggcagtatgcatttctacacagagccacacatactggttacatcgat

SEQ ID NO: 7178 - DNA, 201 bp, Homo sapiens
cttgcagtcagctcctctcttgctgtcctgcccagtgcacccttgcaacatattttcatactttctctaagaaatctgactttttttttttttttttttttacctacaactgtcttggtaaattcatttttttttttttttttgagacagagtcttgctctgttgcccaggctggagcgcagtgccacgatctctgctcac

SEQ ID NO: 7179 - DNA, 201 bp, Homo sapiens
gcctcccgagttcaagcgattcttctgcctcagcctcccaagtagctgggattacaggcatgcaccaccatgccaggttaattttgtatttttagtagagrcagggtttctccatgttggtcaggctggtctagaactcccgacttcaggtgatccacccgcctcggcctcccaaagtgttgagattacagacgtgagcca

SEQ ID NO: 7180 - DNA, 201 bp, Homo sapiens
gaaccctggaggcggaggttacagtgagccgagatcacaccattgcactccagcctgggcaacagggcgaggctccgtctcaaaaaaagaaaaaaaaaaaagaagtgaagaaaccgaggctcagggagaccaagtaatgtgtctagggccttgcagctagaacatggtgggaccagggatttgaaccccagctatttgcct

SEQ ID NO: 7181 - DNA, 201 bp, Homo sapiens
acgcgatcaaatgctgcttcagagctctaggaagctgggtgtgtcttctgtgctttgtaaaaaagaaacgaaaaaaacattagcaaatccccagcccaggyagccggctggctgagggcggactcttggaactgggcggtgggaggtgggggacgggggagggattggggggcccttgctccaaagccaaagagcgggaaa

SEQ ID NO: 7182 - DNA, 201 bp, Homo sapiens
gccttggctgggtttgaaaccatgatttcccaccagcaattgtagggccttgggcaagtcatttcactcccctgagcctcatatctctagtatgcaaaaggagactacatacaatctctagctccaagagctgtggtgaagattaaacaagacagtgcatgaaagcacctggcatgttgcctgccacataatgaatgctag

SEQ ID NO: 7183 - DNA, 201 bp, Homo sapiens
ttctcatctaaaaagagggggctggactcatttctgcaaggcccctcccggttggagcggttccctgcaattcccttccttctctgaacttgaaactcttycctcccccatccccttggggtggcccctggattatctgggtggtgcttatccagtctgccgccttgagagaaaatgttgccctgcagctgtgatttacag

SEQ ID NO: 7184 - DNA, 201 bp, Homo sapiens
actcagcgtgacttgcccaagtcagtggcagaggccattggcacccaggaccctgtgatgagtggtgtcaccacgtcctgcctaggagaggaaaccaaagkgttagcatggagaccaggtttgacaagtcacttcttcacacagtcattcagcaaacacaggcctcttactgtgccaaacactgtgggcagagagaccagt

SEQ ID NO: 7185 - DNA, 201 bp, Homo sapiens
tgcccaggctggagtgcaatggcaggatatcggttcactgcaacctccacttcccaggttcaagtgattctcctgcctcagcctccctagtagctgggatwacaggcgcccaccaccacacccggctaattttgtgtatttttagtagagatggggtttcaccatgttggccaggctggtctcaaactcctgacctcaggt

SEQ ID NO: 7186 - DNA, 201 bp, Homo sapiens
aaccttcggctcccacgttcaagtaattctcctgcctcagcctcccgagtagctgggattacaggtgtgcaccaccacgcccggctaatttttttttttttgtatttttttagtaaagatggggttttaccatgttggccaggctggtcttgaactcctgacctcaggtgatccacccagctcgacctcccaaagtgctgg

SEQ ID NO: 7187 - DNA, 201 bp, Homo sapiens
ccaggcatggtggcaggcgccttgtagtcccagctactggggaggctgagacaggagaatggcatgaatccaggaggcggagcttgcagtgagccaagatyacgccactgcactccagcctgggtgacagagcgagactccatctcaaaaaaagaaaaaaaagaaaaaaaaagaaatcctgggctcaagcagttctcccgc

SEQ ID NO: 7188 - DNA, 201 bp, Homo sapiens
ttgatggcagtccctttagatcccctgtcctgatgctgaccactgctctgatggccggtttccctgcctatacctccatattccccactccctgcccaccycatcagtctatttgttcccggaaagcagggaccttgactagcacccagtgcagtgctcagtacatagcaggagctcaaggaatatttgttgtctgaatga

SEQ ID NO: 7189 - DNA, 201 bp, Homo sapiens
cctcctcccacattctgctctgaaaccttgtttatctttctaagaacaatacacagcctctccccacccacccatccagcaaggacccatgaattccaccrttttgccaagacttattactaattaagtgaactaggtaagcattaaactagcagtgttgctgtttcccctccagaatgaataattactcataatgagctt

SEQ ID NO: 7190 - DNA, 201 bp, Homo sapiens
tgacatttggaaagaagttggcttggggcttctgtgaaattttccttattcttaagaaagtcatctcagaagtgaagactcatttacctgtcattggattytgtaatgtgagagtgtggggtatggaaatgctgcagccatttcgtgaccttgaggatgcagaattaagcagagtggagaagtggaaatgacccagggcct

SEQ ID NO: 7191 - DNA, 201 bp, Homo sapiens
gactctcctttctgaggccagcacaaggggttgagaacaagagcccttccacatggtcacagcccgttcttagtgtgtattcactgctggactggccactrcctcattcagggctctactgccaagcctcaaactttttttctgtctctctctctctttttgagacagggacacgttctgtggcctggctgaagtgcagtg

SEQ ID NO: 7192 - DNA, 201 bp, Homo sapiens
ccttcttctgtcagtgtacttctgtgtttcttggagagctgctccttgaagatactgctgcatgtgggtctctgtgggactgtcagttaagagcctccacyggcctcacccacccccagagggaatacatgtcctcggctgagcccattgggctttctctcctggtattttttagtagctgatatttatgaagtgcttgct

SEQ ID NO: 7193 - DNA, 201 bp, Homo sapiens
ctcaaactttttttctgtctctctctctctttttgagacagggacacgttctgtggcctggctgaagtgcagtggcacgatcacagctcactgcagccacmgcttcccaggcttgagagatcctccccatctcagcctcccaaggagctgagactacagtcatgcaccaccttacccagataatttttggtagagacaggg

SEQ ID NO: 7194 - DNA, 201 bp, Homo sapiens
gaagtggggtgacttaggggctgagcctcagcaactgggagagtttataagctgggatagcagacccctcagcaccacccattctcctcatccctctgctmtctggcctccagcctcccagcagcatggctttcaccggcaagttcgagatggagagtgagaagaattatgatgagttcatgaagctccttggtgagtgag

SEQ ID NO: 7195 - DNA, 201 bp, Homo sapiens
agcctaatacgtgctacctgacctaaggtccttccagctctgtgcaatttgcagcctttcactcttgtgggccagcctcaacctggacagatgtcacagcycaggtcacaggcagccttctcttgcctcctcccacattctgctctgaaaccttgtttatctttctaagaacaatacacagcctctccccacccacccatc

SEQ ID NO: 7196 - DNA, 201 bp, Homo sapiens
tgctggcaatggggtgacagcacttccccagggtgaataacctcggggctctgtccctccaggtcctgcccacatcataaaacagcaagtgcttcctcttyaggacaggagggagaagaagtggggtgacttaggggctgagcctcagcaactgggagagtttataagctgggatagcagacccctcagcaccacccattc

SEQ ID NO: 7197 - DNA, 201 bp, Homo sapiens
tactgacatacctcagagcatagttgtgggaatgaagtgagaatacagatgaagctatcgcataaaggatattattctttgggaagttgttggtatgtatsctcagcagaagatgtggacttagagatttggatggtgtcttgctggccatccactcccaaaatttcgtgagcaaaggcactgtgtgtgcccactgtgcaa

SEQ ID NO: 7198 - DNA, 201 bp, Homo sapiens
gaaatcaagcgcagcgccggtgggccggcactgctgggggacccagtacaccctccgcagccgctggcccaggtgctaagtccctcattgcccggggccascagggccggccggctgctcccagtgcggggcccaccaagcccacgcccaccggcaactccagctggcccgcaagcgccgcacgcatccgcacgcagcccc

SEQ ID NO: 7199 - DNA, 201 bp, Homo sapiens
gcgcagcgccggtgggccggcactgctgggggacccagtacaccctccgcagccgctggcccaggtgctaagtccctcattgcccggggccagcagggccrgccggctgctcccagtgcggggcccaccaagcccacgcccaccggcaactccagctggcccgcaagcgccgcacgcatccgcacgcagccccagttcctg

SEQ ID NO: 7200 - DNA, 201 bp, Homo sapiens
ctgctgggggacccagtacaccctccgcagccgctggcccaggtgctaagtccctcattgcccggggccagcagggccggccggctgctcccagtgcgggrcccaccaagcccacgcccaccggcaactccagctggcccgcaagcgccgcacgcatccgcacgcagccccagttcctgctcgcgcctctccctccacacc

SEQ ID NO: 7201 - DNA, 201 bp, Homo sapiens
tacaggcgtgagccaccgcgcctggcctccaattctattttctattctccatattttaggaccaggaaggcagatgctggccactcagccactctcatccygctttcctactccagaccttattaggctaccgtgacaccttgtctgctaagcaacacatgtctgcaatgggagaaatcccatttgccacccttccctaaa

SEQ ID NO: 7202 - DNA, 201 bp, Homo sapiens
gttattgtatatctgttacagttgataagaaagaaaacaataatgagggagaaggagagaaatagcaaaagagggaggaagagagtagaaaatataaggcygggcagggtggctcacacctgtaatacccgcattttgggaggccgaggcgagtggatcacttgaggtcaggagttcgaaaccagcctggccaacatggca

SEQ ID NO: 7203 - DNA, 201 bp, Homo sapiens
gtcagcctccccctgctccggaaactcctgtcagctcctctgctctgtccctggagaccgcttgtctctgctggaggcttcctcctgataaggctgcttcgtgtgtgtgtgtgtgtgtgtgtgtgtgtgtgtgtgtgtgtatgtgtgtgtgtgtgtgtatgtgtgtgtgagagagagagaaagaggagcaggaggtggggg

SEQ ID NO: 7204 - DNA, 201 bp, Homo sapiens
tcagcctccccctgctccggaaactcctgtcagctcctctgctctgtccctggagaccgcttgtctctgctggaggcttcctcctgataaggctgcttcgtgtgtgtgtgtgtgtgtgtgtgtgtgtgtgtgtgtgtgtatgtgtgtgtgtgtgtgtatgtgtgtgtgagagagagagaaagaggagcaggaggtggggga

SEQ ID NO: 7205 - DNA, 201 bp, Homo sapiens
acttgctctgaattatttgaaatttttatatatataacttaaaaaaatccatgatgtgtgtgtgtgtgtgtgtgtgtgtgtgtgtgtgtgtgtgtgtgtgtctgtctgtctgtctgcctgttagactaaagtaagagtcctggctggagttagaaattccaagattggagattaaagcctggtaaaatgtggcagagttgg

SEQ ID NO: 7206 - DNA, 201 bp, Homo sapiens
atacactggggctctgtgactttggcaaggtatactttgtcaaggtaacacttcactgaacctctgtttgctcctaggtgaaatgggggcaataacagtayatacttcatagagctgttctgaagattaaataagatcattcatgtaaaacactcagctgagtgccaaatgcataataaagatccaataaatgtgagctat

SEQ ID NO: 7207 - DNA, 201 bp, Homo sapiens
aggcccggcgagaaatcaagcgcagcgccggtgggccggcactgctgggggacccagtacaccctccgcagccgctggcccaggtgctaagtccctcattscccggggccagcagggccggccggctgctcccagtgcggggcccaccaagcccacgcccaccggcaactccagctggcccgcaagcgccgcacgcatccg

SEQ ID NO: 7208 - DNA, 201 bp, Homo sapiens
cagcctccccctgctccggaaactcctgtcagctcctctgctctgtccctggagaccgcttgtctctgctggaggcttcctcctgataaggctgcttcgtgtgtgtgtgtgtgtgtgtgtgtgtgtgtgtgtgtgtgtatgtgtgtgtgtgtgtgtatgtgtgtgtgagagagagagaaagaggagcaggaggtgggggaa

SEQ ID NO: 7209 - DNA, 201 bp, Homo sapiens
cacttgctctgaattatttgaaatttttatatatataacttaaaaaaatccatgatgtgtgtgtgtgtgtgtgtgtgtgtgtgtgtgtgtgtgtgtgtgtgtctgtctgtctgtctgcctgttagactaaagtaagagtcctggctggagttagaaattccaagattggagattaaagcctggtaaaatgtggcagagttg

SEQ ID NO: 7210 - DNA, 201 bp, Homo sapiens
agcctccccctgctccggaaactcctgtcagctcctctgctctgtccctggagaccgcttgtctctgctggaggcttcctcctgataaggctgcttcgtgtgtgtgtgtgtgtgtgtgtgtgtgtgtgtgtgtgtgtatgtgtgtgtgtgtgtgtatgtgtgtgtgagagagagagaaagaggagcaggaggtgggggaag

SEQ ID NO: 7211 - DNA, 201 bp, Homo sapiens
ctcacttgctctgaattatttgaaatttttatatatataacttaaaaaaatccatgatgtgtgtgtgtgtgtgtgtgtgtgtgtgtgtgtgtgtgtgtgtstgtctgtctgtctgtctgcctgttagactaaagtaagagtcctggctggagttagaaattccaagattggagattaaagcctggtaaaatgtggcagagt

SEQ ID NO: 7212 - DNA, 201 bp, Homo sapiens
tgacaggactctcacttgctctgaattatttgaaatttttatatatataacttaaaaaaatccatgatgtgtgtgtgtgtgtgtgtgtgtgtgtgtgtgtstgtgtgtgtgtgtctgtctgtctgtctgcctgttagactaaagtaagagtcctggctggagttagaaattccaagattggagattaaagcctggtaaaat

SEQ ID NO: 7213 - DNA, 201 bp, Homo sapiens
tactgtccccagctgtctcatctgtgttctcctgccatgggcatctcttgggatggctccacacttcctcctggcctggccacacctaatccttcaaacctagcccttgggtggggagaggggaaggtggccttagcattgccagggaagtatgaactggcacaatcttcatggaggcttcgtcagtgtctggcaatcctc

SEQ ID NO: 7214 - DNA, 201 bp, Homo sapiens
gagaggtaccaaactactatcacaggccacctctgacaggactctcacttgctctgaattatttgaaatttttatatatataacttaaaaaaatccatgaygtgtgtgtgtgtgtgtgtgtgtgtgtgtgtgtgtgtgtgtgtgtgtctgtctgtctgtctgcctgttagactaaagtaagagtcctggctggagttagaa

SEQ ID NO: 7215 - DNA, 201 bp, Homo sapiens
tcataatttaaccgcttgctctgcataattacttttctcctgcttatgagcttagagcaatagtagttcccaataactagagatttaataaggctaaattrcaacgagtgtcctgcagaattacacaccgcattaacaccaaatgagttcattagaaattcattaggaatgatttctgcggctgccacaggaattaatcac

SEQ ID NO: 7216 - DNA, 201 bp, Homo sapiens
aaacctgggagcggaggttgccgtgagccaagattgtaccactgcactttggcctcggcaacggagggagacttcacttcaaaaaaaaaaaaaaaaaaaaaggcatggtggcatgtacttgtagtcccagctgtttgggaggctgatttgggaggatcactggagcctgggaggttaaggctgcagtgagctgagatcaca

SEQ ID NO: 7217 - DNA, 201 bp, Homo sapiens
taaacctgggagcggaggttgccgtgagccaagattgtaccactgcactttggcctcggcaacggagggagacttcacttcaaaaaaaaaaaaaaaaaaaaaggcatggtggcatgtacttgtagtcccagctgtttgggaggctgatttgggaggatcactggagcctgggaggttaaggctgcagtgagctgagatcac

SEQ ID NO: 7218 - DNA, 201 bp, Homo sapiens
ttaaacctgggagcggaggttgccgtgagccaagattgtaccactgcactttggcctcggcaacggagggagacttcacttcaaaaaaaaaaaaaaaaaaaaaggcatggtggcatgtacttgtagtcccagctgtttgggaggctgatttgggaggatcactggagcctgggaggttaaggctgcagtgagctgagatca

SEQ ID NO: 7219 - DNA, 201 bp, Homo sapiens
tgagacataaggaataaggtttgtccagagctttgcacagggtatggcacacagaaggagcctaatacgtgctacctgacctaaggtccttccagctctgygcaatttgcagcctttcactcttgtgggccagcctcaacctggacagatgtcacagcccaggtcacaggcagccttctcttgcctcctcccacattctgc

SEQ ID NO: 7220 - DNA, 201 bp, Homo sapiens
ctgtgatcatcagatgagataacctatcagtgactgctctctgaactgtggtacaagttacctttcaacctggaacagcacctcaaacatgaaggaatctwtccctatggtggaaattcaggcccaagcagtgggcaagtggggtagatcatgtggggacaaggccacctttggttggcccttaaaaataccagaacacag

SEQ ID NO: 7221 - DNA, 201 bp, Homo sapiens
gcccccagccaggggagaaattcttaagcctgtattgttataaactcacagattcatagactatggaaaagcaggacctcagctctcaactagtttaaacwctgtatttcacagacgtggaaactgaggctcagagaggaaaagaaattcatccaaagtcacacagcagagagtgagtgagtctctcagagtagtaatgcg

SEQ ID NO: 7222 - DNA, 201 bp, Homo sapiens
caactagtttaaactctgtatttcacagacgtggaaactgaggctcagagaggaaaagaaattcatccaaagtcacacagcagagagtgagtgagtctctsagagtagtaatgcgggtgtgggcttcactcactgatggagctacagtttctcagtgtgggtaaatggagtaaggtgagctggagaaaagcacctatgtca

SEQ ID NO: 7223 - DNA, 201 bp, Homo sapiens
agagatcctccccatctcagcctcccaaggagctgagactacagtcatgcaccaccttacccagataatttttggtagagacagggttttgccttgttacyggtctggaactcctaggctcaagtcatccacttgcctcggcctcctaaagtgctgggatcccaggtgtgaaccagcccacctggctattttttcctttat

SEQ ID NO: 7224 - DNA, 201 bp, Homo sapiens
gatagtgggaccacaaggaagaggacagtcccttccagctctgccggcagagcctagggagggctctcagcactgttggcgccgatcattctttgttatgsgggctgtcctgtgcatctctggtctctacccactccatgccaaccctgccccctcctcagttatgacaaccaacaatgtttccagatattgccaaatgtc

SEQ ID NO: 7225 - DNA, 201 bp, Homo sapiens
attgccaaatgtcccaggaagacaaagtggcctccagttgagaagcgcgcgtctggagagaaatgctgcaggaagccgagagggtgaggcagtgggagctrgaaggaatggggaaggcagggaagtcagcctccccctgctccggaaactcctgtcagctcctctgctctgtccctggagaccgcttgtctctgctggagg

SEQ ID NO: 7226 - DNA, 201 bp, Homo sapiens
ctgtccccagctgtctcatctgtgttctcctgccatgggcatctcttgggatggctccacacttcctcctggcctggccacacctaatccttcaaacctakcccttgggtggggagaggggaaggtggccttagcattgccagggaagtatgaactggcacaatcttcatggaggcttcgtcagtgtctggcaatcctctg

SEQ ID NO: 7227 - DNA, 201 bp, Homo sapiens
tgtccccagctgtctcatctgtgttctcctgccatgggcatctcttgggatggctccacacttcctcctggcctggccacacctaatccttcaaacctagyccttgggtggggagaggggaaggtggccttagcattgccagggaagtatgaactggcacaatcttcatggaggcttcgtcagtgtctggcaatcctctga

SEQ ID NO: 7228 - DNA, 201 bp, Homo sapiens
cctgcagaattacacaccgcattaacaccaaatgagttcattagaaattcattaggaatgatttctgcggctgccacaggaattaatcacggtttgccagyggcaggagagggggcaatgaatgattgcatgggagcgggacgaccttttgccatctgactttcttctgaagcaatatctttcaagggtcatgggctgctt

SEQ ID NO: 7229 - DNA, 201 bp, Homo sapiens
acgaagggcacacaatgagtgatgcatgaacgtgctcagcccatgtctttcctccccagctccccctcatcccctgcatcctattttcttttccttttttrgggggggtggggatggagtttctctcttgtcatccgggctggagtgcagtggcgcaatcttggctcactgcaacctctgcatcccgggttcaagcaattc

SEQ ID NO: 7230 - DNA, 201 bp, Homo sapiens
tgcaatgagctataatcctgccattgcactccagcctgggcaatagagtgagactccccatctctaataaaataaagataaaaataaaaataaataatacrttttttttaaaaaagctcactatggagatggagtgaaattccacgaagggcacacaatgagtgatgcatgaacgtgctcagcccatgtctttcctcccca

SEQ ID NO: 7231 - DNA, 201 bp, Homo sapiens
attgaattcagctttagatggaaatgaaggagattcatggagagcaagcctgggaaaaggaaatagacgtgcagaggtttcctgaattaataataataatyggccgggtgtggtggctcacgtctgtaatcccagcactttgggaggctgaggcaggcggatcacttgaggttgggagtttgagaccagcctaagcaacgt

SEQ ID NO: 7232 - DNA, 201 bp, Homo sapiens
gaccttaaacgatctgcctgcctcgggccctcaaggagctgggattacaggcatgaaccaccatacctggtcttgaaagtctcattcattccagaacttcrcgagcttggcaagattcagttatatttatattactatcagaagcttggttattattgatgagcacccaccatgtgccaggagcttcacaaacacactcac

SEQ ID NO: 7233 - DNA, 201 bp, Homo sapiens
ttccttatctgtaaaataaaagtattagaagacacagtctttttctggcagggaggaggggacggagtcctgctctgtagcccaggcggaactgcagtggygcgatcctagctcactgcaacctctgcctccagggtttaagtgattcttttgcctcagcctctcaagtagccagtattacaggcacctgccaccatgccc

SEQ ID NO: 7234 - DNA, 201 bp, Homo sapiens
attaatcacggtttgccagcggcaggagagggggcaatgaatgattgcatgggagcgggacgaccttttgccatctgactttcttctgaagcaatatcttycaagggtcatgggctgctttggtagggagattgcttggacgttgttagacatgcctctcaatcttcttccttcttcccagccactgccctagatcaaacc

SEQ ID NO: 7235 - DNA, 201 bp, Homo sapiens
agttccagaccagccttggcaacatggcaaaactccatctctaaaaaaaaaatacacaaattagcagggtgtggaggcatgtaattgtagtcccagctacytgggaggctggtgtgggaggatcacttgtgtccaggaggtcgaggctgcagtgagtcaagatcgcgacactgcactccagcctgggcaacaaagcgagac

SEQ ID NO: 7236 - DNA, 201 bp, Homo sapiens
ccctctccccttctcatttctcacccttcttctttcttcctctttcccctccccctcctctctttcttcaggaagccacctgtcctgttttctccagcccacagtgaggtttctttgaactcactcattcattcacttatttatttattttttgcgacagggtcttactctatcactcaggctggaatgcagtatatgatc

SEQ ID NO: 7237 - DNA, 201 bp, Homo sapiens
gcccaccaccacacccggctaattttgtgtatttttagtagagatggggtttcaccatgttggccaggctggtctcaaactcctgacctcaggtgatccayccacctcagtctcccaaagtgttggaattacaggcatgagccaccgcgtcaggccaagaaattgtattcttctttttatttttttcagccttttaaacct

SEQ ID NO: 7238 - DNA, 201 bp, Homo sapiens
accaccacacccggctaattttgtgtatttttagtagagatggggtttcaccatgttggccaggctggtctcaaactcctgacctcaggtgatccacccayctcagtctcccaaagtgttggaattacaggcatgagccaccgcgtcaggccaagaaattgtattcttctttttatttttttcagccttttaaaccttggc

SEQ ID NO: 7239 - DNA, 201 bp, Homo sapiens
aattttcctgccagtattcacaagggtaaaggccccaatgtcacctacccagccagccttccctggcaatccccactggtcctctttttctaaattaaacwttttagagatggggtcttgctatgttgccgaggctaatcttgaactcctgggctcaagcaatcctcctccttcagcctcccaagtggctgatactacagg

SEQ ID NO: 7240 - DNA, 201 bp, Homo sapiens
cctcattgcccggggccagcagggccggccggctgctcccagtgcggggcccaccaagcccacgcccaccggcaactccagctggcccgcaagcgccgcamgcatccgcacgcagccccagttcctgctcgcgcctctccctccacacctccctgcaagctgagggagtgggctccagccttggccagcccagaaagggac

SEQ ID NO: 7241 - DNA, 201 bp, Homo sapiens
tttttctgcacacactgcatcttccccagggcaaggttagctccattcctgcagaaaccttgcgtgtttactctccactaagtccccaggcttcgcccacrtctggcacatagtaagtgctcaacatatgtctgatgagctaatggcccattaggcctggatcccctctctatgggaaatcatgaacttgcagcaaacaga

SEQ ID NO: 7242 - DNA, 201 bp, Homo sapiens
cttttagttagtggacaagagtgcaggacctgtagccagacatcctcctccgcttaccacctggacatgttatttctgagcctctgtttcctcatctacaygatgggggtaatatcaggactgacatacaagactggttgggaggataggatgataatttatgtaaagcatttagcacaggacttggcgcattgcaggtcc

SEQ ID NO: 7243 - DNA, 201 bp, Homo sapiens
tttctttttcttttttgagatggagtctctctctgttgcccaggctggagtgcagtgtcacaatctcggctcactgcaacctctggctcctgggttcaagygattctcctgcctcagcctcccaagtagctgggactacaggcacccgccaccatgcccagctaattttttgtatttttactagagacagggttttaccat

SEQ ID NO: 7244 - DNA, 201 bp, Homo sapiens; identical to SEQ ID NO: 889

SEQ ID NO: 7245 - DNA, 201 bp, Homo sapiens
gtgtctttagcctgaacatcccatctgggagggctcaccctttgtcctcatgttgtgttccaggtgctccagttcagcacaaactgcccagaatgcaatgyccccgctcagaccaacatgaagctagtacgtatcttttgccaagcagttgggttgctcttcatctgactcaggcatgaagattataatcaggctgggagc

SEQ ID NO: 7246 - DNA, 201 bp, Homo sapiens
cctagtccctctccacagcgttttcggccacccaggcacggaaaggcttctgggactacttcagccagaccagcggggacaaaggcagggtggagcagatmcatcagcagaagatggctcgcgagcccgcgtgagtgcccaggggaaggggtgtaggcgaagggaggagacagctgggccatgccatgatgacctgcctct

SEQ ID NO: 7247 - DNA, 201 bp, Homo sapiens
ggagagcccaggccctgattacctagtccctctccacagcgttttcggccacccaggcacggaaaggcttctgggactacttcagccagaccagcggggamaaaggcagggtggagcagatccatcagcagaagatggctcgcgagcccgcgtgagtgcccaggggaaggggtgtaggcgaagggaggagacagctgggcc

SEQ ID NO: 7248 - DNA, 201 bp, Homo sapiens
tcaacgtgggggtgtgggtggaggctggccagagggccctgtccaccctgggggaggagagcccaggccctgattacctagtccctctccacagcgttttsggccacccaggcacggaaaggcttctgggactacttcagccagaccagcggggacaaaggcagggtggagcagatccatcagcagaagatggctcgcgag

SEQ ID NO: 7249 - DNA, 201 bp, Homo sapiens
gcaagcatggctgccgtgctcacctgggctctggctcttctttcaggtgggtctccgaccctgacttcaacgtgggggtgtgggtggaggctggccagagkgccctgtccaccctgggggaggagagcccaggccctgattacctagtccctctccacagcgttttcggccacccaggcacggaaaggcttctgggactac

SEQ ID NO: 7250 - DNA, 201 bp, Homo sapiens; identical to SEQ ID NO: 896

SEQ ID NO: 7251 - DNA, 201 bp, Homo sapiens; identical to SEQ ID NO: 898

SEQ ID NO: 7252 - DNA, 201 bp, Homo sapiens; identical to SEQ ID NO: 897

SEQ ID NO: 7253 - DNA, 201 bp, Homo sapiens; identical to SEQ ID NO: 899

SEQ ID NO: 7254 - DNA, 201 bp, Homo sapiens; identical to SEQ ID NO: 900

SEQ ID NO: 7255 - DNA, 201 bp, Homo sapiens; identical to SEQ ID NO: 888

SEQ ID NO: 7256 - DNA, 201 bp, Homo sapiens; identical to SEQ ID NO: 890

SEQ ID NO: 7257 - DNA, 201 bp, Homo sapiens; identical to SEQ ID NO: 892

SEQ ID NO: 7258 - DNA, 201 bp, Homo sapiens; identical to SEQ ID NO: 895

SEQ ID NO: 7259 - DNA, 201 bp, Homo sapiens; identical to SEQ ID NO: 901

SEQ ID NO: 7260 - DNA, 201 bp, Homo sapiens
ttgcccctgcagaggccccctgggcaagtcccctgcgccatgtcccttcgtctccttcttcccctaaccaggcctccctccacctgtcttctcagagcagrtaatggcaagcatggctgccgtgctcacctgggctctggctcttctttcaggtgggtctccgaccctgacttcaacgtgggggtgtgggtggaggctggc

SEQ ID NO: 7261 - DNA, 201 bp, Homo sapiens; identical to SEQ ID NO: 916

SEQ ID NO: 7262 - DNA, 201 bp, Homo sapiens; identical to SEQ ID NO: 917

SEQ ID NO: 7263 - DNA, 201 bp, Homo sapiens
ccctcttgggcaggaacctgcacaatttccgctgtaagcaccccgcagggctgatatgtggtgtgaacagcatacacacctgggtgtgaccccagcctgamacctgctggtcacatggccacgggcaccacatgacccttcaaaggctgtaagacgggttcaagcagtgccgcctcacaaggtttccaggaagattagata

SEQ ID NO: 7264 - DNA, 201 bp, Homo sapiens; identical to SEQ ID NO: 918

SEQ ID NO: 7265 - DNA, 201 bp, Homo sapiens; identical to SEQ ID NO: 919

SEQ ID NO: 7266 - DNA, 201 bp, Homo sapiens; identical to SEQ ID NO: 920

SEQ ID NO: 7267 - DNA, 201 bp, Homo sapiens; identical to SEQ ID NO: 921

SEQ ID NO: 7268 - DNA, 201 bp, Homo sapiens; identical to SEQ ID NO: 922

SEQ ID NO: 7269 - DNA, 201 bp, Homo sapiens
cacgaccccctgattcagcctaggcagccacagcttgactgctcccgccggacaagccctactgtgctatctgccgctcttcccttcctcttcccaggggstccgcgtcaggggaggcgcagctgtgtgcattccgggagcttcagacccccgtgtccagcagctccttcgtttcctgggtgctggggcggccttcccagc

SEQ ID NO: 7270 - DNA, 201 bp, Homo sapiens; identical to SEQ ID NO: 923

SEQ ID NO: 7271 - DNA, 201 bp, Homo sapiens; identical to SEQ ID NO: 924

SEQ ID NO: 7272 - DNA, 201 bp, Homo sapiens; identical to SEQ ID NO: 925

SEQ ID NO: 7273 - DNA, 201 bp, Homo sapiens; identical to SEQ ID NO: 926

SEQ ID NO: 7274 - DNA, 201 bp, Homo sapiens; identical to SEQ ID NO: 927

SEQ ID NO: 7275 - DNA, 201 bp, Homo sapiens; identical to SEQ ID NO: 928

SEQ ID NO: 7276 - DNA, 201 bp, Homo sapiens; identical to SEQ ID NO: 929

SEQ ID NO: 7277 - DNA, 201 bp, Homo sapiens; identical to SEQ ID NO: 930

SEQ ID NO: 7278 - DNA, 201 bp, Homo sapiens; identical to SEQ ID NO: 931

SEQ ID NO: 7279 - DNA, 201 bp, Homo sapiens; identical to SEQ ID NO: 932

SEQ ID NO: 7280 - DNA, 201 bp, Homo sapiens
tttttttaaaggagtctgttagtggtcggtcaaatgaatcgatttataaatttcaatgcagatggctattttttcaattacacgtgccagtccaagcatasagttatcctaaatctatctaatgttagtattctggttatatatttaacagtggatttctaaagttctttaaaaaattaaacatgttttataatgtaattg

SEQ ID NO: 7281 - DNA, 201 bp, Homo sapiens
atccctattctgagaatccaaaatctgaaattctccaaaatatgaaactttgagtgcagacataatgtcacaagtagaaaattccacacttgatctcacayaacaggtcacagtcaaaatgtagacacacaacacagtttattaagcatccccaagagaaaaataaaattaccttcagggtatgtatataaagtgtatatg

SEQ ID NO: 7282 - DNA, 201 bp, Homo sapiens
agcgtattctcttaaattggcagtttctatggaaatgcttttcccacaggattttggattttgtgaggcagtccagatatcatcagcattcccatcacatygcaaacctctcatggtgaagtcatcattctttaaagagctgacactgttattgccaattttggcatctcctaagtaatagaatcacaaaagcaaaatcac

SEQ ID NO: 7283 - DNA, 201 bp, Homo sapiens
aaaaagctgtgaaggaagttagtacgctcaacagaaaaggataccacattgcttccttccccttcccatacccctcaagccttctaaaaagttccataggmtctggaaagaccctctaaaaataatttagataaaatatgtattacgaacctcctgaaggaaatactgactcccccctaccccattgccaagtataccaaa

SEQ ID NO: 7284 - DNA, 201 bp, Homo sapiens
ataataataaaattaaaaaaaaaaagttaaagcagcaaaacactttgcccttcaatctcacccctaacatattttttgcccttctggtttcaaagttaaayaactgtaaataattgtgatacaaggatgccttaatttaatgttatattttcccaaaaactcaaagttaggtaaagaaacaaaaaaaaattgtttatattt

SEQ ID NO: 7285 - DNA, 201 bp, Homo sapiens
gagtgcagacataatgtcacaagtagaaaattccacacttgatctcacataacaggtcacagtcaaaatgtagacacacaacacagtttattaagcatccycaagagaaaaataaaattaccttcagggtatgtatataaagtgtatatgaaacataaatgagtttcatgtttagacttgggtctcatccccaagatttct

SEQ ID NO: 7286 - DNA, 201 bp, Homo sapiens
tgtccttagaaagaagaaatggagttaaaggaattgaggtctgctctaattcatctttatttctttaaaataactgattagaaattttgccaaaatgtgtmtgtgttgacaaagatgtcataatgatggtaagatgatcagagctgtgtattatcctttcaccttactcacattttctgatatttcaacaatgattcaatt

SEQ ID NO: 7287 - DNA, 201 bp, Homo sapiens
tcatataaatgttccatcaggaataagcttcgagcctgggaggaagaatgggtgtgcacatggatgaggaaactgttacaggaatgaagaaattaacaggtttttttttaatcattagtaactatacatagagtatattttctgtaaatcaagaaaataggaggcggatttaactacatttgtatattaaatctttgttct

SEQ ID NO: 7288 - DNA, 201 bp, Homo sapiens
aattttttgtatttttagtagagacagggtttcaccgtgttagccgggatggtctcgatctcctgacctcgtgatccgcccgcctcggcctcccaaagtgytgggattacaggcgtgagccaccgcgcccggccagcactgtgattctaagtagttaaaggctaccaagacaagagttctactcctcacactgtcgtcttc

SEQ ID NO: 7289 - DNA, 201 bp, Homo sapiens
aggcgcccgccactacgcccggctaattttttgtatttttagtagagacagggtttcaccgtgttagccgggatggtctcgatctcctgacctcgtgatcygcccgcctcggcctcccaaagtgttgggattacaggcgtgagccaccgcgcccggccagcactgtgattctaagtagttaaaggctaccaagacaagagt

SEQ ID NO: 7290 - DNA, 201 bp, Homo sapiens
caagggaaaaacaaagggccagagacttaacatccctagccagcacgcattttgagttaacataattacttgttagaagaaaatacatcacccagtgttgyacacaatatatttcagataaattaaccacccaagaaagcaagcttaaaatcttctccaggaagcagacttcgaaggcttgatctcaacttggatttatca

SEQ ID NO: 7291 - DNA, 201 bp, Homo sapiens
gggtagtgatcacaatcagaagacaggagctgcagaacagaacactttctcatgtccagggtcagattacaaggtaaccattgatttatttgattggtaaygcatcagatttatttggtttcttttttgcactgttttcttacaatttttttttaaaggagtctgttagtggtcggtcaaatgaatcgatttataaatttc

SEQ ID NO: 7292 - DNA, 201 bp, Homo sapiens
cagataaattaaccacccaagaaagcaagcttaaaatcttctccaggaagcagacttcgaaggcttgatctcaacttggatttatcatttgcatagaaaayaaccataactcgaagttataaatcatcaactctatagcaggtttcagtaaaaagccgcaagattttaaattgctttttaaaagatgacttctcagccatc

SEQ ID NO: 7293 - DNA, 201 bp, Homo sapiens
tatttgaagcagaataatgaatctccgtgaggccaatctttgaatgagtgagcaatatagaggcaggaatatcttccaaatataaagaaaaaaggtcagcttttttttttttttactgattcagtattttatttaataagtttcccaagagtaatttttcatcaatttcttccccctttttattactttaggattctaaca

SEQ ID NO: 7294 - DNA, 201 bp, Homo sapiens
tagtaaataactcagtacaatataatttttctattatgacactgaaatagattttaaaaaaaacttcagaaatgtcactgatgacaagaaacaaaagcaakgaaagaaattccttcataaagaaggtacgtatggaggaatccaccgattaagttgctgggactgagacacaaaaggaaaactgttgtagagagcccctgc

SEQ ID NO: 7295 - DNA, 201 bp, Homo sapiens
aagggatgctctagtttatagattaccttatcttttctcttttacctacatgtttatcactatttttagttctttcagcacagttcagtcattcaaacatyaactaaaatgaagaagggacgtgagtatctgaatgtgggcaccaataaacttagctttcttttgttccaaatcttttatgatgtccagttttatgatgca

SEQ ID NO: 7296 - DNA, 201 bp, Homo sapiens
tgattcttttttttttttttttttttttttgagacggagtctcgctctgtcgcccaggctggagtgcagtggcgggatctcggctcactgcaagctccgcytcccgggttcacgccattctcctgcctcagcctcccaagtagctgggactacaggcgcccgccactacgcccggctaattttttgtatttttagtagaga

SEQ ID NO: 7297 - DNA, 201 bp, Homo sapiens
atggaatctcagaaactccctcaggcctctctaggcatgtctccctccctaggagatcaaaatcctgacacctaacaacttagattgctattgcctacacyggaactttatatataaaggaaatcatatagtatatgctttccacatctggcatcttgcaatcaacagtatgcttttaagattgattcatgttgctgaggt

SEQ ID NO: 7298 - DNA, 201 bp, Homo sapiens
aatatatgtctaaaaccattaaggttgagaaaatatactgcatgaaaaaaatttttaagtaaattagaatactgcaaatgcataataaacagctttaaatrgctacctgagatgtcacttgatgttgatcaaaatatgaaaggagctggagtttagtgaacacagtctccagtgttggaaatgtctcctgtttgttcttcc

SEQ ID NO: 7299 - DNA, 201 bp, Homo sapiens
agcagcggctaagaggtgtctatcacaagatgatcttattccagggaaaggtttgcctacaaaaacaacaaatctttaatagtctcattaccatcattagyaatgttttgtaattatttacaggcagtcagcctttcattgttagactgtgggtgcttaattgccattagcttgctttaattgatgcttcatggattcact

SEQ ID NO: 7300 - DNA, 201 bp, Homo sapiens
ggttatgtgcatgtaacttctgggtactaataaggttaggtgaaacaaatagcaaataatcacattaaattaagttgaatacaattaataacatttaatgrgtaataaattaaaatgcactagataataaatccataaacaacttgagctcataatacaggctgatctcaaacttactttcagtttctttactaaattcat

SEQ ID NO: 7301 - DNA, 201 bp, Homo sapiens
agtgatctgtgctttctcatcacatacctggagtaagagattggttctgaaggaaaaagccgggctgctggggctggcccacgaggttgtaaccccacaasgtggactgtggatggtgcatcatttgggaggagataggcgagtaattaggaggcactcggtatatgttgctctgtggatattccttcaacataaagtttt

SEQ ID NO: 7302 - DNA, 201 bp, Homo sapiens; identical to SEQ ID NO: 935

SEQ ID NO: 7303 - DNA, 201 bp, Homo sapiens
cctgagttcacctgcagtttcaaggtgtttaagcctactcaatcaaatattccgaagctatcattcaccccagctttactcattaacttattaataataayccctgcttacaagtaactatgttcttcacattcctatgacttaaagaaaaatcactgtgctacacaaaatttaccgttacttgtgaaaaattcatgacag

SEQ ID NO: 7304 - DNA, 201 bp, Homo sapiens
tgaggagagggtgtgatagggaaagattctcaggtacagaaatacacaaatacagattctaaggctaactagacagcacaggtcagaatggggtctccatstaacttcactgctctgctcttcagttcccctcatccagagaatgaggatgatacgcgtacttcagagaatagttgagattattaataaagtgagttaatc

SEQ ID NO: 7305 - DNA, 201 bp, Homo sapiens
tgctctagtttatagattaccttatcttttctcttttacctacatgtttatcactatttttagttctttcagcacagttcagtcattcaaacattaactamaatgaagaagggacgtgagtatctgaatgtgggcaccaataaacttagctttcttttgttccaaatcttttatgatgtccagttttatgatgcaattata

SEQ ID NO: 7306 - DNA, 201 bp, Homo sapiens
cagtcagctcacccgttgcttgaggtaagaagcaggcctggggagctcggaagagatgaagcaagagtcggcatgtcattctcgccccaggctcggcgtcsgcatccccacaagctaggaaagggggattggaaaagcaagttttctaacacacttgggaacaagtccttcaggtttcctattaagctaaatttcctggaa

SEQ ID NO: 7307 - DNA, 201 bp, Homo sapiens
atcttaaagtgaaactgaaatacacttatttaactgagtatttttattcaaggcacagaatttttaatagcatccaagtaaataagatgtggcagaaatcrccatcagtatatcaaagcttataccatgcatacatgtagcaaaatcaatgtgaagtgataaaaacatacttgttagtgtgcatgtcaacagttcctgaag

SEQ ID NO: 7308 - DNA, 201 bp, Homo sapiens
cagaatttttaatagcatccaagtaaataagatgtggcagaaatcgccatcagtatatcaaagcttataccatgcatacatgtagcaaaatcaatgtgaartgataaaaacatacttgttagtgtgcatgtcaacagttcctgaagtaatgatctgaaggagtagcagggcccagtctgtagtccactgggtgctcctctg

SEQ ID NO: 7309 - DNA, 201 bp, Homo sapiens
tccatagagaaggattgtgcgctggttacattcatgacttgaagattcatcctgaaaaacagaaaatgcattctgaaactcttgtctgcaggggtggggtygcatttcatatccctgaaatgcactgaccacagcacctccatgctggcttgcggtggtggcatcccgccctcccttcaattcacctcaacctccactggc

SEQ ID NO: 7310 - DNA, 201 bp, Homo sapiens
aggagcagttcagcttccacaacactcagttcatttagtaactgtaacaggagaaaagactgaataaacatgtaggtgccaaaacaaatagagaaaacatktatttttataaaccatagatatactgagtcattacactacaaatacattccctaaatttaacttttttaaaatttttaatccttttccaatttatagagt

SEQ ID NO: 7311 - DNA, 201 bp, Homo sapiens
ttttaaattttttgtggagatggggtctcactaagttgcccaggctggtctaaaactcctagattcaagcaatcctcctacctcggcctcccaaagtgccrggattacaagcacaagccactgtgcccagctaattggctcactttaaattgcacaatgcctggtggatttgctttcctaaaagtaagagaaacatggtct

SEQ ID NO: 7312 - DNA, 201 bp, Homo sapiens
ttcaggggaagaacattctgaggggtttacgacatgcttgaccacaccacacaacctgaggagaaaaatatacgaagaaataagacatagatttgtactaygtgggttatcatttgactcttttagaatgaaaatatgtatcacttgggtaagaaaaaggatattggattgttgaaactaataaatagaatagtaaataac

SEQ ID NO: 7313 - DNA, 201 bp, Homo sapiens
agtgagtctcctgcctcagcctcccaagtagctgggactacaggcatgcaaccagctaatttttaaattttttgtggagatggggtctcactaagttgccyaggctggtctaaaactcctagattcaagcaatcctcctacctcggcctcccaaagtgccgggattacaagcacaagccactgtgcccagctaattggctc

SEQ ID NO: 7314 - DNA, 201 bp, Homo sapiens
tgtaaatattcttacattctgatgtttttaggatgtttcagatttcatttcataacatgtaattaatacaaataaaggtagcatttcctctttcccagaakagctactgttaaattgatatcattctaggatagcatataaattgattacatgtgctagattaaaaaaataaaaggtactataaaaccaaagaaccccatg

SEQ ID NO: 7315 - DNA, 201 bp, Homo sapiens
ttttttatctatagagtcaaatccagcaattttgtttccttttgtgtcaatcaaggaacccataggttcacaagtgatgacatcacatgtctgtttcggcwaaggtagtaactgtcgaactttgtcaatactttctgatcgcttgtctcctagctctttctaaagaaaaaagagagagagagagagtgagaagtgggacag

SEQ ID NO: 7316 - DNA, 201 bp, Homo sapiens
atactaaatacaaaataagcagactaatgaacaaatatatagctaaaggaatagggcagaggtgaagataaggagaaaaattagttttgtaggaaactttwcctgatgattaagtgttgagaaaaatgaaggggagatgtgagagacaaagctagagtaaaaaagtttgtagggtgaactaagttttagtggtgggaatga

SEQ ID NO: 7317 - DNA, 201 bp, Homo sapiens
acctatctgtgcatctgattccatcaccatcttgtattttgttacagggctcagccattatattacactaacggagtcacagatgacagattattaaagaygaaaaaagctttagaaactatctgattcaccatccttattgtataaaggaggctctgagaggcagaaaggtggggtgacttgctcaaaggcaaagagcta

SEQ ID NO: 7318 - DNA, 201 bp, Homo sapiens
gttaaggaaattaaaagatagtgcagaggtaaattaaggaataaaagaagatttagaaaaagcaaatgatagccaaatgtgagtccagacacttactaacracatcaatttcaaagaagcaccaaggcaacaactctttggttaatcatgaattccagggtaacccatctcacctgccagcatcctgatggcccatacata

SEQ ID NO: 7319 - DNA, 201 bp, Homo sapiens
aaaactagaataactagaaaactatttcacttaaggacatattaaatggcaggaactgtaatgcattcctagagaagattcacattatgagttcttaattwgaacttcttactaattggcgctaatcaaagtactttggaatgtagaaattcctcaataaataatttctaaataggtggaagaacaaaacagaaatgaagt

SEQ ID NO: 7320 - DNA, 201 bp, Homo sapiens
acaaaggctactccaataagtggcaacaggagaagtaaagaatcaagacagatttttaaagaaatacacacatcatggatgcaacatgctatccaaggaastcagtgatatatacaaggggtatcttttcatcatcttccaggcattaattgccaaaaaacaccggacatcctcggaatctagacctggacattcttatgt

SEQ ID NO: 7321 - DNA, 201 bp, Homo sapiens
  misc_feature (1)...(201): n = A,T,C or G, or insertion/deletion polymorphism (see Tables 1-2)
tactagtgtacgacaaaggctactccaataagtggcaacaggagaagtaaagaatcaagacagatttttaaagaaatacacacatcatggatgcaacatgntatccaaggaactcagtgatatatacaaggggtatcttttcatcatcttccaggcattaattgccaaaaaacaccggacatcctcggaatctagacctgg

SEQ ID NO: 7322 - DNA, 201 bp, Homo sapiens
cagtcctgattagcagaattcagaagtcaaccttcaactgagaggcaggtgtaaaaatgtataaagaactatgcataagagatactagtgtacgacaaagrctactccaataagtggcaacaggagaagtaaagaatcaagacagatttttaaagaaatacacacatcatggatgcaacatgctatccaaggaactcagtg

SEQ ID NO: 7323 - DNA, 201 bp, Homo sapiens
cagatgagcagactacctttagtagacttggtaaaataaacaaaccagttaagccacttaaaagtaaaaattctgttcatttttctaactcatctcaattrtacaaaataaccaaaccaaccaaagttagctctgttcccaacactaacacaaataactacaaactgtatgtgttgatgttatttactaatgagagattaa

SEQ ID NO: 7324 - DNA, 201 bp, Homo sapiens
cttaagtcttcatataatgaagatatagagataggattatccaaccagtcctgattagcagaattcagaagtcaaccttcaactgagaggcaggtgtaaaratgtataaagaactatgcataagagatactagtgtacgacaaaggctactccaataagtggcaacaggagaagtaaagaatcaagacagatttttaaaga

SEQ ID NO: 7325 - DNA, 201 bp, Homo sapiens
gacatactacaaaggaagtaataataacaacagatctagttagaaataatgcattacttcctctggcaacattcatttctttgcctcactattagataaayaagagaggtggtaaatagccaaagactgcttgaaaatttaaatcatacctctacttataaaattaaaagccactgtaatgcttctaaatcacttcgtatg

SEQ ID NO: 7326 - DNA, 201 bp, Homo sapiens
cactgaaagcatgaaccaaacctgagttcacctgcagtttcaaggtgtttaagcctactcaatcaaatattccgaagctatcattcaccccagctttactmattaacttattaataataatccctgcttacaagtaactatgttcttcacattcctatgacttaaagaaaaatcactgtgctacacaaaatttaccgttac

SEQ ID NO: 7327 - DNA, 201 bp, Homo sapiens
taaataaattttccttatggtaagaaaataaggccctggctatttttctgagaaatcttggtgcttccttaaaacagactgtaacatagcagtttcccacmtttttcacggtgatacatgttaatttgtataaaataactattaaaattctaccatatctaccttgatactacaccacttcccaatatacataccctcaaa

SEQ ID NO: 7328 - DNA, 201 bp, Homo sapiens
gcattctgaaactcttgtctgcaggggtggggttgcatttcatatccctgaaatgcactgaccacagcacctccatgctggcttgcggtggtggcatcccrccctcccttcaattcacctcaacctccactggcaacacccttgtttttccagtttggaacttgctaacattataaaaaaaaaaaaaaaagtgtcaactga

SEQ ID NO: 7329 - DNA, 201 bp, Homo sapiens
gtattctaatggtagaacaactacaaatattaatttttagacacaaccatttgaatatcaatggatttgtaaagcaaaacagatgtgttttcttctcaatktcgtagtattttatttcaatcatcaacagatttctcatcaattgcaatataggaccaaactctaataacctaactatttcattagctattactttatatg

SEQ ID NO: 7330 - DNA, 201 bp, Homo sapiens
ttccagactcccagatcaaactcctctgtactattcaggggaaagggcaaagtggagagaacataggatgtctaggccaaggaggacaatggaatcacagrtaccataggtggaaccaaggagacttcttgaggaaatggcaatgtagtatcccaaaccctgtgaaatgacatcaacagatgggactacctagcagcaggt

SEQ ID NO: 7331 - DNA, 201 bp, Homo sapiens
cagatttttttttcagtgcctactaagagccacatactcttcaagacactgggatgtagcagtgaaaaaaatagaaaaagcttctgctgtcatgaagcatrcattctaaggaggagccaggccataaataaatatagaatctacagtgggggtagcaagtgctgaggctcagaatgatgacatgggggtgctatttaaaat

SEQ ID NO: 7332 - DNA, 201 bp, Homo sapiens
atcatgaattccagggtaacccatctcacctgccagcatcctgatggcccatacatacattcatgagtgtattgcagacaaagctgtagcgattggccgcrttgtcactgaggatcttgcccagcattgagtagttgatgctgcgggctgagggattctcaataaaatccatcatgaagtctggatcccatcgcaagttcg

SEQ ID NO: 7333 - DNA, 201 bp, Homo sapiens
aaagcacagggtccaatataagttctttgtctgtacataatctttcaggttcttttaagcaatgctctcctacccattcctaaaaataatatggcaattasattgacaggcactggctttcggtatatatatatgcaatatgtactaaatccacagtgcataattgaatagaaaactgataggaattttccaatttaaaaa

SEQ ID NO: 7334 - DNA, 201 bp, Homo sapiens
aaggttaggtgaaacaaatagcaaataatcacattaaattaagttgaatacaattaataacatttaatgagtaataaattaaaatgcactagataataaayccataaacaacttgagctcataatacaggctgatctcaaacttactttcagtttctttactaaattcatgtatgcacgcttgttctcttcagatccccca

SEQ ID NO: 7335 - DNA, 201 bp, Homo sapiens
ccacaacactcagttcatttagtaactgtaacaggagaaaagactgaataaacatgtaggtgccaaaacaaatagagaaaacatttatttttataaaccayagatatactgagtcattacactacaaatacattccctaaatttaacttttttaaaatttttaatccttttccaatttatagagttgttcttctgtctaga

SEQ ID NO: 7336 - DNA, 201 bp, Homo sapiens
tgatactacaccacttcccaatatacataccctcaaatactcctttccctgtgttgtaatgttagaaaccactccatcaagacaacaatcaaagagcaackgatgttcatggatgctgccttacctgctgctagaagagagggaagtgcgacatgctgcacgacgtcctccagggaaaaacactgtcgtgctatcagaata

SEQ ID NO: 7337 - DNA, 201 bp, Homo sapiens
tgatgctcaagtggcatcctaaagtggtggtggtcatttctaaaatagtattaatcaccaagctatcagctaggaaaagatgtattttagttctcacataggtaaacaataaccaatcatgaatatctgaatgaaatggtgaatatttcttccactgtgcagcaagaatgctgtggaatttcattaaaaatgtctcaaatc

SEQ ID NO: 7338 - DNA, 201 bp, Homo sapiens
ttttgtgagaaaacctgggataaagcgtgtaaaatgcttcgaagtataatggacagtgttcactactgttaattcacatgctagacttcccctcctcctcygcacatcccccacacccacaccgaactgccttactcaacatttcaccaagactccagggcacttcctccctttgctgttgctcgtccttacacctaaaat

SEQ ID NO: 7339 - DNA, 201 bp, Homo sapiens
aataataactaccttaggctgaaaataaccatcctctcttttgttctctaggtaaccaacaagaaatgcaagccgtcgacaacctcacctctgcgcctggkaacaccagtctgtgcaccagagactacaaaatcacccaggtcctcttcccactgctctacactgtcctgttttttgttggacttatcacaaatggcctgg

SEQ ID NO: 7340 - DNA, 201 bp, Homo sapiens
taatgaatcatggaatgaaaggtcactcaccttcaagaaaaacattgacaggttttaatacctaacaaccttgtaagcagtatctaagattaataactaasagaatgcaggcaataccaataagatctcaaatcccaacatgaaccagcagagggaaatgataacatatcatgatgattatcctctaggcctatttctatt

SEQ ID NO: 7341 - DNA, 201 bp, Homo sapiens; identical to SEQ ID NO: 934

SEQ ID NO: 7342 - DNA, 201 bp, Homo sapiens
agcaagtgggcaaaacaatgcccaagttaatggaaaaagccttttaaaacccacaagtcaaccaagaaaaagttttgactttgctgaaaaaaatggcttamtgagtatttactaacaaaatcttaagcagaggagaggaataaataatgtatttcaatttatcaatatataatcatatgtttctcattaaaatacaaacac

SEQ ID NO: 7343 - DNA, 201 bp, Homo sapiens
cgaactgtggcctatagatgagaaaaaattactgtaccaaaagctaaattttctgatgtttaatagctatattttggttatgttatgaaataatgcaataktcaaaagaataaaatatacaatctactcttaaatgattcagaaaaaataggtatatgcacccacatctccacatacaaattacaaagcacatgtagcaaa

SEQ ID NO: 7344 - DNA, 201 bp, Homo sapiens
atgtggtgagccaaagggagatgataggatgttcctgacgcaaagcttgtgatttgttctagcacattgttagaaatctgtgcaaataaaaacaaaaataytgtaagaccaatattctaaataatcttttactaagataaatcatttttactttttaagacagttgaatctatacatgattctactttgacgaaagtcaaa

SEQ ID NO: 7345 - DNA, 201 bp, Homo sapiens
aagattatttctgtagtatcttggccagggatgcataatctgaagctaatctacaggaaacctcagacaaatccaacaatactgggacaattaataaaatygaactgtggcctatagatgagaaaaaattactgtaccaaaagctaaattttctgatgtttaatagctatattttggttatgttatgaaataatgcaatat

SEQ ID NO: 7346 - DNA, 201 bp, Homo sapiens
acagggatcaggtagctatccagatctgattcagttggtctaaagcgggtctcggaaatcactgtttttaacagttcagcagtgatttggatataaaggcwgaattgagaactaatgtattaaggattataacctgaaattttttaggaataagacagccttgcctaatagaatattcccagttccatttaaaaactaaat

SEQ ID NO: 7347 - DNA, 201 bp, Homo sapiens
ggctattgaaaaacttttcattgtttaaaattgaacatggtattaatttcacatcatgtaacatattgtctagtcatatttttcccttaaggaaaatgttmtctcttcataagcctggttttatatatagcaatagtaaatatttacatttagggaaaaatatcttgctaggatcctcaaacacctttataaaaaatattc

SEQ ID NO: 7348 - DNA, 201 bp, Homo sapiens
agggaaaggtttgcctacaaaaacaacaaatctttaatagtctcattaccatcattagtaatgttttgtaattatttacaggcagtcagcctttcattgtyagactgtgggtgcttaattgccattagcttgctttaattgatgcttcatggattcactaagaaacatggccagtattcctcacttatccttttcttttta

SEQ ID NO: 7349 - DNA, 201 bp, Homo sapiens
catcaaacaagtcattttcttagattcacagataaaatactcatttgtcaaataacttagtagaaccttgagaagaagataacaatggcttcaaatatttktgacaatgctgttaagcaacaaacaataatcagtacatacacgaattagaatatttttagtttcgtgaataaatctgagctacgatttacatttttaagg

SEQ ID NO: 7350 - DNA, 201 bp, Homo sapiens
agtcagacaattagaaggcagggaaaaaccaggaggctccccctagttgaaaaacaagcctcactaaggttttggagttcctttcagtggtaactactaargattctttaatgattaaactcgttttaaaaacaactctgaaagtttccaattgactcttaaatttaaaaagaagaaaaagagacagagggggaaattaat

SEQ ID NO: 7351 - DNA, 201 bp, Homo sapiens
tttggcagactgcaacaagatataccatttaagagtcagacaattagaaggcagggaaaaaccaggaggctccccctagttgaaaaacaagcctcactaargttttggagttcctttcagtggtaactactaaggattctttaatgattaaactcgttttaaaaacaactctgaaagtttccaattgactcttaaatttaa

SEQ ID NO: 7352 - DNA, 201 bp, Homo sapiens
ttgatttgcaagcaataagaaaaacatttcacatcgtaatccagtgtactgttcacataagtacgaagaagtgaaataatagttttaagcataatacttayccttactaatataaggtaaaaatacaacaaagttaatgtcaaatatgattttatgaatatttaacaggataaaaattttcaaggccaaactaaatgatac

SEQ ID NO: 7353 - DNA, 201 bp, Homo sapiens
agaggcaggaatatcttccaaatataaagaaaaaaggtcagcttttttttttttttactgattcagtattttatttaataagtttcccaagagtaattttycatcaatttcttccccctttttattactttaggattctaacaggcaattatccatcatttctctctcaactgttttgacggtactacagtaaaagaagct

SEQ ID NO: 7354 - DNA, 201 bp, Homo sapiens
gaaactgaaatacacttatttaactgagtatttttattcaaggcacagaatttttaatagcatccaagtaaataagatgtggcagaaatcgccatcagtayatcaaagcttataccatgcatacatgtagcaaaatcaatgtgaagtgataaaaacatacttgttagtgtgcatgtcaacagttcctgaagtaatgatctg

SEQ ID NO: 7355 - DNA, 201 bp, Homo sapiens
taaaatttgttatttgtactttcaatatatctctgattattaagaatattttatatagaatcaatttcacttatctctggtgaaataaaaagattacaaaygtcatttcaaattcccaagatgtagatgccatatagcatattcaagtcacttgttagttttcattatagctgcctattgtggtaataacctatattttat

SEQ ID NO: 7356 - DNA, 201 bp, Homo sapiens
ttgaacacagtattttaaacccttagagaaaatggaattgcaaacaaatcttcaaagccttttaggtaggtttgttcttcctagtggtatgtgtgtaacayttctttctttctttctttctttctttgagacagagtcttgctctcttaccagggctggagtgcagtggcgcaatctcggctcactgcaacctccgcctcc

SEQ ID NO: 7357 - DNA, 201 bp, Homo sapiens
attcactaagtcgaatttccaaaacggtcagggatgaactaagaccacacagcagtagcaggaaaggttaaaatcagtgatcttgtattggaaaacattargttttgtttagcattattttaaagcgctaaataggtgaggagatgctgaaaattgaagccatactgtgacaacatgattcttaatcgttttccttccata

SEQ ID NO: 7358 - DNA, 201 bp, Homo sapiens
tatttacactctgatatgtgtgtacattttttccaagtttctcttaaaattgtaaaccttaataactatcaatgcaagcatgtatttggaataaaaattayaattaaaatagaagtctaattagtgatgtcagagacaattgttaattagcctctttattaagaaaaattatacaaagcatagaaataaaatataaatggt

SEQ ID NO: 7359 - DNA, 201 bp, Homo sapiens
aagactttactgacgaaaactcaggaaatcctctatcacaaagaggtttggcaactaaactaagacattaaaaggaaaataccagatgccactctgcaggytgcaataactactacttactggatacattcaaaccctccagaatcaacagttatcaggtaatgttatttctacaagtacttgacaaatatatgtatttac

SEQ ID NO: 7360 - DNA, 201 bp, Homo sapiens
tttcagtggtaactactaaggattctttaatgattaaactcgttttaaaaacaactctgaaagtttccaattgactcttaaatttaaaaagaagaaaaagagacagagggggaaattaattcagtcacagtgaaatctttacctttctagatctcacgtgaccttggcagaaaataataagaaaaacaactacaatagcaa

SEQ ID NO: 7361 - DNA, 201 bp, Homo sapiens
tattcctttcttagcattaatattttcagggaactcatgctaggtgttactacagtagtcttcaaataggacaggcagaggcattttagaagctactattyttcaagagcctacaagatttgtttacatcagtttttcatacaagtagaaaatgtaggctgggcatggtggctcacatctataatcccagcactttgggag

SEQ ID NO: 7362 - DNA, 201 bp, Homo sapiens
tgattctcaacgaaatactttattttaatgatatttacatgagtaacattatagtcaatatatatttttcctcatctttcttatgttaatttgcttttatracatattattgctcttttgttgcttaattttgattttcttttttaaaaatctttaagtcctgaaactttagcctcttaaaggttgtcatagtaaacttca

SEQ ID NO: 7363 - DNA, 201 bp, Homo sapiens
agttgtcattcagacctaaatcttaagtattctaatggtagaacaactacaaatattaatttttagacacaaccatttgaatatcaatggatttgtaaagsaaaacagatgtgttttcttctcaatttcgtagtattttatttcaatcatcaacagatttctcatcaattgcaatataggaccaaactctaataacctaac

SEQ ID NO: 7364 - DNA, 201 bp, Homo sapiens
tctttcaaataaacaaatttccatagtagaaatcaagattggggaacagataactgatgataaaggatataagagacaatggcctcttagctggattaatrtggaaagaaagaaaggaacatctttctacttgaccatcgggaaaaaaagaaaattagtgaaaataaaaagacattttgaggtgaagaagacacttaagaa

SEQ ID NO: 7365 - DNA, 201 bp, Homo sapiens
ggctggagtgcagtggcgggatctcggctcactgcaagctccgcttcccgggttcacgccattctcctgcctcagcctcccaagtagctgggactacaggygcccgccactacgcccggctaattttttgtatttttagtagagacagggtttcaccgtgttagccgggatggtctcgatctcctgacctcgtgatccgcc

SEQ ID NO: 7366 - DNA, 201 bp, Homo sapiens
aaatcatacctctacttataaaattaaaagccactgtaatgcttctaaatcacttcgtatgctctaattgccctcgaagccattctcaaactagcatcaawccatactgcatgtgagcatgccgggcagtgagggtagaagacagtgaattcatcttctacatcaatatgcagaatttaaaaatgtacatcagaaagaata

SEQ ID NO: 7367 - DNA, 201 bp, Homo sapiens
ggttaagaagtcacaatggatgtgacttcttgtttactgacaaaccatgtgtgaacctcaaaggagaagaagtttctctaagtggcagggcacaaagctargaaacaagcggttaaagtaagaggtgatgatgaaatggtgaagatagggaagtgacccacatttaccaggagttgggcatgaagaacaacagcttgagag

SEQ ID NO: 7368 - DNA, 201 bp, Homo sapiens
cccgggttcacgccattctcctgcctcagcctcccaagtagctgggactacaggcgcccgccactacgcccggctaattttttgtatttttagtagagacrgggtttcaccgtgttagccgggatggtctcgatctcctgacctcgtgatccgcccgcctcggcctcccaaagtgttgggattacaggcgtgagccaccgc

SEQ ID NO: 7369 - DNA, 201 bp, Homo sapiens
ggtcctctcctatgaggcagagttaggagacgggcagatagttcaaagttatatgcaatatataaaattttacttttataggcagtacacatttattgtayatatctcattaatataaagttgttaatcttgtggtgtctacaatgccaggtagaagaataaggcatggattgtttctcagcgtctactcaaaacattttg

SEQ ID NO: 7370 - DNA, 201 bp, Homo sapiens
gtagaggtagagaaggcaaatctatgcttaaaatacctagcactgtctagatgtctgaccagacaggaaggaaagcagcaagggaaacagaaggctttagmaacagggaagtaattacagagagcaaagagtggaaggcctcaccttgtaatgcagactttgcacttaggagaagtggaaagctggaggtattttcacatg

SEQ ID NO: 7371 - DNA, 201 bp, Homo sapiens
aatccctgcttacaagtaactatgttcttcacattcctatgacttaaagaaaaatcactgtgctacacaaaatttaccgttacttgtgaaaaattcatgayagttcaataaaacaacagacaaaaataccttaggaatgtctttattccattctgtctcgtgctacttgtatcagcacttccaatactgtttgggttgaag

SEQ ID NO: 7372 - DNA, 201 bp, Homo sapiens
aagtatcaggcaggccatcctccagaggggcctgcacttgggcctgcctgatgggaaaagaaaactcaaggaatgcacaatatgtgagacattttaaattyctataaaacttctctgtgggatttgtctttataatcaatttgatggaaagttggacaaaactttgagttaaaagactttttaaatggttttaagtaagta

SEQ ID NO: 7373 - DNA, 201 bp, Homo sapiens
aggcaggggcagtggctggaggtagtaactgcggggcttgggcatggggtgtgtgtgatacagcaggaggtgatgctgctcctcgtacttgatcactcttyggtccactcggactgtcccaaaccaggcccaggacaaaggagctgggttcttctgaccctcaaacaagtcccacggggacaccttctgcttcgtagagac

SEQ ID NO: 7374 - DNA, 201 bp, Homo sapiens
tattgaatctaagcctgctatcataataccatatggaaacatccactatcacagcagtggtgggcaggaggcttggcccgcacacctaccagttcacgtgytgggacaaggttagaaacaactgcaaaagtatcaggcaggccatcctccagaggggcctgcacttgggcctgcctgatgggaaaagaaaactcaaggaat

SEQ ID NO: 7375 - DNA, 201 bp, Homo sapiens
taacaggagaaaagactgaataaacatgtaggtgccaaaacaaatagagaaaacatttatttttataaaccatagatatactgagtcattacactacaaayacattccctaaatttaacttttttaaaatttttaatccttttccaatttatagagttgttcttctgtctagacatcaggatgtatacaattaggaagtac

SEQ ID NO: 7376 - DNA, 201 bp, Homo sapiens
aacaaaacttatcctgctcttggtaatgtttcgagggatatgatttgggcacgagtaaatctcatactaaatgctaatgagccaaggttctccttcctttycccacttacatcaactcttgagctagatttcgtcttgcgcttccttccttttgttttcttttcttcatctgttgtggtttttccctgatctgacagctca

SEQ ID NO: 7377 - DNA, 201 bp, Homo sapiens
tgcaattatagttgaattaaacctgaataatgtcaaagtcatgtaatccaattatctgcatctttgtgtttgctgtacaattactattgaatctaagcctrctatcataataccatatggaaacatccactatcacagcagtggtgggcaggaggcttggcccgcacacctaccagttcacgtgttgggacaaggttagaa

SEQ ID NO: 7378 - DNA, 201 bp, Homo sapiens
ctatttttcttttaaagccactataatatttcatcactagttatacattctgagattggaaaaacaacaatgacatgctatataccaacccttcaaacacstgggctgtctgatcaggattcaagattagacaactgtgatagcgcctgagaacagccacgatgcagacacacagtcctgttgtataacttcctgccaggc

SEQ ID NO: 7379 - DNA, 201 bp, Homo sapiens
gaggaaactgttacaggaatgaagaaattaacaggtttttttttaatcattagtaactatacatagagtatattttctgtaaatcaagaaaataggaggcrgatttaactacatttgtatattaaatctttgttctacacagcttatagtccacagtatgactgatatttatatatctactagtcctcttcttgcaagcag

SEQ ID NO: 7380 - DNA, 201 bp, Homo sapiens
atttagatcaagaactgaagcccttcttttatccctcaaatctctactgttagcccttctagaggtttagaaatataaattctcaataaggtagtatgacytaagtattctgaattagtaatatggcagattgatttgttaaaaataatcattttcttgaataagccttgtttcatttgatggtcttagaaaaagcatcat

SEQ ID NO: 7381 - DNA, 201 bp, Homo sapiens
aatgcttgggaagcactactctaacaaagaggactaaagtcatctactaaatggcagcaattacaatcttctacactctctttctgtgtagacaacttatrttttaaaaaatgtgttggttgtcattgaaggatacaagtttgcaattcagagtcatgacattttcagtttcttgaggttgatgtgagaaataaagctctt

SEQ ID NO: 7382 - DNA, 201 bp, Homo sapiens
gtttaggtatccatcgtatagtagtcagtgtttcctcaacttctttgatttgcaagcaataagaaaaacatttcacatcgtaatccagtgtactgttcacrtaagtacgaagaagtgaaataatagttttaagcataatacttacccttactaatataaggtaaaaatacaacaaagttaatgtcaaatatgattttatga

SEQ ID NO: 7383 - DNA, 201 bp, Homo sapiens
ccaggctggagtgcagtggcgggatctcggctcactgcaagctccgcttcccgggttcacgccattctcctgcctcagcctcccaagtagctgggactacaggcgcccgccactacgcccggctaattttttgtatttttagtagagacagggtttcaccgtgttagccgggatggtctcgatctcctgacctcgtgatcc

SEQ ID NO: 7384 - DNA, 201 bp, Homo sapiens
tacctactgagtactatgctcacttcctgatggtttcaatcataacctgaaacctcagcaccaagcaatatacctttgtaataaacctgtaataaatctgytctaaaataaaagttaaacaaaatcctgatattatctataaagcgaaaaattattttgtgactaaagtaaataaacatttattcagagtctgttaggttt

SEQ ID NO: 7385 - DNA, 201 bp, Homo sapiens
tacttttaatgcacattgatttaatgttattcagtgagggtactggtcattttaaaaaaactcattaacacatgaaaaagttacctgctaaacagcaaaaytgtttttgtgaaaaaagaggaaaagtaaacacagtctgaaaaagttctagaaaagtgaatggggctatagaaccttctatgagtcaccaggaaataaaaa

SEQ ID NO: 7386 - DNA, 201 bp, Homo sapiens
gcatttatcaagctgaacctgaatctaatacaatctgtaatagaaaccaggtttcctacttttaatgcacattgatttaatgttattcagtgagggtactrgtcattttaaaaaaactcattaacacatgaaaaagttacctgctaaacagcaaaattgtttttgtgaaaaaagaggaaaagtaaacacagtctgaaaaag

SEQ ID NO: 7387 - DNA, 201 bp, Homo sapiens
gcctatttctattttataaaacaatgaatgaggtttacccacattccaatgctgtaagaaaatactgagctttgacttgcatacatgcaaatgaaaaacamaacaacaaaaatggaaaatcaggaaatcactacaagatgtaacatcattaaaacattttggcagactgcaacaagatataccatttaagagtcagacaat

SEQ ID NO: 7388 - DNA, 201 bp, Homo sapiens
gggaccctgcagatcttgaaggctaggtagggatggtgaattttattctgagtgggtggaaaatcactgaaagcctgtgaatcattcgtatattaaaaggwtcactttagtggatgttgaaaatgtgttttagagttaagggtggaagcaaggaaaccagttagaagaactctgcaatggtccaagcagaggtatccacag

SEQ ID NO: 7389 - DNA, 201 bp, Homo sapiens
  misc_feature (1)...(201): n = A,T,C or G, or insertion/deletion polymorphism (see Tables 1-2)
ataagatctcaaatcccaacatgaaccagcagagggaaatgataacatatcatgatgattatcctctaggcctatttctattttataaaacaatgaatgangtttacccacattccaatgctgtaagaaaatactgagctttgacttgcatacatgcaaatgaaaaacaaaacaacaaaaatggaaaatcaggaaatcact

SEQ ID NO: 7390 - DNA, 201 bp, Homo sapiens
acctcatgatccactcatcttggcctcctaaagtgctaggattacaggtgtgagccaccatgcctggccaagaatcccactcttaattgaacaataaattsgtacaatctttctggaaaactatttgaaaatattatttaacattttgacaaataactttttcctagaaggactgaaccaataatccttcttctaggaaac

SEQ ID NO: 7391 - DNA, 201 bp, Homo sapiens
  misc_feature (1)...(201): n = A,T,C or G, or insertion/deletion polymorphism (see Tables 1-2)
tgtggccacaataaacagagggaaaggggtggaagagaagatgggaccctgcagatcttgaaggctaggtagggatggtgaattttattctgagtgggtgnaaaatcactgaaagcctgtgaatcattcgtatattaaaaggatcactttagtggatgttgaaaatgtgttttagagttaagggtggaagcaaggaaacca

SEQ ID NO: 7392 - DNA, 201 bp, Homo sapiens
cgtcctttagatcaattactttctttctccagatattatctcatactcacagaaacttaatagatgaagaaactagaaacatgcatgcccaaaaccctggyaggcttgttgtactacacgaattaaaatatgtctcttgagccaaatgtccttagaaagaagaaatggagttaaaggaattgaggtctgctctaattcatc

SEQ ID NO: 7393 - DNA, 201 bp, Homo sapiens
caaacaatatacttttctgtcacagttacaatatgaaatattatatgtaagcatactaatagctaatttttaaggtttaaaattcgctagttatactttayaccaaaatgatgaaatacaaatcagcctttcatgattaaataattactttaagactttatatgcctactggttctaattctgcacaaaaattaccaggat

SEQ ID NO: 7394 - DNA, 201 bp, Homo sapiens
acacacagagataacagcaataataactaccttaggctgaaaataaccatcctctcttttgttctctaggtaaccaacaagaaatgcaagccgtcgacaayctcacctctgcgcctggtaacaccagtctgtgcaccagagactacaaaatcacccaggtcctcttcccactgctctacactgtcctgttttttgttggac

SEQ ID NO: 7395 - DNA, 201 bp, Homo sapiens
actttctttctccagatattatctcatactcacagaaacttaatagatgaagaaactagaaacatgcatgcccaaaaccctggcaggcttgttgtactacrcgaattaaaatatgtctcttgagccaaatgtccttagaaagaagaaatggagttaaaggaattgaggtctgctctaattcatctttatttctttaaaata

SEQ ID NO: 7396 - DNA, 201 bp, Homo sapiens
agatgtcattttaaaggaactgtttctttctaagacacaactcccactgatgattttttctaaatagttttaagggtcttttcagagctcattgaagatgsatgtgcttggaaaatgagtatttcttttctcattctgcctggtgatctggctgagagtagatttggattgggtttaggagtggcataagggactgagttg

SEQ ID NO: 7397 - DNA, 201 bp, Homo sapiens
attgtgaaccaaaatgtgaaccaaataaaagaatgacctatcatctggggcatctataatgttattcataggcaagaacttgctttgttatgttctgaatyaccataacacagatgctaatataaaacaaatatttatataagcgagggtgactgctttggtgacgaggacatgggataaaaatatggtggcagaaatcat

SEQ ID NO: 7398 - DNA, 201 bp, Homo sapiens
aacacactaagatgacatctctgtgtatgtgtgtgcgtgtgtgcactgcaaattaaatctcagcttgtcttaagggtttgcatgtttgttatatccatcaractgtgaccttaacagttccccctttagaagttatacttgaaataggtattcatagaatacagtcactttagcaaaagaagaaacaattttcaccagaag

SEQ ID NO: 7399 - DNA, 201 bp, Homo sapiens
tcaatcatacagtcctttacttcctaagatacatttcataattttacccaacggtgctttccaacacactaagatgacatctctgtgtatgtgtgtgcgtstgtgcactgcaaattaaatctcagcttgtcttaagggtttgcatgtttgttatatccatcaaactgtgaccttaacagttccccctttagaagttatact

SEQ ID NO: 7400 - DNA, 201 bp, Homo sapiens
accacttgtctgaggctctgcctcttaaaatccttcaagaggatttcactacacttaccttctcactcacctctaaaggctccaggacgtgctccaggatktgcatgcaaggggccagtttgcatatctgcaaatattgctgggaaacaagcaagattggtgcctgattatgacccattgtgaaccaaaatgtgaaccaaa

SEQ ID NO: 7401 - DNA, 201 bp, Homo sapiens
ccaactctaggaagctttgcttcccttcctgcccctcctcagaagcttcatgcccttctcaccatgtctcacctactgatgcctcctggtcatttgggcamttgtctgtctcagcagctaaacttgcaatccaggagggtatacatggtcctcttctctgtcatgttcttagtacctaatggagtgcctgccacccattag

SEQ ID NO: 7402 - DNA, 201 bp, Homo sapiens
cgagggtgactgctttggtgacgaggacatgggataaaaatatggtggcagaaatcattgtctgaaaagtaattgttttacttttattcttttcgtgtgtktgtgtgtgtgtgtgtgtgtgtgtgtgtgtgtgtgtgcatgtgccagatttcttgtttgaaaggcaatgagcttcatccaagtatcaaagaatgttagcat

SEQ ID NO: 7403 - DNA, 201 bp, Homo sapiens
tgaattttcaggccttgcttcttggctcatgctgttacctctgtctgaaatttccctcctccattgtcgacactttactcctcttaatgtgggtgtcccawctctaggaagctttgcttcccttcctgcccctcctcagaagcttcatgcccttctcaccatgtctcacctactgatgcctcctggtcatttgggcaattg

SEQ ID NO: 7404 - DNA, 201 bp, Homo sapiens
aattagccgagtgtggtggtgggtgcctgtaatcccatctactcgggagtctaaggcagggaaaattgcttgaactcggaggtggaggttgcagtgagccraaatcgtgccactgcactccagtctgggccacagagtgagactccgtcttaaaaaaacaaaaaaagtcaggctttctcactccactgtttttaaaacact

SEQ ID NO: 7405 - DNA, 201 bp, Homo sapiens
ctactcttagatcagctgattagcaaattgaatgtcatctgcaccttcattcctctttggcaggtcacatagctcattaccgggttccagggattgggagrtggatgtctttggaggtggagaattggtctagctaccacagaaagggattttactacttgtgcccaaacgtattctgaattttcaggccttgcttcttgg

SEQ ID NO: 7406 - DNA, 201 bp, Homo sapiens
gttcaagaccagcctgaccaacatggtgaaaccccgtctctactaacaaatacacaaattagccgagtgtggtggtgggtgcctgtaatcccatctactcsggagtctaaggcagggaaaattgcttgaactcggaggtggaggttgcagtgagccgaaatcgtgccactgcactccagtctgggccacagagtgagactc

SEQ ID NO: 7407 - DNA, 201 bp, Homo sapiens; identical to SEQ ID NO: 944

SEQ ID NO: 7408 - DNA, 201 bp, Homo sapiens
acgcctgtaatcccagcactttgggaggccaaggcggacagatctcctgaggtcaggagttcaagaccagcctgaccaacatggtgaaaccccgtctctastaacaaatacacaaattagccgagtgtggtggtgggtgcctgtaatcccatctactcgggagtctaaggcagggaaaattgcttgaactcggaggtggag

SEQ ID NO: 7409 - DNA, 201 bp, Homo sapiens
gcagttattgatgagctgatgcaggtaagacttcattctatcagtgagagcacctttttcatgctaaagataaccagccagggtctttgataaagagatayaaaaagaggtctggaggccttttaaaggcctgacagacctacattttcaagaagacagccttgagggtgccgtctatagggagcacaaatgtgagcagat

SEQ ID NO: 7410 - DNA, 201 bp, Homo sapiens
aagatggatgtgcttggaaaatgagtatttcttttctcattctgcctggtgatctggctgagagtagatttggattgggtttaggagtggcataagggacygagttgcaggctctgagacatgtactggcttcactcatttttatgaatgaatatttgaattttggaataccatgtaagtcatgcttactgttcattctcc

SEQ ID NO: 7411 - DNA, 201 bp, Homo sapiens
agcagatcacattatgaaaagcagactccaaagtattcactctgtggtatcccccacactcggcaaatgtttttgtgcattttcttatgtcagcctcaaarcaaccatatgggatctgcacaaaggagggaaccaaaccttaggagagttaaaccacttgtctgaggctctgcctcttaaaatccttcaagaggatttcac

SEQ ID NO: 7412 - DNA, 201 bp, Homo sapiens; identical to SEQ ID NO: 949

SEQ ID NO: 7413 - DNA, 201 bp, Homo sapiens
atgtaggctttctctgggtgagtgttgggttcaacacccttgtccaagctcatctctagaccctcacagggagctggcttctagccctagaatagagtggygctttgtaataactcgagtcatctctcaggtgttgaaggaaaagtgttggaaatgggttgagggaggtgggtgccaagcatgaatggatgggtgaaggtg

SEQ ID NO: 7414 - DNA, 201 bp, Homo sapiens
gtggccactccagacccaggaatgttcccatgccttcaccactcccaaaacctgctgagggccgtcagcaacatgctccagaaggtgagcctttcctgtcstctccactgtggacctgcaccctccctgaggaaggggcctctgatcctcccctctggtacctgatggaactgcagagaaattgtggaagttcattagcag

SEQ ID NO: 7415 - DNA, 201 bp, Homo sapiens
tgtgccttagtagtatttatgaagacttgaagatgtaccaggtggagttcaagaccatgaatgcaaagcttctgatggatcctaagaggcagatctttctrgatcaaaacatgctggcagttattgatgagctgatgcaggtaagacttcattctatcagtgagagcacctttttcatgctaaagataaccagccagggtc

SEQ ID NO: 7416 - DNA, 201 bp, Homo sapiens; identical to SEQ ID NO: 945

SEQ ID NO: 7417 - DNA, 201 bp, Homo sapiens; identical to SEQ ID NO: 946

SEQ ID NO: 7418 - DNA, 201 bp, Homo sapiens; identical to SEQ ID NO: 947

SEQ ID NO: 7419 - DNA, 201 bp, Homo sapiens; identical to SEQ ID NO: 948

SEQ ID NO: 7420 - DNA, 201 bp, Homo sapiens
cttgtctgaggctctgcctcttaaaatccttcaagaggatttcactacacttaccttctcactcacctctaaaggctccaggacgtgctccaggatttgcmtgcaaggggccagtttgcatatctgcaaatattgctgggaaacaagcaagattggtgcctgattatgacccattgtgaaccaaaatgtgaaccaaataaa

SEQ ID NO: 7421 - DNA, 201 bp, Homo sapiens
tctggggcatctataatgttattcataggcaagaacttgctttgttatgttctgaatcaccataacacagatgctaatataaaacaaatatttatataagygagggtgactgctttggtgacgaggacatgggataaaaatatggtggcagaaatcattgtctgaaaagtaattgttttacttttattcttttcgtgtgtg

SEQ ID NO: 7422 - DNA, 201 bp, Homo sapiens
aaaggctaatgttttaaaagatgtcctctgcctttctgctctctaggaattttttcttgagtattttctagcttgttgccttaggaatatcttaaaataarctcaatgccaccaagccttcttaaagggctcctttcccctttcaatctttcataatgtgctgtgcattgctcctcacaattcaattaatcttaattggac

SEQ ID NO: 7423 - DNA, 201 bp, Homo sapiens
ttgctcctcacaattcaattaatcttaattggacagggggctcaagtgaaaactgctttgtttcccgaagaaaggttcaaaatgggtaacttttaggtgcyccaattcatatagatttttttgtgcaaaagctgacacccctactcccagatatagtcctaagggtcaaaagattatagaaatcaatttaatgttttgtac

SEQ ID NO: 7424 - DNA, 201 bp, Homo sapiens
gctgcccacattccttgacttgtggccccttccattgtccataccagcaatgtctggttgagtctttctcatgctgctccctctggactgaccttctaccygcttctacttttgaggacactgcttacactggattcacccagataatccaggatcatctctctactcttagatcagctgattagcaaattgaatgtcatc

SEQ ID NO: 7425 - DNA, 201 bp, Homo sapiens
tcaggtctagaggctgcccacattccttgacttgtggccccttccattgtccataccagcaatgtctggttgagtctttctcatgctgctccctctggacygaccttctacccgcttctacttttgaggacactgcttacactggattcacccagataatccaggatcatctctctactcttagatcagctgattagcaaa

SEQ ID NO: 7426 - DNA, 201 bp, Homo sapiens
ccctttagaagttatacttgaaataggtattcatagaatacagtcactttagcaaaagaagaaacaattttcaccagaagcaagtgtcacagtgaggtgtrgaggctggttagcacaggctgttgacatgatttattgtgtttacataatgaaaaaatatgtaatccagagaaacatgccccaagcttagggagaggaggg

SEQ ID NO: 7427 - DNA, 201 bp, Homo sapiens; identical to SEQ ID NO: 950

SEQ ID NO: 7428 - DNA, 201 bp, Homo sapiens
acttgtggccccttccattgtccataccagcaatgtctggttgagtctttctcatgctgctccctctggactgaccttctacccgcttctacttttgaggwcactgcttacactggattcacccagataatccaggatcatctctctactcttagatcagctgattagcaaattgaatgtcatctgcaccttcattcctct

SEQ ID NO: 7429 - DNA, 201 bp, Homo sapiens
gaggcctgtttaccattggaattaaccaaggtataaaggattttcctcccagagcatgcagtgtggttaaaaactgtgcatcaaatctcacctgcttctaraaattcacgtttctggtatccatcattatgggattttaactggtcctacttcagaagttagatttgggagaaaaattatttttaaaaaatggtttttttt

SEQ ID NO: 7430 - DNA, 201 bp, Homo sapiens
ttaccattggaattaaccaaggtataaaggattttcctcccagagcatgcagtgtggttaaaaactgtgcatcaaatctcacctgcttctaaaaattcacrtttctggtatccatcattatgggattttaactggtcctacttcagaagttagatttgggagaaaaattatttttaaaaaatggttttttttgcaacaatg

SEQ ID NO: 7431 - DNA, 201 bp, Homo sapiens
gcttcactcatttttatgaatgaatatttgaattttggaataccatgtaagtcatgcttactgttcattctcctaggccctgaatttcaacagtgagactrtgccacaaaaatcctcccttgaagaaccggatttttataaaactaaaatcaagctctgcatacttcttcatgctttcagaattcgggcagtgactattga

SEQ ID NO: 7432 - DNA, 201 bp, Homo sapiens
agctgtagttgctatttcatttttaggaccaagagttgggtgatttgggtgctagaatcaattctaccagtaaccagacaactattcccaagtcacttaamccctctgtgcctcagtttcctccagtataaaatggggtgactttattctagctttcttttagactttttgtgaggaagatatgaaagtatttattcatca

SEQ ID NO: 7433 - DNA, 201 bp, Homo sapiens
tcttcaatcatacagtcctttacttcctaagatacatttcataattttacccaacggtgctttccaacacactaagatgacatctctgtgtatgtgtgtgygtgtgtgcactgcaaattaaatctcagcttgtcttaagggtttgcatgtttgttatatccatcaaactgtgaccttaacagttccccctttagaagttat

SEQ ID NO: 7434 - DNA, 201 bp, Homo sapiens
attagcacttatcccagtttgtaatttaccatttgtgtcttatttgattaatgtctgtctcccatgtccagccttactctccatgaagccagggagcatayttcttttgtgtatcaatatatgcatttagtgacttgcatatagtaatcactcaataaatgtttgctgaaggaaatttaaggtttgtttactgtttccttt

SEQ ID NO: 7435 - DNA, 201 bp, Homo sapiens
  misc_feature (1)...(201): n = A,T,C or G, or insertion/deletion polymorphism (see Tables 1-2)
tatggatccatgttctgcatattagctcactcatactcatccaagactgtaactataggtacccaacacccagaattgagatggccactgaaaactctatncttgaccaacactctaatatcattttattttctttaattgcctttgtaagaagtataatacaaacaaaactccagtaagcaaatggctttaattatttgt

SEQ ID NO: 7436 - DNA, 201 bp, Homo sapiens
actttagtttcctgggatgttatctgtatcatgtaaaagaatgtttgattttgaactaaagttaaattctttctcattcttcatcttttggctcaaaagtyacttcttcaggggatacttttctgggcccccaaatctctctgctatgcagtctcacagtcctctgtactttccacattagcacttatcccagtttgtaat

SEQ ID NO: 7437 - DNA, 201 bp, Homo sapiens
gatccacccaccttggcctcccaaagtgctgggattacgggagtaatccaccacacctggcctttcatgcttttaggaaaaatttgaaattcttttaaacrtgggtcctggagaatcgctgaacttcctttttttttcttctattgagacagaatttctctctgctgtctatgctgattacagactcctgagcttaagaga

SEQ ID NO: 7438 - DNA, 201 bp, Homo sapiens
tcatgaagaagatggtcagaccaaggaagatatcacatttgtgaaaaggagggtattcaaaggccataaaaggcagaacttcaaaatattttaaaaagccraatgaactaaaatgttcacctgtgataaataatagcaacattgaacatttctcaagcacagagagtaatgtcccacccctgtactaagtgtgcacagtga

SEQ ID NO: 7439 - DNA, 201 bp, Homo sapiens
cattcagaaacagattttcaggtattttcagtatttggtggagttagggagctctgtgcaatctttcctatgagtatacatcccaggttaactatgcaccraagagatcaaggtgtgcaggggttgagaggggtcctctgctgattgagagtgattctttatcagtgtggatggagacaagaaagctgtgtgttcctcatt

SEQ ID NO: 7440 - DNA, 201 bp, Homo sapiens
gctttcataatgcattttaaagggtctgaatatccatccttcggccaatttctattaaggaggtgcagttttcaagaaggataaatcatatgtgctcttgygcccctatttttgctccccatcttctgtaaaatataaaactggtgtcactgagcacccaggtccctgagataaacagttggtttccctgtaggtaatgcc

SEQ ID NO: 7441 - DNA, 201 bp, Homo sapiens
ctctctctctctgagtttagttgtttctttttgctcgaatatatactccacttttatagcgtccccagtgcttagaatggtgtttggtttacagtgaatacctaccatttttctggtgaatgaatggattaataatctattaataacatggtatgtgtaataaaaatgtataggatctaggaaacatcctgtgtgtgggga

SEQ ID NO: 7442 - DNA, 201 bp, Homo sapiens
ctcatctgtagaataggaacgatactaatgcctacttgattgagtggctgtgaggatggatgaatccatgtagaatacttggtccagtttctgccacctastaagtgctcatttaatctaagctgtgattattaacactattaacaatattgtgttttctaaatatatagttggctttctatcacatagagaactttcttt

SEQ ID NO: 7443 - DNA, 201 bp, Homo sapiens
gacgaacatgcttgcagtacggtgatttctttatgctgggtcatgttgttgggagtgttttgttttgtttcggttttgttttgttttatccccccgctccsccaccaatgtacctcttttttcaaggagaagagtcactacgtttgatggcagatggaatcagacggtcactagggggtcttggcacaagcctttgtggtg

SEQ ID NO: 7444 - DNA, 201 bp, Homo sapiens
cttttgtttaaaatgatatgaagtagttacatttcagaaagttacattttggaaaagaataattttgattcctctggatcccataaaagagaaaaagttgtttttttattttcttttgttttttttgtgttttttttttttgtttttgtttttttttgcctctagacttatctttttcccactctttagaatattaaaaaa

SEQ ID NO: 7445 - DNA, 201 bp, Homo sapiens
atacattgcaagttacaatagtaaactcatcctcatgtggcattttcacaatcccagaaaagctggccactttaaaatgaaaaaatttaaaatggtgctatatatttagacaaaacatttggtttgttgatggtgtatttcatttttagagtgtgatttttgttttgtatatattcgtataatgttgacagtgtatatggg

SEQ ID NO: 7446 - DNA, 201 bp, Homo sapiens
aggtgggaggattgcctgaacccagggaggtcaaggctgtagtgagctgtgattgtgccactgcactccagcctgggtgacaaagtgagaccctgttttcaaaaaaaaaaaaaacaaaaattaactagatttatatttctcagtcttgttcttcacataacattttttattctataaattctgttgaatttattttcacaa

SEQ ID NO: 7447 - DNA, 201 bp, Homo sapiens
ggtgggaggattgcctgaacccagggaggtcaaggctgtagtgagctgtgattgtgccactgcactccagcctgggtgacaaagtgagaccctgttttcaaaaaaaaaaaaaacaaaaattaactagatttatatttctcagtcttgttcttcacataacattttttattctataaattctgttgaatttattttcacaag

SEQ ID NO: 7448 - DNA, 201 bp, Homo sapiens
ttctcatagtatttttggtaaacttcaagttcgtatgctgagcaacctacctttttttaatttttttatttttatttatttatttattattatactttaarttttagggtacatgtgtacaatgtgcaggttagttacatatgtatacatgtgccatgctggtgcgctgcacccactaactcgtcatctagcattagttat

SEQ ID NO: 7449 - DNA, 201 bp, Homo sapiens
cagtcccaccaacagtgtaaaagtgttcctatttctccacatcctctccagcacctgttgtttcctgactttttaatgattgccattctaactggtgtgaratggtatctcattgtggttttgatttgcatttctctgatggccagtgatggtgagcattttttcgtgtgttttttggctgcataaatgtcttcttttgag

SEQ ID NO: 7450 - DNA, 201 bp, Homo sapiens
agcggcagcaaacttgagaaagcagccccgccagtttcggtgacagcgcaccccacggagaccctgtctttgttcccacgggcgttggtccgatgctcctrgaaagcactttgcgggagaacgaggttctccgccgtttgcagcctgccctccctagcggagttctctgctgggcggcgcggtcccgggctctgctcagag

SEQ ID NO: 7451 - DNA, 201 bp, Homo sapiens
tgactttttaatgattgccattctaactggtgtgaaatggtatctcattgtggttttgatttgcatttctctgatggccagtgatggtgagcattttttcrtgtgttttttggctgcataaatgtcttcttttgagaagtgtctgttcatatcctttgcccactttttgatggggttgtttgtttttttcttgtaaatttg

SEQ ID NO: 7452 - DNA, 201 bp, Homo sapiens
tttgcccactttttgatggggttgtttgtttttttcttgtaaatttgtttgagttcattgtagattctggatattagccctttgtcagatgagtaggttgygaatattttctcccattttgtgggttgcctgttcactgtgatggtagtttcttttgctgtgcagaagctctttagtttaattagatcccatttgtcaatt

SEQ ID NO: 7453 - DNA, 201 bp, Homo sapiens
ttagacatgaagtctttgcccatgcctatgtcctgaatggtaatgcctaggttttcttctagggtttttatggttttaggtctaatatttaagtctttaarccatcttgaattgatatttgtataaggtgtaaggaagggatccagtttcagctttctacatatggctagccagttttcccagcaccatttattaaatagg

SEQ ID NO: 7454 - DNA, 201 bp, Homo sapiens
atatggctagccagttttcccagcaccatttattaaatagggaatcctttccccattgctttttttctcaggtttgtcaaagatcagatagttgtagatayacggcgttatttctgagggctctgttctgttccattggtctatatctgtgttttggtaccagtaccatgctgttttgcttactatagccttgtaggatag

SEQ ID NO: 7455 - DNA, 201 bp, Homo sapiens
tatggacttctttcataaatggtagaacacgtatccatcacaccttattggattaattcagaaatgccagatatatgtactctttgctgatggttactttkttggtctctaatttaagtcttatctctaatcacattagctgagaaaatggagacattatcattctaaaaataagatggttaacttttatattaggacact

SEQ ID NO: 7456 - DNA, 201 bp, Homo sapiens
agtaccatgctgttttgcttactatagccttgtaggatagtttgaagtcaggtagtgtgatgcctccagctttgttcttttggcttaggattgacttggcratgcgggctcttttttggttccatatgagctttaaagtagttttttccaattctgtgaagaaagtcattggtagcttgatggggatggcattgaatctat

SEQ ID NO: 7457 - DNA, 201 bp, Homo sapiens
tttggatcctaaagttttcttatttggagcagagctttgtgatagacaggaaagttctggaaaatgagctgagcgatcagactacaggatcccttaagtcyggtgcagtatttcatttttctgtgaatcttaggctcctactccttttccaatttacttcactccaatgtttatgttcctaagagtttgtctgttttccaa

SEQ ID NO: 7458 - DNA, 201 bp, Homo sapiens
ttgtaggatagtttgaagtcaggtagtgtgatgcctccagctttgttcttttggcttaggattgacttggcaatgcgggctcttttttggttccatatgarctttaaagtagttttttccaattctgtgaagaaagtcattggtagcttgatggggatggcattgaatctataaattaccttgggcagtatggccattttc

SEQ ID NO: 7459 - DNA, 201 bp, Homo sapiens
ggctgggtgtggtggctcatgcctataaatctcagcactttgggagtctgaggtgagcggattgcttgagcctaggagtttgagaccagcctgggcaacayagtgagactccatctctacaaaaaatacaaaaaattagccaggaatggtggtgtgcccttgtggtcccagctacttgggaggctgaggtgagatgatcgc

SEQ ID NO: 7460 - DNA, 201 bp, Homo sapiens
actgcccttttaatggtttaactggtgtttccccttaggtcatttaaattgtaagtaagtcttccaggtgattgttggattaattaagaaaataggaatcrtattcactttctgtttacctgtataatattccttcctgcctaagagtagttcgtgtttaactccaacttgaaaataagagaaacattgaagaaactatta

SEQ ID NO: 7461 - DNA, 201 bp, Homo sapiens
atacctagtttattgagagtttttagcatgaagggttgttgacttttgtcaaaggccttttctgcatctattgagataatcatgtggtttttgtctttggytctgtttatatgctggattacatttattgatttgcgtatattgaaccagccttgcatcccagggatgaagcccacttgatcatggtggataagctttttg

SEQ ID NO: 7462 - DNA, 201 bp, Homo sapiens
gaaagaggtatggctgtttattctgattcagattttctttagtgaaaaaaagaaaaaagagggtaaaagaaagcataataactccataaagaggaaagcgtttttttttttgttgttgttttttttaatcagttctgatttcctttctggtatctctgctggtgttttcaaaacttggcaactttgtggctgtggaagact

SEQ ID NO: 7463 - DNA, 201 bp, Homo sapiens
tagcaaagatggccttatacatggtaccacaacctatgtggtacgatgttaggagccctgataagatactctgttcccctacaatctgctccatcaagccrgtgaggaaggtatgtaggcattaggaatgcctaaaatgccacaattagaaaattcattccttggagggcttctgttttctgctgaaagtgcaaacacccg

SEQ ID NO: 7464 - DNA, 201 bp, Homo sapiens
gctgaggtaggaggatcccttaagcccaggagatgcaggttgcagggactgagaacatgcatggcactccagcctgagtaacagagtgagaccctttctcaaaaaaaacaaaacaaacaaaacaaaaaaaacaaccaatactagtcattcccagcatgggctgggcgtgaaaactggagaatggctaacatgagactcttg

SEQ ID NO: 7465 - DNA, 201 bp, Homo sapiens
caggacctctgggtaatgggcagtagccactcaatcagttccagatgtggttcctcttggttgggagacccataaactaataaacaatcagtgccttctgygcctgataggtattggcggaacaggggcaacacaatagaaataaacactcccattggaaagaaagaattggagactcatggccatcaccaatgtatagca

SEQ ID NO: 7466 - DNA, 201 bp, Homo sapiens
gctattcgaccttggacaaattacttaacttctctgagcctgttttctcatctgtacagtggagtttatggctgaggaagtaaaagtacttcataacactraggtatcctgtaaatacagagcgctgtttccctcaaatgatcaatatttttagaaaatccatgaaagacctgtgagaataatgatccaagggcaaactgc

SEQ ID NO: 7467 - DNA, 201 bp, Homo sapiens
acttaacttctctgagcctgttttctcatctgtacagtggagtttatggctgaggaagtaaaagtacttcataacactgaggtatcctgtaaatacagagygctgtttccctcaaatgatcaatatttttagaaaatccatgaaagacctgtgagaataatgatccaagggcaaactgcccttttaatggtttaactggtg

SEQ ID NO: 7468 - DNA, 201 bp, Homo sapiens
gtgagcggattgcttgagcctaggagtttgagaccagcctgggcaacatagtgagactccatctctacaaaaaatacaaaaaattagccaggaatggtggwgtgcccttgtggtcccagctacttgggaggctgaggtgagatgatcgcttgagcccaggaggtcgaggctacagtgagctgtgatcatgccactgcactc

SEQ ID NO: 7469 - DNA, 201 bp, Homo sapiens
caggaatggtggtgtgcccttgtggtcccagctacttgggaggctgaggtgagatgatcgcttgagcccaggaggtcgaggctacagtgagctgtgatcaygccactgcactccagcctcagcgacagagtgagaccctgtctcaaagaaaataaatacatagttgaaaagatacagataattaggttgatccatttgaga

SEQ ID NO: 7470 - DNA, 201 bp, Homo sapiens
gagccaggtgttacttattataatggatttagcctcttgtctaccttgataaaaacttcaaaaagtggacaagatgtcatctttcttaaggctcaaacaayaacaaaagcttgcctatgggatggtcatcaataaaaggaaggtaacaaggccctctagctcccactccactgagaataagatttgaggcccagtagtcca

SEQ ID NO: 7471 - DNA, 201 bp, Homo sapiens
atcatttgtttgaacaatggtgttttagaccaaaaaagtaagttttcatgaattctcctcctgcgtcagaaaggtagtgtgtaaagccatggattaaaaakaaaagttaaataaaatgcttatatactttatagtttgcacaacatctagaaattactaatcactaattttcctgtttcacattaaaaacataaaattctg

SEQ ID NO: 7472 - DNA, 201 bp, Homo sapiens
agaaagttacattttggaaaagaataattttgattcctctggatcccataaaagagaaaaagttgtttttttattttcttttgttttttttgtgttttttktttttgtttttgtttttttttgcctctagacttatctttttcccactctttagaatattaaaaaaatgcttgggtcagatactgtttgcattgcattgat

SEQ ID NO: 7473 - DNA, 201 bp, Homo sapiens
gagtccagaaaggcgcttgctcaaggtggaaggtgagtttgacatagtaggacttcctgaggtgaaagtatgtcttaggtatttgggcacaactggagccrtgaagagatattgcttgtgccaaggactgttaagggacacacacaggcacattgagagcatcaggaatggccaccttacagcatgcgaaggaagacagtg

SEQ ID NO: 7474 - DNA, 201 bp, Homo sapiens
gtgggaaagatatactaagtaggcacaagatcagagaagcagagtcacaggggccattgactggaggggcaggcagctcatcaacaggcgctaatgtaccrttggagtccagtgtggtgtacgattgtgtgtttattgtggtggtcctgaggaagaaggaggaggtgaaggagcagggactcagcagtaatttaaaaagta

SEQ ID NO: 7475 - DNA, 201 bp, Homo sapiens
cccctcccccgaccccaccacagtccccagagtgtgatattccccttcctgtgtccatgtgatctcattgttcaattcccacctatgagtgagaatatgcrgtgtttggttttttgttcttgcgatagtttactgagaatgatggtttccaatttcatccatgtctctacaaaggatatgaactcatcattttttatggct

SEQ ID NO: 7476 - DNA, 201 bp, Homo sapiens
attgcagaaggagaaaggaggacatgccttctctgtttaaaggagactttccagaagtcccacacaacactactgcttgcatttgatctcatcgattaagrcttagtcctatgatcacatttggctgaagtttggaaaatgtagctttttagctcagcacatagttcacctgagtaacactgggttctattactgaggaga

SEQ ID NO: 7477 - DNA, 201 bp, Homo sapiens
gcagggactcagcagtaatttaaaaagtagataaatgctatcaggaaaatacactctgtgggtgattcatcctctgatgagtggacattgctgagaggtgrtagtttgtgaactgacaatgcaaagacattcaagaggtggagctgtcttcttttgtagtgaagctgcagtagaatatgctttgtttgtatttaagtaata

SEQ ID NO: 7478 - DNA, 201 bp, Homo sapiens
actgagaatgatggtttccaatttcatccatgtctctacaaaggatatgaactcatcattttttatggctgcatagtattccatggtgtatatgtgccacrttttcttaatccagtctatcattgttggacatttgggttggttccaagtctttgctattgtgaatagtgccacaataaacatacgtgtgcatgtgtcttt

SEQ ID NO: 7479 - DNA, 201 bp, Homo sapiens
atttctgtggttcttcacatgttcctaatgcaaatgtttccgaagtaatttcttgacagttacagtgttttgagatgaagtgggaagggcttgtgattttraagttggaggatcttggtttgattcctacctctgccatttattatctgggaaatccagtaccacacatgctgggtgctctggggcagttttcttatctgt

SEQ ID NO: 7480 - DNA, 201 bp, Homo sapiens
ctcctccttcatcttcttcttctccaaaagcatcactgaagtgtttaagacacattgttcgattttttaaaattgaaggtatacaacatgacattttgatrtacttatatatagtgatgtgttataatcaagcaaattaacatatccgttatctcacatagttatctttaaaaaaattatttttgtggtaagagcacctaa

SEQ ID NO: 7481 - DNA, 201 bp, Homo sapiens
taatcaagcaaattaacatatccgttatctcacatagttatctttaaaaaaattatttttgtggtaagagcacctaaagtctactgtcttggcaaattttygggaatgaaaatacattagcattttttctagcaccattcaggtataaaggaaagaaattaacctcaggttgcaaatattatttatgtgatcataaagata

SEQ ID NO: 7482 - DNA, 201 bp, Homo sapiens
tcgcaattaaaatggactgcagttttgcatttaagattctgaaatagtcattgactcattcctaataaccctgcccaggatctcaccagcattagaaagaytggagatgtttcagcatccgagttctgggatgcttcttgataatgatcagctagtagttgttttgaaatgtcaagagcatttctgtggttcttcacatgt

SEQ ID NO: 7483 - DNA, 201 bp, Homo sapiens
tagtagaataagggctttcagtttaaacagaacccacatgagtgtttcattaatcatgttcacgtgttaatggattctcttgaggcctttggagtcattgyttttgcaatatttccttagggcctttttcttcagtccagattaatctaaaatacattgcactgatccagagatgtcaccaaattctcctgaaaagccctt

SEQ ID NO: 7484 - DNA, 201 bp, Homo sapiens
atgcgctttcagcttggtccagaactgatgccatgtcagtgcccctactcccaaagaccatacctccagatccatttttcaaattcttgagccatcaaagygcattcctgaagatctttgggttttgtagtgcaggctgctgtaagactaggttttcagtcttactaaaggtaattattaggtcataatcattgttcatgt

SEQ ID NO: 7485 - DNA, 201 bp, Homo sapiens
ttctttttctctttcttttgctctgggtttgctctgtcagtcaggctggagtgcagtgcagtggcatgatcatagctcactgtagcttcaaactcccgggygcaagcgatcctcccacctcagcctcctgaatagctaggactacaggtgtgcaccatcacacctggttaatttgttttgtttttgtagatactggctctc

SEQ ID NO: 7486 - DNA, 201 bp, Homo sapiens
ataattgttgaaaatgtcttaaaaacacagctagtatcaaccagagaaataatttagcaaagagttaatttatttcactaagtagtgatatatttttgaaygcatgtggaatagatgtgtgcctataaacttgactttgtgaattaagttttatttttctagttcagttttactttgaatatggatatgttgttgttttgt

SEQ ID NO: 7487 - DNA, 201 bp, Homo sapiens
aactctgagaaggtttggtgtggtgtacaaggcaaaagaatggttctgtcatgagcgagttgactagctacctggaacctatccattacttgatgagggcrgtagtccttttctgttttcttttcaagtatttggcatcaggattggtgcagccatactggttattgaatactgaactacttccatgaggttggtagatag

SEQ ID NO: 7488 - DNA, 201 bp, Homo sapiens
tcacagccctcctgcatcttgcagctgtgctgcctggaacacatggcttccaaggttgctgcagcagcacaggagacacggaggaggcacgtgtgcttttcattgcttcagcccagtagtgacacatggcacctccaactgacagtacgttggctagaactggtcacatggtcctaacccagctgcaagggagactgggaa

SEQ ID NO: 7489 - DNA, 201 bp, Homo sapiens
acaacagataaggtcatttggggacaaatcaaggagggcctttaatatcatgctaagaagttgaactttattcttttgagtgataaggagcaagtagggattttttttaaaaaatttcaacttttattttagttatagggggcacatgtgcaggtttgttacatgggtatattgtacccagatagtgagcatagtacccaa

SEQ ID NO: 7490 - DNA, 201 bp, Homo sapiens
atatgcctgtgctcttaaaagattttgctttaggaatagaaacgtataacttatttttgtttaaaggttacttagctattttattatttttacatattatygtctaaaccttttttagtatggaaggttttttttaacatatacaaaagaagcatgaagtgtatagtgaacccctttgtatgcatcactcaattacatcaa

SEQ ID NO: 7491 - DNA, 201 bp, Homo sapiens
ttttggtatatgcagagttgtgtatccatcatcataatcggttttaaagcattttttcatcaccctacaaagaaaccctgttcctctgagccaccattttyctgccctcagtacctgctaatctgctctctgtctctatagatttgcctattctggacatttcctacaaatggaatcctacagtatgtggttctttgtgac

SEQ ID NO: 7492 - DNA, 201 bp, Homo sapiens
aaaatccacacattcgtcagtagaatttaaaacttggcctatgcctgatgactggtttagactacaggctgcaaagcagcggctggtgggccaaatatggyccataggacatatttggctgggacaacacagagctttaagatttttttttttttaacatagtgctgacatttaaaatttaagaaaagaaagaaaacctgt

SEQ ID NO: 7493 - DNA, 201 bp, Homo sapiens
gtctgttgttcccatgtgtatgtccatgtgtgctcaatgtttagctcccacttataagtcagaacatgtggtatttggttttctcttcctagcaaggaatyctgaggaagggagtgaaagaaccaaatttgtgttttagaaaaattggtcaggattgatgtggagagaggccagggccagggagaccagttaggagaaaat

SEQ ID NO: 7494 - DNA, 201 bp, Homo sapiens
gcctgatgactggtttagactacaggctgcaaagcagcggctggtgggccaaatatggcccataggacatatttggctgggacaacacagagctttaagatttttttttttttaacatagtgctgacatttaaaatttaagaaaagaaagaaaacctgtatttcttgctttggaaatcagaggagcggattacactgggta

SEQ ID NO: 7495 - DNA, 201 bp, Homo sapiens
gtgctcaatgtttagctcccacttataagtcagaacatgtggtatttggttttctcttcctagcaaggaatcctgaggaagggagtgaaagaaccaaattygtgttttagaaaaattggtcaggattgatgtggagagaggccagggccagggagaccagttaggagaaaatggtcttaatggatgtaggctggagtcctc

SEQ ID NO: 7496 - DNA, 201 bp, Homo sapiens
attttcccagttcttaagtccaaccatttcattcatgttctagatctcattccctctcacctctctgcaattgtcccctctttcttttatgaaatcctctrttccacattaccttctaactatcactctattttttcggttccactttacagtaaaattcttgtacagatgtgcctatatccactgtaattacctttcaat

SEQ ID NO: 7497 - DNA, 201 bp, Homo sapiens
ttttaatgcaaaaagatctcttttaggtcaggtaaggagacagattatttggcatcatatttctattacaagttccagattactcagtggctgtttgttcrtaatccagttatagactggattgatctgtaaccttgagtcattctcctctctcgtgtctcttatgaattctaagttgaaagcctgatgctagggaagttg

SEQ ID NO: 7498 - DNA, 201 bp, Homo sapiens
atatagaattccttagaaaatcccattgttttgatcttcaaaatacatctagaatccaactacttttcaccatcttcacttctgccaccctgattcaaccractgccctctcttgcctcgacgattgcaatggcttccatactgatttccttgctgtagcaacttttttagaacatcagtcagatcacagcacccctctgc

SEQ ID NO: 7499 - DNA, 201 bp, Homo sapiens
tgagattgcccaatcctaggtgctcttattgatgggtgggaaggagtgggattgctgtttaagaaattttattatctttagaagggaagaatgtattatgttttttttttttagatgatctctttcatgtgggctaagataattttgagctctgactgtccaagctgcttagaggttctgagttgttctccactgggggtg

SEQ ID NO: 7500 - DNA, 201 bp, Homo sapiens
ttgtccaggacaagatcttctggccctgcggcttaactattgactaccccaacagactgctctacttcatggactcctatcttgattacatggacttttgygattataatggacaccatcggagacaggtgatagccagtgatttggtaagttggtggtgaggaaaaccaaattaaaactacagtcgtggataggtagaaa

SEQ ID NO: 7501 - DNA, 201 bp, Homo sapiens
tacagataagcaattagcccaggagggagaagaaaggggctgagaggatgaaagggaaggcggttaataggtttcttgcctaaggacatctagcctgtgayagagctaagatataaatttgcagtggaccattttttagattcatgccttctgaatgtccccagcctgtttggttggttgagatttctagattccttttgg

SEQ ID NO: 7502 - DNA, 201 bp, Homo sapiens
tcaaaaatagaaatggggtctcactgtgttgcccaggctggtcttgaactcttggcctcaaatgatcctcctacctctgcttcccaaagtgctgacattayaggcaggagccaccttacctggtccaacattatattctttaatccaataaaaatgtggtaatgtttttaagagttagtatcagcttttatgacaattaca

SEQ ID NO: 7503 - DNA, 201 bp, Homo sapiens
atgacatcttgtaagcataaagagataaaatatgccaagtgcttagcatggtgtaaagcatatagacagtgaaaataaactagaaaataatctaaaaatayaatatttttattatatttatcaacccttaaagtaacatattgttttgcttcctattcctatttccatttccaattttcaaatatacaaaggaaagtcttc

SEQ ID NO: 7504 - DNA, 201 bp, Homo sapiens
aatttgactttagggtcacttttaacctttgaccttatatagtacagatgcataccatatagatgtatccataagtttgtgcttttgaggttaaaatattrcttattctctggttacttcatattggaattctctttactgagggttgctatggtgataacacccttagcagtctgcattttgaaaagctttggacttttc

SEQ ID NO: 7505 - DNA, 201 bp, Homo sapiens
ctacagaaaggtcagtgagatgttcaataggtgagaaagctgtcaagctagacttggttaataattacagttaaaataatcactgatgtatttctttcacrcacgtttattgcaagctttttttttatcaggaactgacatgcatagatgaataagacatgcaaataaacaattgtgctacagggtgagaggtctataata

SEQ ID NO: 7506 - DNA, 201 bp, Homo sapiens
atttgtgtgacggagacaatgactgtggagataacagtgatgaaaaccctacttattgcagtgagtaagataaaactgctttctttctatcgttccagagrtgcatgttgtgagctaatacaaagatatgaagcgtgggtattcgggctgatttcaattgtcatttcacattgaccttctaagtagaggtggtaggcagtt

SEQ ID NO: 7507 - DNA, 201 bp, Homo sapiens
cttttatttgttcatttttatttacgcagtgttccttgctcatttttgaagtaattcaaaatgacactcacggtaagcttgcaaggctgcctttcctttaytataacggagaaaaaattctggaaagaaggcagctctttcagtatagtcatataagaacaaaatttccccaaacttggcttgtggctagattggaatccg

SEQ ID NO: 7508 - DNA, 201 bp, Homo sapiens
ggtgatcgcatttgtaatctgtatagacctgggaaagttacttaatatctcaagcctcagacatctcatctgtaaaatggagctactactagggttcttgygaggagtaagagaaacaatatgtaaaaatcccttagcatgaggcatggtgcaagctaagtctagcttagcttgggactaaggaaacgtatcattttacca

SEQ ID NO: 7509 - DNA, 201 bp, Homo sapiens
ctccaggctcatgtttcttatattctaaattctagaactttgatcagtttcatcagcataaccactcttgtaactgctgggctcccttttcagccatggcwgtaaagccacactgtgtctctcgccaatacccagcccagatcctggcacagagcaggcacttgaggcaggtttttggagtgaaattaaaccagctacatc

SEQ ID NO: 7510 - DNA, 201 bp, Homo sapiens
taactatattcaacaaggtactttaagatcaagtgacttaagtgaactctggaataatttaagaaggcccccaaatttctaatcattttaaaacattttayaaataaaagttatgatctgcaactggacttaaataagattgcaggacacattttgtgttttattgttatcattaccattatattgggaatgcattcaagt

SEQ ID NO: 7511 - DNA, 201 bp, Homo sapiens
ggttttataattattatatcttatcacatgataatttctatatgtttgaattttcaagtaccaccttgaaaactgtcactgtctacttatcttttacatatttttttttttttagagacaggggtcttgctttgctgcccaggctggagtgcagtggcatgattatagctcactctaactacataaaaagagaagtttttt

SEQ ID NO: 7512 - DNA, 201 bp, Homo sapiens
acacttggccaaacccagagtggatggaagaaatagactccatctattgatgggaagagcctaacaattttttagcaactccccgttcctaatccctaacrcacacacagggaggattgtttcaatggcaattttgatgaccttaaagatgttctggagattttattacctggcttatacttatggaaaaaggccttgtct

SEQ ID NO: 7513 - DNA, 201 bp, Homo sapiens
ctcctgagtagctgggactataggtgtgcaccaccatgcccagctaatttttaaattttttgtagagacacgatcttgttacgtttcccaggctggtctgraatcctgggctaaagtgatcctcctgccttggcctcccaaaatgttgggattataggcatgacccccccatgactggcctgaaaataattttagatgaga

SEQ ID NO: 7514 - DNA, 201 bp, Homo sapiens
tgggtgactgggactggaaatgtgctctgaaatgggaatgatttgtagtttttgcacagggtgtgtcaaatcatgaggtgctgaagggcatgttattcttstaagtagtttgattcattgggtccttatttacctgggcaggcaggccatcttaaattttcttctgtttggatagtgttcttttcaacatcctgtaagtgt

SEQ ID NO: 7515 - DNA, 201 bp, Homo sapiens
catcttccattctatgataataatatataataataatgtgtatagtaatagtaacctagcatacacatatatgtggcaggctttgttctaagcactttatrcttattgactcaattaatcttcataatatcccttggaagtaagtactcttattatcactgttttacagatgagaaagtggaggcacagaacaattcagta

SEQ ID NO: 7516 - DNA, 201 bp, Homo sapiens
cgcggagatggatcgcgggccggcagcagtggcgtgcacgctgctcctggctctcgtcgcctgcctagccccggccagtggccaaggtaagagcccagccrgagcctctcgtggagcccccacttccccggctgtggcagggtcgggtccgcgggaggccggaggggagagcgtccgggcaggggctagggccgggcggcg

SEQ ID NO: 7517 - DNA, 201 bp, Homo sapiens
ccggggaaggaacggcgaggccggggaccgtcgcggagatggatcgcgggccggcagcagtggcgtgcacgctgctcctggctctcgtcgcctgcctagcsccggccagtggccaaggtaagagcccagccggagcctctcgtggagcccccacttccccggctgtggcagggtcgggtccgcgggaggccggaggggaga

SEQ ID NO: 7518 - DNA, 201 bp, Homo sapiens
aagatcctaaaatgggtggggacagttggcttcccagttctccctgaccagtagctggcctgacataggtgctgagtgcttgctggataataaatgaaacrttgactaagcattcctattgtatgtatcaattcctgttttacgtatcctacatgtcaaaaagtatagtgattaatgatttccaggaacagaactgagcat

SEQ ID NO: 7519 - DNA, 201 bp, Homo sapiens
tttaaatcaaaataaaatttgacctaaattgatgctgagaagagtctatatcaaggcttctgtacaccttctcaaattcccttatttcttcttctcatgtcacacacacacacacacacacacacacacacactcatacactcacagacatacataaatattgtctagaaaggaattttcagtttcagatttttcaaggga

SEQ ID NO: 7520 - DNA, 201 bp, Homo sapiens
tatatatatggagagaatatatatataaaaaatatagagtatgtatctatactatatggtatatagaatctatatagattctatatatgatctatatagawtctatatatgatctatatagatatagaatatatattatagaatatagaatatatatttatagaatacagaatatatatctattatatatagaatatagaa

SEQ ID NO: 7521 - DNA, 201 bp, Homo sapiens
tatagaatatagaatatatatttatagaatacagaatatatatctattatatatagaatatagaatttatatatctgtataggatataggtatattctatrtatctacctatgtgtgtgtgtatgtatgtatgtatctatttatttacgtagcaaggttctgaactcagcatcccctcgtagctacacattcttctctaat

SEQ ID NO: 7522 - DNA, 201 bp, Homo sapiens
tggtaagctttggagattaaaaagaagtgatgatgtgtgtgaaaacactttgcagagttgggtgcatgtgtgcaatgacgaggaagctcttgttacatggtatggtttctgtacacacatctgacagggcacagcttctaaatctacgtgcttgttagtggtgtgactctccaacctttctcctagtgtagttcccttatt

SEQ ID NO: 7523 - DNA, 201 bp, Homo sapiens
ttaagctctttccccaaaatggccttcataggagaggagagagaacttgtgtttgcattattacccttcctagaatagttgactattttaggagggctaayagttaattaacaggacaggttttagtttctctctcccagtcgaaggtattgactacaaggcattggatagggaggttgaggaaaggaagccaagaggctg

SEQ ID NO: 7524 - DNA, 201 bp, Homo sapiens
ggatagttattttcagtgtaaattctttttcaccttttaaaaaatgtggctggtgttcctggaagagcatctttgaagaagctaattgggtcccgctgtgyctgcaggctaacaggagactcattttagcattttcagtcaagaaacagggccttagagtactgttgctagagtcaggaactcaaaactccagacattaac

SEQ ID NO: 7525 - DNA, 201 bp, Homo sapiens
tgttaagttttgggggtacattccttaacagatctaattttatcagaaaaccaagttttgctgaacctaaatatctatactacatataagtaaaagaagckctgtaggctgggagcctcggatccctgacagttttgcagaacgctgatatctatggactctaaaatagacttcatttatagatacccacggaccactaat

SEQ ID NO: 7526 - DNA, 201 bp, Homo sapiens
agaagctaaaaatcttgaaaaaagattagatgaatggctaactagaataaccagcatagagaagaccttaaatgacctgatggagctgaaaaccatggcaygagaactacgtgatgcatgcacaagcgtcaatagccgtttcgatcaactggaataaagggtatcagtgattgaagatcaaatgaatgaaatgaagtgaga

SEQ ID NO: 7527 - DNA, 201 bp, Homo sapiens
aaatataaaactggtgtcactgagcacccaggtccctgagataaacagttggtttccctgtaggtaatgccctgtgctctgctgtagtggagaagtcttaycaggtgagatgctacagtgaagaaatcttctgttataggcttatgttctggactgactggggaaaggaacctaaactcgagtctgcctggatgaatggag

SEQ ID NO: 7528 - DNA, 201 bp, Homo sapiens
aaacagatattctttttcctgggttgatgatttagtcactaaataaccaatacctactcttcttgatagttttttgcacccatccatcttccattctatgataataatatataataataatgtgtatagtaatagtaacctagcatacacatatatgtggcaggctttgttctaagcactttatgcttattgactcaatta

SEQ ID NO: 7529 - DNA, 201 bp, Homo sapiens
attttgtcaccaccaggcctaccttacaagaaatcctgaaggaagcactaaacatggaaaggaacaactggtaccagccactgcaaaaacatgccaaattstaaagaccatcaaggctaggaagaaactgcatcaactaacgagcaaaataaccagctaacatcataatgacaggatcaaattcacacataacaatattaa

SEQ ID NO: 7530 - DNA, 201 bp, Homo sapiens
aacagatattctttttcctgggttgatgatttagtcactaaataaccaatacctactcttcttgatagttttttgcacccatccatcttccattctatgataataatatataataataatgtgtatagtaatagtaacctagcatacacatatatgtggcaggctttgttctaagcactttatgcttattgactcaattaa

SEQ ID NO: 7531 - DNA, 201 bp, Homo sapiens
ctctgctgtagtggagaagtcttaccaggtgagatgctacagtgaagaaatcttctgttataggcttatgttctggactgactggggaaaggaacctaaamtcgagtctgcctggatgaatggagaggaccgcaacatcctggttttcgaggaccttggttggccaactggcctttctatcgattatttgaacaatgaccg

SEQ ID NO: 7532 - DNA, 201 bp, Homo sapiens; identical to SEQ ID NO: 998

SEQ ID NO: 7533 - DNA, 201 bp, Homo sapiens
gactcccacacaataataatgggagactttaacaccccactgtcaacattagacagatccacgagacagaaagttaacaaagatttccaggaattgaactsagctctgcaccaagcagacctaatagacatctacagaactctccaccccaaatcaacagaatatacattcctctcagcaccacattgcacttatttcaat

SEQ ID NO: 7534 - DNA, 201 bp, Homo sapiens
gttcaagtgcccattctcacgcacagagattctgcatttctaacaagctctaggtaggccacagggtcttggaccacactttggggagcaaggagttagaraattggcagcagcattttcctactcacctggtattgttgattacaacagggctgtgggagaagagctgtctgcagggctgctttagtacaaggcactcgt

SEQ ID NO: 7535 - DNA, 201 bp, Homo sapiens
acagatattctttttcctgggttgatgatttagtcactaaataaccaatacctactcttcttgatagttttttgcacccatccatcttccattctatgataataatatataataataatgtgtatagtaatagtaacctagcatacacatatatgtggcaggctttgttctaagcactttatgcttattgactcaattaat

SEQ ID NO: 7536 - DNA, 201 bp, Homo sapiens
caatattgaccacatagttggaagtaaagcactccccatcaaatgtaaaaggacagaaattataacaaactgtctctcagaccacagtgcaatcaaactaraactcaggattaagaaactcactcaaaaccgctcaactacatggaaactgaacaacctgctcctgaatgactactgggtacataaagaaatgaaggcaga

SEQ ID NO: 7537 - DNA, 201 bp, Homo sapiens
gaacacaggaggcagggattgcagtgagctgagattgtgccactgcactccagcctgggtgacagagcaagaatctgtctcaaaaataaaataaaataaaataaaataaaataaaataaaataaaataaaataaaataaaaataaataaaaaagaaaaaaaaaagaaaagaaagtagaaggtgcttatgaaagagtgttga

SEQ ID NO: 7538 - DNA, 201 bp, Homo sapiens
agccaaatcatgagtgaattcccattcacaattgcttcaaagagaataaaatacctaggaatccaacttacaagggatgtgaaggacctcttcaaggagarctacaaaccattctcagtgaaataaaagaggacacaaacaaatgaaggaacattctatgcttatggataggaagaatcaatatcatggaaatggccatac

SEQ ID NO: 7539 - DNA, 201 bp, Homo sapiens
aacacaggaggcagggattgcagtgagctgagattgtgccactgcactccagcctgggtgacagagcaagaatctgtctcaaaaataaaataaaataaaataaaataaaataaaataaaataaaataaaataaaataaaaataaataaaaaagaaaaaaaaaagaaaagaaagtagaaggtgcttatgaaagagtgttgaa

SEQ ID NO: 7540 - DNA, 201 bp, Homo sapiens
catgagccactgtgtctggcccctagtttctctgaaaagttcttacaagtctagcgtttatgaatttttccagaagttccttgagtttttaatatatatayattttaatatatacatataacatatatttctgacaggccttttcgtgcagtcctgcatttcataaatttactatgtgctgtataaagatatagtcatgtg

SEQ ID NO: 7541 - DNA, 201 bp, Homo sapiens
atctatttatttttaattttactttaagttctgggatacatgtgtgacgttcccctctctgtatccatgtgttctcatcgttcaactcccacttatgagtragaacatgtggcgtttggttttctattcctgtgttagtttgctgagaatgatggcttccagcttcatccatgtccttgtaaaagacatgaacttgttcct

SEQ ID NO: 7542 - DNA, 201 bp, Homo sapiens
tgtgaaacaggtaaaagctcattttcccccttagttcttttattattcaatctggtcatctgtaaaatggcatctcatattaaacagcttgtcaattaacttttttttttttttaaggaacagagagattcaaaactgcggtccattttacttctaatgggattagcatcaaggaaaaaccactcatgcagggtctaagat

SEQ ID NO: 7543 - DNA, 201 bp, Homo sapiens
attagattttgtcttttgttctgcccaggtgggtccctgggaataactactaaagtatgaaaccatggtgttgtctggctttcaatgaaaacatgtagccycgtgccactaaacatgatgtacattataaacatttgtttaccccttagaaggcatcttacttctttgtactattccttggagcatttgatgcacattttt

SEQ ID NO: 7544 - DNA, 201 bp, Homo sapiens
tcaggcaggagaatcacttgaacctgggaggcggaggttgcagtgagccgagatcgcaccactgcactccagcctggccacagagtgagactctgtctccaaaaaaaaaaaaaaaaaaaaaagtctggatcaatgtacacacttttcatagcagcttctgaaagagcctgtttcttgttactgttatgatataggctgtgt

SEQ ID NO: 7545 - DNA, 201 bp, Homo sapiens
acttttaaatccagttttgggggtctgtctacacactgttgctactaggcatgtgggtcatgctggttttgttgcctgattgggctccattgcttggctttggtctagagtcatggacttcatagtattcatgaaatgtagtccaagtccaagcacatgatgctcactttctgaatgtggtctattttccaaggtgtaatc

SEQ ID NO: 7546 - DNA, 201 bp, Homo sapiens
cttttaaatccagttttgggggtctgtctacacactgttgctactaggcatgtgggtcatgctggttttgttgcctgattgggctccattgcttggctttggtctagagtcatggacttcatagtattcatgaaatgtagtccaagtccaagcacatgatgctcactttctgaatgtggtctattttccaaggtgtaatca

SEQ ID NO: 7547 - DNA, 201 bp, Homo sapiens
ttttaaatccagttttgggggtctgtctacacactgttgctactaggcatgtgggtcatgctggttttgttgcctgattgggctccattgcttggctttggtctagagtcatggacttcatagtattcatgaaatgtagtccaagtccaagcacatgatgctcactttctgaatgtggtctattttccaaggtgtaatcac

SEQ ID NO: 7548 - DNA, 201 bp, Homo sapiens
ttggcctcccaaagtgctgggattacaagcatgagccactgcacccagtggttggccactcttaatagcaaccttcacagtataacaatgaactgtctctrgtttcctttgtcaccttaaagcggcatggagggaggggtgttatgcctcttgagtagataatggaacatcattttcattaccaacagggtatggaaatct

SEQ ID NO: 7549 - DNA, 201 bp, Homo sapiens
acacaggaggcagggattgcagtgagctgagattgtgccactgcactccagcctgggtgacagagcaagaatctgtctcaaaaataaaataaaataaaataaaataaaataaaataaaataaaataaaataaaataaaaataaataaaaaagaaaaaaaaaagaaaagaaagtagaaggtgcttatgaaagagtgttgaat

SEQ ID NO: 7550 - DNA, 201 bp, Homo sapiens
atttgcctgcctgtaccaggaggattgttttcctgcgcctgtgccactggatttaaactcaatcctgataatcggtcctgctctccatataactctttcaytgttgtttcaatgctgtctgcaatcagaggctttagcttggaattgtcagatcattcagaaaccatggtgccggtggcaggccaaggtatgccaactcca

SEQ ID NO: 7551 - DNA, 201 bp, Homo sapiens
cacaggaggcagggattgcagtgagctgagattgtgccactgcactccagcctgggtgacagagcaagaatctgtctcaaaaataaaataaaataaaataaaataaaataaaataaaataaaataaaataaaataaaaataaataaaaaagaaaaaaaaaagaaaagaaagtagaaggtgcttatgaaagagtgttgaatg

SEQ ID NO: 7552 - DNA, 201 bp, Homo sapiens
ggtcctgctctccatataactctttcattgttgtttcaatgctgtctgcaatcagaggctttagcttggaattgtcagatcattcagaaaccatggtgccrgtggcaggccaaggtatgccaactccaatataagtaagatttgacttcatctggcaccaggttgaaatccctggtgccatgaaaacatttcttcatgtgt

SEQ ID NO: 7553 - DNA, 201 bp, Homo sapiens
acaggaggcagggattgcagtgagctgagattgtgccactgcactccagcctgggtgacagagcaagaatctgtctcaaaaataaaataaaataaaataaaataaaataaaataaaataaaataaaataaaataaaaataaataaaaaagaaaaaaaaaagaaaagaaagtagaaggtgcttatgaaagagtgttgaatgg

SEQ ID NO: 7554 - DNA, 201 bp, Homo sapiens
aggaggcagggattgcagtgagctgagattgtgccactgcactccagcctgggtgacagagcaagaatctgtctcaaaaataaaataaaataaaataaaataaaataaaataaaataaaataaaataaaataaaaataaataaaaaagaaaaaaaaaagaaaagaaagtagaaggtgcttatgaaagagtgttgaatggat

SEQ ID NO: 7555 - DNA, 201 bp, Homo sapiens
cttagaaggcatcttacttctttgtactattccttggagcatttgatgcacatttttccatcttgttgctcggtcacttttgtaatagagcttgtgtgagttttttttttttttaaggaatttagaactatgtcagtttttatctcctttgcagtttttggtgatagctctgttatgggaagaaggcagtgctgtggatct

SEQ ID NO: 7556 - DNA, 201 bp, Homo sapiens
tcatctctagctacactgcctccttggtggcctcatcctgtctcatggccctctttgaagcagggagtggtttcccaattcagggaggcggcatggactckggtggaaagaacatcacatgtcaagtcaggacattcatggatcttgttcctgaagaaagaaggaaaaataggcacaaccaaagagggccccaggctgctg

SEQ ID NO: 7557 - DNA, 201 bp, Homo sapiens
ccttggagcatttgatgcacatttttccatcttgttgctcggtcacttttgtaatagagcttgtgtgagttttttttttttttaaggaatttagaactatrtcagtttttatctcctttgcagtttttggtgatagctctgttatgggaagaaggcagtgctgtggatctggactccttggagcaaccctctcaggcacat

SEQ ID NO: 7558 - DNA, 201 bp, Homo sapiens
gtgtgtgtgtgtgtgtgtgtgtgtgtgtgtgatggagtcttgctctgtcacccaggctggggtgtagtagtccaatctcagctcactgcagcctctgcctsctggtttcaagtgattctcctgcctcagcctcctgagtagctgggattacaggtgcatgccaccgcgcctggctaatttttttgtattttcagtacagat

SEQ ID NO: 7559 - DNA, 201 bp, Homo sapiens
aactttatggcctgttttttggtattgactctcctgtttgtcctggtactccttctggaaagttatttttcctgtgtaggtttcctagaattcctagaatwtatcatattgaagtactttgttaactatgccataagttgtgggaaactagagttggcctcacttttcccttcttcctaatgtggatgggaaactgactgg

SEQ ID NO: 7560 - DNA, 201 bp, Homo sapiens
gaagtctcacttagtcacccaggctggagtgcaatggcactatcttggctcactgcaacttctgcctcctgggttcaggagattctcccagctcagcctcycaagtagctgggactacaggtgcatgccaccatgcctggctaattttttgtatttttagtagggatggggttttgccatgctggccaggctggtcttgaa

SEQ ID NO: 7561 - DNA, 201 bp, Homo sapiens
gacataccttttccttggttaaaaagaaatcagaagatgacctgataatcactacaaaaataatctttcatgaagaagatggtcagaccaaggaagatatcacatttgtgaaaaggagggtattcaaaggccataaaaggcagaacttcaaaatattttaaaaagccaaatgaactaaaatgttcacctgtgataaataat

SEQ ID NO: 7562 - DNA, 201 bp, Homo sapiens
tggggaaatgccgtctctactaaaaatacaaaaatattagccaggtgtggtggcgcacacctgtagttccagctactcggtaggctgaggtggaaggatcrcttgaacccgggaggcggaggttgcagtgagccgagactgtgccactgcactccagcctgggcaacagactgtgactccatctcaaaaaaaaaaaaaaaa

SEQ ID NO: 7563 - DNA, 201 bp, Homo sapiens
agagttgcttattgatgttgaagcattggtttcgttagagtaaattatgtatatatatgtgtatgtgcatgtacgtatgtgtgtgtatatatatatgtatmtacctgatctctactttctgaaaatttacacatttagaatgggaggttatttagttcctagcatgtaacttgtgacttataaacccacttagcaattaca

SEQ ID NO: 7564 - DNA, 201 bp, Homo sapiens
cgggaggcggaggttgcagtgagccgagactgtgccactgcactccagcctgggcaacagactgtgactccatctcaaaaaaaaaaaaaaaaaaaaaaaaragaaaaaaaagaaaaagaaaagaaaagagaagaaacttggccttttggtgggttatggaatggtgggccacccagcaggaatggttgaacccaattcaca

SEQ ID NO: 7565 - DNA, 201 bp, Homo sapiens
agcggggaaataggatttgccacagaaattaccttactctgttaactttggacaatgttccattgactaccacttgtctttgtcttataagaatagaattkatggaaggagaaagaaacttacaaggaacgggtaaaagaatgaaactgctattaatatgactcaatgtttttttctttctttttttttttttttgaaaaa

SEQ ID NO: 7566 - DNA, 201 bp, Homo sapiens
tgtcttataagaatagaatttatggaaggagaaagaaacttacaaggaacgggtaaaagaatgaaactgctattaatatgactcaatgtttttttctttctttttttttttttttgaaaaaaacttctagatattccccttttttcagattattccagattccatttttctttctatggatttaagatggtaaatttctat

SEQ ID NO: 7567 - DNA, 201 bp, Homo sapiens
tatatatttcaaatttcaaggagaaattctttgtattgtatttttacctggtatacaaagatacttaaacggcaatatttgaatgtagaatatggctttcttttttttttttttttttgagatggagtctcactctgtcacccaggctgaagtgcagtgatgcgatctcggttcactgcaaactccacctcccaagttcaa

SEQ ID NO: 7568 - DNA, 201 bp, Homo sapiens
cttaaacggcaatatttgaatgtagaatatggctttcttttttttttttttttttgagatggagtctcactctgtcacccaggctgaagtgcagtgatgcratctcggttcactgcaaactccacctcccaagttcaagtgattctcctgcttcaacctccccagtagctaggattacaagcatacaccaccatgcctggc

SEQ ID NO: 7569 - DNA, 201 bp, Homo sapiens
aaaagcactctctgtagactaagaacacagcctatgtagagttcggtactatctgaggtttcatgcatcccttggtgatcttggaatgtatcccccatggwtgagtgcagatgactgtttttatttctgccaaatgaagaaatagggaaaaggtgtcccaggcagagaaaagagctctcactggaacagcgcttgagttta

SEQ ID NO: 7570 - DNA, 201 bp, Homo sapiens
caggcagagaaaagagctctcactggaacagcgcttgagtttacaaagatctttcactagcatctaatttaatcctcacaacattcctgagggcaggcagktctggtagccatttgtgatgagagggaaatttgcagtgtgcacaagtatctcaagccaggtagaattatcaggtgttaacatgaagggccccttggaggc

SEQ ID NO: 7571 - DNA, 201 bp, Homo sapiens
ctacactgaaattagaaacaacttttttctccaatattaataaatatttctgctgtcagcactagggtgtttggtttccaaagcccttgcatttgatatarctttttaaaccaccattacgcacattggaagatactgttggctctcagttatcttaatttttccagtagtggagacggaatatcttctccatgttttctt

SEQ ID NO: 7572 - DNA, 201 bp, Homo sapiens
agaattatcaggtgttaacatgaagggccccttggaggctcctctggttcaaactcttttttttatttttatttttttacatcagaaaccaaggcccacaraagctaagaagatgtcttaaatggtcagcttcactgctctaattcctgagcagtattctctctttgcacttttataaactacaactccggcaatccagac

SEQ ID NO: 7573 - DNA, 201 bp, Homo sapiens
tatttgactgataaagttcaaagaggtgaatttatttgcctcagattgtacagtcaggacctggcagggcagagatttcagctcatgtgtttcagtttagkttgttgacttggaacagaattcactgtacctctgagtaaatttggactattttgatcaactgtgttggcagtaactggccaccgagtgccttggtggggt

SEQ ID NO: 7574 - DNA, 201 bp, Homo sapiens
gtcagaacatgtggtatttggttttctcttcctagcaaggaatcctgaggaagggagtgaaagaaccaaatttgtgttttagaaaaattggtcaggattgrtgtggagagaggccagggccagggagaccagttaggagaaaatggtcttaatggatgtaggctggagtcctccggtctgtttgattggctatttcattct

SEQ ID NO: 7575 - DNA, 201 bp, Homo sapiens
atgggttgcaggagtgatcccattttgttttccttctttgtttaaagctcttgtggaaagtgggaaagggaactgccagtcaccgagcaccagccaccacyttacccacttttcacgtcaatgctgcaaggtgggtatgaggaccagctctgttttacagagattgtaaagattatcaagatgtaagagtaggggagccag

SEQ ID NO: 7576 - DNA, 201 bp, Homo sapiens
agggaaaagatattagtgttaactatcaaagtctctgaagtgaaagaggaaaaccaccttaaaattttttttaaatttatttttatttatttatttatttwttttttagacaaagtctcactctgtcgcccaggctggagtgcagtggcaagaccttggctcactgcaacctctggctcctgggttcaagcaattctcctg

SEQ ID NO: 7577 - DNA, 201 bp, Homo sapiens
cacgctttcctgatggtgcatactgccaggctactatgttcgaatgcaaaaaccatgtttgtatcccgccatattggaaatgtgatggcgatgatgactgyggcgatggttcagatgaagaacttcacctgtgctgtaagagggagagaaacggagtgaatgggagtggtgttgtctgtcaaatctcattgtttcttacgt

SEQ ID NO: 7578 - DNA, 201 bp, Homo sapiens; identical to SEQ ID NO: 995

SEQ ID NO: 7579 - DNA, 201 bp, Homo sapiens
cctggagagggtgccttatgctgcatgaggaaagtaaaaccagacccgtcgaatgaagtgtgtcccccgtattttctacatgacaccaccttaaagtgggmattattgcacacagtcttgcaccctctgttgcctcactgcaggaagacaaacttcctgttttcccctgccctcatttgcctgaagaaaggtgacttctaa

SEQ ID NO: 7580 - DNA, 201 bp, Homo sapiens
tgtcctgcaagtagacacaatggggtcaacacacatggatgactgagtgtttctaatgcatatgagactctaatgtctttgtgtgtgcttgtgtgtgtgtytgcctgtatgtgtccaggtatagggactgctgatggcattgcctttgactggattactagaagaatttattacagtgactacctcaaccagatgattaat

SEQ ID NO: 7581 - DNA, 201 bp, Homo sapiens
cttgtcctgcaagtagacacaatggggtcaacacacatggatgactgagtgtttctaatgcatatgagactctaatgtctttgtgtgtgcttgtgtgtgtktctgcctgtatgtgtccaggtatagggactgctgatggcattgcctttgactggattactagaagaatttattacagtgactacctcaaccagatgatta

SEQ ID NO: 7582 - DNA, 201 bp, Homo sapiens
gctttgataatcccagaggacttgcccttcaccctcaatatgggtattgtctccctgcaatcctgggcttttctttcacctccttcttctgcctctgttamcgagaaggctgttcatgtaactatctcaaggccaatgtcttgctggggtttgtcttctgcttttcctacttggtaaattgtttagtgtaatgagtagaag

SEQ ID NO: 7583 - DNA, 201 bp, Homo sapiens
atttctttactggactctcgaagtcaaagccactgaaatccagttaactatgtttatttgtgagcattttctgtacattgtccccttcctttttctttttwagattatttgctgttagctctctttcttttctgaatgcagaaaagaattcagaatgcagtctgctctacagaatgcagactccatttctctaaatggaga

SEQ ID NO: 7584 - DNA, 201 bp, Homo sapiens
aaatactcattgtaaaaagatgatacacattattaatcaaaaattaaacaacaatacccatattgaattttgctagttatggcctagttggaccatagtawtgtcttctgcataagcatttatggataacgatccaggaacagcctgttgcactcagaagcatggaaatgccattcattcagtagaactatttcaaatttt

SEQ ID NO: 7585 - DNA, 201 bp, Homo sapiens
acaatttacccttgtgtcactaaatactcctttatgattttcttctcacacacagaacacccttaaccccttcccaagggacatagctcatagtccattcmgaaactgaaatccaggacctctgggtaatgggcagtagccactcaatcagttccagatgtggttcctcttggttgggagacccataaactaataaacaat

SEQ ID NO: 7586 - DNA, 201 bp, Homo sapiens
tgttaaaatgacatgttactaagttacacctttgtagtccatttatgactcataaagtgctttcacatacattatttaatgtgttactcaagttagccccrttgagttgcttttattgtctatgtaataaagctcagagagcttaagtaacttccttgtggtcacacagaatgtcagaggcagaattggagcagtcatgta

SEQ ID NO: 7587 - DNA, 201 bp, Homo sapiens
catgttactaagttacacctttgtagtccatttatgactcataaagtgctttcacatacattatttaatgtgttactcaagttagccccgttgagttgctkttattgtctatgtaataaagctcagagagcttaagtaacttccttgtggtcacacagaatgtcagaggcagaattggagcagtcatgtaagtccaggtta

SEQ ID NO: 7588 - DNA, 201 bp, Homo sapiens
gaggtgggaggatcacttgaacccaggaggaggaggttgcagtgagccaacattgtgcaactgtactccagcttgggcaacagagtcagactatctctagwtaaataaataaataaataaataaataaataaataaataaatcagatggtgactaatttctggtcatttacctgcatccttatcaacaaaggccaagcaca

SEQ ID NO: 7589 - DNA, 201 bp, Homo sapiens
atggtcagtgtatcccaagtgaatacaggtgcgaccacgtcagagactgccccgatggagctgatgagaatgactgccgtgagtctgttttagtccttgcrctgtatttggtttcacccttgtccctttggcattttaatcaatttgttagatttgttgatggacataaatgcctacaatatgcctcttgttattgcaatc

SEQ ID NO: 7590 - DNA, 201 bp, Homo sapiens
aatgagcaacgaacttagaggttaaacgaattggccaggtcttactgtcattaagaggttgactcaggatttgaactctggtctgtttcactgcagagcamgtcctcttcccagtccactgggtgcctcttagcactttaaggctacatattttgtttattagtctgcacattatggtgggaggatgggggagggatagca

SEQ ID NO: 7591 - DNA, 201 bp, Homo sapiens
aagcacagcaggcgactcctgcctctcagcttctgcgctagctcttccctctacctggaacatctctcttccagatctctgcatgagttgcttcgcgtgcyatttaggattctacccaaatgtcactttctcagagaggccctcattgaccgctctacctaaaatagccaccccctcataattcttttgctctttaccctc

SEQ ID NO: 7592 - DNA, 201 bp, Homo sapiens
gttgcggttcatccttcgaaacaaccaaattgtgagtgatacagagaaacatcctgcctgggagtagcttgaaaaacactgaccctgggaatgctaaatgyacactgttacagacccatttgtttggacaatacattttccttttctctttacaaaccaccccactatatactttccctagtcctgacattgccattactt

SEQ ID NO: 7593 - DNA, 201 bp, Homo sapiens
cttcgcgtgctatttaggattctacccaaatgtcactttctcagagaggccctcattgaccgctctacctaaaatagccaccccctcataattcttttgcyctttaccctcatgttctgaaacctctctctctctctctgagtttagttgtttctttttgctcgaatatatactccacttttatagcgtccccagtgctta

SEQ ID NO: 7594 - DNA, 201 bp, Homo sapiens
tcagcaggtgagtgctttagcgggtgcagacctatgaggcctcatttaatgctctgtagaagaattccccaattcttattttcactattacctatgcagawctaaatccaattgctactaaatgccatcataaaactccatatgtgcttgcctgaacctgaaccctgatattattaacatacagacttccacagagcatta

SEQ ID NO: 7595 - DNA, 201 bp, Homo sapiens
tgactataatattccattgagtggttatagtatcatcaaattaactgcctctattattaagcattaggttgcttttattttattcctctatagtatatatcattgcagtaaatattaacatcgtatttaaaacattttattttcaggatattttcttaggatcattagtatagttttatagctgaagtcaaactattttca

SEQ ID NO: 7596 - DNA, 201 bp, Homo sapiens
acttcccaaacaatacttttatatcaccctggcagacaatctcaaccaatcactgctcctagaacacagctcaaaacacccactctttatttgtttattgttttttttttgtggaggaaatttattcatcatattaagagcacattttcagtttgtatttggatcttaagaaacctgttctatcttgccaagttatgtttt

SEQ ID NO: 7597 - DNA, 201 bp, Homo sapiens
tagaagagtgacttattttaattcagtatttattgaacagtggtgttctaggaacttttgggctgtgtcagtgaataagacaacaatccctacccacatgragctaatattctaaagaggggagacaggcaaccaatcagtaaattgtctagtatgttgaaaggtggtgctaagtgttatggaaagaaggaaagggagcaa

SEQ ID NO: 7598 - DNA, 201 bp, Homo sapiens
aattgtgagtgatacagagaaacatcctgcctgggagtagcttgaaaaacactgaccctgggaatgctaaatgcacactgttacagacccatttgtttggrcaatacattttccttttctctttacaaaccaccccactatatactttccctagtcctgacattgccattacttttatttaccatggaaatttcaaaccta

SEQ ID NO: 7599 - DNA, 201 bp, Homo sapiens
atgtagttggaaaagcactaaatttggaggagaaagacctaggtttgaagccccagctcttcacctagttctatgactttgagacatccagttaaccatctttgagcttcagttttctcatctatacaaatggtgtaaaaatacctatttcacattgtgcttgtgtgattatactttgtaaactaaaaaaagttaccaaaa

SEQ ID NO: 7600 - DNA, 201 bp, Homo sapiens
taaccatctttgagcttcagttttctcatctatacaaatggtgtaaaaatacctatttcacattgtgcttgtgtgattatactttgtaaactaaaaaaagktaccaaaatataaggcattcggtatccagttaacaaaatggtagtggttttctgaagccctaagggaaaaagtatgaccattctaatgtattttatggaa

SEQ ID NO: 7601 - DNA, 201 bp, Homo sapiens
ctttcttcacaattacatgcacacattttgctgtaaatcatgttgacaaggccctgggtttatggatggcagtgctggttagcaggcctggttataggtcrgttgtaaaactgaccacattcaccgttgttgccttcacattttgtaatgctctatgtgccgctcctatgctttctatgataaattgttcaaaaccattag

SEQ ID NO: 7602 - DNA, 201 bp, Homo sapiens
atatagtcttgaaaataagccaacttccttttctggggaataaagggttattatgcttgtgctttttcttagaatggctttatggggaatttcagctgtgrtctattaggaaggcctcaaagatagaacttaaaagcttctagtatggctgtccttcctctagttagcaattgaaactgagttgttacaacaaaaggaaaa

SEQ ID NO: 7603 - DNA, 201 bp, Homo sapiens
aacaggtcagggtgttcagttcttatctcttaagtctgtatgcaataaagagatatttaagaatttgggagacagtaatagtcaaaagaagaagtgctccrtgtagtagtactgactgataagtacattaggaaataagtcctctaaaaagaaatcatgatcctgctatccaggattcactgatgtcaattaggagctttc

SEQ ID NO: 7604 - DNA, 201 bp, Homo sapiens
ataaaatctgtcaggaaacagtaaggaatgagacttttctggtaaacttttagtaagactataaaagtatttcttctgtgagatagaatgtctgcagtctwgtctgttttgatgtcagtaaataaaaacaattcagtgaaaatgaggactgtacgtagggttctcagtctagctttgttccatactaccactgagtacaaa

SEQ ID NO: 7605 - DNA, 201 bp, Homo sapiens
caatgtccgaattcgaaaatataatctctcatctgagaggttctcagagtatcttcaagatgaggaatatatccaagctgttgattatgattgggatcccraggacataggcctcagtgagtataaactttggcatctttcattgatattaagtgactttatagaattttaaggtgttgacttttaaggaatttattgttt

SEQ ID NO: 7606 - DNA, 201 bp, Homo sapiens
tacgtatttttaaaaggcttcttagccttttagtttagtcccctggttgagaactactgattttaatgaagtgaacgtaaatagagtttgttgcagtcatwttgctacatgctttgagtcattggaggaactctagggtaatagttctcaaaagtgtcttacctggactaggaatgtcagtgccacttgggaatatgttag

SEQ ID NO: 7607 - DNA, 201 bp, Homo sapiens
tcttcaaggaagaggtttgcactgacttacattggtgggaaaatgattccttgaaaatgaaccaataatgcaaacatgtttgagggggaaggttcaggagwcactactctcctggagaatggatagttattttcagtgtaaattctttttcaccttttaaaaaatgtggctggtgttcctggaagagcatctttgaagaag

SEQ ID NO: 7608 - DNA, 201 bp, Homo sapiens
ggtcaaagtcactcatgagttccatgttgttaaatccaatgatctattttcagctctggtccttatttaactggttagcagcatcacacacagtgtatccwgacttcctccttgaaacacttagttagattttcaagaaactgccttctcctggtttcttttcttccttgctggcctacccttggtatctcatgcttgttc

SEQ ID NO: 7609 - DNA, 201 bp, Homo sapiens
atatccactgtaattacctttcaattttttctcaaatccatgccattttgctttagccctcatccttgatagatatttttttggtcaaagtcactcatgasttccatgttgttaaatccaatgatctattttcagctctggtccttatttaactggttagcagcatcacacacagtgtatcctgacttcctccttgaaaca

SEQ ID NO: 7610 - DNA, 201 bp, Homo sapiens
tctcacatgtagagtgagctttttaaaactgtgaaaatggaagcaaccagaagagaattccataaacttctataactcaaccatcatcatttgaacttcgkcttatatcttctgtctttcctcctattactctggaagaattttcccagttcttaagtccaaccatttcattcatgttctagatctcattccctctcacct

SEQ ID NO: 7611 - DNA, 201 bp, Homo sapiens
tttccttgtgtactaatttatggctctaagagcagttgtatgatttagaactctatgtattttactgcaccctggtcaacacttgatatacatgtatatatttgtgtgtgtgtgtgtgtgtgtgtgtgtgtgtgtgtgtgtatataatcaattggtcaatgttagggaaattatagtcttcttaaaattttataatttcct

SEQ ID NO: 7612 - DNA, 201 bp, Homo sapiens
ccttgtgtactaatttatggctctaagagcagttgtatgatttagaactctatgtattttactgcaccctggtcaacacttgatatacatgtatatatttgtgtgtgtgtgtgtgtgtgtgtgtgtgtgtgtgtgtgtatataatcaattggtcaatgttagggaaattatagtcttcttaaaattttataatttcctcct

SEQ ID NO: 7613 - DNA, 201 bp, Homo sapiens
caattggtcaatgttagggaaattatagtcttcttaaaattttataatttcctcctatttgtaactttgttctaacctatctgtatccatgtcttttattwatttatttatttatttatttatttatttatttatttatttctatctgttatctatctatcgatctatcatctatctctctatctatctattgatctatct

SEQ ID NO: 7614 - DNA, 201 bp, Homo sapiens
caactttgtggctgtggaagactgttgatgagagggttgggcgatgatacctcagggttaccctcaggtcgtacctggtggtgtcagcttatcagagccgwctccgggtggtagtaggtgaactcaggtatctcttcttcagatattctacagtgagaaatttttttctggaaggttggacatgggagtaaatccaggcca

SEQ ID NO: 7615 - DNA, 201 bp, Homo sapiens
tttaagaatgaaagtattttatcagaaatatggcaatcctacccacattttaatctcactagaaggggggtgatacatgctagcaagtactcccacactgrtttaattttgatgtgaggaagggtgtggagaatactttttgttgcaagaaacagaaaacccaactcaaaatggcctacacaataaagggtatttcttggc

SEQ ID NO: 7616 - DNA, 201 bp, Homo sapiens
ttgcttccttatatcttctcctctttcctcaaacctctgacatcaccttctcacatgtagagtgagctttttaaaactgtgaaaatggaagcaaccagaaragaattccataaacttctataactcaaccatcatcatttgaacttcggcttatatcttctgtctttcctcctattactctggaagaattttcccagttct

SEQ ID NO: 7617 - DNA, 201 bp, Homo sapiens
ggtgcagtcagggctccagttctctttctttgtgttttccttgaccctactcccccctaagtttcacctttgtgtgcggtctggcttcccatatgattctratatggctgccagggcaaatggggctacgtgtttccttgatcctatccagggggaatccaactttgagaaggttttagttatgttctcaaaagtattatt

SEQ ID NO: 7618 - DNA, 201 bp, Homo sapiens
ttttagttatgttctcaaaagtattatttcatcacaataacttacagattgttagaatttctaaggaccctagacaaagtcagctagctccccaaacttgrcatatcatcaaaatcacctgaggaacttaaaaaagtatagagattcttaaatcaaaactcacccttactaaagcaggggtatgaaaatctgtgtttttta

SEQ ID NO: 7619 - DNA, 201 bp, Homo sapiens
agtgttcagtatgccaaagtcccaggttgaatgctatggatatgtggcctttgacaagttactcccttcctgtccccatatgtgagtcatgggtggagtcyggggttgtcttgagtctgctgatattttgagaccttgatcagccttgaaaaattgcaactcaaagctgagactcccatgagatgacaggggtggcaaatg

SEQ ID NO: 7620 - DNA, 201 bp, Homo sapiens
tacttcctgagtccctcctacatgcccagcgtgatgacaagcagcaggggttttgaggggaacaaggcagacatggcccttgctctcctgaagtacatagscttgcttacaatacttgtcattggccgggggcagtggctcacgcctgtaatctcagaactttgggaggctgaggtgagaggatcgcttgagcccagaagt

SEQ ID NO: 7621 - DNA, 201 bp, Homo sapiens
tccatgttcaaattttgtcacttatccccaaaatgtatttttactgttctctgttcaagttagggttcagatgagatctacaactgattttgattgttatmattcttcaatctcttttatgccacaacacttcccactttttaatgtcattgattcattagaaagattaggtgatttgtcctgtagaatatctcacattct

SEQ ID NO: 7622 - DNA, 201 bp, Homo sapiens
tgttcagaaatatatttcatagatgcataaagcaatagatttttatagagcatgcaattgattccttgtacatcttgggatgcaccaacacatcactggarctgtgcctgtagttctactcttacttttttttttgagatggaaattcgctcttgttgcccaggctgaagtgcgatggcgtgatctcggctcaccacaacc

SEQ ID NO: 7623 - DNA, 201 bp, Homo sapiens
tctggcacatagtttttaatacatgttattgatgatgatgatgatgatgatgatgatgattgcttgtttaactttgtgggtagcgcttgaagtaagtgctkttggccaaactggtagattctttctggcaaatcattacattgactggattaatctgtcttggagccagaggaaataacataaagtaacttataaaggatg

SEQ ID NO: 7624 - DNA, 201 bp, Homo sapiens
ctggcacatagtttttaatacatgttattgatgatgatgatgatgatgatgatgatgattgcttgtttaactttgtgggtagcgcttgaagtaagtgcttktggccaaactggtagattctttctggcaaatcattacattgactggattaatctgtcttggagccagaggaaataacataaagtaacttataaaggatga

SEQ ID NO: 7625 - DNA, 201 bp, Homo sapiens
taccattgtacaccttgaaaatttctactcagacctcaaagacccagtttaatgtcaccacctctgtgacaacttctatcactccttctggcagagttctwtgattgctcaccatgaatctatgtcattttatggcacatgttactctaagttatatagctagttgaccacataatatctttctatcctctagacatctgc

SEQ ID NO: 7626 - DNA, 201 bp, Homo sapiens
tccgggcaggggctagggccgggcggcggcgcgggagctgctcccggtggggcgctcaggttgcttcgcgaagccggagggggagcgcccctcttcgctcrccaggaactgagcggcagcaaacttgagaaagcagccccgccagtttcggtgacagcgcaccccacggagaccctgtctttgttcccacgggcgttggtc

SEQ ID NO: 7627 - DNA, 201 bp, Homo sapiens
agttgggaaataagccacaataaaagtgactaaattatttgagtgctttctataccaggcattggcctaagtgttttgtaggtattagtttacctacttaygtagtaacagtaaaaattttatggataaaggaccaagacaatgacaggtgaggtaatttgcccaaagcaattcagttactaagtggcagagccaacattt

SEQ ID NO: 7628 - DNA, 201 bp, Homo sapiens
gtagagatggggttttcccatgttgcccaggctggtctccaactcctggcctgaagtgatccacccaccttggccccccaagtgctgggatgataggtgtsagccaccatgtctgacccatctctttatttctgctcccactgccaacatctctcatttgggtgtcagcagtagtctctgggttggcctccctgcctccag

SEQ ID NO: 7629 - DNA, 201 bp, Homo sapiens
caattttcaaatatacaaaggaaagtcttctttaagcatttttcactaacagttctctgaagacttctcagaccctagcatgtgattggaagattttttcytttttttttttttttttgagaaaatcgtattggccttaaacaaagttgtattctgtttactaattaaaaaaacttatttttcaaaaatagaaatggggtc

SEQ ID NO: 7630 - DNA, 201 bp, Homo sapiens
agaattctacacttcctgacgaacatgcattagctattccataagcacccggtgctgtgccagaggctgtaaatgacacagaggaatgctctcaatccagygttgttccttgctgtggaaaacaaacaggcaaatgactcctcttctctgggcgctatctgttactctaatatcttatcttaacacattcttagtccaaca

SEQ ID NO: 7631 - DNA, 201 bp, Homo sapiens
cacttctgatataagaatttacttcttccctaatatttggttcagtgaagtgttgaaagaatttgctaagtaatcattgaaagctaagattctagtgaaamacaaaatgcatggtttaaaaattgaacgtactaactgaaagacagtggaagttagatgcttcttgctgtaaataattaaacccaacagtgcagacgagag

SEQ ID NO: 7632 - DNA, 201 bp, Homo sapiens
cataagcacccggtgctgtgccagaggctgtaaatgacacagaggaatgctctcaatccagtgttgttccttgctgtggaaaacaaacaggcaaatgactyctcttctctgggcgctatctgttactctaatatcttatcttaacacattcttagtccaacacttacccaggaagcttgggatatggctacttatgaagaa

SEQ ID NO: 7633 - DNA, 201 bp, Homo sapiens
gaaaaaaattagccagatgtggtggcatgtacctgtagtccccactacttgggaggctgcaatggaaggattgtttgagcccaggagatccaggttgcagygagctatgaccataccactgcactccagcttgggcaacagagtgcaaccctatctcggaaaaaaaaaaaaaaaaaaggttacaaacgtgtgtgtatttta

SEQ ID NO: 7634 - DNA, 201 bp, Homo sapiens
tgcacagacttctctttgccactcccctgtgctggaacttctgtttgtggcaggccatttatttctttttctagatttatttcctcattttgctgaaacamgttacatgatagcttcctgagaaacataagtaggtggcatatattttgagtctttgaatgtctgtgagtgttttattttgctctccatcttgactgtttg

SEQ ID NO: 7635 - DNA, 201 bp, Homo sapiens
ttgctagagtcaggaactcaaaactccagacattaacactctcttctgaaaaccaaccagggaatggcagatctgtcttcttgtttgaagttttacctctktctcagccttaatgaataagagaattaagaaagtggtggaactttttctgcttgtaagagactgagacctgcagcctcagaagtggaaataaggcaggac

SEQ ID NO: 7636 - DNA, 201 bp, Homo sapiens
agaattcccctgtacatacagaatgggtcattctgctatttttaggacagatttgatacagtagcttttacaaaaagataagccaaagtttttagacttcrtgttagtggactgtcattctgtatttaaacagaacacaaaagaaagctgtctgagaccatgacacagtgaaaacagccttgatcaaacaaaaggccctct

SEQ ID NO: 7637 - DNA, 201 bp, Homo sapiens
atagttaaaaggttaatgggcagaacttccatggcgcttcttagggagcatttaatgtagaagctgttgcaagtgctattgtggaggggtcaatgtgaacsgtggctgcatccatcttttacttcttctgggattatctttcttcaggtccaaatggtgccgagtgccagtgtccacatgagggcaactggtatttggcca

SEQ ID NO: 7638 - DNA, 201 bp, Homo sapiens
aggagtcccctcaattccttactcttccaagtgtaacctgccaaacatgtccccttggctgtagttcccccaagagagggggactatggtctgatgatagktatctgagcagctgtctcaccagccaaacgaaatgctctcatcttcaaacctcttacccagtaatgattactctaggctttgcagttgtttaactttgtc

SEQ ID NO: 7639 - DNA, 201 bp, Homo sapiens
aatctaactaattaaaagtgttatctcactttgcatgcagtccattttgcagcgttttttgccttggaaggtaaattcaaagtgtctcttttatttaattrtatctttttaaaaattaggataatgttttaatcaagagggtttgttctcatgtttttcctgttcttagcacttcacacctgctcaccgacagccttcacc

SEQ ID NO: 7640 - DNA, 201 bp, Homo sapiens
ccacaggtataaggtacttagagaaaatatgaaattatttagtgttagaagtaggctgacttgaaaaattttgtttgctgttccagaattataagacaccrttttgctaattaaacagaaagaaggaacaaaatgacaaggaagatataatcaattaagcatggagaagggtgttaattatggttttataattattatatc

SEQ ID NO: 7641 - DNA, 201 bp, Homo sapiens
gtaaaaacaaatgtcttcatgaccagtttgttactattgtagataatacctgttcatcttcggcgttcacctgtggccatggggagtgcattcctgcacamtggcgctgtgacaaacgcaacgactgtgtggatggcagtgatgagcacaactgccccacccacgcacctgcttcctgccttgacacccaatacacctgtg

SEQ ID NO: 7642 - DNA, 201 bp, Homo sapiens
ttgccgtaagtttatcttaagtgcttattgtgattttgggtctgaagtcttggatcacaggagatgaaattattatataaaaaaaaggctttccaaaaatraaaaccctaagtatttatctaaaacgtaaatttttggctaggcgcggtagcaagtatcaacaaataccaatcttgtttcatttttctctccttttttcta

SEQ ID NO: 7643 - DNA, 201 bp, Homo sapiens
cctccactgtttttttcatagaaattcttttttttttttaatttttttggagatggagtgttgctctgtttcccaggctggagtgcagtggcatgatctcrgctcactgcaacctctgtctccaagattcaagtgattctcctgcctcagcctcctggcagctgggattataggcacccaccaccacactgggctaatttt

SEQ ID NO: 7644 - DNA, 201 bp, Homo sapiens
acgtaaatttttggctaggcgcggtagcaagtatcaacaaataccaatcttgtttcatttttctctccttttttctagtattttaaagtgactcctagtcmtgcacttcactgataacattttggaaaataactaccatgccattataatgcctggcaaaatcaaaagtgcttactaaatatccctgagtacctagtccat

SEQ ID NO: 7645 - DNA, 201 bp, Homo sapiens
ttgtttcatttttctctccttttttctagtattttaaagtgactcctagtcatgcacttcactgataacattttggaaaataactaccatgccattataaygcctggcaaaatcaaaagtgcttactaaatatccctgagtacctagtccatgttcaaattttgtcacttatccccaaaatgtatttttactgttctctgt

SEQ ID NO: 7646 - DNA, 201 bp, Homo sapiens
cccagaccaagaggtattttagtttcctgacttggggcatgtgagtaaagtcaatttgccagtcctgggcgggggaaaaaccccgagcttgaggtgtaggkaagggagggggcctgagaaattcctgaggagtagtagaatagcagatggaacactgagaagtgatttccttgaggatagatttccacaatggaaaggaaa

SEQ ID NO: 7647 - DNA, 201 bp, Homo sapiens
ctcgcgtttatttgtgtgacggagacaatgactgtggagataacagtgatgaaaaccctacttattgcagtgagtaagataaaactgctttctttctatcrttccagagatgcatgttgtgagctaatacaaagatatgaagcgtgggtattcgggctgatttcaattgtcatttcacattgaccttctaagtagaggtgg

SEQ ID NO: 7648 - DNA, 201 bp, Homo sapiens
tgcaaagagttttttggacagacaccgtgcaaaataaggtaaatagaaatttcagtagctgaatggaaccctgagcacaaagtgttgatagcttttcactyttagagggagtagaggggaaagttcctttgttttctaacaaaaaaggcccttgagatattttatgttaatcagcaccttttccatgctatactattacat

SEQ ID NO: 7649 - DNA, 201 bp, Homo sapiens
ctataatataagatacaaagggagaattgtcatgaggacactgctgaaaaacactgtgatagttctcctaccttacaagggttcagggaagctctatggaraaagtatcactgaactgaatgttgaaggttgggatccactggtagtataaccagtgataaagtatgtgacatgtgaggtcaatgtgggtgagagtgagaa

SEQ ID NO: 7650 - DNA, 201 bp, Homo sapiens
ttagagggagtagaggggaaagttcctttgttttctaacaaaaaaggcccttgagatattttatgttaatcagcaccttttccatgctatactattacatstgacctattaaacaaagcagtctattatatggattagccttgagcaacttttaattttattcgaagtggagtccaggagcctaattaaaagaaatagtag

SEQ ID NO: 7651 - DNA, 201 bp, Homo sapiens
acaaacctgcacgctgtgcacatgtaccccagaacttaaagtaaaataataataataaaaaaggaattataaaaaaaagaagttttgtaaaaattgagagsaaatcttttttcttccattaggggattatattatattttttagatgatcacgttttcccccaaagctctttgtatgtagacaatttaaaatcccaggata

SEQ ID NO: 7652 - DNA, 201 bp, Homo sapiens
taatacgattctcatttatttaaatgataacttgcatgaaatttctgaaaattgagaatttagatttttagcacttctgatttgattatagctaaaaaaawtcaaaacaaaccacgtagttagtgatgctgaagaaatataataattttggtttttctttcaggttttttcagttgacattaatggtttaaatatccaaga

SEQ ID NO: 7653 - DNA, 201 bp, Homo sapiens
atcagttcactggattttatctgttttatccggaggcaaatttcatgaactgctgatgccctgctttcacctatactaatcaacatgggatgaaatcaagstagcttaaatttttttctctttataaaattgatacatggtcaatgtaggcagtttatagaatagaggaaactatatagaaaaaaataaaatcactcatat

SEQ ID NO: 7654 - DNA, 201 bp, Homo sapiens
ctcatttatttaaatgataacttgcatgaaatttctgaaaattgagaatttagatttttagcacttctgatttgattatagctaaaaaaaatcaaaacaamccacgtagttagtgatgctgaagaaatataataattttggtttttctttcaggttttttcagttgacattaatggtttaaatatccaagaggttctcaat

SEQ ID NO: 7655 - DNA, 201 bp, Homo sapiens
atttaatgagggggacacattctgagaaatgtattattaggcaattttgttgttgtgtgaacgtgatagagtgttgttaaacaaacctggatggtatagcytactgcacacctagggtaaacagtatataccctaggcatatactgttgctcctaggctacaaacctgaacaccatgtttccgtgctaaatactacaggca

SEQ ID NO: 7656 - DNA, 201 bp, Homo sapiens
aatttctgaaaattgagaatttagatttttagcacttctgatttgattatagctaaaaaaaatcaaaacaaaccacgtagttagtgatgctgaagaaatayaataattttggtttttctttcaggttttttcagttgacattaatggtttaaatatccaagaggttctcaatgtttctgttgaaaccccagagaacctggc

SEQ ID NO: 7657 - DNA, 201 bp, Homo sapiens
agcaaaaatatggtattataatcttaggggaccactgtagtacatgtagtccatgcggtctgtcgttgaccgaaagagccatatgcggttcctgactgtasttccttttgtttgctcttaaatttatatttcaaacttcaagaaattatcccagtattccattaattggtgagcagatttttgtgtaccttagaaatcttg

SEQ ID NO: 7658 - DNA, 201 bp, Homo sapiens
ggcatcctagaggaattgccgtggacccaactgttgggtaagtgatgtgaaaacatattgattcctgtatttttagaattttctctctccctctatacackgaacatctactggattaatcaaaggctcattctgatttcttttaggctgtatactctagaagccatgtctattttatgcccttatttatagaagctttaa

SEQ ID NO: 7659 - DNA, 201 bp, Homo sapiens
tcaccgtgccacctgaaaaggttgactgactcatgtgagctccgtcttcattatcaatgaaaggggcacagtgacattttcctgacctgctgcttggtgtsgttgtgatgatcaaatcagaaaatagaagtgaaaaatctctgtaagggatagagggctgtataaatgtgagacattataattaggagaatattagtgttt

SEQ ID NO: 7660 - DNA, 201 bp, Homo sapiens
ggatgattgccataatgagtcctcttttggtttgttttagctgttgtgacctgccagcagggctatttcaagtgccagagtgagggacaatgcatccccarctcctgggtgtgtgaccaagatcaagactgtgatgatggctcagatgaacgtcaagattgctgtaagtgtttggagaggaatcttgctttggctttgtgg

SEQ ID NO: 7661 - DNA, 201 bp, Homo sapiens
ataagatacaaagggagaattgtcatgaggacactgctgaaaaacactgtgatagttctcctaccttacaagggttcagggaagctctatggaaaaagtakcactgaactgaatgttgaaggttgggatccactggtagtataaccagtgataaagtatgtgacatgtgaggtcaatgtgggtgagagtgagaagggccac

SEQ ID NO: 7662 - DNA, 201 bp, Homo sapiens
ctgatgagctgatgcacctgtgccacaccccagaacccacgtgtccacctcacgagttcaagtgtgacaatgggcgctgcatcgagatgatgaaactctgyaaccacctagatgactgtttggacaacagcgatgagaaaggctgtggtgagtacaacagaggatttgggaaaaggaaacaggggagactgaatatggatt

SEQ ID NO: 7663 - DNA, 201 bp, Homo sapiens
agcaaggagtggtatgaggaaggatattctcacctttttgtgttagaaaaaaccttaaaggtctgaggcttaatttatagctacttgttgatctttccatyaaaaccaaattcagaaggaagagtttccttggtgttcttatatatggtctcctctcatattgcactttaccctatacttaaattcttgcaggacattata

SEQ ID NO: 7664 - DNA, 201 bp, Homo sapiens
aattcagacacttaagtgccttctggaaaaatctatctattctgcctttattaatagaagtaaaattggacccacaggtataaggtacttagagaaaataygaaattatttagtgttagaagtaggctgacttgaaaaattttgtttgctgttccagaattataagacaccattttgctaattaaacagaaagaaggaaca

SEQ ID NO: 7665 - DNA, 201 bp, Homo sapiens
gagaatgactgccgtgagtctgttttagtccttgcactgtatttggtttcacccttgtccctttggcattttaatcaatttgttagatttgttgatggacrtaaatgcctacaatatgcctcttgttattgcaatctcttggcagattcttttgtggattaggggtgatgttctgataagagtctatttttaacaagacat

SEQ ID NO: 7666 - DNA, 201 bp, Homo sapiens
aagtggcttcacgtcttggataattacacatttctaattgcaatttaaccctgtgcatttttccttccagctaccaatccgtgtaaagataacaatggggrctgtgagcaggtctgtgttctcagccacagaacagataatgatggtttgggtttccgttgcaagtgcacattcggcttccaactggatacagatgagcgc

SEQ ID NO: 7667 - DNA, 201 bp, Homo sapiens
tcttcgcagcacaaagtacatgctcaagtcatcagataacatgctccaatggtcagtgtatcccaagtgaatacaggtgcgaccacgtcagagactgcccmgatggagctgatgagaatgactgccgtgagtctgttttagtccttgcactgtatttggtttcacccttgtccctttggcattttaatcaatttgttagat

SEQ ID NO: 7668 - DNA, 201 bp, Homo sapiens
tcctcctgcttaagcctcctgagtagctgggactataggtgtgcaccaccatgcccagctaatttttaaattttttgtagagacacgatcttgttacgttkcccaggctggtctggaatcctgggctaaagtgatcctcctgccttggcctcccaaaatgttgggattataggcatgacccccccatgactggcctgaaaa

SEQ ID NO: 7669 - DNA, 201 bp, Homo sapiens
aacagataatgatggtttgggtttccgttgcaagtgcacattcggcttccaactggatacagatgagcgccactgcattggtaagaagtctgttttggacrttgttggcaggtgacacaggtgtatgtgtgtccaaacctctaactagactaactgctactcttgaactggaccagctccctgtctaacttcttgactgca

SEQ ID NO: 7670 - DNA, 201 bp, Homo sapiens
ctgggcaggaatttttaatcaagtttttttttatttaaaaaaatttaagtacaaatagttggtgaaataatgattcactaaggaaagaaaaccaaatttgkcttactgtttctggaatcatacaagtcatgaacccttcagggcacactgtgacctaaaatgaatcacatgcatgtaagggattttgcagtgaggcattct

SEQ ID NO: 7671 - DNA, 201 bp, Homo sapiens
tctatttctcagaaatagaatggcctataggaatgaatatattaggtacctggaaaccacctaaaaatagtaatggatgttggaaaagctccaaagaaggrctcaattcttccctctaatattcaaaaggattagggagcttgatgttgtagtttgtagccctgcctgtcattccagacccctaggttgtagttcataccc

SEQ ID NO: 7672 - DNA, 201 bp, Homo sapiens
caagagttctgaaagttgagcatgcctcagaattatctggagagcttgttaaatatagattcgtgggccccatctgttgcacttctgatgcaatatgcctkaggtggcctaagaatttgcatttctagttctcctgtgacgttgatgctgctggttcagtgaccacattttgagaaccgctgctccagtcccttgctactc

SEQ ID NO: 7673 - DNA, 201 bp, Homo sapiens
tgttttcctaagagcttgaaactgtatgtcttttacagtcattgaaaagtgatgccctagggatttaggtaagttcagcaaatataagattgaactgtatwagttgaaatcaccttaaattttatttcttttttcctccaaaaaactttattctgggggagtaaaaaaaattgtttttaaacccaaaacatttcttctaac

SEQ ID NO: 7674 - DNA, 201 bp, Homo sapiens
aaaatttttgaatatatatatattaaaacctgtgaaacaggtaaaagctcattttcccccttagttcttttattattcaatctggtcatctgtaaaatggmatctcatattaaacagcttgtcaattaacttttttttttttttaaggaacagagagattcaaaactgcggtccattttacttctaatgggattagcatca

SEQ ID NO: 7675 - DNA, 201 bp, Homo sapiens
cattgaaaagtgatgccctagggatttaggtaagttcagcaaatataagattgaactgtataagttgaaatcaccttaaattttatttcttttttcctccraaaaactttattctgggggagtaaaaaaaattgtttttaaacccaaaacatttcttctaacttttggctttctcagtcttcactgaagagtagttttttt

SEQ ID NO: 7676 - DNA, 201 bp, Homo sapiens
ttttattattttagtgcttcacgattgtactgggtagatgcctattttgataaaattgagcacagcacctttgatggtttagacagaagaagactgggccrtatagagcagatgacacatccgtttggacttgccatctttggaggtatgttttaaagcaataaaagtatgtattgtttttatacattgcaagttacaata

SEQ ID NO: 7677 - DNA, 201 bp, Homo sapiens
ataattttttctcttcgcagcacaaagtacatgctcaagtcatcagataacatgctccaatggtcagtgtatcccaagtgaatacaggtgcgaccacgtcrgagactgccccgatggagctgatgagaatgactgccgtgagtctgttttagtccttgcactgtatttggtttcacccttgtccctttggcattttaatca

SEQ ID NO: 7678 - DNA, 201 bp, Homo sapiens
tgctctttagaatttaaacatttttctttatatctttaactgctgaaactccagctgagggaacagtgggaggggaataaaaagatggttaaagtcatttygtggactgtgagggtgcatgaagaacatgttcttcaaactcagttccacatttaagctgcccagcgagccttgcccttgctattctctctctccctgaag

SEQ ID NO: 7679 - DNA, 201 bp, Homo sapiens
ttatacttctgtttttgctttgtaagctcagcttggtggtagccaggtactttaccttgtgtccctatgaactttatgctttccaatatccttgttaatgmcaatagattagtctgtgtctagcaataattataaattaagtaataattttttctcttcgcagcacaaagtacatgctcaagtcatcagataacatgctcc

SEQ ID NO: 7680 - DNA, 201 bp, Homo sapiens
gggaccgtcgcggagatggatcgcgggccggcagcagtggcgtgcacgctgctcctggctctcgtcgcctgcctagccccggccagtggccaaggtaagarcccagccggagcctctcgtggagcccccacttccccggctgtggcagggtcgggtccgcgggaggccggaggggagagcgtccgggcaggggctagggcc

SEQ ID NO: 7681 - DNA, 201 bp, Homo sapiens
ggccggaggggagagcgtccgggcaggggctagggccgggcggcggcgcgggagctgctcccggtggggcgctcaggttgcttcgcgaagccggagggggmgcgcccctcttcgctcgccaggaactgagcggcagcaaacttgagaaagcagccccgccagtttcggtgacagcgcaccccacggagaccctgtctttgt

SEQ ID NO: 7682 - DNA, 201 bp, Homo sapiens
ctattctctgggcattttgataacattatacttctgtttttgctttgtaagctcagcttggtggtagccaggtactttaccttgtgtccctatgaactttwtgctttccaatatccttgttaatgacaatagattagtctgtgtctagcaataattataaattaagtaataattttttctcttcgcagcacaaagtacatg

SEQ ID NO: 7683 - DNA, 201 bp, Homo sapiens
ttggcgggttgatttccaagaggaagctactttttagtattgggtctgaaaaatgttttgtcctgtttgttttccttcacaaatcaaacccgtgacctacytagtgaaaatgtacatgactgactccctcggggctttgcttttgcaggttctaacgcctgtaatcaacccacgcatcctaacggtgactgcagccacttc

SEQ ID NO: 7684 - DNA, 201 bp, Homo sapiens
aaacatgtctgcagtcttcctgtcaagataataatgaacagtgccttatatttgtatcttactctgcttaaaatgatttccattctaagaggtctacaagrtcttcaaactacatttctacaccctcctccctgattatgtaaacagaactatagcatagaaatttcttgcttcaaaccaaatcattaacagtgaaaaaat

SEQ ID NO: 7685 - DNA, 201 bp, Homo sapiens
cttaacatgcactttgaaggcttttaggaagctaagcaagaaatttcattcataatgttatggatggtttctggccttgatttagactatcttcaacaatwtttttccttgacattggctgtttggaccaatgcagtcattatgtcttggcaaactcctcaaaaagtcaaatcgaaataaactagatctgaccaggcaagg

SEQ ID NO: 7686 - DNA, 201 bp, Homo sapiens
tagagatgaggtctcaccatgttgcccaggctgatctaatttttaatcttgaaaaacagaaaccggcacctgagttcatttcctggacccaaagctgctgktatcttcttctttctctctcttttttttcctcctttttaaaaatttttgtcaagatgtctaagggattaaattgatatagaaatttcaatttctaggagt

SEQ ID NO: 7687 - DNA, 201 bp, Homo sapiens
aaagaactgggtctgtgacacagacaatgattgtggggatggatctgatgaaaagaactgcagtaagttttgagctggtttcccttggttggtcagcctcstaaatagacttcaacaaccaaatggccttgcattctttcctctaaggctcatgcaattttcattgtctctttagtacttctattccacttgtcaatctct

SEQ ID NO: 7688 - DNA, 201 bp, Homo sapiens
acccaacttcaccagctgctgatggaactcaggtaacagttgccgactcctgaaataatgtgggatttggaaaaactttgggatgactgggtttttattamccttaagcaaacaagggagattctggaaggctcaaagatctcaagatgtgttgacagttaataaatataattttttaaaaagtcatagattgaaaaactt

SEQ ID NO: 7689 - DNA, 201 bp, Homo sapiens
tctgagcagagtggccacaaatagtcttctttatgaaaaaccgtgtatggtgaccttgggggaataaatggctgattcctgttacattgtattcttagatrgagaacgagcaaaaggaaagtgttgctgcgacaccacctccatcaccttcgctccctgctaagcctaagcctccttcgagaagagacccaactccaacct

SEQ ID NO: 7690 - DNA, 201 bp, Homo sapiens
agacgtgccagtgacattgatgaagaatgtgactttttcttggacatgccttgcacttccctgtttctgtgccagttctagtttgtttcctctgtgaggcrtcccctcccctcagatccatctatctgtagcttaaatgcacctttctctacaggacctttcttgatatccactgaatgttatctgaacctctcttacagc

SEQ ID NO: 7691 - DNA, 201 bp, Homo sapiens
gggtctgtgacacagacaatgattgtggggatggatctgatgaaaagaactgcagtaagttttgagctggtttcccttggttggtcagcctcgtaaatagwcttcaacaaccaaatggccttgcattctttcctctaaggctcatgcaattttcattgtctctttagtacttctattccacttgtcaatctctgtgtcaat

SEQ ID NO: 7692 - DNA, 201 bp, Homo sapiens
tagttttaaaatctatattgtattctttacacatgttgataacgtaattgtgtacatagcatgcttgagtgtggacactattctctgggcattttgataayattatacttctgtttttgctttgtaagctcagcttggtggtagccaggtactttaccttgtgtccctatgaactttatgctttccaatatccttgttaat

SEQ ID NO: 7693 - DNA, 201 bp, Homo sapiens
ttgatgggtgcagcaaaccaccatggcacgtgtatacctatgtaacaaacctgcatgttctgcatatgtactccagaacttaaagtataacaacaaaaaakaaaaatctcagtgtttagtcattttagccctgagctaatttctaatgcttttctctttcattcttagtattaaactgtactgcttctcaattcaagtgtg

SEQ ID NO: 7694 - DNA, 201 bp, Homo sapiens
tttttaacaatttttcttagcacagacattttttcttagaaattatttgcttggttaaattggacacacacttagattattctgagcagagtggccacaartagtcttctttatgaaaaaccgtgtatggtgaccttgggggaataaatggctgattcctgttacattgtattcttagatggagaacgagcaaaaggaaag

SEQ ID NO: 7695 - DNA, 201 bp, Homo sapiens; identical to SEQ ID NO: 997

SEQ ID NO: 7696 - DNA, 201 bp, Homo sapiens
ggggggcggcggctacttgtctttcattacagtacactgatgggtgccctgatctctgacatctaggaggttgcacttgtggagagtcgtcatggtctgtyataacaaagagcaacccagacctcacagaaaacctggcaaatagggaattttaactctgagaaggtttggtgtggtgtacaaggcaaaagaatggttctg

SEQ ID NO: 7697 - DNA, 201 bp, Homo sapiens
gaagactctatatcatttagccttaaatattaatttggtcatagttgttactataaacctactattggatccaaaatcatttcctctgagtctagactatraaagggatcacaaattacattcacaagccgatttaccccatgttttccttctagcaaccaggcctcctggtatgtgccactcagatgaatttcagtgcca

SEQ ID NO: 7698 - DNA, 201 bp, Homo sapiens
gttgaaaccactgatgaaggagtaagttggtgaggaagttgaaaaatagtgacttttcaataatccacagtctttggaagtctttgttgtctgtcttagcmtgattcattaagaattggcactgtttagtagaaatgttgactttgaaccattatagtgagttggtcgttgatattttaggatctctaagaactgcttttt

SEQ ID NO: 7699 - DNA, 201 bp, Homo sapiens; identical to SEQ ID NO: 1001

SEQ ID NO: 7700 - DNA, 201 bp, Homo sapiens
tgctttttacctacaggcattaatgaatgccatgacccttcaatcagtggctgcgatcacaactgcacagacaccttaaccagtttctattgttcctgtcrtcctggttacaagctcatgtctgacaagcggacttgtgttgatattgatgaatgcacagagatgccttttgtctgtagccagaagtgtgagaatgtaata

SEQ ID NO: 7701 - DNA, 201 bp, Homo sapiens
caactatttcctcatatctctcctctctgacttcagaaatgatttctcccaatgagatttttgattttgatgccagctttatatctcactgtgattaggayggggccttatgatgggagaattagacttgaccaactatcatcagtttttgttttctcagtgagtttttggtgctctgatcttttttccttctatctgatt

SEQ ID NO: 7702 - DNA, 201 bp, Homo sapiens
ccccagtggccgatgcatttatcaaaactgggtttgtgatggagaagatgactgtaaagataatggagatgaagatggatgtggtaaggaggggaagagaytcctactgaaaagcattttcttcaagtgttttccagcgcttgttttttctcctttcctttttagaaattttgtgtgacaagcaagcctcaggattggctg

SEQ ID NO: 7703 - DNA, 201 bp, Homo sapiens
atattgaaggtggcatgagactgcataataaatattgcataagagtgaatcaaagaagcaaagattcttgattttcttttttcattattctctttcttttytctagatgggaacagctgctcagatttcaatggtggttgtactcacgagtgtgttcaagagccctttggggctaaatgcctatgtccattgggattctta

SEQ ID NO: 7704 - DNA, 201 bp, Homo sapiens
attttttttttttttttttttttttgtagagatggggttttcccatgttgcccaggctggtctccaactcctggcctgaagtgatccacccaccttggccycccaagtgctgggatgataggtgtgagccaccatgtctgacccatctctttatttctgctcccactgccaacatctctcatttgggtgtcagcagtagtc

SEQ ID NO: 7705 - DNA, 201 bp, Homo sapiens
ataggccatgaagtcctttcaggaaaagtgatttgttctttcagaatcgctaattcagtcttgtgatgccccacaagctgttctcagttttttgttccacsctagagcccagataacacattttccatattttccaacatataagtctgtggtgagccttgggttgtatttccaaatgtctagggttttctaaatgtcaga

SEQ ID NO: 7706 - DNA, 201 bp, Homo sapiens
ttttttttttttgtagagatggggttttcccatgttgcccaggctggtctccaactcctggcctgaagtgatccacccaccttggccccccaagtgctggratgataggtgtgagccaccatgtctgacccatctctttatttctgctcccactgccaacatctctcatttgggtgtcagcagtagtctctgggttggcct

SEQ ID NO: 7707 - DNA, 201 bp, Homo sapiens
tcttacttgccaatgattctaagacctgtgaagacatagatgaatgtgatattctaggctcttgtagccagcactgttacaatatgagaggttctttccgstgctcgtgtgatacaggctacatgttagaaagtgatgggaggacttgcaaagttacaggtaattgctgaactaacccgagccagtttatcagcacatccc

SEQ ID NO: 7708 - DNA, 201 bp, Homo sapiens
gacatgctgtttgttgacagaatgacatcgtggtgcagagtgagggcagggaggtcattcagcatggtggggtttcacacagccagatggatcagagggtrgccaaggggggctcagttaaaaaggggtttttgagtcattttcacagcagtatttgttggtgggaggagacaaagaataaaaaggaaagaaaaatagata

SEQ ID NO: 7709 - DNA, 201 bp, Homo sapiens
ttgtgttttctcccagtatcattgacatttttgcatttttttcttgaacagcatctgagagtctgctgttacttgtggcaagtcagaacaaaattattgcsgacagtgtcacctcccaggtccacaatatctattcattggtcgagaatggttcttacattgtagctgttgattttgattcaattagtggtcgtatctttt

SEQ ID NO: 7710 - DNA, 201 bp, Homo sapiens
gttttatataactttttattgaaagcttcttcaaattacttttggactggggaaggatatgcttctctgtttttttccttgtatattactgcattccctargagctagtccatgatggcagtcactttagggacttgaaattcaccaggaatgggggtttggggagtcgtggtggtaccttcatgagactaactttatggc

SEQ ID NO: 7711 - DNA, 201 bp, Homo sapiens
tgttgacagaatgacatcgtggtgcagagtgagggcagggaggtcattcagcatggtggggtttcacacagccagatggatcagagggtggccaagggggkctcagttaaaaaggggtttttgagtcattttcacagcagtatttgttggtgggaggagacaaagaataaaaaggaaagaaaaatagataaaggtattgga

SEQ ID NO: 7712 - DNA, 201 bp, Homo sapiens
atgaagtaagacttttttttaaaattatgttgccttgacatggttatgatgagggaaaaacaacagtaacatgatgtagctgatatgcatgttgctgataygcaaaatttaaaatgatcccttgtttaaacatggtaggtgtccaactgggtgttgctatctctccttcatctgaatcatcctcttcataaagtacataag

SEQ ID NO: 7713 - DNA, 201 bp, Homo sapiens
taaccacaaacaaaatatgccacctctgtattcactaaagttaccagataactcctgattgccaatgggcacttttccttccttctcacactggatgggcrtttagattgcacttgactctggagaccattcctccttcttgacaccactcccttggctgccatgactcccagcagtcctggctctcttttgagctgcttt

SEQ ID NO: 7714 - DNA, 201 bp, Homo sapiens
ctagtcctctactgatcaatttttatatcattccttatcttttgctattgccaataagactgcaattaataccttgttcatatatcattttgcatacctgsgagtaaacagacagaacagatttggaaccaccattaccatctttttcagagtgatttcctggtaatctttaaaatgtcttctgtgtttaacaaaatctaa

SEQ ID NO: 7715 - DNA, 201 bp, Homo sapiens
tatgacagttttactttgtgacacttagaggaaacaataaactctgtgaatatattctgaaccagagatgatttattttaagcagggcataaacaggatgwtgtattatttaaaatgacagttatttttaatatttaaatacgtcccctccaattggtaactcatttcctttcccagtgagcatctactgttctggtctga

SEQ ID NO: 7716 - DNA, 201 bp, Homo sapiens
cagaatgcttgaattcttaccaaattcttcctaacttactgagattttggacgcttcattaagcctttttgtgcctcaatttgcccttctgtaaaatggayagaatgctagctatctgtctgcctcagaggtttatgttaaaatcaggtaagacaacctagaagatagcatttgaaaaagcagaaagcatatcatttgtaa

SEQ ID NO: 7717 - DNA, 201 bp, Homo sapiens
attctgaaccagagatgatttattttaagcagggcataaacaggatgttgtattatttaaaatgacagttatttttaatatttaaatacgtcccctccaaytggtaactcatttcctttcccagtgagcatctactgttctggtctgactggggccaccaccctcgcatcgagcgagccagcatggacggcagcatgcgca

SEQ ID NO: 7718 - DNA, 201 bp, Homo sapiens
ttattataccattaatacgattctcatttatttaaatgataacttgcatgaaatttctgaaaattgagaatttagatttttagcacttctgatttgattakagctaaaaaaaatcaaaacaaaccacgtagttagtgatgctgaagaaatataataattttggtttttctttcaggttttttcagttgacattaatggttt

SEQ ID NO: 7719 - DNA, 201 bp, Homo sapiens
aattttctctctccctctatacactgaacatctactggattaatcaaaggctcattctgatttcttttaggctgtatactctagaagccatgtctattttrtgcccttatttatagaagctttaagagagtttattaaatataatcctatttgaggacatgttacccaaacacacctagtggtgtactaaaaatacttgtt

SEQ ID NO: 7720 - DNA, 201 bp, Homo sapiens
ttgctcataaggttgttgagagaatttttggctaatgcatgtaaacacctagagtaatggctagaaaatagtaaatattcagtaaatgttggatatcattwtatctgttatcaatataaaaccatattgcccaccctcccctgcccctaatccagacctgctctggggagggaacagctcttttgactatttcttcttttg

SEQ ID NO: 7721 - DNA, 201 bp, Homo sapiens
agggtatctagactctttaaataatatacacatgtaacctatacttattaagcatcttcaatataaaagacactgaagcactaattccccatcaggcacaycctgggagtatgtacaggcctagctgggagcagggacttggagtaagggcagtttgggaggacttgaaaactcaggagctctctagctaactgcctatca

SEQ ID NO: 7722 - DNA, 201 bp, Homo sapiens
taagtgctggaggtaacagaggtgaacaaaacagacaaaaccccctgtgtgtattgagtttacattctaagaggacaataaatagagaagtcaataaatayatggtagttcaggtggtactatggagaaaatgaaggcagaggaagagggatgaggatggggtgagtggggattgtcctttagatagtgttcagggaagac

SEQ ID NO: 7723 - DNA, 201 bp, Homo sapiens
gaagagtgagtttttataagacctctacctcaagctggattcccattgccccagaatccactcaaccttaattgtagctcctcagggtagagaaccatgtycagttttgacaactgaaaaagggctaccttttgaaaagtgctttatattatcaggagacgaagaccagcatgaggaagctgtggtttaattctagtccca

SEQ ID NO: 7724 - DNA, 201 bp, Homo sapiens
ccagtatactttggatagaccatatgttatgatctgtccagttttgggtagtgacaaatcttggtataatatgtggatctcactggtcttttgaaccatckcaagttgtttagcactgagtagattttgaggttaggcagtgaaccagatacccaccttccaaacctctcagggcagcagagaagataagtgatgccaata

SEQ ID NO: 7725 - DNA, 201 bp, Homo sapiens
atgtctccttggagggttggggtggaaatcacatccagtatactttggatagaccatatgttatgatctgtccagttttgggtagtgacaaatcttggtayaatatgtggatctcactggtcttttgaaccatctcaagttgtttagcactgagtagattttgaggttaggcagtgaaccagatacccaccttccaaacct

SEQ ID NO: 7726 - DNA, 201 bp, Homo sapiens
cttgggatccttatgggagctggctagaaatgcagtctctcaggcccaccccagaccttctgaatcagaatctgcattttagcaagattccccaggtgatkgatagcacattcaagtttgaaaatctccactctggagggccgacgaaatggtaatgagacagatattgatggaggcttttggaagatgtgttactaattt

SEQ ID NO: 7727 - DNA, 201 bp, Homo sapiens
ctcaggttacctgtgcgctaatttatccttcagcagtgtgtggagcaagatgaaaggcaaagggaagtgaggaaaggaaatagccttttactaagttcttrtgtcaaattctctcttcagtgttaattcagccatctattacttcaattaccttataaagacctcccaaaccttataaagacattttattctcatctcaaa

SEQ ID NO: 7728 - DNA, 201 bp, Homo sapiens
catcagcaggtaagtaaaaatattagccctcatcattgtttggagtgatggatatgtacttctaggccacagaatccagcagacatcagtcccctgctaartgtgagttgggttaacaagtcacaaaatgggtttcataggcatcagaaatcttatccttcccattgcaaggctaggctagtcaggtcaacctgagatatg

SEQ ID NO: 7729 - DNA, 201 bp, Homo sapiens
caaagctgctgttatcttcttctttctctctcttttttttcctcctttttaaaaatttttgtcaagatgtctaagggattaaattgatatagaaatttcawtttctaggagtactgcttaggcagtgaggtgagagcactttcagtttttcccggtgatttgtgtctttggagtgcagctgttgctttattccagactatc

SEQ ID NO: 7730 - DNA, 201 bp, Homo sapiens
gcctttgcactgcctggagagggtgccttatgctgcatgaggaaagtaaaaccagacccgtcgaatgaagtgtgtcccccgtattttctacatgacaccaycttaaagtgggcattattgcacacagtcttgcaccctctgttgcctcactgcaggaagacaaacttcctgttttcccctgccctcatttgcctgaagaaa

SEQ ID NO: 7731 - DNA, 201 bp, Homo sapiens
aggctgatctaatttttaatcttgaaaaacagaaaccggcacctgagttcatttcctggacccaaagctgctgttatcttcttctttctctctcttttttwtcctcctttttaaaaatttttgtcaagatgtctaagggattaaattgatatagaaatttcaatttctaggagtactgcttaggcagtgaggtgagagcac

SEQ ID NO: 7732 - DNA, 201 bp, Homo sapiens
attggtgagtaggtgattgaggggtttggcaaggttgccttgggttatgtgcatgtcatgattgtctttaagcatgaacttcgtgatttacaaaaagtttrttgcacttgttagtgttttcttcaaagcatatgctgaaagttgacagtaggcaaatatctttagagtttatcccccttcccctgggaaagactacctaga

SEQ ID NO: 7733 - DNA, 201 bp, Homo sapiens
ctccttagaatctcagtaaaagactagtggtagagttagaaatcactaacttattgtaaaatgtagatcatttatagatttctcttgttcaacttgctctrcatcctctgtaaaccactgattaacaaagagctggctgtacctcccctatggcctgtaactctctctttttccccccacagaaagcggtcctcatgatgt

SEQ ID NO: 7734 - DNA, 201 bp, Homo sapiens
ttgcacaatgacttccttgtgtttttattaaataatgacatgttaaaggaaaccgtcttcttgagcagatatcctctttgactcagtgcaccttggctttsatttttggatgaggtctcactgttctcttctgcctcacagattatacggcacccctatgccctaactctctttgaagactctgtgtactggactgaccgt

SEQ ID NO: 7735 - DNA, 201 bp, Homo sapiens
ttcaacttgctctacatcctctgtaaaccactgattaacaaagagctggctgtacctcccctatggcctgtaactctctctttttccccccacagaaagcsgtcctcatgatgttcataaatgttccccaagagaatggtcttgcccagagtcgggacgatgcatctccatttataaagtttgtgatgggattttagattg

SEQ ID NO: 7736 - DNA, 201 bp, Homo sapiens
aattctaagttgaaagcctgatgctagggaagttgaaagtgtgagtagttcagtgaaaacaaaacaaaagaaaacaacagaggtaacaacgtacttaagcmcccctgtactggggcctctggaaggacactaagagcatgactctgttttgattttaatgtggaggttttccacttactggtgctttcttctctttctcat

SEQ ID NO: 7737 - DNA, 201 bp, Homo sapiens
tccattacaagtatgatcagttgatagttccatcaagcagatgcataagagtggtagtggcattgcttcttgctttccttacagtgacatcaggaacagaygtgggcgtttgctggggcttgaaccctaccactcactgtcctgctccctaattgctaggaaatgctcaatggtgcagtgggaaatagttggcaaaggcat

SEQ ID NO: 7738 - DNA, 201 bp, Homo sapiens
aagtacattatatttattgctgcaatgctgcaatgtcattttagcccatatgatggtaacaggctattgccttccattactctaaatgtctgggaatagtrggatatgattttgactgatattcttctattttcacagatgatcaacctttcttaataactgtaaggcaacatataatttttggaatctcccttaatcctg

SEQ ID NO: 7739 - DNA, 201 bp, Homo sapiens
tatgatcagttgatagttccatcaagcagatgcataagagtggtagtggcattgcttcttgctttccttacagtgacatcaggaacagacgtgggcgtttkctggggcttgaaccctaccactcactgtcctgctccctaattgctaggaaatgctcaatggtgcagtgggaaatagttggcaaaggcatcttttcccaga

SEQ ID NO: 7740 - DNA, 201 bp, Homo sapiens
ttagatgttgaatttgatgatgctgagcaatacatctattgggttgaaaatccagtaagttttgaataacattcaaagtatataatttattcttgaagagmctgcctgcactgatgttttcttataagcaaacttttgtcatgtgagtaaaagggaaacaatgtggaaataaatttatccctaagttttttgattcaatga

SEQ ID NO: 7741 - DNA, 201 bp, Homo sapiens
tccttacagtgacatcaggaacagacgtgggcgtttgctggggcttgaaccctaccactcactgtcctgctccctaattgctaggaaatgctcaatggtgmagtgggaaatagttggcaaaggcatcttttcccagacttccaaagtcttggtatactctttcacttatggtattcaaaatgctatttcacatcttagcct

SEQ ID NO: 7742 - DNA, 201 bp, Homo sapiens
aaggcaacattagtgagtcttttctggagatggtcaatttctccttcatagatgcctccattttccttcatgaggtaaggggaagatgtggggagatggtkgtctgttctgggggtgattaatttctcctccatagatgccttcattctccttcttggagtaaggggaagatgtgggaagatggtggtctgttctgggggt

SEQ ID NO: 7743 - DNA, 201 bp, Homo sapiens
cagacacatatcgccagaggcggtttgcttggtaacatggtcattgttattcctcagtaccacaacctcaatgtgacaatggaaaggtgctttcttgtacyttcagttctgactttgatgcctcctcccttttcagtgagctctgcccatctctgtgacaacttcacagaattcagctgcaaaacaaattaccgctgcatc

SEQ ID NO: 7744 - DNA, 201 bp, Homo sapiens
aatccaccttctgttttgttacatgctggtgtttttcatggttgtaggaagctgtactggtcagaccaaggaactgacagtggggttcctgccaagatcgscagtgctaacatggatggcacatctgtgaaaactctctttactgggaacctcgaacacctggagtgtgtcactcttgacatcgaagagcagaaactctac

SEQ ID NO: 7745 - DNA, 201 bp, Homo sapiens
agttgataaggccactggggccaacaaaatagtcttgagagataatgttccaaatctgaggggtcttcaagtttatcacagacgcagtaagtatttgtcaytgaaatacattcatgggtgtataatgcatattcacacataactcacatttgtaagcacacacccacacacagtttcacgtacatacacgtgcatacaaat

SEQ ID NO: 7746 - DNA, 201 bp, Homo sapiens
tttgatgcctcctcccttttcagtgagctctgcccatctctgtgacaacttcacagaattcagctgcaaaacaaattaccgctgcatcccaaagtgggccrtgtgcaatggtgtagatgactgcagggacaacagtgatgagcaaggctgtggtaggaggggccacaggggagtggagggagggacaagaaagtgcacatg

SEQ ID NO: 7747 - DNA, 201 bp, Homo sapiens
aaaagagggaatgttgaccatgaatgttgctggcattcctctctttgggagcttcaagagtgagctaatacaattctcagactgtctcacaaggaagccartactactttgtgcatttctctgccaatggtttatgaagtctttgcaatgactgctttgcagaggagaggacatgccatcctgtgggggatttccgctgta

SEQ ID NO: 7748 - DNA, 201 bp, Homo sapiens
tgttgtttttagattgctaactcagctactatatgttggttattaatttttagaataaattatttggtgacccaattaaagaaatttgagatggggtggcragtagctaggatcaaaagttacaaatggattttgttttcatttagatgccgccgaatcctcaaatggctgtagcaacaacatgaatgcctgtcagcagat

SEQ ID NO: 7749 - DNA, 201 bp, Homo sapiens
tagaataaattatttggtgacccaattaaagaaatttgagatggggtggcgagtagctaggatcaaaagttacaaatggattttgttttcatttagatgcygccgaatcctcaaatggctgtagcaacaacatgaatgcctgtcagcagatttgcctgcctgtaccaggaggattgttttcctgcgcctgtgccactggat

SEQ ID NO: 7750 - DNA, 201 bp, Homo sapiens
acttggcatatcatcaaaatcacctgaggaacttaaaaaagtatagagattcttaaatcaaaactcacccttactaaagcaggggtatgaaaatctgtgtkttttaaaaattttattttattttactttcagttctgggatacatatgcagaatgtgcaggtttgttacataggtatacatgtgccatggtggtttgctgt

SEQ ID NO: 7751 - DNA, 201 bp, Homo sapiens
gaggagaagaaagtcttgagcttagtttccttccacgtgtagggaaggttcctctccaggaacctcagtgacttagctgatagaggaggcactgcatgagstattcagggggagcacagaaaagactggtacaaatacactttcagtgctttgatgctggctaacaggaagttttcattgctcagcgttcttggtaaaaac

SEQ ID NO: 7752 - DNA, 201 bp, Homo sapiens
atcaaaagttacaaatggattttgttttcatttagatgccgccgaatcctcaaatggctgtagcaacaacatgaatgcctgtcagcagatttgcctgcctrtaccaggaggattgttttcctgcgcctgtgccactggatttaaactcaatcctgataatcggtcctgctctccatataactctttcattgttgtttcaat

SEQ ID NO: 7753 - DNA, 201 bp, Homo sapiens
tgttacaagctagctacaacaagaaggacaggactcttttaagtctgagggtgacatgaagtactaccctcattcctggccacctccttttttggccagcrtggcaggtcctgaacctctccctaaatatgccactgtttgtgtcttaattgtatgttttgttcttaccttggtcacctttgaagttccccccagaccctc

SEQ ID NO: 7754 - DNA, 201 bp, Homo sapiens
gaagaaagtcttgagcttagtttccttccacgtgtagggaaggttcctctccaggaacctcagtgacttagctgatagaggaggcactgcatgagctattyagggggagcacagaaaagactggtacaaatacactttcagtgctttgatgctggctaacaggaagttttcattgctcagcgttcttggtaaaaacttgga

SEQ ID NO: 7755 - DNA, 201 bp, Homo sapiens
cttcaaccttatatattttgttctgaatttgtaaagttctccctttttttcttcttggttctccattgatcagcatgcactttcatttttcccataggaamtctttatttcaccaatgcctttgtttctgaaacactgatagaagttctgcggatcaatactacttaccgccgtgttcttcttaaagtcacagtggacatg

SEQ ID NO: 7756 - DNA, 201 bp, Homo sapiens
cagatgtcaccatgggtgctaagaaggggcatcctcagctcatcaccattccctggtactaccagcccttaattcctcgaggcccctggaggcccagtcarggtcctgatggagaaaaaggaaaattgctgtctctatcaaagcaagtggcttagcaacgctgtttctctcgatctgactccccccttttctccaccccag

SEQ ID NO: 7757 - DNA, 201 bp, Homo sapiens
ctgagatatgcttgcacaatgagttttcatgtggcaatggagagtgtatccctcgtgcttatgtctgtgaccatgacaatgattgccaagacggcagtgaygaacatgcttgcagtacggtgatttctttatgctgggtcatgttgttgggagtgttttgttttgtttcggttttgttttgttttatccccccgctccccc

SEQ ID NO: 7758 - DNA, 201 bp, Homo sapiens
ggaaggtggcttggttgccagattgctccccaaggcaacattagtgagtcttttctggagatggtcaatttctccttcatagatgcctccattttccttcrtgaggtaaggggaagatgtggggagatggtggtctgttctgggggtgattaatttctcctccatagatgccttcattctccttcttggagtaaggggaag

SEQ ID NO: 7759 - DNA, 201 bp, Homo sapiens
caagctaatctcttggtgcatgaaaggggtatatgtgtatgtacgtttgctgggggagaggaacgttttaaccattttcaccaaagaaagataaaattggwggtcaaatgaaattatgcaaaccatcagcaggtaagtaaaaatattagccctcatcattgtttggagtgatggatatgtacttctaggccacagaatcca

SEQ ID NO: 7760 - DNA, 201 bp, Homo sapiens
ggaagatggcagtagataacaacaagctaatctcttggtgcatgaaaggggtatatgtgtatgtacgtttgctgggggagaggaacgttttaaccattttmaccaaagaaagataaaattggtggtcaaatgaaattatgcaaaccatcagcaggtaagtaaaaatattagccctcatcattgtttggagtgatggatatg

SEQ ID NO: 7761 - DNA, 201 bp, Homo sapiens
tgagaagggccacttcccagagaaagtgggactgacatagaacctagatggatgtcttgggtactgataggcaaaggagccaggccggctgttcagaagcycaggcaatagcataaacgaagtcatggaggaaacaaaaatcattctgtgtaccttttgtgtgttttttccattccattccctacgttttgttttttttag

SEQ ID NO: 7762 - DNA, 201 bp, Homo sapiens
cttggtgcatacatacatagtacaaaatttctttccttgtgtactaatttatggctctaagagcagttgtatgatttagaactctatgtattttactgcamcctggtcaacacttgatatacatgtatatatttgtgtgtgtgtgtgtgtgtgtgtgtgtgtgtgtgtgtgtatataatcaattggtcaatgttagggaaa

SEQ ID NO: 7763 - DNA, 201 bp, Homo sapiens
agggacatagctcatagtccattcagaaactgaaatccaggacctctgggtaatgggcagtagccactcaatcagttccagatgtggttcctcttggttgrgagacccataaactaataaacaatcagtgccttctgtgcctgataggtattggcggaacaggggcaacacaatagaaataaacactcccattggaaagaa

SEQ ID NO: 7764 - DNA, 201 bp, Homo sapiens
aagtggtctgcagtttggaaaatgtgcctctgggatttcagtttgttctatagagttgtgcccatgactgcagatctctgctgacataattgtttacaagrccatgcaaacacatgcattgcttacatgtaaccctgcctgtttcttcctgtctcatttgagcatgatgctggcaaatccattaatttttcagtctttgtt

SEQ ID NO: 7765 - DNA, 201 bp, Homo sapiens
agagatcagatcattgacagagtaatcctaaacccaaagtaatttttatagctctttactgatttggtgttgggtcttaggaaaattagaaaacattgaarattggggaattccgatttctgaggaaaagcttaagagctggagattatttaatattagggagctaggtacttccatctctgtatgttgagtggggaaagt

SEQ ID NO: 7766 - DNA, 201 bp, Homo sapiens
cctgtggtaccaacaatggtggctgttctcatctctgcctcatcaagccaggaggaaaagggttcacttgcgagtgtccagatgacttccgcacccttcarctgagtggcagcacctactgcatgcccatgtgctccagcacccagttcctgtgcgctaacaatgaaaagtaaggctctctttcccctctcctcagtgcct

SEQ ID NO: 7767 - DNA, 201 bp, Homo sapiens
gaaaatactgtagtgagtatagacatttacctgggtagctttcagataaagatatttctgttttctagaacagacgttcaaatacagtgtatctgttggcrtttgcataacaaagcaccccaagacttagtggcataaactgagaaacgtgtcttatttctcacagttctgtgggttggctaggtagttcctctggcctgt

SEQ ID NO: 7768 - DNA, 201 bp, Homo sapiens
tcacagaaaacctggcaaatagggaattttaactctgagaaggtttggtgtggtgtacaaggcaaaagaatggttctgtcatgagcgagttgactagctayctggaacctatccattacttgatgagggcggtagtccttttctgttttcttttcaagtatttggcatcaggattggtgcagccatactggttattgaata

SEQ ID NO: 7769 - DNA, 201 bp, Homo sapiens
tgacagtgtaggggcttcaaattagtgtttataaggcttttagaggaaaattatttttgtatatgtgtaatatgtaaaccttagcataacacagtatcttytgctctgtattttctatgcattattcttaactcatagcagtctagattagtcataattgaggaaaatagcaaggaattttaaacatttaattttaatatc

SEQ ID NO: 7770 - DNA, 201 bp, Homo sapiens
aatcagcagtgcattccctcgcgatggatctgtgaccattacaacgactgtggggacaactcagatgaacgggactgtggtaactgtcatttgagaagctyaccatagaattttgtactgtgacagtgtaggggcttcaaattagtgtttataaggcttttagaggaaaattatttttgtatatgtgtaatatgtaaacct

SEQ ID NO: 7771 - DNA, 201 bp, Homo sapiens
agctttttccaagtgtctgagttgctagtttggtattaagggtgaggttataaaacctgacccaaaagtctgtacatgtggataggccttgtcagctggtragcttcaggcaggaaggtggcttggttgccagattgctccccaaggcaacattagtgagtcttttctggagatggtcaatttctccttcatagatgcctc

SEQ ID NO: 7772 - DNA, 201 bp, Homo sapiens
ggtttgctgtgagccagtcacagggtgtagataggaatgtgatggagtaaccactatactccaggtacctaatatctgtctgaaaatgacaaggccttctyggaatgacaatcttttctcttcagagatgaggacctgccatcctgaatattttcagtgtacaagtggacattgtgtacacagtgaactgaaatgcgatgg

SEQ ID NO: 7773 - DNA, 201 bp, Homo sapiens
ttacatgatagcttcctgagaaacataagtaggtggcatatattttgagtctttgaatgtctgtgagtgttttattttgctctccatcttgactgtttggstgggtacaggttgcaagttaatttaaacctggaatttgaagacattgctctagtgacgtctaatatctagtgttgagtccagtgccattctgagtaccat

SEQ ID NO: 7774 - DNA, 201 bp, Homo sapiens; identical to SEQ ID NO: 1006

SEQ ID NO: 7775 - DNA, 201 bp, Homo sapiens; identical to SEQ ID NO: 1007

SEQ ID NO: 7776 - DNA, 201 bp, Homo sapiens
tagggatttggtcatatttcatttaaaaattaaacatttatatccaaaatatataaatatttaaaatgacacatgtataaatatatattatccatttgtakaaatattccaatttgcaatttatctataaatcatctcagtgtaaatgagaacaagttttgttatttttctctacatttcaagacatttatttgaataatc

SEQ ID NO: 7777 - DNA, 201 bp, Homo sapiens; identical to SEQ ID NO: 1009

SEQ ID NO: 7778 - DNA, 201 bp, Homo sapiens
tgatgactgtggcgatggttcagatgaagaacttcacctgtgctgtaagagggagagaaacggagtgaatgggagtggtgttgtctgtcaaatctcattgkttcttacgtgtagcatgtgagcctggagagcagttgtacaattgtttaggaatggacacaggatcagcgttggtgttatttcactgggtcttccagcttc

SEQ ID NO: 7779 - DNA, 201 bp, Homo sapiens
gtcctgctggtgtttgcaaagttaaccctgcaggcctgtaagttgtgttcccctcaggttatactgagaatgcaactatctcctagaataacgtcccctcyggaatgttaatgagaaggtagaattccagtataatattgctatcttctgatttcttccaatggtgttggaagaaacaagaatggtgttcaccccaggata

SEQ ID NO: 7780 - DNA, 201 bp, Homo sapiens; identical to SEQ ID NO: 1011

SEQ ID NO: 7781 - DNA, 201 bp, Homo sapiens
ttgacagtaggcaaatatctttagagtttatcccccttcccctgggaaagactacctagaactcttcatcttcttaaaactcgctcaattcttcaagatcrtctttttttttttcctttgtttttgataagatttaacagttatcatgttgccatatttacttcatctatttctatgggaagactgaagtattttaaagga

SEQ ID NO: 7782 - DNA, 201 bp, Homo sapiens
ctggaactgtgcctgtagttctactcttacttttttttttgagatggaaattcgctcttgttgcccaggctgaagtgcgatggcgtgatctcggctcaccrcaacctctgcctcctgggttcaagcaattcccctgtctcagcctcctgaggagctggtattacaggcgtgcaccaccacacctggctaattttgtatttt

SEQ ID NO: 7783 - DNA, 201 bp, Homo sapiens
actcatgaggctgaggtaggaggatcccttaagcccaggagatgcaggttgcagggactgagaacatgcatggcactccagcctgagtaacagagtgagaycctttctcaaaaaaaacaaaacaaacaaaacaaaaaaaacaaccaatactagtcattcccagcatgggctgggcgtgaaaactggagaatggctaacatg

SEQ ID NO: 7784 - DNA, 201 bp, Homo sapiens
aattgcgactgaacatgtgctgtgtcctttgattcctcaggtgtctgcagaatgatgtgtgttgtatggggtgatgtcactgtgtgccttggttgtaatayagtttctgtatatggaactaatgttatctgtgcatgtaattgaacaatctgtaacctcatattttctctcacctgggtacagttagacttctctgacaag

SEQ ID NO: 7785 - DNA, 201 bp, Homo sapiens
aaaattagccaggaaaggtggtgttcgtctgtagtcccagctactcatgaggctgaggtaggaggatcccttaagcccaggagatgcaggttgcagggacygagaacatgcatggcactccagcctgagtaacagagtgagaccctttctcaaaaaaaacaaaacaaacaaaacaaaaaaaacaaccaatactagtcattc

SEQ ID NO: 7786 - DNA, 201 bp, Homo sapiens
agaccagcctgggcaacatggcgaaatctgtctctaaggaaaatgaaaaaaattagccaggaaaggtggtgttcgtctgtagtcccagctactcatgaggytgaggtaggaggatcccttaagcccaggagatgcaggttgcagggactgagaacatgcatggcactccagcctgagtaacagagtgagaccctttctcaa

SEQ ID NO: 7787 - DNA, 201 bp, Homo sapiens
gttcaagaccagcctgggcaacatggcgaaatctgtctctaaggaaaatgaaaaaaattagccaggaaaggtggtgttcgtctgtagtcccagctactcaygaggctgaggtaggaggatcccttaagcccaggagatgcaggttgcagggactgagaacatgcatggcactccagcctgagtaacagagtgagacccttt

SEQ ID NO: 7788 - DNA, 201 bp, Homo sapiens
aagaggaattgcaagggaagagagttcactgttgctggccattcacttaactggagatgatatgaagggacgattcatgcattcattggtgcattcagtcrttacttcctgagtccctcctacatgcccagcgtgatgacaagcagcaggggttttgaggggaacaaggcagacatggcccttgctctcctgaagtacata

SEQ ID NO: 7789 - DNA, 201 bp, Homo sapiens
ttacaggaccagccagagggacatgtagtgttgtgttgcacctagtgttgagctcatgccatctcgtgagaggcaaatgtgtgtatctctttgtggttccrtgttcagtgatgtcacactggaagcctgagcttgaccatggtgtgaacagtcacactggaacatgctacaaatcagagcatttagaaaatttttcctgag

SEQ ID NO: 7790 - DNA, 201 bp, Homo sapiens
aaactgttggtcgctggtactagtcttattggaggactaccctagatgtatataattaaataatgctctgtttcaggttttctagacaacccatgctacarccagcttgtctccagattcctggactgtaaaccactttttttcactgagaatgctattgatcttttcaggtcactctgagcgaacatgcctagctgatga

SEQ ID NO: 7791 - DNA, 201 bp, Homo sapiens
tgtgctgcctggaacacatggcttccaaggttgctgcagcagcacaggagacacggaggaggcacgtgtgcttttcattgcttcagcccagtagtgacacrtggcacctccaactgacagtacgttggctagaactggtcacatggtcctaacccagctgcaagggagactgggaaatgtagggaagcacttgtttatttg

SEQ ID NO: 7792 - DNA, 201 bp, Homo sapiens
taatagctgtagagtgtcaggcttcatagttgtgcagtccagaattggatgctctgaggataagcctaggagtgctgcatataatgtgaaaattgcctcamagttttagcattatatgcatttatctaaatggtattcagatcacgatcagaaataggaatcctgactcccccagtgccctctgtcctctccaaggcttat

SEQ ID NO: 7793 - DNA, 201 bp, Homo sapiens
tagtgacacatggcacctccaactgacagtacgttggctagaactggtcacatggtcctaacccagctgcaagggagactgggaaatgtagggaagcactygtttatttggtaagcacaaactgtctctgtcaaagaaggaagtatcttgcttcataaaagaaaaagttttgattttaacttgtttttacattgcaggtag

SEQ ID NO: 7794 - DNA, 201 bp, Homo sapiens
ttctctgtgtttttaagttgctttggttcatgagtttgttgtgatgctgttgctgagcttatttgacagtgaactctgactggcgtccacagactctagtrtaagggttgtttactatttgccttcaaataaattgagcaggagtttacatgatacactcttctggaacaagcattgcttgctagtataatggggaggatg

SEQ ID NO: 7795 - DNA, 201 bp, Homo sapiens
tgccagcagggctatttcaagtgccagagtgagggacaatgcatccccaactcctgggtgtgtgaccaagatcaagactgtgatgatggctcagatgaacrtcaagattgctgtaagtgtttggagaggaatcttgctttggctttgtggacacctaaaacccaacctgtcgcaaagaagttacacacaatgggatgattc

SEQ ID NO: 7796 - DNA, 201 bp, Homo sapiens
ctccaggtgctgcttgtcctgcaagtagacacaatggggtcaacacacatggatgactgagtgtttctaatgcatatgagactctaatgtctttgtgtgtrcttgtgtgtgtgtctgcctgtatgtgtccaggtatagggactgctgatggcattgcctttgactggattactagaagaatttattacagtgactacctca

SEQ ID NO: 7797 - DNA, 201 bp, Homo sapiens
gaagcacttgtttatttggtaagcacaaactgtctctgtcaaagaaggaagtatcttgcttcataaaagaaaaagttttgattttaacttgtttttacatkgcaggtagaaaaccgacccctaaaccttgtacagaatatgaatataagtgtggcaatgggcattgcattccacatgacaatgtgtgtgatgatgccgatg

SEQ ID NO: 7798 - DNA, 201 bp, Homo sapiens; identical to SEQ ID NO: 985

SEQ ID NO: 7799 - DNA, 201 bp, Homo sapiens
atatgtatatacctgatctctactttctgaaaatttacacatttagaatgggaggttatttagttcctagcatgtaacttgtgacttataaacccacttarcaattacatactgcttcaatctgaatttgggccatagctaaataagggtgagttgccattttgtaccaaattgaggttaaggtgcaagatgccaggtgtc

SEQ ID NO: 7800 - DNA, 201 bp, Homo sapiens
ctggactgacttgtacacacaaagaatttaccgagctaacaaatatgacgggtcaggtcagattgcaatgaccacaaatttgctctcccagcccaggggartcaacactgttgtgaagaaccagaaacaacagtgtaacaatccttgtgaacagtttaatgggggctgcagccatatctgtgcaccaggtaaggcactgac

SEQ ID NO: 7801 - DNA, 201 bp, Homo sapiens
gccactgcacctggcccgatttctcttttttcttttgtacaaaaaatgtcatgctccctaacttactgtccatgtttgaggttcccaaagaagctgagggrcaatatgcaactcgtaccacctgctgcttcataactgtggatctttttccagaatctctcctcaggtttctaagaccagaacccaagtctccccattccc

SEQ ID NO: 7802 - DNA, 201 bp, Homo sapiens
gcattacatttgtttctctatagggaaattaaaatcatgattatgctatattagcaaattgcttataaaacaaattacaatttttgattgtaggataagawgtactcttgtagccccctccctccctccctccctcccttccttccttccttcgttccttccttccttccttttcttccttccctccttccttccttgtag

SEQ ID NO: 7803 - DNA, 201 bp, Homo sapiens
aagggctcatatacttggtcttgccctctagatgctgcgttccttgaggataaagcctctacctggtctgtagatgtatgcttattgcctgtggcacttcrtggtacatggtggcactcagtaaatgttgagtgaatgacaagctctccaatatccatttttgttacttccccagtcctctgatttttacccgtttgctcc

SEQ ID NO: 7804 - DNA, 201 bp, Homo sapiens
ggcaaccaatcagtaaattgtctagtatgttgaaaggtggtgctaagtgttatggaaagaaggaaagggagcaaggaagcgggcatggggagtgcaggcgrggggagactttgcacaaaacaaaatggttttggatgaaaagtagattttaaaatagaaacatgtgaaatagtaggtaattcatatctttcctgggaaaag

SEQ ID NO: 7805 - DNA, 201 bp, Homo sapiens
  misc_feature (1)...(201): n = A,T,C or G, or insertion/deletion polymorphism (see Tables 1-2)
tgttaagactgatgggaacatgcttgtgttttgctcatgggttttatcttctttccctcctgcagccactcacacgtgcagcagcagtgagttccaatgcncatctgggcgctgtattcctcaacattggtattgtgatcaagaaacagattgttttgatgcctctgatgaacctgcctcttgtggtaagagagtaagcaa

SEQ ID NO: 7806 - DNA, 201 bp, Homo sapiens
tacacaagcatccattttccaggctcagtcttccttttttggtaactattatctagctcagagatagaggcagattgttaagactgatgggaacatgcttrtgttttgctcatgggttttatcttctttccctcctgcagccactcacacgtgcagcagcagtgagttccaatgcgcatctgggcgctgtattcctcaaca

SEQ ID NO: 7807 - DNA, 201 bp, Homo sapiens
aaacggccttatagaccagaagaattacaagactttaattagatgtgcacccacataacaatttggaaaatgcatataaccagagctacctaaaattactsgagaaaagagtcaatgttcaaacataggcagagtttcccacttactcaactaaaagtctggtattccaaggatgaatacgaagataactttgccaacttt

SEQ ID NO: 7808 - DNA, 201 bp, Homo sapiens
agagtgggggtcacaaggtgctcagtgggggggagtttttgagccagatgagccaggaaaaggaatttcacaaggtaatgtcatcagttaaggcaaggacmggccattttcacttcttttgtggtggaatgtcatcagttaaggcaggaacaggccattttcacttcttttgtgattcttcagttacttcaggccatctgg

SEQ ID NO: 7809 - DNA, 201 bp, Homo sapiens
gccgcccttccagtggtttgagttccacaatagatgtgttagcacggatactgttcataatacatatttggtggatatattcctaatatttatctggttgyctttttcaagctgatcgcacttgccagtctggatacacaaaatgtcataattcaaatatttgtattcctcgcgtttatttgtgtgacggagacaatgact

SEQ ID NO: 7810 - DNA, 201 bp, Homo sapiens
aaaaaatttttgggggggtggcatggagagataatgcgcagtgtttctcagggctgctcaagtgggattaggggcggtgtgggaacctagagtgggagagmttaagctgaaggaagattttgtggtaaggggtgatattgtggggttgttagaagaaacatttgtcgtgtagaattattggtgatggcctggatacggttt

SEQ ID NO: 7811 - DNA, 201 bp, Homo sapiens
gaaaagacaacatatagtgacccagacttcaaccttatatattttgttctgaatttgtaaagttctccctttttttcttcttggttctccattgatcagcrtgcactttcatttttcccataggaaatctttatttcaccaatgcctttgtttctgaaacactgatagaagttctgcggatcaatactacttaccgccgtg

SEQ ID NO: 7812 - DNA, 201 bp, Homo sapiens
gccaaccctggattaaaggattggaaatgagcaaatgcatacatagcaagtagagttaggtaatgaaaaaatgtatcagtaacatatttcacattggcctsatttctctagaggtggtttgaatcagatataggaacaaaatatgtgtgtcttggtagtagcattgatagttcaacaacagactttcaactacatgaaatc

SEQ ID NO: 7813 - DNA, 201 bp, Homo sapiens
agcactttaggaggctgaggcaggcggatcacctgaggtcaagagttcgagaccagcctgaccaacatggtgaaaccccatctctactaaaaacacaaaarttaaccaggcatggtggcgtacgcctgtaatcccagctactcaggagcctgaggcaggagaatctcttgaagccgggaggtggaggttgcagtgggccga

SEQ ID NO: 7814 - DNA, 201 bp, Homo sapiens
tggtctaagaaccatttgccttgtgtgggaagagattgataggtggaagtttcagcgggggactaggtgggagtgactaatgtgaaggagaaaaactgacygtgagggacagaagttggaacgctagctgcttttttagctaatttatcagcataagcattgtcctgagcgatgggatctgatgcctttttgatggccctt

SEQ ID NO: 7815 - DNA, 201 bp, Homo sapiens
tagaaggtatactactatttaatatggtaatgaaatagtccacaaatatgatttattaatatatatttggtgaattgaagcaaaagagttcacagtgtcastccctctttagtaatcatatttttgcagcactttgtgcttacatactgtgaatgtatgaaacgatcacttgcttcctagatgagccaaggtttttaggta

SEQ ID NO: 7816 - DNA, 201 bp, Homo sapiens
attagtgtttaaatgttcaaaattttcactatgaatccatgaaactaatgaaaattccaatcctttagattgaaagaggaaacgtggatggaacagatcgratgatcctggtacaccagctttcccacccctggggaattgcagtccatgattctttcctttattatactgatgaacagtatgaggtcattgaaagagttg

SEQ ID NO: 7817 - DNA, 201 bp, Homo sapiens
tagtccctttgcaagagtgagggtttgacttaaggcaatgagttcggcttgctgagaggtagtggagcggggcagagcggtagcctcaatgatagatgtgsaagatactatagcatagcctgcctttgctggtgagtggcgattaggcctggtggaactgctatcagtaaaccaagtgtgttcagggtgaggaacaggaaa

SEQ ID NO: 7818 - DNA, 201 bp, Homo sapiens
tttgtaatgctgggattttgtttttcagataaaggaaaagaaagaacatgtgctgaaaatatatgcgagcaaaattgtacccaattaaatgaaggaggatytatctgctcctgtacagctgggttcgaaaccaatgtttttgacagaacctcctgtctaggtagagtatattttttccaattcctgtttaggtgaacttta

SEQ ID NO: 7819 - DNA, 201 bp, Homo sapiens
gggagggctctaggtttggtgctatcaaacgtgcctacatccccaactttgaatccggccgcaataatcttgtgcaggaagttgacctgaaactgaaataygtaatgcagccagatggaatagcagtggactgggttggaaggtaaatttgccatacattccccccttacctgttctgttttcctggttagagttctctac

SEQ ID NO: 7820 - DNA, 201 bp, Homo sapiens
tcctgcgtgattcaggtgctttggctgttgggcaggagtcccctcaattccttactcttccaagtgtaacctgccaaacatgtccccttggctgtagttcycccaagagagggggactatggtctgatgataggtatctgagcagctgtctcaccagccaaacgaaatgctctcatcttcaaacctcttacccagtaatga

SEQ ID NO: 7821 - DNA, 201 bp, Homo sapiens
ttggatcctaaagttttcttatttggagcagagctttgtgatagacaggaaagttctggaaaatgagctgagcgatcagactacaggatcccttaagtcckgtgcagtatttcatttttctgtgaatcttaggctcctactccttttccaatttacttcactccaatgtttatgttcctaagagtttgtctgttttccaag

SEQ ID NO: 7822 - DNA, 201 bp, Homo sapiens
tgaccgaatctactggagtgacttcaaggaggacgttattgaaaccataaaatatgatgggactgataggagagtcattgcaaaggaaggttagaaattarttagaaagtaatatattaaattaataattaacatatttctaatgtctttgcctgttttctcaagaaggagccctgctcttaggaaatggcttatatagtt

SEQ ID NO: 7823 - DNA, 201 bp, Homo sapiens
aaactcgagtctgcctggatgaatggagaggaccgcaacatcctggttttcgaggaccttggttggccaactggcctttctatcgattatttgaacaatgrccgaatctactggagtgacttcaaggaggacgttattgaaaccataaaatatgatgggactgataggagagtcattgcaaaggaaggttagaaattagtt

SEQ ID NO: 7824 - DNA, 201 bp, Homo sapiens
ttcctaagagtttgtctgttttccaagcactagtcctttgctataaggatggggtagagagaaagaagcttaaagagtttgcagacaggttaagatgcttytgtggagacagaacacatcttggtgcacatctgagtgtccttagcacttcatctatggacttctttcataaatggtagaacacgtatccatcacacctta

SEQ ID NO: 7825 - DNA, 201 bp, Homo sapiens
caaggtgattctgagggctggaccaatttttgggaacgtgtgatctaggtaccctctcatttttcagttttgtaaacagacttagaggtgaactgacttamcactgcaaatttcttcagtggcagttaaatatactctgttaaatctctttcttttggatgggaatgttacaagctagctacaacaagaaggacaggactc

SEQ ID NO: 7826 - DNA, 201 bp, Homo sapiens
aatgctcaataataattattgatgaagcattgctttgggtgctgaactgaatatatgctagtcccttccttgctatttaacagtagttacttcagatcctkgacattgatgcttttcataatattgtgcagtaggtttggctttcagttcattgtttgttcaacaagtactaacttcactccgaatatggacctataatgg

SEQ ID NO: 7827 - DNA, 201 bp, Homo sapiens
taagttctcttatttaaagtcactgaagaaaaaaatgaacaaccaagtgagagctgagtttctttacttcccggagaacactgctgttgtagagatggagragacatttcctatgtgctggatgtgcttaaaggtctcttggtcccaaagtatctctcactacggccaaagatctctgctctgtcattactaaagtcagtt

SEQ ID NO: 7828 - DNA, 201 bp, Homo sapiens
ctcagcttggagccttgccctgaggagtagctcccaacacttctgtgaggttgctcagctaatctggtcctggcctccactctctccactctctcctccargctcatgtttcttatattctaaattctagaactttgatcagtttcatcagcataaccactcttgtaactgctgggctcccttttcagccatggcagtaaa

SEQ ID NO: 7829 - DNA, 201 bp, Homo sapiens
aatgactaaatcagtaaattgtactcttaagattaaaggctattttctgatttatttttttgatgacaaattagagtgtttccttctcatctcagtcactscctgccactcttgctcttaatcataagccagttttagtttgagaggagcacaccagggaaacttttaatatatggttttaaggaaaagtcaggcttaagg

SEQ ID NO: 7830 - DNA, 201 bp, Homo sapiens
tttgtgtgtcagttagtagagattttattgtatatattttctggtatagtttattactgaagccgtacttctttttagcattaaaattctaaaattttatrtttataatagtgacaaaggtttttactgtaattactaatgatatttaaaacacagattaggcaaaatcttaggaaatataccctgctttttttccttcca

SEQ ID NO: 7831 - DNA, 201 bp, Homo sapiens
attaatatgagtttttaaacttctctatggtaacaaaagccatagtaatagcagtgagtaccaatgacctgatatatttaaataaaaataagcacataatmtatatatgaatatatcctcattgtagtaaagtaataatattcagaaatatattttaaagaaataatacgatgtacaaaaaagtaaaatttacattttttc

SEQ ID NO: 7832 - DNA, 201 bp, Homo sapiens
gcagccctgcgcaaaggggcagcctcacttctgctcagagtggggctcgtctgtgggtgtgaggccactcctgtgtctttagcaaatgtcaggctcctttkcccccctcactgctacccagctgccaatcccattcccagccttttagttctttaggcattttccttttctcttagtagaaaagaagttccaatagaaata

SEQ ID NO: 7833 - DNA, 201 bp, Homo sapiens
tctcataaggaatgcacaacctagatccctctcatgtgcagtttacaacagggtttgtgctcctatgggaatctaatgcagccactcatctgacaggaggyggagctcaggcactaatgctcactcacccgcctctcacctgctgctgtgtagcctggttcctagcaggccacggaccagtaccagtttgtagcccaggga

SEQ ID NO: 7834 - DNA, 201 bp, Homo sapiens
ttctatttttaaaaaaatttagagatgggggtctcactatgttgcccaggctggattcaaactcctaggctcaagtaaccctcctgcctcagcctcctgartagctgggactaaggtgtgtgccactgtgcctagctctgtttttctttaaagttactgtgtaataaaaaaagaatttgcaaatgcataaaattgaatata

SEQ ID NO: 7835 - DNA, 201 bp, Homo sapiens
gagaagttttttttggctcaagtgatcctcctacctcagccttccaaatagctacgactacagctacttggaagtgagccactgtgcccagctaaatttawtttttttttcttttaagatataaggatctcactatgttgcccaggctagtcttgaattcttggcctcaagtgatcttcttgcctcaatctcccatagctg

SEQ ID NO: 7836 - DNA, 201 bp, Homo sapiens
tcctattttctgtgtcagttttcaaaattctttgcatttttcatcacagaaatcaggttaggtaattaagtagccggtcttgtggtagatggtgatttggrgaataattaaatgaggcctggtaagtgatcagggagtgtacttggcagctttttatattagctttggccttcactatgtactgaagatggagggattatt

SEQ ID NO: 7837 - DNA, 201 bp, Homo sapiens
tgtccaggtgtagaagaactggagggttgggagctcaggcagggcttaagggcaaagaacaagtttaataggaaaagttaaagcaaggaagaaatgagagkttttggtcgaagcagagcatttcagagtttgagaacttagaggcggagaagtttagagttgaagatgaaattcaaaggacgggtatattgatttggtggt

SEQ ID NO: 7838 - DNA, 201 bp, Homo sapiens
agaaacccagggttggagattagcttagacacaatgggaacccaaaagaataaataagaatattgttgaaatggttacatatgatgtccaggtgtagaagractggagggttgggagctcaggcagggcttaagggcaaagaacaagtttaataggaaaagttaaagcaaggaagaaatgagaggttttggtcgaagcaga

SEQ ID NO: 7839 - DNA, 201 bp, Homo sapiens
attttttttaaaaaatttcaacttttattttagttatagggggcacatgtgcaggtttgttacatgggtatattgtacccagatagtgagcatagtacccratagttagtttttcaacccatgccctcctcccttcctcccctctctagtagtccacagtgtctgttgttcccatgtgtatgtccatgtgtgctcaatgtt

SEQ ID NO: 7840 - DNA, 201 bp, Homo sapiens
catctgatattattatcatactctgatatccctccactgtttttttcatagaaattcttttttttttttaatttttttggagatggagtgttgctctgttkcccaggctggagtgcagtggcatgatctcagctcactgcaacctctgtctccaagattcaagtgattctcctgcctcagcctcctggcagctgggattat

SEQ ID NO: 7841 - DNA, 201 bp, Homo sapiens
ctcattttctattgagctaatttcctcatttccctgaagtgcaatatagattatctgaatctcatgcaaatcctctctcatccatccctaatcgtgctttrgaatttgttttgtacataagttctccttcatctcagtttcctttggttccccttatgaaagtcagttctaataagtgattttatgctataggttttgaca

SEQ ID NO: 7842 - DNA, 201 bp, Homo sapiens
tttctctttccaaggtgctgaatttctttctttctttctttctctttctttctttctttctttctttctttctttctttctttctttctttctttctttcyttctttctttctttccttctttctttcttctttctgaatttcttttttaataaatctggttttatataactttttattgaaagcttcttcaaattacttt

SEQ ID NO: 7843 - DNA, 201 bp, Homo sapiens
ttaaatcaaaataaaatttgacctaaattgatgctgagaagagtctatatcaaggcttctgtacaccttctcaaattcccttatttcttcttctcatgtcacacacacacacacacacacacacacacacactcatacactcacagacatacataaatattgtctagaaaggaattttcagtttcagatttttcaagggac

SEQ ID NO: 7844 - DNA, 201 bp, Homo sapiens
ttacatttacattggtagggggcagttctaagatactagctacactgaaattagaaacaacttttttctccaatattaataaatatttctgctgtcagcaytagggtgtttggtttccaaagcccttgcatttgatatagctttttaaaccaccattacgcacattggaagatactgttggctctcagttatcttaatttt

SEQ ID NO: 7845 - DNA, 201 bp, Homo sapiens
gtggtacagaaattggctggagggcccagagagggactatcccactgcagtgtggtggcagagatgatagtgtaaatgagggtgagtggccagctgacacrtggacgagaggtattgagaggatgcctaggctctgctgtcacctggcagagccacttccagttgctgggtattcaggttattcattctgtcaggacctaa

SEQ ID NO: 7846 - DNA, 201 bp, Homo sapiens
acagaaattggctggagggcccagagagggactatcccactgcagtgtggtggcagagatgatagtgtaaatgagggtgagtggccagctgacacgtggaygagaggtattgagaggatgcctaggctctgctgtcacctggcagagccacttccagttgctgggtattcaggttattcattctgtcaggacctaactgct

SEQ ID NO: 7847 - DNA, 201 bp, Homo sapiens
ggcactctgctgagtacagctgactaacacctgcatggctttcccttcctgcagccatcgaactgcctatcaacctgccccccccatgcaggtgcatgcayggaggaaattgctattttgatgagactgacctccccaaatgcaagtaagtctgaatgttgaggtcccagctataggccttgcctcttctggggaaatttg

SEQ ID NO: 7848 - DNA, 201 bp, Homo sapiens
aacttatattccttttatgcaattaaagcaactttatgatttagagtctgaaataaagataaaggtctgaaatatattttggggatagactggtttttgtrggtctgctttgttgtgatgtcttgctaaaacatatgataaacttggaattaaggaaaaatgagaattagcaaaataaagaaatttagtatttctttctgg

SEQ ID NO: 7849 - DNA, 201 bp, Homo sapiens
cccccaaactaaaaacaacacatcaataacagtaacaaacacaaagtttgaagactattttccagtaggagaatagggacagaggaaggtatgcttaacakgtcagggtgttcagttcttatctcttaagtctgtatgcaataaagagatatttaagaatttgggagacagtaatagtcaaaagaagaagtgctccatgta

SEQ ID NO: 7850 - DNA, 201 bp, Homo sapiens
atcaacctgccccccccatgcaggtgcatgcacggaggaaattgctattttgatgagactgacctccccaaatgcaagtaagtctgaatgttgaggtcccrgctataggccttgcctcttctggggaaatttgagaccttaaagtagccaggaaaacaaatacaggaacctcaccagttcactaattcttacattttaacc

SEQ ID NO: 7851 - DNA, 201 bp, Homo sapiens
caaaaggcatctctccaggaacaagtaagttttaagaatgtgagcaacttggaaattactcatggcccctacattgaatgctgtcacagcttttctacttmacccagtctttgaaggagtggttctagcccccagtttctgccaggattgcgggctcccatgtgttgatgtgctctctgctatcttcttctatagccgcag

SEQ ID NO: 7852 - DNA, 201 bp, Homo sapiens
atacactttcccatagcaaatagcatacctgactctctgtgctaatattgcacatttgttaaacaatgaatgaatggatggatggatggatggatgaatgratgaaacatatactactgattattttattccagagttctcaaaatatttgttgctgatattttgagtgctgactgtaattactttgattagataaacaac

SEQ ID NO: 7853 - DNA, 201 bp, Homo sapiens
agaaatccttgtggaaaaaacgattacacatattcatcaactatatgctgactgaatgactttgaaacttttttattcaaaatgttggagaactgacatcrtctttgttttatggaagtgttaggttatgctttatgaagaacagcaagacataattttttttcgtcaacctttccaaataatttcatgctactagtgaag

SEQ ID NO: 7854 - DNA, 201 bp, Homo sapiens
tggctttctatagctgaggcagaccccaaaggagctgattgcaggaagaaagtccttcctcatagctggtccttcctataaggggaagctgcatggcacawctctgggtgtaccactgcttcccatctcatgaagagtcaaagtccaagtccttactatgatctacaagaccctaaccatttggccttcacatcacctccc

SEQ ID NO: 7855 - DNA, 201 bp, Homo sapiens
ctaagacccttactaccaaactcacatctctctaaagtccacccagtgcaaagctgtcttaattccaaatggcaattaatatgctcttattttatctcttkgtctcttgattagtaaatggggttctcttcttttaaactgatagttttccaaaagcagggaacgtgtctttcccattagtgttaggtacaatgcagtagt

SEQ ID NO: 7856 - DNA, 201 bp, Homo sapiens
taaatcaaaataaaatttgacctaaattgatgctgagaagagtctatatcaaggcttctgtacaccttctcaaattcccttatttcttcttctcatgtcacacacacacacacacacacacacacacacactcatacactcacagacatacataaatattgtctagaaaggaattttcagtttcagatttttcaagggact

SEQ ID NO: 7857 - DNA, 201 bp, Homo sapiens
gagccaccacgcctggctggcaaaaataaattatttgagctttctattgctctattttgtttcctcctaattatcaatactaccttgttgctataaaagtrttttaggtaatttacaaaataatatataagaagataaataaaagttgcataaggaattcaacataaagggaagattatggtaagcagagaattttactat

SEQ ID NO: 7858 - DNA, 201 bp, Homo sapiens
aaatcaaaataaaatttgacctaaattgatgctgagaagagtctatatcaaggcttctgtacaccttctcaaattcccttatttcttcttctcatgtcacacacacacacacacacacacacacacacactcatacactcacagacatacataaatattgtctagaaaggaattttcagtttcagatttttcaagggacta

SEQ ID NO: 7859 - DNA, 201 bp, Homo sapiens
aatcaaaataaaatttgacctaaattgatgctgagaagagtctatatcaaggcttctgtacaccttctcaaattcccttatttcttcttctcatgtcacamacacacacacacacacacacacacacactcatacactcacagacatacataaatattgtctagaaaggaattttcagtttcagatttttcaagggactaa

SEQ ID NO: 7860 - DNA, 201 bp, Homo sapiens
ccagtggtgctgaacctttgtttgcctttcctctgagtgtaaggactgttcaagaaatacagcagctggcagtagccacagtgaagaaagggttcttttgyaggagccatggccttggaactgctcacctccccttgtctttctttccagggtgaaattcacagagtgaagacagatggcaccaacaggacagtatttgct

SEQ ID NO: 7861 - DNA, 201 bp, Homo sapiens
gaatacatgccaagaagcagcagtcacaatgcttgcccctagaggagtcttaagctagtagaaaatattcgacgaatataaaaatgatcaaaactcaagayaaaagtagtagctccctaagggaatttagtgaaagcatttgatgtggtgctggggccttcctttagaatcctttagaatatttgcctctagggtaagaat

SEQ ID NO: 7862 - DNA, 201 bp, Homo sapiens
gatgttttcttataagcaaacttttgtcatgtgagtaaaagggaaacaatgtggaaataaatttatccctaagttttttgattcaatgaggggtatatatktgagcttggcctggagcaaaaatcataacactctttagcttcagaataagaaacaaatttaagctattgtgtattatttactcattcagcaagtattttc

SEQ ID NO: 7863 - DNA, 201 bp, Homo sapiens
actgatgttttcttataagcaaacttttgtcatgtgagtaaaagggaaacaatgtggaaataaatttatccctaagttttttgattcaatgaggggtatawatgtgagcttggcctggagcaaaaatcataacactctttagcttcagaataagaaacaaatttaagctattgtgtattatttactcattcagcaagtatt

SEQ ID NO: 7864 - DNA, 201 bp, Homo sapiens
tacaatgtgtagacagttttgagaactttggaagatactgtttacttattcacttatacattcatccattaatgcagtcatatggtcatccatttagttakcaaacatttattgggcaactattttatgccaggctctgagtaccaggccctgggacacaataatgagcaaatcagacacagtcattgacctttgggagtt

SEQ ID NO: 7865 - DNA, 201 bp, Homo sapiens
cctatctaacaaacaagattaggaaacttgagggagataaattaagggaaatacttacctgatgcatgcagtatggcgcatattctcaatcaatgagaagygatttttattgcaattgcagttgttcagaagagaggcaatgtggagcagctgagagaagaagggcctggaagtgaatgagccagggtccatctcctatta

SEQ ID NO: 7866 - DNA, 201 bp, Homo sapiens
aacaatgctttggttgagaattattccaattaagcaaagggagatgacccattcaaaagggcaggatcagatcttacgtaagtgagtaaaaatttaaagtyccccataaaactgggacagagatagtttctactgagccagtgaacattaataacagataatcaataaataattaaatatcatctcaatataatttcttgg

SEQ ID NO: 7867 - DNA, 201 bp, Homo sapiens
acagtggcagtgttgagtacttgtgaaaccatatgctctgcaaagcctaaaatatttattatgtggccctttacagaaaaagtttgccaaccctggattawaggattggaaatgagcaaatgcatacatagcaagtagagttaggtaatgaaaaaatgtatcagtaacatatttcacattggcctgatttctctagaggtg

SEQ ID NO: 7868 - DNA, 201 bp, Homo sapiens
caaaggattgtgaattattgttttctggagtagattgaaactcattaacatctttagcaatggtagtagaatccattcatttctttctttgctcagtgttracagtttggacctgttgtctctgtgtgggtctccaaagagggaaaaccattcagaaacagattttcaggtattttcagtatttggtggagttagggagct

SEQ ID NO: 7869 - DNA, 201 bp, Homo sapiens
ctaactttatggcctgttttttggtattgactctcctgtttgtcctggtactccttctggaaagttatttttcctgtgtaggtttcctagaattcctagawtatatcatattgaagtactttgttaactatgccataagttgtgggaaactagagttggcctcacttttcccttcttcctaatgtggatgggaaactgact

SEQ ID NO: 7870 - DNA, 201 bp, Homo sapiens
tggcagtcactttagggacttgaaattcaccaggaatgggggtttggggagtcgtggtggtaccttcatgagactaactttatggcctgttttttggtatygactctcctgtttgtcctggtactccttctggaaagttatttttcctgtgtaggtttcctagaattcctagaatatatcatattgaagtactttgttaac

SEQ ID NO: 7871 - DNA, 201 bp, Homo sapiens
aatagagtaaataagcttataaagatgaaatgccaaggtaacttatgggagaaaaaaagggaagaaatatatttcaccttttaaacatagattactaccamtgtttttcttaacttgttgatttcacaaggagaaaataaaatttctggctcaaagatagcaacattttaagttttctaagacaattgattgaaagccact

SEQ ID NO: 7872 - DNA, 201 bp, Homo sapiens
ccagattagtatggtgtaatctctctctctgtttctctctctctctctctctctctttctgtctctgccatcagagtgaagactttgtcatggaaatgggraagcagcccataatatttgaaaacccaatgtactcagccagagacagtgctgtcaaagtggttcagccaatccaggtgagaaaccatacagtcttttctt

SEQ ID NO: 7873 - DNA, 201 bp, Homo sapiens
ttttgggtaacttatgacgtagcacctagcgtacctccaggtgtgaggaaggcacctttctttgtgtgtgaaccagattagtatggtgtaatctctctctstgtttctctctctctctctctctctctttctgtctctgccatcagagtgaagactttgtcatggaaatggggaagcagcccataatatttgaaaacccaa

SEQ ID NO: 7874 - DNA, 201 bp, Homo sapiens
acttgtgaaagggcccgcagctattaggcaacagtcagtattcaaattccagacctgtctgactggaatgcctgtgtgcctaaaaaagtctgtttgctgcrtctagagtatctgctttaatttcctctctgtaagataataaaagaaacacattttaaaactgatgttattattgataagaaatttcattgccctatagag

SEQ ID NO: 7875 - DNA, 201 bp, Homo sapiens
catatgtgatatatccaactgattgtcctttttttagaacccactgaaaatagtccttcatcttcaccaatctcctgaaaatattctttcaatgctaccartgactgccattatgctaagcctaatggttcttgttcaaatatcacttctcagagagctactccccacagttactctttaccttttacccagctctatttt

SEQ ID NO: 7876 - DNA, 201 bp, Homo sapiens
aaggacccatggccacttgtctcctgggcatagtctccctcatctcagtccccattcttttgaggactccatacgtaacaaataggttggaggcaggagartgatggaattccacacatagatgagtagagaagttgggaaataagccacaataaaagtgactaaattatttgagtgctttctataccaggcattggccta

SEQ ID NO: 7877 - DNA, 201 bp, Homo sapiens
ttctgattcagattttctttagtgaaaaaaagaaaaaagagggtaaaagaaagcataataactccataaagaggaaagcgtttttttttttgttgttgttktttttaatcagttctgatttcctttctggtatctctgctggtgttttcaaaacttggcaactttgtggctgtggaagactgttgatgagagggttgggcg

SEQ ID NO: 7878 - DNA, 201 bp, Homo sapiens
atcgttggtttgcagcacttctcttttgttacttaggaatgccaaagaaagggtaaaatccctgttacaatgaaggctttcttgctggtaatcagcagtayttggtctgcctgcaactggggctgctttgtcccagaagttttatttctattgactttctgctctttagaatttaaacatttttctttatatctttaactg

SEQ ID NO: 7879 - DNA, 201 bp, Homo sapiens
tgagtggctgtgaggatggatgaatccatgtagaatacttggtccagtttctgccacctagtaagtgctcatttaatctaagctgtgattattaacactaytaacaatattgtgttttctaaatatatagttggctttctatcacatagagaactttcttttcacaatttgctgaataaatgaagagaaaaagtagtagga

SEQ ID NO: 7880 - DNA, 201 bp, Homo sapiens
gcctagttgcctcctcctctttcaccacctcactatgaattaccttgagggtggtgtccacacttctttccagatgcttaacttctctttgacttggttcyctcatctgtagaataggaacgatactaatgcctacttgattgagtggctgtgaggatggatgaatccatgtagaatacttggtccagtttctgccaccta

SEQ ID NO: 7881 - DNA, 201 bp, Homo sapiens
cttctaatgggattagcatcaaggaaaaaccactcatgcagggtctaagataaacatcagaacaatgcagcaattataggtcattcaattaatatattgaygtgactttcagttgctcaaaaatagtacagtttttttctgttaagtgaaaagattattttgctttttcaagcaccatattagaatgattttggtgtgaat

SEQ ID NO: 7882 - DNA, 201 bp, Homo sapiens
tctttcttgtgcattgtagaatgtctaacagtatccctggcctctatccactagatgtctgtagcattgcccagtcgtgacaatccaaaatgtctctggasgttgtcaaatgtcctccaggagccaaatcatccagttgagaaccactgatttaggggactgaacaggtgcaaggattttcttggtggggaaacaagggaa

SEQ ID NO: 7883 - DNA, 201 bp, Homo sapiens
aaatcaaagtccaaataaaatctttatgttcaagttagttgatatgtctcataagcctttcaatttgtggggtttccttctatttctgttctttacccctwgcaatttacttgttaaaaaaaaaaaacccaggtcacttgtcctggagtttcccacagtctggcttgtgttcattgtgtcccctgatgtcctttaacacat

SEQ ID NO: 7884 - DNA, 201 bp, Homo sapiens
tggattgatctgtaaccttgagtcattctcctctctcgtgtctcttatgaattctaagttgaaagcctgatgctagggaagttgaaagtgtgagtagttcrgtgaaaacaaaacaaaagaaaacaacagaggtaacaacgtacttaagcccccctgtactggggcctctggaaggacactaagagcatgactctgttttga

SEQ ID NO: 7885 - DNA, 201 bp, Homo sapiens
cagtatgaggtcattgaaagagttgataaggccactggggccaacaaaatagtcttgagagataatgttccaaatctgaggggtcttcaagtttatcacaracgcagtaagtatttgtcactgaaatacattcatgggtgtataatgcatattcacacataactcacatttgtaagcacacacccacacacagtttcacgt

SEQ ID NO: 7886 - DNA, 201 bp, Homo sapiens
gggctccatcctgctgagtttgaggccttaggacattggattggagctgttcagggggcagttggctctcaggaggaaactcaggaggcactcaggaggamacacacacatcacacacacacacacacacacacaagaaacagtagtgttataaagttatacatatcttttccacatgaaagttattttggtttctatgtt

SEQ ID NO: 7887 - DNA, 201 bp, Homo sapiens
cctctctcgtgtctcttatgaattctaagttgaaagcctgatgctagggaagttgaaagtgtgagtagttcagtgaaaacaaaacaaaagaaaacaacagrggtaacaacgtacttaagcccccctgtactggggcctctggaaggacactaagagcatgactctgttttgattttaatgtggaggttttccacttactgg

SEQ ID NO: 7888 - DNA, 201 bp, Homo sapiens
tgcacaacaggaaccatggcaggaatatacactttcccatagcaaatagcatacctgactctctgtgctaatattgcacatttgttaaacaatgaatgaadggatggatggatggatggatgaatgaatgaaacatatactactgattattttattccagagttctcaaaatatttgttgctgatattttgagtgctgact

SEQ ID NO: 7889 - DNA, 201 bp, Homo sapiens
ttttgctctttaccctcatgttctgaaacctctctctctctctctgagtttagttgtttctttttgctcgaatatatactccacttttatagcgtccccartgcttagaatggtgtttggtttacagtgaatacctaccatttttctggtgaatgaatggattaataatctattaataacatggtatgtgtaataaaaatg

SEQ ID NO: 7890 - DNA, 201 bp, Homo sapiens
aattttttttcgtcaacctttccaaataatttcatgctactagtgaagattgctgagaagcatgaattctggggaactacagtcacaatgagcacagccartgcttgcctgtcttctcagctccccatttgagtgcaggcatgctgctgtgagttgagtttctgggaataagaatgtagcctggtaccatgaaacaggtgg

SEQ ID NO: 7891 - DNA, 201 bp, Homo sapiens
tctcttctcccactcgctgttgccacattggatttcattatggtccaaaagcacagcaggcgactcctgcctctcagcttctgcgctagctcttccctctrcctggaacatctctcttccagatctctgcatgagttgcttcgcgtgctatttaggattctacccaaatgtcactttctcagagaggccctcattgaccgc

SEQ ID NO: 7892 - DNA, 201 bp, Homo sapiens
actttaaaagtataagctatggttctcaagaaattgatgatctatctaggaatataggaaaaggaatagagtaaataagcttataaagatgaaatgccaargtaacttatgggagaaaaaaagggaagaaatatatttcaccttttaaacatagattactaccactgtttttcttaacttgttgatttcacaaggagaaaa

SEQ ID NO: 7893 - DNA, 201 bp, Homo sapiens
gccagcacgagttgtcctaaagtgcatggtatgggtgtctaggtgaaagacttggcatccgtactgttctttctggtgggagagggagataagtcacttartcttcacttaatcctctctcctcaaaactctccaattgtttctcacacccttcagcatgtggctgctgctatttccctgctctcttctcccactcgctgt

SEQ ID NO: 7894 - DNA, 201 bp, Homo sapiens
gggagaaggatattgaacaagaacacaaaggacataaacatagttggccagctactgctggggtgaaaactaataaattcatgagtattctgagaaaattrctagagaaagctgaatgacaagatttagtggaaactcaagatgggggaggtgggtcccaagcagcatttaaagtagggtacagatttgttgaactgtagg

SEQ ID NO: 7895 - DNA, 201 bp, Homo sapiens
gccataaaaaagaatgagttcatgtcctttgcagggatatggatgaagctggaaaccatcattttcagcaaactaacacaagaacagaaaaccaaacactkcatgttgtcactcataagtgagagttgaacaatgagaacacatggacacagggaggggaacatcacacaccggggcctgtcagtgggtgggggcaagggg

SEQ ID NO: 7896 - DNA, 201 bp, Homo sapiens
aaagtttggcttttgattggatttcaaagaatctctattggacagactctcattacaagagtatcagtgtcatgaggctagctgataaaacgagacgcacrgtagttcagtatttaaataacccacggtcggtggtagttcatccttttgccgggtaagtgtgttcatgttttcctaagagcttgaaactgtatgtctttt

SEQ ID NO: 7897 - DNA, 201 bp, Homo sapiens
acaaaatatacttagcttaaaatatgtccatattttaacttataggaagagaaattctcgcagctaacagggtggaaaatgttgaaagtttggcttttgaytggatttcaaagaatctctattggacagactctcattacaagagtatcagtgtcatgaggctagctgataaaacgagacgcacagtagttcagtatttaa

SEQ ID NO: 7898 - DNA, 201 bp, Homo sapiens
attttaagagcacattgatttattagcttggcaatacaatttttgaaatgtcatataattaaaaattaagtttctaattactgcatgcagtaatagtccayagaggggccagtttgatgtaactttgataactcatgattatacaacaaaaaagctggatttttctgcttcagttttatgttgtttattagagctcccttt

SEQ ID NO: 7899 - DNA, 201 bp, Homo sapiens
tctaagttaaaaaagcacaatacgcagttcaccgattccacagaaacaaaaagtagtgaggatgtaaagcagtcacttcaaatcccaacttcttagtcaartgcttctctaaagcctgagtgacaagctgtgttttgtagtccaaatggttgtgcctactggtaggtgttcaggtcagagaggagtgaaaaggcagctgtg

SEQ ID NO: 7900 - DNA, 201 bp, Homo sapiens
agctttaatttagtgatatttctcaatccatctcccagaatttcagtttcttggctcctgatagttacatttcctctgcctcttacaactttattttgtarttcttggtccttaattaatagagatattattcgttgcatgcaaacactataacattttgtaatgttgccaactaagcaaatggatagagctttttcttaa

SEQ ID NO: 7901 - DNA, 201 bp, Homo sapiens
gagaattggcagcagcattttcctactcacctggtattgttgattacaacagggctgtgggagaagagctgtctgcagggctgctttagtacaaggcactsgtgatgagcagaaagactgggatggattcggaaagaagatgactgtgttgcgaaaactctaacatggagcaagataaatggatgtctttaaaaagcattt

SEQ ID NO: 7902 - DNA, 201 bp, Homo sapiens
cccctcctcccacccctaacctgggccggtttgcatggtgtgggcactctgctgagtacagctgactaacacctgcatggctttcccttcctgcagccatygaactgcctatcaacctgccccccccatgcaggtgcatgcacggaggaaattgctattttgatgagactgacctccccaaatgcaagtaagtctgaatgt

SEQ ID NO: 7903 - DNA, 201 bp, Homo sapiens
atgtgactgcctgtggactgatcaattactgatgctttggtgtctttagttgaagtttcaaggtgggcctacattaaactcttgattttaactgggttcayggaggagaattctgaaaacttcaaatgagaatgtgaatattttaagagattattttaccactaggttcttgtaactattaatatatgtgctccagagtct

SEQ ID NO: 7904 - DNA, 201 bp, Homo sapiens
aatcatcttgttattttttatagtttgattatttaaatcaaagtccaaataaaatctttatgttcaagttagttgatatgtctcataagcctttcaatttrtggggtttccttctatttctgttctttacccctagcaatttacttgttaaaaaaaaaaaacccaggtcacttgtcctggagtttcccacagtctggcttg

SEQ ID NO: 7905 - DNA, 201 bp, Homo sapiens
gggaggccggaggggagagcgtccgggcaggggctagggccgggcggcggcgcgggagctgctcccggtggggcgctcaggttgcttcgcgaagccggagsgggagcgcccctcttcgctcgccaggaactgagcggcagcaaacttgagaaagcagccccgccagtttcggtgacagcgcaccccacggagaccctgtct

SEQ ID NO: 7906 - DNA, 201 bp, Homo sapiens
aacaaacctggatggtatagcctactgcacacctagggtaaacagtatataccctaggcatatactgttgctcctaggctacaaacctgaacaccatgttyccgtgctaaatactacaggcaattggaacacaatgttaagtatttatgtagctaaacatatgtaaacatagaaaaggtacagcaaaaatatggtattata

SEQ ID NO: 7907 - DNA, 201 bp, Homo sapiens
ccctggcatcctgtcacagtctcctctttgctgttaaacatcacttcttcttacctatttcctttatccctccccttccttccctgctttcactcctttayatctttatatttctgattgctgttaattatcttggtatctactgtaaggttcttggtgtagatctctatgcagaagttaaaccaacttgaggattgttac

SEQ ID NO: 7908 - DNA, 201 bp, Homo sapiens
ttttggctcaagtgatcctcctacctcagccttccaaatagctacgactacagctacttggaagtgagccactgtgcccagctaaatttattttttttttyttttaagatataaggatctcactatgttgcccaggctagtcttgaattcttggcctcaagtgatcttcttgcctcaatctcccatagctgggattaaagg

SEQ ID NO: 7909 - DNA, 201 bp, Homo sapiens
gtttcctacacatctattcacacttaagccatcgcctgggccccagctaatgatgaaatgcactcctacaatatttgtttttcttattttcacttctacawttctcctttctgtgcctgtgacaaattcttgctctccagatgttgcggtttctagcgtcgtatataaattatcttattctaacccagacacatttgttaa

SEQ ID NO: 7910 - DNA, 201 bp, Homo sapiens
ataattacacatttctaattgcaatttaaccctgtgcatttttccttccagctaccaatccgtgtaaagataacaatgggggctgtgagcaggtctgtgtyctcagccacagaacagataatgatggtttgggtttccgttgcaagtgcacattcggcttccaactggatacagatgagcgccactgcattggtaagaagt

SEQ ID NO: 7911 - DNA, 201 bp, Homo sapiens
gtactggggcctctggaaggacactaagagcatgactctgttttgattttaatgtggaggttttccacttactggtgctttcttctctttctcatgcagcygtgaatccatgtgccttttcccgctgcagccatctctgcctgctttcctcacaggggcctcatttttactcctgtgtttgtccttcaggatggagtctgt

SEQ ID NO: 7912 - DNA, 201 bp, Homo sapiens
tgtggatgtatccagtagtaaccagtagtaatgttttcaacacgttgctaatccattactctatttcacctataggtgaaaagggctagaagtggcttcaygtcttggataattacacatttctaattgcaatttaaccctgtgcatttttccttccagctaccaatccgtgtaaagataacaatgggggctgtgagcagg

SEQ ID NO: 7913 - DNA, 201 bp, Homo sapiens
cagatttgctctaaaactcatgttaagtgatggatctatttaggatgaagaaagactgcaaagtaatgaggttaacttaacaaaagcccaaccactagaamtgacacattcagatgaatctccttcaatgtcatcatcctgggaaagtataaacttgtctaaaaatagatattttatctgaaaacatttttggaaatatct

SEQ ID NO: 7914 - DNA, 201 bp, Homo sapiens
ttgtttcctcttgtatttccattttgtaaggataatatcacagtttgccattggattatatatccttgggacaatctctgcttggttaaatgaagtattgkgtattaatatggtgacttcctatcactgaaactggcttccataaggagaatatgaataaattttatgaaaaaattagctaacccaataagtcacataaaa

SEQ ID NO: 7915 - DNA, 201 bp, Homo sapiens
ctgagggcctcagaaaacagaaatatttaagacatgattcctgctgtccagaagcctacaacctattaaatagtaaggaagataaccaaagtacaaaaatraatacagtaaaaggaagaatgtaagcatagtttactctagactagtatttagaaacacagttaaatataacccaagaaagagtctattttaagtactcat

SEQ ID NO: 7916 - DNA, 201 bp, Homo sapiens
tacaatatgagaggttctttccggtgctcgtgtgatacaggctacatgttagaaagtgatgggaggacttgcaaagttacaggtaattgctgaactaaccygagccagtttatcagcacatcccagagcttaaaatcaaatggcacatgtaggtatttgacaatgttgattaggagttagatcgacttgaatcctggaaag

SEQ ID NO: 7917 - DNA, 201 bp, Homo sapiens
ggtatatacccaaaggaatataaatcattctactataaagacacatgcactcatatgttattgcagcactatttacaatagcaaagacttggaactaacamaaatgcccattaatgatagacatatacatcatggactactatgcagccataaaaaagaatgagttcatgtcctttgcagggatatggatgaagctggaaa

SEQ ID NO: 7918 - DNA, 201 bp, Homo sapiens
tgttttcacttttagtttttcttaggacttcccactttagtaggtttaaacttttgaggctctactccatataaagatattttactggtttcttttaagtktcagtagagaagtcatatcatggtgtagaaatggtatggagctgtgtttagtattgactctgatgaattcattctttgtgctattatgtgttgaatatct

SEQ ID NO: 7919 - DNA, 201 bp, Homo sapiens
cacacattttccctaactcagacaaactgggggaaagtatcctcaaaggaatgtggtattgaacatacagtaaaattgagtagacattgccatataatgtrtaattaacaaatcaagtggttgtataaatggacacttcaaatagtctcttagatgggctaaatatttcttagatatttttgttttcacttttagtttttc

SEQ ID NO: 7920 - DNA, 201 bp, Homo sapiens
gtggggataaatgtattggcgtcacaaatcgttgtgatggtgtttttgattgcagtgacaactcggatgaagcaggctgtcgtaagtaacacatacccagmatgtttcagacaaaggggtcatttcatttttgccagtattgatattgatattgccacacattttccctaactcagacaaactgggggaaagtatcctcaa

SEQ ID NO: 7921 - DNA, 201 bp, Homo sapiens
gtactgcttctcaattcaagtgtgccagtggggataaatgtattggcgtcacaaatcgttgtgatggtgtttttgattgcagtgacaactcggatgaagcrggctgtcgtaagtaacacatacccagaatgtttcagacaaaggggtcatttcatttttgccagtattgatattgatattgccacacattttccctaactc

SEQ ID NO: 7922 - DNA, 201 bp, Homo sapiens
ccccaatcatcgatgtattgacctatcgtttgtctgtgatggtgacaaggattgtgttgatggatctgatgaggttggttgtggtaagtgcattgccttcktttttattcacaatgtttatttagaaaaatctcagtgttaacacatggacacagggaggggaacatcacacaccggggcctgttggggggtggggagcta

SEQ ID NO: 7923 - DNA, 201 bp, Homo sapiens
attgccccaatcatcgatgtattgacctatcgtttgtctgtgatggtgacaaggattgtgttgatggatctgatgaggttggttgtggtaagtgcattgcyttcttttttattcacaatgtttatttagaaaaatctcagtgttaacacatggacacagggaggggaacatcacacaccggggcctgttggggggtgggga

SEQ ID NO: 7924 - DNA, 201 bp, Homo sapiens
agacttttaaatccagttttgggggtctgtctacacactgttgctactaggcatgtgggtcatgctggttttgttgcctgattgggctccattgcttggckttggtctagagtcatggacttcatagtattcatgaaatgtagtccaagtccaagcacatgatgctcactttctgaatgtggtctattttccaaggtgtaa

SEQ ID NO: 7925 - DNA, 201 bp, Homo sapiens
gagtagaggtgggctttaaagaaaataaataaaagcttgggctatttatatgggaaaaatatcttttagaatttcagattcttaacatgcactttgaaggyttttaggaagctaagcaagaaatttcattcataatgttatggatggtttctggccttgatttagactatcttcaacaatttttttccttgacattggctg

SEQ ID NO: 7926 - DNA, 201 bp, Homo sapiens
tgtattggttaactcctggctctccattttagaaagctctactggttggatgcccgcctggatggcctctttgtctctgacctcaatggtggacaccgccrcatgctggcccagcactgtgtggatgccaacaacaccttctgctttgataatcccagaggacttgcccttcaccctcaatatgggtattgtctccctgca

SEQ ID NO: 7927 - DNA, 201 bp, Homo sapiens
ctcccttgcacgtacctcgcccctagctgaagtccagttctttatagtatgtgcatagttccctatagggtaatgtttattaatttccccaccaacgtttktttttcttcaagataaattaattccatttgtcatttcttacttgtcatttcagagccatttctttcatggtttagtgatttcagtgtttttctttgaaag

SEQ ID NO: 7928 - DNA, 201 bp, Homo sapiens
ctcggcctcccaaagtattgggattacagatgtgagccactacacctggctgaatatggcatattttttttcatctttttactctgattagagctaactayaacttaatgtaaaaaaaattattttagatcctctccttttggtattttcaaaaattgggtaaaacatgttcttcaaattttgacccaaaatattattctt

SEQ ID NO: 7929 - DNA, 201 bp, Homo sapiens
ctcggcctcccaaagtgctggtattatgggtatgagccaccacgcccagcctgaaagtttcagtgtggtataggtggctttcttgcctccacttcttcackctgaccttgcttttatgtccatgctgttgcctgcaatgcaaatgacctctcttattgttgccacctctccacttatgttttttggaaagagtaaagttag

SEQ ID NO: 7930 - DNA, 201 bp, Homo sapiens
agagaagttttttttggctcaagtgatcctcctacctcagccttccaaatagctacgactacagctacttggaagtgagccactgtgcccagctaaatttwttttttttttcttttaagatataaggatctcactatgttgcccaggctagtcttgaattcttggcctcaagtgatcttcttgcctcaatctcccatagct

SEQ ID NO: 7931 - DNA, 201 bp, Homo sapiens
tcctgattatattaacttacttccctttctaacgcatgttctgtgttatgactcttacaaatatgttagagtacacatggaaatagaaggcatttgcatcyccaggcatgtgaactgtcttagggtggctttaggcattttcattttggccctgaaagtaaggcatgacgatatgttaccggatctgtgtactctaatatt

SEQ ID NO: 7932 - DNA, 201 bp, Homo sapiens
atgagcttttaattgcttcttcgtaagccctttgaaaacctaagcacaacatttagaattatttgggcttgacgtaaagaagaaagccaaggtaattgaaygagcactgatacctgacccaggttcttttcatattttgtttgagacaacccatgacttgccttctcgggaataaaagaaagttctttaattttatgtgaa

SEQ ID NO: 7933 - DNA, 201 bp, Homo sapiens
tctaacttttaactagtaggtgatccggatacatcaccttgctttttgtgcttcagttttgttttcatttgtaaaatagatgcccagtgtaattaccaagrcaaacataaagagtaaatggcacgtgtatgtgaaaggctcttgaatggtttagtgggatataggacgaattgtgtattttttgccgctcttttgcacaat

SEQ ID NO: 7934 - DNA, 201 bp, Homo sapiens
tcagtaacctggaaaaaacctttaaattctaatttctttggaatcagactggaaaagactgttttaataggtctaacaataattttattttatttattttwattttattattatttttagagtcagggtctcactctctcacccaggctggagtgcagtggtgcgatcacagctcactgcagcctcaaacaccggggctca

SEQ ID NO: 7935 - DNA, 201 bp, Homo sapiens
ctgggaattaattggattttactctgctcttatatatttcaaatttcaaggagaaattctttgtattgtatttttacctggtatacaaagatacttaaacrgcaatatttgaatgtagaatatggctttcttttttttttttttttttgagatggagtctcactctgtcacccaggctgaagtgcagtgatgcgatctcgg

SEQ ID NO: 7936 - DNA, 201 bp, Homo sapiens
attacattgaaactgtaacttatgatggaattcaaaggtaagaagtattttttatggcttatggctttataagttgcagggaaagtgcataaaatggctgsagagaaatatcaaaggaccagaattaaaatattgctttgttggtggacatgatagctttaatgacctttgtactgacatttgcatgaagtgacctgctct

SEQ ID NO: 7937 - DNA, 201 bp, Homo sapiens
agaggagaaagttcagaaggtgaatatgaattttttttttttgagacaggttcttgctctgttgcccaggctggagtgcagcagcacaatcacagcatgcygcagacttgaacttctgggctcaagcaatcctcccacctcagcttcctgagtagctgagactatgggcaagtgccatcatgcccagctaatcttttaatt

SEQ ID NO: 7938 - DNA, 201 bp, Homo sapiens; identical to SEQ ID NO: 966

SEQ ID NO: 7939 - DNA, 201 bp, Homo sapiens; identical to SEQ ID NO: 967

SEQ ID NO: 7940 - DNA, 201 bp, Homo sapiens
cagagcattactagggagtaacaagtcgtggaaaatggttagagaaacatattacagatatttatgggggagatgatcgtacttgcaagaagcatttcaarcctattgcattttctcaagtgatttatttataagttagctgtgactgaaaatactaatctacccatgtttcttttcagagcatttattttttactgactg

SEQ ID NO: 7941 - DNA, 201 bp, Homo sapiens
ccagagtgaatttgtacattccttaggggcatttttgcaagggaggttgttgtgttttaaaggtagttgataagagacctgcaccaccaaccccagacctrcaccaccaaccaccatcatgcattagtctatagaaggtatttgggtgtacgtactcctgtaccactcggtaccaccatttagccaagcgaagtttctgac

SEQ ID NO: 7942 - DNA, 201 bp, Homo sapiens
tacttcagtgactgctgccacagccaccatagggagagcttgaacaagaaagaaaatagtagcgatgaagcggatcttggcaactgcggcatccctggacrttgagggggtttggttcagtaacctggaaaaaacctttaaattctaatttctttggaatcagactggaaaagactgttttaataggtctaacaataattt

SEQ ID NO: 7943 - DNA, 201 bp, Homo sapiens
gaatgtctctgttgccttttatttgttcatttttatttacgcagtgttccttgctcatttttgaagtaattcaaaatgacactcacggtaagcttgcaagrctgcctttcctttactataacggagaaaaaattctggaaagaaggcagctctttcagtatagtcatataagaacaaaatttccccaaacttggcttgtgg

SEQ ID NO: 7944 - DNA, 201 bp, Homo sapiens
aaacagaggagaaagttcagaaggtgaatatgaattttttttttttgagacaggttcttgctctgttgcccaggctggagtgcagcagcacaatcacagcrtgctgcagacttgaacttctgggctcaagcaatcctcccacctcagcttcctgagtagctgagactatgggcaagtgccatcatgcccagctaatctttt

SEQ ID NO: 7945 - DNA, 201 bp, Homo sapiens
aagaagttacacacaatgggatgattctttataaatgtggagcagggccttaaatcataagggaacctatgccagcaatctcattcaggggttggatgatrttgaaagtacggatgtactgaagaattatgaatataccccagcaatttggaagtgagataggttcccaatctttaattttgattatgttatgctcaagaa

SEQ ID NO: 7946 - DNA, 201 bp, Homo sapiens
tgattgaaagcagcttacttttaggactagtttattatggcaccactgccttctaggtgctctgctgtagccagcacgagttgtcctaaagtgcatggtaygggtgtctaggtgaaagacttggcatccgtactgttctttctggtgggagagggagataagtcacttaatcttcacttaatcctctctcctcaaaactct

SEQ ID NO: 7947 - DNA, 201 bp, Homo sapiens
tcctctgggcttactgagttcattttgattaaacaataaaagcaaaaaggcaagggcagtgtatctggggtaaaggaataagtgaacagctatgccaacarctcttcagagattgttacctgtattatattttattgacctgtaaaaataataacaataacaacaatatcaatgacgatagtgatagcaagtaacattaca

SEQ ID NO: 7948 - DNA, 201 bp, Homo sapiens
atttttaacaattcaatgtgtttatttttgcataggtaacatatttatatgttcacaaattttaaattataagaagatatgtagtgaaatgccttcctccrtaactattcccctctgcatggttttcaccttctctttcctatgagtaattgccgtttctttattttagttctagagattttttaatgaataaacaagaac

SEQ ID NO: 7949 - DNA, 201 bp, Homo sapiens
cctaatatttggttcagtgaagtgttgaaagaatttgctaagtaatcattgaaagctaagattctagtgaaaaacaaaatgcatggtttaaaaattgaacrtactaactgaaagacagtggaagttagatgcttcttgctgtaaataattaaacccaacagtgcagacgagagaacatggcaccaagagggacttgggcta

SEQ ID NO: 7950 - DNA, 201 bp, Homo sapiens
cagtgttcttgcaaaatttagggatatttccaaatggacatgctaaatttggattaacaattttttgaatgcactaactctgggtaatttgttggaatcartgtaagagtatgaaaagtagagagtagtacagagtagtagagaaaagtcatggagaaaatctgcaaaaaatagatgagggctccaaagcattttgtcgct

SEQ ID NO: 7951 - DNA, 201 bp, Homo sapiens
agacgaagagggcccctgactgctgaaaaggacccatggccacttgtctcctgggcatagtctccctcatctcagtccccattcttttgaggactccatamgtaacaaataggttggaggcaggagaatgatggaattccacacatagatgagtagagaagttgggaaataagccacaataaaagtgactaaattatttga

SEQ ID NO: 7952 - DNA, 201 bp, Homo sapiens
ggcagggctttatcattacaaatcagggatggctcctactgcctagaaaaattggtcaacattaatttcatactttgattattaaggaccaatttgtcgaytaatggtgaccattattaatattttttaattgattgattgtttactttgcctaggctatcatgtcacccacctttaattgtggaataaatgctatgccta

SEQ ID NO: 7953 - DNA, 201 bp, Homo sapiens
ctgtgccactgtgaagaagggtatatcttggagcgtggacagtattgcaaagctaatgattcctgtgagtaaattatggacacctgtgtctctgaacagtraacagattctaatagcttctttccttccttctgatgacaacagaattatcagcatttttgttgttggcagggctttatcattacaaatcagggatggctc

SEQ ID NO: 7954 - DNA, 201 bp, Homo sapiens
ttctgtaaagttatccttcatgtaggtttaaaaaatgatgtaaatgttctttttccttacatgaagatggttgttataaattctcagaacctgtgcctaaytccagagggtgtttatttagacatgggcaacaccacattcttggccatcttatctaggatttttgtcagagagtgcttaataaatgctgataaccttgac

SEQ ID NO: 7955 - DNA, 201 bp, Homo sapiens
tatgttttttaaaaattctagttttaaaaaatttgaaaaatacgataatgtagtaaacttcaaatctaattaattataaaatgactttcacattcattttktcatttagttttctcactaatcttctgaggtcggtttcagattagtaaattgagactcggagaagttaagtcatttattaaagttcttacagttggtaag

SEQ ID NO: 7956 - DNA, 201 bp, Homo sapiens
acttgaaatgtggcaagtgactaggaaagcaaattattacttttattttattttaattaatctaaagatacatttagatagccacagggggttagtggctrccatgttggaaagcatagtattgaagggaaacatttacaccaaaatttatatatttgtagactaacattaataaatgaaatgcagtaccatagggctatg

SEQ ID NO: 7957 - DNA, 201 bp, Homo sapiens
agtgatgagatggaaagtgtctgtggtgagttggactcttggcgcttttggtaggagctaatggcatcttgatgtcaagtgtttggtatggaatcctgctrtgtgtgaatgtgtttgaaatgtgtgcctaggcatcctggtagagctgaaaaatgtttcctctgataatccagactgtttctgttaaatcacctctgtagt

SEQ ID NO: 7958 - DNA, 201 bp, Homo sapiens
tataaaaattagttaattgcaacatttccccatcagtttcatttttcatatgtgtgattttaaataattgactttgaagtgttttataaaatgacttttgrgtctctattttgtgttcttttcatgatgtgtttaacttggtattttagtttggcaaaaacaaacaaatccccccaccccactcctcaaaaatgggacttg

SEQ ID NO: 7959 - DNA, 201 bp, Homo sapiens
taagagaaacaatatgtaaaaatcccttagcatgaggcatggtgcaagctaagtctagcttagcttgggactaaggaaacgtatcattttaccaattttcrtagcacaaaggtcattatttcaaaaattttatgaaaataacttccaatcctcagcttccatctgaatagagtgaataaaacacagtggactttctcaggg

SEQ ID NO: 7960 - DNA, 201 bp, Homo sapiens
atgaattatagatctgttgataaattgagtaaattggatttgatatattagataatggagtgaggagatcaagtgtgaaaatcactacctataaaaattasttaattgcaacatttccccatcagtttcatttttcatatgtgtgattttaaataattgactttgaagtgttttataaaatgacttttgagtctctatttt

SEQ ID NO: 7961 - DNA, 201 bp, Homo sapiens
gattactcagatttgagtctttatggatcacttgaatcaatgcaaactgtttatacatcattattgctgatccatcaacaataaccatcatccatgataaycatccatgatggttatcgttgatgatgtggttgccaaagagactttataaatgtatgtgggtaaaaccagtcttgacatttgcctgtagagattaagtcc

SEQ ID NO: 7962 - DNA, 201 bp, Homo sapiens
gacattcatgggtcttgttcctgatgaatgaaggaaaaatgggcacagacgaagagggcccctgactgctgaaaaggacccatggccacttgtctcctggrcatagtctccctcatctcagtccccattcttttgaggactccatacgtaacaaataggttggaggcaggagaatgatggaattccacacatagatgagta

SEQ ID NO: 7963 - DNA, 201 bp, Homo sapiens
tgagaggtcacccagcaatgataaagtatcagtttgttttttctggagagatatttccaaacaatagtcgtttgggagttataaacaggcatcgaagttamtactgaaaaggtgaatttgacaaatgaattatagatctgttgataaattgagtaaattggatttgatatattagataatggagtgaggagatcaagtgtg

SEQ ID NO: 7964 - DNA, 201 bp, Homo sapiens
aacagccttgatcaaacaaaaggccctctttgaagaggggagtggtttctccactcagggaggcagcatggattgtggtggaaagaacatcacatgtcaaktcaggacattcatgggtcttgttcctgatgaatgaaggaaaaatgggcacagacgaagagggcccctgactgctgaaaaggacccatggccacttgtctc

SEQ ID NO: 7965 - DNA, 201 bp, Homo sapiens
ttacataaatgattatttgcaagattacttcttggctaaaactggattggttgaatgtggcagttttgagactattttctgaacaaagttttaaagctggytctatgtagattttttttttctccctgtgggtggctccaatgtatgaaatcatccccttagctttttttttttttaaatcttcaaataaataacaaaatg

SEQ ID NO: 7966 - DNA, 201 bp, Homo sapiens
atttgcctgtagagattaagtccagtgctgtccatgccatggatgattcatgccattggaaactgactgggctctgacaactgcccttaagacatagtccrttcaactttcagacaggtcaaggccactatacatcttgatgaataaagaagagcaggctataatggcaagagccaaaggagaaatagcaggaagcttccc

SEQ ID NO: 7967 - DNA, 201 bp, Homo sapiens
atgtaaatgtgtatcttcactctgtcatattgtaaccactagtcatatgtggctattgagcacttgaaatgtggcaagtgactaggaaagcaaattattamttttattttattttaattaatctaaagatacatttagatagccacagggggttagtggctaccatgttggaaagcatagtattgaagggaaacatttaca

SEQ ID NO: 7968 - DNA, 201 bp, Homo sapiens
ctgaagccttatagtctttaagaaagactcttctaatattttgttgtgttctcccctccatattctattgtttatgtcaattatattggaactatttttamacagtagaactgggacttctctggtaatgaacagagctctgtcatgtaagggacttcaatgaacacttactaaatgagtgaataataagttaaccaataa

SEQ ID NO: 7969 - DNA, 201 bp, Homo sapiens
aggaattgaaaaagtgaaaatccctcagctatctatttatatatttaaaacaatactaaaagtcatatagatatatccagacctttggctattgatgtttmtttttcatttggtacaagcaaaaagacatcaaaataaagaggcacagaaaatttaaatttcctttgatcttatccacctgttttccatcttgccagttct

SEQ ID NO: 7970 - DNA, 201 bp, Homo sapiens
tgagacaggaaaattgcttgaacccgggaagcagaggttgcagtgagctgagattgcctcactgcactccagcctaggtgacagagtgagactccatctcaaaaaaaaaaaaaatttttttcaagcaaaaatttataacttaacttggccaggcacattgtctcacatctgtaatcctagcactttgggaggctgaggttg

SEQ ID NO: 7971 - DNA, 201 bp, Homo sapiens
ttgcttgaacccgggaagcagaggttgcagtgagctgagattgcctcactgcactccagcctaggtgacagagtgagactccatctcaaaaaaaaaaaaawtttttttcaagcaaaaatttataacttaacttggccaggcacattgtctcacatctgtaatcctagcactttgggaggctgaggttggtggatcgcttga

SEQ ID NO: 7972 - DNA, 201 bp, Homo sapiens
taatttttaaattttttgtagagacacgatcttgttacgtttcccaggctggtctggaatcctgggctaaagtgatcctcctgccttggcctcccaaaatkttgggattataggcatgacccccccatgactggcctgaaaataattttagatgagaagtaatgttgggtaaatataagatggcgacctatgagcaatttg

SEQ ID NO: 7973 - DNA, 201 bp, Homo sapiens
ccaggctggagtgcagtggcattatcacgctcactgcagcctcccacttcagcctcccgaatagctgggactacaggcacgtgcctccatgcctggctaatttttttttttttttttttaattcttagtacacataaacccttgccatattgcccaggctagtctcaaacccttggactcaagcaatcctcccaccttacc

SEQ ID NO: 7974 - DNA, 201 bp, Homo sapiens
agtctcaccattctcatgactttagtgaccctctgtggcctgatgagacttaaatctgtgtttacaacccagatttttgcccacacttgagtcttgtatastcaactacctttggacctctgcaagttgccttgaactcaaggtgtcccaactgaaaataatcatcttccctcctgaactggattttccttctatatttgc

SEQ ID NO: 7975 - DNA, 201 bp, Homo sapiens
acttaaatctgtgtttacaacccagatttttgcccacacttgagtcttgtatactcaactacctttggacctctgcaagttgccttgaactcaaggtgtcmcaactgaaaataatcatcttccctcctgaactggattttccttctatatttgctagtctacatattttatctttattaatagaaatagcatttaacccac

SEQ ID NO: 7976 - DNA, 201 bp, Homo sapiens
gtgagaattcccctgtacatacagaatgggtcattctgctatttttaggacagatttgatacagtagcttttacaaaaagataagccaaagtttttagacwtcgtgttagtggactgtcattctgtatttaaacagaacacaaaagaaagctgtctgagaccatgacacagtgaaaacagccttgatcaaacaaaaggccc

SEQ ID NO: 7977 - DNA, 201 bp, Homo sapiens
catttaccctatccaccctatccactgacatgggtggttttcagctacacatacatggattgtggtgtatgcatttctctcacctgtctttaccaacatcwtcttctttcttttgtttcctattcacctgcaatgagtctggataaaacccctgttcttttattttgtggacactaatgatttgatgtcagcatctcacct

SEQ ID NO: 7978 - DNA, 201 bp, Homo sapiens
agccccagctcttcacctagttctatgactttgagacatccagttaaccatctttgagcttcagttttctcatctatacaaatggtgtaaaaatacctatytcacattgtgcttgtgtgattatactttgtaaactaaaaaaagttaccaaaatataaggcattcggtatccagttaacaaaatggtagtggttttctgaa

SEQ ID NO: 7979 - DNA, 201 bp, Homo sapiens
atggctccccagtgaatacctcggtggtaatcaagaataacattgaataatcctgacacgaaatcttgtgtctttctaccattcatctgcctctggtagtsttgacctggcagtggaagctctgaggcatgctgaagcagtttactgggctcattgtttctgattgacaggacatgctgtttgttgacagaatgacatcgt

SEQ ID NO: 7980 - DNA, 201 bp, Homo sapiens
gaatcagactgcctcagtgtaaatctgtgctccactacctactagctgtgagatttgttcaagccttgtcgtcctcatctatgaaatggggccattgatamcatctcacaaagctgttgtgaggatatgtaaggtaatgcatgggaagcacttaaaatattgctggcaagttctgggtgaacaaatgctgtcatttgcttt

SEQ ID NO: 7981 - DNA, 201 bp, Homo sapiens
ctcagtattacatcagcttttctctctttttcctttatcaactcccaaagaggagttggggctgagctgtcttacagttgaaacttgataggccatgaagkcctttcaggaaaagtgatttgttctttcagaatcgctaattcagtcttgtgatgccccacaagctgttctcagttttttgttccacgctagagcccagat

SEQ ID NO: 7982 - DNA, 201 bp, Homo sapiens
tgacattgccattacttttatttaccatggaaatttcaaacctaggatataataacagcacatctgaattatatcatttcagcatttggctgctacctctktgaccctcacatgagtctccgtttcctcagctgacaaatggagtacagaccagatagtgccttcgatcctcttaccgctaccactctgattgaaagcagc

SEQ ID NO: 7983 - DNA, 201 bp, Homo sapiens
ctgctttgaccaggacagttctgcaagatgagtaattgtcccaccccaaatggcgatagcgtcctctgaagaacctctgagaagtgtggctttgcttatamtgttctgtagtgctgatggactgcctgattgtagaggtgagaggtgcataatgaaaaaacaagtgggatgtaagagccttgggggagaaagacaggtgac

SEQ ID NO: 7984 - DNA, 201 bp, Homo sapiens
tctcttagtagaaaagaagttccaatagaaataccagaagccacattctcagtattacatcagcttttctctctttttcctttatcaactcccaaagaggmgttggggctgagctgtcttacagttgaaacttgataggccatgaagtcctttcaggaaaagtgatttgttctttcagaatcgctaattcagtcttgtgat

SEQ ID NO: 7985 - DNA, 201 bp, Homo sapiens
tactggtgttccacaggtgggggtcagggatgatgtacatactgctttgaccaggacagttctgcaagatgagtaattgtcccaccccaaatggcgatagygtcctctgaagaacctctgagaagtgtggctttgcttataatgttctgtagtgctgatggactgcctgattgtagaggtgagaggtgcataatgaaaaaa

SEQ ID NO: 7986 - DNA, 201 bp, Homo sapiens
cacaaagatagacccatgcatgacctgatttttttttcataaataagacttttaatgacttatacttgcacatagttataactttaaaaaggagctttttyttttcttttgtttccactcaaggcagcctcttgttctgtcacccaggctagagtgcagtggtgcagtcatagctcactgcagcctccatcttttgggctc

SEQ ID NO: 7987 - DNA, 201 bp, Homo sapiens
ttagcacaagaggaactaagagttttctaacatcgctaggagaatgtcacaggctaaagagagaaatagagggtagaaaggaaggaaaaaaggatgaagtsaatgaaggggttgtagagatggtcagaaaatacagaaatgcacctggagaagggaatcagagagcttccagtcccacacgtcctcctgcctgatggtcat

SEQ ID NO: 7988 - DNA, 201 bp, Homo sapiens
gtcttgtgtgaccacattcatttatgaggaaactgactggaactagggattttttttctccttttttggggctgtagaatattcaccccaccaacaacccmtcaactctgtggacagctgatggtcctgtaaggaaatgccatttaaaaccttgatttcatcaataatatactctaactaaatttgtgattgcctagaagt

SEQ ID NO: 7989 - DNA, 201 bp, Homo sapiens
taaataactacatcttttcttaggggatcatgaatttagtttgtcgataattgaggcccatatctgcttcttcctcttataaccctactgggggctgccthttccaggaaaagtggagtaattccattatgcctctccttagaatctcagtaaaagactagtggtagagttagaaatcactaacttattgtaaaatgtaga

SEQ ID NO: 7990 - DNA, 201 bp, Homo sapiens
tctggtcctggactctttttggcaacctaccttttaaaatattcctcatagtcagtggttaaactctgtatgctttgttgagggaggcattacattgttcttttttttttttttgaatgagtacacagtatatgcaggaaatgagttgtcagaaatcaaattagctaatgtggtggtgtggtgtagtgccagatacttggg

SEQ ID NO: 7991 - DNA, 201 bp, Homo sapiens
gtgggctatgactgtgccactgcactccagcctaggtaagacctgtctctaaagaaaaagaaaaagaaatcatattaaaagtcaggattagctgaatgaarccctcaggagaactccctccttcaatgataccttcttttttccaaattctctttttctactgacttttccctatcatcagatatgctcaagtttctccca

SEQ ID NO: 7992 - DNA, 201 bp, Homo sapiens
caccatgcctggcaatttttgtatttttagtagagataaaatttcaccgtgtttcccaggctggtcccaaactcctaacctcaagttattcgcctgcctcrgcctcccaaagtattgggattacagatgtgagccactacacctggctgaatatggcatattttttttcatctttttactctgattagagctaactataac

SEQ ID NO: 7993 - DNA, 201 bp, Homo sapiens
tttgtgtgtgtgtgtgtgtgtgtatgcgtgttttgcctgtttattgtaatgatacttacaacttgataattaaaactcagtatctaatttttaagcagtcwtatttatttatttatttatttatttatttatttatttatttatactattttactttaagttctagggtacatgtgcacaacgtgcaggtttgttacatat

SEQ ID NO: 7994 - DNA, 201 bp, Homo sapiens
ttatttatttatactattttactttaagttctagggtacatgtgcacaacgtgcaggtttgttacatatgtatacatgtgccatgttggtgtgctgcaccygttaactcgtcatttatgttaggtatatctcctaatgctatccctccccctccccccaccccacgacaggccctggcgtgtgatgttccccatcctgtgt

SEQ ID NO: 7995 - DNA, 201 bp, Homo sapiens
ttgcaattggtacactatttggtctgcaggaagaaattcaataaatatatttgatattaaactctgtattaatgtatatcattagttttaatgaatgcatwtgcagctataccagatatagctgtttgaatctggacaaactgttttacttctggggctagagtcctcaataatatttctcactgggggcgctattggcat

SEQ ID NO: 7996 - DNA, 201 bp, Homo sapiens
aagggttcttatggctttaggtctaacatttaaatctttaatccatcttgaattgatttttgtataaggtgtaaggaagggatccagtttcagctttctamatatggctagccagttttcccagtaccatttattaaatagggaatcctttccccatttcttgtttttgtcaggtttgtcaaagatcagatggttgtagat

SEQ ID NO: 7997 - DNA, 201 bp, Homo sapiens
gttctccacatctgcaactctgtagctaaacatggcaggagaaaaacacaactatactgactagcctcgcttgacattcatgaagccaatctcaagcttargacttgcttcctagtctgtctattgcctctcttgcttccttatatcttctcctctttcctcaaacctctgacatcaccttctcacatgtagagtgagctt

SEQ ID NO: 7998 - DNA, 201 bp, Homo sapiens
acacacacactcatacactcacagacatacataaatattgtctagaaaggaattttcagtttcagatttttcaagggactaaacattttttctttaagctrtattaaaaatggattttgaagattaattttccacagacacacggatgcttgaatgtcatatatttggtcctccaagcctgagtcaaccccaagctagtgc

SEQ ID NO: 7999 - DNA, 201 bp, Homo sapiens
gttttcccagtaccatttattaaatagggaatcctttccccatttcttgtttttgtcaggtttgtcaaagatcagatggttgtagatgtgtgatatcattwctgaggactctattctgttccattggtctatatctctgttttggtaccagtaccatgctgttttggttactgtagccttgtagtatagcttgaagtcagg

SEQ ID NO: 8000 - DNA, 201 bp, Homo sapiens
gatcctaccgcctcttcaccatccctcaaatccctcacctatttacttcctcagcttatattttatggccatcattaatttcacttccctgcatacatacrcgctcagcagcttggcccctttatctggctctgttgtgcttggcaaggccctgatcctggttaaatccagttctccacatctgcaactctgtagctaaac

SEQ ID NO: 8001 - DNA, 201 bp, Homo sapiens
gatttttcaagggactaaacattttttctttaagctgtattaaaaatggattttgaagattaattttccacagacacacggatgcttgaatgtcatatatytggtcctccaagcctgagtcaaccccaagctagtgccagatttattttatattttcaacattttttctcagtccatctctagtctagtgatcttcttcac

SEQ ID NO: 8002 - DNA, 201 bp, Homo sapiens
aagtcatgcaggatacattgtctgttcaacatgtaatttatgcagtcaaagctctctctacttcaggatgtgctcagaaaaatgcagtagaagcctaagawcataacagctagtgaatgatttgctttttcctttcaggtgtcctagcggctacaccggaaaatattgtgaaatggcgttttcaaaaggcatctctccagg

SEQ ID NO: 8003 - DNA, 201 bp, Homo sapiens
agatctctactgctttctcctgtgggcatttagtgctataaatttccttctacaccctacttcaaatgtgtcccagagattctggtgtgttgtgtctttgstctcattggtttcacagaacgtctttatttctgccttcatttcgttgcttacccagtagtcattcaggagcacgttgttcagtttccgtgtagttgagtg

SEQ ID NO: 8004 - DNA, 201 bp, Homo sapiens
tcaggctggagtgcatggctccctgcagcctcaacttcccaggctgaagagatcctctccgcttaaccccacaagaagctgggactacagacacataccascactcacagttaatttttatattttttgtagagatgaggtttctccatgttgttcaggctggcctcaaacccctgagctcaagtgatcctcccgcctcag

SEQ ID NO: 8005 - DNA, 201 bp, Homo sapiens
tctacaccctacttcaaatgtgtcccagagattctggtgtgttgtgtctttgctctcattggtttcacagaacgtctttatttctgccttcatttcgttgyttacccagtagtcattcaggagcacgttgttcagtttccgtgtagttgagtggttttgagtgagtttctggatcctgagttctaatttgattgccttgtg

SEQ ID NO: 8006 - DNA, 201 bp, Homo sapiens
gccttgtggtctgagagacagtttgttataatttctgttcttttacatttgctgaggagtgctttacttccaactatgtggtcaattttggaataagtgcratgtggtgctgagaggaatgtatattctgttgatttggggtggatagttatgtaagcagagattttactaagcttcctaaatagttttagattgagaaaa

SEQ ID NO: 8007 - DNA, 201 bp, Homo sapiens
ttataatttctgttcttttacatttgctgaggagtgctttacttccaactatgtggtcaattttggaataagtgcgatgtggtgctgagaggaatgtataytctgttgatttggggtggatagttatgtaagcagagattttactaagcttcctaaatagttttagattgagaaaataaatttattgcttttttatggatt

SEQ ID NO: 8008 - DNA, 201 bp, Homo sapiens
gcacctccacaggtcagcttccttctgttttgttgatctggaattctcatagtatttttggtaaacttcaagttcgtatgctgagcaacctaccttttttwaatttttttatttttatttatttatttattattatactttaaattttagggtacatgtgtacaatgtgcaggttagttacatatgtatacatgtgccatg

SEQ ID NO: 8009 - DNA, 201 bp, Homo sapiens
gatgttgtcatgtctgcagcatctttgtctgcattttctgttctgtgccaacgcattgcaaaccatcttgtttttaatttttttttttttttttttttgaracagggtctcactctgtcacccaggctggagtgcagtggtgcgatcttggctcactgcaactccacacacccccaccaggctcatgccatcctcccacct

SEQ ID NO: 8010 - DNA, 201 bp, Homo sapiens
acaacagggtttgtgctcctatgggaatctaatgcagccactcatctgacaggaggcggagctcaggcactaatgctcactcacccgcctctcacctgctsctgtgtagcctggttcctagcaggccacggaccagtaccagtttgtagcccagggactggggacccctccctcatggaacctgttcgtagtttgccatgc

SEQ ID NO: 8011 - DNA, 201 bp, Homo sapiens
cagctttgcgtggtgatttatttactagaatgtatgatttccctccacacctcttttgattggttggtacccatgccttagggtgttgttaaatattttcratatcaccctaattttcaatgagccatgcctgacttcctttctggaacctgggcttatttcagtgacagagaattaaagagaatgtgacatcatggaatg

SEQ ID NO: 8012 - DNA, 201 bp, Homo sapiens
ttaaaatttctgttaaaattggttaaaggccatagaattttttttttaagctaagcatgttatagagaggtatcctataagaagcaaggggcaggtaaagmctttagagatgtatagtccagtgtgttaattaaaggatactacctacttctaattcggtatgtattaatcttttctgatatatctgttaaagtactcttc

SEQ ID NO: 8013 - DNA, 201 bp, Homo sapiens
cacttgatgctgagaaatagaagagaatggatgggaaagaatgatggggagtttcagagatttgtgatgattcacaaatcacaaggtatgttgcaatgttygtccagggaaaagtcctcatttgttttttgttgttgttttgtgttatttatttatttatttatttatttgagatggagtctcgctctgtcgcccaggctg

SEQ ID NO: 8014 - DNA, 201 bp, Homo sapiens
ctgagttgctgggactacaggcgcgtgccaccatgcctggctaatttttgtatttttagtagagatggggtttcattttgttggccaggctagtcttgaasgagtaggagagcggtttttttgcctgattttacacaatcaccatggactggattccgctgaagtcatcatgaagctatttatgaaggagaaaggccgggg

SEQ ID NO: 8015 - DNA, 201 bp, Homo sapiens
tttattatcaacaaaacatggaactgaacattcatcagggatgtttcaaaaactggtaattcagccccagtaacttaactgtctcattttatctaaaggaraatttgtttgaaacaaatttgctagttgcaaattagctctgagaacaggcacagcttacgttaagtgaaaattttactttccctatttcaatacagcata

SEQ ID NO: 8016 - DNA, 201 bp, Homo sapiens
ttgtttgaaacaaatttgctagttgcaaattagctctgagaacaggcacagcttacgttaagtgaaaattttactttccctatttcaatacagcataagamcatacaagttacaattatctaagtacaatacattgtttctttctaatatatattttatttaatcagacatctatttacctctccttgaattgcagactca

SEQ ID NO: 8017 - DNA, 201 bp, Homo sapiens
tttgaaacaaatttgctagttgcaaattagctctgagaacaggcacagcttacgttaagtgaaaattttactttccctatttcaatacagcataagaacayacaagttacaattatctaagtacaatacattgtttctttctaatatatattttatttaatcagacatctatttacctctccttgaattgcagactcacag

SEQ ID NO: 8018 - DNA, 201 bp, Homo sapiens
caccatcatgagctgaccaacaatttctaaattcctactcagaaacacagcaaggggaatgcagtcaagcacaaagggcttaaatgaccagataaggctgsgctggatgaataaagaggaatatcctatgaatgtgactgtgtagttttagagtatcccgattcaactgttatatttgacttgtggccttgtagacagtgt

SEQ ID NO: 8019 - DNA, 201 bp, Homo sapiens
ttttaatgaagaaggacttaggaaagcaatacattatggattaaaacataaggcaaaggattaacccaagcaggcatctggaatgtactaaaagaaatgaygtgtactaaacgaatgggcgcggtggctcacgcctgtaatcccagcactttgggaagctgaggtgggcagatcacgaggtcaggagatcgagaccatcct

SEQ ID NO: 8020 - DNA, 201 bp, Homo sapiens
ctcacgcctgtaatcccagcactttgggaagctgaggtgggcagatcacgaggtcaggagatcgagaccatcctggctaacacactgaaaccccgtctctrctaaaaaatacaaaaaattagctgggcgtggtggtgggcgcctgtagttccagctacttaggaggctgaggcaggagaatggtgtgaacccaggaggtgg

SEQ ID NO: 8021 - DNA, 201 bp, Homo sapiens; identical to SEQ ID NO: 1026

SEQ ID NO: 8022 - DNA, 201 bp, Homo sapiens
gataatagtggggagaaggtcagcatgtaaacacgtgaacaaatgtctctgcatcataaaaaggtaaagaaaaaggtgctgtgcttttgatgtgcatatamataaacatctcaatgccttaaagagcagtattgctgccagcacgtcccacctccagccctaaggcagttttcccctatctcagtagatggaatatacaat

SEQ ID NO: 8023 - DNA, 201 bp, Homo sapiens
tttagaatgtgttcaccatcatgagctgaccaacaatttctaaattcctactcagaaacacagcaaggggaatgcagtcaagcacaaagggcttaaatgamcagataaggctgggctggatgaataaagaggaatatcctatgaatgtgactgtgtagttttagagtatcccgattcaactgttatatttgacttgtggcc

SEQ ID NO: 8024 - DNA, 201 bp, Homo sapiens
ccaaaaggctttagaatgtgttcaccatcatgagctgaccaacaatttctaaattcctactcagaaacacagcaaggggaatgcagtcaagcacaaagggyttaaatgaccagataaggctgggctggatgaataaagaggaatatcctatgaatgtgactgtgtagttttagagtatcccgattcaactgttatatttga

SEQ ID NO: 8025 - DNA, 201 bp, Homo sapiens
tccagtgtgttaattaaaggatactacctacttctaattcggtatgtattaatcttttctgatatatctgttaaagtactcttcgcatatttttaaaaaaytggcattttaaagtatagtctttgatggtagaaatgtgagattgacaaaaatcatgtcctcttatgtatgaatttagtcttacacagttcttcatatgat

SEQ ID NO: 8026 - DNA, 201 bp, Homo sapiens
agtgggttttctggttaaaaaaaaaaaaaaatctctgaatgcacggagtcgtctcaggccttctcaaatttgcaaagaacaggtccacaagacctacattycccaagataattgcagtagtgtgacctgataattaacattttttgctttcctgctggaacattcctggggcccagagactgggccaagcatttccagtcc

SEQ ID NO: 8027 - DNA, 201 bp, Homo sapiens
ctcaaagccattattttgggccttctaccaatgacgtgtttgtttcccttgaaggcttgccagaatctttatgtaggtgactctagatcatggttatttaytttcattttctcagatattaaagcatattttccttctgagttttgaatggtaagggtaaggctattcaccgcatactatcatccaaatagaagtggatgt

SEQ ID NO: 8028 - DNA, 201 bp, Homo sapiens
gtttcctgcctttgttgtatgcctgatacatgtattaactcatttaatccttattgaaagtctgtgatgtataggtgctacatttttcaaaagaagaaacwgaggtccagagaggttatatagctcactctggggtgagaacctaaagagtcaagactgtttttttaatcccgaaactttggtactgagcgaagtgctctt

SEQ ID NO: 8029 - DNA, 201 bp, Homo sapiens
caaagcacttagccaagtttaaggacactactcatgtcatatctgctaacacccgttgttcaaacaagtaacatggccaagcctaattatgaaggaacagkaagtatactggccctacagaaggagagggaatgaaatgaatatttgatgaacagtattatgctatcagcttcatattagatgtttatttctagtatttta

SEQ ID NO: 8030 - DNA, 201 bp, Homo sapiens
gcatggccacttcccagttccaggaacaggcagtcgttgttttttctggcttatcacattgagatacatggttactacaagtgacacttaaacgtgtcagrcagtttgggggctcccttcttgaactttttctaagagcaaacctttgtcttaatgccaccctgtttacaacaatagtagggctttgaacaatgagaaaat

SEQ ID NO: 8031 - DNA, 201 bp, Homo sapiens
aattggatagaaaagtggcatgtaaaatagctggtttatagatcaaactgcctttagatctgtaaaggagcttagagtacatacaggtggagagacatcaratgtgtgtgagcagacccttatgtacttctccatcttcatctctaagactgtctccctcttttgctctgtaacctcactcgtcttcctttacttgaatga

SEQ ID NO: 8032 - DNA, 201 bp, Homo sapiens
ttcaggaaacgaaaccaggagccgcgggtgttggcgcaaaggttactcccagacccttttccggctgacttctgagaaggttgcgcagcagctgtgcccgrcagtctagaggcgcagaagaggaagccatcgcctggccccggctctctggaccttgtctcgctcgggagcggaaacagcggcagccagaggtgcgcgggc

SEQ ID NO: 8033 - DNA, 201 bp, Homo sapiens
cttcttttcctttccggtatttctgtgcaaggagagaatgatctctgaccttgtgaaaggcaaataccatgtgtattcatggttgttattcatttggcaasgacttgaaactcatgacactccctgctgaagatcctccacctattcttaacagctgggctccccagctcctggatcaccaaccagtaccagtctgtggcc

SEQ ID NO: 8034 - DNA, 201 bp, Homo sapiens
ttaaatctcttgatgaacagtgtgtggttggcaaaatttccaagcactggactggaattttgagagaggcatttacagacgctgataactttggaatccarttccctttagaccttgatgttaaaatgaaagctgtaatgattggtgcctgtttcctcattgtaagtctgttcttattaatcttgattatagatgctttct

SEQ ID NO: 8035 - DNA, 201 bp, Homo sapiens
aacttatcttttaagattaaaaataatgtaaccaagtgggaagaaaaagagcaaatatgaacaaattgtcattgttttagaatctgcttcttttcctttcyggtatttctgtgcaaggagagaatgatctctgaccttgtgaaaggcaaataccatgtgtattcatggttgttattcatttggcaacgacttgaaactcat

SEQ ID NO: 8036 - DNA, 201 bp, Homo sapiens
tttcatatggttcaacttcattggtgtagttccagagtaagcataacatatataaatactgaagtatattcattattttaaatatttaaaataatacttayagcaatgatgatagatatctttaaaatcatccataattctaccatcttcacatcccattaatttcatttatctctttcttcgtagtctgtatgtaatttt

SEQ ID NO: 8037 - DNA, 201 bp, Homo sapiens
gattatataaaatatatatgggaagttaatgacttgaattaaggtcatgttggattttagttatgtataggaaaagaatggagagttttcagcaaacagayggtaattgaatctctaagaaggttatcttaatggtgagtaagagagagcctagtagaccttttatccaatataggtgataagagagtctgtctccttcaa

SEQ ID NO: 8038 - DNA, 201 bp, Homo sapiens
attatataaaatatatatgggaagttaatgacttgaattaaggtcatgttggattttagttatgtataggaaaagaatggagagttttcagcaaacagatrgtaattgaatctctaagaaggttatcttaatggtgagtaagagagagcctagtagaccttttatccaatataggtgataagagagtctgtctccttcaag

SEQ ID NO: 8039 - DNA, 201 bp, Homo sapiens
accacagtagtatttcattacacataatccctaaaactcagcagcttgcaataagtgtttatactcatgcttatgggtgtgtaggtcaactgtgtttcagyggatgtatttaagcactgacttaggcgcatgttaacctcaatctgctccaggtagatttgttctatggctgtagcagcagcagctacctgagtcatgctt

SEQ ID NO: 8040 - DNA, 201 bp, Homo sapiens
ggatgactttagtgacctggcacacagtgccttatctacttggcacatgtacaggtacaaggaacacttaacattttgcaccagagcttattacataccaytttcaatgcttgagatattatataaatgctaaaattctaaaacctatagtaaagcaaagacccagattttatactgcagtagttttgccagtaagtctca

SEQ ID NO: 8041 - DNA, 201 bp, Homo sapiens
tgtagcagcagcagctacctgagtcatgcttttctagtggcttgtcactgaagatcataagccaggccaaagcacttagccaagtttaaggacactactcrtgtcatatctgctaacacccgttgttcaaacaagtaacatggccaagcctaattatgaaggaacaggaagtatactggccctacagaaggagagggaatg

SEQ ID NO: 8042 - DNA, 201 bp, Homo sapiens
cttgagaaaacccaaaggatcattataacagcaaacaggaatgtaggcatccacatagtggatgactttagtgacctggcacacagtgccttatctacttrgcacatgtacaggtacaaggaacacttaacattttgcaccagagcttattacataccactttcaatgcttgagatattatataaatgctaaaattctaaa

SEQ ID NO: 8043 - DNA, 201 bp, Homo sapiens
ccctttctctgagtatttctgaaatttaaaatgaaataagtgtggtagaagccattatttatgaattatcatgctaaattaattaactcattaattcattsagggcacacccagttattccccaaactgagtgatgtatttctgggaatagacttattaagcttgagaaaacccaaaggatcattataacagcaaacagga

SEQ ID NO: 8044 - DNA, 201 bp, Homo sapiens
gtacttttgctataagtttcctaaaagtatttaatacttttttttttcaatttagattaaatctcttgatgaacagtgtgtggttggcaaaatttccaagyactggactggaattttgagagaggcatttacagacgctgataactttggaatccagttccctttagaccttgatgttaaaatgaaagctgtaatgattgg

SEQ ID NO: 8045 - DNA, 201 bp, Homo sapiens
tatatgttctttccattgcctcatctctgaaattgtgtaactattaaatgagctacagagtattaatgtaaaattcttagagcagtgcctggcgctacagraagtactcagtgaaagttagctcttattattttaaatatttgacaaagttcctgcttctccaagctgattctctggttcccaggtggtttcattcatgca

SEQ ID NO: 8046 - DNA, 201 bp, Homo sapiens
tacttgaatgagggacgttcctccagctcaggaattctacctatgaagttccctctatctatgatgccctccaacaccccacccaccatacctccatagaytagttgatttgagacttccttcatctcctagtctgacttttcttaaaccccctaccaccatctaagttagtgccccataaccctttcttatagcaacatt

SEQ ID NO: 8047 - DNA, 201 bp, Homo sapiens
tccttcatctcctagtctgacttttcttaaaccccctaccaccatctaagttagtgccccataaccctttcttatagcaacattaattttatttatagcasttagagtatttttaataatatatttaattcttaattgtctgtctcccctagtgtctaggtattgtgctctagtgcctggtatagtgccttgcatgctcta

SEQ ID NO: 8048 - DNA, 201 bp, Homo sapiens
gatgtatagatctgcaatccagaaactatgaatttttttcagttgagtagtctgtttgccaaaaaataaaaaaaaataaaaaataaaaacttgcctaagtktcttctcttacattttatttaggatttgcccttagacattatttagtgcttttctgaccctgtagggacggtgagaataattgaaacactagtttcttaa

SEQ ID NO: 8049 - DNA, 201 bp, Homo sapiens
tggccacttcccagttccaggaacaggcagtcgttgttttttctggcttatcacattgagatacatggttactacaagtgacacttaaacgtgtcagacartttgggggctcccttcttgaactttttctaagagcaaacctttgtcttaatgccaccctgtttacaacaatagtagggctttgaacaatgagaaaatgcg

SEQ ID NO: 8050 - DNA, 201 bp, Homo sapiens
atatttaattcttaattgtctgtctcccctagtgtctaggtattgtgctctagtgcctggtatagtgccttgcatgctctatgccttcaattaattccttwaaaaccacacaagctttatatttagtgaatatttatataggaagaatttctatgtgtatatatgtgtatctgtgtatatacacactgtattgcactgccc

SEQ ID NO: 8051 - DNA, 201 bp, Homo sapiens
aagaatttctatgtgtatatatgtgtatctgtgtatatacacactgtattgcactgccctgaatagtgctaaattaaaaaaccaaaacactttttaatcasaacttaatagttgcactcttcaattttccatatgttcttttaagaagtgattagaaaaaaatgatgtctccatatgttgtctgctgctgtaaaagaatac

SEQ ID NO: 8052 - DNA, 201 bp, Homo sapiens
ttgatacaaagtatgtgagtgtcagcattttgcagccatctgtttccctcatgaagatagattagcccagcaaaggtgcagagttcacttaggattcccayggtctagatattctgtgagttgaagccttggttgccgaacacgtttgtctaatacccacctcccacttctgaacaactactgttgagttgaataaggatg

SEQ ID NO: 8053 - DNA, 201 bp, Homo sapiens
agttcccttagtatttattgatcattatcgggcgtttcccggagagggggatgtggcaggacaataggataatagtggggagaaggtcagcatgtaaacaygtgaacaaatgtctctgcatcataaaaaggtaaagaaaaaggtgctgtgcttttgatgtgcatatacataaacatctcaatgccttaaagagcagtattg

SEQ ID NO: 8054 - DNA, 201 bp, Homo sapiens
ttaagaagtgattagaaaaaaatgatgtctccatatgttgtctgctgctgtaaaagaatacctgagacttggtaatttataaaggacagaaatttatttcytacagttctggaggctaggaagtccaacataatcatgtgttgcttaaatacaggaatacattctgagaaatgcatcatgaggcaattttgtggttgtgag

SEQ ID NO: 8055 - DNA, 201 bp, Homo sapiens
gcctactctggcaataacaaacccactcccaagataacgacattaatctattcatgaaggtagagtgcttataaactaatcatattttattaggctccacytcccaacactgttgcattggaaattaagtttccaacacatgaacttagctcacacattctaaccatagcacctggcctagttaaagctaagtggcacaag

SEQ ID NO: 8056 - DNA, 201 bp, Homo sapiens
catctcacttggtcctagttgatgtatcatctacatttttattcaaggtttaatataaaatgctataaaaggctatcctaaactggttttaagcatatttrttttgtttgttcagcataaaatacacaagaggatttttatggaatggctccttgttacaaggtactttgcatttataatcagccacagtcacctcagttt

SEQ ID NO: 8057 - DNA, 201 bp, Homo sapiens
gaatggtaagggtaaggctattcaccgcatactatcatccaaatagaagtggatgtgcaaccacagatatttcattgaaaaatctcagaaagagaaaagcrtattaaacatcacagatacagatgtctacgctgaaatgtcaacttatagatagatggcataaccctaaaaaggttgacaattccatttttggtgcagtta

SEQ ID NO: 8058 - DNA, 201 bp, Homo sapiens
gtttaatataaaatgctataaaaggctatcctaaactggttttaagcatatttgttttgtttgttcagcataaaatacacaagaggatttttatggaatgrctccttgttacaaggtactttgcatttataatcagccacagtcacctcagtttcatcccgtatcttacaagtatgatgtgctgtatactcaaagcctcac

SEQ ID NO: 8059 - DNA, 201 bp, Homo sapiens
tgaaaacttttagtctactttggttacatgtgtttattattgctcaccttatagattaacagcagaaaagtataaattttaatatttctacctttctggcttgaggtctacagcattaatttctgaccagttaatgcaaactgagattcctattgtcctaagaaaatctgggaagttagtaacacaaacacatcttttgat

SEQ ID NO: 8060 - DNA, 201 bp, Homo sapiens
gaggatttttatggaatggctccttgttacaaggtactttgcatttataatcagccacagtcacctcagtttcatcccgtatcttacaagtatgatgtgcygtatactcaaagcctcaccacctgcttgccccacccatttgcttaaatgtatcaattttttctaagcttaacttttaccaaaactggagttcaacagatg

SEQ ID NO: 8061 - DNA, 201 bp, Homo sapiens
cacctcaacctcccgagtagttgggactacaagcgcatgccaccatgcttggctaatttttttttagtagagacagtgtctgtccatgttgcccaggctgrtctcaaacttctggactcaagtgatcctcctgcctcagcttcccaaaatactggcattataggcataagccaccatccctggccaaaaaataattctgaa

SEQ ID NO: 8062 - DNA, 201 bp, Homo sapiens
aattttttctaagcttaacttttaccaaaactggagttcaacagatgaatatttttccttcttagatgttaactaaacatttttaaaggtacaaaatttaygtacaaacataacccaaatgacatggaagttacttgatttgtgacttacctctgtaatgttcccctggcctacttgaaattcctacctttcctctagtct

SEQ ID NO: 8063 - DNA, 201 bp, Homo sapiens
ttgacttattaaccacttaggattgcacagtaagataatttaaagggtagccagcactggagtgggcctgggaaggggatgggcagtttgtgttagtgtgygtgggtccaagataaaaatgttgggtagcagagttttgcctaatgcattgtcgctaaaagggatgaagggcatcgggatctacaggagatggaaaaagta

SEQ ID NO: 8064 - DNA, 201 bp, Homo sapiens
gctgcaatttatgtttctgtataaataccgagtacaaagtttcacttgggtggtcaaggtgctatggctgtgacaactcctgagagtgggttttctggttaaaaaaaaaaaaaaatctctgaatgcacggagtcgtctcaggccttctcaaatttgcaaagaacaggtccacaagacctacatttcccaagataattgcag

SEQ ID NO: 8065 - DNA, 201 bp, Homo sapiens
aaaaaaataaaaaataaaaacttgcctaagtttcttctcttacattttatttaggatttgcccttagacattatttagtgcttttctgaccctgtagggamggtgagaataattgaaacactagtttcttaaaatttctgttaaaattggttaaaggccatagaattttttttttaagctaagcatgttatagagaggtat

SEQ ID NO: 8066 - DNA, 201 bp, Homo sapiens
gtgtgtccagtctatacacatacaaatattcttgtgatattcaaccagttttcatttcataaatcatttctttcttgcactctctttagtaacttaatttmccacaatgtgcttaagtggcataatcataggaatttttggtcattattatattatgcaagaaatacatagaaatagatattttaaaaatcagagtctcat

SEQ ID NO: 8067 - DNA, 201 bp, Homo sapiens
tgcagtcaagcacaaagggcttaaatgaccagataaggctgggctggatgaataaagaggaatatcctatgaatgtgactgtgtagttttagagtatccckattcaactgttatatttgacttgtggccttgtagacagtgtgttaatgtcagatcttctttttcagaactgttttaatcatggacaaacaaagtaagtaa

SEQ ID NO: 8068 - DNA, 201 bp, Homo sapiens
tcttttactaatccccctcagtgcagaccctttacgggtgtcggactggtggacggtcaggtctttcccttcccaggaggccatatttcagactatcacawggggagaaaccttggacaatacctggctttcctaggcagaggtccctgtggccttccacagtgttttgtgtccctgggtacttgagattagggagtggtg

SEQ ID NO: 8069 - DNA, 201 bp, Homo sapiens
gaagtttggctggcatatattttatttttagtaaataaatgaaaacactggaaaaacattgtgtaatccttgtatttgatactaaaaaatttatgtttcawctggcagtctttcttgatggataccttaaagcatccattccatgtaataaattaacttttcttctatttatctagaatgatgatatcaaggtactctcat

SEQ ID NO: 8070 - DNA, 201 bp, Homo sapiens
tatattttatttttagtaaataaatgaaaacactggaaaaacattgtgtaatccttgtatttgatactaaaaaatttatgtttcatctggcagtctttctygatggataccttaaagcatccattccatgtaataaattaacttttcttctatttatctagaatgatgatatcaaggtactctcatggaaagaattgagaa

SEQ ID NO: 8071 - DNA, 201 bp, Homo sapiens
ggggcatttcatcaagttacttattggtatttgcctttactccaaactgctaatcttttctaggtgcttagcatttcatgtttggcaactcacagtgggtrgtaataagccttttcatcatatttaatctttcagtctgtgtaaactgtgcttctcctaaagcagaagtctaataggagttttgttcattaacttcctgat

SEQ ID NO: 8072 - DNA, 201 bp, Homo sapiens
actggagttcaacagatgaatatttttccttcttagatgttaactaaacatttttaaaggtacaaaatttatgtacaaacataacccaaatgacatggaakttacttgatttgtgacttacctctgtaatgttcccctggcctacttgaaattcctacctttcctctagtctagtatcttattctcagttattcggaggaa

SEQ ID NO: 8073 - DNA, 201 bp, Homo sapiens
caagtgtgtagacctaactaccaaattacaggaaataattggatataccagtgattctgaaattgccttcacattagaaccacctagggactttaaaaacyccaaggactagtccatacctcagttcaactaaatcagaaacttcgaagttcatatagtgttccaggtgattccagtatgcagccaaagatgagaattatg

SEQ ID NO: 8074 - DNA, 201 bp, Homo sapiens
ttctttctttttttttttttttttttttgagatggagtctcacgcttgttgcccaggctggagtgcagtagcgcgatctcggctcactgcaacatctgcckcctgggttcaggcgattctcctgcctgagcctcccaagtagctgggactacaggcacctgccaccacacccagctcattttttgtatttttagtagagac

SEQ ID NO: 8075 - DNA, 201 bp, Homo sapiens
acaaaatttatgtacaaacataacccaaatgacatggaagttacttgatttgtgacttacctctgtaatgttcccctggcctacttgaaattcctaccttycctctagtctagtatcttattctcagttattcggaggaagttagggacctagaattcttgttttcagagcagtagaattttgctaacataattcaaaaca

SEQ ID NO: 8076 - DNA, 201 bp, Homo sapiens
caaacataacccaaatgacatggaagttacttgatttgtgacttacctctgtaatgttcccctggcctacttgaaattcctacctttcctctagtctagtrtcttattctcagttattcggaggaagttagggacctagaattcttgttttcagagcagtagaattttgctaacataattcaaaacatttatccctatctt

SEQ ID NO: 8077 - DNA, 201 bp, Homo sapiens
gacctagaattcttgttttcagagcagtagaattttgctaacataattcaaaacatttatccctatcttggggcttgaagagaatgtgaaatgctttatcytctgttttgagggaatgagggaaggagcttgttcttaggcaattaacaagtaaatttaaataaataatccaaatctggtgtgggtaaacaaattttagtt

SEQ ID NO: 8078 - DNA, 201 bp, Homo sapiens
attggcattttaaagtatagtctttgatggtagaaatgtgagattgacaaaaatcatgtcctcttatgtatgaatttagtcttacacagttcttcatatgwtggaatctaaaacaaatgtagtcttgaaaacttttagtctactttggttacatgtgtttattattgctcaccttatagattaacagcagaaaagtataaa

SEQ ID NO: 8079 - DNA, 201 bp, Homo sapiens
taccttcctcttatctcaactgcaaagacgcgttccttcctcttttactaatccccctcagtgcagaccctttacgggtgtcggactggtggacggtcagrtctttcccttcccaggaggccatatttcagactatcacatggggagaaaccttggacaatacctggctttcctaggcagaggtccctgtggccttccaca

SEQ ID NO: 8080 - DNA, 201 bp, Homo sapiens
ccattttaaacagaacgttaaccttgccatctaagtctgattgccaaagcatatggatccttcttaaatctgaaatatcatctgccaatgctcaaggccaygttcagaatgtctgacatctttgaattcctacaagaagcccaattatgcaaagatagttttgagaaaattagtataatatgtactacccagttatgcttc

SEQ ID NO: 8081 - DNA, 201 bp, Homo sapiens
attggaatgttcttaagactttaagttgattataaaattttgtgcttaaagttggcaataatcaaaacaaaacaaacaaacaaaaaaaaccctttattttraaacacagtcttgctctgtcacccaggctggaatgcagtgatgacatcatacttcattagaccgtcaatattccaggctcaagcaatcctcccacctcaa

SEQ ID NO: 8082 - DNA, 201 bp, Homo sapiens
caaaacaaaacaaacaaacaaaaaaaaccctttattttaaaacacagtcttgctctgtcacccaggctggaatgcagtgatgacatcatacttcattagascgtcaatattccaggctcaagcaatcctcccacctcaacctcccgagtagttgggactacaagcgcatgccaccatgcttggctaatttttttttagtag

SEQ ID NO: 8083 - DNA, 201 bp, Homo sapiens
tatcttaaatacaatctatgataatggccaatagcaaacatttaattagcactgtttcctgcctttgttgtatgcctgatacatgtattaactcatttaawccttattgaaagtctgtgatgtataggtgctacatttttcaaaagaagaaactgaggtccagagaggttatatagctcactctggggtgagaacctaaag

SEQ ID NO: 8084 - DNA, 201 bp, Homo sapiens
ataaaaatggtattaattgatgaactgacacctttaagtagatgataagggatggcaattggggcaccagaagagggtctggctctggctgggagcagaakggttaacccacaacagtccctcacatggtaaaacgcctgacatgtggtgcagctgcaaatgcatgagcagacagtggtggaatctgtgaagttgtcttct

SEQ ID NO: 8085 - DNA, 201 bp, Homo sapiens
gtgagccatgcagggagagggtgattgctggccatggtagggacttcctatgtggtttggaatcctaaattttaagagaccagtcagcgtactgtgtgctkctctccagcctcctgcagctcatgggggcaggctcagcataggcagaggtggaacccaccagctgtgtagttttgccaggtgagtgtgacaattcaaggg

SEQ ID NO: 8086 - DNA, 201 bp, Homo sapiens
acatagaattgaaaatgaaccatcacatgtaggttattttttacacccttaagtcctgcccaagccagggctgggccaaggccctcgaacatccagctgtrgcctcctcctgctgcaggtgaggagtgggcagcagggagggccgtggtgcctgctttgtccccatcccggtctctgtctctcaggcttaccaggttgcat

SEQ ID NO: 8087 - DNA, 201 bp, Homo sapiens
gatagcgaattggttagccacttttcagtctcgggcagttttgttttccaaaacatgggtttttatctcaggaccttcttgtccccagatgatcaaaaccrgggccatccactcccttctgagccacctctgcctggggggcccgtggctgtgtcctccagtcacaacagaacactccttcagaacactcgcaggaagaca

SEQ ID NO: 8088 - DNA, 201 bp, Homo sapiens
ctcagacagctccttgcctcacctgccacagtcctccctctcccctggcctccaagtacccgggagtgcgagcctgggccccgggaaccggcaccttgagrgctggagagggaccccgcccgctccctgtctccctgacgcgctctctccgcctccccgcggggacccagcctcccgggctccctcctgcctaccgcccgg

SEQ ID NO: 8089 - DNA, 201 bp, Homo sapiens
cctcctgcttggaacttctgacctcccctctccagcttctcctctgccttcctcctctgcagaatctgactccaaccagggcaggctctctgcttttaatrgctcttgtgatttgattgggcccacacagagagtccagcagaatctccctattttaaggtccttaatcttcattacatgagtaatatcccttttgccacg

SEQ ID NO: 8090 - DNA, 201 bp, Homo sapiens
agacagctccttgcctcacctgccacagtcctccctctcccctggcctccaagtacccgggagtgcgagcctgggccccgggaaccggcaccttgagggcdggagagggaccccgcccgctccctgtctccctgacgcgctctctccgcctccccgcggggacccagcctcccgggctccctcctgcctaccgcccggccc

SEQ ID NO: 8091 - DNA, 201 bp, Homo sapiens
cagattggctaatttaaagagagtgaaacaggtgatcagaatgagtcagggtggtgcaggtaactggaatgagtcaggctggggcaagtaatcaggatgartcagggtggagcaggtaatcagaatgagtcagggtggagcaggtgactggaatgagtcagggtggagcaggtaaccagaatgagtcaggctggagcaagt

SEQ ID NO: 8092 - DNA, 201 bp, Homo sapiens
tcaaatagttccaagacttcagtgccataagaatgatgccttgaaaataagtctttgttttgtctaagatgtctcaaatttagtggaagtatgccccaagygccaattttcttattgacatatcatcttcagaaaacatttgcctacacttaaaaaaaaaatacacacacactgctctgtctatggagtagccattctttt

SEQ ID NO: 8093 - DNA, 201 bp, Homo sapiens
tatactgtccacacttctctggtgacaaacttaatgtgtagttcagtgggctgtcttttgtctgcttttaagggtaccctcctttgcaaaccaggacctcrtaccctgcacagcccagtgttctgagataaaacatgtcaaataccccattaggtgaatctaagagattagacatggagccatacctgcttccaccgtttg

SEQ ID NO: 8094 - DNA, 201 bp, Homo sapiens
tgttactttttccagcccccgagggtcatagtacccagtgggctgttttttgggctttgttctgtgctctgtggcctcaccttgcctttcctgagccaatktttttgttcttagtgtagtcgctgcctggtaagtttaaaataagagacagtcagaatcatgtcccccacagtcaggttgtttgaggggagaggaaaagag

SEQ ID NO: 8095 - DNA, 201 bp, Homo sapiens
gaggagactcctcttctcaccaggtggtctctgggcatatactgtccacacttctctggtgacaaacttaatgtgtagttcagtgggctgtcttttgtctscttttaagggtaccctcctttgcaaaccaggacctcgtaccctgcacagcccagtgttctgagataaaacatgtcaaataccccattaggtgaatctaag

SEQ ID NO: 8096 - DNA, 201 bp, Homo sapiens
agggtcatagtacccagtgggctgttttttgggctttgttctgtgctctgtggcctcaccttgcctttcctgagccaatttttttgttcttagtgtagtcrctgcctggtaagtttaaaataagagacagtcagaatcatgtcccccacagtcaggttgtttgaggggagaggaaaagagcaagcagaaagttttgagttt

SEQ ID NO: 8097 - DNA, 201 bp, Homo sapiens
aagggatacaatgtccccagacctaccagagaaggcaaactcatacagcttgcaggaccagacaaggacaagaaacaagttcaaaagagggaaagggaaaytacagacgtacctcagagatactgcagatttggtttcagaccatggcaacaaacaagtcacacaaatttttgtttttccagtacatataaaagttatatt

SEQ ID NO: 8098 - DNA, 201 bp, Homo sapiens
cctggggatgaggatctattacctgggcctggagaggaggagactcctcttctcaccaggtggtctctgggcatatactgtccacacttctctggtgacamacttaatgtgtagttcagtgggctgtcttttgtctgcttttaagggtaccctcctttgcaaaccaggacctcgtaccctgcacagcccagtgttctgaga

SEQ ID NO: 8099 - DNA, 201 bp, Homo sapiens
tgggctgttttttgggctttgttctgtgctctgtggcctcaccttgcctttcctgagccaatttttttgttcttagtgtagtcgctgcctggtaagtttavaataagagacagtcagaatcatgtcccccacagtcaggttgtttgaggggagaggaaaagagcaagcagaaagttttgagtttctgcaaagacagaggca

SEQ ID NO: 8100 - DNA, 201 bp, Homo sapiens
tgtgtagggagcctcactagtccaacagagcttggtaccagtgtcatatgccaggaaccaaggttataagggatacaatgtccccagacctaccagagaargcaaactcatacagcttgcaggaccagacaaggacaagaaacaagttcaaaagagggaaagggaaactacagacgtacctcagagatactgcagatttgg

SEQ ID NO: 8101 - DNA, 201 bp, Homo sapiens
tggatctctggtttccacacttctgcctttattgtgtgaaagtagccatgcctcctcctggggatgaggatctattacctgggcctggagaggaggagackcctcttctcaccaggtggtctctgggcatatactgtccacacttctctggtgacaaacttaatgtgtagttcagtgggctgtcttttgtctgcttttaag

SEQ ID NO: 8102 - DNA, 201 bp, Homo sapiens
ctactctcacttgcaatggggtgagggaaaacagaaggcccccaggtggatctctggtttccacacttctgcctttattgtgtgaaagtagccatgcctchtcctggggatgaggatctattacctgggcctggagaggaggagactcctcttctcaccaggtggtctctgggcatatactgtccacacttctctggtgac

SEQ ID NO: 8103 - DNA, 201 bp, Homo sapiens
aacagcacctaattatcatgttacagtcctgtaggttgcaagtccacacagtcttatggggctaagatcaaggtatgggcaggtctgtgttccctcctggrgactctggggaagaatccatttccaagctcattcaggttcttgtctgaattcacttccttgcacatagaacagaggtttccacttccttgttaagagcca

SEQ ID NO: 8104 - DNA, 201 bp, Homo sapiens
ggaggattacccaggagtgtgactcaaaccttctgccctgatgggtctgggcccttggaaatcaaatcctctcaggctgaattgctggataattctactcwcacttgcaatggggtgagggaaaacagaaggcccccaggtggatctctggtttccacacttctgcctttattgtgtgaaagtagccatgcctcctcctgg

SEQ ID NO: 8105 - DNA, 201 bp, Homo sapiens
agagagaggagaaggtcatggaggagaggagttccaggatctgagagtccagggagcaagggcatcttctctgctgtataggtgtctattgctgccataaraattaccacaaaccaagtggctttaaacagcacctaattatcatgttacagtcctgtaggttgcaagtccacacagtcttatggggctaagatcaaggta

SEQ ID NO: 8106 - DNA, 201 bp, Homo sapiens
cataattgtgtgagccaattagcccaataaatcacctatctatctatctgtctgtctatctatctatctatctatctatctatctatctatcatcatctawcatctatctatcatctatcatctatctatctattatctatctatcatctatgtacctatgctattggttctttctttcttggtaaccttaataaatcaac

SEQ ID NO: 8107 - DNA, 201 bp, Homo sapiens
ggggccatccattccattctgagccacttctgcccaggggcccatggctatttcctccagtcacaacagaacaccccttcagaacagcctgcaggaaggcmccgtctcctcacaggctcacacatgcacggtgtgtgcacagagcttttgctctagttcaggaggtgtgtagggagcctcactagtccaacagagcttggt

SEQ ID NO: 8108 - DNA, 201 bp, Homo sapiens
agtctgtgtcctcagagcctgtggccaccttgcatgggatgagtggaaagatggccagagagtgggaagtgtgaaattgagagtatggaagggctggggtycttgggcatgatgaggcctaggggatgacaggggcatgagattcaggcagagagaggagaaggtcatggaggagaggagttccaggatctgagagtccag

SEQ ID NO: 8109 - DNA, 201 bp, Homo sapiens
tccataattgtgtgagccaattagcccaataaatcacctatctatctatctgtctgtctatctatctatctatctatctatctatctatctatcatcatctaacatctatctatcatctatcatctatctatctattatctatctatcatctatgtacctatgctattggttctttctttcttggtaaccttaataaatca

SEQ ID NO: 8110 - DNA, 201 bp, Homo sapiens
gattgttggaattgatgtgctaaagggtggacttcaagcctggaatgcaggcacatatgcaatgagtagtcactgatattacctcacagcatatgataaartgatagagtctgtgtcctcagagcctgtggccaccttgcatgggatgagtggaaagatggccagagagtgggaagtgtgaaattgagagtatggaagggc

SEQ ID NO: 8111 - DNA, 201 bp, Homo sapiens
gttcgatgatctttggactctgacttttgcaccagtgagcccctttatcctcctgttctgtattctgggtcctcagggctttgactttggactgagccacrctactggcttttctagttctccagcttccagacagtctatcatgggacttctcagcctccataattgtgtgagccaattagcccaataaatcacctatct

SEQ ID NO: 8112 - DNA, 201 bp, Homo sapiens
ccaggacttggggctctggcactttcttctcactgtgcgtcctccttctctggctcaaaagagaaccacatgtaacagaaaccaagggctacaattctcayagaacccagaaaactggactaggggcctagagagtcatgtgcctgccattgttccaccgcttacgtgctgtgtgacctcaggagaagctctctgctcttt

SEQ ID NO: 8113 - DNA, 201 bp, Homo sapiens
cccagctacttgggtgtctgaggtgggagggttgcttaagcctggaagattcaggctgcagtgagccatgaacaacactgcactccagccagcaagcccartctcaaaaaaataaattatagactactcaaattgtaagtattaaaccagtgtctgtgagagtttttctggaagggatgtgagtgggtggactggtgggga

SEQ ID NO: 8114 - DNA, 201 bp, Homo sapiens
atgcctgtacttccagcactttgggaggctcaggctggcagattgcttgagcccctgagtttgtgaccagcctaggcaacatagagaaaccctgtctctasaaaaaattcaaaagaattagccgggcttggtggcacatgcctgtagtcccagctacttgggtgtctgaggtgggagggttgcttaagcctggaagattca

SEQ ID NO: 8115 - DNA, 201 bp, Homo sapiens
gttttctcagtgaggtaggaaccaaggttgtcagctgagataagaatggggaaggagggttggatgtgtgagcacagagagaaggtgtgtaagggtcaccyaggccaggaggaggctgagggtgagccatgcagggagagggtgattgctggccctggtgggggctccccatgtggtttgggtcatgaagttagagaagac

SEQ ID NO: 8116 - DNA, 201 bp, Homo sapiens
agttttggggttttttttaagatggagtctcactctgtcccccaggggctggagtgcagtggcatgatctcggctcactgcaacctctgcatctcggatgmaagtgagtcttctgcctcagcccctcgagtagctgggattacagatgtgcactaccacgcctggctaattttgtgtttttaatatagatggggttacact

SEQ ID NO: 8117 - DNA, 201 bp, Homo sapiens
gaactgacacctttaagtagatgataagggatgacattttgggcaccagaagagggactggctctgatgggagcagaatggtttacccacaacagtccccracatggtaaaacacctgacatgtgttgcagctgcaaatgcatgagcagatggtgatggaatctgtcttctaatgtgttcagttttctcagtgaggtagga

SEQ ID NO: 8118 - DNA, 201 bp, Homo sapiens
tcctcccggcgcggctacccgggtcctgcgtccccgccgggcgggccccttgcttctccccgcagaggcggtttccccacgaccccgcactcacccgcccwggtctgggtcagggccagggcccccaagagtagcaggaggagggttcggggcgccatgacggccatcctcggcgtctggggagaatctgagtcccggtgg

SEQ ID NO: 8119 - DNA, 201 bp, Homo sapiens
ccataccaaaaccctaggttctcagggactcagattttcatctgtggaagaaaagaatccatctcactctctcaggtgtgatggtaattatatatattataatataatatatatatacataattataatttatatatctataaaagagataatcagtattccataaattgatgatattctcagtgttgacttcattgccca

SEQ ID NO: 8120 - DNA, 201 bp, Homo sapiens
cccataccaaaaccctaggttctcagggactcagattttcatctgtggaagaaaagaatccatctcactctctcaggtgtgatggtaattatatatattataatataatatatatatacataattataatttatatatctataaaagagataatcagtattccataaattgatgatattctcagtgttgacttcattgccc

SEQ ID NO: 8121 - DNA, 201 bp, Homo sapiens
acccataccaaaaccctaggttctcagggactcagattttcatctgtggaagaaaagaatccatctcactctctcaggtgtgatggtaattatatatattataatataatatatatatacataattataatttatatatctataaaagagataatcagtattccataaattgatgatattctcagtgttgacttcattgcc

SEQ ID NO: 8122 - DNA, 201 bp, Homo sapiens
aacccataccaaaaccctaggttctcagggactcagattttcatctgtggaagaaaagaatccatctcactctctcaggtgtgatggtaattatatatattataatataatatatatatacataattataatttatatatctataaaagagataatcagtattccataaattgatgatattctcagtgttgacttcattgc

SEQ ID NO: 8123 - DNA, 201 bp, Homo sapiens
ggctcttatggcaacttcttaaaataagacaatgaagtttgcggcatggattataaagggggaatcagtacttaagtaaggtcaatataagttttcaagtyaggtggacctgaatatgaaccctccaggcctttccaccagctagctatagagccttggacacatcttggccatagctggccctgacagacacttgcccag

SEQ ID NO: 8124 - DNA, 201 bp, Homo sapiens
cgcagacaatggtgctgaggctgtgggagatgagggaggaggagcaggggtggctctcacctgggctctgtccgtggaggtgaggacaatgaggtggttgkgtctcagtgctgtgtggaactttcttttgacctccttatgagtggatggtctgtctgagatagaacgggtcttagaggatttactcattaccctgagaga

SEQ ID NO: 8125 - DNA, 201 bp, Homo sapiens
ctgtgctctgtggcctcaccttgcctttcctgagccaatttttttgttcttagtgtagtcgctgcctggtaagtttaaaataagagacagtcagaatcatdtcccccacagtcaggttgtttgaggggagaggaaaagagcaagcagaaagttttgagtttctgcaaagacagaggcagtgcaggggacagtgagagtctg

SEQ ID NO: 8126 - DNA, 201 bp, Homo sapiens
gagtgcgagcctgggccccgggaaccggcaccttgagggctggagagggaccccgcccgctccctgtctccctgacgcgctctctccgcctccccgcgggdacccagcctcccgggctccctcctgcctaccgcccggccctggagccgcttacctgggagcttcttacggtgtagggggagctggggaggggacagaggg

SEQ ID NO: 8127 - DNA, 201 bp, Homo sapiens
tcccccacagtcaggttgtttgaggggagaggaaaagagcaagcagaaagttttgagtttctgcaaagacagaggcagtgcaggggacagtgagagtctgrggtgtccaggaaacccgagtctttctgccatttctccacttccgtgtgtctggccagtgaggtggtggtgactcatccttgaacctaattgcacagttag

SEQ ID NO: 8128 - DNA, 201 bp, Homo sapiens
tgcaagatgaaacagtttgtctgttaccttggaggggacacacctgcattcccctaaacacttggccattgttcacccataaaactttacttcaatgcccrctatctttttctttttgagatggaattttgctcttgttgcccactctggagtgcaatggcacgatcttggctcactgcaatctctgcctcctgggttcaa

SEQ ID NO: 8129 - DNA, 201 bp, Homo sapiens
acctaattgcacagttagttggccactcaggcctgggcagatgggacggttcatcccctgccctgcagcaagagggccccgtccaggaggcaaccacagcrcgggcagtgcaggtctgtggttgctcctgctctcacctgcggtgtctcctatagagggattgtcagttctggttccctgtaggcaggaaaggttttctcg

SEQ ID NO: 8130 - DNA, 201 bp, Homo sapiens
aaaaaggcatgaaaattacatgttagtttctcaaaattcctgctttaagtattggtgtccatcaacataatttcagctggataatcttaataggatttccbccaatactgatgttgtaaaggatgttgaatagaacaggaagtcaaatttggggcttcgtttctcagagggtccatgtgggagacagtgcctgtggcagtg

SEQ ID NO: 8131 - DNA, 201 bp, Homo sapiens
ggcatgaaaattacatgttagtttctcaaaattcctgctttaagtattggtgtccatcaacataatttcagctggataatcttaataggatttcccccaahactgatgttgtaaaggatgttgaatagaacaggaagtcaaatttggggcttcgtttctcagagggtccatgtgggagacagtgcctgtggcagtggcaat

SEQ ID NO: 8132 - DNA, 201 bp, Homo sapiens
aaatgcaggttatggggagggcaggctgggcctccttgagcaagggggtccccagcatcaggtcaggtgcagactccatggcagccacatatttccatgcvgggcctgtgagccccagggcttcctgataggatctctagttaggagctgtctgctcagagctgggaggggaggaacagtgagctgctggtggagggcaga

SEQ ID NO: 8133 - DNA, 201 bp, Homo sapiens
caccaatgccactgaggatgtcagagcacaggagcacggccttggaggattacccaggagtgtgactcaaaccttctgccctgatgggtctgggcccttgraaatcaaatcctctcaggctgaattgctggataattctactctcacttgcaatggggtgagggaaaacagaaggcccccaggtggatctctggtttccac

SEQ ID NO: 8134 - DNA, 201 bp, Homo sapiens
tagtgtcactggtgtgacccatcactggttgggaatagtccatgggaagcagggcctcagcaccaatgccactgaggatgtcagagcacaggagcacggchttggaggattacccaggagtgtgactcaaaccttctgccctgatgggtctgggcccttggaaatcaaatcctctcaggctgaattgctggataattctac

SEQ ID NO: 8135 - DNA, 201 bp, Homo sapiens
gggaagagggtcatggtggacatgggggtgggttggtctccccacctcctcatattatgcctacaggaacacaggcacattcaggtgcctttgcagaaagwgagtcagggtttttgaagtcacaaagggaaggcgtgaacaaatcttgcctctcagtcccacacaaggcagctgtctcacactataaaataaaatattcat

SEQ ID NO: 8136 - DNA, 201 bp, Homo sapiens
aaaagtgccatgggagggagaaaaaagtggggacgtcatcttccgtcagagaaagggtaaatctgatttgggagtgactgaggagggagaactcctcaggraataaaaagcagcactctgcacccaggggagcatttattggtttctctcttttttccagagcgcgtgagcctgcaaggcctgggtcaacacctggttggg

SEQ ID NO: 8137 - DNA, 201 bp, Homo sapiens
ttctaaaacatgggtttttatctgagaatcttcctgttcccagatgatcaaaactggggccatccattccattctgagccacttctgcccaggggcccatkgctatttcctccagtcacaacagaacaccccttcagaacagcctgcaggaaggcaccgtctcctcacaggctcacacatgcacggtgtgtgcacagagct

SEQ ID NO: 8138 - DNA, 201 bp, Homo sapiens
ccttagtgtcactggtgtgacccatcactggttgggaatagtccatgggaagcagggcctcagcaccaatgccactgaggatgtcagagcacaggagcacrgccttggaggattacccaggagtgtgactcaaaccttctgccctgatgggtctgggcccttggaaatcaaatcctctcaggctgaattgctggataattc

SEQ ID NO: 8139 - DNA, 201 bp, Homo sapiens
tcctgccttagtgtcactggtgtgacccatcactggttgggaatagtccatgggaagcagggcctcagcaccaatgccactgaggatgtcagagcacaggrgcacggccttggaggattacccaggagtgtgactcaaaccttctgccctgatgggtctgggcccttggaaatcaaatcctctcaggctgaattgctggat

SEQ ID NO: 8140 - DNA, 201 bp, Homo sapiens
gttcgctcggtcagtctgtgactgggccttcacattccgtgtctgcaggtcccaatactccggcccctcctgctctatccacggtgcccgcggctccatcytctggctcgcggcgtcgctgtcaaaccgcacgaactgcgtgtcgtccacgtagcccacggcgatgaagcggggctccccgcggccgggccgggacacgga

SEQ ID NO: 8141 - DNA, 201 bp, Homo sapiens
cagtcaggttgtttgaagggaggggaaaagagcaagcagcaagttttgtgtttctgcaaagacagagacagtgcaggagacactgagagcctggagtgtcygggaaacccgagtctttctgccatttccccacttctgtgtatctggcagggggtggtgatttctcatccttgaacctaattgcactgtcagttggcccct

SEQ ID NO: 8142 - DNA, 201 bp, Homo sapiens
gaataagatgcaagtgtgacccccagtgatggaaagaaggaaggaaggattacttaacatgtcctagaccacaggcaatctaaggagagttgagcaaggchatggaggagtcctccagccacagctggccatcagaggagtcccctgtcttccaggaatgtcctgccttagtgtcactggtgtgacccatcactggttggg

SEQ ID NO: 8143 - DNA, 201 bp, Homo sapiens
gttgatgataaagagaaaaaaaggtattaattgatgaactgacacctttaagtagatgataagggatgacattttgggcaccagaagagggactggctctratgggagcagaatggtttacccacaacagtccccaacatggtaaaacacctgacatgtgttgcagctgcaaatgcatgagcagatggtgatggaatctgt

SEQ ID NO: 8144 - DNA, 201 bp, Homo sapiens
ggaaaaaggttgatgataaagagaaaaaaaggtattaattgatgaactgacacctttaagtagatgataagggatgacattttgggcaccagaagagggaytggctctgatgggagcagaatggtttacccacaacagtccccaacatggtaaaacacctgacatgtgttgcagctgcaaatgcatgagcagatggtgatg

SEQ ID NO: 8145 - DNA, 201 bp, Homo sapiens
cgaaaatgattttgtagtccaaatgctccaaaaagcaagtgccatcataggattaaagttacagcattttattaggggacacacctgtcagacgatatggkgagggaggtaggttaccctgggaaaggcaatagaataagatgcaagtgtgacccccagtgatggaaagaaggaaggaaggattacttaacatgtcctaga

SEQ ID NO: 8146 - DNA, 201 bp, Homo sapiens
ccaccccacatccttcagctctctcatggtgatgtgacccccacagtactttcagtgccttccacaagacacatgaggttgcctggttgctgtggtgcccrctttccaccccaccctcccgtacccccatgtcactttcattgtgtcctgaataacagtttcaagtttgtctatggcttctgcgaggagccaggacatcca

SEQ ID NO: 8147 - DNA, 201 bp, Homo sapiens
attggttgtgggttgtttaaacttatactgtgtagttttacatatctgtaacagcagtagtttgggcctcttatattctaataattaagactttcagctgwgtacacactgtaattcaagcacgagtcatgcataaccctagcactaagagacaagaggggaatccctctctctgaaaattttgcaaaattctgggttctt

SEQ ID NO: 8148 - DNA, 201 bp, Homo sapiens
tgatccagtggggagagaggaaaaaggttgatgataaagagaaaaaaaggtattaattgatgaactgacacctttaagtagatgataagggatgacatttkgggcaccagaagagggactggctctgatgggagcagaatggtttacccacaacagtccccaacatggtaaaacacctgacatgtgttgcagctgcaaatg

SEQ ID NO: 8149 - DNA, 201 bp, Homo sapiens
aacaaaaagattttacacgttggaataagtaagaggtcactggtgtgcagacgaaaatgattttgtagtccaaatgctccaaaaagcaagtgccatcatargattaaagttacagcattttattaggggacacacctgtcagacgatatggtgagggaggtaggttaccctgggaaaggcaatagaataagatgcaagtgt

SEQ ID NO: 8150 - DNA, 201 bp, Homo sapiens
acaatgatccagtggggagagaggaaaaaggttgatgataaagagaaaaaaaggtattaattgatgaactgacacctttaagtagatgataagggatgacrttttgggcaccagaagagggactggctctgatgggagcagaatggtttacccacaacagtccccaacatggtaaaacacctgacatgtgttgcagctgca

SEQ ID NO: 8151 - DNA, 201 bp, Homo sapiens
aaacaaaaagattttacacgttggaataagtaagaggtcactggtgtgcagacgaaaatgattttgtagtccaaatgctccaaaaagcaagtgccatcatrggattaaagttacagcattttattaggggacacacctgtcagacgatatggtgagggaggtaggttaccctgggaaaggcaatagaataagatgcaagtg

SEQ ID NO: 8152 - DNA, 201 bp, Homo sapiens
gaacccataccaaaaccctaggttctcagggactcagattttcatctgtggaagaaaagaatccatctcactctctcaggtgtgatggtaattatatatattataatataatatatatatacataattataatttatatatctataaaagagataatcagtattccataaattgatgatattctcagtgttgacttcattg

SEQ ID NO: 8153 - DNA, 201 bp, Homo sapiens
acaggattgactcatgaccctgagggatgtgctcactccaggtctcaggtctgtcctgacacctttatttgtggcttagagctccctactgtaaattattrggagttagttcattttggagtttataacttaaagcagaaattcagatggttgaaatgtcattttcatgaaggtttgttattagtgtatcatttagattgt

SEQ ID NO: 8154 - DNA, 201 bp, Homo sapiens
cacaatgatccagtggggagagaggaaaaaggttgatgataaagagaaaaaaaggtattaattgatgaactgacacctttaagtagatgataagggatgayattttgggcaccagaagagggactggctctgatgggagcagaatggtttacccacaacagtccccaacatggtaaaacacctgacatgtgttgcagctgc

SEQ ID NO: 8155 - DNA, 201 bp, Homo sapiens
aagtgaaggaagccagtcacaggaggctacgtaacttatgagcccatttttgtgaaatattcataagaggcaagtcgatagagaaagaagtggatttgtgrcgacagggtctgctggcaggtggaaatggagggtgactgcttaatgggtgcagagttccccctgaggtgataaaaacactctggaactagagagtgatga

SEQ ID NO: 8156 - DNA, 201 bp, Homo sapiens
gccactatcaattctgcttactctagctgaggggctgggatgtgcattctcatgactgccacaatgatccagtggggagagaggaaaaaggttgatgataragagaaaaaaaggtattaattgatgaactgacacctttaagtagatgataagggatgacattttgggcaccagaagagggactggctctgatgggagcag

SEQ ID NO: 8157 - DNA, 201 bp, Homo sapiens
tctccttcagaaatgatggagaaatcacgacattcacaggttaaaaaaagctgactgagattgtctcaaccctacaagacatatatatatacacacacacmtatatatatttgtaattcctctcttgtttttcctatttgatttaaaagaaaatgtccatcgaccaatgaatggagaaacaacatatagttttttcctaca

SEQ ID NO: 8158 - DNA, 201 bp, Homo sapiens
atcttgaaagcaataacagagaaggaacttttcaggtacaatggatcctcaataagattaacatacaaattttcatcagaaaccatggggttcaggaggcrttgggatgacaaatttaaagctgagaaagtaaaaggactatcaaccaagaattgtatgtctgcaaaactctccttcagaaatgatggagaaatcacgaca

SEQ ID NO: 8159 - DNA, 201 bp, Homo sapiens
tgcaattaaactagacagtaagacccattctcaagaaaaaagaggaattgacagaaactgttcctgagaaaggccattgaacatacttactggacaaacaactttgaattgactgcttaaatatgttcacagagctaaaggaaactatgggcaaaaaactaaaggaaatcagaagaactatcttaactcaaatagagaaca

SEQ ID NO: 8160 - DNA, 201 bp, Homo sapiens
gaactctcttaggtcacagaggcagagggcatctgctaaaaccatttaagtgccactgaaccagcagctgcccccttggggcaaaaatatattacatgagraaggtaatagacatacagaaaagcctggaggagaaactgggtgagtgagatgggaatatgggttttgaaaagcttccatatccctgggaatctgtatagc

SEQ ID NO: 8161 - DNA, 201 bp, Homo sapiens
ctactaaatatacaaaattagctgggtgtggtggctcgcgcctgtagtcccagctactcgggaggtgaggaaggagaatcgcttgaacccgggaggcagakgttgcagttagccgggatcatgccattgcactccaccctgggcaacaagagcaaaactccatcaaaaaaaaaaaaaaaaaaattccctcggagagctgtt

SEQ ID NO: 8162 - DNA, 201 bp, Homo sapiens
tcgagaccagactgatcaacatggagaatcccagtctctactaaatatacaaaattagctgggtgtggtggctcgcgcctgtagtcccagctactcgggargtgaggaaggagaatcgcttgaacccgggaggcagaggttgcagttagccgggatcatgccattgcactccaccctgggcaacaagagcaaaactccatc

SEQ ID NO: 8163 - DNA, 201 bp, Homo sapiens
atcctctggctcgcggcgtcgctgtcaaaccgcacgaactgcgtgtcgtccacgtagcccacggcgatgaagcggggctccccgcggccgggccgggacayggatgtggtgaaatacctcatggagtgggagcctgggggcgaggagtggctgagacccacccgaccctcctcccggcgcggctacccgggtcctgcgtcc

SEQ ID NO: 8164 - DNA, 201 bp, Homo sapiens
cacaggctaaactaattcagattggctaatttaaagagagtgaaacaggtgatcagaatgagtcagggtggtgcaggtaactggaatgagtcaggctgggrcaagtaatcaggatgagtcagggtggagcaggtaatcagaatgagtcagggtggagcaggtgactggaatgagtcagggtggagcaggtaaccagaatga

SEQ ID NO: 8165 - DNA, 201 bp, Homo sapiens
ttattcccctattggctagggttagaccgcacaggctaaactaattcagattggctaatttaaagagagtgaaacaggtgatcagaatgagtcagggtggwgcaggtaactggaatgagtcaggctggggcaagtaatcaggatgagtcagggtggagcaggtaatcagaatgagtcagggtggagcaggtgactggaatg

SEQ ID NO: 8166 - DNA, 201 bp, Homo sapiens
gggaagtaagaagttacagctcagtgcacataaagttgagacagagatggagacatctcagcctcacctctatggagcaggaatgattaattattggagasggaacacaggtcagcatgagggaagagggtcatggtggacatgggggtgggttggtctccccacctcctcatattatgcctacaggaacacaggcacatt

SEQ ID NO: 8167 - DNA, 201 bp, Homo sapiens
ttatgaacatgagtgatgttaacatttttgtcaactgtttcttctgcatcttttgagataattatgtctttttttccattaatacagtgcattccatgaaytgattttcaaatgttaatccaaccatatgttcctgggatgaatcccattggtcatggagtgtaatccttttttatgtggctttgtattatctgccaatgt

SEQ ID NO: 8168 - DNA, 201 bp, Homo sapiens
atggggtatttgcagctgtgccatattatttttgttattttgttattttattatattttgatatattacatatgcagtaattgtattattataggtgagcwttatgagtgagtgtcctgctgatggctccttggtcctggcccagcaccagctttcctggcaccttgaggtcctgtcatctctgtcatgctctcctgcatt

SEQ ID NO: 8169 - DNA, 201 bp, Homo sapiens
ttatagatgccctttatcagagtgaagaaggtctcctccattcctattttgttgaaacttatgaacatgagtgatgttaacatttttgtcaactgtttctyctgcatcttttgagataattatgtctttttttccattaatacagtgcattccatgaattgattttcaaatgttaatccaaccatatgttcctgggatgaa

SEQ ID NO: 8170 - DNA, 201 bp, Homo sapiens
tctgggaagggatagtgtgaggttcaggagagaaggagaggtctgtctccatgctttgacacagcataaagaaacctcccctcctcccccacatctccccrccagttctcagtgagggacagattcacagcaacaccgaaagggctgggaagggatggggggacatttgcagccagtgttcaggggctgaccctgtggggc

SEQ ID NO: 8171 - DNA, 201 bp, Homo sapiens
gcagggatgggagccttctgtgcagccagagtggatgcaggacctgcctggatgcaagagaaggatgagggaccctagctgggtcctgttccctgactccbtgtgttcacagggcaaccagtaagggagctggggtagggaattcattcataagctatctatctagagatgtgtttatagacatattatttcatgtttgta

SEQ ID NO: 8172 - DNA, 201 bp, Homo sapiens
tacatgttcttcatcacagatgtaatttgtgataaattgtgaaatattttctctcaatctacggcttgtcttctcattttctcaatattgtcttttggagyacttaagttttaaattttaactaagcccaatttgtctctcacttttttttcatctgtagatcatgttttttgtattttatgtaagaatcttttgcctaac

SEQ ID NO: 8173 - DNA, 201 bp, Homo sapiens
tcactttcattgtgtcctgaataacagtttcaagtttgtctatggcttctgcgaggagccaggacatccagatagaatgggccacatgaatcaattggtaygtgtttctcctttcaggcagagtctcactcacttcacacaagcacagagatccccatataggcaactagattatgagaaacaaacgcacccatccaaacc

SEQ ID NO: 8174 - DNA, 201 bp, Homo sapiens
agttgaataaacaaaaagattttacacgttggaataagtaagaggtcactggtgtgcagacgaaaatgattttgtagtccaaatgctccaaaaagcaagtrccatcataggattaaagttacagcattttattaggggacacacctgtcagacgatatggtgagggaggtaggttaccctgggaaaggcaatagaataaga

SEQ ID NO: 8175 - DNA, 201 bp, Homo sapiens
tgcaggtagaagaagttgaataaacaaaaagattttacacgttggaataagtaagaggtcactggtgtgcagacgaaaatgattttgtagtccaaatgcthcaaaaagcaagtgccatcataggattaaagttacagcattttattaggggacacacctgtcagacgatatggtgagggaggtaggttaccctgggaaagg

SEQ ID NO: 8176 - DNA, 201 bp, Homo sapiens
tgctgtgtaaaacactacccccaaatttagtgacttacagcaacaaacattggtgaactcaaaaacataatacaaataccagcaaaatggagccaatgcargtagaagaagttgaataaacaaaaagattttacacgttggaataagtaagaggtcactggtgtgcagacgaaaatgattttgtagtccaaatgctccaaa

SEQ ID NO: 8177 - DNA, 201 bp, Homo sapiens
aatattatcaaaataggaggaaataaaatagacgtagttaacctctatcgaataacggaaatgtaagaaggcttcattagttatctgttgctgtgtaaaamactacccccaaatttagtgacttacagcaacaaacattggtgaactcaaaaacataatacaaataccagcaaaatggagccaatgcaggtagaagaagtt

SEQ ID NO: 8178 - DNA, 201 bp, Homo sapiens
gccccagaaccatcagagtgatccagtctgcccactcttcttattattctgtctctccaatcactctccctgagctggactctccacccaccctcacattytggatagtgcagagatgtgagcatggccctggggcaggattgtctgcgtgcaagcccagctccaccacgacttgtaggcgaccttctttcctattgtatc

SEQ ID NO: 8179 - DNA, 201 bp, Homo sapiens
ggaaactcccccatgtgggaggacttcggagggggtcatgtcctcagggagacccaggttgctgctggagctgcgagatgcaggaacatcctgagagaggmtgaggaggttttgctgatgtggactgagaaatccagggggtgcactgggaagatttctgtggctggggaggtcggggagacagaatagaggtgtgcagag

SEQ ID NO: 8180 - DNA, 201 bp, Homo sapiens
tgggaactggaaaccctctgtatggctaatattatcaaaataggaggaaataaaatagacgtagttaacctctatcgaataacggaaatgtaagaaggctdcattagttatctgttgctgtgtaaaacactacccccaaatttagtgacttacagcaacaaacattggtgaactcaaaaacataatacaaataccagcaaa

SEQ ID NO: 8181 - DNA, 201 bp, Homo sapiens
aaagaaaagaataggcgttgggaactggaaaccctctgtatggctaatattatcaaaataggaggaaataaaatagacgtagttaacctctatcgaataamggaaatgtaagaaggcttcattagttatctgttgctgtgtaaaacactacccccaaatttagtgacttacagcaacaaacattggtgaactcaaaaacat

SEQ ID NO: 8182 - DNA, 201 bp, Homo sapiens
tccctattttaaggtccttaatcttcattacatgagtaatatcccttttgccacgcaatgcaacctgttcacaggttccaacgattaagactggacatcthtggggaccattactcagcccaccacatctgcgtatgttgaagtcaccaagagtcaaggagacagcaatgctggagagggtgacagtgaaccaggagctac

SEQ ID NO: 8183 - DNA, 201 bp, Homo sapiens
ctaaaataaagaaaagaataggcgttgggaactggaaaccctctgtatggctaatattatcaaaataggaggaaataaaatagacgtagttaacctctatmgaataacggaaatgtaagaaggcttcattagttatctgttgctgtgtaaaacactacccccaaatttagtgacttacagcaacaaacattggtgaactca

SEQ ID NO: 8184 - DNA, 201 bp, Homo sapiens
caaaggagaaaagaaactaaaataaagaaaagaataggcgttgggaactggaaaccctctgtatggctaatattatcaaaataggaggaaataaaatagamgtagttaacctctatcgaataacggaaatgtaagaaggcttcattagttatctgttgctgtgtaaaacactacccccaaatttagtgacttacagcaaca

SEQ ID NO: 8185 - DNA, 201 bp, Homo sapiens
aggaagccctagagcttcagtcagccttcagagaagaaatgttcctgccttagtttctgccctgctttcctcagtcattggcaggaaaagacagggggcakgtgtggtctcagagcaaatgtggcaataggtttcaggattcaaaagttgaggccactatcaattctgcttactctagctgaggggctgggatgtgcattc

SEQ ID NO: 8186 - DNA, 201 bp, Homo sapiens
caaggcaattacttctatacaagggtgtgccctcacagatggagcaatggtgagcacacccctggacaaggaaggggaaggggttcttatccctgatgcaygtggcccctgctgctgtgttattcccctattggctagggttagaccgcacaggctaaactaattcagattggctaatttaaagagagtgaaacaggtgat

SEQ ID NO: 8187 - DNA, 201 bp, Homo sapiens
aaagaaatagcactcaaatataaaattttctttttttcttctcagcaaggcaattacttctatacaagggtgtgccctcacagatggagcaatggtgagcrcacccctggacaaggaaggggaaggggttcttatccctgatgcacgtggcccctgctgctgtgttattcccctattggctagggttagaccgcacaggct

SEQ ID NO: 8188 - DNA, 201 bp, Homo sapiens
cttaaaaggatttccaccaatactaatgttgtaacctatatcaaatgaaacaggaactcaaatgtggagctccctctccaggacggtccatgtgggagacrgtggctgtggcagtggcaatccccaagtgcaaagggtgggcagaggcagcctcaggctgaggggtctcaagaaactttctactccacagggagaagaaga

SEQ ID NO: 8189 - DNA, 201 bp, Homo sapiens
ttttgcctgttttcatggatcacccttcatactacttgtgttagttagggtcccctgaggagcggaccccaatacagtattcaatgtgcaaggatttattrgaggaaatagttatgagagaaattcaggacacagacggaaaatgctgggaatgtcatcagaccacaaagcaactctgagccccagtgaggtaaacagtgc

SEQ ID NO: 8190 - DNA, 201 bp, Homo sapiens
ggccggggtcactcaccggcctcgctctggttgtagtagccgcgcagggtccccaggttcgctcggtcagtctgtgactgggccttcacattccgtgtctbcaggtcccaatactccggcccctcctgctctatccacggtgcccgcggctccatcctctggctcgcggcgtcgctgtcaaaccgcacgaactgcgtgtcg

SEQ ID NO: 8191 - DNA, 201 bp, Homo sapiens
gggccgcctcccacttgcgctgggtgatctgagccgccatgtccgccgcggtccaagagcgcaggtcctcgttcaaggcgatgtaatccttgccgtcgtargcgtcctgccggtacccgcggaggaagcgcccgtccgaccccacgtcgcagccatacatcatctggatggtgtgagaacctggccccgaccccacggtca

SEQ ID NO: 8192 - DNA, 201 bp, Homo sapiens
gggccttcacattccgtgtctgcaggtcccaatactccggcccctcctgctctatccacggtgcccgcggctccatcctctggctcgcggcgtcgctgtcraaccgcacgaactgcgtgtcgtccacgtagcccacggcgatgaagcggggctccccgcggccgggccgggacacggatgtggtgaaatacctcatggagt

SEQ ID NO: 8193 - DNA, 201 bp, Homo sapiens
accccccatccttcagctctctaatggcagtgccacccctacaatacctgcagtaccctcctgaagtcccacctggggcgcaatattgcttctggcttggytgggatgagggaagttttagatgattccctttgggcttcagcacaatgatagcccttactctccagactagggatgtagtgtgggggtgactccctttgc

SEQ ID NO: 8194 - DNA, 201 bp, Homo sapiens
gtgactgctgggatcaggtcccatcaccacagtcatcaaggtgataaatctgtccctcattgtaacaggtgctttacaaaagagtaagtgctggcacacasggcccaggctgggtaggcccatgagtgtggatggtgcttcccagtaaccaggcagggcacttctacctggggcttggaactctcagtgagacaagaaatc

SEQ ID NO: 8195 - DNA, 201 bp, Homo sapiens
ggattgtctgcgtgcaagcccagctccaccacgacttgtaggcgaccttctttcctattgtatcacctgaaaacggaaaattagcaggcacaccccatagwtgtatagtgacaattaaatgaattcatattttgaaagtgctaaggacacagattaacacatagcaccatgacagtgtatgatattatcgctgttggtttt

SEQ ID NO: 8196 - DNA, 201 bp, Homo sapiens
tctgcgtgcaagcccagctccaccacgacttgtaggcgaccttctttcctattgtatcacctgaaaacggaaaattagcaggcacaccccatagttgtatmgtgacaattaaatgaattcatattttgaaagtgctaaggacacagattaacacatagcaccatgacagtgtatgatattatcgctgttggtttttttttt

SEQ ID NO: 8197 - DNA, 201 bp, Homo sapiens
tggtggaatcactggattggtattcccagggtgggggtcgaaggattgttggaattgatgtgctaaagggtggacttcaagcctggaatgcaggcacataygcaatgagtagtcactgatattacctcacagcatatgataaaatgatagagtctgtgtcctcagagcctgtggccaccttgcatgggatgagtggaaaga

SEQ ID NO: 8198 - DNA, 201 bp, Homo sapiens
cagggagagggtgattgctggccctggtgggggctccccatgtggtttgggtcatgaagttagagaagacaccaacgatgagggacagtgagtagatggtrgaatcactggattggtattcccagggtgggggtcgaaggattgttggaattgatgtgctaaagggtggacttcaagcctggaatgcaggcacatatgcaa

SEQ ID NO: 8199 - DNA, 201 bp, Homo sapiens
actctgttaataacttcctgttgtttacttgtttctcatataccatggtattatacttttgacatatagattcagaaaatgcttactgataacacaatcamgtaggggttatttaatatgttaggaaaatttcataataaaaaggaaaaaatggaggaagggagagaaagaaggaggaattgaggaaggagtgaaagaaga

SEQ ID NO: 8200 - DNA, 201 bp, Homo sapiens
tttattcagactctgttaataacttcctgttgtttacttgtttctcatataccatggtattatacttttgacatatagattcagaaaatgcttactgatarcacaatcacgtaggggttatttaatatgttaggaaaatttcataataaaaaggaaaaaatggaggaagggagagaaagaaggaggaattgaggaaggagt

SEQ ID NO: 8201 - DNA, 201 bp, Homo sapiens
tagcaggcatttttattcagactctgttaataacttcctgttgtttacttgtttctcatataccatggtattatacttttgacatatagattcagaaaatrcttactgataacacaatcacgtaggggttatttaatatgttaggaaaatttcataataaaaaggaaaaaatggaggaagggagagaaagaaggaggaatt

SEQ ID NO: 8202 - DNA, 201 bp, Homo sapiens
ccttgttaagagccacccttagctcctagagccttctctcagatactcacacacggtgcctaaggcacattcaatcctcctgcttggaacttctgacctcycctctccagcttctcctctgccttcctcctctgcagaatctgactccaaccagggcaggctctctgcttttaatggctcttgtgatttgattgggcccac

SEQ ID NO: 8203 - DNA, 201 bp, Homo sapiens
ttgaaggaattgagttaaaagccactgtcttggctgcagaattatagcaggcatttttattcagactctgttaataacttcctgttgtttacttgtttctbatataccatggtattatacttttgacatatagattcagaaaatgcttactgataacacaatcacgtaggggttatttaatatgttaggaaaatttcataa

SEQ ID NO: 8204 - DNA, 201 bp, Homo sapiens
acttaaactcatgtgttctgaaaacacctagttgaaggaattgagttaaaagccactgtcttggctgcagaattatagcaggcatttttattcagactctrttaataacttcctgttgtttacttgtttctcatataccatggtattatacttttgacatatagattcagaaaatgcttactgataacacaatcacgtagg

SEQ ID NO: 8205 - DNA, 201 bp, Homo sapiens
gacgatatgttgtatggactttaaccatactagataatgataatatgatttccaaggtgattgtgtcaacttaaactcatgtgttctgaaaacacctagtygaaggaattgagttaaaagccactgtcttggctgcagaattatagcaggcatttttattcagactctgttaataacttcctgttgtttacttgtttctca

SEQ ID NO: 8206 - DNA, 201 bp, Homo sapiens
gctgattccagtttttgccataaacatcagtgtgcctgtctcctgggcacataggcaagaaagcccgctagagtgtatggttaggagtgggagggttggamgatatgttgtatggactttaaccatactagataatgataatatgatttccaaggtgattgtgtcaacttaaactcatgtgttctgaaaacacctagttga

SEQ ID NO: 8207 - DNA, 201 bp, Homo sapiens
acagcatatgataaaatgatagtatctgtgtcctcagagcctgtggccaccttgcaaggggatgagtggaaagatggtcagagagtgggaagtgtgagatwgagagtatggaagggctggggttcttagccatgatgaggcctaggggataacaagggcatgagattcaggcagacaggagaagatcatggaggagaggag

SEQ ID NO: 8208 - DNA, 201 bp, Homo sapiens
gcagggagagggtgattgctggccctggtgggggctccccatgtggtttgggtcatgaagttagagaagacaccaacgatgagggacagtgagtagatggyggaatcactggattggtattcccagggtgggggtcgaaggattgttggaattgatgtgctaaagggtggacttcaagcctggaatgcaggcacatatgca

SEQ ID NO: 8209 - DNA, 201 bp, Homo sapiens
tggctagctgccagagacacatacctgtgatgcgagggttatctttttccattttgtgttgctataaagaaatgtctgagactgactaatttatataaacraggttcatgtggctcaagattctgatgtctggaaatgtttgcgcatttagtgagggcctcaggctgcttccactcatggcagaagacaaaggggagctgg

SEQ ID NO: 8210 - DNA, 201 bp, Homo sapiens
agcctgagagtagctccctccttttcaatctgtgggaagaaaatgtcctgtgagaggccagaaaggtggcagggccatgaggtcctagaggaacctcctartcttggaccctcgagaagtttccagaaatgtgtgactgcagactcagggcgggatcaggaaaaacaaggaaagcagatgtgggtcctcgaccaactgccc

SEQ ID NO: 8211 - DNA, 201 bp, Homo sapiens
gcagaaagagaaaacagaggcccttgaagtctcaaagtggagccatgaacaaatcttgcatctcagtccctcacaaggcagtcttggaaagaaaatagtcrtgaacaaattcaagtcagtcatggtaagtggtgacactgaacagcccaccacacattgaaaaattccaaatcaaagactctctagagcctagttgtgtcc

SEQ ID NO: 8212 - DNA, 201 bp, Homo sapiens
cagttggccatcagaggagtccctggtctcccaggaatgtcctgctttcgtgtcactggtgtgatctgtcactggttgggaacagcccattggaagcaggrcctcagcaccaatgctactgaggatgtcagagcacaggagcagggccttgggagattacccagcattactcaaaccttctgccctgacgggtctgggtcc

SEQ ID NO: 8213 - DNA, 201 bp, Homo sapiens
ggttgctggattacgtagagacaatagacagccccaacaccatcccacatccttcagctctgtaatggtgatgtgatccccacaatacttgaagtatcttmcacaagacccaccctgggacacactatgatttttgatttggccaggatgggggcagtgtcagaggtttccctttggctttcagcacaatgaaagtcctta

SEQ ID NO: 8214 - DNA, 201 bp, Homo sapiens
tgaggccatcatagaatcagcctagcaagggctggatcttctttttgtgttcacttgggacacagttgcaaattgaagttcaagtaaagtaatcattgtgracggtaataaaatacatccttttcagccacgaaaattctccttaccttttaaaactaagttacatatttatatcttttaattaatttaggccagatttgg

SEQ ID NO: 8215 - DNA, 201 bp, Homo sapiens
ttcaatgtgcaaggatttattagaggaaatagttatgagagaaattcaggacacagacggaaaatgctgggaatgtcatcagaccacaaagcaactctgarccccagtgaggtaaacagtgcaggaaggtcagctggaagcatcctagaccctgtgcaggctaacagaagttcagtaagcgtggcaggaagccctagagct

SEQ ID NO: 8216 - DNA, 201 bp, Homo sapiens
ctgccaggcagtgggcaagcttttttcaaattctcatttttgcctgttttcatggatcacccttcatactacttgtgttagttagggtcccctgaggagcrgaccccaatacagtattcaatgtgcaaggatttattagaggaaatagttatgagagaaattcaggacacagacggaaaatgctgggaatgtcatcagacc

SEQ ID NO: 8217 - DNA, 201 bp, Homo sapiens
caccatgccccgccgttgttgctatttctttcatcctttttgcttgagcctcttctcttctttctaggttcccagggaaattctctgttggaagattatgbctgcaagaggcctccacctgggaaatgctggcccatggggggatctcccttttattaaatggaatgattgttggtgaagtgacagctagtgagccagtga

SEQ ID NO: 8218 - DNA, 201 bp, Homo sapiens
atatttcctattgatgtatatgtggctgattccagtttttgccataaacatcagtgtgcctgtctcctgggcacataggcaagaaagcccgctagagtgtrtggttaggagtgggagggttggacgatatgttgtatggactttaaccatactagataatgataatatgatttccaaggtgattgtgtcaacttaaactca

SEQ ID NO: 8219 - DNA, 201 bp, Homo sapiens
ttttcactgctgaaggtttacattttatgccacaatttcctattgatgtatatttcctattgatgtatatgtggctgattccagtttttgccataaacatmagtgtgcctgtctcctgggcacataggcaagaaagcccgctagagtgtatggttaggagtgggagggttggacgatatgttgtatggactttaaccatac

SEQ ID NO: 8220 - DNA, 201 bp, Homo sapiens
cctaattttgaatgaccgaatgagacttggataatatgccaatgcttctttactgttataatccttttcgtatgaaaaatatgtggtcaaagaaaaggggrtaatatgagttatcacaaaaacatttagttttgtccctggtttctcctaaaaaccttagaatctcttgagtgattagagtgtctttagaatactgaggaa

SEQ ID NO: 8221 - DNA, 201 bp, Homo sapiens
gatattacatcacagcatatgataaaatgatagtatctgtgtcctcagagcctgtggccaccttgcaaggggatgagtggaaagatggtcagagagtgggwagtgtgagatagagagtatggaagggctggggttcttagccatgatgaggcctaggggataacaagggcatgagattcaggcagacaggagaagatcatg

SEQ ID NO: 8222 - DNA, 201 bp, Homo sapiens
tgtgtgtgtatatatatatatatatacacacatatatatccaaaaaaaattatttacttctgctggtttttaagcttcctgtacagcaaattcctactgcrtttattttcccatgatgcacattacgtacaggagttatctgtggtgtgggaggctgtcattcattcattttcactgctgaaggtttacattttatgccac

SEQ ID NO: 8223 - DNA, 201 bp, Homo sapiens
caatgcttctttactgttataatccttttcgtatgaaaaatatgtggtcaaagaaaagggggtaatatgagttatcacaaaaacatttagttttgtccctsgtttctcctaaaaaccttagaatctcttgagtgattagagtgtctttagaatactgaggaaaggactcttggctgagtggatcctggataccttgagaat

SEQ ID NO: 8224 - DNA, 201 bp, Homo sapiens
gggtgagggacagtgagtagatggcaggatcactggattgggaatcccaggagggtggaacgattgttggaattgatgtactacagggtagactccaagcrtggaaagcaagcacatatgcaatgagtggtccactgatattacatcacagcatatgataaaatgatagtatctgtgtcctcagagcctgtggccaccttg

SEQ ID NO: 8225 - DNA, 201 bp, Homo sapiens
gtcttctaatgtgttcagttttctcagtgaagtgggaagcaaggtcatcagctgaagtaagaatggggaaggcaggttggatgtgtgagcacaaagaaaargtgtgtaagagtcacccaggccaggaggaggctgagggtgagccatgcagggagagggtgattgctggccatggtagggacttcctatgtggtttggaat

SEQ ID NO: 8226 - DNA, 201 bp, Homo sapiens
gacatgtggtgcagctgcaaatgcatgagcagacagtggtggaatctgtgaagttgtcttctaatgtgttcagttttctcagtgaagtgggaagcaaggthatcagctgaagtaagaatggggaaggcaggttggatgtgtgagcacaaagaaaaagtgtgtaagagtcacccaggccaggaggaggctgagggtgagcca

SEQ ID NO: 8227 - DNA, 201 bp, Homo sapiens
tcttgttaaggatccttgcaatgaactttggtattcttttctctttcatttttataaataccaggtatattttaatttgaaaactctgtttaacaaattayaatcatgtaactaaaaagatgcccagcactggtgtaaaacacaaacctgtaaagctcccctgggctgctgcccagtcacatcccccagagagagactcca

SEQ ID NO: 8228 - DNA, 201 bp, Homo sapiens
tggggccatcatcaattctgcttcttctagatgaggggctgggatgtgcattctcatgactgccacaatgatccagtggggagagaggaaaaaggttgacrataaagataaaaatggtattaattgatgaactgacacctttaagtagatgataagggatggcaattggggcaccagaagagggtctggctctggctggga

SEQ ID NO: 8229 - DNA, 201 bp, Homo sapiens
aatacagtagtaaacatgtaaggatttattaggggaaatacttgtgagagaaattcatgagacagaaaatgctgggaaagccactggaccacaaagcaackctgagcctcagtgatgtagagagtgcaggaaggtcagctggaagcatcctagaccctgtgcaggctaagggaagttcagtaagggtggcagggagccctg

SEQ ID NO: 8230 - DNA, 201 bp, Homo sapiens
cacttgtgttagttagggtcccctgagaagcggaccccaatacagtagtaaacatgtaaggatttattaggggaaatacttgtgagagaaattcatgagahagaaaatgctgggaaagccactggaccacaaagcaactctgagcctcagtgatgtagagagtgcaggaaggtcagctggaagcatcctagaccctgtgca

SEQ ID NO: 8231 - DNA, 201 bp, Homo sapiens
ggactttctgtgtctgccaccaacccgggtggcatcctcttggcctgccaggcagtgggaagcttatttcaaattcccatttttgcctgttttcatggatsacccttcatgccacttgtgttagttagggtcccctgagaagcggaccccaatacagtagtaaacatgtaaggatttattaggggaaatacttgtgagaga

SEQ ID NO: 8232 - DNA, 201 bp, Homo sapiens
ggaaagaggtttaattgactcacagttctgcatggctgaggagcctgccccaggaaacttacagtcatgacagaagtggaagcaaacacatccttcttcayatgatgacaggagagagaagtgcagaatgaagcagggaaaagccccttataaaaccatcagatctcatgagaattccctcagtatcacgagaacagcatg

SEQ ID NO: 8233 - DNA, 201 bp, Homo sapiens
ccgtcattattgtgcagggcattctatcaccccacctgccatagcttcccctaaccagggcatcctctcagctcagcactggtgagacccatagcagctcrgctgcatcttgtgctatggaatttctgtgtctcccacaaccctggtggcatcctcttggcctgccaggcagtgggcaagcttttttcaaattctcatttt

SEQ ID NO: 8234 - DNA, 201 bp, Homo sapiens
cttgagtgattagagtgtctttagaatactgaggaaaggactcttggctgagtggatcctggataccttgagaatgggggctggctgccacagacacatasctatgatgagagggttgtcttattccgttttgtgttgctataaagaaatgtctgagactgactaatttatataaacaaggttcatttggctcaggattct

SEQ ID NO: 8235 - DNA, 201 bp, Homo sapiens
ggcagctgtttcacactacagaaaaatattcatgaacaaattcatatcagtcacagtgaggggtgacactttaaacagcccatcacatgctcaatacattsaagtcaaagaaacctcatagcacagctatgtccactgttcccctcaacaacccacacacatcaggccccccggggtgtcacatttacaagccgtgagaga

SEQ ID NO: 8236 - DNA, 201 bp, Homo sapiens
acccgcggggattttggcctaaacggaaaatgaaacctggtaaaggcgcctgggcctctcccgggtcgaggatctggcgggtcccgcagcctcggggtggrtctcggagccggagactcgcgggggggacccgggacgtccgtgggggatgaggaggggtcgtgaccttcgccccaggccggggtcattcaccggcctagc

SEQ ID NO: 8237 - DNA, 201 bp, Homo sapiens
actgaggaaaggactcttggctgagtggatcctggataccttgagaatgggggctggctgccacagacacatacctatgatgagagggttgtcttattccrttttgtgttgctataaagaaatgtctgagactgactaatttatataaacaaggttcatttggctcaggattctgatgtctggaaatgtttgagcatttag

SEQ ID NO: 8238 - DNA, 201 bp, Homo sapiens
aacaaattcatatcagtcacagtgaggggtgacactttaaacagcccatcacatgctcaatacattcaagtcaaagaaacctcatagcacagctatgtccvctgttcccctcaacaacccacacacatcaggccccccggggtgtcacatttacaagccgtgagagacacattagagccctgggcactgtcactgcctaga

SEQ ID NO: 8239 - DNA, 201 bp, Homo sapiens
aggttcccagggaaattctctgttggaagattatgcctgcaagaggcctccacctgggaaatgctggcccatggggggatctcccttttattaaatggaahgattgttggtgaagtgacagctagtgagccagtgacagtacggttcatgtaaaaaagaccacatacctaggattacctccattttaataaagacacatcc

SEQ ID NO: 8240 - DNA, 201 bp, Homo sapiens
gccccgcccccgctgtcagccccgcccaccgagccccgcccccgccccgaccaacccgcggggattttggcctaaacggaaaatgaaacctggtaaaggckcctgggcctctcccgggtcgaggatctggcgggtcccgcagcctcggggtggatctcggagccggagactcgcgggggggacccgggacgtccgtggggg

SEQ ID NO: 8241 - DNA, 201 bp, Homo sapiens
ttcatatcagtcacagtgaggggtgacactttaaacagcccatcacatgctcaatacattcaagtcaaagaaacctcatagcacagctatgtccactgttbccctcaacaacccacacacatcaggccccccggggtgtcacatttacaagccgtgagagacacattagagccctgggcactgtcactgcctagagtagaa

SEQ ID NO: 8242 - DNA, 201 bp, Homo sapiens
atttcaaatctctgcttctcatttcacactatctggctcatgagtgaaggtgataagtgtcgtactatgctctcaggtttgtctgtcagagtcatagtcahgtattacacataaagattattttcttgttatcatttatttatatatattatactcatgggatatagatagatattattacagtgcttaaatggctactac

SEQ ID NO: 8243 - DNA, 201 bp, Homo sapiens
tttctctcttggtatatgatattaacacatagaattgtatactgttactttggtttccagcaattgctgattaggtcatttggaccacttctcccattgastacaactggaaaaatgggaggaaaatacatatttgaaaagtctggttgaatttatagatgggctagcaaagcagtgaagatttgcttggccaggaaccag

SEQ ID NO: 8244 - DNA, 201 bp, Homo sapiens
tatctggagggtgttagaccctggccccgcccccgctgtcagccccgcccaccgagccccgcccccgccccgaccaacccgcggggattttggcctaaackgaaaatgaaacctggtaaaggcgcctgggcctctcccgggtcgaggatctggcgggtcccgcagcctcggggtggatctcggagccggagactcgcgggg

SEQ ID NO: 8245 - DNA, 201 bp, Homo sapiens
cgttggcgtgctgttcatacccgcggaggaggcgcccttccagccccaagtcgcagccatacattatctggagggtgttagaccctggccccgcccccgckgtcagccccgcccaccgagccccgcccccgccccgaccaacccgcggggattttggcctaaacggaaaatgaaacctggtaaaggcgcctgggcctctcc

SEQ ID NO: 8246 - DNA, 201 bp, Homo sapiens
gatggaattaccttgcacatcagattgaagattgtatacatgaaaatctacagagatgccagtgagccaaggatcaaatgacctatttgtagccaaagccrttttcatggcctcgtggtcctctctgtcacatggctccttacaattctgtgtggttttgttccaatgtaagtagttcttgttaaggatgcttgcaatgaa

SEQ ID NO: 8247 - DNA, 201 bp, Homo sapiens
gaagttgcaaattttcccccattttcttgtcttctgaactctccaaactcttccaacctctgcctgttacccagttccaaagctgtttccacattttcaasaatttttatagtaatacccaactcctggtaccgattttctgaattagttcattctcacacttttataaagaaatacctgagactgggtaatttataaaca

SEQ ID NO: 8248 - DNA, 201 bp, Homo sapiens
ctgtttttatgctagcaccatgctgatttggttactataactttatattgtatcctgaattcagtaagtgtgatgcctctagctttgttcttcttgctcakgattgctttggctatttgggatattttacgattccatatgaatttcacgattttttctatttctgtgaataatgatattggtattttgatagggattgaa

SEQ ID NO: 8249 - DNA, 201 bp, Homo sapiens
caagaaggaattaccttgcacatcagattgaacattgtatacttgaaaatccagagagatgccagtgagctaaggatcaaatgacctattattaaccaagrccattttcatcacatcctggtcctctctgtcacatggctgcttacatttctctgtggttttctttcaatgtaagtagttcttgttaaggatccttgcaat

SEQ ID NO: 8250 - DNA, 201 bp, Homo sapiens
cgccgcggtccaggagcgcaggtcctagttccgggctatgtaatccttgccatcgttggcgtgctgttcatacccgcggaggaggcgcccttccagccccragtcgcagccatacattatctggagggtgttagaccctggccccgcccccgctgtcagccccgcccaccgagccccgcccccgccccgaccaacccgcgg

SEQ ID NO: 8251 - DNA, 201 bp, Homo sapiens
agaatttttatagtaatacccaactcctggtaccgattttctgaattagttcattctcacacttttataaagaaatacctgagactgggtaatttataaasaaaataggtttctttctttctcctcccaccatccaagatgccaaaaggaaagaaggccaaggagaagaaggtggctccagcccctgctgtcgtgaagaag

SEQ ID NO: 8252 - DNA, 201 bp, Homo sapiens
aacaccaaatcctttgcaagaaggaattaccttgcacatcagattgaacattgtatacttgaaaatccagagagatgccagtgagctaaggatcaaatgamctattattaaccaaggccattttcatcacatcctggtcctctctgtcacatggctgcttacatttctctgtggttttctttcaatgtaagtagttcttgt

SEQ ID NO: 8253 - DNA, 201 bp, Homo sapiens
gccgccatgtccgccgcggtccaggagcgcaggtcctagttccgggctatgtaatccttgccatcgttggcgtgctgttcatacccgcggaggaggcgccsttccagccccaagtcgcagccatacattatctggagggtgttagaccctggccccgcccccgctgtcagccccgcccaccgagccccgcccccgccccga

SEQ ID NO: 8254 - DNA, 201 bp, Homo sapiens
ttcagttgtatgtgtggtaaaatgtaacaccaaatcctttgcaagaaggaattaccttgcacatcagattgaacattgtatacttgaaaatccagagagaygccagtgagctaaggatcaaatgacctattattaaccaaggccattttcatcacatcctggtcctctctgtcacatggctgcttacatttctctgtggtt

SEQ ID NO: 8255 - DNA, 201 bp, Homo sapiens
tctgcctcccacttgcgcttggtgatctgagccgccatgtccgccgcggtccaggagcgcaggtcctagttccgggctatgtaatccttgccatcgttggsgtgctgttcatacccgcggaggaggcgcccttccagccccaagtcgcagccatacattatctggagggtgttagaccctggccccgcccccgctgtcagc

SEQ ID NO: 8256 - DNA, 201 bp, Homo sapiens
ggcaacttctcagctcagcactggtgagacccccagctgctcagctgcaccttgtgccatggactttctgtgtctgccaccaacccgggtggcatcctctwggcctgccaggcagtgggaagcttatttcaaattcccatttttgcctgttttcatggatcacccttcatgccacttgtgttagttagggtcccctgagaa

SEQ ID NO: 8257 - DNA, 201 bp, Homo sapiens
ttaattcagttgtatgtgtggtaaaatgtaacaccaaatcctttgcaagaaggaattaccttgcacatcagattgaacattgtatacttgaaaatccagaragatgccagtgagctaaggatcaaatgacctattattaaccaaggccattttcatcacatcctggtcctctctgtcacatggctgcttacatttctctgt

SEQ ID NO: 8258 - DNA, 201 bp, Homo sapiens
ccaggtgtctgcgagcctctccacgcacgtgccctccaggtaggccctgatctgctctgcaaattcttctgcctcccacttgcgcttggtgatctgagcckccatgtccgccgcggtccaggagcgcaggtcctagttccgggctatgtaatccttgccatcgttggcgtgctgttcatacccgcggaggaggcgcccttc

SEQ ID NO: 8259 - DNA, 201 bp, Homo sapiens
cttttgtattccattagtctatgtgtctgtttttatgctagcaccatgctgatttggttactataactttatattgtatcctgaattcagtaagtgtgatrcctctagctttgttcttcttgctcatgattgctttggctatttgggatattttacgattccatatgaatttcacgattttttctatttctgtgaataatg

SEQ ID NO: 8260 - DNA, 201 bp, Homo sapiens
tgctcattggccagggctatgatactcacactcattccttggaggagccaagcttcgggtttggctgcctctgggacatttcatgctagaaaaaccccaabatgtgtagataaatggtatagaggacaccagccacccttcgatggagctctgcccagtagtgtcccctcacttccactcagagacaacatgcccatttca

SEQ ID NO: 8261 - DNA, 201 bp, Homo sapiens
tcttattttgctttccattcatatttgctattccatcactggttgttcctttctactcttttcttgtttcatttattttgatcagtgatgtgtatttccawttctgtgaaagtttaattcagttgtatgtgtggtaaaatgtaacaccaaatcctttgcaagaaggaattaccttgcacatcagattgaacattgtatact

SEQ ID NO: 8262 - DNA, 201 bp, Homo sapiens
gcctgccttggctgagtgtcaaacatctctggagcactgtggccctcatagtgatgtagagctaacattccttgctatctgcccttttgctacaggagatraagacctgtccatgagacactgccgagggtgtcaaatgtagccagtcatagctgtcaacaatccgcagattctcattatctttttacacagcatcgatgc

SEQ ID NO: 8263 - DNA, 201 bp, Homo sapiens
tttttgggtgtggtattgcatgagatgtggtagaagtgatttggacactactacagttctaaatagcactgctattatgtgcttctgaagctttctttttyttttttttttagctgtcttattttgctttccattcatatttgctattccatcactggttgttcctttctactcttttcttgtttcatttattttgatcag

SEQ ID NO: 8264 - DNA, 201 bp, Homo sapiens
taggggtgaggattgtgtagcatcttccagcagtgaaagtgggaaccattactagagaagggtgagcctcctctgcatgcccagaagatcctggagggcahgcatcgcataatcctgttccagtttgcagaatctcaggtttccccaccaaagccctgactttcctgtaacaggcctgccttggctgagtgtcaaacatct

SEQ ID NO: 8265 - DNA, 201 bp, Homo sapiens
aaacttaacatttttgggtgtggtattgcatgagatgtggtagaagtgatttggacactactacagttctaaatagcactgctattatgtgcttctgaagytttcttttttttttttttttagctgtcttattttgctttccattcatatttgctattccatcactggttgttcctttctactcttttcttgtttcattta

SEQ ID NO: 8266 - DNA, 201 bp, Homo sapiens
tgtgagttctcttttgtattccattagtctatgtgtctgtttttatgctagcaccatgctgatttggttactataactttatattgtatcctgaattcagkaagtgtgatgcctctagctttgttcttcttgctcatgattgctttggctatttgggatattttacgattccatatgaatttcacgattttttctatttct

SEQ ID NO: 8267 - DNA, 201 bp, Homo sapiens
ttccttgatcaaacaccctcaaattccaatcccagaagtagtccctgggctcctatggggacgtgctggctagttcctgcaaacctcctgagtgggattcbcgcggcatcataggggtgaggattgtgtagcatcttccagcagtgaaagtgggaaccattactagagaagggtgagcctcctctgcatgcccagaagatc

SEQ ID NO: 8268 - DNA, 201 bp, Homo sapiens
caggggcattctattgtaaacttaacatttttgggtgtggtattgcatgagatgtggtagaagtgatttggacactactacagttctaaatagcactgctrttatgtgcttctgaagctttcttttttttttttttttagctgtcttattttgctttccattcatatttgctattccatcactggttgttcctttctactc

SEQ ID NO: 8269 - DNA, 201 bp, Homo sapiens
atcctctacatgttccagggcaactaagacatgtctaccttgttgagagttgggcatgtttttttctagactatgtggatacaccccagcagtgggtttaytccacttatcaaagtcctggagtgtttgataaatccatgccctgagaaagtgtcttcaagccaaaggattatattcatccagcctgaaattctggttcct

SEQ ID NO: 8270 - DNA, 201 bp, Homo sapiens
tcagtcaacacatctagcttagcataatgccagtaactttggtttgatgcagtagcccaaaatgcttaactcgaattgagaatcaaattttttccaaaaayggctcaggggcattctattgtaaacttaacatttttgggtgtggtattgcatgagatgtggtagaagtgatttggacactactacagttctaaatagcac

SEQ ID NO: 8271 - DNA, 201 bp, Homo sapiens
cctcagcttgttattccatcctctacatgttccagggcaactaagacatgtctaccttgttgagagttgggcatgtttttttctagactatgtggatacaycccagcagtgggtttactccacttatcaaagtcctggagtgtttgataaatccatgccctgagaaagtgtcttcaagccaaaggattatattcatccagc

SEQ ID NO: 8272 - DNA, 201 bp, Homo sapiens
tcctgaggctctggtggaaggtgtgtcctctgggccctcttgtagagcatggttttggtaggccttcaccaagcccactcccctcagcttgttattccatyctctacatgttccagggcaactaagacatgtctaccttgttgagagttgggcatgtttttttctagactatgtggatacaccccagcagtgggtttactc

SEQ ID NO: 8273 - DNA, 201 bp, Homo sapiens
caaaggggacattccccactaagagtccacctgtccttcgagcaggagttaacaccatcaccaccttggtggagaacaagaaagctcagctggtggtgatwgcacatgatgtagatcccatcaagctggttgtcttcttgcctgtcctgtgtcataaaatggggtcccttactgcattatcaaagggaaggcaagactggg

SEQ ID NO: 8274 - DNA, 201 bp, Homo sapiens
ttctgcaggctatacagaaagtatgattctggcatctgctcatcttatgagagggcctcagggaactttcgattatgctggaaggctaaggggaagcagayattacttacatgcctggagcaggagggagagagagcagggaggtgacacagatttttaaacaccagatcttatgagaattatcacaagaatagcaccaaa

SEQ ID NO: 8275 - DNA, 201 bp, Homo sapiens
tggttctaaaccgttcatgaaggatccatcctcatgagccgatcacctgccaccagacaccacctccaaaattagggattacaattgaacatgagatttgkgtggggacacagatccaaacaatatcaggggtcatggtggacatgaggatgggctggtctcccatttcttacctgttactgtagacatagacacattcag

SEQ ID NO: 8276 - DNA, 201 bp, Homo sapiens
tggggacacagatccaaacaatatcaggggtcatggtggacatgaggatgggctggtctcccatttcttacctgttactgtagacatagacacattcagabgctttggcagaaagagaagccagaggcccttaatgtcacaaagaggaggcatgaacaaatcttgcatctcagtccctcacaaggcaatcttagaaaaaac

SEQ ID NO: 8277 - DNA, 201 bp, Homo sapiens
ggtcatggtggacatgaggatgggctggtctcccatttcttacctgttactgtagacatagacacattcagacgctttggcagaaagagaagccagaggchcttaatgtcacaaagaggaggcatgaacaaatcttgcatctcagtccctcacaaggcaatcttagaaaaaacatagtcataaactaatccaggtcagtca

SEQ ID NO: 8278 - DNA, 201 bp, Homo sapiens
gagccaagcttcgggtttggctgcctctgggacatttcatgctagaaaaaccccaacatgtgtagataaatggtatagaggacaccagccacccttcgatkgagctctgcccagtagtgtcccctcacttccactcagagacaacatgcccatttcactaaattcatgaggacatggccaacataagtaagagaacaccgg

SEQ ID NO: 8279 - DNA, 201 bp, Homo sapiens
tttggctgcctctgggacatttcatgctagaaaaaccccaacatgtgtagataaatggtatagaggacaccagccacccttcgatggagctctgcccagtrgtgtcccctcacttccactcagagacaacatgcccatttcactaaattcatgaggacatggccaacataagtaagagaacaccgggaggtaccttggaca

SEQ ID NO: 8280 - DNA, 201 bp, Homo sapiens
ttggtcccattttccttctctctttgtgggaagccagcccaggagatctacaggcgatcagggagacgtcttgtgttccctggtacccgtgagctgcagcrtctccttcccgttctccaggtgtctgcgagcctctccacgcacgtgccctccaggtaggccctgatctgctctgcaaattcttctgcctcccacttgcgc

SEQ ID NO: 8281 - DNA, 201 bp, Homo sapiens
tccctcaggaccagagagaggacgacattctagtgttggtcccattttccttctctctttgtgggaagccagcccaggagatctacaggcgatcagggagrcgtcttgtgttccctggtacccgtgagctgcagcatctccttcccgttctccaggtgtctgcgagcctctccacgcacgtgccctccaggtaggccctga

SEQ ID NO: 8282 - DNA, 201 bp, Homo sapiens
catggatttattgtgagttctcttttgtattccattagtctatgtgtctgtttttatgctagcaccatgctgatttggttactataactttatattgtatmctgaattcagtaagtgtgatgcctctagctttgttcttcttgctcatgattgctttggctatttgggatattttacgattccatatgaatttcacgattt

SEQ ID NO: 8283 - DNA, 201 bp, Homo sapiens
ctgctctgtctatggagtagccattcttttgtttctttacttctctaataaacttgctttcacttagaaaaaattgcataatcagattgcttctcatttayaaaaatgggaatctcatacttcagtcaacacatctagcttagcataatgccagtaactttggtttgatgcagtagcccaaaatgcttaactcgaattgag

SEQ ID NO: 8284 - DNA, 201 bp, Homo sapiens
gagggactcagaagagctggactcagacccccacacacattgagtgtaaagcagagagcaaggcctgagaggaaaagtaacggggcccaaggctgctgccrgtgtcaaagggaacccctcatcagtattccagggattgtcttcccttcatttcctcagagatttcatcccttaattgtatcagagagcagggcagaccct

SEQ ID NO: 8285 - DNA, 201 bp, Homo sapiens
tgagggactcagaagagctggactcagacccccacacacattgagtgtaaagcagagagcaaggcctgagaggaaaagtaacggggcccaaggctgctgcyagtgtcaaagggaacccctcatcagtattccagggattgtcttcccttcatttcctcagagatttcatcccttaattgtatcagagagcagggcagaccc

SEQ ID NO: 8286 - DNA, 201 bp, Homo sapiens
tacaaaggacaataccctgacacttcttagtgatgcaggtccctctcaccatcaagttcctgaggctctggtggaaggtgtgtcctctgggccctcttgtrgagcatggttttggtaggccttcaccaagcccactcccctcagcttgttattccatcctctacatgttccagggcaactaagacatgtctaccttgttga

SEQ ID NO: 8287 - DNA, 201 bp, Homo sapiens
gtgtcttctggtcctgacctgagtggaggctgagggactcagaagagctggactcagacccccacacacattgagtgtaaagcagagagcaaggcctgagrggaaaagtaacggggcccaaggctgctgccagtgtcaaagggaacccctcatcagtattccagggattgtcttcccttcatttcctcagagatttcatcc

SEQ ID NO: 8288 - DNA, 201 bp, Homo sapiens
tctttactaccatcacccccagcctacaaaggacaataccctgacacttcttagtgatgcaggtccctctcaccatcaagttcctgaggctctggtggaakgtgtgtcctctgggccctcttgtagagcatggttttggtaggccttcaccaagcccactcccctcagcttgttattccatcctctacatgttccagggca

SEQ ID NO: 8289 - DNA, 201 bp, Homo sapiens
gaggagggaacagtgtcttctggtcctgacctgagtggaggctgagggactcagaagagctggactcagacccccacacacattgagtgtaaagcagagarcaaggcctgagaggaaaagtaacggggcccaaggctgctgccagtgtcaaagggaacccctcatcagtattccagggattgtcttcccttcatttcctca

SEQ ID NO: 8290 - DNA, 201 bp, Homo sapiens
ttgtctcttcagggccacactctccccagtgatattagaaatgaaactctgggactatctttactaccatcacccccagcctacaaaggacaataccctgwcacttcttagtgatgcaggtccctctcaccatcaagttcctgaggctctggtggaaggtgtgtcctctgggccctcttgtagagcatggttttggtaggc

SEQ ID NO: 8291 - DNA, 201 bp, Homo sapiens
ctttgtctcttcagggccacactctccccagtgatattagaaatgaaactctgggactatctttactaccatcacccccagcctacaaaggacaatacccygacacttcttagtgatgcaggtccctctcaccatcaagttcctgaggctctggtggaaggtgtgtcctctgggccctcttgtagagcatggttttggtag

SEQ ID NO: 8292 - DNA, 201 bp, Homo sapiens
tattctcagttcctttaccaaaaatgagttggctatcaatgcatggatttattgtgagttctcttttgtattccattagtctatgtgtctgtttttatgckagcaccatgctgatttggttactataactttatattgtatcctgaattcagtaagtgtgatgcctctagctttgttcttcttgctcatgattgctttggc

SEQ ID NO: 8293 - DNA, 201 bp, Homo sapiens
gcttctcctccgaggttgccatagtaaccgtgccctctggcttttgcaagtcactgccaccacttggtctttgtctcttcagggccacactctccccagtratattagaaatgaaactctgggactatctttactaccatcacccccagcctacaaaggacaataccctgacacttcttagtgatgcaggtccctctcacc

SEQ ID NO: 8294 - DNA, 201 bp, Homo sapiens
atcatagatatcaaccagctgcctgtcctaaccctgggacaccaccctctattatacttccccacattccctgcagcttgagtcctcttggcttctcctchgaggttgccatagtaaccgtgccctctggcttttgcaagtcactgccaccacttggtctttgtctcttcagggccacactctccccagtgatattagaaa

SEQ ID NO: 8295 - DNA, 201 bp, Homo sapiens
gagtcaaacaccttcaccctcctgcttctcaattcttgctttcttatcatagatatcaaccagctgcctgtcctaaccctgggacaccaccctctattatmcttccccacattccctgcagcttgagtcctcttggcttctcctccgaggttgccatagtaaccgtgccctctggcttttgcaagtcactgccaccacttg

SEQ ID NO: 8296 - DNA, 201 bp, Homo sapiens
gtctggtcctccccatcccgctgccaggtcagtgtgatctccgcagggtagaagcccagggcccagcacctcagggtggcctcatggtcagagatggggtrgtgggtcatatgtgtcttgggggggtctgacgggaagagtcagaaaattcaggcattttgcatctgtcatgggacactccaccagcacgcatgtggccat

SEQ ID NO: 8297 - DNA, 201 bp, Homo sapiens
cttgagaatggacaggacgcctggggtggggaagggagcacagaacccagacaacagcctggacacaggcacctgggataatctcctattccgtggaaaaytctagtccctgaggagggaacagcgacttctggtcctgacctgagtggaggctgagggactcagaagagctggactcagacccccaggcacattgagtgt

SEQ ID NO: 8298 - DNA, 201 bp, Homo sapiens
gcttgaaatccaccaatggaagaaggaaactcagagctcacccctttcctacctgggatcttattcctccacatcacagcagcgaccacagctacagtgawtacagcaactagaagaaccaggccagcaatgatgcccacaacggggatgatgggctgggaagacagctctaagaaaggaggtgaacgtgaggggccctga

SEQ ID NO: 8299 - DNA, 201 bp, Homo sapiens
aaggaggtgaacgtgaggggccctgacccccaggcctcagccctgaccctgcttaaaggctccagaaggacttctgctttgcctgagaagagacatgaccbctcattcgtctccttaccccatcttagtgtgaggggctcaggcaacccctcgtgctgcacatggcatgtgtacctctgcttctctccagaagacaccact

SEQ ID NO: 8300 - DNA, 201 bp, Homo sapiens
ttaaaggctccagaaggacttctgctttgcctgagaagagacatgacccctcattcgtctccttaccccatcttagtgtgaggggctcaggcaacccctcrtgctgcacatggcatgtgtacctctgcttctctccagaagacaccactgcagctgcccacttctggaaggttctgtaccctgcaagtctggtctccacaa

SEQ ID NO: 8301 - DNA, 201 bp, Homo sapiens; identical to SEQ ID NO: 1123

SEQ ID NO: 8302 - DNA, 201 bp, Homo sapiens; identical to SEQ ID NO: 1124

SEQ ID NO: 8303 - DNA, 201 bp, Homo sapiens
aggacaccagccacccttcgatggagctctgcccagtagtgtcccctcacttccactcagagacaacatgcccatttcactaaattcatgaggacatggcbaacataagtaagagaacaccgggaggtaccttggacagagttccatgcagtcacagcttttgcgtctctgtgtcttttcccttcatctcaaccagagagc

SEQ ID NO: 8304 - DNA, 201 bp, Homo sapiens
cagacgccaacctggacacaggtacctgggataatctcctatccgtggaaaattctagtccctgaggagggaacagtgtcttctggtcctgacctgagtgsaggctgagggactcagaagagctggactcagacccccacacacattgagtgtaaagcagagagcaaggcctgagaggaaaagtaacggggcccaaggctg

SEQ ID NO: 8305 - DNA, 201 bp, Homo sapiens
ccagtagtgtcccctcacttccactcagagacaacatgcccatttcactaaattcatgaggacatggccaacataagtaagagaacaccgggaggtacctkggacagagttccatgcagtcacagcttttgcgtctctgtgtcttttcccttcatctcaaccagagagcatttgccgaggccgaagaacaaaaaacttcaa

SEQ ID NO: 8306 - DNA, 201 bp, Homo sapiens
gtggggaagggagcacagaacccagacgccaacctggacacaggtacctgggataatctcctatccgtggaaaattctagtccctgaggagggaacagtgwcttctggtcctgacctgagtggaggctgagggactcagaagagctggactcagacccccacacacattgagtgtaaagcagagagcaaggcctgagagga

SEQ ID NO: 8307 - DNA, 201 bp, Homo sapiens
tgagaatggacaggacacctggggtggggaagggagcacagaacccagacgccaacctggacacaggtacctgggataatctcctatccgtggaaaattcyagtccctgaggagggaacagtgtcttctggtcctgacctgagtggaggctgagggactcagaagagctggactcagacccccacacacattgagtgtaaa

SEQ ID NO: 8308 - DNA, 201 bp, Homo sapiens
tctttctccattgtatattctcagttcctttaccaaaaatgagttggctatcaatgcatggatttattgtgagttctcttttgtattccattagtctatgbgtctgtttttatgctagcaccatgctgatttggttactataactttatattgtatcctgaattcagtaagtgtgatgcctctagctttgttcttcttgct

SEQ ID NO: 8309 - DNA, 201 bp, Homo sapiens
agtaagagaacaccgggaggtaccttggacagagttccatgcagtcacagcttttgcgtctctgtgtcttttcccttcatctcaaccagagagcatttgcbgaggccgaagaacaaaaaacttcaaatattggagcggaatctaagaccactgatccattgtgatcaggaggctggagccatgtggtccaggaataatgaa

SEQ ID NO: 8310 - DNA, 201 bp, Homo sapiens
agacactccagcagcacgcatgtggccatcctgagaatggacaggacacctggggtggggaagggagcacagaacccagacgccaacctggacacaggtayctgggataatctcctatccgtggaaaattctagtccctgaggagggaacagtgtcttctggtcctgacctgagtggaggctgagggactcagaagagctg

SEQ ID NO: 8311 - DNA, 201 bp, Homo sapiens
tttgcatctctcatgagacactccagcagcacgcatgtggccatcctgagaatggacaggacacctggggtggggaagggagcacagaacccagacgccarcctggacacaggtacctgggataatctcctatccgtggaaaattctagtccctgaggagggaacagtgtcttctggtcctgacctgagtggaggctgagg

SEQ ID NO: 8312 - DNA, 201 bp, Homo sapiens
gcactttgcatctctcatgagacactccagcagcacgcatgtggccatcctgagaatggacaggacacctggggtggggaagggagcacagaacccagacrccaacctggacacaggtacctgggataatctcctatccgtggaaaattctagtccctgaggagggaacagtgtcttctggtcctgacctgagtggaggct

SEQ ID NO: 8313 - DNA, 201 bp, Homo sapiens
cacagggtagaagcccagggcccagcacctcagggtggccttatagtcagagatggaatggtggatcatatgtgtcttggtgggggggtctaacaggaagwgtcagaaaattcaggcactttgcatctctcatgagacactccagcagcacgcatgtggccatcctgagaatggacaggacacctggggtggggaagggag

SEQ ID NO: 8314 - DNA, 201 bp, Homo sapiens
attctgttctgttggtctatatgcttgtttttctaccagtaccatgctgttttggttactttagccttatagtatagttttaagtaggatagcctgatgcytccagctttattctttttgcttagcattctcctggctacacaacctcttttttggatccatatgaattttcaaatttttttttctaattctgtgataagc

SEQ ID NO: 8315 - DNA, 201 bp, Homo sapiens
ctgccaggtcagtgtgatctccacagggtagaagcccagggcccagcacctcagggtggccttatagtcagagatggaatggtggatcatatgtgtcttgstgggggggtctaacaggaagagtcagaaaattcaggcactttgcatctctcatgagacactccagcagcacgcatgtggccatcctgagaatggacagga

SEQ ID NO: 8316 - DNA, 201 bp, Homo sapiens
tgtttttgtcaggtttgttgaagatcacatggttgtagatgtgaggtcttatttctgagttttctattctgttctgttggtctatatgcttgtttttctaycagtaccatgctgttttggttactttagccttatagtatagttttaagtaggatagcctgatgcctccagctttattctttttgcttagcattctcctgg

SEQ ID NO: 8317 - DNA, 201 bp, Homo sapiens
tcccgagtctggtcctctccatcctgctgccaggtcagtgtgatctccacagggtagaagcccagggcccagcacctcagggtggccttatagtcagagayggaatggtggatcatatgtgtcttggtgggggggtctaacaggaagagtcagaaaattcaggcactttgcatctctcatgagacactccagcagcacgca

SEQ ID NO: 8318 - DNA, 201 bp, Homo sapiens
tctgttcatgtgctttgtccacttcttaatgaagttgtttttttcatgtaaatttgcttaagttctttttagattatgaatattagacctttgtcagatcratagattgcataaattttctcccattctgtaggttgtctccttttcgctctgatgatagtttcttttcctgtgcagaagctcttttgtttaattagatcc

SEQ ID NO: 8319 - DNA, 201 bp, Homo sapiens
gttgttctgggtgctcagtgtccagagaggaggatggggaggaggctttgtgcagaacaggaaccgtggagctggatgcacactcagtaatgagacagccmtgccaggggtcctggggctgccggttgttctgggtgctcagtgtccagagaggaggatggggaggaggctttgtgcagaacaggaaccgtgccccataac

SEQ ID NO: 8320 - DNA, 201 bp, Homo sapiens
ccacctgtatgtcttcttttgagaagtgtctgttcatgtgctttgtccacttcttaatgaagttgtttttttcatgtaaatttgcttaagttctttttagrttatgaatattagacctttgtcagatcaatagattgcataaattttctcccattctgtaggttgtctccttttcgctctgatgatagtttcttttcctgt

SEQ ID NO: 8321 - DNA, 201 bp, Homo sapiens
tccccccagttctgcctgtttcctttccccagtgtacaatctcctgagtaaatggctatatggtcctttgccgaaggactgagggaattgtcccagcatabacttccacggggttgcagagtattccgcctagagatatggactcttcctctgtcactgagatctgaatctgcatcttggctgaggtctaggcattgagga

SEQ ID NO: 8322 - DNA, 201 bp, Homo sapiens
tcgccagaatctgttgtttcttaactttttaataattgccattctgactggcatgagatggtatcttattgtggttttgatttgcatttctctaacgatcrgtgatattgagctttttaaaatatgttttttggccacctgtatgtcttcttttgagaagtgtctgttcatgtgctttgtccacttcttaatgaagttgtt

SEQ ID NO: 8323 - DNA, 201 bp, Homo sapiens
acatatgaatctaaactagactctgctttataaattgatgagtttctattggagccagcactaggattactacaactcagggcaggaagaagagtaggagwgcagaagaggagttccaacagaaagttacctatgatgagaaactatgggaccctgcctcttggcaaatttcagaatctggttcctttaaaaagattgcag

SEQ ID NO: 8324 - DNA, 201 bp, Homo sapiens
ttccgtggaaaattctagtccctgaggagggaacagcgacttctggtcctgacctgagtggaggctgagggactcagaagagctggactcagacccccagrcacattgagtgtgaagcagagaacaaggcctgagaggaaaagtcacggggcccaaggctgctgccagtgtcaaagggaaccactcatcagtattccaggg

SEQ ID NO: 8325 - DNA, 201 bp, Homo sapiens
gaagagctggactcagacccccaggcacattgagtgtgaagcagagaacaaggcctgagaggaaaagtcacggggcccaaggctgctgccagtgtcaaagrgaaccactcatcagtattccagggattgtcttcccttcatttcctcagagatttcatcccttaattgtgtcagagagcacggcggaccctcagagtcact

SEQ ID NO: 8326 - DNA, 201 bp, Homo sapiens
cattgtgatcaggaggctggagccatgtggtccaggaataatgaagtctgtgaggccttggtcaccccaaggctctctcccattaggagctgcctctcacdgctatcagggaggacccaggagctggacatggctttttttttttttttttttcatttctgatgagaacctggagaggtcccagagcatatagaccttgat

SEQ ID NO: 8327 - DNA, 201 bp, Homo sapiens; identical to SEQ ID NO: 1046

SEQ ID NO: 8328 - DNA, 201 bp, Homo sapiens
ttttttttttcatttctgatgagaacctggagaggtcccagagcatatagaccttgattgaaatggggccagagtggagtcaggcaaaaaactctaatgabtcagaggcacctaagtataaaataaaatctcaactcagagcttccatcagagcatcaggctcagtatctcctgtgtttgcactgtgagtactggagcttg

SEQ ID NO: 8329 - DNA, 201 bp, Homo sapiens
ggggtttcaccatgttagctaggatggtctcgatctcctgaccttgtgatccacgcgcctcggcctcccaaagtgctgggattacaggcgtgagccaccgygcccggccttttttaacctttttatcttagagaggcaattaggttttagacagccccacagaatgcattaaagaccaaggtgcaagtaacactgtgccag

SEQ ID NO: 8330 - DNA, 201 bp, Homo sapiens
ttgtgatccacgcgcctcggcctcccaaagtgctgggattacaggcgtgagccaccgcgcccggccttttttaacctttttatcttagagaggcaattagsttttagacagccccacagaatgcattaaagaccaaggtgcaagtaacactgtgccaggctttgcggataaatgcattaaaaatctataaaacactgtatt

SEQ ID NO: 8331 - DNA, 201 bp, Homo sapiens
tggagcttgatgagaagaaaaatagctacatgtgcagaaaaacatatgtagttagaaagctgggtcatggttcaaggtaagagggacccttgtcttttccrtggtagatagtggggctttctgccatcttagttctgatggaccaagtgcagaagataaactttcctgctttcagcttagtgactggtaatagaagctgga

SEQ ID NO: 8332 - DNA, 201 bp, Homo sapiens
gcacatgtatctctgttcctctccagaaggcaccaccacagctgcccacttctggaagtttccatcccctgcaggcctggtctctacaagctccatgtccygagtctggtcctctccatcctgctgccaggtcagtgtgatctccacagggtagaagcccagggcccagcacctcagggtggccttatagtcagagatgga

SEQ ID NO: 8333 - DNA, 201 bp, Homo sapiens
tgaccctcagcccccagcaccgaccctgctgaagttctccagagaggctcctgctttccctaagagacatgaccccccctccactcatctcctgcctaacyccatctcagggtgaggggcttgggcaacccctcatgctgcacatggcacatgtatctctgttcctctccagaaggcaccaccacagctgcccacttctgg

SEQ ID NO: 8334 - DNA, 201 bp, Homo sapiens
ccctgaccctcagcccccagcaccgaccctgctgaagttctccagagaggctcctgctttccctaagagacatgaccccccctccactcatctcctgcctwactccatctcagggtgaggggcttgggcaacccctcatgctgcacatggcacatgtatctctgttcctctccagaaggcaccaccacagctgcccacttc

SEQ ID NO: 8335 - DNA, 201 bp, Homo sapiens
tctgctctgcagtgatatccagacaacataaaagctgcaattataattcctgcttggccaggcctggagtaatctcattcattctttagtcctcatcaggsttcctcagggacaggttgctggattatgtagagacaatagacaaccccaacaccatcccacatccttcagctctctaatggtggtgtgacccccacatta

SEQ ID NO: 8336 - DNA, 201 bp, Homo sapiens
gcgtccctgaccctcagcccccagcaccgaccctgctgaagttctccagagaggctcctgctttccctaagagacatgaccccccctccactcatctcctrcctaactccatctcagggtgaggggcttgggcaacccctcatgctgcacatggcacatgtatctctgttcctctccagaaggcaccaccacagctgccca

SEQ ID NO: 8337 - DNA, 201 bp, Homo sapiens
aatccatagctgcacgctgtgtgcccgaggctttattattctgctctgcagtgatatccagacaacataaaagctgcaattataattcctgcttggccagrcctggagtaatctcattcattctttagtcctcatcaggcttcctcagggacaggttgctggattatgtagagacaatagacaaccccaacaccatcccac

SEQ ID NO: 8338 - DNA, 201 bp, Homo sapiens
gagcgtccctgaccctcagcccccagcaccgaccctgctgaagttctccagagaggctcctgctttccctaagagacatgaccccccctccactcatctcytgcctaactccatctcagggtgaggggcttgggcaacccctcatgctgcacatggcacatgtatctctgttcctctccagaaggcaccaccacagctgcc

SEQ ID NO: 8339 - DNA, 201 bp, Homo sapiens
tcctcatccattccttacctgagttcttcttcctgcacatcacagcagaaaccacagctccagtgactacagctccaaggagaaccaggccagcaacgatrcccacgatggggatggtgggctgagaagactgctctgggaaaaaaggggaaggtgagcgtccctgaccctcagcccccagcaccgaccctgctgaagttc

SEQ ID NO: 8340 - DNA, 201 bp, Homo sapiens
accccactcctcatccattccttacctgagttcttcttcctgcacatcacagcagaaaccacagctccagtgactacagctccaaggagaaccaggccagyaacgatacccacgatggggatggtgggctgagaagactgctctgggaaaaaaggggaaggtgagcgtccctgaccctcagcccccagcaccgaccctgct

SEQ ID NO: 8341 - DNA, 201 bp, Homo sapiens
tctttatctagtccctcattggtgggcatttgggttgattccatgtctttgctgttgtgaattgtgctgcaatgaacaaacacatgcacatatctttatartagaatgatttatattcctttgggtatataccctgcaatgggattgctgggtcaaatggtatttctggttctaaatctttgaggaatcaccacactgcct

SEQ ID NO: 8342 - DNA, 201 bp, Homo sapiens
tgctgggatcaggtccccatcatcataatcatcaaggtgataaatctgtccttcattgtcacaggtgctttacaaaagagtaagtgctggcacacagggcscaggctgggtaggcccatgagtgtggatggtgcttcccagtaaccaggcaggacacacttctaactggggcttgaaaccctcagtgggacaagaaatctc

SEQ ID NO: 8343 - DNA, 201 bp, Homo sapiens
catatatgtatcatattttctttatctagtccctcattggtgggcatttgggttgattccatgtctttgctgttgtgaattgtgctgcaatgaacaaacayatgcacatatctttataatagaatgatttatattcctttgggtatataccctgcaatgggattgctgggtcaaatggtatttctggttctaaatctttga

SEQ ID NO: 8344 - DNA, 201 bp, Homo sapiens
ttattattaatttttttattttttatttatttacagacagggcgtcactctgttaccctggctaaagtgcagtggcacgctcatgactcactgaagcctckacctccttggctcatgtgatcaatgctcctccctcagcctcccaagtagctggcaccacaggcttgtgccaccactcctggctaatttttctaaaaataa

SEQ ID NO: 8345 - DNA, 201 bp, Homo sapiens
tgtgactgctgggatcaggtccccatcatcataatcatcaaggtgataaatctgtccttcattgtcacaggtgctttacaaaagagtaagtgctggcacasagggcccaggctgggtaggcccatgagtgtggatggtgcttcccagtaaccaggcaggacacacttctaactggggcttgaaaccctcagtgggacaaga

SEQ ID NO: 8346 - DNA, 201 bp, Homo sapiens
gtttgctgaggataatggcttccagcttcatccatatccctgcaaaggatttgatctcattcctttttatggctgcataatattccatggcatatatgtaycatattttctttatctagtccctcattggtgggcatttgggttgattccatgtctttgctgttgtgaattgtgctgcaatgaacaaacacatgcacatat

SEQ ID NO: 8347 - DNA, 201 bp, Homo sapiens
gtttactccctgagctccataagccccactgtgatgagagacatgatagtgctgtgggcatctgagcatcaatgtcagttcacacccagtgtcaataatchccccagttctgcctgtttcctttccccagtgtacaatctcctgagtaaatggctatatggtcctttgccgaaggactgagggaattgtcccagcatatac

SEQ ID NO: 8348 - DNA, 201 bp, Homo sapiens
ctgtgttagtttgctgaggataatggcttccagcttcatccatatccctgcaaaggatttgatctcattcctttttatggctgcataatattccatggcayatatgtatcatattttctttatctagtccctcattggtgggcatttgggttgattccatgtctttgctgttgtgaattgtgctgcaatgaacaaacacat

SEQ ID NO: 8349 - DNA, 201 bp, Homo sapiens
aattcaaactattatttcaggatttttaagttaaaggcttttaatctaattatttttccttaacattttaatcttgtcctttaatttaatttagtttaatkttaagttccagggtacatatgcaggatgtgcaggtttgttacacaggtaaacgggttccacggcagtttgctgcaccaatcaacccataacctaggtatt

SEQ ID NO: 8350 - DNA, 201 bp, Homo sapiens
cacctctggaagggagcagtattaaaggatttgcatatatgttaaaagcaaaattcaaactattatttcaggatttttaagttaaaggcttttaatctaaytatttttccttaacattttaatcttgtcctttaatttaatttagtttaattttaagttccagggtacatatgcaggatgtgcaggtttgttacacaggta

SEQ ID NO: 8351 - DNA, 201 bp, Homo sapiens
aagtccaagccacactcaagagagggaattaagctgcacctctggaagggagcagtattaaaggatttgcatatatgttaaaagcaaaattcaaactattrtttcaggatttttaagttaaaggcttttaatctaattatttttccttaacattttaatcttgtcctttaatttaatttagtttaattttaagttccaggg

SEQ ID NO: 8352 - DNA, 201 bp, Homo sapiens
acctcctcacattatgcctacacgaacacagacacatgcaggtgcctttgcagaaacaaagtcagggttcttcaagtcacaaagggaagggcaggaacaamtcttgcctctcagtcccacacaaggcagctgtctcacactatagaaaaaaatattcatgaacaaattcatatctgtcacagtgaggggtcacactttaaa

SEQ ID NO: 8353 - DNA, 201 bp, Homo sapiens
ttcgcatgacaattgaagatgagatttgggtgggaacacagaaccaggccatatcagaagtgcatcattaagtccaagccacactcaagagagggaattargctgcacctctggaagggagcagtattaaaggatttgcatatatgttaaaagcaaaattcaaactattatttcaggatttttaagttaaaggcttttaat

SEQ ID NO: 8354 - DNA, 201 bp, Homo sapiens
attcgcatgacaattgaagatgagatttgggtgggaacacagaaccaggccatatcagaagtgcatcattaagtccaagccacactcaagagagggaattmagctgcacctctggaagggagcagtattaaaggatttgcatatatgttaaaagcaaaattcaaactattatttcaggatttttaagttaaaggcttttaa

SEQ ID NO: 8355 - DNA, 201 bp, Homo sapiens
gaggtttccctttggctttcagcacaatgaaagtccttactccacagactagggacccagggtgggggtaactccacttagcagtgcatcagtgtcaattrtgcactcagggtataggaagataaccagggctgggtctatggatccagtagttccattgtgggccataatgtgtccaggtttactccctgagctccataa

SEQ ID NO: 8356 - DNA, 201 bp, Homo sapiens
tgtgcagaaaaacatatgtagttagaaagctgggtcatggttcaaggtaagagggacccttgtcttttccgtggtagatagtggggctttctgccatcttrgttctgatggaccaagtgcagaagataaactttcctgctttcagcttagtgactggtaatagaagctggagttaagagaatcagtggcagcctctctctc

SEQ ID NO: 8357 - DNA, 201 bp, Homo sapiens
cagcttagtgactggtaatagaagctggagttaagagaatcagtggcagcctctctctccatgccccagcccagtaaatctaagccaggacttggggctchggcactttcttctcactgtgcgtcctccttctctggctcaaaagagaaccacatgtaacagaaaccaagggctacaattctcatagaacccagaaaactg

SEQ ID NO: 8358 - DNA, 201 bp, Homo sapiens
cattaatttaactttgatatctgttccatttctgtgactctgttaagaaattagagactttgaactttctattaattttactttcttggaaatgtccctcytgggcccttctggctgctcccatctggactggaggcttctacctgtgggacagagtcaccttcctaggatctccctccaccaccatctggggcggtgctt

SEQ ID NO: 8359 - DNA, 201 bp, Homo sapiens
atgaacctccgccccccgggccgcctcccacttgagctgggtgatctgagccgccgtgtctgcggctgtcaaggagcacaggtcctcgttcaggacgatgdaatccttgccatcgtaagcaagctggtgatacccgcggagtaggcgcccgtccgaccccacgtcgcagacagacatcctctagatgggtgtgagaccctg

SEQ ID NO: 8360 - DNA, 201 bp, Homo sapiens; identical to SEQ ID NO: 1075

SEQ ID NO: 8361 - DNA, 201 bp, Homo sapiens
gtattgtctttagaccatactatatagggcaggggagttacaatagccctgagaaaaaactataaataaatgtgttgtggatcccacatggatgtgaatcrctccatatcccctttctaattggagtggaaagaaatgcactcaccaaatccatagctgcacgctgtgtgcccgaggctttattattctgctctgcagtga

SEQ ID NO: 8362 - DNA, 201 bp, Homo sapiens; identical to SEQ ID NO: 1076

SEQ ID NO: 8363 - DNA, 201 bp, Homo sapiens
caccgcagtcaacatgaagttgtcagtgaaatgagctgatttaatatcctatagaatatccagtatgtctagtattgtctttagaccatactatataggghaggggagttacaatagccctgagaaaaaactataaataaatgtgttgtggatcccacatggatgtgaatcgctccatatcccctttctaattggagtgga

SEQ ID NO: 8364 - DNA, 201 bp, Homo sapiens
cctgaggtctgtcctcagcagggaccttcccctgtgacttgtgactgctgggatcaggtccccatcatcataatcatcaaggtgataaatctgtccttcaktgtcacaggtgctttacaaaagagtaagtgctggcacacagggcccaggctgggtaggcccatgagtgtggatggtgcttcccagtaaccaggcaggaca

SEQ ID NO: 8365 - DNA, 201 bp, Homo sapiens
acaaaccccctagcctttgatcccagagaagtttcctgaaagtgtaactgctgatctaggacaggatcaggaaacatgaggaaagcaggtgtgggtcctgraccaactgccctcctgaggtctgtcctcagcagggaccttcccctgtgacttgtgactgctgggatcaggtccccatcatcataatcatcaaggtgataa

SEQ ID NO: 8366 - DNA, 201 bp, Homo sapiens
gcatgggccaccatgcctggataattttgtatttttagtagagacggggtttctccgtgttggtcaggctagtctccaactcccaacctcaggtgatccabccacctcagccttccaaagtgctgggattacaggcgtgagccactgcacctggccgagtggccactctggaagctttgtaaggtttatcttcaccttctg

SEQ ID NO: 8367 - DNA, 201 bp, Homo sapiens
gagtcagggccatacggccctaaacaaaccccctagcctttgatcccagagaagtttcctgaaagtgtaactgctgatctaggacaggatcaggaaacatraggaaagcaggtgtgggtcctggaccaactgccctcctgaggtctgtcctcagcagggaccttcccctgtgacttgtgactgctgggatcaggtccccat

SEQ ID NO: 8368 - DNA, 201 bp, Homo sapiens
gtcctatgagaggccagaaaggagtcagggccatacggccctaaacaaaccccctagcctttgatcccagagaagtttcctgaaagtgtaactgctgatcyaggacaggatcaggaaacatgaggaaagcaggtgtgggtcctggaccaactgccctcctgaggtctgtcctcagcagggaccttcccctgtgacttgtga

SEQ ID NO: 8369 - DNA, 201 bp, Homo sapiens
cagagtagctcactctatctgtgggaagaaaatgtcctatgagaggccagaaaggagtcagggccatacggccctaaacaaaccccctagcctttgatccyagagaagtttcctgaaagtgtaactgctgatctaggacaggatcaggaaacatgaggaaagcaggtgtgggtcctggaccaactgccctcctgaggtctg

SEQ ID NO: 8370 - DNA, 201 bp, Homo sapiens
cagaattgcaagtgcttaatgcagccaaagtgcccttcgccagtgctcatgcactccctttattattaatttttttattttttatttatttacagacaggkcgtcactctgttaccctggctaaagtgcagtggcacgctcatgactcactgaagcctcgacctccttggctcatgtgatcaatgctcctccctcagcctc

SEQ ID NO: 8371 - DNA, 201 bp, Homo sapiens
tcggcgtgggtctccgattgtgctacagtgggtagcacaatcttggtagcccctgaatggtcacgaatctaatttgtaaaagagatgatttttggccccaytatatataaatatgtctaaacgcattgcaattagactcacaaagtgaagttttactttcccagactgtgtatctgtgactctggtctgttgtatttttac

SEQ ID NO: 8372 - DNA, 201 bp, Homo sapiens
ccagcgtctcacctttacaagccgtgagagacacatcagaaccctgcgcatggtcgctgcctggggtagaacaaaaacaggacttggtcagagcccagagragatgcggctagaggaggaatctggggttgggtgagctcccccatgggctcccgaccacaatatcccaaggatctcagggatcagcccacttcatactta

SEQ ID NO: 8373 - DNA, 201 bp, Homo sapiens
cccccagcgtctcacctttacaagccgtgagagacacatcagaaccctgcgcatggtcgctgcctggggtagaacaaaaacaggacttggtcagagcccasaggagatgcggctagaggaggaatctggggttgggtgagctcccccatgggctcccgaccacaatatcccaaggatctcagggatcagcccacttcatac

SEQ ID NO: 8374 - DNA, 201 bp, Homo sapiens
agctgcatccactattgcccccaacaccccccacacatcaggtcccccagcgtctcacctttacaagccgtgagagacacatcagaaccctgcgcatggtygctgcctggggtagaacaaaaacaggacttggtcagagcccagaggagatgcggctagaggaggaatctggggttgggtgagctcccccatgggctcccg

SEQ ID NO: 8375 - DNA, 201 bp, Homo sapiens
catggtggacatgggggtggggtggtctccccacctcctcacattatgcctacacgaacacagacacatgcaggtgcctttgcagaaacaaagtcagggtwcttcaagtcacaaagggaagggcaggaacaactcttgcctctcagtcccacacaaggcagctgtctcacactatagaaaaaaatattcatgaacaaattc

SEQ ID NO: 8376 - DNA, 201 bp, Homo sapiens
gtctggagtgtttcctgtaagcattcttctagtagttttatagttttgggacttacatttaaatctttaatccattttgagttgatttctgtatatggtgrgagacggttctagtggtattcttctgcatctggtagcattttcccagctccatttattctccattgttgcttttgttctttctccattgtatattctcag

SEQ ID NO: 8377 - DNA, 201 bp, Homo sapiens; identical to SEQ ID NO: 1084

SEQ ID NO: 8378 - DNA, 201 bp, Homo sapiens
ttttacaaattggaataagaggacactggtgtgcagatgaaaatgattttgtagtccaaatcctccaaaaagcaagtgccatcatgggattaaagttacarcattttattaggggacatacctgtcagacgatattgtgagggagtcaggttaccctgggaaaggcaacaggccgagatgcaagtgtgacccccagtgatg

SEQ ID NO: 8379 - DNA, 201 bp, Homo sapiens
cctgggtctggtcctccccatcccgctgccaggtcagtgtgatctccgcagggtagaagctcagggcccagcacctcagggtggcttcatggtcagagacrgcgtggtgagtcatatgcgttttgggggcgtctgtcaggaagagtcagatcattcaggcattttgcatctgtcatgggacactcctccagcacacatgtg

SEQ ID NO: 8380 - DNA, 201 bp, Homo sapiens; identical to SEQ ID NO: 1093

SEQ ID NO: 8381 - DNA, 201 bp, Homo sapiens; identical to SEQ ID NO: 1094

SEQ ID NO: 8382 - DNA, 201 bp, Homo sapiens
cgggtaaagggtctccaggttccgctgcctcggcgtggatctcggacccagagactcggggagacccgggcggtccgtgggggatgtagaggggtagtgabctgcgcccccggccggtgtcactcacaggcctcactctggttgtagtagccgctcagggtccgcaggttcactcggtaaaactgtgctttggccttggcg

SEQ ID NO: 8383 - DNA, 201 bp, Homo sapiens
cctgggcctctcccgggtaaagggtctccaggttccgctgcctcggcgtggatctcggacccagagactcggggagacccgggcggtccgtgggggatgtrgaggggtagtgatctgcgcccccggccggtgtcactcacaggcctcactctggttgtagtagccgctcagggtccgcaggttcactcggtaaaactgtgc

SEQ ID NO: 8384 - DNA, 201 bp, Homo sapiens
ggccagccccgcccaccgagccccgccctcgccaggaccaacctgcggggattttggctgaaaatgaaaccgggtaacggctcctgggcctctcccgggtvaagggtctccaggttccgctgcctcggcgtggatctcggacccagagactcggggagacccgggcggtccgtgggggatgtagaggggtagtgatctgcg

SEQ ID NO: 8385 - DNA, 201 bp, Homo sapiens
tacttcttggtttttggacccacgtattcttccttctgtaaacacagcactatagagacatctttgattcaatacatgcaccacatcctgaaagatggcasccattcctcagagggtttcatccaagctggcactaagttgtgtctgtagagacctgtccatgactctgtgtggctggcagcccctgggaggtgcaggtgg

SEQ ID NO: 8386 - DNA, 201 bp, Homo sapiens
cactgtgactttcccactggtgcttggttcagctccatcctgcatctttccctaccaatggcatcaccagcaccagggggtctgagagatggtggctgctygcaccatggcctggatctgctgcagggtccttttctgtgtgggccctacttgaagctggcctcctcctatgtcacctagagtgtgggccaaagcaacata

SEQ ID NO: 8387 - DNA, 201 bp, Homo sapiens
ctcatgatggatgctgttgggcctgtctaatctatgactctgtgggtcacacaggcactcgaaccacatagttgcttggtgtcccgtggtcaagcattctrtctaatcaggacaagggacactaaaagttgcttctaataggtggcatatgtctctgctgtgaatgacatgaccttactccagaatcccaggcctttcact

SEQ ID NO: 8388 - DNA, 201 bp, Homo sapiens
atacatccaattcaaagaaaccccatagcacagctgcatccactattgcccccaacaccccccacacatcaggtcccccagcgtctcacctttacaagccrtgagagacacatcagaaccctgcgcatggtcgctgcctggggtagaacaaaaacaggacttggtcagagcccagaggagatgcggctagaggaggaatct

SEQ ID NO: 8389 - DNA, 201 bp, Homo sapiens
ccattttcacctcatgatggatgctgttgggcctgtctaatctatgactctgtgggtcacacaggcactcgaaccacatagttgcttggtgtcccgtggtbaagcattctatctaatcaggacaagggacactaaaagttgcttctaataggtggcatatgtctctgctgtgaatgacatgaccttactccagaatcccag

SEQ ID NO: 8390 - DNA, 201 bp, Homo sapiens
cagcccatcacatgttcaatacatccaattcaaagaaaccccatagcacagctgcatccactattgcccccaacaccccccacacatcaggtcccccagcktctcacctttacaagccgtgagagacacatcagaaccctgcgcatggtcgctgcctggggtagaacaaaaacaggacttggtcagagcccagaggagatg

SEQ ID NO: 8391 - DNA, 201 bp, Homo sapiens
acagcccatcacatgttcaatacatccaattcaaagaaaccccatagcacagctgcatccactattgcccccaacaccccccacacatcaggtcccccagygtctcacctttacaagccgtgagagacacatcagaaccctgcgcatggtcgctgcctggggtagaacaaaaacaggacttggtcagagcccagaggagat

SEQ ID NO: 8392 - DNA, 201 bp, Homo sapiens
taaacaaaaggattttacaaattggaataagaggacactggtgtgcagatgaaaatgattttgtagtccaaatcctccaaaaagcaagtgccatcatgggrttaaagttacaacattttattaggggacatacctgtcagacgatattgtgagggagtcaggttaccctgggaaaggcaacaggccgagatgcaagtgtga

SEQ ID NO: 8393 - DNA, 201 bp, Homo sapiens
ggtggaccattttcacctcatgatggatgctgttgggcctgtctaatctatgactctgtgggtcacacaggcactcgaaccacatagttgcttggtgtcchgtggtcaagcattctatctaatcaggacaagggacactaaaagttgcttctaataggtggcatatgtctctgctgtgaatgacatgaccttactccagaa

SEQ ID NO: 8394 - DNA, 201 bp, Homo sapiens
catgaacaaattcatatccgtcacagtgagggatgacactttaaacagcccatcacatgttcaatacatccaattcaaagaaaccccatagcacagctgcrtccactattgcccccaacaccccccacacatcaggtcccccagcgtctcacctttacaagccgtgagagacacatcagaaccctgcgcatggtcgctgcc

SEQ ID NO: 8395 - DNA, 201 bp, Homo sapiens
aatttaagtcaattctttcaactcaatgttttcagaacacatcatcaacatcaagtattacacatttattttaaaagttccattttaaaagggaatggatgatatgttgtttggactttagccagcactgttgtaaaacacagaacctgtaaactaccctgggctgctgcccattcacatcccccaaaaggagactccatc

SEQ ID NO: 8396 - DNA, 201 bp, Homo sapiens
cccacacaaggcagctgtctcacactataaaataaaatattcatgaacaaattcatatccgtcacagtgagggatgacactttaaacagcccatcacatgytcaatacatccaattcaaagaaaccccatagcacagctgcatccactattgcccccaacaccccccacacatcaggtcccccagcgtctcacctttacaa

SEQ ID NO: 8397 - DNA, 201 bp, Homo sapiens
tttgtctgtttggttgttcagtgccacttcagacttgggtattttctctgggtgtaaacatgggattcaagctcaacccaggtggaccattttcacctcaygatggatgctgttgggcctgtctaatctatgactctgtgggtcacacaggcactcgaaccacatagttgcttggtgtcccgtggtcaagcattctatcta

SEQ ID NO: 8398 - DNA, 201 bp, Homo sapiens
aggcgtgaacaaatcttgcctctcagtcccacacaaggcagctgtctcacactataaaataaaatattcatgaacaaattcatatccgtcacagtgagggrtgacactttaaacagcccatcacatgttcaatacatccaattcaaagaaaccccatagcacagctgcatccactattgcccccaacaccccccacacatc

SEQ ID NO: 8399 - DNA, 201 bp, Homo sapiens
tgtgtggttttgttccaatgtaagtagttcttgttaaggatgcttgcaatgaactttggtattcttttctctttcatttttataaaaaccaagcatattttactttgaaaaaatctgtttaaggaattaggaatttaagtcaattctttcaactcaatgttttcagaacacatcatcaacatcaagtattacacatttatt

SEQ ID NO: 8400 - DNA, 201 bp, Homo sapiens
caggaacacaggcacattcaggtgcctttgcagaaagagagtcagggtttttgaagtcacaaagggaaggcgtgaacaaatcttgcctctcagtcccacasaaggcagctgtctcacactataaaataaaatattcatgaacaaattcatatccgtcacagtgagggatgacactttaaacagcccatcacatgttcaata

SEQ ID NO: 8401 - DNA, 201 bp, Homo sapiens
ataaagttgagacagagatggagacatctcagcctcacctctatggagcaggaatgattaattattggagacggaacacaggtcagcatgagggaagaggrtcatggtggacatgggggtgggttggtctccccacctcctcatattatgcctacaggaacacaggcacattcaggtgcctttgcagaaagagagtcaggg

SEQ ID NO: 8402 - DNA, 201 bp, Homo sapiens
aagtaaatttatactcagattctaattttaatagggaagtaagaagttacagctcagtgcacataaagttgagacagagatggagacatctcagcctcacstctatggagcaggaatgattaattattggagacggaacacaggtcagcatgagggaagagggtcatggtggacatgggggtgggttggtctccccacctc

SEQ ID NO: 8403 - DNA, 201 bp, Homo sapiens; identical to SEQ ID NO: 1101

SEQ ID NO: 8404 - DNA, 201 bp, Homo sapiens; identical to SEQ ID NO: 1102

SEQ ID NO: 8405 - DNA, 201 bp, Homo sapiens
tgatcaatgatgtgcatttccaattctgtaaaagtttaattcagtggtatgtgtggtagaatgtaacatcaaatcctttgcaagatggaattaccttgcacatcagattgaagattgtatacatgaaaatctacagagatgccagtgagccaaggatcaaatgacctatttgtagccaaagccattttcatggcctcgtgg

SEQ ID NO: 8406 - DNA, 201 bp, Homo sapiens; identical to SEQ ID NO: 1104

SEQ ID NO: 8407 - DNA, 201 bp, Homo sapiens
ttttgatcaatgatgtgcatttccaattctgtaaaagtttaattcagtggtatgtgtggtagaatgtaacatcaaatcctttgcaagatggaattaccttgcacatcagattgaagattgtatacatgaaaatctacagagatgccagtgagccaaggatcaaatgacctatttgtagccaaagccattttcatggcctcg

SEQ ID NO: 8408 - DNA, 201 bp, Homo sapiens
aatagcatgccatcaggtgcttctgaagtggttttgtttgtttctttgttttcgcagtcctattgtgttttctattcatattgctattccgtcactggttrttcctttctactcttttcttgtttcatttattttgatcaatgatgtgcatttccaattctgtaaaagtttaattcagtggtatgtgtggtagaatgtaac

SEQ ID NO: 8409 - DNA, 201 bp, Homo sapiens
gaatggggagataaccaggactgggtttatgaacccagtggtcccacagtgggccataatgtgtccaggtttatttcctggcctccttaagccccactgtrgattctgaatctgaagcttggctgaagtctaggaattgagactgggatcatgactttgtatttgatcaaacaccctcagtctcctgctcctcaattcttg

SEQ ID NO: 8410 - DNA, 201 bp, Homo sapiens
ccaggtttatttcctggcctccttaagccccactgtagattctgaatctgaagcttggctgaagtctaggaattgagactgggatcatgactttgtatttratcaaacaccctcagtctcctgctcctcaattcttgcattcccatcatagatatgaagcagtgccctcgctggctgcccatctgttctgacgctgggaca

SEQ ID NO: 8411 - DNA, 201 bp, Homo sapiens
caggtttatttcctggcctccttaagccccactgtagattctgaatctgaagcttggctgaagtctaggaattgagactgggatcatgactttgtatttgrtcaaacaccctcagtctcctgctcctcaattcttgcattcccatcatagatatgaagcagtgccctcgctggctgcccatctgttctgacgctgggacac

SEQ ID NO: 8412 - DNA, 201 bp, Homo sapiens
agtatccactgctaagtgttgtgtatattttataggaacacttagtaatttttaaacctgattaacattaaaaaattagtttttaggcagacccacatgargtattaaaggccaactgccaaggacaccctgctaggctctgtagatggatgtattaaaatccataaaacaatgtatttaaacctaagaattctgctgctt

SEQ ID NO: 8413 - DNA, 201 bp, Homo sapiens
acacctccatgctagcaacattactgaaatgcagggaggaacaagtgattcaattgggaggaaaaaaagcaaagtgatgacatttactcctagacaaaachttttaggaaaatgtatcttaaaagtaggagaaaaacatataatacctgcaatcccctgcaaaagaagcctctttagcttactacttgttcatcgtctttc

SEQ ID NO: 8414 - DNA, 201 bp, Homo sapiens
tgggcctcaattgctaatgagttggacattcagaggtgtcggcagctggatctgccttggtaggggggagtcagtgctgttggccccatacgtagcctcakgcctgccactgtggttgctccattcatgaactcatcctaccaaaccagggctgacccatggtgaaggctggctaacttccatttgtctgtttggttgttc

SEQ ID NO: 8415 - DNA, 201 bp, Homo sapiens
caacctctcatggcaagaatttgaaaaagtaaatttatactcagattctaattttaatagggaagtaagaagttacagctcagtgcacataaagttgagayagagatggagacatctcagcctcacctctatggagcaggaatgattaattattggagacggaacacaggtcagcatgagggaagagggtcatggtggaca

SEQ ID NO: 8416 - DNA, 201 bp, Homo sapiens
gtctctcaaattttaggaatcttctcctttaattaacccatcaacctctcatggcaagaatttgaaaaagtaaatttatactcagattctaattttaatarggaagtaagaagttacagctcagtgcacataaagttgagacagagatggagacatctcagcctcacctctatggagcaggaatgattaattattggagac

SEQ ID NO: 8417 - DNA, 201 bp, Homo sapiens
ccttgccaggggtcctggggctgccggttgttctgggtgctcagtgtccagagaggaggatggggaggaggctttgtgcagaacaggaaccgtggagctgratgcacactcagtaatgagacagccctgccaggggtcctggggctgccggttgttctgggtgctcagtgtccagagaggaggatggggaggaggctttgt

SEQ ID NO: 8418 - DNA, 201 bp, Homo sapiens
catgcaacaaatcagcataagaaacatgtggactctggaaggttctcatgtcttccatttattttgtctctcaaattttaggaatcttctcctttaattarcccatcaacctctcatggcaagaatttgaaaaagtaaatttatactcagattctaattttaatagggaagtaagaagttacagctcagtgcacataaagt

SEQ ID NO: 8419 - DNA, 201 bp, Homo sapiens
aaacctgcttccatcttttgatccctggacacacatgttcttcctattgagaacacagcactctagagacatctctgattcaaacaatgcaccgtgtcctraaagatggcacccacctctcagagtgcttcctccaggctggcactgagttttgcctgtagaagacctgtccagcattccttgtggctggcagcctctgga

SEQ ID NO: 8420 - DNA, 201 bp, Homo sapiens
ccagctgagcagtgaccacataaagcgcacggtggcctgagcacccactgggcacagccccatctactctcctctcatgcaacaaatcagcataagaaacwtgtggactctggaaggttctcatgtcttccatttattttgtctctcaaattttaggaatcttctcctttaattaacccatcaacctctcatggcaagaat

SEQ ID NO: 8421 - DNA, 201 bp, Homo sapiens
tcatttgctgtgctgaagctatttagtttaatatagtcccacttgtctattttatttttgttgcctgtgcttttgaggtcttagccataaagtctttgccbagacccatgtctggagtgtttcctgtaagcattcttctagtagttttatagttttgggacttacatttaaatctttaatccattttgagttgatttctgt

SEQ ID NO: 8422 - DNA, 201 bp, Homo sapiens
ccctgcacagcccagtgttggaagataaaacgtgcaaaataccccattgggtgaatctaagggattggacgtggagccaaacctgcttccatcttttgatycctggacacacatgttcttcctattgagaacacagcactctagagacatctctgattcaaacaatgcaccgtgtcctaaaagatggcacccacctctcag

SEQ ID NO: 8423 - DNA, 201 bp, Homo sapiens
gcgatgagctgtgacatccttctccccaccttcaatctcagccccagcaggcacctcctgggcgcagaagcagtgcagcggcgccacctggcggtctgcamtcttcctttcccagatcaagcacagccctgaaatccacctgtccctcctctgtgcctgtgatttcttcaggggacaccagcgtgggtcaactttcttgta

SEQ ID NO: 8424 - DNA, 201 bp, Homo sapiens
tgtcttttgtctccttttaagggtaccctccttggaaaccaggacctcgtaccctgcacagcccagtgttggaagataaaacgtgcaaaataccccattgrgtgaatctaagggattggacgtggagccaaacctgcttccatcttttgatccctggacacacatgttcttcctattgagaacacagcactctagagacat

SEQ ID NO: 8425 - DNA, 201 bp, Homo sapiens
cacacggggagaaaacccgctaagccccgtagggctggatcatacagccaaggacaacggagcagcaaagatgacccagctgagcagtgaccacataaagygcacggtggcctgagcacccactgggcacagccccatctactctcctctcatgcaacaaatcagcataagaaacatgtggactctggaaggttctcatgt

SEQ ID NO: 8426 - DNA, 201 bp, Homo sapiens
tctttgtcttgtgcttttatttattacaatctctcatctccgcacacggggagaaaacccgctaagccccgtagggctggatcatacagccaaggacaacrgagcagcaaagatgacccagctgagcagtgaccacataaagcgcacggtggcctgagcacccactgggcacagccccatctactctcctctcatgcaaca

SEQ ID NO: 8427 - DNA, 201 bp, Homo sapiens
gggcccagctgttttctctttatctctttgtcttgtgcttttatttattacaatctctcatctccgcacacggggagaaaacccgctaagccccgtagggmtggatcatacagccaaggacaacggagcagcaaagatgacccagctgagcagtgaccacataaagcgcacggtggcctgagcacccactgggcacagccc

SEQ ID NO: 8428 - DNA, 201 bp, Homo sapiens
gtggtcccccgggcccagctgttttctctttatctctttgtcttgtgcttttatttattacaatctctcatctccgcacacggggagaaaacccgctaagycccgtagggctggatcatacagccaaggacaacggagcagcaaagatgacccagctgagcagtgaccacataaagcgcacggtggcctgagcacccactg

SEQ ID NO: 8429 - DNA, 201 bp, Homo sapiens
ttgagaggaggggagggcactgggtttttcccaggtcttgtcctttggtcctggggctcttttcctccttgcatggtggctggtgggcacagggcaggggytgatgttgatggagtcacgggaggggactggcaggggctgggaaaagtgccatgggagggagaaaaaagtgcagacatcatcttccctcggagaaagggt

SEQ ID NO: 8430 - DNA, 201 bp, Homo sapiens
ccgcctcccacttgcgctgggtaatctgagccgccatggccgccgcagtccaagagctcaggtcctggtttagggcgatgtaatctttttacagagaatcstttttacagagaatggggagataaccaggacaggatttatggacccagtgattccaccgtggggcataatttgtccaggtttattccctggcctctgtaa

SEQ ID NO: 8431 - DNA, 201 bp, Homo sapiens
agccaaggatcaaatgacctatttgtagccaaggctgtttttcatggcatcctggtcctctcacatggctccttaaaattggctgtggcttgttttttgtrgttgtttgtttgtttgttttgagatggagtatggctctgtcacccaggctggagtgcgatggcaggatctcagctcactgcaacttctgccttccaggtt

SEQ ID NO: 8432 - DNA, 201 bp, Homo sapiens
tggaatgtggtgttgccaggacccagagaagctcaccaaatagtgtgcttccttccttctgttgaggatgcaagatgcaagtttgtcttttactttggagrggacagccctgcatgcccctaaccactggacccataacacttcactgcagtggccactcttgaagctctgtaaggttaatcttcaccttctgtagtgcac

SEQ ID NO: 8433 - DNA, 201 bp, Homo sapiens
ccactggacccataacacttcactgcagtggccactcttgaagctctgtaaggttaatcttcaccttctgtagtgcacacgttttgccaaagaattcagcrtactttcctcctcttactcatccatcccaatctatgtgatattgccaatgaaatgaagagatttagtattctgtgagatgtctgatttgtccagatctct

SEQ ID NO: 8434 - DNA, 201 bp, Homo sapiens
ccatctgttctgacgctgggacaccaccttttactaacctttcccaaaactccatgaaggttgagcccctttggctgctactctgggttctcacagtaacygtgccctctatcttttgcaggtcactgcaaaggagggttcctaaagcattcactcctgatcctgagggaggtgggtgcactcactccaggtctcaggtcc

SEQ ID NO: 8435 - DNA, 201 bp, Homo sapiens
cctgaagatgaggatctattacctgggcctggagaggaggagaatcctcttttcaccaggtggtctctgggcacaaactatcaaaacttctctcgtgacarccataatgtgtagttcagtgggctgtcttttgtctccttttaagggtaccctccttggaaaccaggacctcgtaccctgcacagcccagtgttggaagat

SEQ ID NO: 8436 - DNA, 201 bp, Homo sapiens
gaagatgaggccacccgctatgtggctccaagtgctcgggtggaggagatgaagggatcagtacagtagtcgggggaaattctctcaatcccaccctgcaytaccctcacctctgcagctttttgcctatttccaactctcagctccttccacccccaccccagcccagccctcagggctccctctctccagccctccctc

SEQ ID NO: 8437 - DNA, 201 bp, Homo sapiens
gagcttttgctctagttcaggaggtgtgtagggagcctcactagtccaacagagcttggtaccagtgtcatatgccaggaaccaaggttataagggatacmatgtccccagacctaccagagaaggcaaactcatacagcttgcaggaccagacaaggacaagaaacaagttcaaaagagggaaagggaaactacagacgt

SEQ ID NO: 8438 - DNA, 201 bp, Homo sapiens
cttcttctgccttctcaacatagggcttcaacatgtggattttggtggcgtaggaacacaattcctcttgtaacagtctggatcgtctttgacaatggatrttctaaaaaataaaagagagtaatagacagtacaaccctttggctgaaatctttctcttggttttctaaaattttggtcttgcaatagaaaaaacaagaa

SEQ ID NO: 8439 - DNA, 201 bp, Homo sapiens
cctggcaccccagggctcataaacatgctgctcccaaaactccaaggcaagtatggaagggcagaacagcttctgggacagtgggaagatgaggccacccsctatgtggctccaagtgctcgggtggaggagatgaagggatcagtacagtagtcgggggaaattctctcaatcccaccctgcattaccctcacctctgca

SEQ ID NO: 8440 - DNA, 201 bp, Homo sapiens
gaggagcactgagctgcaggtggagggcagaaccacagtgtttagggcctgcctttgtgtgcaggtgtctctacaggtgaggtgggactggggactgaggragagaaggactgtgcgtgtgacccagcccagtcctggaaggacatggagccagggccagagcctctctttggggagtcctcctgctgtcagagctggcca

SEQ ID NO: 8441 - DNA, 201 bp, Homo sapiens
tggattttggtggcgtaggaacacaattcctcttgtaacagtctggatcgtctttgacaatggatgttctaaaaaataaaagagagtaatagacagtacawccctttggctgaaatctttctcttggttttctaaaattttggtcttgcaatagaaaaaacaagaaagagaaccaaagtttagttcttcccggaaggtgag

SEQ ID NO: 8442 - DNA, 201 bp, Homo sapiens
tgatcaaaaccggggccatccactcccttctgagccacctctgcctggggggcccgtggctgtgtcctccagtcacaacagaacactccttcagaacactygcaggaagacaacatcttgtcattggctcacacatgcacggtgcatgcacagagctttggttctagttcaggaggtgtgtggggaggaggctcactagtc

SEQ ID NO: 8443 - DNA, 201 bp, Homo sapiens
ccaccgacgccacaaggtagagggcgaggacagcgaggtcggccggattccgcacccctgcctccaaccaccgcccatgggcggggaggagagactaccgrccgcaagcagaacgcagaacgagaagagcggtcccgttagccatgaatgtgtccctcatctgtaccgcctccggccccgcccgggagaacgcgacgtcac

SEQ ID NO: 8444 - DNA, 201 bp, Homo sapiens
aacttagtggctgaaaacagcacccatttatttgtctacatttccttcatcagaaatccaggcctaatgtgatagactctttgttcagagtttcgcaaagytgtatcctcatcttaagattggggttctcccccaagcttgtgtagagtttgttggcagaattcggtttctggcaattgtaggattaaggtccctgtttcc

SEQ ID NO: 8445 - DNA, 201 bp, Homo sapiens
tgatctgtcactggttgggaacagcccattggaagcaggacctcagcaccaatgctactgaggatgtcagagcacaggagcagggccttgggagattaccsagcattactcaaaccttctgccctgacgggtctgggtccttggaaatcaagctgtctcaggctgaattgctggatgattctgctcacacttacaatgagg

SEQ ID NO: 8446 - DNA, 201 bp, Homo sapiens
tcctgctttcgtgtcactggtgtgatctgtcactggttgggaacagcccattggaagcaggacctcagcaccaatgctactgaggatgtcagagcacaggwgcagggccttgggagattacccagcattactcaaaccttctgccctgacgggtctgggtccttggaaatcaagctgtctcaggctgaattgctggatgat

SEQ ID NO: 8447 - DNA, 201 bp, Homo sapiens
ctaaacccctccctgtggtgctgtgcttcagtggtcatgctccttgtccactttcatgctcctcctgtactcctggttcctctttgaatttcgtagtagawaatggtagaagaaatagtgaaagtcttaaagtctttgatcttaagtgcagaaaagaaaatggtgacatatgctacctaaaagggaagggccccctatcct

SEQ ID NO: 8448 - DNA, 201 bp, Homo sapiens; identical to SEQ ID NO: 1058

SEQ ID NO: 8449 - DNA, 201 bp, Homo sapiens
ccagaggcctaaacccctccctgtggtgctgtgcttcagtggtcatgctccttgtccactttcatgctcctcctgtactcctggttcctctttgaatttcrtagtagataatggtagaagaaatagtgaaagtcttaaagtctttgatcttaagtgcagaaaagaaaatggtgacatatgctacctaaaagggaagggccc

SEQ ID NO: 8450 - DNA, 201 bp, Homo sapiens
gcttcttgtagaaggctggatattatccagagctacccgcagtcatccagaggcctaaacccctccctgtggtgctgtgcttcagtggtcatgctccttgyccactttcatgctcctcctgtactcctggttcctctttgaatttcgtagtagataatggtagaagaaatagtgaaagtcttaaagtctttgatcttaagt

SEQ ID NO: 8451 - DNA, 201 bp, Homo sapiens
cttagcagaccatgaaagggagtctccctttcttggaggagtcggggaacactctgctccaccagcttcttgtagaaggctggatattatccagagctacycgcagtcatccagaggcctaaacccctccctgtggtgctgtgcttcagtggtcatgctccttgtccactttcatgctcctcctgtactcctggttcctct

SEQ ID NO: 8452 - DNA, 201 bp, Homo sapiens
ccgcttgagggatccttggtcaagtggcaatgccaatgtctgggaaggcacctgttacttagcagaccatgaaagggagtctccctttcttggaggagtcrgggaacactctgctccaccagcttcttgtagaaggctggatattatccagagctacccgcagtcatccagaggcctaaacccctccctgtggtgctgtgc

SEQ ID NO: 8453 - DNA, 201 bp, Homo sapiens
gatcatgaaaaattatcaatcattattataaacattattaatcattagcttttaatattactctttgttgcattactaagataacctaggaataactggcrggcatagggtcaggtgctgaagggacattgtgagaagtgacctagaaggcaagagatgagccttctgtcacgcccgcataagggccgcttgagggatcct

SEQ ID NO: 8454 - DNA, 201 bp, Homo sapiens
agtgtctttagagtactgatgagaagactcttggctgagtggatcctggatatcttaagaacggtggctagctgccagagacacatacctgtgatgcgagkgttatctttttccattttgtgttgctataaagaaatgtctgagactgactaatttatataaacgaggttcatgtggctcaagattctgatgtctggaaat

SEQ ID NO: 8455 - DNA, 201 bp, Homo sapiens
ccctaaccactggacccataacacttcactgcagtggccactcttgaagctctgtaaggttaatcttcaccttctgtagtgcacacgttttgccaaagaaytcagcgtactttcctcctcttactcatccatcccaatctatgtgatattgccaatgaaatgaagagatttagtattctgtgagatgtctgatttgtccag

SEQ ID NO: 8456 - DNA, 201 bp, Homo sapiens
tgcatcaaggccaattatgcatgtggagaatggggagataaccaggactgggtttatgaacccagtggtcccacagtgggccataatgtgtccaggtttayttcctggcctccttaagccccactgtagattctgaatctgaagcttggctgaagtctaggaattgagactgggatcatgactttgtatttgatcaaacac

SEQ ID NO: 8457 - DNA, 201 bp, Homo sapiens
cctccacctcacagcagcgaccacagctccagtgatcacagctccaaagagaaccaggccagcaatgatgcccacgatggggatggtgggctgggaagacrgctctgggaaaagaggggaaggtgaggggccctgaccctgctaaaggtcagagaggctcctgctttccctaaaagacatgacacccccgtctccctcctt

SEQ ID NO: 8458 - DNA, 201 bp, Homo sapiens
tagagaataatggaaatgtaagagggcttcattagttatccattgctgtgtaacaaactactcccaaatttagtgacttgggatcactaaatgagggatcdtgttcccgtcattccctcagagattttatcccttaattgcgtcttcccgtcattgcctcagagattttatcccttaattgtgtcagagagcagtgtggaa

SEQ ID NO: 8459 - DNA, 201 bp, Homo sapiens
gaatcaactgcattggaaccctgaaaaatcatcaaaggtttattgcaacctagcaagtccagaaaaatcaactggaactcaggagcagagctttgtggcamcatatcttacccttggcccattcctccctgttcaagtcagtagtgatcttgaagacagcagcctggttccttagtgtgggctccaatgccagtgggagcc

SEQ ID NO: 8460 - DNA, 201 bp, Homo sapiens
atcaaaataggagaaaataaaacagatgtagttaacctctagagaataatggaaatgtaagagggcttcattagttatccattgctgtgtaacaaactackcccaaatttagtgacttgggatcactaaatgagggatcgtgttcccgtcattccctcagagattttatcccttaattgcgtcttcccgtcattgcctcag

SEQ ID NO: 8461 - DNA, 201 bp, Homo sapiens
aataatggggggaaggtgaatgaccaggagcttgttgttgaggccatcatagaatcagcctagcaagggctggatcttctttttgtgttcacttgggacayagttgcaaattgaagttcaagtaaagtaatcattgtgaacggtaataaaatacatccttttcagccacgaaaattctccttaccttttaaaactaagtta

SEQ ID NO: 8462 - DNA, 201 bp, Homo sapiens
ttatttcctggcagtacataaccaattaccacaaacttagtggctgaaaacagcacccatttatttgtctacatttccttcatcagaaatccaggcctaaygtgatagactctttgttcagagtttcgcaaagctgtatcctcatcttaagattggggttctcccccaagcttgtgtagagtttgttggcagaattcggtt

SEQ ID NO: 8463 - DNA, 201 bp, Homo sapiens
ctccggatcccgcactcacccgcccaggtctcggtcagggccagggcccccaagagcagcaggaggagggttcgggacgccatgaccccatcctcggcgtmtggggagaatctgagtcccaatgggttcgcggggacttctggaacagggaccccagcgacgccgattggcttcgctagaaacccgacaccaaatgggggt

SEQ ID NO: 8464 - DNA, 201 bp, Homo sapiens
tcagattgtttcatttcttcacttaaaagcctctaatggctccatcttactctcaagaagcctctagaatggaaggcacaagcacaggggctttgggttgytttgatcaaagttgtatctacagaatataaaagtatatctgccacatagtaggcactaagttaatttttgttgaatgaatgaatgaaatataattgtgtt

SEQ ID NO: 8465 - DNA, 201 bp, Homo sapiens
tgtcactactgaattgtgtccctagctctgtcccttgcctgctgcccatgactgttctccccacaaaggtcagcaatcctgctaatgtgagtcagattgtktcatttcttcacttaaaagcctctaatggctccatcttactctcaagaagcctctagaatggaaggcacaagcacaggggctttgggttgttttgatcaa

SEQ ID NO: 8466 - DNA, 201 bp, Homo sapiens
ctccagcccttctctctgtccctgtcatccttcaggccctcctctccccttagtctctactactctgtcactactgaattgtgtccctagctctgtccctygcctgctgcccatgactgttctccccacaaaggtcagcaatcctgctaatgtgagtcagattgtttcatttcttcacttaaaagcctctaatggctccat

SEQ ID NO: 8467 - DNA, 201 bp, Homo sapiens
atgatcaaaaccggggccatccactcccttctgagccacctctgcctggggggcccgtggctgtgtcctccagtcacaacagaacactccttcagaacacycgcaggaagacaacatcttgtcattggctcacacatgcacggtgcatgcacagagctttggttctagttcaggaggtgtgtggggaggaggctcactagt

SEQ ID NO: 8468 - DNA, 201 bp, Homo sapiens
tgggagatgagggaggaggagcaggggtggctctcacctgggctctgtccgtggaggtgaggacaatgaggtggttgggtctcagtgctgtgtggaacttkcttttgacctccttatgagtggatggtctgtctgagatagaacgggtcttagaggatttactcattaccctgagagagggggcgtgttcattccaggttt

SEQ ID NO: 8469 - DNA, 201 bp, Homo sapiens
aaaacaagaaagagaaccaaagtttagttcttcccggaaggtgaggcctcctccctaagtctgtgtaatcccagacactaagacatggtgctgtgcagttvtccaaagtcctactcactccagtgattctgtttctgtctttttaactgagcagaagagtctctttcaggagagcaacttcttctgatgctttatgggctt

SEQ ID NO: 8470 - DNA, 201 bp, Homo sapiens
aacttatggaatgaaaaagatcttaataaaaaggaaaatatttgccaaatttttatcatgctcataatttttgtacctttttaaatgccccatattgtgtkgtttattttttaaattttttaaaattggtacataatatttgtacatatttatgggatacatgtgacattttgatacatgcatagaatgtgtgtatcagtc

SEQ ID NO: 8471 - DNA, 201 bp, Homo sapiens
ccacgcccagccaaatccactcttatagctattttgaaatatacatttttgttaactttagtcagtctgctgtgctatcaaacattagaacttattttctbtatataattggacatttgcatccattaacctgcatctctatattttcccacccctacattcttcccagtttctgggaactgtcattctactctctctacc

SEQ ID NO: 8472 - DNA, 201 bp, Homo sapiens
gtgatatggcaagggaggtaggttaccctgggaaaggcaacaagatgcaaaggtgatccccagtgatggacagaaggagacaaggtttactggatgtgccrtagaccacaggcaatctaaggagagttaagcaaggccatggaggagtccttgagctacagttggccatcagaggagtccctggtctcccaggaatgtcct

SEQ ID NO: 8473 - DNA, 201 bp, Homo sapiens
tgatgagctgagtcctggtggactcggcgcagacaatggtgctgaggctgtgggagatgagggaggaggagcaggggtggctctcacctgggctctgtccrtggaggtgaggacaatgaggtggttgggtctcagtgctgtgtggaactttcttttgacctccttatgagtggatggtctgtctgagatagaacgggtctt

SEQ ID NO: 8474 - DNA, 201 bp, Homo sapiens
ggatggaagtagctaaatgtagtcaacttgttacttagtggctagttagtcacctaaagaaatagtgccccactggggcacatcatgggcctcaattgctratgagttggacattcagaggtgtcggcagctggatctgccttggtaggggggagtcagtgctgttggccccatacgtagcctcatgcctgccactgtggt

SEQ ID NO: 8475 - DNA, 201 bp, Homo sapiens
aaatacaatgaggaaagagccctgggaagagggcaagagcttgaaagatctgaaaatttgtctcttgataccacaaggaccctggtatgcagggactgccrtaggtgacatccaagtccctgtgatcacaggtcatggtgggacaaggttctactgaagggccaagtgtgggtggaggattactcaggtgccgaggcaaga

SEQ ID NO: 8476 - DNA, 201 bp, Homo sapiens
aaaaagattttacacattggaataagtaagagatcactagtgggcagatgaaaatgattttatagtccaaatgctccaaaaagcaagttccatcatgggabtaaagttatagcattttattaggggacacacctgtcaggtgatatggcaagggaggtaggttaccctgggaaaggcaacaagatgcaaaggtgatcccca

SEQ ID NO: 8477 - DNA, 201 bp, Homo sapiens
gattaaacaataaacattgaggaactcaaaagcataatacaaataccagcaaaatggagccaatgcaggtagaagttgaataaacaaaaagattttacacvttggaataagtaagagatcactagtgggcagatgaaaatgattttatagtccaaatgctccaaaaagcaagttccatcatgggattaaagttatagcatt

SEQ ID NO: 8478 - DNA, 201 bp, Homo sapiens
gcagaaaagatggaaaatacaatgaggaaagagccctgggaagagggcaagagcttgaaagatctgaaaatttgtctcttgataccacaaggaccctggtrtgcagggactgccataggtgacatccaagtccctgtgatcacaggtcatggtgggacaaggttctactgaagggccaagtgtgggtggaggattactcag

SEQ ID NO: 8479 - DNA, 201 bp, Homo sapiens
tggaaatgtaagagggcttcattagttatccattgctgtgtaacaaactacccccaaatttagtgattaaacaataaacattgaggaactcaaaagcatamtacaaataccagcaaaatggagccaatgcaggtagaagttgaataaacaaaaagattttacacattggaataagtaagagatcactagtgggcagatgaa

SEQ ID NO: 8480 - DNA, 201 bp, Homo sapiens
tgcagaaaagatggaaaatacaatgaggaaagagccctgggaagagggcaagagcttgaaagatctgaaaatttgtctcttgataccacaaggaccctggwatgcagggactgccataggtgacatccaagtccctgtgatcacaggtcatggtgggacaaggttctactgaagggccaagtgtgggtggaggattactca

SEQ ID NO: 8481 - DNA, 201 bp, Homo sapiens
cctcttggcaaatttcagaatctggttcctttaaaaagattgcagaaaagatggaaaatacaatgaggaaagagccctgggaagagggcaagagcttgaamgatctgaaaatttgtctcttgataccacaaggaccctggtatgcagggactgccataggtgacatccaagtccctgtgatcacaggtcatggtgggacaa

SEQ ID NO: 8482 - DNA, 201 bp, Homo sapiens
aactatgggaccctgcctcttggcaaatttcagaatctggttcctttaaaaagattgcagaaaagatggaaaatacaatgaggaaagagccctgggaagasggcaagagcttgaaagatctgaaaatttgtctcttgataccacaaggaccctggtatgcagggactgccataggtgacatccaagtccctgtgatcacag

SEQ ID NO: 8483 - DNA, 201 bp, Homo sapiens
agatgagccttctgtcacgcccgcataagggccgcttgagggatccttggtcaagtggcaatgccaatgtctgggaaggcacctgttacttagcagaccaygaaagggagtctccctttcttggaggagtcggggaacactctgctccaccagcttcttgtagaaggctggatattatccagagctacccgcagtcatcca

SEQ ID NO: 8484 - DNA, 201 bp, Homo sapiens
tattggagccagcactaggattactacaactcagggcaggaagaagagtaggagtgcagaagaggagttccaacagaaagttacctatgatgagaaactaygggaccctgcctcttggcaaatttcagaatctggttcctttaaaaagattgcagaaaagatggaaaatacaatgaggaaagagccctgggaagagggcaa

SEQ ID NO: 8485 - DNA, 201 bp, Homo sapiens
cctgagtgcatgagatagaatagagaccagtttgctttttgtttattaactatagtgggtagcataaccttggtaacccctgaatgatcaggaatctaatmggtaaaaaatgtgactttggcctgttggtatataaatgcatctaaaagcattacaacaggactcacaaagctcttaagtttcactttcccagacagtgta

SEQ ID NO: 8486 - DNA, 201 bp, Homo sapiens
ttcatcccggaatccctgtccctgaactggactccctgcctcccactccttgcctgtcctcctgtactcttctagaagaaaaatcaccccagggagcttgktgccagagagtgagctcgccctgggattgtaggtgtaaagacagggttttttttcccccttaaatctggaaaagttgtgcctgagtgcatgagatagaat

SEQ ID NO: 8487 - DNA, 201 bp, Homo sapiens
ttggtcaggctggtctcgaactcctgatctcgtgatccacaggcctcgacttcccaaagtgctaggatcacagaagtgagccaccgtgcccggccagctghggctttgttttactacgagtagttatcgcaaaggatgcttgtgatgaactttggcattttcttttctctttcatttccaaataatcaatcaggaatggca

SEQ ID NO: 8488 - DNA, 201 bp, Homo sapiens
gtgggagggtgctgttcattcactgttgctgctgaagttttactttttattattatacgacaattttgttaattcccattgatgtatatgtgattgtttcyagtttttgccataaacattggtgtacatgtctcctggacacatagccaagaatgtccccagggggtatgatcaggaggcagatggtgggattatatgatg

SEQ ID NO: 8489 - DNA, 201 bp, Homo sapiens
aaaaggaaaatatttgccaaatttttatcatgctcataatttttgtacctttttaaatgccccatattgtgttgtttattttttaaattttttaaaattgrtacataatatttgtacatatttatgggatacatgtgacattttgatacatgcatagaatgtgtgtatcagtcaagatatttagggtatccatgacctcaa

SEQ ID NO: 8490 - DNA, 201 bp, Homo sapiens
cacgaatctaatttgtaaaagagatgatttttggccccattatatataaatatgtctaaacgcattgcaattagactcacaaagtgaagttttactttccyagactgtgtatctgtgactctggtctgttgtatttttacagtatctttatttcatagctctgagtttgtgtgtgcgagtccaggacatctcaatacaaag

SEQ ID NO: 8491 - DNA, 201 bp, Homo sapiens
tgcgttactatatgttgcaaccgggagccagtacagactttattcacctcacagttgcaagtgttcaatgcagtcacaatgcccctcagcagtgctcatgygctgcctgtttttaggaagtattcacgtctaagtggtgtgtatatcttataggaacacttagtatttttaaaacctgattaattaaaaaaaattagtttc

SEQ ID NO: 8492 - DNA, 201 bp, Homo sapiens
gatcaatcccccggggatttgggcctgaactgaaaatggaatcgggtataggcacctggggttcttgtgtcgagggtctccacgagtcccgcagcctcggsgtgggtctccgattgtgctacagtgggtagcacaatcttggtagcccctgaatggtcacgaatctaatttgtaaaagagatgatttttggccccattata

SEQ ID NO: 8493 - DNA, 201 bp, Homo sapiens
tatctgtgactcccgcttgttttttacatttaccttcattccacagccctgagttactgggtgagtccaagacatctcctcaatataaagtagcacactgygttactatatgttgcaaccgggagccagtacagactttattcacctcacagttgcaagtgttcaatgcagtcacaatgcccctcagcagtgctcatgtgc

SEQ ID NO: 8494 - DNA, 201 bp, Homo sapiens
ctcctctgccccgatcaatcccccggggatttgggcctgaactgaaaatggaatcgggtataggcacctggggttcttgtgtcgagggtctccacgagtcycgcagcctcggcgtgggtctccgattgtgctacagtgggtagcacaatcttggtagcccctgaatggtcacgaatctaatttgtaaaagagatgattttt

SEQ ID NO: 8495 - DNA, 201 bp, Homo sapiens
atcggtaaaaaatgtaactttggccccttgatatataaatgtgtctgaaagcattacaacaggactcacaaagctactaagtttgactttcgcagacaatrtatctgtgactcccgcttgttttttacatttaccttcattccacagccctgagttactgggtgagtccaagacatctcctcaatataaagtagcacactg

SEQ ID NO: 8496 - DNA, 201 bp, Homo sapiens
tcattcttaaggcctttgctgagccactccgcccaccttcccggcaggtaggttttgagcagctctgcatgttcctcctccaaaacatctgagccgccttdtccgctgcggtccaagagagcagttcctggtttaggacgaggtaactggcgccatcgtagggtatgttcatccccgcgcgaagaggctccggtccgggtc

SEQ ID NO: 8497 - DNA, 201 bp, Homo sapiens
cattgcagcctctccttctcattcttaaggcctttgctgagccactccgcccaccttcccggcaggtaggttttgagcagctctgcatgttcctcctccaraacatctgagccgccttttccgctgcggtccaagagagcagttcctggtttaggacgaggtaactggcgccatcgtagggtatgttcatccccgcgcgaa

SEQ ID NO: 8498 - DNA, 201 bp, Homo sapiens
atgcctgcaatcccagcactttgggaggctgaggcaggcagatcatgaggtcaggagatagagactttcctggctaacatggtgaaaccccgtctctactraaaatacaaaaaaattagctgggcgtggtggcaggtgcctgtagtcccagctacttgggaagctgaatcaggagaatggcatgaacccaggaggcagagc

SEQ ID NO: 8499 - DNA, 201 bp, Homo sapiens
gagaaagggaaggaagaggccaggtgtggtggctcatgcctgcaatcccagcactttgggaggctgaggcaggcagatcatgaggtcaggagatagagacyttcctggctaacatggtgaaaccccgtctctactaaaaatacaaaaaaattagctgggcgtggtggcaggtgcctgtagtcccagctacttgggaagctg

SEQ ID NO: 8500 - DNA, 201 bp, Homo sapiens
ctcaggacaagagggagagggatattttagcgttggtcccattttcctccccttcttttggaaggtggctcagggatatctgcaggagatcagggaggcgmcccgtggcctctggtacctgcgcattgcagcctctccttctcattcttaaggcctttgctgagccactccgcccaccttcccggcaggtaggttttgagc

SEQ ID NO: 8501 - DNA, 201 bp, Homo sapiens
cccaccaccacgcccggctaatttttttttttttttttgtatttttagtagagacggggtttcaccatgttagccaggatggtctcgatctcctgacctcrtgatccaccctcctcggcctcccaaagtgctgggatcacaggcatgagccaccacgcccagccaaatccactcttatagctattttgaaatatacatttt

SEQ ID NO: 8502 - DNA, 201 bp, Homo sapiens
aaggaaggagaaagggaaggaagaggccaggtgtggtggctcatgcctgcaatcccagcactttgggaggctgaggcaggcagatcatgaggtcaggagayagagactttcctggctaacatggtgaaaccccgtctctactaaaaatacaaaaaaattagctgggcgtggtggcaggtgcctgtagtcccagctacttgg

SEQ ID NO: 8503 - DNA, 201 bp, Homo sapiens
tgagtggggctgcaagaataactccactaggtagcatcctctcttttacctgatggatcaggacgatgctgttacgacgatacatacaattcttctgaagrggagaggatgctggaataaagactacacttcacctcaaatttattttttcatatgttatgccatagtaccaggaatagggatgtaaataaaagtgccaga

SEQ ID NO: 8504 - DNA, 201 bp, Homo sapiens
aggggaaggggaaggaaagggagcaagaaggagggaaggtgataggttgaatggaaatagagaagaaagagagggagggagggttagaaggaaggagaaasggaaggaagaggccaggtgtggtggctcatgcctgcaatcccagcactttgggaggctgaggcaggcagatcatgaggtcaggagatagagactttcctg

SEQ ID NO: 8505 - DNA, 201 bp, Homo sapiens
ctcgctgtcaacatgagtggggctgcaagaataactccactaggtagcatcctctcttttacctgatggatcaggacgatgctgttacgacgatacatacrattcttctgaaggggagaggatgctggaataaagactacacttcacctcaaatttattttttcatatgttatgccatagtaccaggaatagggatgtaaa

SEQ ID NO: 8506 - DNA, 201 bp, Homo sapiens
agaaggaaggggaaggggaaggaaagggagcaagaaggagggaaggtgataggttgaatggaaatagagaagaaagagagggagggagggttagaaggaargagaaagggaaggaagaggccaggtgtggtggctcatgcctgcaatcccagcactttgggaggctgaggcaggcagatcatgaggtcaggagatagagac

SEQ ID NO: 8507 - DNA, 201 bp, Homo sapiens
ttgctcaatttctgtggattcacttcacaaattttattataaggtagttctagctagaagaaaaaatagagaattataagaaatctttgtgaagctgccayccaggtttgtcaatttgtgacattttaatattattggctgtatgtagtatacatagaaaataacagaaacacgtgtagatagccctgattttccacagtt

SEQ ID NO: 8508 - DNA, 201 bp, Homo sapiens
attgggctatgctcaaccaggggtagatgtcaatgcttcaagggctatacaaggaccagaaaagaagaggttgcaccaatttggactgccgagtcacactwctttacacaagaaaacacactttacagcctcaaacggccaacaatgcagagggacatgtcctcctcaggggaaaatttgatagaaaattgaaatggtcaa

SEQ ID NO: 8509 - DNA, 201 bp, Homo sapiens
atttttctcttcaggaaagataaccctaggcttatgggtccaattttccaaccacatatgaatctaaactagactctgctttataaattgatgagtttctmttggagccagcactaggattactacaactcagggcaggaagaagagtaggagtgcagaagaggagttccaacagaaagttacctatgatgagaaactatg

SEQ ID NO: 8510 - DNA, 201 bp, Homo sapiens
tcaccggtttcctattgatgtacatgtggccgattccagtttttgccataaatattagtgtgcatgtctcctgtgcacataggcaagaaagccccaaagcycccagagtggatgattaggaatgggttggttgcatgatacattgtatggactttaaccatactagataatgataatatgatttccaaagtaattgtggct

SEQ ID NO: 8511 - DNA, 201 bp, Homo sapiens
acaacatcatctcacactgacatcagtgccactggagcttttctcaccagggctgcttgtgtgtcctccctccctccctccctccccccacaccaactctmctgcacactgcagcacacaaccatatttttctcttcaggaaagataaccctaggcttatgggtccaattttccaaccacatatgaatctaaactagactc

SEQ ID NO: 8512 - DNA, 201 bp, Homo sapiens
atgatacacattatgtgtaggagttatctgtggtgtgggaggctgtcattcattcatttttacgctgaaggcttacatatcgttttaccacaatttcaccrgtttcctattgatgtacatgtggccgattccagtttttgccataaatattagtgtgcatgtctcctgtgcacataggcaagaaagccccaaagcccccag

SEQ ID NO: 8513 - DNA, 201 bp, Homo sapiens
ctacagaacaacatcatctcacactgacatcagtgccactggagcttttctcaccagggctgcttgtgtgtcctccctccctccctccctccccccacacyaactctcctgcacactgcagcacacaaccatatttttctcttcaggaaagataaccctaggcttatgggtccaattttccaaccacatatgaatctaaac

SEQ ID NO: 8514 - DNA, 201 bp, Homo sapiens
tagaggcaatatctttattaatgtagcctcaggacaaatgctttatttttgtggcagctacagaacaacatcatctcacactgacatcagtgccactggakcttttctcaccagggctgcttgtgtgtcctccctccctccctccctccccccacaccaactctcctgcacactgcagcacacaaccatatttttctcttc

SEQ ID NO: 8515 - DNA, 201 bp, Homo sapiens
ttctagaggcaatatctttattaatgtagcctcaggacaaatgctttatttttgtggcagctacagaacaacatcatctcacactgacatcagtgccactrgagcttttctcaccagggctgcttgtgtgtcctccctccctccctccctccccccacaccaactctcctgcacactgcagcacacaaccatatttttctc

SEQ ID NO: 8516 - DNA, 201 bp, Homo sapiens
gggcctctcccgggtaaagggtctccaggttccgctgcctcggcgtggatctcggacccagagactcggggagacccgggcggtccgtgggggatgtagasgggtagtgatctgcgcccccggccggtgtcactcacaggcctcactctggttgtagtagccgctcagggtccgcaggttcactcggtaaaactgtgcttt

SEQ ID NO: 8517 - DNA, 201 bp, Homo sapiens
attctagaggcaatatctttattaatgtagcctcaggacaaatgctttatttttgtggcagctacagaacaacatcatctcacactgacatcagtgccacyggagcttttctcaccagggctgcttgtgtgtcctccctccctccctccctccccccacaccaactctcctgcacactgcagcacacaaccatatttttct

SEQ ID NO: 8518 - DNA, 201 bp, Homo sapiens; identical to SEQ ID NO: 1107

SEQ ID NO: 8519 - DNA, 201 bp, Homo sapiens
tgtcttggctgcagaattatagcaggcatttttatttagattctgtcaataactttctgttgtttacttgtttctcatataccgtggcattgtacttttgrcatacagattcagaaaatgcttacttatagcacaatcacatagggttattttatatgttaggaaattttcataataaaaaggaaaaaatggaggaaggga

SEQ ID NO: 8520 - DNA, 201 bp, Homo sapiens
agccgcgggttggacaagcttgcatctagaacatatgcaccacaaggcccgaaatttttctgtttttactttaatgatgctttctaaatgcaaaaacagtyatatacctagcagaaacaaatgtcagttgaaggaatgatcatagagaaccactctattctagaggcaatatctttattaatgtagcctcaggacaaatgc

SEQ ID NO: 8521 - DNA, 201 bp, Homo sapiens
acagataagcaaaaaagtcctcacattcaaaattgtcctgggccacatgcagcccacgagccgcgggttggacaagcttgcatctagaacatatgcaccayaaggcccgaaatttttctgtttttactttaatgatgctttctaaatgcaaaaacagttatatacctagcagaaacaaatgtcagttgaaggaatgatcat

SEQ ID NO: 8522 - DNA, 201 bp, Homo sapiens
acagcaagtatagctaatgttattaaaatgcaagggattaaaagatatgtagataatatccatggaataatggaaacttaagaaagccttaatagttatcwagtgctgtgtcacaaactacctcaaaatttagtagcttaatagaacaaatatctgttaactcaaagagatactacacacacaagtaaaatagattctgtg

SEQ ID NO: 8523 - DNA, 201 bp, Homo sapiens
tctgctccatgtccatggctcagccaaataagttggtagtcaacaaattgatcttatcttttggggtcattctccagcaagtgcagaacagtaaaaaaatktagtcacctgaggtgcatatcttggcttcctggccagttttcccaaggcctccactgccaccctgcaccctgggtgccctccacactctccaagtgtcca

SEQ ID NO: 8524 - DNA, 201 bp, Homo sapiens
tgcaccacagataagcaaaaaagtcctcacattcaaaattgtcctgggccacatgcagcccacgagccgcgggttggacaagcttgcatctagaacatatrcaccacaaggcccgaaatttttctgtttttactttaatgatgctttctaaatgcaaaaacagttatatacctagcagaaacaaatgtcagttgaaggaat

SEQ ID NO: 8525 - DNA, 201 bp, Homo sapiens
cgcgctgcagcatctccttcccgttctccaggtatctgtggagccactccacgcacgtgccctccaggtaggctctcctttgttcagccacattggccgcytcacacttgcgcttggagatctgagccgcagtgtccgctgcggtccaggagcgcaggtcctcgttcagggcgaggtaatccttgccatcgtaggcatact

SEQ ID NO: 8526 - DNA, 201 bp, Homo sapiens
ggggtttcaccatgttagccaggatggtctcgatctcctgacctcatgatccaccctcctcggcctcccaaagtgctgggatcacaggcatgagccaccaygcccagccaaatccactcttatagctattttgaaatatacatttttgttaactttagtcagtctgctgtgctatcaaacattagaacttattttctctat

SEQ ID NO: 8527 - DNA, 201 bp, Homo sapiens
tgcactcactccgggactcaggtgcaccacagataagcaaaaaagtcctcacattcaaaattgtcctgggccacatgcagcccacgagccgcgggttggayaagcttgcatctagaacatatgcaccacaaggcccgaaatttttctgtttttactttaatgatgctttctaaatgcaaaaacagttatatacctagcaga

SEQ ID NO: 8528 - DNA, 201 bp, Homo sapiens
ggtataggatttagaaacccaggaggactcttctgcctcaggacaagagggagagggatattttagcgttggtcccattttcctccccttcttttggaagrtggctcagggatatctgcaggagatcagggaggcgacccgtggcctctggtacctgcgcattgcagcctctccttctcattcttaaggcctttgctgagc

SEQ ID NO: 8529 - DNA, 201 bp, Homo sapiens
tcatgctgcacatggcaggtgtatctctgctcctctccagaaggcaccaccacagccgcccacttctggaaggttccatcccctgcaggcctggtctccaygagctccgtgtgtgggtctggtcctccccatcccgctgccaggtcagtgtgatctccgcagggtagaagcccagggcccagcacctcagggtggcctcat

SEQ ID NO: 8530 - DNA, 201 bp, Homo sapiens
agggaggtgggtgcactcactccgggactcaggtgcaccacagataagcaaaaaagtcctcacattcaaaattgtcctgggccacatgcagcccacgagcygcgggttggacaagcttgcatctagaacatatgcaccacaaggcccgaaatttttctgtttttactttaatgatgctttctaaatgcaaaaacagttata

SEQ ID NO: 8531 - DNA, 201 bp, Homo sapiens
tccctccttaccccatctcagggtgaggggctctggcagaccctcatgctgcacatggcaggtgtatctctgctcctctccagaaggcaccaccacagccrcccacttctggaaggttccatcccctgcaggcctggtctccacgagctccgtgtgtgggtctggtcctccccatcccgctgccaggtcagtgtgatctcc

SEQ ID NO: 8532 - DNA, 201 bp, Homo sapiens
ctaaagcattcactcctgaccctgagggaggtgggtgcactcactccgggactcaggtgcaccacagataagcaaaaaagtcctcacattcaaaattgtcytgggccacatgcagcccacgagccgcgggttggacaagcttgcatctagaacatatgcaccacaaggcccgaaatttttctgtttttactttaatgatgc

SEQ ID NO: 8533 - DNA, 201 bp, Homo sapiens
gaccctgaccctgctaaagctctccagagaggctccggctttccctaagggacatgacacccccatctccctccttaccccatctcagggtgaggggctckggcagaccctcatgctgcacatggcaggtgtatctctgctcctctccagaaggcaccaccacagccgcccacttctggaaggttccatcccctgcaggcc

SEQ ID NO: 8534 - DNA, 201 bp, Homo sapiens
gagggttcctaaagcattcactcctgaccctgagggaggtgggtgcactcactccgggactcaggtgcaccacagataagcaaaaaagtcctcacattcaraattgtcctgggccacatgcagcccacgagccgcgggttggacaagcttgcatctagaacatatgcaccacaaggcccgaaatttttctgtttttacttt

SEQ ID NO: 8535 - DNA, 201 bp, Homo sapiens
cccacgatggggatggtgggctgggaagatggctctgggaaaaggggggaaggtgagggaccctgaccctgctaaagctctccagagaggctccggctttycctaagggacatgacacccccatctccctccttaccccatctcagggtgaggggctctggcagaccctcatgctgcacatggcaggtgtatctctgctcc

SEQ ID NO: 8536 - DNA, 201 bp, Homo sapiens
tgtaaatacctttaataacaatgttcttcaataagttaacacagttgagaacatagagtaactagatcaaatagttccaagacttcagtgccataagaatsatgccttgaaaataagtctttgttttgtctaagatgtctcaaatttagtggaagtatgccccaagtgccaattttcttattgacatatcatcttcagaaa

SEQ ID NO: 8537 - DNA, 201 bp, Homo sapiens
aagagctggaatcagacccccacacacattgagtatgaggcagagaacaaggcctgagaggaaaattcctggtgcccaaggctgctggggggtcaaagggkaccgcgtatcagtattccagggattgtcttcccctcctttcccgcagagacttcatccgttaattgtcccagagtgcagggcgggccctcagtcactctc

SEQ ID NO: 8538 - DNA, 201 bp, Homo sapiens
aacgatgcccacgatggggatggtgggctgggaagatggctctgggaaaaggggggaaggtgagggaccctgaccctgctaaagctctccagagaggctcyggctttccctaagggacatgacacccccatctccctccttaccccatctcagggtgaggggctctggcagaccctcatgctgcacatggcaggtgtatct

SEQ ID NO: 8539 - DNA, 201 bp, Homo sapiens
ttagaacttattttctctatataattggacatttgcatccattaacctgcatctctatattttcccacccctacattcttcccagtttctgggaactgtcwttctactctctctacctccctaagattaacctttttggctcgcacatattagtgacaacatgtggtatttgtctttccttgcttggcttatttcacctaa

SEQ ID NO: 8540 - DNA, 201 bp, Homo sapiens
cttaaaggcattcttaagccacaaacaatagcatgagcgatctgtgtcttaagggtgtgttcctgctgcagttaactagcccaacctattcctttaattcrgcccatccctttgcttcctataagggatacttttagttaatttaatacctatagaaacaacactaatgaccggtttgctgttaataaatatgtgggtaaa

SEQ ID NO: 8541 - DNA, 201 bp, Homo sapiens
caagaatgagggaaaggaacacctggcctgcccagggcggaaaaccgcttaaaggcattcttaagccacaaacaatagcatgagcgatctgtgtcttaagrgtgtgttcctgctgcagttaactagcccaacctattcctttaattcggcccatccctttgcttcctataagggatacttttagttaatttaatacctata

SEQ ID NO: 8542 - DNA, 201 bp, Homo sapiens
aaatctggccataaactggccccaagactggccataaacaaaatctctgcagcaccgtaacatgttcataatggccctaatgtccaagctggaaggttgcrggtttacaagaatgagggaaaggaacacctggcctgcccagggcggaaaaccgcttaaaggcattcttaagccacaaacaatagcatgagcgatctgtgt

SEQ ID NO: 8543 - DNA, 201 bp, Homo sapiens
atctgtgaatagagttttatgttttcctttttatctggatgcctttaacttttaattatttgccttattgcaccagctgcaatctccagtacaatgttaartagaagtgttggattggacatccttgcattgatctccatcttaggagaaaagcattcagtctttcttcagcaagcatgattttagttgtgggttttttat

SEQ ID NO: 8544 - DNA, 201 bp, Homo sapiens
acatatatgtatatatgtgtatatgtatgtgtatatatacacacacacatatatatatgtatgtgtgtatatatatatatccccaaaacaaatatcagttkgttttgctggtttttaagcttcctgtacagcaagttcctactgcctttattttcccatgatgcacattatgtgtaggagttatctgtggtgtgggagact

SEQ ID NO: 8545 - DNA, 201 bp, Homo sapiens
atatgtatatatgtgtatatatacacatatatgtatatatgtgtatatgtatgtgtatatatacacacacacatatatatatgtatgtgtgtatatatatrtatccccaaaacaaatatcagtttgttttgctggtttttaagcttcctgtacagcaagttcctactgcctttattttcccatgatgcacattatgtgtag

SEQ ID NO: 8546 - DNA, 201 bp, Homo sapiens
tcggtgggggcccaggccctggtgctcaagatccaaaagctaaagaaacagatgaggaggcactgagagagcctgggaggagagagcctgggaggggacasccaagcttcccagcagtgcccacagcaccctccatgcctggaactaatgtgcaccacccccaggagccccaggatcagaaacaccccagcatctcccagg

SEQ ID NO: 8547 - DNA, 201 bp, Homo sapiens
tggtattttgatagggattgaattgaatctgtaaattgctttgggtagtatgaacattttaacaatattctcccaatttatgtgcatgaaatttatgtgthtcatttttaaaattaatatttaacaatattaattctcccaatttatgtgttttattttttttcttagagacaaggtctcactatgtttcccaggctagtc

SEQ ID NO: 8548 - DNA, 201 bp, Homo sapiens
atatgtatccatatatgtatatatgtgtatatatacacatatatgtatatatgtgtatatgtatgtgtatatatacacacacacatatatatatgtatgtrtgtatatatatatatccccaaaacaaatatcagtttgttttgctggtttttaagcttcctgtacagcaagttcctactgcctttattttcccatgatgca

SEQ ID NO: 8549 - DNA, 201 bp, Homo sapiens
ttacctgagctcttcttcctccacattacagcagcgaccacagctccagtgaccacagctacaagtagaaccaggccagcaacgatgcccacgatggggayggtgggctgggaagatggctctgggaaaaggggggaaggtgagggaccctgaccctgctaaagctctccagagaggctccggctttccctaagggacatg

SEQ ID NO: 8550 - DNA, 201 bp, Homo sapiens
tagtatgaacattttaacaatattctcccaatttatgtgcatgaaatttatgtgtctcatttttaaaattaatatttaacaatattaattctcccaatttrtgtgttttattttttttcttagagacaaggtctcactatgtttcccaggctagtcttgaactcccaggctcaaacaattctcctgtctcatcatcccaaa

SEQ ID NO: 8551 - DNA, 201 bp, Homo sapiens
gaaggtgagcgtccctgaccctcagcccccagcaccgaccctgctgaagttctccagagaggctcctgctttccctaagagacatgaccccccctccactmatctcctgcctaactccatctcagggtgaggggcttgggcaacccctcatgctgcacatggcacatgtatctctgttcctctccagaaggcaccaccaca

SEQ ID NO: 8552 - DNA, 201 bp, Homo sapiens
acactcctcaccccttccttacctgagctcttcttcctccacattacagcagcgaccacagctccagtgaccacagctacaagtagaaccaggccagcaaygatgcccacgatggggatggtgggctgggaagatggctctgggaaaaggggggaaggtgagggaccctgaccctgctaaagctctccagagaggctccgg

SEQ ID NO: 8553 - DNA, 201 bp, Homo sapiens
cttctacctggggcttggaactctcagtgagacaagaaatctcagaccacactcctcaccccttccttacctgagctcttcttcctccacattacagcagygaccacagctccagtgaccacagctacaagtagaaccaggccagcaacgatgcccacgatggggatggtgggctgggaagatggctctgggaaaaggggg

SEQ ID NO: 8554 - DNA, 201 bp, Homo sapiens
agaagggctgatggaattgtcccagcatgtaacagtcatggtgtcccaaggttctttctcttagggatatggatacttcctcagccactggattctgaatrtgaagcttgctcctcaattcttttttttttttttattgatcattcttgggtgtttctcacagagggggatttggcagggtcatgggacaatagtggaggg

SEQ ID NO: 8555 - DNA, 201 bp, Homo sapiens
ttgtaacaggtgctttacaaaagagtaagtgctggcacacagggcccaggctgggtaggcccatgagtgtggatggtgcttcccagtaaccaggcagggcmcttctacctggggcttggaactctcagtgagacaagaaatctcagaccacactcctcaccccttccttacctgagctcttcttcctccacattacagcag

SEQ ID NO: 8556 - DNA, 201 bp, Homo sapiens
atctttttacagagaatcctttttacagagaatggggagataaccaggacaggatttatggacccagtgattccaccgtggggcataatttgtccaggttwattccctggcctctgtaagccccactgtgatagggacataatggtgctgtgggaatctgggcagcaatgttagctcacacccaatgttaacacttatccc

SEQ ID NO: 8557 - DNA, 201 bp, Homo sapiens
ccaggagtattatgaataaagctgcaagagtatttgtatacaggtttttcatgaacataaagttttcccttgtttgaaataagtgcctaggagggcaattkctagtcatatggtaaattgcatgttcagtttgaagaaaactgcaatatccatttccagagtggctgtaccattttaaaatccattcctaccagcaatatg

SEQ ID NO: 8558 - DNA, 201 bp, Homo sapiens
aggtcctggtttagggcgatgtaatctttttacagagaatcctttttacagagaatggggagataaccaggacaggatttatggacccagtgattccaccrtggggcataatttgtccaggtttattccctggcctctgtaagccccactgtgatagggacataatggtgctgtgggaatctgggcagcaatgttagctca

SEQ ID NO: 8559 - DNA, 201 bp, Homo sapiens
gcccttctgaggtctgtcctcggggaccttcccctgtgacttgtgactgctgggatcaggtcccatcaccacagtcatcaaggtgataaatctgtccctcrttgtaacaggtgctttacaaaagagtaagtgctggcacacagggcccaggctgggtaggcccatgagtgtggatggtgcttcccagtaaccaggcagggc

SEQ ID NO: 8560 - DNA, 201 bp, Homo sapiens
ctctgtttaaggaattataatcaagtatctacgagggtgcccagcactggtgtaaaacacaagcctgtaaagctaccctgggctgctacccagtcaccccmtagaaggagaccgttgggagcaagtcccccaaaatctggccataaactggccccaagactggccataaacaaaatctctgcagcaccgtaacatgttcat

SEQ ID NO: 8561 - DNA, 201 bp, Homo sapiens
ccaggtaggctgtctgctgctccgcctcatgggccgcctcccacttgcgctgggtaatctgagccgccatggccgccgcagtccaagagctcaggtcctgstttagggcgatgtaatctttttacagagaatcctttttacagagaatggggagataaccaggacaggatttatggacccagtgattccaccgtggggcat

SEQ ID NO: 8562 - DNA, 201 bp, Homo sapiens
catttctataaaaaacaggtatattttaatttggaaaactctgtttaaggaattataatcaagtatctacgagggtgcccagcactggtgtaaaacacaarcctgtaaagctaccctgggctgctacccagtcaccccctagaaggagaccgttgggagcaagtcccccaaaatctggccataaactggccccaagactgg

SEQ ID NO: 8563 - DNA, 201 bp, Homo sapiens
aaagaactatgtatataccttaatttaaaattactctattgctcaaaaatgctaaggatcatctgaggcttcagctaatcttaatctttttgctggggcasggtcttgcctcaatgttgatgactgctggctgatcaggagggtggttgctaaaggctcttatggcaacttcttaaaataagacaatgaagtttgcggcat

SEQ ID NO: 8564 - DNA, 201 bp, Homo sapiens
gaaattcttttctttttcatttctataaaaaacaggtatattttaatttggaaaactctgtttaaggaattataatcaagtatctacgagggtgcccagcrctggtgtaaaacacaagcctgtaaagctaccctgggctgctacccagtcaccccctagaaggagaccgttgggagcaagtcccccaaaatctggccataa

SEQ ID NO: 8565 - DNA, 201 bp, Homo sapiens
tgcaatgaactttgaaattcttttctttttcatttctataaaaaacaggtatattttaatttggaaaactctgtttaaggaattataatcaagtatctacsagggtgcccagcactggtgtaaaacacaagcctgtaaagctaccctgggctgctacccagtcaccccctagaaggagaccgttgggagcaagtcccccaa

SEQ ID NO: 8566 - DNA, 201 bp, Homo sapiens
ttttccaaaacatgggtttttatctcaggaccttcttgtccccagatgatcaaaaccggggccatccactcccttctgagccacctctgcctggggggccygtggctgtgtcctccagtcacaacagaacactccttcagaacactcgcaggaagacaacatcttgtcattggctcacacatgcacggtgcatgcacagag

SEQ ID NO: 8567 - DNA, 201 bp, Homo sapiens
accctacaccatggcagaagccatcttccctcccagtgtgcagtgatgtcccagatagcgaattggttagccacttttcagtctcgggcagttttgttttycaaaacatgggtttttatctcaggaccttcttgtccccagatgatcaaaaccggggccatccactcccttctgagccacctctgcctggggggcccgtgg

SEQ ID NO: 8568 - DNA, 201 bp, Homo sapiens
tcttttcatgtttcatttattttgatcaatgatgtgcatttccaatctgtaaaagtttatttcagtttaatgtgtggtaaaatgtaacatcaaatctttgsaagatgaaattatcttgcacagcagattgaacattgtatcattgaaaatctagagagatgccagggagccaaggatcaaatgacctatttgtagccaatg

SEQ ID NO: 8569 - DNA, 201 bp, Homo sapiens
taaatagcgctgctattacatgcttctgaatttttttttctttttagcagtcctattctgttttccattcatatttgctattccatcactgggtattcctycctactcttttcatgtttcatttattttgatcaatgatgtgcatttccaatctgtaaaagtttatttcagtttaatgtgtggtaaaatgtaacatcaaat

SEQ ID NO: 8570 - DNA, 201 bp, Homo sapiens
ttgttaagttgtagttctgtatgtagtctggatattaattctttatcagatatgtgattggcaaatattttatcttattctatgcagtttcttttattttyacttttttttttttttttttttttttttttgagacagagtctctctctgatgccccagctggagtgcaatggtgcaatctcagctcattgcaacctctgc

SEQ ID NO: 8571 - DNA, 201 bp, Homo sapiens
gctgtgcagaaaaaaattgcctaatctgattgcttttcatttacaaaaatgagaatctcatacttcagttaacacatctagcttagcatgatgccaataaytttggcttgatgctgtagcccgaaatggttagctcgaattgagagacaagttattttcaaaaactggctatccgatgggcattctataacacacttaaca

SEQ ID NO: 8572 - DNA, 201 bp, Homo sapiens
tccaggtaggctgtctgctgctccgcctcatgggccgcctcccacttgcgctgggtaatctgagccgccatggccgccgcagtccaagagctcaggtcctsgtttagggcgatgtaatctttttacagagaatcctttttacagagaatggggagataaccaggacaggatttatggacccagtgattccaccgtggggca

SEQ ID NO: 8573 - DNA, 201 bp, Homo sapiens
cattgttcctgccttcagcccctggtaacctgtattctactttctgtttttgtgaatttgcttattctaggtgcctcatataagtgaaatatcatatttgycttttttttggcttattttatttagcgtgttttcaaggttccatccaatccaaatattcttcacttttaaggctgattaatattccatgtgtatatgcac

SEQ ID NO: 8574 - DNA, 201 bp, Homo sapiens
gccactccacgcacctgccctccaggtaggctgtctgctgctccgcctcatgggccgcctcccacttgcgctgggtaatctgagccgccatggccgccgcrgtccaagagctcaggtcctggtttagggcgatgtaatctttttacagagaatcctttttacagagaatggggagataaccaggacaggatttatggaccc

SEQ ID NO: 8575 - DNA, 201 bp, Homo sapiens
tggaaggcccttccggttttctatcctagtgaggatggttctggggtggaggtggcagaggagtgagaagtgattggatttggtgttgatatatatttttwaaattgtggtaaaacacacatactatacgatttaccttctaacaatttttttcagtgtacaattcattggcattaagcacatttacaattgatggtggtt

SEQ ID NO: 8576 - DNA, 201 bp, Homo sapiens
ctgttcactctgattgatgatagtttcttttgctgtgcagaaaaaaattgcctaatctgattgcttttcatttacaaaaatgagaatctcatacttcagtyaacacatctagcttagcatgatgccaataattttggcttgatgctgtagcccgaaatggttagctcgaattgagagacaagttattttcaaaaactggct

SEQ ID NO: 8577 - DNA, 201 bp, Homo sapiens
gaggcgcccgtggtccctggtacaggtgtgctgcagtgtctccttcctgttctccaggtatctgcggagccactccacgcacctgccctccaggtaggctstctgctgctccgcctcatgggccgcctcccacttgcgctgggtaatctgagccgccatggccgccgcagtccaagagctcaggtcctggtttagggcgat

SEQ ID NO: 8578 - DNA, 201 bp, Homo sapiens
cattcatgggctatctatccagagttgtttatagacatattctttcaagtttgtattcagggttgatgtcacatacacatttatacatgctgttttatgtytaagtgtttttatattttggttagccttttatcattgttaaacaaagttgtcattaggcataaacttgcatgttaactgaagcttttgtttttattttat

SEQ ID NO: 8579 - DNA, 201 bp, Homo sapiens
tcccattctgtagcatgtctgttcactctgattgatgatagtttcttttgctgtgcagaaaaaaattgcctaatctgattgcttttcatttacaaaaatgwgaatctcatacttcagttaacacatctagcttagcatgatgccaataattttggcttgatgctgtagcccgaaatggttagctcgaattgagagacaagt

SEQ ID NO: 8580 - DNA, 201 bp, Homo sapiens
agattacaggcgatcagggaggcgcccgtggtccctggtacaggtgtgctgcagtgtctccttcctgttctccaggtatctgcggagccactccacgcacstgccctccaggtaggctgtctgctgctccgcctcatgggccgcctcccacttgcgctgggtaatctgagccgccatggccgccgcagtccaagagctcag

SEQ ID NO: 8581 - DNA, 201 bp, Homo sapiens
gagttttaggttctacacccagagttacaaaccattatgtcagcattattctataagttagaagttatattagtccattctcacactgctatgaagaaatrcctgagactgggtaatttataaaggaaagaggtttaattgactcacagttctgcatggctgaggagcctgccccaggaaacttacagtcatgacagaagt

SEQ ID NO: 8582 - DNA, 201 bp, Homo sapiens
atctgtctcccatccttgtgggaggccagcccgggagattacaggcgatcagggaggcgcccgtggtccctggtacaggtgtgctgcagtgtctccttccygttctccaggtatctgcggagccactccacgcacctgccctccaggtaggctgtctgctgctccgcctcatgggccgcctcccacttgcgctgggtaatc

SEQ ID NO: 8583 - DNA, 201 bp, Homo sapiens
cgccatcagttcagactgattcggaggtggggaggtgggatagttcctgaccctgttgcaaggtttcttttgactttctggttttggggcacatagatggstggtgctcttcttggtcagggcggcctcagctccacccaggtaaggcagtggtggcagagagttaggggagcacctatgaaacagaccaaggcagggatg

SEQ ID NO: 8584 - DNA, 201 bp, Homo sapiens
tcccctcctccacacattatgcctacaggaacacagacacattcaggtgcctttgcagaaagtcagggttcttcaagtcacaaagggaaggtgtgaacaamtcttgcctctcagtcccacacaaggcagctgtctcacactatagaaaaaatattcatgaacaaattcatatctgtcccagtaatggatgacactttggca

SEQ ID NO: 8585 - DNA, 201 bp, Homo sapiens
tgttggtcccatctgtctcccatccttgtgggaggccagcccgggagattacaggcgatcagggaggcgcccgtggtccctggtacaggtgtgctgcagtrtctccttcctgttctccaggtatctgcggagccactccacgcacctgccctccaggtaggctgtctgctgctccgcctcatgggccgcctcccacttgcg

SEQ ID NO: 8586 - DNA, 201 bp, Homo sapiens
tgtcttgctcattgcctattgtttatttggatttcatttttactgttgagtttttacatttcttcatatattgtgaatgcaagtctttattgaatatgtgrtttgcaaatatcttctctcattctgtagcttgtctttttatgctcttcataggtctctcacagagcaacagttttaattttgataagatccagtttagta

SEQ ID NO: 8587 - DNA, 201 bp, Homo sapiens
atattcctgttttaatttgctagggctgccataacaaagtaccaaaggctgggtgacttaaataataaatatgtgttgtctcacagttccagaggccacargtgcaaggtcaaggtgctgcagggttgatctcttctgaggcctctttcctttgcttgtagatggccacttcttctgccttctcaacatagggcttcaaca

SEQ ID NO: 8588 - DNA, 201 bp, Homo sapiens
gatctggaaactgaggaggattcttctccctcaggaccagagggagggtgatattctagtgttggtcccatctgtctcccatccttgtgggaggccagccygggagattacaggcgatcagggaggcgcccgtggtccctggtacaggtgtgctgcagtgtctccttcctgttctccaggtatctgcggagccactccacg

SEQ ID NO: 8589 - DNA, 201 bp, Homo sapiens
cttttggagcactcaagttttaaattttaactaagcccaatttctctctctcttttttttttatttgtagatcatgcttttggtattttatctaagaatchtttgcctaactacccaaagtaataaaaattttctcctgtgttttcttttagaaattttatagttttaactcataaattttagctgtttaggtctctaatt

SEQ ID NO: 8590 - DNA, 201 bp, Homo sapiens
aattatgtaaaacttagcttaaaacaacaaatattcctcatctgccacagtttccaatggtcaggagtccaggagaggtttccctgagtgcttcttgctcsgggcctctcacaaggttgcagtccaattgtcagccaagggctgcatcatctgagggcttcactggggctgaggattcacatgaaacatggatcagtcaca

SEQ ID NO: 8591 - DNA, 201 bp, Homo sapiens
acatcttttgttgtggtattgaatgagatgtgatagaagtgatttggacaccactatgattctaaatagcgctgctattacatgcttctgaatttttttttctttttagcagtcctattctgttttccattcatatttgctattccatcactgggtattcctccctactcttttcatgtttcatttattttgatcaatgat

SEQ ID NO: 8592 - DNA, 201 bp, Homo sapiens
cagagtcactctctggtacaggatctggaaactgaggaggattcttctccctcaggaccagagggagggtgatattctagtgttggtcccatctgtctccyatccttgtgggaggccagcccgggagattacaggcgatcagggaggcgcccgtggtccctggtacaggtgtgctgcagtgtctccttcctgttctccagg

SEQ ID NO: 8593 - DNA, 201 bp, Homo sapiens
ggccaggaggaggctgagggtgagccatgcagggagagggtgattgctggccctggtgggggctccccatgtggtttgggtcatgaagttagagaagacaycaacgatgagggacagtgagtagatggtggaatcactggattggtattcccagggtgggggtcgaaggattgttggaattgatgtgctaaagggtggact

SEQ ID NO: 8594 - DNA, 201 bp, Homo sapiens
aactaagcccaatttctctctctcttttttttttatttgtagatcatgcttttggtattttatctaagaatcttttgcctaactacccaaagtaataaaavttttctcctgtgttttcttttagaaattttatagttttaactcataaattttagctgtttaggtctctaatttgtttgagctgatattttatatggtgtt

SEQ ID NO: 8595 - DNA, 201 bp, Homo sapiens
ccccaccgccgcgaagaggggctgcccaaaaggcaacagccataggagatgagcaggggtgcctgctgcgtcggagaactcatctccccaaccccaccgaygccacaaggtagagggcgaggacagcgaggtcggccggattccgcacccctgcctccaaccaccgcccatgggcggggaggagagactaccggccgcaag

SEQ ID NO: 8596 - DNA, 201 bp, Homo sapiens
agactgatcaacctgtcaaggctgggcctgtgagcctttctgtccagtttcatgagatgctggttctgctggttcatggataatagctggggtagcaaggrtctctctttttgtctcacagttttctgcatctctttttcatagtaagcacatgctaatatattttcaataaattcatgtgctcttttcctaagttggtat

SEQ ID NO: 8597 - DNA, 201 bp, Homo sapiens
gctatttgatgggcattctataataaacttaacatcttttgttgtggtattgaatgagatgtgatagaagtgatttggacaccactatgattctaaatagygctgctattacatgcttctgaatttttttttctttttagcagtcctattctgttttccattcatatttgctattccatcactgggtattcctccctactc

SEQ ID NO: 8598 - DNA, 201 bp, Homo sapiens
taatggaaatgtaagagggcttcattagttatccattgctgtgtaacaaactactcccaaatttagtgacttgggatcactaaatgagggatcgtgttccmgtcattccctcagagattttatcccttaattgcgtcttcccgtcattgcctcagagattttatcccttaattgtgtcagagagcagtgtggaacctcaga

SEQ ID NO: 8599 - DNA, 201 bp, Homo sapiens
tatgatgagaaactatgggacccctcctctctgcaaatttcagaatctgcttcctttaaaaagattggagacaagatgaaaactacaatccaggaaagagycctgggaggagggcaagagctggacaggtctgaaaattagtctcttgataccacaatgagatttgtatgcagggaccaccgtaggtgacatccaagtccc

SEQ ID NO: 8600 - DNA, 201 bp, Homo sapiens
aaattattagcatgatgccaataattttggcttgatgctgtagcccgaaatggttagttctaattgagaaacaagtttttttcaaaaactggctatttgaygggcattctataataaacttaacatcttttgttgtggtattgaatgagatgtgatagaagtgatttggacaccactatgattctaaatagcgctgctatt

SEQ ID NO: 8601 - DNA, 201 bp, Homo sapiens
tgcttttcatttacaaaaatgtgaatctcatacttcagtcaactttattttactttagtaaaaattattagcatgatgccaataattttggcttgatgctrtagcccgaaatggttagttctaattgagaaacaagtttttttcaaaaactggctatttgatgggcattctataataaacttaacatcttttgttgtggta

SEQ ID NO: 8602 - DNA, 201 bp, Homo sapiens
ggttatttatttatttacttatttatttttatccctctgcactatttgtcttgtaattggagtgtctgagtccattacgtttaatgtcattgttgacctcrttgggtttaagtctgtccattttcatttactgccttctaatattatctttcttgctcaactatttttcttctgttgccttctttagatgaataaaaaact

SEQ ID NO: 8603 - DNA, 201 bp, Homo sapiens
aagaagggaaggagctggagcgttcataggatatgccctaattcccattggaaaggcacgctctctctgttgtgtgggtgatggacagtgggcatgagagwcagcaggcagcccagctggaaggcccttccggttttctatcctagtgaggatggttctggggtggaggtggcagaggagtgagaagtgattggatttggt

SEQ ID NO: 8604 - DNA, 201 bp, Homo sapiens
cctggtaaaggcgcctgggcctctcccgggtcgaggatctggcgggtcccgcagcctcggggtggatctcggagccggagactcgcgggggggacccgggrcgtccgtgggggatgaggaggggtcgtgaccttcgccccaggccggggtcattcaccggcctagctctggtggtagtagcggcgcggcatgggcaggttc

SEQ ID NO: 8605 - DNA, 201 bp, Homo sapiens
cagaggggaccctgtgataaggagtgcataggaaatggtgggaaactggggtttccttgtgcctaagaagggaaggagctggagcgttcataggatatgcyctaattcccattggaaaggcacgctctctctgttgtgtgggtgatggacagtgggcatgagagtcagcaggcagcccagctggaaggcccttccggtttt

SEQ ID NO: 8606 - DNA, 201 bp, Homo sapiens
tagaaaggaacagtatcaaaggatttgaatatatgttaaaagcaaaattataactattgtttcaggtttctgaaaatcaaagtcttcttgtatctaattakttttcattaactctttaagcttgtcttttaatttaatttttttttaagttccagggtacatgtgtgtaggatgtgcaggtttgttacataaatgtgtgcc

SEQ ID NO: 8607 - DNA, 201 bp, Homo sapiens
aaatgtctgttcatgtcttgctcattgcctgttttgtatttggatttcatttttattgttgtttaaaatttcttcatatattctgaatacagtctttacakaatatgttgcctgcaaatatcttctctcattctgtagcttgtctttttatgctcttcataggtctctcacagaacaacagtttttagtgttgataagatc

SEQ ID NO: 8608 - DNA, 201 bp, Homo sapiens
ggtggcaggtgcctgtagtcccagctacttggaaagctgaggcaggagaatggcatgaacctgggaggcagagcttgcagtgagccgagatcgagccactscactccagcctgggcgacagaacgagactttgtctcaaaaaaaaaaaaaaaaaaaaagaaaagaaaagaaaaaagaaaaaaaaaggatggaacaaaggag

SEQ ID NO: 8609 - DNA, 201 bp, Homo sapiens
ctactaaaaatacaaaaaattagccgggcatggtggcaggtgcctgtagtcccagctacttggaaagctgaggcaggagaatggcatgaacctgggaggcrgagcttgcagtgagccgagatcgagccactgcactccagcctgggcgacagaacgagactttgtctcaaaaaaaaaaaaaaaaaaaaagaaaagaaaaga

SEQ ID NO: 8610 - DNA, 201 bp, Homo sapiens
ctgtaatcccagtctttgggaggccgaggcaggcagatcacgaggtcaggagatagagaccatcctggctaacatggtgaaaccctgtctctactaaaaayacaaaaaattagccgggcatggtggcaggtgcctgtagtcccagctacttggaaagctgaggcaggagaatggcatgaacctgggaggcagagcttgcag

SEQ ID NO: 8611 - DNA, 201 bp, Homo sapiens
gagctcccctaggatatgcatgtaggagtggggtcactgcacccttcccatatgatgctacatgatgtcaaattgttctctgaaagaaataatccaaatgyctatcagtagggagctggttaaaaagcattgcattcaaaaagggtaatctctattttaaaaaatgcatgcctatacaatggattgccaagaaatttttga

SEQ ID NO: 8612 - DNA, 201 bp, Homo sapiens
tagagaagaaagagatggagggagggctagaaggaaggagaaagggaaggaagaggtcaggcacagtggctcatgcctgtaatcccagtctttgggaggcygaggcaggcagatcacgaggtcaggagatagagaccatcctggctaacatggtgaaaccctgtctctactaaaaatacaaaaaattagccgggcatggtg

SEQ ID NO: 8613 - DNA, 201 bp, Homo sapiens
ccatgggaggaatatgctacaatttatctcttccccacttcattgacctctacatagtctttattaaagacactgctgcaatgaacatgctgggacattgytttctggttccaagaatatgtgagctcccctaggatatgcatgtaggagtggggtcactgcacccttcccatatgatgctacatgatgtcaaattgttct

SEQ ID NO: 8614 - DNA, 201 bp, Homo sapiens
ggaaagggagaaagaaggagggaaggcgatagtttgaatggaaatagagaagaaagagatggagggagggctagaaggaaggagaaagggaaggaagaggycaggcacagtggctcatgcctgtaatcccagtctttgggaggccgaggcaggcagatcacgaggtcaggagatagagaccatcctggctaacatggtgaa

SEQ ID NO: 8615 - DNA, 201 bp, Homo sapiens
aggaagagagagaaagaaggaggaatggaggaaaaagcaaaagaagaaaagaaggaaggggaggggaaggaaagggagaaagaaggagggaaggcgatagkttgaatggaaatagagaagaaagagatggagggagggctagaaggaaggagaaagggaaggaagaggtcaggcacagtggctcatgcctgtaatcccagt

SEQ ID NO: 8616 - DNA, 201 bp, Homo sapiens
aacttcctgttgtttacttgtttctcatatacatgacattatatttttgacatatagattcagaaaatgcttacttacagcccaatcacatagagttattktatatattaggaaaatttcataataaaaaggaaaaaatggaggaagagagagaaagaaggaggaatggaggaaaaagcaaaagaagaaaagaaggaaggg

SEQ ID NO: 8617 - DNA, 201 bp, Homo sapiens
tgcaacctcgccagcatctgttgtttcttgactttttaataattgccattctgactgacatgaggtggtatctcatttgtggttttgatttgcatttctcyaatgatcagcgatgttgagctttttttcatatttttgttggccacatgtatgtcttctttagaagtgtctgttcaagttctttgtctactttttaatgaa

SEQ ID NO: 8618 - DNA, 201 bp, Homo sapiens
tattgagctttttaaaatatgttttttggccacctgtatgtcttcttttgagaagtgtctgttcatgtgctttgtccacttcttaatgaagttgtttttttcatgtaaatttgcttaagttctttttagattatgaatattagacctttgtcagatcaatagattgcataaattttctcccattctgtaggttgtctcctt

SEQ ID NO: 8619 - DNA, 201 bp, Homo sapiens
ttttattcagactctgttaataacttcctgttgtttacttgtttctcatatacatgacattatatttttgacatatagattcagaaaatgcttacttacarcccaatcacatagagttattttatatattaggaaaatttcataataaaaaggaaaaaatggaggaagagagagaaagaaggaggaatggaggaaaaagca

SEQ ID NO: 8620 - DNA, 201 bp, Homo sapiens
tcagcattattctataagttagaagttatattagtccattctcacactgctatgaagaaatacctgagactgggtaatttataaaggaaagaggtttaatwgactcacagttctgcatggctgaggagcctgccccaggaaacttacagtcatgacagaagtggaagcaaacacatccttcttcacatgatgacaggagag

SEQ ID NO: 8621 - DNA, 201 bp, Homo sapiens
ttttccaccaacagtgtaaaagcattcctatttctctgcaacctcgccagcatctgttgtttcttgactttttaataattgccattctgactgacatgagrtggtatctcatttgtggttttgatttgcatttctctaatgatcagcgatgttgagctttttttcatatttttgttggccacatgtatgtcttctttagaa

SEQ ID NO: 8622 - DNA, 201 bp, Homo sapiens
tacaataaatgtgtaatacttgatgttgatgatgtgttctgaaaacactgtgttgaaggaattgagttaaaagccactgtcttggctgtagaattatagcrggcatttttattcagactctgttaataacttcctgttgtttacttgtttctcatatacatgacattatatttttgacatatagattcagaaaatgcttac

SEQ ID NO: 8623 - DNA, 201 bp, Homo sapiens
acagttcttcctgttttaaaacttcatacaaatctactcatcccatatggcctcccttgtatctggctttttgcgcttgttgtaatacctatgtgatcaayccatgttggtgcacgtatcagtagttctttcattttcattgctgataatattccattgtatgactgaatcatgatttttgtacattggcagttatttctt

SEQ ID NO: 8624 - DNA, 201 bp, Homo sapiens
attttcaattgcctcactctatcttttgaaatctcaggtaattcatactcctaaaaaaatctcatgttcatacataggacaaggtagaaaaggtaatattbctgttttaatttgctagggctgccataacaaagtaccaaaggctgggtgacttaaataataaatatgtgttgtctcacagttccagaggccacaggtgca

SEQ ID NO: 8625 - DNA, 201 bp, Homo sapiens
gtaccacattttctttatccagttcatcattgatgggcatttgggttgattccatgtgtttgctattgtgaatagtgctgccatgaatgtaaacatgcatrtatctttataatagaatgatttgtattcctttgggtatataccctgtaatgcgattgctggatcaaatggtatttctgattctaaatctctgaggaatca

SEQ ID NO: 8626 - DNA, 201 bp, Homo sapiens
tgtggcagctaaagaacaacatcatctcatgtggacatcgatgccgccagtgcttttctcaccaggagtgcttgtgtgtcctccctccctccctacctccycccacaccaaccctcctgcacactgcagcacacaaccatatttttctcttcaggaaagataaccctaggcttatgggtacaattttccaaccacgtatga

SEQ ID NO: 8627 - DNA, 201 bp, Homo sapiens
taaatgagaacatgtggtgtttggttttccgttcctgtgtgagtttgctgaggataatggcttccagcttcatccatatccctgcaaaggacttgatctcmttcctttttatggctgcataatattccatggtgtatatgtaccacattttctttatccagttcatcattgatgggcatttgggttgattccatgtgtttg

SEQ ID NO: 8628 - DNA, 201 bp, Homo sapiens
ctgttttgtggcagctaaagaacaacatcatctcatgtggacatcgatgccgccagtgcttttctcaccaggagtgcttgtgtgtcctccctccctccctmcctcctcccacaccaaccctcctgcacactgcagcacacaaccatatttttctcttcaggaaagataaccctaggcttatgggtacaattttccaaccac

SEQ ID NO: 8629 - DNA, 201 bp, Homo sapiens
aggagagagaagtgcagaatgaagcagggaaaagccccttataaaaccatcagatctcatgagaattccctcagtatcacgagaacagcatgggggcaccrcccccattatccaatcacctcccatgtggtccctcccccaataggtagcgattacaattcgcataacaattcaagatgagatttgggtgggaacacagaa

SEQ ID NO: 8630 - DNA, 201 bp, Homo sapiens
aagaaatacctgagactgggtaatttataaaggaaagaggtttaattgactcacagttctgcatggctgaggagcctgccccaggaaacttacagtcatgrcagaagtggaagcaaacacatccttcttcacatgatgacaggagagagaagtgcagaatgaagcagggaaaagccccttataaaaccatcagatctcatg

SEQ ID NO: 8631 - DNA, 201 bp, Homo sapiens
cattattctataagttagaagttatattagtccattctcacactgctatgaagaaatacctgagactgggtaatttataaaggaaagaggtttaattgacycacagttctgcatggctgaggagcctgccccaggaaacttacagtcatgacagaagtggaagcaaacacatccttcttcacatgatgacaggagagagaa

SEQ ID NO: 8632 - DNA, 201 bp, Homo sapiens
ctacacccagagttacaaaccattatgtcagcattattctataagttagaagttatattagtccattctcacactgctatgaagaaatacctgagactggstaatttataaaggaaagaggtttaattgactcacagttctgcatggctgaggagcctgccccaggaaacttacagtcatgacagaagtggaagcaaacac

SEQ ID NO: 8633 - DNA, 201 bp, Homo sapiens
atctacaaagagagatgttattttatttttaaatttttaaattcgtatatattcatggggcacaggtgcagttttgctacattgctatattgagttgtggyaaagtcagggccttcagtgcatccaccactggagacagatacattgaccccaacaagaaactcctctacgatacacccactgccaaccactcttaccctt

SEQ ID NO: 8634 - DNA, 201 bp, Homo sapiens
ttgtggctacttaaacttttacaataaatgtgtaatacttgatgttgatgatgtgttctgaaaacactgtgttgaaggaattgagttaaaagccactgtcktggctgtagaattatagcaggcatttttattcagactctgttaataacttcctgttgtttacttgtttctcatatacatgacattatatttttgacatat

SEQ ID NO: 8635 - DNA, 201 bp, Homo sapiens
ctagataatgataatacaaattccaaagtgattgtggctacttaaacttttacaataaatgtgtaatacttgatgttgatgatgtgttctgaaaacactgbgttgaaggaattgagttaaaagccactgtcttggctgtagaattatagcaggcatttttattcagactctgttaataacttcctgttgtttacttgtttc

SEQ ID NO: 8636 - DNA, 201 bp, Homo sapiens
acttctctattctaaagccaatatctttgttaaggtagcctcagggcaaatgctgttttgtggcagctaaagaacaacatcatctcatgtggacatcgatrccgccagtgcttttctcaccaggagtgcttgtgtgtcctccctccctccctacctcctcccacaccaaccctcctgcacactgcagcacacaaccatatt

SEQ ID NO: 8637 - DNA, 201 bp, Homo sapiens
gggttggttggatgatacgttgtatggactttaaccatactagataatgataatacaaattccaaagtgattgtggctacttaaacttttacaataaatgygtaatacttgatgttgatgatgtgttctgaaaacactgtgttgaaggaattgagttaaaagccactgtcttggctgtagaattatagcaggcatttttat

SEQ ID NO: 8638 - DNA, 201 bp, Homo sapiens
cataggcaagaaagccccccagagtggatgattaggaatgggttggttggatgatacgttgtatggactttaaccatactagataatgataatacaaattscaaagtgattgtggctacttaaacttttacaataaatgtgtaatacttgatgttgatgatgtgttctgaaaacactgtgttgaaggaattgagttaaaag

SEQ ID NO: 8639 - DNA, 201 bp, Homo sapiens
gtgcacataggcaagaaagccccccagagtggatgattaggaatgggttggttggatgatacgttgtatggactttaaccatactagataatgataatacraattccaaagtgattgtggctacttaaacttttacaataaatgtgtaatacttgatgttgatgatgtgttctgaaaacactgtgttgaaggaattgagtt

SEQ ID NO: 8640 - DNA, 201 bp, Homo sapiens
tctaccatttagtagtcctggcaggggtcctgttgctgcagctccgctaagaattttcctgggtattaaatttccccatttaaatatcagttccagtttcrggtcatttctttgctcacacatatgcacataggctattacaggcagccagaccaaatcctgaattctatgctactgagaaatttcttccatcagataccc

SEQ ID NO: 8641 - DNA, 201 bp, Homo sapiens
tgtgcacataggcaagaaagccccccagagtggatgattaggaatgggttggttggatgatacgttgtatggactttaaccatactagataatgataatamaaattccaaagtgattgtggctacttaaacttttacaataaatgtgtaatacttgatgttgatgatgtgttctgaaaacactgtgttgaaggaattgagt

SEQ ID NO: 8642 - DNA, 201 bp, Homo sapiens
tagtgtgcatgtctcctgtgcacataggcaagaaagccccccagagtggatgattaggaatgggttggttggatgatacgttgtatggactttaaccatastagataatgataatacaaattccaaagtgattgtggctacttaaacttttacaataaatgtgtaatacttgatgttgatgatgtgttctgaaaacactgt

SEQ ID NO: 8643 - DNA, 201 bp, Homo sapiens
acaccccttcagaacagcctgcaggaaggcaccgtctcctcacaggctcacacatgcacggtgtgtgcacagagcttttgctctagttcaggaggtgtgtrgggagcctcactagtccaacagagcttggtaccagtgtcatatgccaggaaccaaggttataagggatacaatgtccccagacctaccagagaaggcaaa

SEQ ID NO: 8644 - DNA, 201 bp, Homo sapiens
ttccagtttttgccataaatattagtgtgcatgtctcctgtgcacataggcaagaaagccccccagagtggatgattaggaatgggttggttggatgatasgttgtatggactttaaccatactagataatgataatacaaattccaaagtgattgtggctacttaaacttttacaataaatgtgtaatacttgatgttga

SEQ ID NO: 8645 - DNA, 201 bp, Homo sapiens
tttgttttgctggtttttaagcttcctgtacagcaagttcctactgcctttattttcccatgatgcacattatgtgtaggagttatctgtggtgtgggagrctgtcattcattcatttttactgctgaaggcttacatatggttataccacaatttcactagtttcctattgatgtatatgtggctgattccagtttttgc

SEQ ID NO: 8646 - DNA, 201 bp, Homo sapiens
taaaaaccttagaatctcttgagtgattagagtgtctttagaatactgaggaaaggactcttggctgagtggatcctggataccttgagaatgggggctgrctgccacagacacatacctatgatgagagggttgtcttattccgttttgtgttgctataaagaaatgtctgagactgactaatttatataaacaaggttc

SEQ ID NO: 8647 - DNA, 201 bp, Homo sapiens
ctgggacatttcatgctagaaaaaccccaacatgtgtagataaatggtatagaggacaccagccacccttcgatggagctctgcccagtagtgtcccctcmcttccactcagagacaacatgcccatttcactaaattcatgaggacatggccaacataagtaagagaacaccgggaggtaccttggacagagttccatgc

SEQ ID NO: 8648 - DNA, 201 bp, Homo sapiens
gcttgagcctcttctcttctttctaggttcccagggaaattctctgttggaagattatgcctgcaagaggcctccacctgggaaatgctggcccatggggsgatctcccttttattaaatggaatgattgttggtgaagtgacagctagtgagccagtgacagtacggttcatgtaaaaaagaccacatacctaggattac

SEQ ID NO: 8649 - DNA, 201 bp, Homo sapiens
cagagagagttaggggagcacctgtgaaaccgaccaaggcagagatgggagccctctgtgcagcaggagtggatgcaggacctgcctggaagcaagaggabgagggaacctagttgggtcctgttccctgcctgcctgtgttcgcagggtaaccagtaagggagctggggtagggaattctttcataggttatctagccag

SEQ ID NO: 8650 - DNA, 201 bp, Homo sapiens
gtgtatatatgtgtatatatatacatatatgtgtatatatgtgtatatatacacatatatgtatccatatatgtatatatgtgtatatatacacatatatrtatccatatatgtatatatgtgtatatatacacatatatgtatatatgtgtatatgtatgtgtatatatacacacacacatatatatatgtatgtgtgta

SEQ ID NO: 8651 - DNA, 201 bp, Homo sapiens
aactcatcctaccaaaccagggctgacccatggtgaaggctggctaacttccatttgtctgtttggttgttcagtgccacttcagacttgggtattttctstgggtgtaaacatgggattcaagctcaacccaggtggaccattttcacctcatgatggatgctgttgggcctgtctaatctatgactctgtgggtcacac

SEQ ID NO: 8652 - DNA, 201 bp, Homo sapiens
agactggccataaacaaaatttctgcagcaccataacatgttcataatggccctagcacccaagctggaaggttgtgggtttacgggaatgagggcaaggracacctggcccgcccagggtggaaaaccacttaaaggcattcttaagccacaaacaatagcatgagtgatctgtgtcttaagggcatgttcctgctgcag

SEQ ID NO: 8653 - DNA, 201 bp, Homo sapiens
aattataatcaagtaactaccagggggcccagcactggtgtaaaacacaaaactgtaaaactaccctgggctgctacccagtcatcctccagaaggagacygttgggagcaagtcccccaaaatctggtcataaactggccccgagactggccataaacaaaatttctgcagcaccataacatgttcataatggccctagc

SEQ ID NO: 8654 - DNA, 201 bp, Homo sapiens
ctgggattacaggcgtgagccactgcacctggccgagtggccactctggaagctttgtaaggtttatcttcaccttctggagtgcccgtgttttgccaagsactacagtgcactttctacctgctgctcatccagccaggtcaacaggaagttgtcaatgatatgagctgatttaatatcctattggatatccagtatgtt

SEQ ID NO: 8655 - DNA, 201 bp, Homo sapiens
aattataactcctacttggccagacctggagtaatctagttcattctttaggcttcatcaggcttcttcagggacaggttgctggattacgtagagacaayagacagccccaacaccatcccacatccttcagctctgtaatggtgatgtgatccccacaatacttgaagtatcttacacaagacccaccctgggacacac

SEQ ID NO: 8656 - DNA, 201 bp, Homo sapiens
aaaacaggtatattttaatttggaaaactctgtttaaggaattataatcaagtaactaccagggggcccagcactggtgtaaaacacaaaactgtaaaacwaccctgggctgctacccagtcatcctccagaaggagactgttgggagcaagtcccccaaaatctggtcataaactggccccgagactggccataaacaaa

SEQ ID NO: 8657 - DNA, 201 bp, Homo sapiens
cttcatcaggcttcttcagggacaggttgctggattacgtagagacaatagacagccccaacaccatcccacatccttcagctctgtaatggtgatgtgayccccacaatacttgaagtatcttacacaagacccaccctgggacacactatgatttttgatttggccaggatgggggcagtgtcagaggtttccctttgg

SEQ ID NO: 8658 - DNA, 201 bp, Homo sapiens
atttcctggcctccttaagccccactgtagattctgaatctgaagcttggctgaagtctaggaattgagactgggatcatgactttgtatttgatcaaacrccctcagtctcctgctcctcaattcttgcattcccatcatagatatgaagcagtgccctcgctggctgcccatctgttctgacgctgggacaccaccttt

SEQ ID NO: 8659 - DNA, 201 bp, Homo sapiens
ttcatttctataaaaaacaggtatattttaatttggaaaactctgtttaaggaattataatcaagtaactaccagggggcccagcactggtgtaaaacacraaactgtaaaactaccctgggctgctacccagtcatcctccagaaggagactgttgggagcaagtcccccaaaatctggtcataaactggccccgagact

SEQ ID NO: 8660 - DNA, 201 bp, Homo sapiens
acctgtccatgagacactgccgagggtgtcaaatgtagccagtcatagctgtcaacaatccgcagattctcattatctttttacacagcatcgatgcagcygagaagtaactagccaaagccactgtctttgtaggtttcttccaaccctgtccttattatgcagggcattctatcactgcatgtgccatagcactcccta

SEQ ID NO: 8661 - DNA, 201 bp, Homo sapiens
tgaactttgaaattcttttctttttcatttctataaaaaacaggtatattttaatttggaaaactctgtttaaggaattataatcaagtaactaccagggkgcccagcactggtgtaaaacacaaaactgtaaaactaccctgggctgctacccagtcatcctccagaaggagactgttgggagcaagtcccccaaaatct

SEQ ID NO: 8662 - DNA, 201 bp, Homo sapiens
agacactgccgagggtgtcaaatgtagccagtcatagctgtcaacaatccgcagattctcattatctttttacacagcatcgatgcagctgagaagtaacyagccaaagccactgtctttgtaggtttcttccaaccctgtccttattatgcagggcattctatcactgcatgtgccatagcactccctaaccaaggcaac

SEQ ID NO: 8663 - DNA, 201 bp, Homo sapiens
aaaacataatacaaataccagcaaaatggagccaacgcaagtagaagaagttgaataaacaaaaggattttacaaattggaataagaggacactggtgtgyagatgaaaatgattttgtagtccaaatcctccaaaaagcaagtgccatcatgggattaaagttacaacattttattaggggacatacctgtcagacgata

SEQ ID NO: 8664 - DNA, 201 bp, Homo sapiens
tctgaacccaggggtacaagtccctggggaaactcccccatgtgggaggacttcggagggggtcatgtcctcagggagacccaggttgctgctggagctgygagatgcaggaacatcctgagagaggctgaggaggttttgctgatgtggactgagaaatccagggggtgcactgggaagatttctgtggctggggaggtc

SEQ ID NO: 8665 - DNA, 201 bp, Homo sapiens
aatattgcttctggcttggctgggatgagggaagttttagatgattccctttgggcttcagcacaatgatagcccttactctccagactagggatgtagtrtgggggtgactccctttgccagtgcatcaaggccaattatgcatgtggagaatggggagataaccaggactgggtttatgaacccagtggtcccacagtg

SEQ ID NO: 8666 - DNA, 201 bp, Homo sapiens
attcagttgtatgtgtggtaaaatgtaacatagaatctttgcaagatgaaattaccttgcacagcatattgaacattgtattattgaaaatctagagagaygccagtgagccaaggatcgaatgacctatatgtagccaaggccgttttcatggcatcctggtcctctctgtcacatagctccttacaattctctgtggtt

SEQ ID NO: 8667 - DNA, 201 bp, Homo sapiens
ggcaattggggcaccagaagagggtctggctctggctgggagcagaagggttaacccacaacagtccctcacatggtaaaacgcctgacatgtggtgcagytgcaaatgcatgagcagacagtggtggaatctgtgaagttgtcttctaatgtgttcagttttctcagtgaagtgggaagcaaggtcatcagctgaagtaa

SEQ ID NO: 8668 - DNA, 201 bp, Homo sapiens
aggagcaaggaccccacctcacctctgaacccaggggtacaagtccctggggaaactcccccatgtgggaggacttcggagggggtcatgtcctcagggaracccaggttgctgctggagctgcgagatgcaggaacatcctgagagaggctgaggaggttttgctgatgtggactgagaaatccagggggtgcactggga

SEQ ID NO: 8669 - DNA, 201 bp, Homo sapiens
cagtaccctcctgaagtcccacctggggcgcaatattgcttctggcttggctgggatgagggaagttttagatgattccctttgggcttcagcacaatgawagcccttactctccagactagggatgtagtgtgggggtgactccctttgccagtgcatcaaggccaattatgcatgtggagaatggggagataaccagga

SEQ ID NO: 8670 - DNA, 201 bp, Homo sapiens
ttgatcagtgatgtgcatttccaattctgtaaaagtttaattcagttgtatgtgtggtaaaatgtaacatagaatctttgcaagatgaaattaccttgcayagcatattgaacattgtattattgaaaatctagagagatgccagtgagccaaggatcgaatgacctatatgtagccaaggccgttttcatggcatcctgg

SEQ ID NO: 8671 - DNA, 201 bp, Homo sapiens
ccttcctactcttttcatgtttcatttattttgatcagtgatgtgcatttccaattctgtaaaagtttaattcagttgtatgtgtggtaaaatgtaacatmgaatctttgcaagatgaaattaccttgcacagcatattgaacattgtattattgaaaatctagagagatgccagtgagccaaggatcgaatgacctatat

SEQ ID NO: 8672 - DNA, 201 bp, Homo sapiens
ttccttcctactcttttcatgtttcatttattttgatcagtgatgtgcatttccaattctgtaaaagtttaattcagttgtatgtgtggtaaaatgtaacrtagaatctttgcaagatgaaattaccttgcacagcatattgaacattgtattattgaaaatctagagagatgccagtgagccaaggatcgaatgacctat

SEQ ID NO: 8673 - DNA, 201 bp, Homo sapiens
ataataggcaatcccaacaccaccccccatccttcagctctctaatggcagtgccacccctacaatacctgcagtaccctcctgaagtcccacctggggcrcaatattgcttctggcttggctgggatgagggaagttttagatgattccctttgggcttcagcacaatgatagcccttactctccagactagggatgtag

SEQ ID NO: 8674 - DNA, 201 bp, Homo sapiens
accaggcctgggctgacccatggtgaaggctggctaactgccatttgtctgtttggttgttcagtgccacatcacacttgggtgttttctgtgggtgtcarcatgggattcaagctcaacccaggtggaccattttcacctgttgatgaatgctgttgggcctgtgcaatttatgactttgtgggtcacacagccacttgg

SEQ ID NO: 8675 - DNA, 201 bp, Homo sapiens
tttcattgtgttgacttttccattagtgctgcaaatgccaaggtcggtagcacacccagcacctcagcagaaccaggcagtggctccaaactgcagtcccrtttaagagtgtctttgatggagcagtaaaaaatttatgtggattaaagtttgatccttgagtatacgtctttaatattctttgtgagaaaatgggaaata

SEQ ID NO: 8676 - DNA, 201 bp, Homo sapiens
ctacggaaagacagttgtattaattcctgtttgggggtatcatgaataaagctgcaagagtatttgtgcacaggattttcgtgaacataaagtattccctygtttgaaataagtgcctaggagggcaattgctagtcataaggtaaattgcatgttcggtttgaagaaaactgcaatactcatttccagagtggctgtacc

SEQ ID NO: 8677 - DNA, 201 bp, Homo sapiens
ccacctgagctcttcctcctccacctcacagcagcgaccacagctccagtgatcacagctccaaagagaaccaggccagcaatgatgcccacgatggggayggtgggctgggaagacggctctgggaaaagaggggaaggtgaggggccctgaccctgctaaaggtcagagaggctcctgctttccctaaaagacatgaca

SEQ ID NO: 8678 - DNA, 201 bp, Homo sapiens
gcctaactacccaaagtaataaaaattttctcctgtgttttcttttagaaattttatagttttaactcataaattttagctgtttaggtctctaatttgtytgagctgatattttatatggtgttaaatgtaacattgtgttacctatgcaacttcattgaaaatcaattgacaaagaaagtaagaatatctttctagatt

SEQ ID NO: 8679 - DNA, 201 bp, Homo sapiens
aaatctcagacccacccttcatcccttccccacctgagctcttcctcctccacctcacagcagcgaccacagctccagtgatcacagctccaaagagaacyaggccagcaatgatgcccacgatggggatggtgggctgggaagacggctctgggaaaagaggggaaggtgaggggccctgaccctgctaaaggtcagaga

SEQ ID NO: 8680 - DNA, 201 bp, Homo sapiens
tggctcttgtgatttgattgggcccacacagagagtccagcagaatctccctattttaaggtccttaatcttcattacatgagtaatatcccttttgccaygcaatgcaacctgttcacaggttccaacgattaagactggacatctttggggaccattactcagcccaccacatctgcgtatgttgaagtcaccaagagt

SEQ ID NO: 8681 - DNA, 201 bp, Homo sapiens
gttctgctccatcctgcatctttccccaccactggcaccaccagccccagggggtctgagggacgctggctgcttgcaccatggcctggatctgctgcagsgtcctttcctgtgtaggccctacttgaagctggcctcctcctatgtcacctagagtgtttgccaaagcacgtacctagatgtggaatgtggtgttgtcag

SEQ ID NO: 8682 - DNA, 201 bp, Homo sapiens
ccctcagtgagacaagaaatctcagacccacccttcatcccttccccacctgagctcttcctcctccacctcacagcagcgaccacagctccagtgatcayagctccaaagagaaccaggccagcaatgatgcccacgatggggatggtgggctgggaagacggctctgggaaaagaggggaaggtgaggggccctgaccc

SEQ ID NO: 8683 - DNA, 201 bp, Homo sapiens
gtattcccttgtttgaaataagtgcctaggagggcaattgctagtcataaggtaaattgcatgttcggtttgaagaaaactgcaatactcatttccagagyggctgtaccattttaaaatacatccctaccagcaatataagagtgtcccagttcctctgcgtccttgccagcatctgttgctacctttattttgtatttc

SEQ ID NO: 8684 - DNA, 201 bp, Homo sapiens
ctctcattctgtagcttgtctttttatgctcttcataggtctctcacagagcaacagttttaattttgataagatccagtttagtaactttttcttttacrgatcatacttttggtgttatgtgtaagaactctttgtctagtcttagttctgatggctttttgttaaaagatttgtaattttaattttttaatgtatttg

SEQ ID NO: 8685 - DNA, 201 bp, Homo sapiens
gagtcatgcataaccctagcactaagagacaagaggggaatccctctctctgaaaattttgcaaaattctgggttctttttccactgagtgggcacaagtyggctaatcatgaacatgaggtatttgtcctcatttaaaggtgcttcagaagcactgacccctaggaaggcctccttgtctgggtcaggcaccctacacca

SEQ ID NO: 8686 - DNA, 201 bp, Homo sapiens
ttggaaccctcagtgagacaagaaatctcagacccacccttcatcccttccccacctgagctcttcctcctccacctcacagcagcgaccacagctccagygatcacagctccaaagagaaccaggccagcaatgatgcccacgatggggatggtgggctgggaagacggctctgggaaaagaggggaaggtgaggggccc

SEQ ID NO: 8687 - DNA, 201 bp, Homo sapiens
ctttattgaatatgtggtttgcaaatatcttctctcattctgtagcttgtctttttatgctcttcataggtctctcacagagcaacagttttaattttgawaagatccagtttagtaactttttcttttacagatcatacttttggtgttatgtgtaagaactctttgtctagtcttagttctgatggctttttgttaaaa

SEQ ID NO: 8688 - DNA, 201 bp, Homo sapiens
cgggtcctgcgtccccgccgggcgggccccttgcttctccccgcagaggcggtttccccacgaccccgcactcacccgcccaggtctgggtcagggccagrgcccccaagagtagcaggaggagggttcggggcgccatgacggccatcctcggcgtctggggagaatctgagtcccggtgggtgcgtgcggactttagaa

SEQ ID NO: 8689 - DNA, 201 bp, Homo sapiens
gtaatcaaggtgataaatctgtccttcattttaacaggtgctttacaaaagagtaagtgctggcacacagggcccaggctgggtaggcccataattgtggrtggtgcttcccagtaacgaggcagggcacacttctacctgggtcttggaaccctcagtgagacaagaaatctcagacccacccttcatcccttccccacc

SEQ ID NO: 8690 - DNA, 201 bp, Homo sapiens
aaggcaagactgggacatctagtccataggaagacctgcaccactgtcaccttcacacaggttaactcggaagacaaaggtgctttggctaagctggtggragttctcaggaccaattacaatgacagatacgatgagatccgccatcactggggagacagtgtcctgggtctcaagtatgtggtttgcattgccaagctc

SEQ ID NO: 8691 - DNA, 201 bp, Homo sapiens
atctgttgctacctttattttgtatttcagccattctcatcactgcagttttaatttgtattttcctactggatagtgatgttgagtgtcttttcatctgyttgttagcctggtgtttatcctcttcagtgaaacgtctgttcatgtcttgctcattgcctattgtttatttggatttcatttttactgttgagtttttac

SEQ ID NO: 8692 - DNA, 201 bp, Homo sapiens
ctcgcggcgtcgctgtcaaaccgcacgaactgcgtgtcgtccacgtagcccacggcgatgaagcggggctccccgcggccgggccgggacacggatgtggwgaaatacctcatggagtgggagcctgggggcgaggagtggctgagacccacccgaccctcctcccggcgcggctacccgggtcctgcgtccccgccgggc

SEQ ID NO: 8693 - DNA, 201 bp, Homo sapiens
aagcagaggctgttggcccgggccaagaagaaagctgctggcaaaggggacattccccactaagagtccacctgtccttcgagcaggagttaacaccatcrccaccttggtggagaacaagaaagctcagctggtggtgattgcacatgatgtagatcccatcaagctggttgtcttcttgcctgtcctgtgtcataaaat

SEQ ID NO: 8694 - DNA, 201 bp, Homo sapiens
atatttgctattccatcactgggtattccttcctactcttttcatgtttcatttattttgatcagtgatgtgcatttccaattctgtaaaagtttaattcmgttgtatgtgtggtaaaatgtaacatagaatctttgcaagatgaaattaccttgcacagcatattgaacattgtattattgaaaatctagagagatgcca

SEQ ID NO: 8695 - DNA, 201 bp, Homo sapiens
tcttagttctgatggaccaagtgcagaagataaactttcctgctttcagcttagtgactggtaatagaagctggagttaagagaatcagtggcagcctctstctccatgccccagcccagtaaatctaagccaggacttggggctctggcactttcttctcactgtgcgtcctccttctctggctcaaaagagaaccacat

SEQ ID NO: 8696 - DNA, 201 bp, Homo sapiens
gaagaaagcaggtgtgggtcctggaccaaccgccctcctgaaggtcctcagggaccttcccctgtgacttgtgactgctgggatcaggtcccatcaccgcygtaatcaaggtgataaatctgtccttcattttaacaggtgctttacaaaagagtaagtgctggcacacagggcccaggctgggtaggcccataattgtgg

SEQ ID NO: 8697 - DNA, 201 bp, Homo sapiens
tcacccaggcaccagacagccaaacagctactctgctgcttaagctggcccacaatacagaccagagacaaaccaagagaagaagcagaggctgttggccbgggccaagaagaaagctgctggcaaaggggacattccccactaagagtccacctgtccttcgagcaggagttaacaccatcaccaccttggtggagaaca

SEQ ID NO: 8698 - DNA, 201 bp, Homo sapiens
ttcctaccagcaatatgaatgatccagtttctctgtaaccttgccagcatctgttgctacctttattttgtatttcagccattctcatcactgcagttttratttgtattttcctactggatagtgatgttgagtgtcttttcatctgcttgttagcctggtgtttatcctcttcagtgaaacgtctgttcatgtcttgct

SEQ ID NO: 8699 - DNA, 201 bp, Homo sapiens
ggtgcccgcggctccatcctctggctcgcggcgtcgctgtcaaaccgcacgaactgcgtgtcgtccacgtagcccacggcgatgaagcggggctccccgckgccgggccgggacacggatgtggtgaaatacctcatggagtgggagcctgggggcgaggagtggctgagacccacccgaccctcctcccggcgcggctac

SEQ ID NO: 8700 - DNA, 201 bp, Homo sapiens
cagcgaggtcggccggattccgcacccctgcctccaaccaccgcccatgggcggggaggagagactaccggccgcaagcagaacgcagaacgagaagagcsgtcccgttagccatgaatgtgtccctcatctgtaccgcctccggccccgcccgggagaacgcgacgtcaccacatccatcacttgttctctttcactctt

SEQ ID NO: 8701 - DNA, 201 bp, Homo sapiens
ttttttctttttagcagtcctattctgtttccattcatatttgctattccatcactgggtattccttcctactcttttcatgtttcatttattttgatcartgatgtgcatttccaattctgtaaaagtttaattcagttgtatgtgtggtaaaatgtaacatagaatctttgcaagatgaaattaccttgcacagcatat

SEQ ID NO: 8702 - DNA, 201 bp, Homo sapiens
cttcaagggctatacaaggaccagaaaagaagaggttgcaccaatttggactgccgagtcacacttctttacacaagaaaacacactttacagcctcaaayggccaacaatgcagagggacatgtcctcctcaggggaaaatttgatagaaaattgaaatggtcaattgaaacattgtttgtctaaaaactgccaatctaa

SEQ ID NO: 8703 - DNA, 201 bp, Homo sapiens
tgctgtcgtgaagaagcaggaggccaagaaagtggtaaatcccttgtttgagaaaaggcctaagaattttggcactggacaggatatccagcccaaaagasacctcacccactttgtgaaatggccctgctatatcaggttgcagcagcagagaaccatcctctataagtggctgaaagtgcctcctgagattaaccagtt

SEQ ID NO: 8704 - DNA, 201 bp, Homo sapiens
tagcactgctattatgtgcttctgaattttttttctttttagcagtcctattctgtttccattcatatttgctattccatcactgggtattccttcctackcttttcatgtttcatttattttgatcagtgatgtgcatttccaattctgtaaaagtttaattcagttgtatgtgtggtaaaatgtaacatagaatctttg

SEQ ID NO: 8705 - DNA, 201 bp, Homo sapiens
gaaggccaaggagaagaaggtggctccagcccctgctgtcgtgaagaagcaggaggccaagaaagtggtaaatcccttgtttgagaaaaggcctaagaathttggcactggacaggatatccagcccaaaagagacctcacccactttgtgaaatggccctgctatatcaggttgcagcagcagagaaccatcctctataa

SEQ ID NO: 8706 - DNA, 201 bp, Homo sapiens
tggtattgaatgagatgtgatagaagtgatttggacaccactatgattctaaatagcactgctattatgtgcttctgaattttttttctttttagcagtcytattctgtttccattcatatttgctattccatcactgggtattccttcctactcttttcatgtttcatttattttgatcagtgatgtgcatttccaattc

SEQ ID NO: 8707 - DNA, 201 bp, Homo sapiens
ttgtcttctgaactctccaaactcttccaacctctgcctgttacccagttccaaagctgtttccacattttcaagaatttttatagtaatacccaactcchggtaccgattttctgaattagttcattctcacacttttataaagaaatacctgagactgggtaatttataaacaaaataggtttctttctttctcctccc

SEQ ID NO: 8708 - DNA, 201 bp, Homo sapiens
agatatatcagagtgataacttgaattttactgcactattctttcagcttctttgcacatttgaaaatatatacaattataagttggaagaatgagggaamaaaaagagcgagagagagtgctgaatctgaataggctaggggttgggtctcactaggaactataattgatctctgccattttgaaagtgtggccccctga

SEQ ID NO: 8709 - DNA, 201 bp, Homo sapiens
ggcattctataacacacttaacatcttttgttgtggtattgaatgagatgtgatagaagtgatttggacaccactatgattctaaatagcactgctattaygtgcttctgaattttttttctttttagcagtcctattctgtttccattcatatttgctattccatcactgggtattccttcctactcttttcatgtttca

SEQ ID NO: 8710 - DNA, 201 bp, Homo sapiens
ggtggctcatgcctgtaatcccagcacttttggtggccgaggcgggcggatcacctgagtttaggagtttgagactatcctggccaatatggtgaaacccygtctctactgaaaatacaaaaattagctgcgtgtggtggtgggcgcctgtattaccagctactcgggaggctgagacagtagaattgcttgaacctggga

SEQ ID NO: 8711 - DNA, 201 bp, Homo sapiens
gcttaacaaatctctaggaagttgcaaattttcccccattttcttgtcttctgaactctccaaactcttccaacctctgcctgttacccagttccaaagchgtttccacattttcaagaatttttatagtaatacccaactcctggtaccgattttctgaattagttcattctcacacttttataaagaaatacctgagac

SEQ ID NO: 8712 - DNA, 201 bp, Homo sapiens
aaatttcccctttaaatatcagttccagtttcaggtcatgtctttgctcacacatatgtgcataggctattacaagcaggcaggccaaatctggaatgctwtgctgcttagaaatttcttccaccagatacccttatacatcactctcaagttcaaagttctacagatccctagggagggggaacaatgcctccaagttct

SEQ ID NO: 8713 - DNA, 201 bp, Homo sapiens
catctagcttagcatgatgccaataattttggcttgatgctgtagcccgaaatggttagctcgaattgagagacaagttattttcaaaaactggctatccratgggcattctataacacacttaacatcttttgttgtggtattgaatgagatgtgatagaagtgatttggacaccactatgattctaaatagcactgcta

SEQ ID NO: 8714 - DNA, 201 bp, Homo sapiens
gtcctcacaaggttgaaactcatcatggcagacattaaaacttaaagctctaaaataatctcctttgactctatatcttgaaccctgagcacactggctgstgcaagcaatggactcacaatgccatcttcagcctcatatccgtggctttggtgaacataatccatatagctgctctcatgggtgaacattgaatgctta

SEQ ID NO: 8715 - DNA, 201 bp, Homo sapiens
ttcatttacaaaaatgagaatctcatacttcagttaacacatctagcttagcatgatgccaataattttggcttgatgctgtagcccgaaatggttagctygaattgagagacaagttattttcaaaaactggctatccgatgggcattctataacacacttaacatcttttgttgtggtattgaatgagatgtgatagaa

SEQ ID NO: 8716 - DNA, 201 bp, Homo sapiens
tgcacctgtaaaattaaaaaaagttatttacttctaaaatattaatacaacagtggtagagacatttcctatacatttccattccaaaagaaataaatggrccaaaagaaatgaatgcagtgtcctcacaaggttgaaactcatcatggcagacattaaaacttaaagctctaaaataatctcctttgactctatatcttg

SEQ ID NO: 8717 - DNA, 201 bp, Homo sapiens
attgatgatagtttcttttgctgtgcagaaaaaaattgcctaatctgattgcttttcatttacaaaaatgagaatctcatacttcagttaacacatctagyttagcatgatgccaataattttggcttgatgctgtagcccgaaatggttagctcgaattgagagacaagttattttcaaaaactggctatccgatgggca

SEQ ID NO: 8718 - DNA, 201 bp, Homo sapiens
gccactacagataagcaaaaaaatcgtcacattctaaagctgtcctgggccacatgcatcccgagagctgcaggttggacaagcttgcatctagaatgtayacacgacaaggccagaaatttttctgtttttactttaacgatgttttctaaatgcaaaaacagtcaaatacctagcagacaacaaatgccacttgaatgg

SEQ ID NO: 8719 - DNA, 201 bp, Homo sapiens
tctttttatgctcttcataggtctctcacagaacaacagtttttagtgttgataagatccaatttattaacttttatggatcatacttttggtgttatgtytaagaactctttgtccagtcttagctctgatgactttttcttaaaaggtttgtaatttaaaaatttaaatttattatttattttagaaaaaaaattcttg

SEQ ID NO: 8720 - DNA, 201 bp, Homo sapiens
gtgttcagttttctcagtgaagtgggaagcaaggtcatcagctgaagtaagaatggggaaggcaggttggatgtgtgagcacaaagaaaaagtgtgtaagrgtcacccaggccaggaggaggctgagggtgagccatgcagggagagggtgattgctggccatggtagggacttcctatgtggtttggaatcctaaatttt

SEQ ID NO: 8721 - DNA, 201 bp, Homo sapiens
tgataagatccaatttattaacttttatggatcatacttttggtgttatgtctaagaactctttgtccagtcttagctctgatgactttttcttaaaaggyttgtaatttaaaaatttaaatttattatttattttagaaaaaaaattcttgcctaggctggccttgaactcctgggctcaagggatcctcccacctcagc

SEQ ID NO: 8722 - DNA, 201 bp, Homo sapiens
cccagggaagggcaacgtgacaggccggcgggacagccccaccgccgcgaagaggggctgcccaaaaggcaacagccataggagatgagcaggggtgcctrctgcgtcggagaactcatctccccaaccccaccgacgccacaaggtagagggcgaggacagcgaggtcggccggattccgcacccctgcctccaaccacc

SEQ ID NO: 8723 - DNA, 201 bp, Homo sapiens
tcattgggtttaagtctgtccattttcatttactgccttctaatattatctttcttgctcaactatttttcttctgttgccttctttagatgaataaaaavctttgcattattgtggtcttctcagtaagtgttctagttacaaattctcttattatttctttaattatctgagaaagcacaataatctgtgacttattat

SEQ ID NO: 8724 - DNA, 201 bp, Homo sapiens
gaggaaagaaaacaaactgtgagaggccagggaagaggcagggccatgagatcctagaggagtttccagaactgtgactgcagacccaggtcaggatcagraaacccgagggaagaggatgtgttgaagctgaaccaaatgtccttttgacatctgtcctcagcaggaacattctcctgacttgtgactgctgggagtcag

SEQ ID NO: 8725 - DNA, 201 bp, Homo sapiens
ctcaggcatcagcctccttcatacttacttgcagcctgagagtagctccctccttttctatctgtgggaagaaaatgtcctgtgagataccagaaaggagycagggccttaaggtcctagaggaacctccaagtcttggacctcagagaagtttccagaaatgtgtgactgcagacccagggcgggatcaggaaacatgaa

SEQ ID NO: 8726 - DNA, 201 bp, Homo sapiens
gaaatgcagtggcacaaacacaactcacttcagcctctacctgccaggcttaagcaattcctcccttctaggcctcttgagtagctgggactagaggttcrcgccaccatgcctggctaatttctgtattttttgtagagaaagggatttatcatgtttcccagacttgtctggaacgcctggggtcaagcaatctgccca

SEQ ID NO: 8727 - DNA, 201 bp, Homo sapiens
caagagatgttgtctcttaggtcaactatactggatgcctaaaagggtgaagctgtatgtccctgagaccattcttgtttttggaacctgataagattgartggtgtctgcaaagctgagtgatgtcattctgggagacatattcatacaagaggatgataaactggcctaattttgaatgaccgaatgagacttggataa

SEQ ID NO: 8728 - DNA, 201 bp, Homo sapiens
cttttccaccaacagtgtaaaagcattcctatttctctgcaaccttgccagcatctgttgtttcttgactatttaataattgccattctgactggcataaratggtatctcatttgtcgttttgatttgcatttctctaatgatcagtgatgggagctttctttttcatatttttgttggccacatgtatgtcttctttag

SEQ ID NO: 8729 - DNA, 201 bp, Homo sapiens
tcttgcctgaattcacttccttgcagatagaaaagaggtttccacttccttgttaagagccacccttagctcctagagccttctctcagatactcacacayggtgcctaaggcacattcaatcctcctgcttggaacttctgacctcccctctccagcttctcctctgccttcctcctctgcagaatctgactccaaccag

SEQ ID NO: 8730 - DNA, 201 bp, Homo sapiens
ccccatgggctcccaaacacaatatcccaaggacctcaggcatcagcctccttcatacttacttgcagcctgagagtagctccctccttttctatctgtgrgaagaaaatgtcctgtgagataccagaaaggagtcagggccttaaggtcctagaggaacctccaagtcttggacctcagagaagtttccagaaatgtgtg

SEQ ID NO: 8731 - DNA, 201 bp, Homo sapiens
gtggtgtgagcaagagatgttgtctcttaggtcaactatactggatgcctaaaagggtgaagctgtatgtccctgagaccattcttgtttttggaacctgwtaagattgaatggtgtctgcaaagctgagtgatgtcattctgggagacatattcatacaagaggatgataaactggcctaattttgaatgaccgaatgag

SEQ ID NO: 8732 - DNA, 201 bp, Homo sapiens
gatgggagccctctgtgcagcaggagtggatgcaggacctgcctggaagcaagaggatgagggaacctagttgggtcctgttccctgcctgcctgtgttcrcagggtaaccagtaagggagctggggtagggaattctttcataggttatctagccagagatatgtttatagacatgttctttcatgtttatattcaggtt

SEQ ID NO: 8733 - DNA, 201 bp, Homo sapiens
taatttctcaaaattcctgctttaaatgctgatgtccaataaagatgttcgtagtttcagctgggtcttaaaaggatttccaccaatactaatgttgtaayctatatcaaatgaaacaggaactcaaatgtggagctccctctccaggacggtccatgtgggagacagtggctgtggcagtggcaatccccaagtgcaaag

SEQ ID NO: 8734 - DNA, 201 bp, Homo sapiens
gggtggtgctgttcttggtcaaggcagcctcagctccacccaggtaaggcagtggtggcagagagagttaggggagcacctgtgaaaccgaccaaggcagrgatgggagccctctgtgcagcaggagtggatgcaggacctgcctggaagcaagaggatgagggaacctagttgggtcctgttccctgcctgcctgtgttc

SEQ ID NO: 8735 - DNA, 201 bp, Homo sapiens
gggcactgtcactgcctggggtagaacaaaaacagaacctggtcagatcccacagaagatgtggctagaggaggaattgtggggtgggtgagctcccccaygggctcccaaacacaatatcccaaggacctcaggcatcagcctccttcatacttacttgcagcctgagagtagctccctccttttctatctgtgggaaga

SEQ ID NO: 8736 - DNA, 201 bp, Homo sapiens
gaggaaaattcaatattagcttatctcctcaaaagtggtgtgagcaagagatgttgtctcttaggtcaactatactggatgcctaaaagggtgaagctgtrtgtccctgagaccattcttgtttttggaacctgataagattgaatggtgtctgcaaagctgagtgatgtcattctgggagacatattcatacaagaggat

SEQ ID NO: 8737 - DNA, 201 bp, Homo sapiens
ctaacttcctggtcttggggcacacagatgggtggtgctgttcttggtcaaggcagcctcagctccacccaggtaaggcagtggtggcagagagagttagrggagcacctgtgaaaccgaccaaggcagagatgggagccctctgtgcagcaggagtggatgcaggacctgcctggaagcaagaggatgagggaacctagt

SEQ ID NO: 8738 - DNA, 201 bp, Homo sapiens
tcagagccctgggcactgtcactgcctggggtagaacaaaaacagaacctggtcagatcccacagaagatgtggctagaggaggaattgtggggtgggtgrgctcccccatgggctcccaaacacaatatcccaaggacctcaggcatcagcctccttcatacttacttgcagcctgagagtagctccctccttttctatc

SEQ ID NO: 8739 - DNA, 201 bp, Homo sapiens
ctacgtagactggtggtcagatagcctgcactagttcctaacctatgtaacctactgtctatgatcaagagtagattaagagaagacatggtagaatactrttgctgcatgcagtctaggccagcacagcagccaaacctaatgtcacttctagaactggaaaagactgatataaagggacagaaggaggaatagtggctg

SEQ ID NO: 8740 - DNA, 201 bp, Homo sapiens
agactgactggggaggtgggatagttattgactctgttgcgtggttcctcctaacttcctggtcttggggcacacagatgggtggtgctgttcttggtcarggcagcctcagctccacccaggtaaggcagtggtggcagagagagttaggggagcacctgtgaaaccgaccaaggcagagatgggagccctctgtgcagc

SEQ ID NO: 8741 - DNA, 201 bp, Homo sapiens
aatctttgaggaatcgccacactgtcactgtcttccacaatggattaaccatttacttttccaccaacagtgtaaaagcattcctatttctctgcaacctygccagcatctgttgtttcttgactatttaataattgccattctgactggcataaaatggtatctcatttgtcgttttgatttgcatttctctaatgatca

SEQ ID NO: 8742 - DNA, 201 bp, Homo sapiens
agagacacatcagagccctgggcactgtcactgcctggggtagaacaaaaacagaacctggtcagatcccacagaagatgtggctagaggaggaattgtgrggtgggtgagctcccccatgggctcccaaacacaatatcccaaggacctcaggcatcagcctccttcatacttacttgcagcctgagagtagctccctcc

SEQ ID NO: 8743 - DNA, 201 bp, Homo sapiens
agactatcctggccaatatggtgaaaccccgtctctactgaaaatacaaaaattagctgcgtgtggtggtgggcgcctgtattaccagctactcgggaggytgagacagtagaattgcttgaacctgggaggcagaggttgcatgagccgagatcatactactgcactccagcctgggcgacagagtgagactccatctca

SEQ ID NO: 8744 - DNA, 201 bp, Homo sapiens
tcagttcagactgactggggaggtgggatagttattgactctgttgcgtggttcctcctaacttcctggtcttggggcacacagatgggtggtgctgttcktggtcaaggcagcctcagctccacccaggtaaggcagtggtggcagagagagttaggggagcacctgtgaaaccgaccaaggcagagatgggagccctct

SEQ ID NO: 8745 - DNA, 201 bp, Homo sapiens
tggttctaaatctttgaggaatcgccacactgtcactgtcttccacaatggattaaccatttacttttccaccaacagtgtaaaagcattcctatttctcygcaaccttgccagcatctgttgtttcttgactatttaataattgccattctgactggcataaaatggtatctcatttgtcgttttgatttgcatttctct

SEQ ID NO: 8746 - DNA, 201 bp, Homo sapiens
gagtttgagactatcctggccaatatggtgaaaccccgtctctactgaaaatacaaaaattagctgcgtgtggtggtgggcgcctgtattaccagctactygggaggctgagacagtagaattgcttgaacctgggaggcagaggttgcatgagccgagatcatactactgcactccagcctgggcgacagagtgagactc

SEQ ID NO: 8747 - DNA, 201 bp, Homo sapiens
aataaacggggaatgaggataagcaagcatcagcatctcccgccatcagttcagactgactggggaggtgggatagttattgactctgttgcgtggttcckcctaacttcctggtcttggggcacacagatgggtggtgctgttcttggtcaaggcagcctcagctccacccaggtaaggcagtggtggcagagagagtta

SEQ ID NO: 8748 - DNA, 201 bp, Homo sapiens
caggccatttcagaagtgcctcattaagtccaagccacactcaagagagggaattaagctgcacctctagaaaggaacagtatcaaaggatttgaatataygttaaaagcaaaattataactattgtttcaggtttctgaaaatcaaagtcttcttgtatctaattagttttcattaactctttaagcttgtcttttaatt

SEQ ID NO: 8749 - DNA, 201 bp, Homo sapiens
ctatacaagaaccagaaaaatggagattacaccaatttggactgttgagtcacatttctttacacaagaaaacacactttacagccttaaaaagccaacartgcacagggaaatgtactattcaggggaaactttgatagaatattgaaatggctgaccaggcgcggtggctcatgcctgtaatcccagcacttttggtgg

SEQ ID NO: 8750 - DNA, 201 bp, Homo sapiens
tcagcatcaggagaacagcatgggggcaccgcccccattatccaatcacctcccatgaggtccctcccccaataggtagggattacaatttgcataacaaytcaagatgagatttgggtgggagcacagaaccaggccatttcagaagtgcctcattaagtccaagccacactcaagagagggaattaagctgcacctcta

SEQ ID NO: 8751 - DNA, 201 bp, Homo sapiens
tttatgttttcctttttatctggatgcctttaacttttaattatttgccttattgcaccagctgcaatctccagtacaatgttaagtagaagtgttggatkggacatccttgcattgatctccatcttaggagaaaagcattcagtctttcttcagcaagcatgattttagttgtgggttttttatagatgccctttatca

SEQ ID NO: 8752 - DNA, 201 bp, Homo sapiens
gtgactcattttgagttatttttgtatgaagcatgaggttttggctcaggttattttttttccactgtggttgtccagttgttccatcaccatttgatggraaagctctccttccttcattgaattgcttttgtgcttttgtaaaagtcagttgagcatgttttgctcatttttagttgagttgctcatcttcttacattg

SEQ ID NO: 8753 - DNA, 201 bp, Homo sapiens
ggcctgtgataccacacctggctcaatgtttgccattttaactctgtgctttacatgaaagcttgtgactcattttgagttatttttgtatgaagcatgargttttggctcaggttattttttttccactgtggttgtccagttgttccatcaccatttgatgggaaagctctccttccttcattgaattgcttttgtgct

SEQ ID NO: 8754 - DNA, 201 bp, Homo sapiens
atgaagcagggaaaagccccttataaaaccatcagatctcatgagaattccctcagcatcaggagaacagcatgggggcaccgcccccattatccaatcamctcccatgaggtccctcccccaataggtagggattacaatttgcataacaattcaagatgagatttgggtgggagcacagaaccaggccatttcagaagt

SEQ ID NO: 8755 - DNA, 201 bp, Homo sapiens
ttagcttttaaatagacatttctggtctgtgttttatttcaagtgtctgggaacggatagagttgaggttcaagggagaatgagagctctgtctagatgcrttgacatagcacaaagaaatctcccctcctccctgatatctccccgccagttctcagggaaggacagattcagagcaacacagacaggtctggaaaggga

SEQ ID NO: 8756 - DNA, 201 bp, Homo sapiens
tccgcccaacacccaacacacatcaggccctccaagctctcacctttacaagctgtgagagacacatcagagccctgggcactgtcactgcctggggtagracaaaaacagaacctggtcagatcccacagaagatgtggctagaggaggaattgtggggtgggtgagctcccccatgggctcccaaacacaatatcccaa

SEQ ID NO: 8757 - DNA, 201 bp, Homo sapiens
tgcaaagaaaccccatagcacagctgtgtccactgttccgcccaacacccaacacacatcaggccctccaagctctcacctttacaagctgtgagagacayatcagagccctgggcactgtcactgcctggggtagaacaaaaacagaacctggtcagatcccacagaagatgtggctagaggaggaattgtggggtgggt

SEQ ID NO: 8758 - DNA, 201 bp, Homo sapiens
acgaagaataaataaacggggaatgaggataagcaagcatcagcatctcccgccatcagttcagactgactggggaggtgggatagttattgactctgttrcgtggttcctcctaacttcctggtcttggggcacacagatgggtggtgctgttcttggtcaaggcagcctcagctccacccaggtaaggcagtggtggca

SEQ ID NO: 8759 - DNA, 201 bp, Homo sapiens
cacctggactgaaatgcagtggcacaaacacaactcacttcagcctctacctgccaggcttaagcaattcctcccttctaggcctcttgagtagctgggaytagaggttcgcgccaccatgcctggctaatttctgtattttttgtagagaaagggatttatcatgtttcccagacttgtctggaacgcctggggtcaagc

SEQ ID NO: 8760 - DNA, 201 bp, Homo sapiens
tccaatgcaaagaaaccccatagcacagctgtgtccactgttccgcccaacacccaacacacatcaggccctccaagctctcacctttacaagctgtgagrgacacatcagagccctgggcactgtcactgcctggggtagaacaaaaacagaacctggtcagatcccacagaagatgtggctagaggaggaattgtgggg

SEQ ID NO: 8761 - DNA, 201 bp, Homo sapiens
aataaataaacagggaatgagtataagcaagcatcagcatctcccgccatcagttcagactgaggggagtttggactgaattaacgaagaataaataaacrgggaatgaggataagcaagcatcagcatctcccgccatcagttcagactgactggggaggtgggatagttattgactctgttgcgtggttcctcctaact

SEQ ID NO: 8762 - DNA, 201 bp, Homo sapiens
acttcattctggcttaagctcacactcctccaggaagtcagttactgtgaaggtcactaacatgctcagtattgtcatgtctccacctgtctttacttctytgtagctttcctcacactcaacgactcctttttattttgctcaatttctgtggattcacttcacaaattttattataaggtagttctagctagaagaaaa

SEQ ID NO: 8763 - DNA, 201 bp, Homo sapiens
gggcacatcatgggcctcaattgctaatgagttggacattcagaggtgtcggcagctggatctgccttggtaggggggagtcagtgctgttggccccataygtagcctcatgcctgccactgtggttgctccattcatgaactcatcctaccaaaccagggctgacccatggtgaaggctggctaacttccatttgtctgt

SEQ ID NO: 8764 - DNA, 201 bp, Homo sapiens
gattgaattaatgaagaataaataaacagggaatgagtataagcaagcatcagcatctcccgccatcagttcagactgaggggagtttggactgaattaamgaagaataaataaacggggaatgaggataagcaagcatcagcatctcccgccatcagttcagactgactggggaggtgggatagttattgactctgttgc

SEQ ID NO: 8765 - DNA, 201 bp, Homo sapiens
cattgtatgactgaatcatgatttttgtacattggcagttatttcttgttttttactattataaataaagaaactatgaacatttttatgcagggattatygacaaaatcttcatttctcttgagtatatacctaggagtggaaatggtagctgtagaggactagcttgtttaactttattagatgatatgaaattgattt

SEQ ID NO: 8766 - DNA, 201 bp, Homo sapiens
cactacagtgcactttctacctgctgctcatccagccaggtcaacaggaagttgtcaatgatatgagctgatttaatatcctattggatatccagtatgtytagtatagtcttaagactatactatagaggtcaggggagttacaatagccctgagacaaatgataaatcaatgttttgaggatcccacatgaatgtgaat

SEQ ID NO: 8767 - DNA, 201 bp, Homo sapiens
ctcagcttcctgagtagctgagagtacaggcctgtgataccacacctggctcaatgtttgccattttaactctgtgctttacatgaaagcttgtgactcaytttgagttatttttgtatgaagcatgaggttttggctcaggttattttttttccactgtggttgtccagttgttccatcaccatttgatgggaaagctct

SEQ ID NO: 8768 - DNA, 201 bp, Homo sapiens
gggagtttggattgaattaatgaagaataaataaacagggaatgagtataagcaagcatcagcatctcccgccatcagttcagactgaggggagtttggamtgaattaacgaagaataaataaacggggaatgaggataagcaagcatcagcatctcccgccatcagttcagactgactggggaggtgggatagttattga

SEQ ID NO: 8769 - DNA, 201 bp, Homo sapiens
tgaactgacacctttaagtagatgataagggatggcaattggggcaccagaagagggtctggctctggctgggagcagaagggttaacccacaacagtccstcacatggtaaaacgcctgacatgtggtgcagctgcaaatgcatgagcagacagtggtggaatctgtgaagttgtcttctaatgtgttcagttttctcag

SEQ ID NO: 8770 - DNA, 201 bp, Homo sapiens
cagcatctcccaccatcagttcagactgaggggagtttggattgaattaatgaagaataaataaacagggaatgagtataagcaagcatcagcatctcccrccatcagttcagactgaggggagtttggactgaattaacgaagaataaataaacggggaatgaggataagcaagcatcagcatctcccgccatcagttca

SEQ ID NO: 8771 - DNA, 201 bp, Homo sapiens
ggaaagaggtttaattgactcacagttctgcatgactgaggcggctgccccaggaaacttacagtcatggcagaagtggaagcaaacccgtccttcttcaygtggtgacaggagagagaaatgcacaatgaagcagggaaaagccccttataaaaccatcagatctcatgagaattccctcagcatcaggagaacagcatg

SEQ ID NO: 8772 - DNA, 201 bp, Homo sapiens
aacaactcttgcctctcagtcccacacaaggcagctgtctcacactatagaaaaaaatattcatgaacaaattcatatctgtcacagtgaggggtcacacyttaaacagcccatcgcatgctcaatacatccaatgcaaagaaaccccatagcacagctgtgtccactgttccgcccaacacccaacacacatcaggccct

SEQ ID NO: 8773 - DNA, 201 bp, Homo sapiens
tgtggttttaatttgtattttcctactggataatgatgttgagcacctattcatctgcttattagcccagtatttatcctcttcagtgaaatgtctgttcrtgtcttgctcattgcctgttttgtatttggatttcatttttattgttgtttaaaatttcttcatatattctgaatacagtctttacagaatatgttgcct

SEQ ID NO: 8774 - DNA, 201 bp, Homo sapiens
cggggaatgaggataagcaagcatcagcatctcccaccatcagttcagactgaggggagtttggattgaattaatgaagaataaataaacagggaatgagkataagcaagcatcagcatctcccgccatcagttcagactgaggggagtttggactgaattaacgaagaataaataaacggggaatgaggataagcaagca

SEQ ID NO: 8775 - DNA, 201 bp, Homo sapiens
gactctggggaagaatccacttccaagctcattcaggttcttgcctgaattcacttccttgcagatagaaaagaggtttccacttccttgttaagagccayccttagctcctagagccttctctcagatactcacacacggtgcctaaggcacattcaatcctcctgcttggaacttctgacctcccctctccagcttctc

SEQ ID NO: 8776 - DNA, 201 bp, Homo sapiens
agggcaggaacaactcttgcctctcagtcccacacaaggcagctgtctcacactatagaaaaaaatattcatgaacaaattcatatctgtcacagtgaggrgtcacactttaaacagcccatcgcatgctcaatacatccaatgcaaagaaaccccatagcacagctgtgtccactgttccgcccaacacccaacacacat

SEQ ID NO: 8777 - DNA, 201 bp, Homo sapiens
tctcatcactgtggttttaatttgtattttcctactggataatgatgttgagcacctattcatctgcttattagcccagtatttatcctcttcagtgaaatgtctgttcatgtcttgctcattgcctgttttgtatttggatttcatttttattgttgtttaaaatttcttcatatattctgaatacagtctttacagaat

SEQ ID NO: 8778 - DNA, 201 bp, Homo sapiens
taatcttcaccttctgtagtgcacacgttttgccaaagaattcagcgtactttcctcctcttactcatccatcccaatctatgtgatattgccaatgaaahgaagagatttagtattctgtgagatgtctgatttgtccagatctcttaaggtgatatttatagaaggttgaggagttaaagtagccctgaggcaagctat

SEQ ID NO: 8779 - DNA, 201 bp, Homo sapiens
aataaataaacggggaatgaggataagcaagcatcagcatctcccaccatcagttcagactgaggggagtttggattgaattaatgaagaataaataaacrgggaatgagtataagcaagcatcagcatctcccgccatcagttcagactgaggggagtttggactgaattaacgaagaataaataaacggggaatgagga

SEQ ID NO: 8780 - DNA, 201 bp, Homo sapiens
taaagaaatacctgagactgggtaatttataaaggaaagaggtttaattgactcacagttctgcatgactgaggcggctgccccaggaaacttacagtcayggcagaagtggaagcaaacccgtccttcttcacgtggtgacaggagagagaaatgcacaatgaagcagggaaaagccccttataaaaccatcagatctca

SEQ ID NO: 8781 - DNA, 201 bp, Homo sapiens
ttcattacatgagtaatatcccttttgccacgcaatgcaacctgttcacaggttccaacgattaagactggacatctttggggaccattactcagcccacsacatctgcgtatgttgaagtcaccaagagtcaaggagacagcaatgctggagagggtgacagtgaaccaggagctacaagactcaggattgagaagaaca

SEQ ID NO: 8782 - DNA, 201 bp, Homo sapiens
gtcacaaagggaagggcaggaacaactcttgcctctcagtcccacacaaggcagctgtctcacactatagaaaaaaatattcatgaacaaattcatatctrtcacagtgaggggtcacactttaaacagcccatcgcatgctcaatacatccaatgcaaagaaaccccatagcacagctgtgtccactgttccgcccaaca

SEQ ID NO: 8783 - DNA, 201 bp, Homo sapiens
ctgctggggagattggattgaattaatgaagaataaataaacggggaatgaggataagcaagcatcagcatctcccaccatcagttcagactgaggggagwttggattgaattaatgaagaataaataaacagggaatgagtataagcaagcatcagcatctcccgccatcagttcagactgaggggagtttggactgaat

SEQ ID NO: 8784 - DNA, 201 bp, Homo sapiens
agtattagtccattctcacactgccataaagaaatacctgagactgggtaatttataaaggaaagaggtttaattgactcacagttctgcatgactgaggmggctgccccaggaaacttacagtcatggcagaagtggaagcaaacccgtccttcttcacgtggtgacaggagagagaaatgcacaatgaagcagggaaaa

SEQ ID NO: 8785 - DNA, 201 bp, Homo sapiens
aggcaccgtctcctcacaggctcacacatgcacggtgtgtgcacagagcttttgctctagttcaggaggtgtgtagggagcctcactagtccaacagagcytggtaccagtgtcatatgccaggaaccaaggttataagggatacaatgtccccagacctaccagagaaggcaaactcatacagcttgcaggaccagacaa

SEQ ID NO: 8786 - DNA, 201 bp, Homo sapiens
tttggttgttcagtgccacttcagacttgggtattttctctgggtgtaaacatgggattcaagctcaacccaggtggaccattttcacctcatgatggatrctgttgggcctgtctaatctatgactctgtgggtcacacaggcactcgaaccacatagttgcttggtgtcccgtggtcaagcattctatctaatcaggac

SEQ ID NO: 8787 - DNA, 201 bp, Homo sapiens
cttcaagtcacaaagggaagggcaggaacaactcttgcctctcagtcccacacaaggcagctgtctcacactatagaaaaaaatattcatgaacaaattcrtatctgtcacagtgaggggtcacactttaaacagcccatcgcatgctcaatacatccaatgcaaagaaaccccatagcacagctgtgtccactgttccgc

SEQ ID NO: 8788 - DNA, 201 bp, Homo sapiens
tgagcacgaatacatgggagcaccatgaatttatttacatgtctttacttcacagttgttttgaggaggctttcactgagaaacctaacagaaatgaatayatatgacttcctataaaatgaaatttaagtaaaattatactttttaaaatgttaagactggagcaagactggaacatcaccagacaaacagaaacatagg

SEQ ID NO: 8789 - DNA, 201 bp, Homo sapiens
ggattttcgtgaacataaagtattcccttgtttgaaataagtgcctaggagggcaattgctagtcataaggtaaattgcatgttcggtttgaagaaaactrcaatactcatttccagagtggctgtaccattttaaaatacatccctaccagcaatataagagtgtcccagttcctctgcgtccttgccagcatctgttgc

SEQ ID NO: 8790 - DNA, 201 bp, Homo sapiens
gcatgcccctaaccactggacccataacacttcactgcagtggccactcttgaagctctgtaaggttaatcttcaccttctgtagtgcacacgttttgccraagaattcagcgtactttcctcctcttactcatccatcccaatctatgtgatattgccaatgaaatgaagagatttagtattctgtgagatgtctgattt

SEQ ID NO: 8791 - DNA, 201 bp, Homo sapiens
tggcactattctataagttagaagtattagtccattctcacactgccataaagaaatacctgagactgggtaatttataaaggaaagaggtttaattgacycacagttctgcatgactgaggcggctgccccaggaaacttacagtcatggcagaagtggaagcaaacccgtccttcttcacgtggtgacaggagagagaa

SEQ ID NO: 8792 - DNA, 201 bp, Homo sapiens
gcaggagttgggttccgggacgcgggatccggcttctctgggaatcttggattccaggaaggatcctggagatctcccactttatgaagcccaatctccastcactgtgatggcgtctttagaccccactggaaaccagatacgacgccctcatcggccctggggaaaaaacaagagcaaagtatgagaggtggccatgag

SEQ ID NO: 8793 - DNA, 201 bp, Homo sapiens
ttgttttcacagtaataccaagatgccatctgcctgtttcattgtgttgacttttccattagtgctgcaaatgccaaggtcggtagcacacccagcacctmagcagaaccaggcagtggctccaaactgcagtcccatttaagagtgtctttgatggagcagtaaaaaatttatgtggattaaagtttgatccttgagtat

SEQ ID NO: 8794 - DNA, 201 bp, Homo sapiens
ccaatgttcaggggttgaccctgtgggaggacacctgccttcagagttagagcccacatgtgatgatgtagagctgaagggtgatatcagggaggtgatgragagtgctttggggtttcctgattatgaagagcagaggtcagtctgcttcctgggtgaagtgactgctggggagattggattgaattaatgaagaataaa

SEQ ID NO: 8795 - DNA, 201 bp, Homo sapiens
gtggaagccgcagttagttttatgttctacacccagagtcacaaactgttatgttggcactattctataagttagaagtattagtccattctcacactgcyataaagaaatacctgagactgggtaatttataaaggaaagaggtttaattgactcacagttctgcatgactgaggcggctgccccaggaaacttacagtc

SEQ ID NO: 8796 - DNA, 201 bp, Homo sapiens
ttggtatatgatattaacacatagaattgtatactgttactttggtttccagcaattgctgattaggtcatttggaccacttctcccattgagtacaactrgaaaaatgggaggaaaatacatatttgaaaagtctggttgaatttatagatgggctagcaaagcagtgaagatttgcttggccaggaaccaggaagaggc

SEQ ID NO: 8797 - DNA, 201 bp, Homo sapiens
gtcctggaggcaggcttgttttcacagtaataccaagatgccatctgcctgtttcattgtgttgacttttccattagtgctgcaaatgccaaggtcggtarcacacccagcacctcagcagaaccaggcagtggctccaaactgcagtcccatttaagagtgtctttgatggagcagtaaaaaatttatgtggattaaagt

SEQ ID NO: 8798 - DNA, 201 bp, Homo sapiens
cacatggctgttggaaaaggcctggttccttgttgtctgttcccagaaggcctcagttctcagtcatgtggaccttcctgcagggctgcttatggcacagyggctggcttcccccagagctcatgatcccagattcagagagagagagaaggtggaagccgcagttagttttatgttctacacccagagtcacaaactgtt

SEQ ID NO: 8799 - DNA, 201 bp, Homo sapiens
ataatatgccaatacctctttactgttacaatcctttttcctgtaaaagatatgtggtcaaagaaaagtgggcaatctgagttatcacaaaaacatttagwctttgtccctggtttctcctaaaaaccttagactctcttgagtgataagagtgtctttagagtactgatgagaagactcttggctgagtggatcctggat

SEQ ID NO: 8800 - DNA, 201 bp, Homo sapiens
attcatgaggcacaagtgcaattttgctacattgctatattggttgtggtaaagtcagggccttcagagcatccagcactggagacaagcacattgtaccmatcaagaaacccctctattatacaccaactgccaacccccttacccttctgggtctccatggtccatcatttcacactctccttttatgtatataaagag

SEQ ID NO: 8801 - DNA, 201 bp, Homo sapiens
catctatacaaaaaattagaaaattagccaggcatggtagttcatgatggtagtcgcagctactcaggaggctgaggtcagagagtcccttgaccccaggmgttcgacactgcagtgcatggtgatcatgccactgcattccagcctgggtgacagagcaagaccctgtctcaaaaataataatgatgatgatgacacatt

SEQ ID NO: 8802 - DNA, 201 bp, Homo sapiens
atgtttaagttactttggaatagctcagtcacaaaatcttaatctcttaatttgtgctgcctctctacacggacacacacacacaggcggacacacacacmggcacacacacacattcacacacatgctatacaaacatgtctacctgtatctataaagagacatgttatgttattttattttttatttcttaaattcata

SEQ ID NO: 8803 - DNA, 201 bp, Homo sapiens
aaatacatcctcttcagccatggaaattgtccttactttttaaaactaagttacatgtttaatatcttataattaatttaggccaggtgtggtggctcacrtctgtcatcctagcactgtggaaggcagaggaatggagatttgttgactccagaagttcaagatcagcctgggcaaaacctccatctatacaaaaaatta

SEQ ID NO: 8804 - DNA, 201 bp, Homo sapiens
actgctggggagattggattgaattaatgaagaataagtgagctgggattgaggatgagtaaagcaagcatcagcatctcccgccatcagttcagactgaytggggaggtgggatagttcctgaccttgttgtgtggttcctcctaacttcctggtcttggggacacagatgggtggtgctgttcttggtcagggcagcct

SEQ ID NO: 8805 - DNA, 201 bp, Homo sapiens
tgctctttgaatcatctgtgaatcatggacaaacacctccatgctagcaacattactgaaatgcagggaggaacaagtgattcaattgggaggaaaaaaarcaaagtgatgacatttactcctagacaaaactttttaggaaaatgtatcttaaaagtaggagaaaaacatataatacctgcaatcccctgcaaaagaagc

SEQ ID NO: 8806 - DNA, 201 bp, Homo sapiens
ggagtttcactcttgttgctcaggctggagtgtaggggcgggatctcagctcacttgatctcagctgcttggttcagctccatctagcatctttccccacrctgtcacccccagcaccaggggactgagagttgatgacctggtacaccaccgcctggatctgctgcagtgtcctttcctgtctagtccgcactcaaagct

SEQ ID NO: 8807 - DNA, 201 bp, Homo sapiens
gtgtttaattgggacacagttggaaagtgaagttcaagtaacgtgatcattgtgaatggtcataaaatacatcctcttcagccatggaaattgtccttacyttttaaaactaagttacatgtttaatatcttataattaatttaggccaggtgtggtggctcacgtctgtcatcctagcactgtggaaggcagaggaatgg

SEQ ID NO: 8808 - DNA, 201 bp, Homo sapiens
gctgtgtgacctcaggagaagctctctgctctttgaatcatctgtgaatcatggacaaacacctccatgctagcaacattactgaaatgcagggaggaacmagtgattcaattgggaggaaaaaaagcaaagtgatgacatttactcctagacaaaactttttaggaaaatgtatcttaaaagtaggagaaaaacatataa

SEQ ID NO: 8809 - DNA, 201 bp, Homo sapiens
tgctattccttggcattgtcactgaagatttttacaataatacccaaatcacagtttgacctgtatttttttaacttccccatacagagaactcacaccghatgtatattatgtgttggggagttatctctgatgtgggagggtgcttatccttttaatttttttttctttttgagatggagtttcactcttgttgctcag

SEQ ID NO: 8810 - DNA, 201 bp, Homo sapiens
tttgctattccttggcattgtcactgaagatttttacaataatacccaaatcacagtttgacctgtatttttttaacttccccatacagagaactcacachgcatgtatattatgtgttggggagttatctctgatgtgggagggtgcttatccttttaatttttttttctttttgagatggagtttcactcttgttgctc

SEQ ID NO: 8811 - DNA, 201 bp, Homo sapiens
ttcattcgtatctctgcaaaggacttgatctcattcctttttatggttgcataatattccgtggtgtatatgtaccatattttctttatccagttcctcayttgtgggcatttgggttgattccatgtctttgctattgtgaatagtgctgcaatgaacatacacatgcatatacctttataatagaatgatttatattcc

SEQ ID NO: 8812 - DNA, 201 bp, Homo sapiens
gctttcaatttttggggggtatacacccaaaagtggaattgttgcttcatatggaaattctatgtttaccttcttgagaaagcgtcatcctgtttccatgrtggctgcactgttgttcactctcagcagcagtgcacaagcattccattttctccacatcctcaccaacacctggactagtgaagctgagcatattttcat

SEQ ID NO: 8813 - DNA, 201 bp, Homo sapiens
gtagttgtattatcacaggtgagctttatgagtgagtgtcctggtgacggctcctccaggggagccaaggaccaactttcctggcacgttgaggtcccctygccctgtcacactctcctgcattaccccattctactctgtcttcatattttatactatagatatttagcttttaaatagacatttctggtctgtgtttta

SEQ ID NO: 8814 - DNA, 201 bp, Homo sapiens
caccccgtctgggaggtaaggagcgtctctccccggccgccccgtctgagaggtgaggagcccctccgcccagcagccaccccgtctgggaagtgaggagygtctctgcccggcagccgccccgtccaggagggaggtggggggcagcccccgcccggccagccacctcgtccaggaggtggggggcgcctctgcccggcc

SEQ ID NO: 8815 - DNA, 201 bp, Homo sapiens
gccttttatcattgttaaacaaagttgtcattaggcataaacttgcatgttaactgaagcttttgtttttattttattcgaagttacaattgcacataatkgaaagagtaaatatttgcgcaggacttcctgagaaaaacgagtcttctctgcctttctagggagagtcctctcttctctgtttctgcctttctagggagc

SEQ ID NO: 8816 - DNA, 201 bp, Homo sapiens
tttatagacatattctttcaagtttgtattcagggttgatgtcacatacacatttatacatgctgttttatgtttaagtgtttttatattttggttagccytttatcattgttaaacaaagttgtcattaggcataaacttgcatgttaactgaagcttttgtttttattttattcgaagttacaattgcacataattgaa

SEQ ID NO: 8817 - DNA, 201 bp, Homo sapiens
ccatgttggtgcacgtatcagtagttctttcattttcattgctgataatattccattgtatgactgaatcatgatttttgtacattggcagttatttcttrttttttactattataaataaagaaactatgaacatttttatgcagggattatcgacaaaatcttcatttctcttgagtatatacctaggagtggaaatgg

SEQ ID NO: 8818 - DNA, 201 bp, Homo sapiens; identical to SEQ ID NO: 1060
  misc_feature (1)...(201): n = A,T,C or G, or insertion/deletion polymorphism (see Tables 1-2)

SEQ ID NO: 8819 - DNA, 201 bp, Homo sapiens
catctggggccaatgttcaggggttgaccctgtgggaggacacctgccttcagagttagagcccacatgtgatgatgtagagctgaagggtgatatcaggraggtgatggagagtgctttggggtttcctgattatgaagagcagaggtcagtctgcttcctgggtgaagtgactgctggggagattggattgaattaatg

SEQ ID NO: 8820 - DNA, 201 bp, Homo sapiens
aatacctatgtgatcaacccatgttggtgcacgtatcagtagttctttcattttcattgctgataatattccattgtatgactgaatcatgatttttgtamattggcagttatttcttgttttttactattataaataaagaaactatgaacatttttatgcagggattatcgacaaaatcttcatttctcttgagtatat

SEQ ID NO: 8821 - DNA, 201 bp, Homo sapiens; identical to SEQ ID NO: 1061

SEQ ID NO: 8822 - DNA, 201 bp, Homo sapiens
ggctttttgcgcttgttgtaatacctatgtgatcaacccatgttggtgcacgtatcagtagttctttcattttcattgctgataatattccattgtatgaytgaatcatgatttttgtacattggcagttatttcttgttttttactattataaataaagaaactatgaacatttttatgcagggattatcgacaaaatct

SEQ ID NO: 8823 - DNA, 201 bp, Homo sapiens
gtgtgctgctctccagcctcctgcagctcatgggggcaggctcagcataggcagaggtggaacccaccagctgtgtagttttgccaggtgagtgtgacaaytcaagggagagggaagggagggatggaaattatttaccatagaattcaaaatgggtgaggagggaggacaggacacccagggtgagggacagtgagtaga

SEQ ID NO: 8824 - DNA, 201 bp, Homo sapiens; identical to SEQ ID NO: 1063

SEQ ID NO: 8825 - DNA, 201 bp, Homo sapiens
aaagggctgggaagagatggggagacatctggggccaatgttcaggggttgaccctgtgggaggacacctgccttcagagttagagcccacatgtgatgaygtagagctgaagggtgatatcagggaggtgatggagagtgctttggggtttcctgattatgaagagcagaggtcagtctgcttcctgggtgaagtgactg

SEQ ID NO: 8826 - DNA, 201 bp, Homo sapiens
aatttctcaaaattcctgctttaaatgctgatgtccaataaagatgttcgtagtttcagctgggtcttaaaaggatttccaccaatactaatgttgtaacstatatcaaatgaaacaggaactcaaatgtggagctccctctccaggacggtccatgtgggagacagtggctgtggcagtggcaatccccaagtgcaaagg

SEQ ID NO: 8827 - DNA, 201 bp, Homo sapiens; identical to SEQ ID NO: 1064

SEQ ID NO: 8828 - DNA, 201 bp, Homo sapiens
tggaaggttctcatgtgttccatttattttgtctctcaaattttaggaatcttctcctttaattaactcatcaacctctcatggcaagaatttgagaaagkaaatttatactcaggttctaattttaatagggaaggaagaagttacagctcagtgcaccatgaagttgagacagagatggagacacctcagccccacctc

SEQ ID NO: 8829 - DNA, 201 bp, Homo sapiens
ggagaccaccagggcagtgcacagctgagatctcagtctctggtgtcagctcctgggttcgctggctccactgagggcaactagactctgcagccaggcgrtctggattcaactccttgcctaggcctcaccagcatgttctctctttgtgcctcattttcctcatctatgacatggggaaactacgagcatttatttctt

SEQ ID NO: 8830 - DNA, 201 bp, Homo sapiens
agatagagtgtgaggttcaggagagaaggagaggtctgtcttgatgctttgacacagcaccaagaaatttcccctcctcccccacatcgccccgccagttstcagtgagggacagattcacagcagtactgaaagggctgggaagagatggggagacatctggggccaatgttcaggggttgaccctgtgggaggacacct

SEQ ID NO: 8831 - DNA, 201 bp, Homo sapiens
aggagctgcttgttgaggccatcatagaatcagcctagcaagggttggatcttccttttgtgtttaattgggacacagttggaaagtgaagttcaagtaamgtgatcattgtgaatggtcataaaatacatcctcttcagccatggaaattgtccttactttttaaaactaagttacatgtttaatatcttataattaatt

SEQ ID NO: 8832 - DNA, 201 bp, Homo sapiens
cctgggtcctttcactcactgcacaatggatggtggacacagggcaggtgctgatgttgatggagtcacgggaggggactggcaggggctggaaaagtgcsatgggagggagaaaaaagtggggacgtcatcttccgtcagagaaagggtaaatctgatttgggagtgactgaggagggagaactcctcagggaataaaaa

SEQ ID NO: 8833 - DNA, 201 bp, Homo sapiens
gccggaacagaaactgggcacagccccatctactctcctcccctgcaacaaatcagcataagcaacacgtggactctggaaggttctcatgtgttccattwattttgtctctcaaattttaggaatcttctcctttaattaactcatcaacctctcatggcaagaatttgagaaagtaaatttatactcaggttctaattt

SEQ ID NO: 8834 - DNA, 201 bp, Homo sapiens
tcactgtgtcagggctggtcaggcttgagaggaggaggaaagggcactgagtttcctcttgggtcttgttccttagtcctgggtcctttcactcactgcamaatggatggtggacacagggcaggtgctgatgttgatggagtcacgggaggggactggcaggggctggaaaagtgccatgggagggagaaaaaagtgggg

SEQ ID NO: 8835 - DNA, 201 bp, Homo sapiens
ccatggtggccggaacagaaactgggcacagccccatctactctcctcccctgcaacaaatcagcataagcaacacgtggactctggaaggttctcatgtsttccatttattttgtctctcaaattttaggaatcttctcctttaattaactcatcaacctctcatggcaagaatttgagaaagtaaatttatactcaggt

SEQ ID NO: 8836 - DNA, 201 bp, Homo sapiens
ggacatggagacagggccagggcctctctttggggaggcctctcactgtgtcagggctggtcaggcttgagaggaggaggaaagggcactgagtttcctcbtgggtcttgttccttagtcctgggtcctttcactcactgcacaatggatggtggacacagggcaggtgctgatgttgatggagtcacgggaggggactgg

SEQ ID NO: 8837 - DNA, 201 bp, Homo sapiens
gagccccagggcttcctgataggatctctagttaggagctgtctgctcagagctgggaggggaggaacagtgagctgctggtggagggcagaacccacagygtgcagggcctgccctggtatgcaggtgcctctgcaggtgaagagggcctggggtctcaggaagagaaggactgtgtgtgacttggcccagacctggaag

SEQ ID NO: 8838 - DNA, 201 bp, Homo sapiens
agcaagggggtccccagcatcaggtcaggtgcagactccatggcagccacatatttccatgcagggcctgtgagccccagggcttcctgataggatctctwgttaggagctgtctgctcagagctgggaggggaggaacagtgagctgctggtggagggcagaacccacagtgtgcagggcctgccctggtatgcaggtgc

SEQ ID NO: 8839 - DNA, 201 bp, Homo sapiens
ctccttgagcaagggggtccccagcatcaggtcaggtgcagactccatggcagccacatatttccatgcagggcctgtgagccccagggcttcctgatagkatctctagttaggagctgtctgctcagagctgggaggggaggaacagtgagctgctggtggagggcagaacccacagtgtgcagggcctgccctggtatg

SEQ ID NO: 8840 - DNA, 201 bp, Homo sapiens
gcctccttgagcaagggggtccccagcatcaggtcaggtgcagactccatggcagccacatatttccatgcagggcctgtgagccccagggcttcctgatrggatctctagttaggagctgtctgctcagagctgggaggggaggaacagtgagctgctggtggagggcagaacccacagtgtgcagggcctgccctggta

SEQ ID NO: 8841 - DNA, 201 bp, Homo sapiens
ggaatccaaggagaggtggtgcctctagtcccttcctctctgcatccccctcccctgtttctccagccatcaggaggacatcaagaaaaagacccacgagrcccagaatgagggcccccatgtgtacagcccctttgaggtccccttgtaacagggagagtcctgagtgcacatggccatcctctgtccactttgcagctc

SEQ ID NO: 8842 - DNA, 201 bp, Homo sapiens
caggcctgggctgacccatggtgaaggctggctaactgccatttgtctgtttggttgttcagtgccacatcacacttgggtgttttctgtgggtgtcaacrtgggattcaagctcaacccaggtggaccattttcacctgttgatgaatgctgttgggcctgtgcaatttatgactttgtgggtcacacagccacttggaa

SEQ ID NO: 8843 - DNA, 201 bp, Homo sapiens
agggagagaaagaaggaggaattgaggaaggagtgaaagaagaaaagaaggaaggggaaggggaagaaaaaggacggaaaggaggaagggagaaggagggbgagagattgaatggaattaaagagggaaggagggacagaaggaaagagaaaaagaaggaacaaaggagaaaagaaactaaaataaagaaaagaataggcg

SEQ ID NO: 8844 - DNA, 201 bp, Homo sapiens
aaagaaggaggaattgaggaaggagtgaaagaagaaaagaaggaaggggaaggggaagaaaaaggacggaaaggaggaagggagaaggagggcgagagatwgaatggaattaaagagggaaggagggacagaaggaaagagaaaaagaaggaacaaaggagaaaagaaactaaaataaagaaaagaataggcgttgggaac

SEQ ID NO: 8845 - DNA, 201 bp, Homo sapiens
ggaattgaggaaggagtgaaagaagaaaagaaggaaggggaaggggaagaaaaaggacggaaaggaggaagggagaaggagggcgagagattgaatggaaktaaagagggaaggagggacagaaggaaagagaaaaagaaggaacaaaggagaaaagaaactaaaataaagaaaagaataggcgttgggaactggaaaccc

SEQ ID NO: 8846 - DNA, 201 bp, Homo sapiens
ttactgctgaaggcttacatatggttataccacaatttcactagtttcctattgatgtatatgtggctgattccagtttttgccataaatattagtgtgcrtgtctcctgtgcacataggcaagaaagccccccagagtggatgattaggaatgggttggttggatgatacgttgtatggactttaaccatactagataat

SEQ ID NO: 8847 - DNA, 201 bp, Homo sapiens
atatcaggggtcatggtggacatgagggtgggctggtctctccacttctcacatgttaccagggacatagacacattcagatgccttggcagaaagagaaracagaggcccttgaagtctcaaagtggagccatgaacaaatcttgcatctcagtccctcacaaggcagtcttggaaagaaaatagtcgtgaacaaattca

SEQ ID NO: 8848 - DNA, 201 bp, Homo sapiens
ctttgcaattagaaaaatgtgagtctcacatctttgtctgtacaactggcttagcatcatgacaatgatttggtttgatgtggtaggtggaaatggttaamttcaatctaggaacaagatttttcagtaactggctattcagtgggcatcctgtgatcagtttaacatctttcactgtggtttttaattagatgtggtaga

SEQ ID NO: 8849 - DNA, 201 bp, Homo sapiens
caccttttactaacctttcccaaaactccatgaaggttgagcccctttggctgctactctgggttctcacagtaaccgtgccctctatcttttgcaggtcrctgcaaaggagggttcctaaagcattcactcctgatcctgagggaggtgggtgcactcactccaggtctcaggtccgccacagaaaagcaaaaactcctc

SEQ ID NO: 8850 - DNA, 201 bp, Homo sapiens
tcagatctcatgagaattccctcagtatcacgagaacagcatgggggcaccgcccccattatccaatcacctcccatgtggtccctcccccaataggtagsgattacaattcgcataacaattcaagatgagatttgggtgggaacacagaaccaggccatatcagaagtgcctcattaagtccaagccacactcaggaga

SEQ ID NO: 8851 - DNA, 201 bp, Homo sapiens
tttgttaaggtagcctcagggcaaatgctgttttgtggcagctaaagaacaacatcatctcatgtggacatcgatgccgccagtgcttttctcaccaggastgcttgtgtgtcctccctccctccctacctcctcccacaccaaccctcctgcacactgcagcacacaaccatatttttctcttcaggaaagataacccta

SEQ ID NO: 8852 - DNA, 201 bp, Homo sapiens
actacaatccaggaaagagccctgggaggagggcaagagctggacaggtctgaaaattagtctcttgataccacaatgagatttgtatgcagggaccaccstaggtgacatccaagtccctgtgatcacaggtggtggtgggacaaggttctactgaagggccaaggagaatgaaggagcaaagatgacccagctgagcag

SEQ ID NO: 8853 - DNA, 201 bp, Homo sapiens
ggtctcactatgtttcccaggctagtcttgaactcccaggctcaaacaattctcctgtctcatcatcccaaagtgccaggattacaggtatgtgccactgbgcctggctcttccagttttgtgtactcttcaatttccttcatcagtgccttatagtttttgttttacttcctggggtaaattgattcttagttattttat

SEQ ID NO: 8854 - DNA, 201 bp, Homo sapiens
agagccctgggaggagggcaagagctggacaggtctgaaaattagtctcttgataccacaatgagatttgtatgcagggaccaccgtaggtgacatccaastccctgtgatcacaggtggtggtgggacaaggttctactgaagggccaaggagaatgaaggagcaaagatgacccagctgagcagtgaccacataaagtc

SEQ ID NO: 8855 - DNA, 201 bp, Homo sapiens
tccatactggcctgagcacccactaggcacagccccatctattctcctcccctgcaacaaatcagcacaagaaacacatggactctggaaggttctcatgkgttccatttattttgtctctcaaattttaggaatcttctcctttaattaagtcatcaacctctcatggcaagaatttgaaaaagtaaatgtttactcaga

SEQ ID NO: 8856 - DNA, 201 bp, Homo sapiens
ctaccaggcctgggctgacccatggtgaaggctggctaactgccatttgtctgtttggttgttcagtgccacatcacacttgggtgttttctgtgggtgtmaacatgggattcaagctcaacccaggtggaccattttcacctgttgatgaatgctgttgggcctgtgcaatttatgactttgtgggtcacacagccactt

SEQ ID NO: 8857 - DNA, 201 bp, Homo sapiens
caaaacatcaaattcaaagaaccccatagcacagctgtgtccactgttcccccccaacaccccccacacatcaggccccccaaggtctcacctttcacgcygtgagagacacatcagagccctgggcactgttgccgcctggagtagaataaaaacaggacctggtcagatcccacagtagatgtggctagaggaagaatt

SEQ ID NO: 8858 - DNA, 201 bp, Homo sapiens
ccctcggcatgggccctgtccctctcccttcacttttcatccaggaatctccgtccctgaactggactccctgtccacctggactcttctagaagaaaaghcacccacggagtttggtgacagagagtgagcttgctctgggaatggaggtgtagaaactgttttttgttttcctttttttttttttttttattgggaaaa

SEQ ID NO: 8859 - DNA, 201 bp, Homo sapiens
ttggatagcagaaccttggtaacccctgaatgatcaggaatctaatcggtaaaaaatgtgactttggccccatgatgtataaatgtgcccaaaagcgttasaacaggactcacaaagcttctaagtttcacttttgcagtgtacctgtgactcccgcttgtcatattttaaatttgccatcattccatagctctgagtttc

SEQ ID NO: 8860 - DNA, 201 bp, Homo sapiens
gatagggattgaattgaatctgtaaattgctttgggtagtatgaacattttaacaatattctcccaatttatgtgcatgaaatttatgtgtctcatttttwaaattaatatttaacaatattaattctcccaatttatgtgttttattttttttcttagagacaaggtctcactatgtttcccaggctagtcttgaactcc

SEQ ID NO: 8861 - DNA, 201 bp, Homo sapiens
cccatggtggccggaacagaaactgggcacagccccatctactctcctcccctgcaacaaatcagcataagcaacacgtggactctggaaggttctcatgygttccatttattttgtctctcaaattttaggaatcttctcctttaattaactcatcaacctctcatggcaagaatttgagaaagtaaatttatactcagg

SEQ ID NO: 8862 - DNA, 201 bp, Homo sapiens
gaaggacagattcagagcaacacagacaggtctggaaagggatggggggacatctgaagcaaatgttcagggcctgaagctgtgagagtacacctgccctrcagagttggagccctcatgtgatgatgcagagctgaagtgttatattctggaggggataaaaagtgctctggggtttcctgattatgaagggtaggggtc

SEQ ID NO: 8863 - DNA, 201 bp, Homo sapiens
ccagtggctctaccatttagtagtcctggcaggggtcctgttgctgcagctccgctaagaattttcctgggtattaaatttccccatttaaatatcagttycagtttcgggtcatttctttgctcacacatatgcacataggctattacaggcagccagaccaaatcctgaattctatgctactgagaaatttcttccatc

SEQ ID NO: 8864 - DNA, 201 bp, Homo sapiens
tgccaatgtttgttaaggatgttttcatttatgtttattggtgacactggtgtatggcactcttttcctgtgagtcttgctgtgactttgatatgagggtratgccagttctgtaaatgggctggaaagtcttccctcctctcttcttgtctgaaagagctttcaaaatatttgatagaattcaccagtgaagatatctgg

SEQ ID NO: 8865 - DNA, 201 bp, Homo sapiens
cagcagcacctatattagagttggttgaataatggggggaaggtgaatgaccaggagcttgttgttgaggccatcatagaatcagcctagcaagggctggrtcttctttttgtgttcacttgggacacagttgcaaattgaagttcaagtaaagtaatcattgtgaacggtaataaaatacatccttttcagccacgaaaa

SEQ ID NO: 8866 - DNA, 201 bp, Homo sapiens
actatctcagagggagcaaatagtaaaggcagatgtgatctagggagggctagaaactggagaggaatccaaggagaggtggtgcctctagtcccttcctytctgcatccccctcccctgtttctccagccatcaggaggacatcaagaaaaagacccacgaggcccagaatgagggcccccatgtgtacagcccctttga

SEQ ID NO: 8867 - DNA, 201 bp, Homo sapiens
caggaacatcctgagagagggtgtggaggttttgttgatcattgactgagattccagggggtgcactgggaagatttctgtggttcgggaggttggggagmcagaatagtggtgtgcagagccttgtggggatgtgagtgcagagtatgtgggggacccagtgtcactgacacaaacagggaaaggacatgatgagctgag

SEQ ID NO: 8868 - DNA, 201 bp, Homo sapiens
gctttgtccccatcccggtctctgtctctcaggcttaccaggttgcatccaggtgggtgagttgggaattgcgtgctgattgctgagggcctggatgatcrctatctcagagggagcaaatagtaaaggcagatgtgatctagggagggctagaaactggagaggaatccaaggagaggtggtgcctctagtcccttcctc

SEQ ID NO: 8869 - DNA, 201 bp, Homo sapiens
catccatcctcatgagccaatcacgtcccaccaagcaccacctccaacattagggattacaagtgagcatgagatttgggtggggacacagatccaaacartatcaggggtcatggtggacatgagggtgggctggtctctccacttctcacatgttaccagggacatagacacattcagatgccttggcagaaagagaaa

SEQ ID NO: 8870 - DNA, 201 bp, Homo sapiens
ctgtggcctcctcctgctgcaggtgaggagtgggcagcagggagggccgtggtgcctgctttgtccccatcccggtctctgtctctcaggcttaccaggtygcatccaggtgggtgagttgggaattgcgtgctgattgctgagggcctggatgatcactatctcagagggagcaaatagtaaaggcagatgtgatctagg

SEQ ID NO: 8871 - DNA, 201 bp, Homo sapiens
aatgtgatggtcaagccctgtgccacctggaaggggatagagggtaggataggactagaagacccaaagagggaagactctcagagggaaggatgaggatrtaaagtgtgaaaagatacagaaagtaaggaggtgggagagtgggtgtccctctgggtgtggggcttaactgctgcaggtaggtctcagaatcctcatgca

SEQ ID NO: 8872 - DNA, 201 bp, Homo sapiens
aatgcattgtgattgtctcaggactctttaaacatttgacttatgtccctaatggctgcacttagttgataagaaagggtacaattatctatgttgcaagytagcctaaactacattttttggtgaggtggggaaggggtcgttgagggggccccaaccgataggtgcctggccagtgcatgaaagggaaagcaagaagta

SEQ ID NO: 8873 - DNA, 201 bp, Homo sapiens
ttattccctagtgcgcaactccctcccccagttgctcattagctgagtaccaaggacttacgatcttcccggatgtcacctattggtagtttaagacttcwagtatgttccttagggttttttttttttttgctgcattttgttgcagcccataatgcattgtgattgtctcaggactctttaaacatttgacttatgtcc

SEQ ID NO: 8874 - DNA, 201 bp, Homo sapiens
gagaacagcaaaagtgagagtgttagtgacggttttgcaatattgggtgtctggaatgcaggcacaccagggagagtttcaacaatttattccctagtgckcaactccctcccccagttgctcattagctgagtaccaaggacttacgatcttcccggatgtcacctattggtagtttaagacttcaagtatgttccttag

SEQ ID NO: 8875 - DNA, 201 bp, Homo sapiens
gagatccccatataggcaactagattatgagaaacaaacgcacccatccaaacccaaagaatggactctgagacccagagaacagcaaaagtgagagtgtyagtgacggttttgcaatattgggtgtctggaatgcaggcacaccagggagagtttcaacaatttattccctagtgcgcaactccctcccccagttgctca

SEQ ID NO: 8876 - DNA, 201 bp, Homo sapiens
tttattaatctgctctaccagtgatatccagacaacataaaagctgcaattataactcctacttggccatacctagagtaatctcattcattctttaggcmtcatcaggctccctcagggacagtttgctggattacgtagagacgatagacagccccaacaccaccccacatccttcagctctctcatggtgatgtgacc

SEQ ID NO: 8877 - DNA, 201 bp, Homo sapiens
gttcacccataaaacttcacttcagtggccactcttgaagctctgtaaggtttaccttcaccttctggagtgtgcttgttttgccaaggactccagtgcastttctacctgctgctcatccaccccagtaaacatgaaattgtcaatgaaatgagctgatttaatatcctataggatatccagtatgtctagtgtagtctt

SEQ ID NO: 8878 - DNA, 201 bp, Homo sapiens
ggttcagctccatcctgcatctttccccaccactggcaccaccagccccaaggggtctgagggatgctggctgcttgtaccatggcctggatctgctgcarggtcctttcctgtgtgggccccacatgaaggtggcctcctcctatgtcacctagagtgtgggccaaagcaacacacctaaatgtggaatgtggtgtcatc

SEQ ID NO: 8879 - DNA, 201 bp, Homo sapiens
cccaataggccccagtgtgtgttgttcctctccctgtgtccatgtgttctcattactcagttcccaattataaatgagaacatgtggtgtttggttttccrttcctgtgtgagtttgctgaggataatggcttccagcttcatccatatccctgcaaaggacttgatctcattcctttttatggctgcataatattccatg

SEQ ID NO: 8880 - DNA, 201 bp, Homo sapiens
ccccaaagcccccagagtggatgattaggaatgggttggttgcatgatacattgtatggactttaaccatactagataatgataatatgatttccaaagtrattgtggctacttaaacttttacaataaatgtgtaatacttgatgttgatgatgtgttctgaaaacactgagttgaaggaattgtgttaaaagtcaccgt

SEQ ID NO: 8881 - DNA, 201 bp, Homo sapiens
ttttcacctcatgatggatgctgttgggcctgtctaatctatgactctgtgggtcacacaggcactcgaaccacatagttgcttggtgtcccgtggtcaarcattctatctaatcaggacaagggacactaaaagttgcttctaataggtggcatatgtctctgctgtgaatgacatgaccttactccagaatcccaggcc

SEQ ID NO: 8882 - DNA, 201 bp, Homo sapiens
ctgtcaccgtgttcaggggaaggaccgagcctcactcccacgcagagaggaggctctggttgtaactgctccagtggagagatgaggacctcctccctctrcactgatggccaaagcctgcagactgggccaggcttcccctcagctatgtcctgtcaggttcatccaggactcaagaaataaactgtggacattgtctcc

SEQ ID NO: 8883 - DNA, 201 bp, Homo sapiens
cctgccctccttgtgtgatagcagccctgcctcctcctcttctcacctgcttgtatctggacacatactattcaaacatccctgggggcagccataatgtrtatttccatggactctcatttaaatgtctccttgccagggtgccccctttgggaaaccaggacctcctcccctacagagcccagatattggagatgagaa

SEQ ID NO: 8884 - DNA, 201 bp, Homo sapiens
acagagccttgggtgctgcagggaaaacagtttgagacagagaaaggagaaacaacagtatctctgcgtttctcttgtaaatacctttaataacaatgttyttcaataagttaacacagttgagaacatagagtaactagatcaaatagttccaagacttcagtgccataagaatgatgccttgaaaataagtctttgttt

SEQ ID NO: 8885 - DNA, 201 bp, Homo sapiens
gccgcagtgagttttaggttctacacccagagttacaaaccattatgtcagcattattctataagttagaagttatattagtccattctcacactgctatraagaaatacctgagactgggtaatttataaaggaaagaggtttaattgactcacagttctgcatggctgaggagcctgccccaggaaacttacagtcatg

SEQ ID NO: 8886 - DNA, 201 bp, Homo sapiens
cgaactcctgatctcgtgatccacaggcctcgacttcccaaagtgctaggatcacagaagtgagccaccgtgcccggccagctgcggctttgttttactaygagtagttatcgcaaaggatgcttgtgatgaactttggcattttcttttctctttcatttccaaataatcaatcaggaatggcacacaaggtgcattttg

SEQ ID NO: 8887 - DNA, 201 bp, Homo sapiens
ataaaaccatcagatctcatgagaattccctcagtatcacgagaacagcatgggggcaccgcccccattatccaatcacctcccatgtggtccctcccccwataggtagcgattacaattcgcataacaattcaagatgagatttgggtgggaacacagaaccaggccatatcagaagtgcctcattaagtccaagccaca

SEQ ID NO: 8888 - DNA, 201 bp, Homo sapiens
agggaaaccagaaggcccccaggtggatctctggtttccacacacacttccgccctcattgtgtgaaagtagccatgccttctcctgaagatgaggatctrttacctgggcctggagaggaggagaatcctcttttcaccaggtggtctctgggcacaaactatcaaaacttctctcgtgacaaccataatgtgtagttca

SEQ ID NO: 8889 - DNA, 201 bp, Homo sapiens
gacagccctgcatgcccctaaccactggacccataacacttcactgcagtggccactcttgaagctctgtaaggttaatcttcaccttctgtagtgcacaygttttgccaaagaattcagcgtactttcctcctcttactcatccatcccaatctatgtgatattgccaatgaaatgaagagatttagtattctgtgagat

SEQ ID NO: 8890 - DNA, 201 bp, Homo sapiens
caagcagtgatatccagccagcatggcagctgcaatcaggactcctacttggtcaagtctggagtaattccattcattctttatcaggcttcttcagggayagactgctgaattatatggagataataggcaatcccaacaccaccccccatccttcagctctctaatggcagtgccacccctacaatacctgcagtaccc

SEQ ID NO: 8891 - DNA, 201 bp, Homo sapiens
acctgagctcttcttcctccacattacagcagcgaccacagctccagtgaccacagctacaagtagaaccaggccagcaacgatgcccacgatggggatgktgggctgggaagatggctctgggaaaaggggggaaggtgagggaccctgaccctgctaaagctctccagagaggctccggctttccctaagggacatgac

SEQ ID NO: 8892 - DNA, 201 bp, Homo sapiens
agagagaagtgcagaatgaagcagggaaaagccccttataaaaccatcagatctcatgagaattccctcagtatcacgagaacagcatgggggcaccgccyccattatccaatcacctcccatgtggtccctcccccaataggtagcgattacaattcgcataacaattcaagatgagatttgggtgggaacacagaacca

SEQ ID NO: 8893 - DNA, 201 bp, Homo sapiens
agagtatgtgggggacccagtgtgactgacacaaacagggacagagcatgatgagctcagtccaggtgcactccaggccgacgatggtgctgagcctgtgrgagatgcgggaggaggagcaggggtggctttcacctgggctctgtccatggaggtgaggacagtgaggtggttgggtcttagtgctgtggggaacttttc

SEQ ID NO: 8894 - DNA, 201 bp, Homo sapiens
aaggggaaaatgtggcatggtgagaataaggcatgaaaaggaaaaagtgaggcaggagcacacggcacacatgcagatgctggtgtactgtgtgggttcasaggacagacttgggagtgggggaagagatgtaatatgatgaaagaaaacagataccccacataacggtcagaaaaacatcccaacacggcatcaaagacc

SEQ ID NO: 8895 - DNA, 201 bp, Homo sapiens
ttctatcaaatcaggacaagtaacactaaatgttgcttctaacagggggcatatgtctctgctgtggatgacatgatcttactccagaatcccaggccctycattgtgactctcccactggtgcttggttcagctccatcctgcatctttccccaccactggcaccaccagccccaaggggtctgagggatgctggctgct

SEQ ID NO: 8896 - DNA, 201 bp, Homo sapiens
cctgcagtctcctcctgaagcgtggtcacatgccagaatgggctagtcccctactgtgtctgttcaactaaggggaaaatgtggcatggtgagaataaggmatgaaaaggaaaaagtgaggcaggagcacacggcacacatgcagatgctggtgtactgtgtgggttcagaggacagacttgggagtgggggaagagatgt

SEQ ID NO: 8897 - DNA, 201 bp, Homo sapiens
tggaccattttcacctgttgatgaatgctgttgggcctgtgcaatttatgactttgtgggtcacacagccacttggaaccacattgttgtttggtgtctcwtggtcaagcattctatcaaatcaggacaagtaacactaaatgttgcttctaacagggggcatatgtctctgctgtggatgacatgatcttactccagaat

SEQ ID NO: 8898 - DNA, 201 bp, Homo sapiens
ctccttcacccccaacctgcagtctcctcctgaagcgtggtcacatgccagaatgggctagtcccctactgtgtctgttcaactaaggggaaaatgtggcmtggtgagaataaggcatgaaaaggaaaaagtgaggcaggagcacacggcacacatgcagatgctggtgtactgtgtgggttcagaggacagacttgggag

SEQ ID NO: 8899 - DNA, 201 bp, Homo sapiens
ggtggaccattttcacctgttgatgaatgctgttgggcctgtgcaatttatgactttgtgggtcacacagccacttggaaccacattgttgtttggtgtcycttggtcaagcattctatcaaatcaggacaagtaacactaaatgttgcttctaacagggggcatatgtctctgctgtggatgacatgatcttactccaga

SEQ ID NO: 8900 - DNA, 201 bp, Homo sapiens
tggcaggggtcctgttgctgcagctccgctaagaattttcctgggtattaaatttccccatttaaatatcagttccagtttcgggtcatttctttgctcamacatatgcacataggctattacaggcagccagaccaaatcctgaattctatgctactgagaaatttcttccatcagatacccttaatcatcactctcaag

SEQ ID NO: 8901 - DNA, 201 bp, Homo sapiens
cccacacataatgcagatgcacttgtgtttcatttttagttatgttaaaaattctgacaatcaggaatgggggttcaggagtggtgctgaggcagaggacrgaagccagggggtgggggaagaggatgtcaggggtggggtcagtagagtctccttcacccccaacctgcagtctcctcctgaagcgtggtcacatgccag

SEQ ID NO: 8902 - DNA, 201 bp, Homo sapiens
tagggcacatcatgggctccaaatgctgacgagttgacattcaggagtggcagtagctggatctaccttggtagggctgggagagtcagtgctgctggccycatacatagcctcatgcctgccactgtggttgctccattcatgcacccatcctaccaggcctgggctgacccatggtgaaggctggctaactgccatttg

SEQ ID NO: 8903 - DNA, 201 bp, Homo sapiens
ggagagagcacccacacataatgcagatgcacttgtgtttcatttttagttatgttaaaaattctgacaatcaggaatgggggttcaggagtggtgctgargcagaggacagaagccagggggtgggggaagaggatgtcaggggtggggtcagtagagtctccttcacccccaacctgcagtctcctcctgaagcgtggt

SEQ ID NO: 8904 - DNA, 201 bp, Homo sapiens
tgcgtgtcgtccacgtagcccacggcgatgaagcggggctccccgcggccgggccgggacacggatgtggtgaaatacctcatggagtgggagcctggggrcgaggagtggctgagacccacccgaccctcctcccggcgcggctacccgggtcctgcgtccccgccgggcgggccccttgcttctccccgcagaggcggt

SEQ ID NO: 8905 - DNA, 201 bp, Homo sapiens
atagtgccccactagggcacatcatgggctccaaatgctgacgagttgacattcaggagtggcagtagctggatctaccttggtagggctgggagagtcastgctgctggccccatacatagcctcatgcctgccactgtggttgctccattcatgcacccatcctaccaggcctgggctgacccatggtgaaggctggct

SEQ ID NO: 8906 - DNA, 201 bp, Homo sapiens
ttcttctcacattgcaaaatataataatctactcccaattgtcccaaatgtgttaggttgttccagcatcaactcaaaattctagagtctcatctgagacdcaaggtaaattcttatagctttgagcctgtaaaatttttttaaaaaatgttatttgcatctaaaatattaataaaacagtggaagagacatttcttgtac

SEQ ID NO: 8907 - DNA, 201 bp, Homo sapiens
accccaaataaaataaagggagagagcacccacacataatgcagatgcacttgtgtttcatttttagttatgttaaaaattctgacaatcaggaatggggrttcaggagtggtgctgaggcagaggacagaagccagggggtgggggaagaggatgtcaggggtggggtcagtagagtctccttcacccccaacctgcagt

SEQ ID NO: 8908 - DNA, 201 bp, Homo sapiens
gtcgtccacgtagcccacggcgatgaagcggggctccccgcggccgggccgggacacggatgtggtgaaatacctcatggagtgggagcctgggggcgagsagtggctgagacccacccgaccctcctcccggcgcggctacccgggtcctgcgtccccgccgggcgggccccttgcttctccccgcagaggcggtttccc

SEQ ID NO: 8909 - DNA, 201 bp, Homo sapiens
atgagcctatttctgtgaagatgaacctctggcccttccaggatggaagtagctaaatgtagtcacttgttacttagtggctggtcgccgaaagaaatagygccccactagggcacatcatgggctccaaatgctgacgagttgacattcaggagtggcagtagctggatctaccttggtagggctgggagagtcagtgct

SEQ ID NO: 8910 - DNA, 201 bp, Homo sapiens
cagggcaccaaggccttacaggaatttaccctgggccatgccctaaaataacctcaccccaaataaaataaagggagagagcacccacacataatgcagakgcacttgtgtttcatttttagttatgttaaaaattctgacaatcaggaatgggggttcaggagtggtgctgaggcagaggacagaagccagggggtgggg

SEQ ID NO: 8911 - DNA, 201 bp, Homo sapiens
acccatggaatatgagcctatttctgtgaagatgaacctctggcccttccaggatggaagtagctaaatgtagtcacttgttacttagtggctggtcgcckaaagaaatagtgccccactagggcacatcatgggctccaaatgctgacgagttgacattcaggagtggcagtagctggatctaccttggtagggctggga

SEQ ID NO: 8912 - DNA, 201 bp, Homo sapiens
gagcaccgcctagcctgcagatcaggaatgtcaacagcacccggagagtggtgctggctgagtgtcagagcaagacaggaaaacccacccatggaatatgrgcctatttctgtgaagatgaacctctggcccttccaggatggaagtagctaaatgtagtcacttgttacttagtggctggtcgccgaaagaaatagtgcc

SEQ ID NO: 8913 - DNA, 201 bp, Homo sapiens
agttgtgcctatagaagacctgtccagcattccttgtggctggtagctcctgggtggtgcagatggtgataggattagtggaacccacagccatggaaacwttaaaactttccaggccaaatgggtccttcaggcagagaatgggctaggagcaccgcctagcctgcagatcaggaatgtcaacagcacccggagagtggt

SEQ ID NO: 8914 - DNA, 201 bp, Homo sapiens
accttttgatttctggacccacatgttcttccattgagaacacagcaccatagagacatctctgattcaaacaatataccatgttctgaaagatggcactytcagagtgcttcctccaggctggcactgagttgtgcctatagaagacctgtccagcattccttgtggctggtagctcctgggtggtgcagatggtgatag

SEQ ID NO: 8915 - DNA, 201 bp, Homo sapiens
cattccttgctatctgcccttttgctacaggagataaagacctgtccatgagacactgccgagggtgtcaaatgtagccagtcatagctgtcaacaatccrcagattctcattatctttttacacagcatcgatgcagctgagaagtaactagccaaagccactgtctttgtaggtttcttccaaccctgtccttattatg

SEQ ID NO: 8916 - DNA, 201 bp, Homo sapiens
atgaaaagtgttagtatatatgaggtgtttgcagctgtgccatattatttttgttattttgttatgattttattatattttaatacattaatgtcatgtarttgtattatcacaggtgagctttatgagtgagtgtcctggtgacggctcctccaggggagccaaggaccaactttcctggcacgttgaggtcccctcgcc

SEQ ID NO: 8917 - DNA, 201 bp, Homo sapiens
atgagacagaaaatgctgggaaagccactggaccacaaagcaactctgagcctcagtgatgtagagagtgcaggaaggtcagctggaagcatcctagaccstgtgcaggctaagggaagttcagtaagggtggcagggagccctggagcttcagtcagccttcagaagaggaatgtcctgccttagtttctgccctacttt

SEQ ID NO: 8918 - DNA, 201 bp, Homo sapiens
agtttctgccctactttcctcaatcattggctggaaaaagccaggggtgggcatagtctcagagcaaatgtggcaatagatttcagacttcaagagctggrgccatcatcaattctgcttcttctagatgaggggctgggatgtgcattctcatgactgccacaatgatccagtggggagagaggaaaaaggttgacgata

SEQ ID NO: 8919 - DNA, 201 bp, Homo sapiens
tgcagccaggcggcctggattgaacgccctgcccaggtctcaccagcactttttctcttgctggctcagctttctcatctatgaaatagggaatgtaacarcatttatttcttgtggttgggtggatgaaaagtgttagtatatatgaggtgtttgcagctgtgccatattatttttgttattttgttatgattttattat

SEQ ID NO: 8920 - DNA, 201 bp, Homo sapiens
ctctgtccatggaggtgaggacagtgaggtggttgggtcttagtgctgtggggaacttttcttgacctcctgatgactggatggagtgtctgagggaggargggtcttacaggattgactcatgaccctgagggatgtgctcactccaggtctcaggtctgtcctgacacctttatttgtggcttagagctccctactgta

SEQ ID NO: 8921 - DNA, 201 bp, Homo sapiens
ggagttagttcattttggagtttataacttaaagcagaaattcagatggttgaaatgtcattttcatgaaggtttgttattagtgtatcatttagattgtyttgcaaaagtctcattttttttctaaagggttgccaatcttgttttaaatttacaaaggttgttaatttatcttcactgttaattggttgtgggttgttt

SEQ ID NO: 8922 - DNA, 201 bp, Homo sapiens
gttcattttggagtttataacttaaagcagaaattcagatggttgaaatgtcattttcatgaaggtttgttattagtgtatcatttagattgttttgcaamagtctcattttttttctaaagggttgccaatcttgttttaaatttacaaaggttgttaatttatcttcactgttaattggttgtgggttgtttaaactta

SEQ ID NO: 8923 - DNA, 201 bp, Homo sapiens
aaggtttgttattagtgtatcatttagattgttttgcaaaagtctcattttttttctaaagggttgccaatcttgttttaaatttacaaaggttgttaatytatcttcactgttaattggttgtgggttgtttaaacttatactgtgtagttttacatatctgtaacagcagtagtttgggcctcttatattctaataatt

SEQ ID NO: 8924 - DNA, 201 bp, Homo sapiens
agaaaacaaactgtgagaggccagggaggaggcagggcatgagatcctagagaagtttccagaactgtgactacagacccaggtcaggatcagaaaacccragggaagaggatgtgttgaggctggaccagttgtcctcctgaggtctgtcctcagcagggaccttcccctgacctgtgactgctgggagtcaggttccca

SEQ ID NO: 8925 - DNA, 201 bp, Homo sapiens
accccacaaagggctggcaattggcaggtagtgggggagccagggctctgcagtcttagtcccatccctctttgacctcacagcagggcaccaaggccttrcaggaatttaccctgggccatgccctaaaataacctcaccccaaataaaataaagggagagagcacccacacataatgcagatgcacttgtgtttcattt

SEQ ID NO: 8926 - DNA, 201 bp, Homo sapiens
gtgcccacagcaccctccatgcctggaactaatgtgcaccacccccaggagccccaggatcagaaacaccccagcatctcccaggccagagaaagcagaaragaccccacaaagggctggcaattggcaggtagtgggggagccagggctctgcagtcttagtcccatccctctttgacctcacagcagggcaccaaggcc

SEQ ID NO: 8927 - DNA, 201 bp, Homo sapiens
ttgtgcagggcattctatcaccccacctgccatagcttcccctaaccagggcatcctctcagctcagcactggtgagacccatagcagctcggctgcatchtgtgctatggaatttctgtgtctcccacaaccctggtggcatcctcttggcctgccaggcagtgggcaagcttttttcaaattctcatttttgcctgttt

SEQ ID NO: 8928 - DNA, 201 bp, Homo sapiens
catgagacactgcagaggctgtcacatgtagccagtgacagctgttaacaatctgcagattctcatgatactttcacagggcatcattgcagctgagcagyaaccagccaactccactgtctttgtaggtttccccctaaccccgtcattattgtgcagggcattctatcaccccacctgccatagcttcccctaaccagg

SEQ ID NO: 8929 - DNA, 201 bp, Homo sapiens
tggacatggagccatacctgcttccaccttttgatttctggacccacatgttcttccattgagaacacagcaccatagagacatctctgattcaaacaatrtaccatgttctgaaagatggcactctcagagtgcttcctccaggctggcactgagttgtgcctatagaagacctgtccagcattccttgtggctggtagc

SEQ ID NO: 8930 - DNA, 201 bp, Homo sapiens
gcccattgttgggagataaaaaaggcaaaataccttagtgggtgaatctaagagattggacatggagccatacctgcttccaccttttgatttctggaccyacatgttcttccattgagaacacagcaccatagagacatctctgattcaaacaatataccatgttctgaaagatggcactctcagagtgcttcctccagg

SEQ ID NO: 8931 - DNA, 201 bp, Homo sapiens
tcttttgtctacttttaagggtaccctcctttggaaaccaggacctcctaacccgcacagcccattgttgggagataaaaaaggcaaaataccttagtggrtgaatctaagagattggacatggagccatacctgcttccaccttttgatttctggacccacatgttcttccattgagaacacagcaccatagagacatct

SEQ ID NO: 8932 - DNA, 201 bp, Homo sapiens
attccgtggaaaattctagtccctgaggagggaacagcgacttctggtcctgacctgagtggaggctgagggactcagaagagctggactcagacccccasgcacattgagtgtgaagcagagaacaaggcctgagaggaaaagtcacggggcccaaggctgctgccagtgtcaaagggaaccactcatcagtattccagg

SEQ ID NO: 8933 - DNA, 201 bp, Homo sapiens
taaagtaatgtgtagttcaatgggctctcttttgtctacttttaagggtaccctcctttggaaaccaggacctcctaacccgcacagcccattgttgggasataaaaaaggcaaaataccttagtgggtgaatctaagagattggacatggagccatacctgcttccaccttttgatttctggacccacatgttcttccat

SEQ ID NO: 8934 - DNA, 201 bp, Homo sapiens
ggatgattctgctcacacttacaatggggcaaggggacccagaaggttcccaggtggatgtctggtttccacacacacttctgccctcattgtgtgaaagyagccatgcctcctcctggggatgagggcctattacctgggcctggagagaaggacactcctcttctcacgatgtggtctctgggaacatgctctccaaac

SEQ ID NO: 8935 - DNA, 201 bp, Homo sapiens
ccacggcgatgaagcggggctccccgcggccgggccgggacacggatgtggtgaaatacctcatggagtgggagcctgggggcgaggagtggctgagaccyacccgaccctcctcccggcgcggctacccgggtcctgcgtccccgccgggcgggccccttgcttctccccgcagaggcggtttccccacgaccccgcact

SEQ ID NO: 8936 - DNA, 201 bp, Homo sapiens
cacaggagcagggccttgggagattacccaggagtgtgactcaaacctgctgcccagatgggtctgggttcttggaaatcaaatcctctcaggctaaattkctggatgattctgctcacacttacaatggggcaaggggacccagaaggttcccaggtggatgtctggtttccacacacacttctgccctcattgtgtgaa

SEQ ID NO: 8937 - DNA, 201 bp, Homo sapiens
gggctccccgcggccgggccgggacacggatgtggtgaaatacctcatggagtgggagcctgggggcgaggagtggctgagacccacccgaccctcctccmggcgcggctacccgggtcctgcgtccccgccgggcgggccccttgcttctccccgcagaggcggtttccccacgaccccgcactcacccgcccaggtctg

SEQ ID NO: 8938 - DNA, 201 bp, Homo sapiens
atgtcagagcacaggagcagggccttgggagattacccaggagtgtgactcaaacctgctgcccagatgggtctgggttcttggaaatcaaatcctctcargctaaattgctggatgattctgctcacacttacaatggggcaaggggacccagaaggttcccaggtggatgtctggtttccacacacacttctgccctca

SEQ ID NO: 8939 - DNA, 201 bp, Homo sapiens
cggccgggccgggacacggatgtggtgaaatacctcatggagtgggagcctgggggcgaggagtggctgagacccacccgaccctcctcccggcgcggcthcccgggtcctgcgtccccgccgggcgggccccttgcttctccccgcagaggcggtttccccacgaccccgcactcacccgcccaggtctgggtcagggcc

SEQ ID NO: 8940 - DNA, 201 bp, Homo sapiens
ggacagaaggagagaaggtttactggatgtttcctagaccacaggcaatctaaggagagttgagcaaggccatggaggagacccggagccaccattggccrtcagaggagtcccctgtctcccaggaatgtcctgccttagtgtcactggtgtgagccatcactgactgggaacagcccatgggaagcagggcctccatac

SEQ ID NO: 8941 - DNA, 201 bp, Homo sapiens
atgcaagtgtgacccccagtgatggacagaaggagagaaggtttactggatgtttcctagaccacaggcaatctaaggagagttgagcaaggccatggagragacccggagccaccattggccatcagaggagtcccctgtctcccaggaatgtcctgccttagtgtcactggtgtgagccatcactgactgggaacagcc

SEQ ID NO: 8942 - DNA, 201 bp, Homo sapiens
ggacagaaggaaggagaaagggaaggaacaaaaaagaaaagaaactaaaataaagaaaagaatacacgttgagaaactagaaaccctacgtatggccagtrttatgaaaatggaaggaaataaagcagatgtacgtaacctgtatagaataatggaaatgtaagagggcttcattagttatccattgccgcataacaaact

SEQ ID NO: 8943 - DNA, 201 bp, Homo sapiens
ttcttcagggacagactgctgaattatatggagataataggcaatcccaacaccaccccccatccttcagctctctaatggcagtgccacccctacaatayctgcagtaccctcctgaagtcccacctggggcgcaatattgcttctggcttggctgggatgagggaagttttagatgattccctttgggcttcagcacaa

SEQ ID NO: 8944 - DNA, 201 bp, Homo sapiens
tggggatggtgggctgggaagatggctctgggaaaaggggggaaggtgagggaccctgaccctgctaaagctctccagagaggctccggctttccctaagrgacatgacacccccatctccctccttaccccatctcagggtgaggggctctggcagaccctcatgctgcacatggcaggtgtatctctgctcctctccag

SEQ ID NO: 8945 - DNA, 201 bp, Homo sapiens
cgccctcgctctggttgtagtagcggagcgcgatccgcaggttctctcgttcagtctgtgcctgggccttgcagatctgtgtgttccggtcccaatactcyggcccctcccgctccatccacggcgcccgcggctccatcctctggctcgcggcgtcgctgtcgaaccgcacgaactgcgtatcgtccacgtagccgacgg

SEQ ID NO: 8946 - DNA, 201 bp, Homo sapiens
gttgggttccgggacgcgggatccggcttctctgggaatcttggattccaggaaggatcctggagatctcccactttatgaagcccaatctccactcactstgatggcgtctttagaccccactggaaaccagatacgacgccctcatcggccctggggaaaaaacaagagcaaagtatgagaggtggccatgaggtcagg

SEQ ID NO: 8947 - DNA, 201 bp, Homo sapiens
ctggggaaaaaacaagagcaaagtatgagaggtggccatgaggtcagggaaactcctgcagaattctcaggaaaggaaactcttccgagctgggcccttgscttagtttgtcttccctgcccagccacctgtcccagagctggagacgcccaggtttaagccagagactttggatactttccttgatggtgacataatttt

SEQ ID NO: 8948 - DNA, 201 bp, Homo sapiens
caggaaaggaaactcttccgagctgggcccttggcttagtttgtcttccctgcccagccacctgtcccagagctggagacgcccaggtttaagccagagahtttggatactttccttgatggtgacataatttttgtcttcttctctcctggaagagaagccccagaaccatcagagtgatccagtctgcccactcttctt

SEQ ID NO: 8949 - DNA, 201 bp, Homo sapiens
cgctacaagagataaagacctgtgcatgagacactgcagaggctgtcacatgtagccagtgacagctgttaacaatctgcagattctcatgatactttcabagggcatcattgcagctgagcagtaaccagccaactccactgtctttgtaggtttccccctaaccccgtcattattgtgcagggcattctatcaccccac

SEQ ID NO: 8950 - DNA, 201 bp, Homo sapiens
tttcctattgtatcacctgaaaacggaaaattagcaggcacaccccatagttgtatagtgacaattaaatgaattcatattttgaaagtgctaaggacacrgattaacacatagcaccatgacagtgtatgatattatcgctgttggttttttttttttttttttttagatggagttttgctctcgttgcccatgctggag

SEQ ID NO: 8951 - DNA, 201 bp, Homo sapiens
atttctcaaaattcctgctttaaatgctgatgtccaataaagatgttcgtagtttcagctgggtcttaaaaggatttccaccaatactaatgttgtaaccyatatcaaatgaaacaggaactcaaatgtggagctccctctccaggacggtccatgtgggagacagtggctgtggcagtggcaatccccaagtgcaaaggg

SEQ ID NO: 8952 - DNA, 201 bp, Homo sapiens
gctgagtggcaaacctctctggagcactgtggccctcatagtgatgtcttcagctaccattccacggtatctgccctttcgctacaagagataaagacctstgcatgagacactgcagaggctgtcacatgtagccagtgacagctgttaacaatctgcagattctcatgatactttcacagggcatcattgcagctgagc

SEQ ID NO: 8953 - DNA, 201 bp, Homo sapiens
ccataaactggccccaagactggccataaacaaaatctctgcagcaccgtaacatgttcataatggccctaatgtccaagctggaaggttgcgggtttacragaatgagggaaaggaacacctggcctgcccagggcggaaaaccgcttaaaggcattcttaagccacaaacaatagcatgagcgatctgtgtcttaaggg

SEQ ID NO: 8954 - DNA, 201 bp, Homo sapiens
tatcatgctcataatttttgtacctttttaaatgccccatattgtgttgtttattttttaaattttttaaaattggtacataatatttgtacatatttatrggatacatgtgacattttgatacatgcatagaatgtgtgtatcagtcaagatatttagggtatccatgacctcaagcatttatcatttctttctgttgag

SEQ ID NO: 8955 - DNA, 201 bp, Homo sapiens
tttgcagaatctcaggtttccccaccagggtcctgactttcctgtaacaggcctgccttggctgagtggcaaacctctctggagcactgtggccctcatartgatgtcttcagctaccattccacggtatctgccctttcgctacaagagataaagacctgtgcatgagacactgcagaggctgtcacatgtagccagtga

SEQ ID NO: 8956 - DNA, 201 bp, Homo sapiens
gatgaaacagtttgtctgttaccttggaggggacacacctgcattcccctaaacacttggccattgttcacccataaaactttacttcaatgcccactatytttttctttttgagatggaattttgctcttgttgcccactctggagtgcaatggcacgatcttggctcactgcaatctctgcctcctgggttcaagtgat

SEQ ID NO: 8957 - DNA, 201 bp, Homo sapiens
cctcctatgcatgcccagaggatcctggagggcacccatcggataaccctgttcctgtttgcagaatctcaggtttccccaccagggtcctgactttcctstaacaggcctgccttggctgagtggcaaacctctctggagcactgtggccctcatagtgatgtcttcagctaccattccacggtatctgccctttcgcta

SEQ ID NO: 8958 - DNA, 201 bp, Homo sapiens
tctcctgcctcagcctccagagtagctgagattacaggcgcccgctactacgcccagctaattttttgtatttttagtagaaacggagtttccccatgttrggcagtctggtcttgaactcctgacctcaggtgatccaccctcttcggcctcccaaagtgctgggattacaggtgtgagccaccatgccccgccgttgtt

SEQ ID NO: 8959 - DNA, 201 bp, Homo sapiens
tgagaaagtgcctccaagccaaaggatttttattcttccagcttgaaattctggttccttgatcaaacaccctcaaattccaatcccagaagtgctcctcrgcctcctatggggacgtgccagctagttcctgcaaagctcttcagtgggattcctgctgtatcatgggggtgagacttctgtagcatcttccagcatagg

SEQ ID NO: 8960 - DNA, 201 bp, Homo sapiens
aaaaagagaaaacgaggtcgaattcctcacttaccatgagatcttgcaacacaggttccaagggcctcaacccctctaccctggctgatgctccctcctcyactccctctgaccagggccctgagccccccacacagctgagctggcccaagctgaggagttgcttgcacagcagctggagctggaccaggccctcctgga

SEQ ID NO: 8961 - DNA, 201 bp, Homo sapiens
agcggtgggtttggccccccccttatcaaagtcctggggtgtttgataaacccatgccttgagaaagtgcctccaagccaaaggatttttattcttccagvttgaaattctggttccttgatcaaacaccctcaaattccaatcccagaagtgctcctcggcctcctatggggacgtgccagctagttcctgcaaagctct

SEQ ID NO: 8962 - DNA, 201 bp, Homo sapiens
agggacagaaggaaggagaaagggaaggaacaaaaaagaaaagaaactaaaataaagaaaagaatacacgttgagaaactagaaaccctacgtatggccartgttatgaaaatggaaggaaataaagcagatgtacgtaacctgtatagaataatggaaatgtaagagggcttcattagttatccattgccgcataacaaa

SEQ ID NO: 8963 - DNA, 201 bp, Homo sapiens
ctgtatctgccctccagaggcctatgcccaagacaggttgctccctgggattctcactacaggtggacttaagctaatgggctggaaaaagagaaaacgasgtcgaattcctcacttaccatgagatcttgcaacacaggttccaagggcctcaacccctctaccctggctgatgctccctcctccactccctctgaccag

SEQ ID NO: 8964 - DNA, 201 bp, Homo sapiens
agaaaaaagtcatgtaaaatacataacatgctgtgctataatttctttatttatcttcccacccccacctttgacttctatgaagtccaaggaagtttgaktcttttatctgaggctcaactccatagagcacagtacccagaataaggtaggtgcttaatgatgtttaccatttgaatgagtttcctggaagtacttagc

SEQ ID NO: 8965 - DNA, 201 bp, Homo sapiens
aaccaccacgcctggcttaaacttttgaaataagtgcgtaatacttgatgttgatgatgtgttctgaaaacactgagttgaaggaattgagttgaaagccrctgtcttggctgcagaattatagcaggcatttttatttagattctgtcaataactttctgttgtttacttgtttctcatataccgtggcattgtactttt

SEQ ID NO: 8966 - DNA, 201 bp, Homo sapiens
atcagttcagactgattcggaggtggggaggtgggatagttcctgaccctgttgcaaggtttcttttgactttctggttttggggcacatagatgggtggygctcttcttggtcagggcggcctcagctccacccaggtaaggcagtggtggcagagagttaggggagcacctatgaaacagaccaaggcagggatgggag

SEQ ID NO: 8967 - DNA, 201 bp, Homo sapiens
atctgtatctgccctccagaggcctatgcccaagacaggttgctccctgggattctcactacaggtggacttaagctaatgggctggaaaaagagaaaacraggtcgaattcctcacttaccatgagatcttgcaacacaggttccaagggcctcaacccctctaccctggctgatgctccctcctccactccctctgacc

SEQ ID NO: 8968 - DNA, 201 bp, Homo sapiens
ctcccaaagtgctgggattacaggcgtgaaccaccacgcctggcttaaacttttgaaataagtgcgtaatacttgatgttgatgatgtgttctgaaaacaytgagttgaaggaattgagttgaaagccgctgtcttggctgcagaattatagcaggcatttttatttagattctgtcaataactttctgttgtttacttgt

SEQ ID NO: 8969 - DNA, 201 bp, Homo sapiens
gagtcctcctgctgtcagagctggccaggcttgagaggaggggagggcactgggtttttcccaggtcttgtcctttggtcctggggctcttttcctccttkcatggtggctggtgggcacagggcaggggctgatgttgatggagtcacgggaggggactggcaggggctgggaaaagtgccatgggagggagaaaaaagt

SEQ ID NO: 8970 - DNA, 201 bp, Homo sapiens
gaactcctgacctcaggtggtccacccacctcagcctcccaaagtgctgggattacaggcgtgaaccaccacgcctggcttaaacttttgaaataagtgcrtaatacttgatgttgatgatgtgttctgaaaacactgagttgaaggaattgagttgaaagccgctgtcttggctgcagaattatagcaggcatttttatt

SEQ ID NO: 8971 - DNA, 201 bp, Homo sapiens
tatcctcattcaaggcatccagatatagcccctgagccagggatctgtatctgccctccagaggcctatgcccaagacaggttgctccctgggattctcastacaggtggacttaagctaatgggctggaaaaagagaaaacgaggtcgaattcctcacttaccatgagatcttgcaacacaggttccaagggcctcaacc

SEQ ID NO: 8972 - DNA, 201 bp, Homo sapiens
tgaactcctgacctcaggtggtccacccacctcagcctcccaaagtgctgggattacaggcgtgaaccaccacgcctggcttaaacttttgaaataagtgygtaatacttgatgttgatgatgtgttctgaaaacactgagttgaaggaattgagttgaaagccgctgtcttggctgcagaattatagcaggcatttttat

SEQ ID NO: 8973 - DNA, 201 bp, Homo sapiens; identical to SEQ ID NO: 1078

SEQ ID NO: 8974 - DNA, 201 bp, Homo sapiens
agccctccctctgcccagagcagcacagtccagagtccttgaacaggaattccccctcatctaacagttaatcatttattagtggggacagacatctggtygtctctttccggtgaccccatatcctcattcaaggcatccagatatagcccctgagccagggatctgtatctgccctccagaggcctatgcccaagacag

SEQ ID NO: 8975 - DNA, 201 bp, Homo sapiens
catgttagccagactggtcttgaactcctgacctcaggtggtccacccacctcagcctcccaaagtgctgggattacaggcgtgaaccaccacgcctggcytaaacttttgaaataagtgcgtaatacttgatgttgatgatgtgttctgaaaacactgagttgaaggaattgagttgaaagccgctgtcttggctgcaga

SEQ ID NO: 8976 - DNA, 201 bp, Homo sapiens
ctctccagccctccctctgcccagagcagcacagtccagagtccttgaacaggaattccccctcatctaacagttaatcatttattagtggggacagacayctggttgtctctttccggtgaccccatatcctcattcaaggcatccagatatagcccctgagccagggatctgtatctgccctccagaggcctatgccca

SEQ ID NO: 8977 - DNA, 201 bp, Homo sapiens
accctcggcatgggccctgtccctctcccttcacttttcatccaggaatctccgtccctgaactggactccctgtccacctggactcttctagaagaaaastcacccacggagtttggtgacagagagtgagcttgctctgggaatggaggtgtagaaactgttttttgttttcctttttttttttttttttattgggaaa

SEQ ID NO: 8978 - DNA, 201 bp, Homo sapiens
ctgctgaaggtttacattttatggttataccataattgcactagttttctattgatatatatgtagctgattccagttcttgccataaacattagtgtgcmtgtctcctgggcacataggcaagaaagcccgcagagtgtatgattaggagtgggatgattggatgatatgttgtatggcctttaaccatactagataata

SEQ ID NO: 8979 - DNA, 201 bp, Homo sapiens
aaagaaattatagagtttctttaaggatttgtgtaataagtatagatatatccccaatccaaatattagttagttttgatggtttttaagcttccagtacmgcaaattcctactgcatttattttcccatgatgcacattacatataggagttatctgtggtgtgggaggctgtcattcattcgtttttactgctgaaggt

SEQ ID NO: 8980 - DNA, 201 bp, Homo sapiens
cgggccgggacacggatgtggtgaaatacctcatggagtgggagcctgggggcgaggagtggctgagacccacccgaccctcctcccggcgcggctacccsggtcctgcgtccccgccgggcgggccccttgcttctccccgcagaggcggtttccccacgaccccgcactcacccgcccaggtctgggtcagggccaggg

SEQ ID NO: 8981 - DNA, 201 bp, Homo sapiens
taagtcaattctttcaactcaatgttttcagaacacatcatcaacatcaagtattacacatttattttaaaagttccattttaaaagggaatggatgatatgttgtttggactttagccagcactgttgtaaaacacagaacctgtaaactaccctgggctgctgcccattcacatcccccaaaaggagactccatcctga

SEQ ID NO: 8982 - DNA, 201 bp, Homo sapiens
atctgtggtgtgggaggctgtcattcattcatttttacgctgaaggcttacatatcgttttaccacaatttcaccggtttcctattgatgtacatgtggcygattccagtttttgccataaatattagtgtgcatgtctcctgtgcacataggcaagaaagccccaaagcccccagagtggatgattaggaatgggttggt

SEQ ID NO: 8983 - DNA, 201 bp, Homo sapiens
ttaagtcaattctttcaactcaatgttttcagaacacatcatcaacatcaagtattacacatttattttaaaagttccattttaaaagggaatggatgatatgttgtttggactttagccagcactgttgtaaaacacagaacctgtaaactaccctgggctgctgcccattcacatcccccaaaaggagactccatcctg

SEQ ID NO: 8984 - DNA, 201 bp, Homo sapiens
gtaattgtggctacttaaacttttacaataaatgtgtaatacttgatgttgatgatgtgttctgaaaacactgagttgaaggaattgtgttaaaagtcacygtcttggtggtagaattatagcaagcatttttattctgttaataacttcctgttgtttacttgtttctcatataaaagacattatgcttttgacatatag

SEQ ID NO: 8985 - DNA, 201 bp, Homo sapiens
tggtgaaatacctcatggagtgggagcctgggggcgaggagtggctgagacccacccgaccctcctcccggcgcggctacccgggtcctgcgtccccgccrggcgggccccttgcttctccccgcagaggcggtttccccacgaccccgcactcacccgcccaggtctgggtcagggccagggcccccaagagtagcagga

SEQ ID NO: 8986 - DNA, 201 bp, Homo sapiens
tcggagaaagggtgaatctgatttgggactgactgaggagggagaagtcgtcagggagtaaaaagcagcactgtgcacccaggggagcacttactattttytctcttttctccagagcacatgagcctgcaaggcccagatcaacacctgactcagacagaacaccagggcagtgcacagctgggatttcagtctctgctc

SEQ ID NO: 8987 - DNA, 201 bp, Homo sapiens
tgaaatacctcatggagtgggagcctgggggcgaggagtggctgagacccacccgaccctcctcccggcgcggctacccgggtcctgcgtccccgccgggmgggccccttgcttctccccgcagaggcggtttccccacgaccccgcactcacccgcccaggtctgggtcagggccagggcccccaagagtagcaggagga

SEQ ID NO: 8988 - DNA, 201 bp, Homo sapiens
tgtggaaggtgctaaataaagatgagtcctctttctctagtgctggacctaaagcagaatgttcagagtccctccacatatcccaatccagccaaccacayaccatgtttgcctccagaagctcctactccttcatccgtctttcacggtctatcacttcattctggcttaagctcacactcctccaggaagtcagttact

SEQ ID NO: 8989 - DNA, 201 bp, Homo sapiens
gagtcctctttctctagtgctggacctaaagcagaatgttcagagtccctccacatatcccaatccagccaaccacataccatgtttgcctccagaagctsctactccttcatccgtctttcacggtctatcacttcattctggcttaagctcacactcctccaggaagtcagttactgtgaaggtcactaacatgctcag

SEQ ID NO: 8990 - DNA, 201 bp, Homo sapiens
gcaagttccagggcaactaagtcacgtctaccttgttgagagttaggcatcattttttctagtctatatggattcaccccagcggtgggtttggccccccscttatcaaagtcctggggtgtttgataaacccatgccttgagaaagtgcctccaagccaaaggatttttattcttccagcttgaaattctggttccttga

SEQ ID NO: 8991 - DNA, 201 bp, Homo sapiens
gttggaaattgaagttcaagtaaagtgatcattgtgaatggtcataaaatacatcctcttcagccatggaaattctccttaccttttaaaactaagttacrtgtttaatatcttataattaatttacgccaggtatggtggctcacgcctgccatcctagcactgtggaaggcagaggaaggcagatttgttgactccaga

SEQ ID NO: 8992 - DNA, 201 bp, Homo sapiens
gtctcctcttcccaatactccggcccctcctgctccacccacggcgcccgcggctccatcctcggacacgccgagtcgctgtcgaaccgcacgaactgcgwgtcgtccacgtagcccatggcgatgaagcggggctccccgcggccgggccgggacacggcggcgctgaaatacctcatggagtgggagcctgggggcgag

SEQ ID NO: 8993 - DNA, 201 bp, Homo sapiens
ttgttattccatcctgtgcaagttccagggcaactaagtcacgtctaccttgttgagagttaggcatcattttttctagtctatatggattcaccccagcrgtgggtttggccccccccttatcaaagtcctggggtgtttgataaacccatgccttgagaaagtgcctccaagccaaaggatttttattcttccagcttg

SEQ ID NO: 8994 - DNA, 201 bp, Homo sapiens
cccagtcaccccctagaaggagaccgttgggagcaagtcccccaaaatctggccataaactggccccaagactggccataaacaaaatctctgcagcaccrtaacatgttcataatggccctaatgtccaagctggaaggttgcgggtttacaagaatgagggaaaggaacacctggcctgcccagggcggaaaaccgctt

SEQ ID NO: 8995 - DNA, 201 bp, Homo sapiens
caagtttaaagttccacagatccctagggaggtggcacaatgcctccaagaactatcacaagaacagcatgaaagagatgattctaaaccattcatgaatsatccatcctcatgagccaatcacgtcccaccaagcaccacctccaacattagggattacaagtgagcatgagatttgggtggggacacagatccaaacaa

SEQ ID NO: 8996 - DNA, 201 bp, Homo sapiens
ggtactggtgggccttcaccatgcccacttccctcagccttgttattccatcctgtgcaagttccagggcaactaagtcacgtctaccttgttgagagttrggcatcattttttctagtctatatggattcaccccagcggtgggtttggccccccccttatcaaagtcctggggtgtttgataaacccatgccttgagaa

SEQ ID NO: 8997 - DNA, 201 bp, Homo sapiens
tggaccgtcttgtggagcatggtactggtgggccttcaccatgcccacttccctcagccttgttattccatcctgtgcaagttccagggcaactaagtcahgtctaccttgttgagagttaggcatcattttttctagtctatatggattcaccccagcggtgggtttggccccccccttatcaaagtcctggggtgtttg

SEQ ID NO: 8998 - DNA, 201 bp, Homo sapiens
tttggaccgtcttgtggagcatggtactggtgggccttcaccatgcccacttccctcagccttgttattccatcctgtgcaagttccagggcaactaagthacgtctaccttgttgagagttaggcatcattttttctagtctatatggattcaccccagcggtgggtttggccccccccttatcaaagtcctggggtgtt

SEQ ID NO: 8999 - DNA, 201 bp, Homo sapiens
ggtttatcgtagggactaaattaatttttgtcgactgaatgaatgaaatatgagtgtattaaattgcattacagataattataaagtgcaaaacacggaaraagttcagaaaatttttattttatgtaactagtgtgcatatcaattcatcaattcattcgtgcactaccatgcctggcgaaacaacacccatttatctgc

SEQ ID NO: 9000 - DNA, 201 bp, Homo sapiens
gtgggggcctgggtagggccaggcactggagtgaagacaggcctggagagagcctcctgaaggctgctgagcggctcagacagctccttgcctcacctgcsacagtcctcccactcccctggctctctcggtgctgttttcttcacctcctcctgccctcctggtccctggcaccccagggctcataaacatgctgctccc

SEQ ID NO: 9001 - DNA, 201 bp, Homo sapiens
tccagcctgcagaggacaacaccccgacatttcttaatgatgcaggtccctctcaccatcacgtttctgaggctctggtggaaggtgtttcctttggaccstcttgtggagcatggtactggtgggccttcaccatgcccacttccctcagccttgttattccatcctgtgcaagttccagggcaactaagtcacgtctac

SEQ ID NO: 9002 - DNA, 201 bp, Homo sapiens
aaacccccatctatacaaaaaattagaaaattagccaggcatagtagttcatgatggtagtcccagctactcaggaggctgagatcagtgggtcccttgamcccaggaggtcgacactgcagtgcatggtgatcatgccactgcactccagcctgggtgacagagcgagaccatgtctcaaaaataataatgatgacgatg

SEQ ID NO: 9003 - DNA, 201 bp, Homo sapiens
gtgctctaaagcaagttctgcctaaagcggcagaaacatttttcacattaggaacaggagttgtttgggatcctgtctggggccagcttgagagcagagcrggagtgggggcctgggtagggccaggcactggagtgaagacaggcctggagagagcctcctgaaggctgctgagcggctcagacagctccttgcctcacc

SEQ ID NO: 9004 - DNA, 201 bp, Homo sapiens
atccagcctgcagaggacaacaccccgacatttcttaatgatgcaggtccctctcaccatcacgtttctgaggctctggtggaaggtgtttcctttggacbgtcttgtggagcatggtactggtgggccttcaccatgcccacttccctcagccttgttattccatcctgtgcaagttccagggcaactaagtcacgtcta

SEQ ID NO: 9005 - DNA, 201 bp, Homo sapiens
tagaaaattagccaggcatagtagttcatgatggtagtcccagctactcaggaggctgagatcagtgggtcccttgaacccaggaggtcgacactgcagtrcatggtgatcatgccactgcactccagcctgggtgacagagcgagaccatgtctcaaaaataataatgatgacgatgatacatttaaagcaaatgcaatt

SEQ ID NO: 9006 - DNA, 201 bp, Homo sapiens
agggccacactctccccagggatattaataaatgcaactctgggtcatctttactaccatcacatccagcctgcagaggacaacaccccgacatttcttartgatgcaggtccctctcaccatcacgtttctgaggctctggtggaaggtgtttcctttggaccgtcttgtggagcatggtactggtgggccttcaccatg

SEQ ID NO: 9007 - DNA, 201 bp, Homo sapiens
ttctgtgtgggccctacttgaagctggcctcctcctatgtcacctagagtgtgggccaaagcaacatacctagatgtggaaagtggtgttgtcagaactgraagaggctcatcaggcagtgtgcttccttctttctggtgaggatgcaagatgaaacagtttgtctgttaccttggaggggacacacctgcattcccctaa

SEQ ID NO: 9008 - DNA, 201 bp, Homo sapiens
tatgattctaaatagcatgccatcaggtgcttctgaagtggttttgtttgtttctttgttttcgcagtcctattgtgttttctattcatattgctattccrtcactggttattcctttctactcttttcttgtttcatttattttgatcaatgatgtgcatttccaattctgtaaaagtttaattcagtggtatgtgtggt

SEQ ID NO: 9009 - DNA, 201 bp, Homo sapiens
ttgcctcacccaaccagtgatataattccttccttgcagaagaataagtgaaaaaaggcacagtgccaagagaatcagacacacgacctgcggaaggctgygccagtgctctaaagcaagttctgcctaaagcggcagaaacatttttcacattaggaacaggagttgtttgggatcctgtctggggccagcttgagagca

SEQ ID NO: 9010 - DNA, 201 bp, Homo sapiens
caacacatctagcatgccaataacttcggtttgatgcagtatcacgaaattgttagctcgaattgagaaactagttttttcaataactggctattcgatcrgcattctataatacacttaacatcttttgttgtgatattgaatgatatgtgatagaagtgatttggacaccactatgattctaaatagcatgccatcagg

SEQ ID NO: 9011 - DNA, 201 bp, Homo sapiens
ccagttgcctcacccaaccagtgatataattccttccttgcagaagaataagtgaaaaaaggcacagtgccaagagaatcagacacacgacctgcggaagsctgtgccagtgctctaaagcaagttctgcctaaagcggcagaaacatttttcacattaggaacaggagttgtttgggatcctgtctggggccagcttgag

SEQ ID NO: 9012 - DNA, 201 bp, Homo sapiens
gtgaatctcatacttcagtcaacacatctagcatgccaataacttcggtttgatgcagtatcacgaaattgttagctcgaattgagaaactagttttttcrataactggctattcgatcagcattctataatacacttaacatcttttgttgtgatattgaatgatatgtgatagaagtgatttggacaccactatgattc

SEQ ID NO: 9013 - DNA, 201 bp, Homo sapiens
gcttccatcttttgatccctggacacacatgttcttcctattgagaacacagcactctagagacatctctgattcaaacaatgcaccgtgtcctaaaagayggcacccacctctcagagtgcttcctccaggctggcactgagttttgcctgtagaagacctgtccagcattccttgtggctggcagcctctggatggtgc

SEQ ID NO: 9014 - DNA, 201 bp, Homo sapiens
tatctttaataacagcaatgttctcttcaatgagttaacacagttgagaacatagaataactagatcaaatagttccaagactttagtgctataaaaatartgccttgaaaataagtctttgttttgtctaaaatgtctcaaatttaggggaagtatgcccctagtgccagttttcttattgaaatatcgtcttccaaaaa

SEQ ID NO: 9015 - DNA, 201 bp, Homo sapiens
gtggagccaaacctgcttccatcttttgatccctggacacacatgttcttcctattgagaacacagcactctagagacatctctgattcaaacaatgcacsgtgtcctaaaagatggcacccacctctcagagtgcttcctccaggctggcactgagttttgcctgtagaagacctgtccagcattccttgtggctggcag

SEQ ID NO: 9016 - DNA, 201 bp, Homo sapiens
ggaatcctttgcccattgcttatttttgtcgggctcattgaagatcacagggttttagatgtgtggtcttatttctgagttctctattctgttccattggyctatgtgcctgtttttgtaccagtaccttgctgtttcagttactgtagccttgtagtatagttttaagtcaggtagcctcatgcctccagctttgttctt

SEQ ID NO: 9017 - DNA, 201 bp, Homo sapiens
tgttaaatagggaatcctttgcccattgcttatttttgtcgggctcattgaagatcacagggttttagatgtgtggtcttatttctgagttctctattctrttccattggtctatgtgcctgtttttgtaccagtaccttgctgtttcagttactgtagccttgtagtatagttttaagtcaggtagcctcatgcctccag

SEQ ID NO: 9018 - DNA, 201 bp, Homo sapiens
taaggaaggagtccagtttcaattttctgcagattgctagccagttctcccagcaccatttgttaaatagggaatcctttgcccattgcttatttttgtcrggctcattgaagatcacagggttttagatgtgtggtcttatttctgagttctctattctgttccattggtctatgtgcctgtttttgtaccagtaccttg

SEQ ID NO: 9019 - DNA, 201 bp, Homo sapiens
cattcgtatctctgcaaaggacttgatctcattcctttttatggttgcataatattccgtggtgtatatgtaccatattttctttatccagttcctcattkgtgggcatttgggttgattccatgtctttgctattgtgaatagtgctgcaatgaacatacacatgcatatacctttataatagaatgatttatattcctt

SEQ ID NO: 9020 - DNA, 201 bp, Homo sapiens
cacctcagggtggcctcatagtcaaagacagggtggtgggtcacgtgtgtcttgggggggtctgaaaggaagagtcagaaaactcaagcactttgcatctstcatgggacactccagcagcacctggatgtgaccatcctaagaatgaaccagatacctggggtggggaagggagcacagaacccagacaccagcctggac

SEQ ID NO: 9021 - DNA, 201 bp, Homo sapiens
tttgctgaggataatggcttccagcttcattcgtatctctgcaaaggacttgatctcattcctttttatggttgcataatattccgtggtgtatatgtacyatattttctttatccagttcctcatttgtgggcatttgggttgattccatgtctttgctattgtgaatagtgctgcaatgaacatacacatgcatatacc

SEQ ID NO: 9022 - DNA, 201 bp, Homo sapiens
gaaggtattccaaaatcttttgtatagtaaactcctgagtttgcttgagaatctgcctatctgtcttttcttctcaggacatcatctcctacccagagcamacctttgttcttctgcaagtagaaagccctctttcagaacattgtccaagatcagccaggcccaaccctcaaaatgactttctgtctttgacccaaatgc

SEQ ID NO: 9023 - DNA, 201 bp, Homo sapiens
ttaggaaaaataggttcaaccgctgacttccacagcttgggggaatcatccccatgattcgatcacctcccatgaagtccctccgccaatatgtggggathagaattcgcatgacaattcaaaatgagatttgggtgggaacacagagacaggccatatcagaagtgcatcattaagtccaagccacacttaagagaggga

SEQ ID NO: 9024 - DNA, 201 bp, Homo sapiens
gaacatacgaattgtcactgcattgtgcactttaaatggttacggtggtatcctttgtgtttatgtgtattttaccacaatgaaaaagaggctgaggaagrtattccaaaatcttttgtatagtaaactcctgagtttgcttgagaatctgcctatctgtcttttcttctcaggacatcatctcctacccagagcaaacct

SEQ ID NO: 9025 - DNA, 201 bp, Homo sapiens
cctcatggagtgggagcctgggggcgaggagtggctgagacccacccgaccctcctcccggcgcggctacccgggtcctgcgtccccgccgggcgggcccsttgcttctccccgcagaggcggtttccccacgaccccgcactcacccgcccaggtctgggtcagggccagggcccccaagagtagcaggaggagggttcg

SEQ ID NO: 9026 - DNA, 201 bp, Homo sapiens
gagcctgggggcgaggagtggctgagacccacccgaccctcctcccggcgcggctacccgggtcctgcgtccccgccgggcgggccccttgcttctccccrcagaggcggtttccccacgaccccgcactcacccgcccaggtctgggtcagggccagggcccccaagagtagcaggaggagggttcggggcgccatgacg

SEQ ID NO: 9027 - DNA, 201 bp, Homo sapiens
aaactttctactccacagggagaagaagatcccctatgggctgtgagggcagtggcttgggtggaatccctgctaggaatccctgctaggaacaggagagraaggcctttcagcctccccaagcagcagccctggggagaagctgtgcttccagggatgagtggaccaggctggagcaagcttggcccaagtgcaggtcat

SEQ ID NO: 9028 - DNA, 201 bp, Homo sapiens
tccgtgtctcctcttcccaatactccggcccctcctgctccacccacggcgcccgcggctccatcctcggacacgccgagtcgctgtcgaaccgcacgaaytgcgtgtcgtccacgtagcccatggcgatgaagcggggctccccgcggccgggccgggacacggcggcgctgaaatacctcatggagtgggagcctgggg

SEQ ID NO: 9029 - DNA, 201 bp, Homo sapiens; identical to SEQ ID NO: 1112

SEQ ID NO: 9030 - DNA, 201 bp, Homo sapiens
tctcttcagggccacactctccccagggatattaataaatgcaactctgggtcatctttactaccatcacatccagcctgcagaggacaacaccccgacayttcttaatgatgcaggtccctctcaccatcacgtttctgaggctctggtggaaggtgtttcctttggaccgtcttgtggagcatggtactggtgggcctt

SEQ ID NO: 9031 - DNA, 201 bp, Homo sapiens
ttttcatagtaagcacatgctaatatattttcaataaattcatgtgctcttttcctaagttggtatcagagctaattatttttttcattgcgccaaaatcyatattatataaaatttggtatcgtaacaatttttaagtatagagtactataatatgaactgtagcacattgttatgcaacagatctctagaacttttcat

SEQ ID NO: 9032 - DNA, 201 bp, Homo sapiens
tatagagtactataatatgaactgtagcacattgttatgcaacagatctctagaacttttcatcttgcaaaactgaaactctacgctgaaaatctcctcawgaatccccccagcctaaccactggcagccgccattctactttcaggttctaagagtttagacgccgcatataacgaattgcgcagtattggaatttcctt

SEQ ID NO: 9033 - DNA, 201 bp, Homo sapiens
ttcaggtcactgccaccatttggtctttgtctcttcagggccacactctccccagggatattaataaatgcaactctgggtcatctttactaccatcacabccagcctgcagaggacaacaccccgacatttcttaatgatgcaggtccctctcaccatcacgtttctgaggctctggtggaaggtgtttcctttggaccg

SEQ ID NO: 9034 - DNA, 201 bp, Homo sapiens
tttcaggtcactgccaccatttggtctttgtctcttcagggccacactctccccagggatattaataaatgcaactctgggtcatctttactaccatcacvtccagcctgcagaggacaacaccccgacatttcttaatgatgcaggtccctctcaccatcacgtttctgaggctctggtggaaggtgtttcctttggacc

SEQ ID NO: 9035 - DNA, 201 bp, Homo sapiens
tggacctgaatatgaaccctccaggcctttccaccagctagctatagagccttggacacatcttggccatagctggccctgacagacacttgcccagtggktgagtgctcagtgaacccctctgagccagttgcctcacccaaccagtgatataattccttccttgcagaagaataagtgaaaaaaggcacagtgccaaga

SEQ ID NO: 9036 - DNA, 201 bp, Homo sapiens
tttgccatagtaactctgccctctggctttttcaggtcactgccaccatttggtctttgtctcttcagggccacactctccccagggatattaataaatgbaactctgggtcatctttactaccatcacatccagcctgcagaggacaacaccccgacatttcttaatgatgcaggtccctctcaccatcacgtttctgag

SEQ ID NO: 9037 - DNA, 201 bp, Homo sapiens
cctggacacaggcacctgggataatctcctattccgtggaaaattctagtccctgaagagggaacagcgacttctggtcctgacctgagtggaggctgagrgactcagaagtgctggactcagacccccacacacattgagtgtgaagcagagaacaaggcctgagaggaaaagtcacgggcccaaggctgctgcctgtgt

SEQ ID NO: 9038 - DNA, 201 bp, Homo sapiens
caagttaggtggacctgaatatgaaccctccaggcctttccaccagctagctatagagccttggacacatcttggccatagctggccctgacagacacttkcccagtgggtgagtgctcagtgaacccctctgagccagttgcctcacccaaccagtgatataattccttccttgcagaagaataagtgaaaaaaggcaca

SEQ ID NO: 9039 - DNA, 201 bp, Homo sapiens
ctactccttttagtttgccatagtaactctgccctctggctttttcaggtcactgccaccatttggtctttgtctcttcagggccacactctccccagggwtattaataaatgcaactctgggtcatctttactaccatcacatccagcctgcagaggacaacaccccgacatttcttaatgatgcaggtccctctcacca

SEQ ID NO: 9040 - DNA, 201 bp, Homo sapiens
tcaagttaggtggacctgaatatgaaccctccaggcctttccaccagctagctatagagccttggacacatcttggccatagctggccctgacagacactygcccagtgggtgagtgctcagtgaacccctctgagccagttgcctcacccaaccagtgatataattccttccttgcagaagaataagtgaaaaaaggcac

SEQ ID NO: 9041 - DNA, 201 bp, Homo sapiens
cattccctgcagcttgagtcctattggctactccttttagtttgccatagtaactctgccctctggctttttcaggtcactgccaccatttggtctttgtstcttcagggccacactctccccagggatattaataaatgcaactctgggtcatctttactaccatcacatccagcctgcagaggacaacaccccgacatt

SEQ ID NO: 9042 - DNA, 201 bp, Homo sapiens
gaggcttcagctaatcttaatctttttgctggggcagggtcttgcctcaatgttgatgactgctggctgatcaggagggtggttgctaaaggctcttatgrcaacttcttaaaataagacaatgaagtttgcggcatggattataaagggggaatcagtacttaagtaaggtcaatataagttttcaagttaggtggacct

SEQ ID NO: 9043 - DNA, 201 bp, Homo sapiens
ttgggtcaaacaccttcaccctcctgcttctcaattcttgctttcttatcatagatatcaagcagcgcccttgttggcttcctgtcctaatcctgggacavcaccctctactatccttccccacattccctgcagcttgagtcctattggctactccttttagtttgccatagtaactctgccctctggctttttcaggtc

SEQ ID NO: 9044 - DNA, 201 bp, Homo sapiens
ggcagtgctgaggggagcattaggaaaaataggttcaaccgctgacttccacagcttgggggaatcatccccatgattcgatcacctcccatgaagtcccdccgccaatatgtggggattagaattcgcatgacaattcaaaatgagatttgggtgggaacacagagacaggccatatcagaagtgcatcattaagtccaa

SEQ ID NO: 9045 - DNA, 201 bp, Homo sapiens
tttaaaattactctattgctcaaaaatgctaaggatcatctgaggcttcagctaatcttaatctttttgctggggcagggtcttgcctcaatgttgatgaytgctggctgatcaggagggtggttgctaaaggctcttatggcaacttcttaaaataagacaatgaagtttgcggcatggattataaagggggaatcagta

SEQ ID NO: 9046 - DNA, 201 bp, Homo sapiens
ggtaatttataaaggcaagaggtttagttgactcacagttgtgcatggctgaggaggctgccccaggaaacttacaatcatggcagaaggggaagcaaacrtgtcattcttcacatggtggcaggagagaaaaatgcagagtgaagtggggaaaatccccttatatggtacatatacaccatggaatattatgcagccata

SEQ ID NO: 9047 - DNA, 201 bp, Homo sapiens
ccaaggcctccactgccaccctgcaccctgggtgccctccacactctccaagtgtccagatgtgtgtgaggagttaagggcaggaagaactattggatcgwggatttaggtgcctttttccacctctgcaggtggcaaggtgtggattcataagctggcattgaagcgagttctgtcctttgtgaatagttgtttggtcac

SEQ ID NO: 9048 - DNA, 201 bp, Homo sapiens
gggcgaggagtggctgagacccacccgaccctcctcccggcgcggctacccgggtcctgcgtccccgccgggcgggccccttgcttctccccgcagaggcsgtttccccacgaccccgcactcacccgcccaggtctgggtcagggccagggcccccaagagtagcaggaggagggttcggggcgccatgacggccatcct

SEQ ID NO: 9049 - DNA, 201 bp, Homo sapiens
ctctatcagttagaagttgtattagtctgttctcacactgctataaagaaatacctgagactgggtaatttataaaggcaagaggtttagttgactcacarttgtgcatggctgaggaggctgccccaggaaacttacaatcatggcagaaggggaagcaaacatgtcattcttcacatggtggcaggagagaaaaatgca

SEQ ID NO: 9050 - DNA, 201 bp, Homo sapiens
agttttcccaaggcctccactgccaccctgcaccctgggtgccctccacactctccaagtgtccagatgtgtgtgaggagttaagggcaggaagaactatwggatcgtggatttaggtgcctttttccacctctgcaggtggcaaggtgtggattcataagctggcattgaagcgagttctgtcctttgtgaatagttgtt

SEQ ID NO: 9051 - DNA, 201 bp, Homo sapiens
ttactctatcagttagaagttgtattagtctgttctcacactgctataaagaaatacctgagactgggtaatttataaaggcaagaggtttagttgactcrcagttgtgcatggctgaggaggctgccccaggaaacttacaatcatggcagaaggggaagcaaacatgtcattcttcacatggtggcaggagagaaaaat

SEQ ID NO: 9052 - DNA, 201 bp, Homo sapiens
cccctgaggagcggaccccaatacagtattcaatgtgcaaggatttattagaggaaatagttatgagagaaattcaggacacagacggaaaatgctgggartgtcatcagaccacaaagcaactctgagccccagtgaggtaaacagtgcaggaaggtcagctggaagcatcctagaccctgtgcaggctaacagaagttc

SEQ ID NO: 9053 - DNA, 201 bp, Homo sapiens
tgggtccccaagagctcatgatcccagagacagagagagagaaggtggaagccatagtgagtttcacattctacacccagagtcacaaactgttatgtcarcattactctatcagttagaagttgtattagtctgttctcacactgctataaagaaatacctgagactgggtaatttataaaggcaagaggtttagttgac

SEQ ID NO: 9054 - DNA, 201 bp, Homo sapiens
ttcctgagtgcttctggctcagggcctctcacaaggttgcagtccagttgtcagcctagggctgcatcgtctgagggcttcactggggctagggattcacrtgaaacatggcttagtcacatggctgttggaaaagcctagttccttgctgtctggtcccagggggcctcagttcttagccacatggaccttcctgcaggg

SEQ ID NO: 9055 - DNA, 201 bp, Homo sapiens
ggatgcaaagttcccagacctaccagagaaggcaaacccctgcagcatgcagggctagacaggggcaagaaacaaggtcattccgggccagcaggaagagrgaaagggaaactacagacgtacctcagagacactgcagatttggtttcagaccatggcaacaaacaagtcacacaaatttttgtttttccagtgcataga

SEQ ID NO: 9056 - DNA, 201 bp, Homo sapiens
tttcctgagtgcttctggctcagggcctctcacaaggttgcagtccagttgtcagcctagggctgcatcgtctgagggcttcactggggctagggattcaygtgaaacatggcttagtcacatggctgttggaaaagcctagttccttgctgtctggtcccagggggcctcagttcttagccacatggaccttcctgcagg

SEQ ID NO: 9057 - DNA, 201 bp, Homo sapiens
ggagcggttttcctgagtgcttctggctcagggcctctcacaaggttgcagtccagttgtcagcctagggctgcatcgtctgagggcttcactggggctarggattcacgtgaaacatggcttagtcacatggctgttggaaaagcctagttccttgctgtctggtcccagggggcctcagttcttagccacatggacctt

SEQ ID NO: 9058 - DNA, 201 bp, Homo sapiens
gaactaaagggcttcatgacatcagcactcactgtggaggagatgtctgtctcatcaggcagctcactatcactgacctcaaagcgatgctgcccatactraggatcctggcattattgtcacctgacacaaatgtgatggtcaagccctgtgccacctggaaggggatagagggtaggataggactagaagacccaaaga

SEQ ID NO: 9059 - DNA, 201 bp, Homo sapiens
aggagcggttttcctgagtgcttctggctcagggcctctcacaaggttgcagtccagttgtcagcctagggctgcatcgtctgagggcttcactggggctrgggattcacgtgaaacatggcttagtcacatggctgttggaaaagcctagttccttgctgtctggtcccagggggcctcagttcttagccacatggacct

SEQ ID NO: 9060 - DNA, 201 bp, Homo sapiens
ctgtctcatcaggcagctcactatcactgacctcaaagcgatgctgcccatactgaggatcctggcattattgtcacctgacacaaatgtgatggtcaagycctgtgccacctggaaggggatagagggtaggataggactagaagacccaaagagggaagactctcagagggaaggatgaggatgtaaagtgtgaaaaga

SEQ ID NO: 9061 - DNA, 201 bp, Homo sapiens
aaatgcaaattaacgtgtaataatacatcctctcttgtgaaaatgtattagttatttactattgtgtaacaaattatgtaaaacttagcagctcaaaacarcaaatattcatcatctcccacagtttctaatggtcaggaatccaggagcggttttcctgagtgcttctggctcagggcctctcacaaggttgcagtccag

SEQ ID NO: 9062 - DNA, 201 bp, Homo sapiens
ggccggggtcactcaccgccctcgctctggttgtagtagcggagcgcgatccgcaggttctctcgttcagtctgtgcctgggccttgcagatctgtgtgtyccggtcccaatactccggcccctcccgctccatccacggcgcccgcggctccatcctctggctcgcggcgtcgctgtcgaaccgcacgaactgcgtatcg

SEQ ID NO: 9063 - DNA, 201 bp, Homo sapiens
cgggccggggtcactcaccgccctcgctctggttgtagtagcggagcgcgatccgcaggttctctcgttcagtctgtgcctgggccttgcagatctgtgtsttccggtcccaatactccggcccctcccgctccatccacggcgcccgcggctccatcctctggctcgcggcgtcgctgtcgaaccgcacgaactgcgtat

SEQ ID NO: 9064 - DNA, 201 bp, Homo sapiens
tcgttcaaggcgatgtaatccttgccgtcgtaggcgtcctgccggtacccgcggaggaagcgcccgtccgaccccacgtcgcagccatacatcatctggayggtgtgagaacctggccccgaccccacggtcagcccagtcccccgagccccgtccggccccgaccaacccggggggatttttggcctaaactgaaaatga

SEQ ID NO: 9065 - DNA, 201 bp, Homo sapiens
tgcttaaatatgttcacagagctaaaggaaactatgggcaaaaaactaaaggaaatcagaagaactatcttaactcaaatagagaacatcaataaaaagayagaaagtttaaaaagaaaccaaatagaaattttggagctgaaaagtgcaataactgaaatgaaaaatttactagagtaattttactattttttactatat

SEQ ID NO: 9066 - DNA, 201 bp, Homo sapiens
ctgcatctttcctttcgccagtgtacaatctcctgagtaaatggctataggttcctttgctgaaggactgagggaattgtgccagcatttacttccacggrgttgcagggtattcctcctagggatatggactcctcctctgtcactgggatctgaatctgaactttggctgaggtctaggcattgaggatgggatcatga

SEQ ID NO: 9067 - DNA, 201 bp, Homo sapiens
ctgggcatcaatgtcagctctcactcagtgtcaataatctgaccagttctgcatctttcctttcgccagtgtacaatctcctgagtaaatggctataggtwcctttgctgaaggactgagggaattgtgccagcatttacttccacggagttgcagggtattcctcctagggatatggactcctcctctgtcactgggatc

SEQ ID NO: 9068 - DNA, 201 bp, Homo sapiens
gcatcattcttttgcatgtggatatccaggtttccagcaccatttgttgatgcaccatctgttgcagtggggctgacacatttgtaagatgcaatgagcaygaatacatgggagcaccatgaatttatttacatgtctttacttcacagttgttttgaggaggctttcactgagaaacctaacagaaatgaatatatatga

SEQ ID NO: 9069 - DNA, 201 bp, Homo sapiens
tactccctgacctccgtaagccccactgtgatgggagacatgatagtgctgtgggcatctgggcatcaatgtcagctctcactcagtgtcaataatctgahcagttctgcatctttcctttcgccagtgtacaatctcctgagtaaatggctataggttcctttgctgaaggactgagggaattgtgccagcatttacttc

SEQ ID NO: 9070 - DNA, 201 bp, Homo sapiens
gaaacataggctgaaatgaagggtttatgtttatcttgctacaaattctgttggcccacaatctcttatgcttattgcataagagagccacagagtggggygatagctcaaataaccagtccctggttttctgcttcagaaacaagtttaaattctctgcttagacaaagtaaagaaaataattgaaagatgttgaatgtg

SEQ ID NO: 9071 - DNA, 201 bp, Homo sapiens
cacctgtggtgtctcctgaagagggattgtcagttctggttccccgtgggcgggaacggttgccttgtaggttactggggcactggccaggaaaggggtgwgaaagttatgtgctaatttctcaaaattcctgctttaaatgctgatgtccaataaagatgttcgtagtttcagctgggtcttaaaaggatttccaccaat

SEQ ID NO: 9072 - DNA, 201 bp, Homo sapiens
gggtgactccacttaacagtgcatcagtgttaattatgcactcagggaattggaagataaccagggctgggtctatggatccagtagttccattgtgggcbgtaatgtgtccaggtttactccctgacctccgtaagccccactgtgatgggagacatgatagtgctgtgggcatctgggcatcaatgtcagctctcactc

SEQ ID NO: 9073 - DNA, 201 bp, Homo sapiens
cagactagggacccagtgtgggggtgactccacttaacagtgcatcagtgttaattatgcactcagggaattggaagataaccagggctgggtctatggawccagtagttccattgtgggccgtaatgtgtccaggtttactccctgacctccgtaagccccactgtgatgggagacatgatagtgctgtgggcatctggg

SEQ ID NO: 9074 - DNA, 201 bp, Homo sapiens
gtttccctttggctttcagcacaatgagagtcctgactccacagactagggacccagtgtgggggtgactccacttaacagtgcatcagtgttaattatgbactcagggaattggaagataaccagggctgggtctatggatccagtagttccattgtgggccgtaatgtgtccaggtttactccctgacctccgtaagcc

SEQ ID NO: 9075 - DNA, 201 bp, Homo sapiens
cagagaaggcaaacccctgcagcatgcagggctagacaggggcaagaaacaaggtcattccgggccagcaggaagagggaaagggaaactacagacgtacmtcagagacactgcagatttggtttcagaccatggcaacaaacaagtcacacaaatttttgtttttccagtgcatagaaaagttatattcacactctactg

SEQ ID NO: 9076 - DNA, 201 bp, Homo sapiens
cgtcagaggtttccctttggctttcagcacaatgagagtcctgactccacagactagggacccagtgtgggggtgactccacttaacagtgcatcagtgtyaattatgcactcagggaattggaagataaccagggctgggtctatggatccagtagttccattgtgggccgtaatgtgtccaggtttactccctgacctc

SEQ ID NO: 9077 - DNA, 201 bp, Homo sapiens
cgttgggagcaagtcccccaaaatctggccataaactggccccaagactggccataaacaaaatctctgcagcaccgtaacatgttcataatggccctaaygtccaagctggaaggttgcgggtttacaagaatgagggaaaggaacacctggcctgcccagggcggaaaaccgcttaaaggcattcttaagccacaaaca

SEQ ID NO: 9078 - DNA, 201 bp, Homo sapiens
gtggctgagacccacccgaccctcctcccggcgcggctacccgggtcctgcgtccccgccgggcgggccccttgcttctccccgcagaggcggtttccccmcgaccccgcactcacccgcccaggtctgggtcagggccagggcccccaagagtagcaggaggagggttcggggcgccatgacggccatcctcggcgtctg

SEQ ID NO: 9079 - DNA, 201 bp, Homo sapiens
aaatgaaaccgggtaaaggcgcctgggcctctcccggggcaagggtctcggggtcccgcggcttcggggtggatctcggacccggagactgtgggcgaccyggcccgtccgtgggggatgagaggtcgtgacctgcgccccgggccggggtcactcaccggcctcgctctggttgtagtagccgcgcagggtccccaggtt

SEQ ID NO: 9080 - DNA, 201 bp, Homo sapiens
aatgctctggctctgagacacaggggtggtggaagtaggatagtgattggatgatgaatctgtagctgcagaggcatctgggcccctcaccttcattcctygtagatgtcacctccactggatgcctgcaatgccctctcctctgtatgctcctgccagagtctccccatctccactgacagcagctccacccttctgctc

SEQ ID NO: 9081 - DNA, 201 bp, Homo sapiens
gtggaaagttctcatgtcttccatttattttgtctctcaaatttcaggaatcttctcctttaattaacccatcaatctctcttggaaataatttgaaaaastaaatttatactcagattctaattttaatacagaagtaagttatagctcagtgcaccacaaatttgagacagagacggagacatcccagccccttttctg

SEQ ID NO: 9082 - DNA, 201 bp, Homo sapiens
caagacacaccctgggacacactatgattttttttttttttttttttgccaggatgtgggcagcgtcagaggtttccctttggctttcagcacaatgagadtcctgactccacagactagggacccagtgtgggggtgactccacttaacagtgcatcagtgttaattatgcactcagggaattggaagataaccagggct

SEQ ID NO: 9083 - DNA, 201 bp, Homo sapiens
tctcatgtcttccatttattttgtctctcaaatttcaggaatcttctcctttaattaacccatcaatctctcttggaaataatttgaaaaagtaaatttayactcagattctaattttaatacagaagtaagttatagctcagtgcaccacaaatttgagacagagacggagacatcccagccccttttctggaacaggaa

SEQ ID NO: 9084 - DNA, 201 bp, Homo sapiens
agctctctaatggtggtgtgacccccacattactttcagtgtcttcctcaagacacaccctgggacacactatgattttttttttttttttttttgccagratgtgggcagcgtcagaggtttccctttggctttcagcacaatgagagtcctgactccacagactagggacccagtgtgggggtgactccacttaacagt

SEQ ID NO: 9085 - DNA, 201 bp, Homo sapiens
ctcctttaattaacccatcaatctctcttggaaataatttgaaaaagtaaatttatactcagattctaattttaatacagaagtaagttatagctcagtgsaccacaaatttgagacagagacggagacatcccagccccttttctggaacaggaaaggtgattggggaaggaatgcagttcagcatgaggaagagggtca

SEQ ID NO: 9086 - DNA, 201 bp, Homo sapiens
ctcatcaggcttcctcagggacaggttgctggattatgtagagacaatagacaaccccaacaccatcccacatccttcagctctctaatggtggtgtgacbcccacattactttcagtgtcttcctcaagacacaccctgggacacactatgattttttttttttttttttttgccaggatgtgggcagcgtcagaggttt

SEQ ID NO: 9087 - DNA, 201 bp, Homo sapiens
gcaaggacaaccaggccagcaacgatacccatgatggggatggtgggcagggaagactgctctgggaaaggaggtgaaggtgagggtctctgacccccagscctcaccaccgaccctgttaaaggtcttcagagaggctcctgctttccctaacagacatgatgcctccatctccctccttactccatctcagcatgaggg

SEQ ID NO: 9088 - DNA, 201 bp, Homo sapiens
tagaagcccagggcccagcacctcagggtggcctcatagtcaaagacagggtggtgggtcacgtgtgtcttgggggggtctgaaaggaagagtcagaaaaytcaagcactttgcatctctcatgggacactccagcagcacctggatgtgaccatcctaagaatgaaccagatacctggggtggggaagggagcacagaac

SEQ ID NO: 9089 - DNA, 201 bp, Homo sapiens
aggaggcacccacagcaggggcagtgcaggtctgtggtcgctcctgctctcacctgtggtgtctcctgaagagggattgtcagttctggttccccgtgggygggaacggttgccttgtaggttactggggcactggccaggaaaggggtgtgaaagttatgtgctaatttctcaaaattcctgctttaaatgctgatgtcc

SEQ ID NO: 9090 - DNA, 201 bp, Homo sapiens
cgctccatatcccctttctaattggagtggaaagaaatgcactcaccaaatccatagctgcacgctgtgtgcccgaggctttattattctgctctgcagtkatatccagacaacataaaagctgcaattataattcctgcttggccaggcctggagtaatctcattcattctttagtcctcatcaggcttcctcagggaca

SEQ ID NO: 9091 - DNA, 201 bp, Homo sapiens
gttgtggatcccacatggatgtgaatcgctccatatcccctttctaattggagtggaaagaaatgcactcaccaaatccatagctgcacgctgtgtgcccraggctttattattctgctctgcagtgatatccagacaacataaaagctgcaattataattcctgcttggccaggcctggagtaatctcattcattcttta

SEQ ID NO: 9092 - DNA, 201 bp, Homo sapiens
aggggagttacaatagccctgagaaaaaactataaataaatgtgttgtggatcccacatggatgtgaatcgctccatatcccctttctaattggagtggaragaaatgcactcaccaaatccatagctgcacgctgtgtgcccgaggctttattattctgctctgcagtgatatccagacaacataaaagctgcaattata

SEQ ID NO: 9093 - DNA, 201 bp, Homo sapiens
atgaaccctccaggcctttccaccagctagctatagagccttggacacatcttggccatagctggccctgacagacacttgcccagtgggtgagtgctcartgaacccctctgagccagttgcctcacccaaccagtgatataattccttccttgcagaagaataagtgaaaaaaggcacagtgccaagagaatcagacac

SEQ ID NO: 9094 - DNA, 201 bp, Homo sapiens
aagaatcttttgcctaactacccaaagtaataaaaattttctcctgtgttttcttttagaaattttatagttttaactcataaattttagctgtttaggtbtctaatttgtttgagctgatattttatatggtgttaaatgtaacattgtgttacctatgcaacttcattgaaaatcaattgacaaagaaagtaagaatat

SEQ ID NO: 9095 - DNA, 201 bp, Homo sapiens
gcctgtgattcattttgagtttttttttttttgtataaagcgtgaggtttgggctcagcctattttttttccactgtggttgtccagttgctccagcaccrtttgttgggaaagctctccttccttcattgaattgtgtttgtgcttttgtaaatgtcagttgagcatatttgtgtgttttgctcattttcagttgagttg

SEQ ID NO: 9096 - DNA, 201 bp, Homo sapiens
agaattcactcactatcattagaacagcatgatccaatcacctcccatgaggtccctccttcaatactggggattacaattcgcatgacaattgaagatgwgatttgggtgggaacacagaaccaggccatatcagaagtgcatcattaagtccaagccacactcaagagagggaattaagctgcacctctggaagggagc

SEQ ID NO: 9097 - DNA, 201 bp, Homo sapiens
atgcttaactcgaattgagaatcaaattttttccaaaaacggctcaggggcattctattgtaaacttaacatttttgggtgtggtattgcatgagatgtgrtagaagtgatttggacactactacagttctaaatagcactgctattatgtgcttctgaagctttcttttttttttttttttagctgtcttattttgcttt

SEQ ID NO: 9098 - DNA, 201 bp, Homo sapiens
agggagcacagaacccagacaccagcctggacacgggcacctgggataatctcctattccttggaaagttctagtctctgagcgggggagcagggacctcyggttctgacctgagtggaggccaagggactcagaggagctggagtcagacccccacacacattgagtgtgaggcagagaacaaggcctgaggggaaaagt

SEQ ID NO: 9099 - DNA, 201 bp, Homo sapiens
ctcatgagaattcactcactatcattagaacagcatgatccaatcacctcccatgaggtccctccttcaatactggggattacaattcgcatgacaattgragatgagatttgggtgggaacacagaaccaggccatatcagaagtgcatcattaagtccaagccacactcaagagagggaattaagctgcacctctggaa

SEQ ID NO: 9100 - DNA, 201 bp, Homo sapiens
tcctattccttggaaagttctagtctctgagcgggggagcagggacctctggttctgacctgagtggaggccaagggactcagaggagctggagtcagacycccacacacattgagtgtgaggcagagaacaaggcctgaggggaaaagtcctggtgccaaggctgctgtggggtcaaagggaacccctgatcagtcttcc

SEQ ID NO: 9101 - DNA, 201 bp, Homo sapiens
gcctgtgacaccacacctggctcaatgtttgtaattttaactgtgtgttttacattaaagcctgtgattcattttgagtttttttttttttgtataaagcrtgaggtttgggctcagcctattttttttccactgtggttgtccagttgctccagcaccatttgttgggaaagctctccttccttcattgaattgtgtttg

SEQ ID NO: 9102 - DNA, 201 bp, Homo sapiens
aaggttgtcagctgagataagaatggggaaggagggttggatgtgtgagcacagagagaaggtgtgtaagggtcacccaggccaggaggaggctgagggtragccatgcagggagagggtgattgctggccctggtgggggctccccatgtggtttgggtcatgaagttagagaagacaccaacgatgagggacagtgagt

SEQ ID NO: 9103 - DNA, 201 bp, Homo sapiens
cagagggaagcggggaaaagccccttataaaaccatcagatctcatgagaattcactcactatcattagaacagcatgatccaatcacctcccatgaggtycctccttcaatactggggattacaattcgcatgacaattgaagatgagatttgggtgggaacacagaaccaggccatatcagaagtgcatcattaagtcc

SEQ ID NO: 9104 - DNA, 201 bp, Homo sapiens
gacccccacacacattgagtgtgaggcagagaacaaggcctgaggggaaaagtcctggtgccaaggctgctgtggggtcaaagggaacccctgatcagtcytccagggattgtcttcccctccactccctcagagacttcatcccttaattgtcccagagagcaggacgggccctcagaatcactctctggtacaggatct

SEQ ID NO: 9105 - DNA, 201 bp, Homo sapiens
ccaggaaacttacaatcatggcagaagtggaagaaaacctgtccttcttcacatggtggcaggagagagaaatgcagagggaagcggggaaaagccccttrtaaaaccatcagatctcatgagaattcactcactatcattagaacagcatgatccaatcacctcccatgaggtccctccttcaatactggggattacaat

SEQ ID NO: 9106 - DNA, 201 bp, Homo sapiens
cccagagagcaggacgggccctcagaatcactctctggtacaggatctggaaacccaggaggattcctctccctcaggaccagagggagggcgatattctrgtgttggtcccattttcctcctctccttgtgctaggccaggctgagaggtctacaggagatcagggaggcgccccactgcccctggtacccgcgcgctgc

SEQ ID NO: 9107 - DNA, 201 bp, Homo sapiens
tgcatggctgaggaggccgccccaggaaacttacaatcatggcagaagtggaagaaaacctgtccttcttcacatggtggcaggagagagaaatgcagagsgaagcggggaaaagccccttataaaaccatcagatctcatgagaattcactcactatcattagaacagcatgatccaatcacctcccatgaggtccctcc

SEQ ID NO: 9108 - DNA, 201 bp, Homo sapiens
gtaatttataaaggaaagaggtttaactgactcccagttctgcatggctgaggaggccgccccaggaaacttacaatcatggcagaagtggaagaaaaccygtccttcttcacatggtggcaggagagagaaatgcagagggaagcggggaaaagccccttataaaaccatcagatctcatgagaattcactcactatcat

SEQ ID NO: 9109 - DNA, 201 bp, Homo sapiens
tggcctcgctctggttgtagtagccgcgcagggtctgcaggttcattctgtcagtctgtgcgtgggccttggtgttccgtgtctcctcttcccaatactcyggcccctcctgctccacccacggcgcccgcggctccatcctcggacacgccgagtcgctgtcgaaccgcacgaactgcgtgtcgtccacgtagcccatgg

SEQ ID NO: 9110 - DNA, 201 bp, Homo sapiens
tagtctgttctcacactgctataaagaaatacctgagactgggtaatttataaaggaaagaggtttaactgactcccagttctgcatggctgaggaggccrccccaggaaacttacaatcatggcagaagtggaagaaaacctgtccttcttcacatggtggcaggagagagaaatgcagagggaagcggggaaaagcccc

SEQ ID NO: 9111 - DNA, 201 bp, Homo sapiens
gtccacgtagcccatggcgatgaagcggggctccccgcggccgggccgggacacggcggcgctgaaatacctcatggagtgggagcctgggggcgaggagrggttgagacccgcccgaccctcctcccggcgcggctgccgagtcctgcgcccccgccgggccggcccctccctcctccgcgcaggggccgtttccctcct

SEQ ID NO: 9112 - DNA, 201 bp, Homo sapiens
gcgctgaaatacctcatggagtgggagcctgggggcgaggaggggttgagacccgcccgaccctcctcccggcgcggctgccgagtcctgcgcccccgccrggccggcccctccctcctccgcgcaggggccgtttccctcctgaccccgcactcacccgcccaggtctcggtcagggtcagggcccccgagagcagcagg

SEQ ID NO: 9113 - DNA, 201 bp, Homo sapiens
cagagctcatgatcccagagacagagagagagaaggtggaagccacagggagttttaggttctacacccagagtcacaagctgttacgtcggcattgctcmatcagttagaagttgtattagtctgttctcacactgctataaagaaatacctgagactgggtaatttataaaggaaagaggtttaactgactcccagttc

SEQ ID NO: 9114 - DNA, 201 bp, Homo sapiens
tgaaatacctcatggagtgggagcctgggggcgaggaggggttgagacccgcccgaccctcctcccggcgcggctgccgagtcctgcgcccccgccgggcsggcccctccctcctccgcgcaggggccgtttccctcctgaccccgcactcacccgcccaggtctcggtcagggtcagggcccccgagagcagcaggaaga

SEQ ID NO: 9115 - DNA, 201 bp, Homo sapiens
ccccagagctcatgatcccagagacagagagagagaaggtggaagccacagggagttttaggttctacacccagagtcacaagctgttacgtcggcattgytctatcagttagaagttgtattagtctgttctcacactgctataaagaaatacctgagactgggtaatttataaaggaaagaggtttaactgactcccag

SEQ ID NO: 9116 - DNA, 201 bp, Homo sapiens
ctgcattcccctaaacacttggcacttgttaacccataaaacttcacttcagtggccactcttgaagctctgtaaggtttatcttcacatactggagtgcrtgtgttttgccaatgactccagtgcactttctacctgctgctcattcaccgcagtcaacatgaagttgtcagtgaaatgagctgatttaatatcctatag

SEQ ID NO: 9117 - DNA, 201 bp, Homo sapiens
tggaatgtggtgttgtcagaactcaaagaggctcatcaggcagtgtgcttccttccttctggtgaggatgcaagatgaaacagtttgtcttttaccttggrgggaacacacctgcattcccctaaacacttggcacttgttaacccataaaacttcacttcagtggccactcttgaagctctgtaaggtttatcttcacat

SEQ ID NO: 9118 - DNA, 201 bp, Homo sapiens
tcctgtgtaggccctacttgaagctggcctcctcctatgtcacctagagtgtttgccaaagcacgtacctagatgtggaatgtggtgttgtcagaactcavagaggctcatcaggcagtgtgcttccttccttctggtgaggatgcaagatgaaacagtttgtcttttaccttggggggaacacacctgcattcccctaaa

SEQ ID NO: 9119 - DNA, 201 bp, Homo sapiens
cccagggggtctgagggacgctggctgcttgcaccatggcctggatctgctgcagggtcctttcctgtgtaggccctacttgaagctggcctcctcctatrtcacctagagtgtttgccaaagcacgtacctagatgtggaatgtggtgttgtcagaactcaaagaggctcatcaggcagtgtgcttccttccttctggtg

SEQ ID NO: 9120 - DNA, 201 bp, Homo sapiens
cactgtgactctcccactggtgcttggttctgctccatcctgcatctttccccaccactggcaccaccagccccagggggtctgagggacgctggctgctygcaccatggcctggatctgctgcagggtcctttcctgtgtaggccctacttgaagctggcctcctcctatgtcacctagagtgtttgccaaagcacgtac

SEQ ID NO: 9121 - DNA, 201 bp, Homo sapiens
ctctgctgtggatgacatgatcttactccagaatcccaggcccttcactgtgactctcccactggtgcttggttctgctccatcctgcatctttccccacmactggcaccaccagccccagggggtctgagggacgctggctgcttgcaccatggcctggatctgctgcagggtcctttcctgtgtaggccctacttgaag

SEQ ID NO: 9122 - DNA, 201 bp, Homo sapiens
accctacataggttgggagagggagaaaagaaactgcggagttggggaatccccaaggctgggactccccaatccatacaccgccttcggggcctgagacyctgagagccacgcctggggccctgggacttcgccctgacccctctgcttctgtgccaagcgctctgtctcaatgtctccctgagtcttggcccaagagct

SEQ ID NO: 9123 - DNA, 201 bp, Homo sapiens
tttggtttgatgcagtagcccaaaatgcttaactcgaattgagaatcaaattttttccaaaaacggctcaggggcattctattgtaaacttaacatttttkggtgtggtattgcatgagatgtggtagaagtgatttggacactactacagttctaaatagcactgctattatgtgcttctgaagctttcttttttttttt

SEQ ID NO: 9124 - DNA, 201 bp, Homo sapiens
ccgggccgggacatggtggtgtagaaatacctcatggagtgggagcctgggagcgaggaggagctgagacccgcccgaccctcctccctgcgcggctcccygggtcctgcgcccccgccgggcgggcccctcgctcctcccgaccatttccctgcagaccctgcactcacgcgcccaggtctgggtcagggccagggcccc

SEQ ID NO: 9125 - DNA, 201 bp, Homo sapiens
gccaattttcttattgacatatcatcttcagaaaacatttgcctacacttaaaaaaaaaatacacacacactgctctgtctatggagtagccattcttttstttctttacttctctaataaacttgctttcacttagaaaaaattgcataatcagattgcttctcatttacaaaaatgggaatctcatacttcagtcaaca

SEQ ID NO: 9126 - DNA, 201 bp, Homo sapiens
tcctccctgcgcggctccctgggtcctgcgcccccgccgggcgggcccctcgctcctcccgaccatttccctgcagaccctgcactcacgcgcccaggtcwgggtcagggccagggcccctgagagcagcaggaggagggttcggggcgccatgagcaccatcctcggcgtctggggagaatctgagtcccggtgggtgcg

SEQ ID NO: 9127 - DNA, 201 bp, Homo sapiens
gactaaattaatttttgtcgactgaatgaatgaaatatgagtgtattaaattgcattacagataattataaagtgcaaaacacggaaaaagttcagaaaawttttattttatgtaactagtgtgcatatcaattcatcaattcattcgtgcactaccatgcctggcgaaacaacacccatttatctgcttatagttccttg

SEQ ID NO: 9128 - DNA, 201 bp, Homo sapiens
tggacagaaggagacaaggtttactggatgtgccgtagaccacaggcaatctaaggagagttaagcaaggccatggaggagtccttgagctacagttggcyatcagaggagtccctggtctcccaggaatgtcctgctttcgtgtcactggtgtgatctgtcactggttgggaacagcccattggaagcaggacctcagca

SEQ ID NO: 9129 - DNA, 201 bp, Homo sapiens
gtcctggagggaaacctgttttcacagtaataccaagatgccatttgcctgtttcattatgttgacttttccattaatgctgcaaatgccaaggtcggtarcacacccagcaccttagcagaaccaaggcagtggctccaaactgcagtcccatttaagaatgcctttgatggagcagtaaaatatttatgttcattaaat

SEQ ID NO: 9130 - DNA, 201 bp, Homo sapiens
attggaagcaggacctcagcaccaatgctactgaggatgtcagagcacaggagcagggccttgggagattacccagcattactcaaaccttctgccctgaygggtctgggtccttggaaatcaagctgtctcaggctgaattgctggatgattctgctcacacttacaatgaggtaagggaaaccagaaggcccccaggtg

SEQ ID NO: 9131 - DNA, 201 bp, Homo sapiens
ccattttgaaagtgtggccccctgagctgccttcagagagtcctggagggaaacctgttttcacagtaataccaagatgccatttgcctgtttcattatgbtgacttttccattaatgctgcaaatgccaaggtcggtagcacacccagcaccttagcagaaccaaggcagtggctccaaactgcagtcccatttaagaat

SEQ ID NO: 9132 - DNA, 201 bp, Homo sapiens
ctcttgtaaatacctttaataacaatgttcttcaataagttaacacagttgagaacatagagtaactagatcaaatagttccaagacttcagtgccataaraatgatgccttgaaaataagtctttgttttgtctaagatgtctcaaatttagtggaagtatgccccaagtgccaattttcttattgacatatcatcttca

SEQ ID NO: 9133 - DNA, 201 bp, Homo sapiens
ggccttgggagattacccagcattactcaaaccttctgccctgacgggtctgggtccttggaaatcaagctgtctcaggctgaattgctggatgattctgytcacacttacaatgaggtaagggaaaccagaaggcccccaggtggatctctggtttccacacacacttccgccctcattgtgtgaaagtagccatgcctt

SEQ ID NO: 9134 - DNA, 201 bp, Homo sapiens
gaatgagggaaaaaaaagagcgagagagagtgctgaatctgaataggctaggggttgggtctcactaggaactataattgatctctgccattttgaaagtrtggccccctgagctgccttcagagagtcctggagggaaacctgttttcacagtaataccaagatgccatttgcctgtttcattatgttgacttttccatt

SEQ ID NO: 9135 - DNA, 201 bp, Homo sapiens
taggagcaccgcctagcctgcagatcaggaatgtcaacagcacccggagaggtgctggctgagtttctgagagcaggacatgaaaacacccatggaatagragcctatccctgtgaagatgaacctctggcccttccaggatggaagtagctaaatgtagtcaacttgttacttagtggctagttagtcacctaaagaaat

SEQ ID NO: 9136 - DNA, 201 bp, Homo sapiens
caggaaggtcagctggaagcatcctagaccctgtgcaggctaagggaagttcagtaagggtggcagggagccctggagcttcagtcagccttcagaagagraatgtcctgccttagtttctgccctactttcctcaatcattggctggaaaaagccaggggtgggcatagtctcagagcaaatgtggcaatagatttcaga

SEQ ID NO: 9137 - DNA, 201 bp, Homo sapiens
tgaaaatatatacaattataagttggaagaatgagggaaaaaaaagagcgagagagagtgctgaatctgaataggctaggggttgggtctcactaggaacbataattgatctctgccattttgaaagtgtggccccctgagctgccttcagagagtcctggagggaaacctgttttcacagtaataccaagatgccatttg

SEQ ID NO: 9138 - DNA, 201 bp, Homo sapiens
tgctttcatgcatataaagagatattaatcagatatatcagagtgataacttgaattttactgcactattctttcagcttctttgcacatttgaaaatatrtacaattataagttggaagaatgagggaaaaaaaagagcgagagagagtgctgaatctgaataggctaggggttgggtctcactaggaactataattgat

SEQ ID NO: 9139 - DNA, 201 bp, Homo sapiens
cagctgactttccccagagctcatgatcccagagacagagagagagaaggtggaagccacagggagttttaggttctacacccagagtcacaagctgttabgtcggcattgctctatcagttagaagttgtattagtctgttctcacactgctataaagaaatacctgagactgggtaatttataaaggaaagaggtttaa

SEQ ID NO: 9140 - DNA, 201 bp, Homo sapiens
ttttaaatttttaaattcgtatatattcatggggcacaggtgcagttttgctacattgctatattgagttgtggtaaagtcagggccttcagtgcatccascactggagacagatacattgaccccaacaagaaactcctctacgatacacccactgccaaccactcttacccttctgggtctctattgtctatcattcca

SEQ ID NO: 9141 - DNA, 201 bp, Homo sapiens
gccagatggaccttcctgcagggctgctcatggcacagcagctgactttccccagagctcatgatcccagagacagagagagagaaggtggaagccacagkgagttttaggttctacacccagagtcacaagctgttacgtcggcattgctctatcagttagaagttgtattagtctgttctcacactgctataaagaaat

SEQ ID NO: 9142 - DNA, 201 bp, Homo sapiens
cttagccagatggaccttcctgcagggctgctcatggcacagcagctgactttccccagagctcatgatcccagagacagagagagagaaggtggaagccrcagggagttttaggttctacacccagagtcacaagctgttacgtcggcattgctctatcagttagaagttgtattagtctgttctcacactgctataaag

SEQ ID NO: 9143 - DNA, 201 bp, Homo sapiens
tcttagccagatggaccttcctgcagggctgctcatggcacagcagctgactttccccagagctcatgatcccagagacagagagagagaaggtggaagckacagggagttttaggttctacacccagagtcacaagctgttacgtcggcattgctctatcagttagaagttgtattagtctgttctcacactgctataaa

SEQ ID NO: 9144 - DNA, 201 bp, Homo sapiens
ctaggcctgcatcatctgagggcttcactggggctgaggattcacatgaaacatggatcagtcacatggctgttggaaaaggcctagttcgttgtaattgrgtcccagaaggcctcagttcttagccagatggaccttcctgcagggctgctcatggcacagcagctgactttccccagagctcatgatcccagagacaga

SEQ ID NO: 9145 - DNA, 201 bp, Homo sapiens
gttgcttctaacagggggcatatgtctctgctgtggatgacatgatcttactccagaatcccaggcccttcactgtgactctcccactggtgcttggttcwgctccatcctgcatctttccccaccactggcaccaccagccccagggggtctgagggacgctggctgcttgcaccatggcctggatctgctgcagggtcc

SEQ ID NO: 9146 - DNA, 201 bp, Homo sapiens
agttgtcagtctaggcctgcatcatctgagggcttcactggggctgaggattcacatgaaacatggatcagtcacatggctgttggaaaaggcctagttcrttgtaattgagtcccagaaggcctcagttcttagccagatggaccttcctgcagggctgctcatggcacagcagctgactttccccagagctcatgatcc

SEQ ID NO: 9147 - DNA, 201 bp, Homo sapiens
aatccaggagaagtttccctgagtgcttcttgctaagggcctctcacaaggttgcagtccagttgtcagtctaggcctgcatcatctgagggcttcactgsggctgaggattcacatgaaacatggatcagtcacatggctgttggaaaaggcctagttcgttgtaattgagtcccagaaggcctcagttcttagccagat

SEQ ID NO: 9148 - DNA, 201 bp, Homo sapiens
gtacaaggaacactaaaagttgcttctaacagggggcatatgtctctgctgtggatgacatgatcttactccagaatcccaggcccttcactgtgactctbccactggtgcttggttctgctccatcctgcatctttccccaccactggcaccaccagccccagggggtctgagggacgctggctgcttgcaccatggcct

SEQ ID NO: 9149 - DNA, 201 bp, Homo sapiens
aaaatgtaccatttcaaaacaacaaatattgatcatctcccacagtttccaattgtcaggaatccaggagaagtttccctgagtgcttcttgctaagggcmtctcacaaggttgcagtccagttgtcagtctaggcctgcatcatctgagggcttcactggggctgaggattcacatgaaacatggatcagtcacatggct

SEQ ID NO: 9150 - DNA, 201 bp, Homo sapiens
agttgcctggtgtcctgtggtcaagctttctatcaaatcagtacaaggaacactaaaagttgcttctaacagggggcatatgtctctgctgtggatgacahgatcttactccagaatcccaggcccttcactgtgactctcccactggtgcttggttctgctccatcctgcatctttccccaccactggcaccaccagccc

SEQ ID NO: 9151 - DNA, 201 bp, Homo sapiens
atagttgcctggtgtcctgtggtcaagctttctatcaaatcagtacaaggaacactaaaagttgcttctaacagggggcatatgtctctgctgtggatgayatgatcttactccagaatcccaggcccttcactgtgactctcccactggtgcttggttctgctccatcctgcatctttccccaccactggcaccaccagc

SEQ ID NO: 9152 - DNA, 201 bp, Homo sapiens
tgctgttgggcctgtgcaatttatgatgttgtgggtcacaaaggcacttggaaccacatagttgcctggtgtcctgtggtcaagctttctatcaaatcagkacaaggaacactaaaagttgcttctaacagggggcatatgtctctgctgtggatgacatgatcttactccagaatcccaggcccttcactgtgactctcc

SEQ ID NO: 9153 - DNA, 201 bp, Homo sapiens
tcacttcatgatgaatgctgttgggcctgtgcaatttatgatgttgtgggtcacaaaggcacttggaaccacatagttgcctggtgtcctgtggtcaagcwttctatcaaatcagtacaaggaacactaaaagttgcttctaacagggggcatatgtctctgctgtggatgacatgatcttactccagaatcccaggccct

SEQ ID NO: 9154 - DNA, 201 bp, Homo sapiens
atcagacttgggtgttttctgtgggtgtaaacgtgggattcaagctcaatccaggtggaccattttcacttcatgatgaatgctgttgggcctgtgcaatktatgatgttgtgggtcacaaaggcacttggaaccacatagttgcctggtgtcctgtggtcaagctttctatcaaatcagtacaaggaacactaaaagttg

SEQ ID NO: 9155 - DNA, 201 bp, Homo sapiens
cagtgccacatcagacttgggtgttttctgtgggtgtaaacgtgggattcaagctcaatccaggtggaccattttcacttcatgatgaatgctgttgggcbtgtgcaatttatgatgttgtgggtcacaaaggcacttggaaccacatagttgcctggtgtcctgtggtcaagctttctatcaaatcagtacaaggaacac

SEQ ID NO: 9156 - DNA, 201 bp, Homo sapiens
tgctaaggacacagattaacacatagcaccatgacagtgtatgatattatcgctgttggttttttttttttttttttttagatggagttttgctctcgttrcccatgctggagtgcagtggcaccatctcggctcactgcaacctccacctcctgagttcaagcgattctcctgcctcagcctccagagtagctgagatta

SEQ ID NO: 9157 - DNA, 201 bp, Homo sapiens
attgttgtttggtgtctcttggtcaagcattctatcaaatcaggacaagtaacactaaatgttgcttctaacagggggcatatgtctctgctgtggatgayatgatcttactccagaatcccaggccctccattgtgactctcccactggtgcttggttcagctccatcctgcatctttccccaccactggcaccaccagc

SEQ ID NO: 9158 - DNA, 201 bp, Homo sapiens
agcttctcctctgccttcctcctctgcagaatctgactccaaccagggcaggctctctgcttttaatggctcttgtgatttgattgggcccacacagagaktccagcagaatctccctattttaaggtccttaatcttcattacatgagtaatatcccttttgccacgcaatgcaacctgttcacaggttccaacgattaa

SEQ ID NO: 9159 - DNA, 201 bp, Homo sapiens
tgctgttgggcctgtgcaatttatgactttgtgggtcacacagccacttggaaccacattgttgtttggtgtctcttggtcaagcattctatcaaatcagkacaagtaacactaaatgttgcttctaacagggggcatatgtctctgctgtggatgacatgatcttactccagaatcccaggccctccattgtgactctcc

SEQ ID NO: 9160 - DNA, 201 bp, Homo sapiens
gaaccctcagtgagacaagaaatctcagacccacccttcatcccttccccacctgagctcttcctcctccacctcacagcagcgaccacagctccagtgawcacagctccaaagagaaccaggccagcaatgatgcccacgatggggatggtgggctgggaagacggctctgggaaaagaggggaaggtgaggggccctga

SEQ ID NO: 9161 - DNA, 201 bp, Homo sapiens
gcaggtggagggcagaaccacagtgtttagggcctgcctttgtgtgcaggtgtctctacaggtgaggtgggactggggactgaggaagagaaggactgtgmgtgtgacccagcccagtcctggaaggacatggagccagggccagagcctctctttggggagtcctcctgctgtcagagctggccaggcttgagaggaggg

SEQ ID NO: 9162 - DNA, 201 bp, Homo sapiens
gtatctacaaagagagatgttattttatttttaaatttttaaattcgtatatattcatggggcacaggtgcagttttgctacattgctatattgagttgtrgtaaagtcagggccttcagtgcatccaccactggagacagatacattgaccccaacaagaaactcctctacgatacacccactgccaaccactcttaccc

SEQ ID NO: 9163 - DNA, 201 bp, Homo sapiens
acatacacacacattcacacacatgctatgcaaacatgtctacctgtatctacaaagagagatgttattttatttttaaatttttaaattcgtatatatthatggggcacaggtgcagttttgctacattgctatattgagttgtggtaaagtcagggccttcagtgcatccaccactggagacagatacattgaccccaa

SEQ ID NO: 9164 - DNA, 201 bp, Homo sapiens
tagacatgttctttcatgtttatattcaggtttgttgtcacatagacatttatccatgcgtgttttatgtttgttactttagaatggctcagtcacaaaakcttaatctcttcattcctgctgcctctctacacacacatacacacacattcacacacatgctatgcaaacatgtctacctgtatctacaaagagagatgt

SEQ ID NO: 9165 - DNA, 201 bp, Homo sapiens
tgtcttgtgaaaatgtattagttatttactattgcataacaaattatgtaaaatgtaccatttcaaaacaacaaatattgatcatctcccacagtttccarttgtcaggaatccaggagaagtttccctgagtgcttcttgctaagggcctctcacaaggttgcagtccagttgtcagtctaggcctgcatcatctgaggg

SEQ ID NO: 9166 - DNA, 201 bp, Homo sapiens
gcaaatgcaaattaacatgtaataatacatcctgtcttgtgaaaatgtattagttatttactattgcataacaaattatgtaaaatgtaccatttcaaaabaacaaatattgatcatctcccacagtttccaattgtcaggaatccaggagaagtttccctgagtgcttcttgctaagggcctctcacaaggttgcagtcc

SEQ ID NO: 9167 - DNA, 201 bp, Homo sapiens
ctccagcctgggtgacagagtgagaccctgtctcaaaaataataataatgatgatgataaatttagagcaaatgcaaattaacatgtaataatacatcctstcttgtgaaaatgtattagttatttactattgcataacaaattatgtaaaatgtaccatttcaaaacaacaaatattgatcatctcccacagtttccaat

SEQ ID NO: 9168 - DNA, 201 bp, Homo sapiens
cctgttccctgcctgcctgtgttcgcagggtaaccagtaagggagctggggtagggaattctttcataggttatctagccagagatatgtttatagacatrttctttcatgtttatattcaggtttgttgtcacatagacatttatccatgcgtgttttatgtttgttactttagaatggctcagtcacaaaatcttaatc

SEQ ID NO: 9169 - DNA, 201 bp, Homo sapiens
ggtgatcatgccactgcactccagcctgggtgacagagtgagaccctgtctcaaaaataataataatgatgatgataaatttagagcaaatgcaaattaayatgtaataatacatcctgtcttgtgaaaatgtattagttatttactattgcataacaaattatgtaaaatgtaccatttcaaaacaacaaatattgatca

SEQ ID NO: 9170 - DNA, 201 bp, Homo sapiens
cagaggaaggcagatttgttgactccagaagttcaagatcagcctgggcaacatggggaaacccccatctctacaaaaaattagaaaattagccaggcatrgtggttcatgattgtactcccagctactcaagaggctgaggtcagagggtcccttgagcccaggaggtctacactgcagtgcatggtgatcatgccactg

SEQ ID NO: 9171 - DNA, 201 bp, Homo sapiens
gcagaggaaggcagatttgttgactccagaagttcaagatcagcctgggcaacatggggaaacccccatctctacaaaaaattagaaaattagccaggcahggtggttcatgattgtactcccagctactcaagaggctgaggtcagagggtcccttgagcccaggaggtctacactgcagtgcatggtgatcatgccact

SEQ ID NO: 9172 - DNA, 201 bp, Homo sapiens
gagttccaggatctgagaggccaggaagcgagggcatcttctctgctgtgtgggtgtctattgctgccataaaaattaccacaaaccaaatggctttaaamagcacctatgtatcatggcacagtcgtgtggattgcaagtccacccagtctcatggggctaagatcaacatacgggaaggtctgcattcctttccataga

SEQ ID NO: 9173 - DNA, 201 bp, Homo sapiens
aatcctagcattgtggaaggcagaggaaggcagatttgttgactccagaagttcaagatcagcctgggcaacatggggaaacccccatctctacaaaaaabtagaaaattagccaggcatggtggttcatgattgtactcccagctactcaagaggctgaggtcagagggtcccttgagcccaggaggtctacactgcagt

SEQ ID NO: 9174 - DNA, 201 bp, Homo sapiens
ccagatttggtggctcgcacctgcaatcctagcattgtggaaggcagaggaaggcagatttgttgactccagaagttcaagatcagcctgggcaacatggrgaaacccccatctctacaaaaaattagaaaattagccaggcatggtggttcatgattgtactcccagctactcaagaggctgaggtcagagggtcccttg

SEQ ID NO: 9175 - DNA, 201 bp, Homo sapiens
tcctatgggcccttctggattcatttattagtgctagccagtttttatctgcttgtgaattctacagacagggtcatgttatctgtgaatagaattgtatrttttcctttttatctggatgcctttaatttttaattttctgccttattgcactggctacaatctccagtataatattaaataaaagtggtgggattggac

SEQ ID NO: 9176 - DNA, 201 bp, Homo sapiens
ataaaatacatccttttcagccacgaaaattctccttaccttttaaaactaagttacatatttatatcttttaattaatttaggccagatttggtggctcrcacctgcaatcctagcattgtggaaggcagaggaaggcagatttgttgactccagaagttcaagatcagcctgggcaacatggggaaacccccatctcta

SEQ ID NO: 9177 - DNA, 201 bp, Homo sapiens
cagttgagcatatttgtgtgttttgctcattttcagttgagttgctcatcttcttacacattgagtttaagaacttgccacattattctggaaacatgttyttcaacacaaatgtaatttgtgataaattgtgaaatattttctccctgtctatggcttgtcttctcattctctcaatgtcttttggagcactcaagtttt

SEQ ID NO: 9178 - DNA, 201 bp, Homo sapiens
tggatcttctttttgtgttcacttgggacacagttgcaaattgaagttcaagtaaagtaatcattgtgaacggtaataaaatacatccttttcagccacgraaattctccttaccttttaaaactaagttacatatttatatcttttaattaatttaggccagatttggtggctcgcacctgcaatcctagcattgtggaa

SEQ ID NO: 9179 - DNA, 201 bp, Homo sapiens
atggtgaaggctggctaactgccatttgtctgtttggttgttcagtgccacatcagacttgggtgttttctgtgggtgtaaacgtgggattcaagctcaayccaggtggaccattttcacttcatgatgaatgctgttgggcctgtgcaatttatgatgttgtgggtcacaaaggcacttggaaccacatagttgcctggt

SEQ ID NO: 9180 - DNA, 201 bp, Homo sapiens
tcttccctgcccagccacctgtcccagagctggagacgcccaggtttaagccagagactttggatactttccttgatggtgacataatttttgtcttcttctctcctggaagagaagccccagaaccatcagagtgatccagtctgcccactcttcttattattctgtctctccaatcactctccctgagctggactctcc

SEQ ID NO: 9181 - DNA, 201 bp, Homo sapiens
ctgtggttgctccattcatgcactcatcctaccaggcctgggctgacccatggtgaaggctggctaactgccatttgtctgtttggttgttcagtgccacwtcagacttgggtgttttctgtgggtgtaaacgtgggattcaagctcaatccaggtggaccattttcacttcatgatgaatgctgttgggcctgtgcaatt

SEQ ID NO: 9182 - DNA, 201 bp, Homo sapiens
gtcttccctgcccagccacctgtcccagagctggagacgcccaggtttaagccagagactttggatactttccttgatggtgacataatttttgtcttcttctctcctggaagagaagccccagaaccatcagagtgatccagtctgcccactcttcttattattctgtctctccaatcactctccctgagctggactctc

SEQ ID NO: 9183 - DNA, 201 bp, Homo sapiens
aagtcagtgctgctggcactcatgcctgccactgtggttgctccattcatgcactcatcctaccaggcctgggctgacccatggtgaaggctggctaactkccatttgtctgtttggttgttcagtgccacatcagacttgggtgttttctgtgggtgtaaacgtgggattcaagctcaatccaggtggaccattttcact

SEQ ID NO: 9184 - DNA, 201 bp, Homo sapiens
ttggacattcagaggtggcagcagctggatctgccttggtagggggaagtcagtgctgctggcactcatgcctgccactgtggttgctccattcatgcacycatcctaccaggcctgggctgacccatggtgaaggctggctaactgccatttgtctgtttggttgttcagtgccacatcagacttgggtgttttctgtgg

SEQ ID NO: 9185 - DNA, 201 bp, Homo sapiens
ggcagaagagccgtgggaggagctgctgagctctccaggccgccctttacctcctgcctccccagcccagttcatcttgatcctctcctcactagcccagktctccccaaggtcagggctcatagagcagcaggagttgggttccgggacgcgggatccggcttctctgggaatcttggattccaggaaggatcctggaga

SEQ ID NO: 9186 - DNA, 201 bp, Homo sapiens
ccactagggcacatcatgggcctaaaatgctgatgagttggacattcagaggtggcagcagctggatctgccttggtagggggaagtcagtgctgctggcmctcatgcctgccactgtggttgctccattcatgcactcatcctaccaggcctgggctgacccatggtgaaggctggctaactgccatttgtctgtttggt

SEQ ID NO: 9187 - DNA, 201 bp, Homo sapiens
ccccatcccgctgccaggtcagtatgatctccgcagggtagaagcccagggcccagcacctcagggtggcctcatagtcaaagacagggtggtgggtcacrtgtgtcttgggggggtctgaaaggaagagtcagaaaactcaagcactttgcatctctcatgggacactccagcagcacctggatgtgaccatcctaagaa

SEQ ID NO: 9188 - DNA, 201 bp, Homo sapiens
gctggatcttctttttgtgttcacttgggacacagttgcaaattgaagttcaagtaaagtaatcattgtgaacggtaataaaatacatccttttcagccabgaaaattctccttaccttttaaaactaagttacatatttatatcttttaattaatttaggccagatttggtggctcgcacctgcaatcctagcattgtgg

SEQ ID NO: 9189 - DNA, 201 bp, Homo sapiens
ggaaggtgaatgaccaggagcttgttgttgaggccatcatagaatcagcctagcaagggctggatcttctttttgtgttcacttgggacacagttgcaaaytgaagttcaagtaaagtaatcattgtgaacggtaataaaatacatccttttcagccacgaaaattctccttaccttttaaaactaagttacatatttata

SEQ ID NO: 9190 - DNA, 201 bp, Homo sapiens
aagcagcataaacccagcctaaagtcaactaattgaggcccttaattatatctgctaaatcccttcacagcagcacctatattagagttggttgaataatdgggggaaggtgaatgaccaggagcttgttgttgaggccatcatagaatcagcctagcaagggctggatcttctttttgtgttcacttgggacacagttgc

SEQ ID NO: 9191 - DNA, 201 bp, Homo sapiens
caagcagcataaacccagcctaaagtcaactaattgaggcccttaattatatctgctaaatcccttcacagcagcacctatattagagttggttgaataabggggggaaggtgaatgaccaggagcttgttgttgaggccatcatagaatcagcctagcaagggctggatcttctttttgtgttcacttgggacacagttg

SEQ ID NO: 9192 - DNA, 201 bp, Homo sapiens
ttagtcacctgaggtgcatatcttggcttcctggccagttttcccaaggcctccactgccaccctgcaccctgggtgccctccacactctccaagtgtccwgatgtgtgtgaggagttaagggcaggaagaactattggatcgtggatttaggtgcctttttccacctctgcaggtggcaaggtgtggattcataagctgg

SEQ ID NO: 9193 - DNA, 201 bp, Homo sapiens
ctcacctgattaggacagtccaagcagcataaacccagcctaaagtcaactaattgaggcccttaattatatctgctaaatcccttcacagcagcacctabattagagttggttgaataatggggggaaggtgaatgaccaggagcttgttgttgaggccatcatagaatcagcctagcaagggctggatcttctttttgt

SEQ ID NO: 9194 - DNA, 201 bp, Homo sapiens
acatgggggtggggtggtctccccacctcctcacattatgcctacacgaacacagacacatgcaggtgcctttgcagaaacaaagtcagggttcttcaagycacaaagggaagggcaggaacaactcttgcctctcagtcccacacaaggcagctgtctcacactatagaaaaaaatattcatgaacaaattcatatctgt

SEQ ID NO: 9195 - DNA, 201 bp, Homo sapiens
cccagtcctttcaaggactcacctgattaggacagtccaagcagcataaacccagcctaaagtcaactaattgaggcccttaattatatctgctaaatccvttcacagcagcacctatattagagttggttgaataatggggggaaggtgaatgaccaggagcttgttgttgaggccatcatagaatcagcctagcaaggg

SEQ ID NO: 9196 - DNA, 201 bp, Homo sapiens
aagcgtgaggtttgggctcagcctattttttttccactgtggttgtccagttgctccagcaccatttgttgggaaagctctccttccttcattgaattgtktttgtgcttttgtaaatgtcagttgagcatatttgtgtgttttgctcattttcagttgagttgctcatcttcttacacattgagtttaagaacttgccac

SEQ ID NO: 9197 - DNA, 201 bp, Homo sapiens
ttccctgtacagccccttcattttcaaagcccacagtggaggaaacccctcatgctgaatccctctcacactgtgaatctctatgctcaggaagaacccartcctttcaaggactcacctgattaggacagtccaagcagcataaacccagcctaaagtcaactaattgaggcccttaattatatctgctaaatcccttca

SEQ ID NO: 9198 - DNA, 201 bp, Homo sapiens
ggctcaatgtttgtaattttaactgtgtgttttacattaaagcctgtgattcattttgagtttttttttttttgtataaagcgtgaggtttgggctcagcytattttttttccactgtggttgtccagttgctccagcaccatttgttgggaaagctctccttccttcattgaattgtgtttgtgcttttgtaaatgtcag

SEQ ID NO: 9199 - DNA, 201 bp, Homo sapiens
gggaaactcctgcagaattctcaggaaaggaaactcttccgagctgggcccttggcttagtttgtcttccctgcccagccacctgtcccagagctggagaygcccaggtttaagccagagactttggatactttccttgatggtgacataatttttgtcttcttctctcctggaagagaagccccagaaccatcagagtga

SEQ ID NO: 9200 - DNA, 201 bp, Homo sapiens
gaagatgaacctctggtccttccaggatggaagtaggtaaatgtagtcaacttcttagttaatgactagtcacctaaagaaatagtgccccactagggcabatcatgggcctaaaatgctgatgagttggacattcagaggtggcagcagctggatctgccttggtagggggaagtcagtgctgctggcactcatgcctgc

SEQ ID NO: 9201 - DNA, 201 bp, Homo sapiens
ttggtgttatgtgtaagaactctttgtctagtcttagttctgatggctttttgttaaaagatttgtaattttaattttttaatgtatttgttatttatttwaaaaaaaatcttgcctaggctggccttgaactcctgggctcaagggatcctcccacctcagtctcctgagtaggtgagagtacaggcctgtgacaccaca

SEQ ID NO: 9202 - DNA, 201 bp, Homo sapiens
gggaggggacagagggacagggaccacgggagggtggcgtggggcggcgtacttggagatatgacctgaggagtctgcagaccccagaccggggcagaagmgccgtgggaggagctgctgagctctccaggccgccctttacctcctgcctccccagcccagttcatcttgatcctctcctcactagcccaggtctcccca

SEQ ID NO: 9203 - DNA, 201 bp, Homo sapiens
cagaaaaccccccctagaataggtacctaaccctgtgaagatgaacctctggtccttccaggatggaagtaggtaaatgtagtcaacttcttagttaatgrctagtcacctaaagaaatagtgccccactagggcacatcatgggcctaaaatgctgatgagttggacattcagaggtggcagcagctggatctgccttgg

SEQ ID NO: 9204 - DNA, 201 bp, Homo sapiens
atgcagtttcttgcagttgtaagactgaggtccgcgttccttgctggctgtcaatgtagagaacagggagggctgcgctcaattcctgatgcccaccagcrttcttccctgtacagccccttcattttcaaagcccacagtggaggaaacccctcatgctgaatccctctcacactgtgaatctctatgctcaggaagaac

SEQ ID NO: 9205 - DNA, 201 bp, Homo sapiens
ggtgtagggggagctggggaggggacagagggacagggaccacgggagggtggcgtggggcggcgtacttggagatatgacctgaggagtctgcagacccbagaccggggcagaagagccgtgggaggagctgctgagctctccaggccgccctttacctcctgcctccccagcccagttcatcttgatcctctcctcact

SEQ ID NO: 9206 - DNA, 201 bp, Homo sapiens
ttccccacttctgtgtatctggcagggggtggtgatttctcatccttgaacctaattgcactgtcagttggcccctcaggcctgggcagatgggatggttmatcccctgccctgcagcaagagggccctgtccaggaggcacccacagcaggggcagtgcaggtctgtggtcgctcctgctctcacctgtggtgtctcctg

SEQ ID NO: 9207 - DNA, 201 bp, Homo sapiens
aatgcagtttcttgcagttgtaagactgaggtccgcgttccttgctggctgtcaatgtagagaacagggagggctgcgctcaattcctgatgcccaccagbgttcttccctgtacagccccttcattttcaaagcccacagtggaggaaacccctcatgctgaatccctctcacactgtgaatctctatgctcaggaagaa

SEQ ID NO: 9208 - DNA, 201 bp, Homo sapiens
ttgtctcatccaaccagtgatataattccttccttgcagaagaataagtgagaaaagacacagtgccaagaaattcagacacaagacctgcggaagtctgygccagtgctctaaagcaagttctgcctaaagcggcagaaacatttttcacattaggaacaggagttgtttgggatcctgtctggggccaggttgagagca

SEQ ID NO: 9209 - DNA, 201 bp, Homo sapiens
aggcagataatgggctaggagcactgcctagcctgcagaccaggaatgtcaacagcacccagagagtggtactggctgtgtctgagagcaggacagaaaamcccccctagaataggtacctaaccctgtgaagatgaacctctggtccttccaggatggaagtaggtaaatgtagtcaacttcttagttaatgactagtca

SEQ ID NO: 9210 - DNA, 201 bp, Homo sapiens
caagtcaggtggacttgaatatgaaccctccaggcctttccaccaactagctatagagccttgggcacatctggcccagagctggccccgacagacacttkcccagtgggtgagtgctcaatgaacccatctgagccaattgtctcatccaaccagtgatataattccttccttgcagaagaataagtgagaaaagacaca

SEQ ID NO: 9211 - DNA, 201 bp, Homo sapiens
ttcccttgccaagtggatccttcaggcagataatgggctaggagcactgcctagcctgcagaccaggaatgtcaacagcacccagagagtggtactggctrtgtctgagagcaggacagaaaaccccccctagaataggtacctaaccctgtgaagatgaacctctggtccttccaggatggaagtaggtaaatgtagtca

SEQ ID NO: 9212 - DNA, 201 bp, Homo sapiens
tgagttttcaagtcaggtggacttgaatatgaaccctccaggcctttccaccaactagctatagagccttgggcacatctggcccagagctggccccgacrgacacttgcccagtgggtgagtgctcaatgaacccatctgagccaattgtctcatccaaccagtgatataattccttccttgcagaagaataagtgagaa

SEQ ID NO: 9213 - DNA, 201 bp, Homo sapiens
aacactgaatctttcccttgccaagtggatccttcaggcagataatgggctaggagcactgcctagcctgcagaccaggaatgtcaacagcacccagagartggtactggctgtgtctgagagcaggacagaaaaccccccctagaataggtacctaaccctgtgaagatgaacctctggtccttccaggatggaagtagg

SEQ ID NO: 9214 - DNA, 201 bp, Homo sapiens
catggaaacactgaatctttcccttgccaagtggatccttcaggcagataatgggctaggagcactgcctagcctgcagaccaggaatgtcaacagcaccyagagagtggtactggctgtgtctgagagcaggacagaaaaccccccctagaataggtacctaaccctgtgaagatgaacctctggtccttccaggatgga

SEQ ID NO: 9215 - DNA, 201 bp, Homo sapiens
ttataaagggggaatcagtacttaagtaaggtcaatatgagttttcaagtcaggtggacttgaatatgaaccctccaggcctttccaccaactagctataragccttgggcacatctggcccagagctggccccgacagacacttgcccagtgggtgagtgctcaatgaacccatctgagccaattgtctcatccaaccag

SEQ ID NO: 9216 - DNA, 201 bp, Homo sapiens
gccatggaaacactgaatctttcccttgccaagtggatccttcaggcagataatgggctaggagcactgcctagcctgcagaccaggaatgtcaacagcabccagagagtggtactggctgtgtctgagagcaggacagaaaaccccccctagaataggtacctaaccctgtgaagatgaacctctggtccttccaggatg

SEQ ID NO: 9217 - DNA, 201 bp, Homo sapiens
gaccctcctcccggcgcggctacccgggtcctgcgtccccgccgggcgggccccttgcttctccccgcagaggcggtttccccacgaccccgcactcaccygcccaggtctgggtcagggccagggcccccaagagtagcaggaggagggttcggggcgccatgacggccatcctcggcgtctggggagaatctgagtccc

SEQ ID NO: 9218 - DNA, 201 bp, Homo sapiens
accgcacgaactgcgtgtcgtccacgtagcccacggcgatgaagcggggctccccgcggccgggccgggacacggatgtggtgaaatacctcatggagtgrgagcctgggggcgaggagtggctgagacccacccgaccctcctcccggcgcggctacccgggtcctgcgtccccgccgggcgggccccttgcttctcccc

SEQ ID NO: 9219 - DNA, 201 bp, Homo sapiens
ggcattccttgtggctggcagcccctggggagagtagctggtgatagggttagtggaagcaacagccatggaaacactgaatctttcccttgccaagtggrtccttcaggcagataatgggctaggagcactgcctagcctgcagaccaggaatgtcaacagcacccagagagtggtactggctgtgtctgagagcaggac

SEQ ID NO: 9220 - DNA, 201 bp, Homo sapiens
gaatggaacaaccacagtggcaggtgtgaggctacatatggggcattccttgtggctggcagcccctggggagagtagctggtgatagggttagtggaagsaacagccatggaaacactgaatctttcccttgccaagtggatccttcaggcagataatgggctaggagcactgcctagcctgcagaccaggaatgtcaac

SEQ ID NO: 9221 - DNA, 201 bp, Homo sapiens
atgtccgccgcggtccaagagcgcaggtcctcgttcaaggcgatgtaatccttgccgtcgtaggcgtcctgccggtacccgcggaggaagcgcccgtccgrccccacgtcgcagccatacatcatctggatggtgtgagaacctggccccgaccccacggtcagcccagtcccccgagccccgtccggccccgaccaaccc

SEQ ID NO: 9222 - DNA, 201 bp, Homo sapiens
gaaaatgatccacctgggttgagcttgaatcccatgttgacacccacagaaaacagccaagtctgaagtgtcattaaacaacgaaacagacaaatggaagytagccagccttcactatgggtcagcccatgcatgataggatgggcacatgaatggaacaaccacagtggcaggtgtgaggctacatatggggcattcctt

SEQ ID NO: 9223 - DNA, 201 bp, Homo sapiens
catcccgctgccaggtcagtgtgatctccgcagggtagaagctcagggcccagcacctcagggtggcttcatggtcagagacagcgtggtgagtcatatgygttttgggggcgtctgtcaggaagagtcagatcattcaggcattttgcatctgtcatgggacactcctccagcacacatgtggctatcttgagaatggac

SEQ ID NO: 9224 - DNA, 201 bp, Homo sapiens
ggtcctccccatcccgctgccaggtcagtgtgatctccgcagggtagaagctcagggcccagcacctcagggtggcttcatggtcagagacagcgtggtgrgtcatatgcgttttgggggcgtctgtcaggaagagtcagatcattcaggcattttgcatctgtcatgggacactcctccagcacacatgtggctatcttg

SEQ ID NO: 9225 - DNA, 201 bp, Homo sapiens
tacacattgagtttaagaacttgccacattattctggaaacatgttcttcaacacaaatgtaatttgtgataaattgtgaaatattttctccctgtctatrgcttgtcttctcattctctcaatgtcttttggagcactcaagttttaaattttaactaagcccaatttctctctctcttttttttttatttgtagatcat

SEQ ID NO: 9226 - DNA, 201 bp, Homo sapiens
tcctgggtctggtcctccccatcccgctgccaggtcagtgtgatctccgcagggtagaagctcagggcccagcacctcagggtggcttcatggtcagagayagcgtggtgagtcatatgcgttttgggggcgtctgtcaggaagagtcagatcattcaggcattttgcatctgtcatgggacactcctccagcacacatgt

SEQ ID NO: 9227 - DNA, 201 bp, Homo sapiens
atcacgggactccaagcaactatgtggttccaagtgcctgtgtgacccagaaagtcatagattgcacaggccaaacagcattcatcatgaggtgaaaatgrtccacctgggttgagcttgaatcccatgttgacacccacagaaaacagccaagtctgaagtgtcattaaacaacgaaacagacaaatggaagctagccag

SEQ ID NO: 9228 - DNA, 201 bp, Homo sapiens
tgcctgtggaagatcacgggactccaagcaactatgtggttccaagtgcctgtgtgacccagaaagtcatagattgcacaggccaaacagcattcatcatraggtgaaaatgatccacctgggttgagcttgaatcccatgttgacacccacagaaaacagccaagtctgaagtgtcattaaacaacgaaacagacaaatg

SEQ ID NO: 9229 - DNA, 201 bp, Homo sapiens
ttcaggcttatacagaggtggcagaatgcagtttcttgcagttgtaagactgaggtccgcgttccttgctggctgtcaatgtagagaacagggagggctgygctcaattcctgatgcccaccagcgttcttccctgtacagccccttcattttcaaagcccacagtggaggaaacccctcatgctgaatccctctcacact

SEQ ID NO: 9230 - DNA, 201 bp, Homo sapiens; identical to SEQ ID NO: 1099

SEQ ID NO: 9231 - DNA, 201 bp, Homo sapiens
ttccgggcttcccaaagctgtgttttcattttgaatcctccttcaggcttatacagaggtggcagaatgcagtttcttgcagttgtaagactgaggtccgbgttccttgctggctgtcaatgtagagaacagggagggctgcgctcaattcctgatgcccaccagcgttcttccctgtacagccccttcattttcaaagcc

SEQ ID NO: 9232 - DNA, 201 bp, Homo sapiens
gttccgggcttcccaaagctgtgttttcattttgaatcctccttcaggcttatacagaggtggcagaatgcagtttcttgcagttgtaagactgaggtccscgttccttgctggctgtcaatgtagagaacagggagggctgcgctcaattcctgatgcccaccagcgttcttccctgtacagccccttcattttcaaagc

SEQ ID NO: 9233 - DNA, 201 bp, Homo sapiens
gtggatggaatctctgttccgggcttcccaaagctgtgttttcattttgaatcctccttcaggcttatacagaggtggcagaatgcagtttcttgcagttstaagactgaggtccgcgttccttgctggctgtcaatgtagagaacagggagggctgcgctcaattcctgatgcccaccagcgttcttccctgtacagccc

SEQ ID NO: 9234 - DNA, 201 bp, Homo sapiens
ggtgtgcattaccacgcctggccaaacaacacccatttatctgtttatagtaccttagtcagaaatctgggcatgatgtggatggaatctctgttccgggmttcccaaagctgtgttttcattttgaatcctccttcaggcttatacagaggtggcagaatgcagtttcttgcagttgtaagactgaggtccgcgttcctt

SEQ ID NO: 9235 - DNA, 201 bp, Homo sapiens
aattatgaataattacttccaggagtattatgaataaagctgcaagagtatttgtatacaggtttttcatgaacataaagttttcccttgtttgaaataartgcctaggagggcaatttctagtcatatggtaaattgcatgttcagtttgaagaaaactgcaatatccatttccagagtggctgtaccattttaaaatcc

SEQ ID NO: 9236 - DNA, 201 bp, Homo sapiens
acatctattcagacactttgtccattttttaattggattatttgtgtttttactgctgagttttttaagttccttgtatattctagatgttagttccttgbtggatgaatacatagcaaatattttctctattcaacaggttgcctcttcattctgttgattgtttcatttgctgtgctgaagctatttagtttaatatag

SEQ ID NO: 9237 - DNA, 201 bp, Homo sapiens
ctcccagctaattaaaaagaaattgtagagatgagtgtctcactgtttgatcttggctggtctcaaactcctggatgcaagtgatcctcctgtgtcaactyctcagatgttaggattgcaggtgtgcattaccacgcctggccaaacaacacccatttatctgtttatagtaccttagtcagaaatctgggcatgatgtgg

SEQ ID NO: 9238 - DNA, 201 bp, Homo sapiens
ccactcccagctaattaaaaagaaattgtagagatgagtgtctcactgtttgatcttggctggtctcaaactcctggatgcaagtgatcctcctgtgtcarctcctcagatgttaggattgcaggtgtgcattaccacgcctggccaaacaacacccatttatctgtttatagtaccttagtcagaaatctgggcatgatg

SEQ ID NO: 9239 - DNA, 201 bp, Homo sapiens
cagagtagctaggactgcaggcaagtgccaccactcccagctaattaaaaagaaattgtagagatgagtgtctcactgtttgatcttggctggtctcaaaktcctggatgcaagtgatcctcctgtgtcaactcctcagatgttaggattgcaggtgtgcattaccacgcctggccaaacaacacccatttatctgtttat

SEQ ID NO: 9240 - DNA, 201 bp, Homo sapiens
tcactgcagcctcaaactcctgggctcaagggatcttcctgcctcagtcttcagagtagctaggactgcaggcaagtgccaccactcccagctaattaaaragaaattgtagagatgagtgtctcactgtttgatcttggctggtctcaaactcctggatgcaagtgatcctcctgtgtcaactcctcagatgttaggatt

SEQ ID NO: 9241 - DNA, 201 bp, Homo sapiens
atcatggctcactgcagcctcaaactcctgggctcaagggatcttcctgcctcagtcttcagagtagctaggactgcaggcaagtgccaccactcccagcwaattaaaaagaaattgtagagatgagtgtctcactgtttgatcttggctggtctcaaactcctggatgcaagtgatcctcctgtgtcaactcctcagatg

SEQ ID NO: 9242 - DNA, 201 bp, Homo sapiens
gctcgcggcgtcgctgtcaaaccgcacgaactgcgtgtcgtccacgtagcccacggcgatgaagcggggctccccgcggccgggccgggacacggatgtgdtgaaatacctcatggagtgggagcctgggggcgaggagtggctgagacccacccgaccctcctcccggcgcggctacccgggtcctgcgtccccgccggg

SEQ ID NO: 9243 - DNA, 201 bp, Homo sapiens
tctggctcgcggcgtcgctgtcaaaccgcacgaactgcgtgtcgtccacgtagcccacggcgatgaagcggggctccccgcggccgggccgggacacggakgtggtgaaatacctcatggagtgggagcctgggggcgaggagtggctgagacccacccgaccctcctcccggcgcggctacccgggtcctgcgtccccgc

SEQ ID NO: 9244 - DNA, 201 bp, Homo sapiens
tttcaaggactcacctgattaggacagtccaagcagcataaacccagcctaaagtcaactaattgaggcccttaattatatctgctaaatcccttcacagyagcacctatattagagttggttgaataatggggggaaggtgaatgaccaggagcttgttgttgaggccatcatagaatcagcctagcaagggctggatct

SEQ ID NO: 9245 - DNA, 201 bp, Homo sapiens
caagtgattctcctgcctcagcctcccaagtagctgggattaccagcatgggccaccatgcctggataattttgtatttttagtagagacggggtttctcygtgttggtcaggctagtctccaactcccaacctcaggtgatccatccacctcagccttccaaagtgctgggattacaggcgtgagccactgcacctggcc

SEQ ID NO: 9246 - DNA, 201 bp, Homo sapiens
caccgtttgatttctggacccacatgttcttcctcttgcgaacacagaactgtagagacgactctgatttaaacaacgcaccatgtcctgaaagatggcaygcaaccctcagagtgcttcctccaggctggcacttagttgtgcctgtggaagatcacgggactccaagcaactatgtggttccaagtgcctgtgtgaccc

SEQ ID NO: 9247 - DNA, 201 bp, Homo sapiens
aacatgtcaaataccccattaggtgaatctaagagattagacatggagccatacctgcttccaccgtttgatttctggacccacatgttcttcctcttgcraacacagaactgtagagacgactctgatttaaacaacgcaccatgtcctgaaagatggcacgcaaccctcagagtgcttcctccaggctggcacttagtt

SEQ ID NO: 9248 - DNA, 201 bp, Homo sapiens
aaggttgagtgtttttcgtatacctgttgaccatttgtatgtctccttttgagaaacatctattcagacactttgtccattttttaattggattatttgtrtttttactgctgagttttttaagttccttgtatattctagatgttagttccttgctggatgaatacatagcaaatattttctctattcaacaggttgcct

SEQ ID NO: 9249 - DNA, 201 bp, Homo sapiens
tcacatgatcatggctcactgcagcctcaaactcctgggctcaagggatcttcctgcctcagtcttcagagtagctaggactgcaggcaagtgccaccacdcccagctaattaaaaagaaattgtagagatgagtgtctcactgtttgatcttggctggtctcaaactcctggatgcaagtgatcctcctgtgtcaactcc

SEQ ID NO: 9250 - DNA, 201 bp, Homo sapiens
agggtgaagtgcagtcacatgatcatggctcactgcagcctcaaactcctgggctcaagggatcttcctgcctcagtcttcagagtagctaggactgcagrcaagtgccaccactcccagctaattaaaaagaaattgtagagatgagtgtctcactgtttgatcttggctggtctcaaactcctggatgcaagtgatcct

SEQ ID NO: 9251 - DNA, 201 bp, Homo sapiens
tgatttgcattttcctgatatttaataaggttgagtgtttttcgtatacctgttgaccatttgtatgtctccttttgagaaacatctattcagacactttrtccattttttaattggattatttgtgtttttactgctgagttttttaagttccttgtatattctagatgttagttccttgctggatgaatacatagcaaa

SEQ ID NO: 9252 - DNA, 201 bp, Homo sapiens
cctctgtcatccagggtgaagtgcagtcacatgatcatggctcactgcagcctcaaactcctgggctcaagggatcttcctgcctcagtcttcagagtagvtaggactgcaggcaagtgccaccactcccagctaattaaaaagaaattgtagagatgagtgtctcactgtttgatcttggctggtctcaaactcctggat

SEQ ID NO: 9253 - DNA, 201 bp, Homo sapiens
tctccctctgtcatccagggtgaagtgcagtcacatgatcatggctcactgcagcctcaaactcctgggctcaagggatcttcctgcctcagtcttcagartagctaggactgcaggcaagtgccaccactcccagctaattaaaaagaaattgtagagatgagtgtctcactgtttgatcttggctggtctcaaactcct

SEQ ID NO: 9254 - DNA, 201 bp, Homo sapiens
ggtggctcatgtctgtaatcccagcactttggaaggccgaagttggtggatcacctgaggtcaggagtttgagaccaacctggacaatatggtgaaacccygtctctactaaaaatacaaaaattacctgggtgtcgtggtggatgcctataattccagctactcaggaggctgaggtaggagaattgcttgaacctggga

SEQ ID NO: 9255 - DNA, 201 bp, Homo sapiens
gcacacaaggtgcattttgaaaaatgacactttaaagatttgtgggccgggaatggtggctcatgtctgtaatcccagcactttggaaggccgaagttggyggatcacctgaggtcaggagtttgagaccaacctggacaatatggtgaaaccccgtctctactaaaaatacaaaaattacctgggtgtcgtggtggatgc

SEQ ID NO: 9256 - DNA, 201 bp, Homo sapiens
catcttaaagtcaactgactggggactttaaatatatctgcaaaacctcttcacagcagcacctgctttagtgtcaactgagtaactggggtaacctgagwaaccaagggtggttattggggtgtcatcatagaatcagcctagcatagcctggatcttcctttcatgtttaaatagaacatacaagttgaagatcaaaaa

SEQ ID NO: 9257 - DNA, 201 bp, Homo sapiens
tgaagcttctagaatgtcaggcacgtgagcatatgagggcatacctggttcatcttaggcactaaattaatttttgttgactgaatgaatgaaatatgaakgtattaaattgcatcacagaaagttataaaatgtaaaacactgaaaaattaagaaatattttatcttatgtaactagtgtgcatatcaattcatccgagt

SEQ ID NO: 9258 - DNA, 201 bp, Homo sapiens
cagtggtcctgctcctgtgagtcagagtgtgtcatttcctcacctaaaacactccagtggctccacctcggtcttgtgaagcttctagaatgtcaggcacrtgagcatatgagggcatacctggttcatcttaggcactaaattaatttttgttgactgaatgaatgaaatatgaatgtattaaattgcatcacagaaagt

SEQ ID NO: 9259 - DNA, 201 bp, Homo sapiens
aggccctcctctccccttagtccccaccaccctgtcacttctaaattgtggctctagcattgtcccattacctgctacgtgactgttctctccacagtggycctgctcctgtgagtcagagtgtgtcatttcctcacctaaaacactccagtggctccacctcggtcttgtgaagcttctagaatgtcaggcacgtgagca

SEQ ID NO: 9260 - DNA, 201 bp, Homo sapiens
gaactttggtattttcttttctctttcatttccaaataatcagtcaggaatggcacacaaggtgcattttgaaaaatgacactttaaagatttgtgggccrggaatggtggctcatgtctgtaatcccagcactttggaaggccgaagttggtggatcacctgaggtcaggagtttgagaccaacctggacaatatggtga

SEQ ID NO: 9261 - DNA, 201 bp, Homo sapiens
tccctctgtccctttcatccctcaggccctcctctccccttagtccccaccaccctgtcacttctaaattgtggctctagcattgtcccattacctgctamgtgactgttctctccacagtggtcctgctcctgtgagtcagagtgtgtcatttcctcacctaaaacactccagtggctccacctcggtcttgtgaagctt

SEQ ID NO: 9262 - DNA, 201 bp, Homo sapiens
catgactctttacaattggctgtggctttgttttaacgtgtgtagttattgctaaggatccttgagatgaactttggtattttcttttctctttcatttccaaataatcagtcaggaatggcacacaaggtgcattttgaaaaatgacactttaaagatttgtgggccgggaatggtggctcatgtctgtaatcccagcac

SEQ ID NO: 9263 - DNA, 201 bp, Homo sapiens
aatgtgtttaaacctaagaattctactgctttccaattccttccctctgctccttttcctaacctcctgcttctccagcccttccctctgtccctttcatscctcaggccctcctctccccttagtccccaccaccctgtcacttctaaattgtggctctagcattgtcccattacctgctacgtgactgttctctccaca

SEQ ID NO: 9264 - DNA, 201 bp, Homo sapiens
tccacggtgcccgcggctccatcctctggctcgcggcgtcgctgtcaaaccgcacgaactgcgtgtcgtccacgtagcccacggcgatgaagcggggctcyccgcggccgggccgggacacggatgtggtgaaatacctcatggagtgggagcctgggggcgaggagtggctgagacccacccgaccctcctcccggcgcg

SEQ ID NO: 9265 - DNA, 201 bp, Homo sapiens
ggaagatgaaattatcttgcacagcagattgaacattgtatcattgaaaatctagagagatgccagggagccaaggatcaaatgacctatttgtagccaakgccattttcatggcatcctggtcctctctgtcacatggctccttacaattctctgtggttttcttccaatgtaagtagttcttgttaagaatctttgcaa

SEQ ID NO: 9266 - DNA, 201 bp, Homo sapiens
aggaggagaatcctcttttcaccaggtggtctctgggcacaaactatcaaaacttctctcgtgacaaccataatgtgtagttcagtgggctgtcttttgtmtccttttaagggtaccctccttggaaaccaggacctcgtaccctgcacagcccagtgttggaagataaaacgtgcaaaataccccattgggtgaatctaa

SEQ ID NO: 9267 - DNA, 201 bp, Homo sapiens
gtgcagatggtgataggattagtggaacccacagccatggaaacactgaaactttcccagccaagtgggtccttcaggcagataatgggctaggagcacckcctagcctgcagatcaggaatgtcaacagcacccggagaggtgctggctgagtttctgagagcaggacatgaaaacacccatggaataggagcctatccc

SEQ ID NO: 9268 - DNA, 201 bp, Homo sapiens
tatccagacagcacaaaagctgcaattataactcctacttggccagacctggagtaatctagttcattctttaggcttcatcaggcttcttcagggacagrttgctggattacgtagagacaatagacagccccaacaccatcccacatccttcagctctgtaatggtgatgtgatccccacaatacttgaagtatcttac

SEQ ID NO: 9269 - DNA, 201 bp, Homo sapiens
tggcaggatcactggattgggaatcccaggagggtggaacgattgttggaattgatgtactacagggtagactccaagcgtggaaagcaagcacatatgcratgagtggtccactgatattacatcacagcatatgataaaatgatagtatctgtgtcctcagagcctgtggccaccttgcaaggggatgagtggaaagat

SEQ ID NO: 9270 - DNA, 201 bp, Homo sapiens
tctctgcttttaatggctcttgtgatttgattgggcccacacagagagtccagcagaatctccctattttaaggtccttaatcttcattacatgagtaatrtcccttttgccacgcaatgcaacctgttcacaggttccaacgattaagactggacatctttggggaccattactcagcccaccacatctgcgtatgttga

SEQ ID NO: 9271 - DNA, 201 bp, Homo sapiens
gagatctgagccgcagtgtccgctgcggtccaggagcgcaggtcctcgttcagggcgaggtaatccttgccatcgtaggcatactgttcatacccgcggakgaggcgtccgtcggaccccaggtcgcagccaatcatccactggagggtgtgagaacctggccccaccccctcggtcagccccgcccaccgagcctcgccc

SEQ ID NO: 9272 - DNA, 201 bp, Homo sapiens
caatgtgtttaaacctaagaattctactgctttccaattccttccctctgctccttttcctaacctcctgcttctccagcccttccctctgtccctttcayccctcaggccctcctctccccttagtccccaccaccctgtcacttctaaattgtggctctagcattgtcccattacctgctacgtgactgttctctccac

SEQ ID NO: 9273 - DNA, 201 bp, Homo sapiens
ggcccccttgcctggctttacttttagactttttataaattgtttcttgctgattttgttatgcatttgcttgctttttccgttaacatggtctatgagakggatcaatgttcacacaaatagttcatttgttttcattgctagatagtattccatgggaggaatatgctacaatttatctcttccccacttcattgacct

SEQ ID NO: 9274 - DNA, 201 bp, Homo sapiens
acacttagtatttttaaaacctgattaattaaaaaaaattagtttctaggcagtcccaaatatagtattaaaggccaactgcaaagaaggaacactaagtrttttttaaaccttattaacataaaaaacattagtttttaggcagtcctacattaggtattaaaggccaactgcaaagaacactgagcgaggctctgtaga

SEQ ID NO: 9275 - DNA, 201 bp, Homo sapiens
actgccaacccccttacccttctgggtctccatggtccatcatttcacactctccttttatgtatataaagagatattaaccaaatacggcagagtggtarcttgaattttactgcaccgttctttcagcttctttgcacatttgaaaatttatacagttataagttggaagaatgagggaaaatagagagcaagacagtg

SEQ ID NO: 9276 - DNA, 201 bp, Homo sapiens
gcaagtgttcaatgcagtcacaatgcccctcagcagtgctcatgtgctgcctgtttttaggaagtattcacgtctaagtggtgtgtatatcttataggaamacttagtatttttaaaacctgattaattaaaaaaaattagtttctaggcagtcccaaatatagtattaaaggccaactgcaaagaaggaacactaagtat

SEQ ID NO: 9277 - DNA, 201 bp, Homo sapiens; identical to SEQ ID NO: 1057

SEQ ID NO: 9278 - DNA, 201 bp, Homo sapiens
attcacctcacagttgcaagtgttcaatgcagtcacaatgcccctcagcagtgctcatgtgctgcctgtttttaggaagtattcacgtctaagtggtgtgwatatcttataggaacacttagtatttttaaaacctgattaattaaaaaaaattagtttctaggcagtcccaaatatagtattaaaggccaactgcaaaga

SEQ ID NO: 9279 - DNA, 201 bp, Homo sapiens
gggtgagtccaagacatctcctcaatataaagtagcacactgcgttactatatgttgcaaccgggagccagtacagactttattcacctcacagttgcaartgttcaatgcagtcacaatgcccctcagcagtgctcatgtgctgcctgtttttaggaagtattcacgtctaagtggtgtgtatatcttataggaacactt

SEQ ID NO: 9280 - DNA, 201 bp, Homo sapiens
aggaatctaatcggtaaaaaatgtaactttggccccttgatatataaatgtgtctgaaagcattacaacaggactcacaaagctactaagtttgactttcscagacaatgtatctgtgactcccgcttgttttttacatttaccttcattccacagccctgagttactgggtgagtccaagacatctcctcaatataaagt

SEQ ID NO: 9281 - DNA, 201 bp, Homo sapiens
ttctgggtctccatggtccatcatttcacactctccttttatgtatataaagagatattaaccaaatacggcagagtggtaacttgaattttactgcaccrttctttcagcttctttgcacatttgaaaatttatacagttataagttggaagaatgagggaaaatagagagcaagacagtgctgaataggaataggctag

SEQ ID NO: 9282 - DNA, 201 bp, Homo sapiens
aggaataggctaggggttgtgtcccactaggaaccataattgatctttgccattttgaaagtgtgtcccctgagcagccttcagagagtcctggaggcagrcttgttttcacagtaataccaagatgccatctgcctgtttcattgtgttgacttttccattagtgctgcaaatgccaaggtcggtagcacacccagcacc

SEQ ID NO: 9283 - DNA, 201 bp, Homo sapiens
ccgggtaacggctcctgggcctctcccgggtaaagggtctccaggttccgctgcctcggcgtggatctcggacccagagactcggggagacccgggcggtycgtgggggatgtagaggggtagtgatctgcgcccccggccggtgtcactcacaggcctcactctggttgtagtagccgctcagggtccgcaggttcactc

SEQ ID NO: 9284 - DNA, 201 bp, Homo sapiens
cccgcgacccggccgggacacggcggtgctgaaataccttatggagtgggtacctgggggcgaggaggggctgagacccgtccgaccctcctccttgcgckgctccccgggtcctgcgccccagtgcgcgggcccctagctcctccccgcagaggccatttccctccggatcccgcactcacccgcccaggtctcggtcag

SEQ ID NO: 9285 - DNA, 201 bp, Homo sapiens
caccaatggaagaaggaaactcagagctcacccctttcctacctgggatcttattcctccacatcacagcagcgaccacagctacagtgattacagcaacdagaagaaccaggccagcaatgatgcccacaacggggatgatgggctgggaagacagctctaagaaaggaggtgaacgtgaggggccctgacccccaggcc

SEQ ID NO: 9286 - DNA, 201 bp, Homo sapiens
gtttgtttgtttgttttgagatggagtatggctctgtcacccaggctggagtgcgatggcaggatctcagctcactgcaacttctgccttccaggttcaarcgattctcctgcatcagccttctgagtagcttggattacagacacgcaccaacacgcccagctaatttttgtatttttagtaaagacgaggtttcaccat

SEQ ID NO: 9287 - DNA, 201 bp, Homo sapiens
atgcacattacgtacaggagttatctgtggtgtgggaggctgtcattcattcattttcactgctgaaggtttacattttatgccacaatttcctattgatrtatatttcctattgatgtatatgtggctgattccagtttttgccataaacatcagtgtgcctgtctcctgggcacataggcaagaaagcccgctagagtg

SEQ ID NO: 9288 - DNA, 201 bp, Homo sapiens
acttcactgcagtggccactcttgaagctctgtaaggttaatcttcaccttctgtagtgcacacgttttgccaaagaattcagcgtactttcctcctcttrctcatccatcccaatctatgtgatattgccaatgaaatgaagagatttagtattctgtgagatgtctgatttgtccagatctcttaaggtgatatttata

SEQ ID NO: 9289 - DNA, 201 bp, Homo sapiens
cagctcaaatcaacaaatatttatcatctcccacagttatccatggtcaggaatccaggagaagtttctctgaatgcttctggctcagggcctctcacaaygttgcagtctagttgtcttccagggctgaatcacctgagggctcaaatggggccagggattcacaagacacaagaatctctcacatggcttttggaagag

SEQ ID NO: 9290 - DNA, 201 bp, Homo sapiens
ctggacaggtctgaaaattagtctcttgataccacaatgagatttgtatgcagggaccaccgtaggtgacatccaagtccctgtgatcacaggtggtggtrggacaaggttctactgaagggccaaggagaatgaaggagcaaagatgacccagctgagcagtgaccacataaagtccatactggcctgagcacccactag

SEQ ID NO: 9291 - DNA, 201 bp, Homo sapiens
cacatatatatatgtatgtgtgtatatatatatatccccaaaacaaatatcagtttgttttgctggtttttaagcttcctgtacagcaagttcctactgcmtttattttcccatgatgcacattatgtgtaggagttatctgtggtgtgggagactgtcattcattcatttttactgctgaaggcttacatatggttatac

SEQ ID NO: 9292 - DNA, 201 bp, Homo sapiens
gcgtggggactttagaaccgggaccgcggcggcaccgattggcttctctagaaacccgacacctagtgggaatgagaactgtgcccgcttcctgagtatcmaggaaaaaggacccgtcgcaggttgtgagaagaagagaaactgcggaggtggcgaatccccaaggcggggcctccccaatccatacaccgccttcggggc

SEQ ID NO: 9293 - DNA, 201 bp, Homo sapiens
ggactttagaaccgggaccgcggcggcaccgattggcttctctagaaacccgacacctagtgggaatgagaactgtgcccgcttcctgagtatccaggaaraaggacccgtcgcaggttgtgagaagaagagaaactgcggaggtggcgaatccccaaggcggggcctccccaatccatacaccgccttcggggcctgaga

SEQ ID NO: 9294 - DNA, 201 bp, Homo sapiens
tgtctctgctgtgaatgacatgaccttactccagaatcccaggcctttcactgtgactttcccactggtgcttggttcagctccatcctgcatctttcccyaccaatggcatcaccagcaccagggggtctgagagatggtggctgctcgcaccatggcctggatctgctgcagggtccttttctgtgtgggccctacttg

SEQ ID NO: 9295 - DNA, 201 bp, Homo sapiens
ttccctaccaatggcatcaccagcaccagggggtctgagagatggtggctgctcgcaccatggcctggatctgctgcagggtccttttctgtgtgggcccyacttgaagctggcctcctcctatgtcacctagagtgtgggccaaagcaacatacctagatgtggaaagtggtgttgtcagaactggaagaggctcatcag

SEQ ID NO: 9296 - DNA, 201 bp, Homo sapiens
tcccaaatgtgttaggttgttccagcatcaactcaaaattctagagtctcatctgagacgcaaggtaaattcttatagctttgagcctgtaaaattttttwaaaaaatgttatttgcatctaaaatattaataaaacagtggaagagacatttcttgtacatttccattccaaaaggtatataaatgggccaaaagaaatg

SEQ ID NO: 9297 - DNA, 201 bp, Homo sapiens
tttctctttgtttattaactacagtgggtagcagaatcttggcaacccctaaatgatcaggaatctaatcggtaaaaaatgtaactttggccccttgatamataaatgtgtctgaaagcattacaacaggactcacaaagctactaagtttgactttcgcagacaatgtatctgtgactcccgcttgttttttacatttac

SEQ ID NO: 9298 - DNA, 201 bp, Homo sapiens
ttttctctttgtttattaactacagtgggtagcagaatcttggcaacccctaaatgatcaggaatctaatcggtaaaaaatgtaactttggccccttgatvtataaatgtgtctgaaagcattacaacaggactcacaaagctactaagtttgactttcgcagacaatgtatctgtgactcccgcttgttttttacattta

SEQ ID NO: 9299 - DNA, 201 bp, Homo sapiens
aagttgtgcctgagtacatgagacagcatagagacaagttttctctttgtttattaactacagtgggtagcagaatcttggcaacccctaaatgatcaggwatctaatcggtaaaaaatgtaactttggccccttgatatataaatgtgtctgaaagcattacaacaggactcacaaagctactaagtttgactttcgcag

SEQ ID NO: 9300 - DNA, 201 bp, Homo sapiens
cccagaactggactccctgcctcccactccttacctatttccctgaactcttctagaaaaaaactcaccccagggagcttggtgacagagagggagctcgmcgccagagaggcagagctcgccctgggaatggaggcgtagagacaggtttttgttttttttttctttaaatccggaaaagttgtgcctgagtacatgaga

SEQ ID NO: 9301 - DNA, 201 bp, Homo sapiens
agcttagttgtgtcccctctgcccaactcctctttcacttcaggccctctaaggtgtcacttttacaagccgtgagagacacatcagagccctgggtactsttcctgtttggggtggaacaaaaacaaaatctggtcagagcccacaggtgatgtgactaaaggaggaattttggggtggctgagctcccccatgggctcc

SEQ ID NO: 9302 - DNA, 201 bp, Homo sapiens
tccccaatcaatacatcgccttcggggcctgaaaccctgagagccacgcctggggccataggacttcgccctgaccccgctcctcctgtgccaagcgctcwgtctcaatgtctccctgagtcttggcccaagagctgtctgagaaaccagggagaaaccctcgtcatgggccccgtccctcttcatttttcatcccggaat

SEQ ID NO: 9303 - DNA, 201 bp, Homo sapiens
tgaaaaattccaaatcaaagaatctccagagcttagttgtgtcccctctgcccaactcctctttcacttcaggccctctaaggtgtcacttttacaagccdtgagagacacatcagagccctgggtactgttcctgtttggggtggaacaaaaacaaaatctggtcagagcccacaggtgatgtgactaaaggaggaattt

SEQ ID NO: 9304 - DNA, 201 bp, Homo sapiens
ttttttgtagagaaagggatttatcatgtttcccagacttgtctggaacgcctggggtcaagcaatctgcccaccttggcctcccaagatgctaggattaygggtataggcccccttgcctggctttacttttagactttttataaattgtttcttgctgattttgttatgcatttgcttgctttttccgttaacatggtc

SEQ ID NO: 9305 - DNA, 201 bp, Homo sapiens
aaaacatagtcataaactaatccaggtcagtcacagtaagttgtgacactgaacagcccaccacaccttgaaaaattccaaatcaaagaatctccagagcytagttgtgtcccctctgcccaactcctctttcacttcaggccctctaaggtgtcacttttacaagccgtgagagacacatcagagccctgggtactgttc

SEQ ID NO: 9306 - DNA, 201 bp, Homo sapiens
gagaaactgcggagatggggaatccccaaccctgggcctccccaatcaatacatcgccttcggggcctgaaaccctgagagccacgcctggggccataggrcttcgccctgaccccgctcctcctgtgccaagcgctctgtctcaatgtctccctgagtcttggcccaagagctgtctgagaaaccagggagaaaccctcg

SEQ ID NO: 9307 - DNA, 201 bp, Homo sapiens
acataagttgggagagggagaagagaaactgcggagatggggaatccccaaccctgggcctccccaatcaatacatcgccttcggggcctgaaaccctgaragccacgcctggggccataggacttcgccctgaccccgctcctcctgtgccaagcgctctgtctcaatgtctccctgagtcttggcccaagagctgtctg

SEQ ID NO: 9308 - DNA, 201 bp, Homo sapiens
caggtcctcgttcaaggcgatgtaatccttgccgtcgtaggcgtcctgccggtacccgcggaggaagcgcccgtccgaccccacgtcgcagccatacatcmtctggatggtgtgagaacctggccccgaccccacggtcagcccagtcccccgagccccgtccggccccgaccaacccggggggatttttggcctaaactg

SEQ ID NO: 9309 - DNA, 201 bp, Homo sapiens
gagtggccactctggaagctttgtaaggtttatcttcaccttctggagtgcccgtgttttgccaagcactacagtgcactttctacctgctgctcatccasccaggtcaacaggaagttgtcaatgatatgagctgatttaatatcctattggatatccagtatgtttagtatagtcttaagactatactatagaggtcag

SEQ ID NO: 9310 - DNA, 201 bp, Homo sapiens
gtccatgagacactgccgagggtgtcaaatgtagccagtcatagctgtcaacaatccgcagattctcattatctttttacacagcatcgatgcagctgagmagtaactagccaaagccactgtctttgtaggtttcttccaaccctgtccttattatgcagggcattctatcactgcatgtgccatagcactccctaacca

SEQ ID NO: 9311 - DNA, 201 bp, Homo sapiens
tcctatgtggtttggaatcctaaattttaagagaccagtcagcgtactgtgtgctgctctccagcctcctgcagctcatgggggcaggctcagcataggcmgaggtggaacccaccagctgtgtagttttgccaggtgagtgtgacaattcaagggagagggaagggagggatggaaattatttaccatagaattcaaaat

SEQ ID NO: 9312 - DNA, 201 bp, Homo sapiens
agacaaggacaagaaacaagttcaaaagagggaaagggaaactacagacgtacctcagagatactgcagatttggtttcagaccatggcaacaaacaagtyacacaaatttttgtttttccagtacatataaaagttatattcacactctactgtagcctattaagtatacaatagcattatgtatgaaagaactatgtac

SEQ ID NO: 9313 - DNA, 201 bp, Homo sapiens
cctcccccagttgctcattagctgagtaccaaggacttacgatcttcccggatgtcacctattggtagtttaagacttcaagtatgttccttagggttttktttttttttgctgcattttgttgcagcccataatgcattgtgattgtctcaggactctttaaacatttgacttatgtccctaatggctgcacttagttga

SEQ ID NO: 9314 - DNA, 201 bp, Homo sapiens
ataaagggggaatcagtacttaagtaaggtcaatatgagttttcaagtcaggtggacttgaatatgaaccctccaggcctttccaccaactagctatagakccttgggcacatctggcccagagctggccccgacagacacttgcccagtgggtgagtgctcaatgaacccatctgagccaattgtctcatccaaccagtg

SEQ ID NO: 9315 - DNA, 201 bp, Homo sapiens
cttggttcagctccatcctgcatctttccccaccactggcaccaccagccccaaggggtctgagggatgctggctgcttgtaccatggcctggatctgctrcagggtcctttcctgtgtgggccccacatgaaggtggcctcctcctatgtcacctagagtgtgggccaaagcaacacacctaaatgtggaatgtggtgtc

SEQ ID NO: 9316 - DNA, 201 bp, Homo sapiens
atgagatgtggtagaagtgatttggacactactacagttctaaatagcactgctattatgtgcttctgaagctttcttttttttttttttttagctgtctkattttgctttccattcatatttgctattccatcactggttgttcctttctactcttttcttgtttcatttattttgatcagtgatgtgtatttccaattc

SEQ ID NO: 9317 - DNA, 201 bp, Homo sapiens
tactacgcccagctaattttttgtatttttagtagaaacggagtttccccatgttgggcagtctggtcttgaactcctgacctcaggtgatccaccctctycggcctcccaaagtgctgggattacaggtgtgagccaccatgccccgccgttgttgctatttctttcatcctttttgcttgagcctcttctcttctttct

SEQ ID NO: 9318 - DNA, 201 bp, Homo sapiens
aaaatgtaaatgtggatatggcttggattactaagtggttttatttcttcattcacctgacatttgttgtgtacctgctgcaagtcaaatacatggtatgrtattgtttccttgttcacaccacagcaaatgagaaaatgagacattatagccaggtgtggcggcacaggcttctcgtcctagctactcagaaggctgagg

SEQ ID NO: 9319 - DNA, 201 bp, Homo sapiens
taaattaatgattaaatgtttgagacatgacagagccttgggtgctgcagggaaaacagtttgagacagagaaaggagaaacaacagtatctctgcgtttytcttgtaaatacctttaataacaatgttcttcaataagttaacacagttgagaacatagagtaactagatcaaatagttccaagacttcagtgccataag

SEQ ID NO: 9320 - DNA, 201 bp, Homo sapiens
ggactagcttgtttaactttattagatgatatgaaattgattttcaaaatggatgttttatattcctataggcaatggaggagagtacagattgttccacwtccttgctagcatttatagttattaatcattttaattttagccattctaatggttgcttagtggtttctcactgtggttttactttgcatttttccctga

SEQ ID NO: 9321 - DNA, 201 bp, Homo sapiens
ctttttaaattaatgattaaatgtttgagacatgacagagccttgggtgctgcagggaaaacagtttgagacagagaaaggagaaacaacagtatctctgmgtttctcttgtaaatacctttaataacaatgttcttcaataagttaacacagttgagaacatagagtaactagatcaaatagttccaagacttcagtgcc

SEQ ID NO: 9322 - DNA, 201 bp, Homo sapiens
ctcatgcctgccactgtggttgctccattcatgcacccatcctaccaggcctgggctgacccatggtgaaggctggctaactgccatttgtctgtttggtwgttcagtgccacatcacacttgggtgttttctgtgggtgtcaacatgggattcaagctcaacccaggtggaccattttcacctgttgatgaatgctgttg

SEQ ID NO: 9323 - DNA, 201 bp, Homo sapiens
attactacaactcagggcaggaagaagagtaggagtgcagaagaggagttccaacagaaagttacctatgatgagaaactatgggaccctgcctcttggcraatttcagaatctggttcctttaaaaagattgcagaaaagatggaaaatacaatgaggaaagagccctgggaagagggcaagagcttgaaagatctgaaa

SEQ ID NO: 9324 - DNA, 201 bp, Homo sapiens
ctgagtgtccaggaagaaggaccctacataagttgggagagggagaagagaaactgcggagatggggaatccccaaccctgggcctccccaatcaatacawcgccttcggggcctgaaaccctgagagccacgcctggggccataggacttcgccctgaccccgctcctcctgtgccaagcgctctgtctcaatgtctccc

SEQ ID NO: 9325 - DNA, 201 bp, Homo sapiens
gtctggggagaatctgagtcccaatgggttcgcggggacttctggaacagggaccccagcgacgccgattggcttcgctagaaacccgacaccaaatgggrgtgagaactgagtccacatcctgagtgtccaggaagaaggaccctacataagttgggagagggagaagagaaactgcggagatggggaatccccaaccct

SEQ ID NO: 9326 - DNA, 201 bp, Homo sapiens
gcccaggtctcggtcagggccagggcccccaagagcagcaggaggagggttcgggacgccatgaccccatcctcggcgtctggggagaatctgagtcccartgggttcgcggggacttctggaacagggaccccagcgacgccgattggcttcgctagaaacccgacaccaaatgggggtgagaactgagtccacatcctg

SEQ ID NO: 9327 - DNA, 201 bp, Homo sapiens
tcacccgcccaggtctcggtcagggccagggcccccaagagcagcaggaggagggttcgggacgccatgaccccatcctcggcgtctggggagaatctgartcccaatgggttcgcggggacttctggaacagggaccccagcgacgccgattggcttcgctagaaacccgacaccaaatgggggtgagaactgagtccac

SEQ ID NO: 9328 - DNA, 201 bp, Homo sapiens
ccgcagaggccatttccctccggatcccgcactcacccgcccaggtctcggtcagggccagggcccccaagagcagcaggaggagggttcgggacgccatraccccatcctcggcgtctggggagaatctgagtcccaatgggttcgcggggacttctggaacagggaccccagcgacgccgattggcttcgctagaaacc

SEQ ID NO: 9329 - DNA, 201 bp, Homo sapiens
ctcctccccgcagaggccatttccctccggatcccgcactcacccgcccaggtctcggtcagggccagggcccccaagagcagcaggaggagggttcgggwcgccatgaccccatcctcggcgtctggggagaatctgagtcccaatgggttcgcggggacttctggaacagggaccccagcgacgccgattggcttcgct

SEQ ID NO: 9330 - DNA, 201 bp, Homo sapiens
ctagctcctccccgcagaggccatttccctccggatcccgcactcacccgcccaggtctcggtcagggccagggcccccaagagcagcaggaggagggttygggacgccatgaccccatcctcggcgtctggggagaatctgagtcccaatgggttcgcggggacttctggaacagggaccccagcgacgccgattggctt

SEQ ID NO: 9331 - DNA, 201 bp, Homo sapiens
ccagtgcgcgggcccctagctcctccccgcagaggccatttccctccggatcccgcactcacccgcccaggtctcggtcagggccagggcccccaagagcrgcaggaggagggttcgggacgccatgaccccatcctcggcgtctggggagaatctgagtcccaatgggttcgcggggacttctggaacagggaccccagc

SEQ ID NO: 9332 - DNA, 201 bp, Homo sapiens
gggggcgaggaggggctgagacccgtccgaccctcctccttgcgctgctccccgggtcctgcgccccagtgcgcgggcccctagctcctccccgcagaggycatttccctccggatcccgcactcacccgcccaggtctcggtcagggccagggcccccaagagcagcaggaggagggttcgggacgccatgaccccatcc

SEQ ID NO: 9333 - DNA, 201 bp, Homo sapiens
agagtgataacttgaattttactgcactattctttcagcttctttgcacatttgaaaatatatacaattataagttggaagaatgagggaaaaaaaagagygagagagagtgctgaatctgaataggctaggggttgggtctcactaggaactataattgatctctgccattttgaaagtgtggccccctgagctgccttc

SEQ ID NO: 9334 - DNA, 201 bp, Homo sapiens
ttataaacattggcttatcatgggttattttattatttattgtgtattttgatttcactttactggcaacacaataaacaatgacatgatgaccctagcartcacatcctctttcttgtgtcaaaaagcaccttccaggaacgtgagaaggagacagttttcgctacagttgattaagggagagcccgctaggctgggcag

SEQ ID NO: 9335 - DNA, 201 bp, Homo sapiens
ataatatgccaatgcttctttactgttataatccttttcgtatgaaaaatatgtggtcaaagaaaagggggtaatatgagttatcacaaaaacatttagtyttgtccctggtttctcctaaaaaccttagaatctcttgagtgattagagtgtctttagaatactgaggaaaggactcttggctgagtggatcctggatac

SEQ ID NO: 9336 - DNA, 201 bp, Homo sapiens
atggtgaaggctggctaactgccatttgtctgtttggttgttcagtgccacatcacacttgggtgttttctgtgggtgtcaacatgggattcaagctcaayccaggtggaccattttcacctgttgatgaatgctgttgggcctgtgcaatttatgactttgtgggtcacacagccacttggaaccacattgttgtttggt

SEQ ID NO: 9337 - DNA, 201 bp, Homo sapiens
cccacttgcgctgggtgatctgagccgccatgtccgccgcggtccaagagcgcaggtcctcgttcaaggcgatgtaatccttgccgtcgtaggcgtcctgscggtacccgcggaggaagcgcccgtccgaccccacgtcgcagccatacatcatctggatggtgtgagaacctggccccgaccccacggtcagcccagtcc

SEQ ID NO: 9338 - DNA, 201 bp, Homo sapiens
atatgaattttcaaatttttttttctaattctgtgataagcttctctttttaaattaatgattaaatgtttgagacatgacagagccttgggtgctgcagrgaaaacagtttgagacagagaaaggagaaacaacagtatctctgcgtttctcttgtaaatacctttaataacaatgttcttcaataagttaacacagttg

SEQ ID NO: 9339 - DNA, 201 bp, Homo sapiens
tgccttcatttcatctggcaaagtcgggattaactgtaagtagagctacgtagactggtggtcagatagcctgcactagttcctaacctatgtaacctacygtctatgatcaagagtagattaagagaagacatggtagaatactattgctgcatgcagtctaggccagcacagcagccaaacctaatgtcacttctagaa

SEQ ID NO: 9340 - DNA, 201 bp, Homo sapiens
aaaatgcacacatcaacacctggttgaattttaaagaaaaaaaaatgcagagaagaaagaaatatcacccaggcttcccctccaaagaaccactgctatcrtattattgaaacttcctggactgcagtgtgaatggtcatccctggagctatcttctgcagtgatgctgacttccattcttttgttttctatgtatatatt

SEQ ID NO: 9341 - DNA, 201 bp, Homo sapiens
catgtggatcactgggcagcacatgcatgtgggagtcacagcaggggcaggtggtggagacagggtggagtagacaagaaactggtgtgagtggagaagartgagctaggctgagagtaatgggatgaggccaaagtggccagaggggaccctgtgataaggagtgcataggaaatggtgggaaactggggtttccttgtg

SEQ ID NO: 9342 - DNA, 201 bp, Homo sapiens
tttctgaacacttgaccatgggacatttaagcagggaccttaatggtgtgaggagtgagccatgtggatcactgggcagcacatgcatgtgggagtcacarcaggggcaggtggtggagacagggtggagtagacaagaaactggtgtgagtggagaagaatgagctaggctgagagtaatgggatgaggccaaagtggcc

SEQ ID NO: 9343 - DNA, 201 bp, Homo sapiens
ttatggagtgggtacctgggggcgaggaggggctgagacccgtccgaccctcctccttgcgctgctccccgggtcctgcgccccagtgcgcgggcccctasctcctccccgcagaggccatttccctccggatcccgcactcacccgcccaggtctcggtcagggccagggcccccaagagcagcaggaggagggttcggg

SEQ ID NO: 9344 - DNA, 201 bp, Homo sapiens
ctccccgcgacccggccgggacacggcggtgctgaaataccttatggagtgggtacctgggggcgaggaggggctgagacccgtccgaccctcctccttgmgctgctccccgggtcctgcgccccagtgcgcgggcccctagctcctccccgcagaggccatttccctccggatcccgcactcacccgcccaggtctcggt

SEQ ID NO: 9345 - DNA, 201 bp, Homo sapiens
tgggttagaagattggtggcggtggtgggaatggcaggggatagatttcagaagaggtcactggacaagacatttctgaacacttgaccatgggacatttragcagggaccttaatggtgtgaggagtgagccatgtggatcactgggcagcacatgcatgtgggagtcacagcaggggcaggtggtggagacagggtgga

SEQ ID NO: 9346 - DNA, 201 bp, Homo sapiens
cactgcgatgtaccggggctccccgcgacccggccgggacacggcggtgctgaaataccttatggagtgggtacctgggggcgaggaggggctgagacccrtccgaccctcctccttgcgctgctccccgggtcctgcgccccagtgcgcgggcccctagctcctccccgcagaggccatttccctccggatcccgcactc

SEQ ID NO: 9347 - DNA, 201 bp, Homo sapiens
tatctattatctatctatcatctatgtacctatgctattggttctttctttcttggtaaccttaataaatcaacagacaataaacaaataaaacctgtcayagtatcactgataattgccattaagaaaaatatgcttgggttagaagattggtggcggtggtgggaatggcaggggatagatttcagaagaggtcactgg

SEQ ID NO: 9348 - DNA, 201 bp, Homo sapiens
cgcacgaactgcgtgtcgtccacgtagcccactgcgatgtaccggggctccccgcgacccggccgggacacggcggtgctgaaataccttatggagtgggwacctgggggcgaggaggggctgagacccgtccgaccctcctccttgcgctgctccccgggtcctgcgccccagtgcgcgggcccctagctcctccccgca

SEQ ID NO: 9349 - DNA, 201 bp, Homo sapiens
ccgcgtcgctgtcgaaccgcacgaactgcgtgtcgtccacgtagcccactgcgatgtaccggggctccccgcgacccggccgggacacggcggtgctgaamtaccttatggagtgggtacctgggggcgaggaggggctgagacccgtccgaccctcctccttgcgctgctccccgggtcctgcgccccagtgcgcgggcc

SEQ ID NO: 9350 - DNA, 201 bp, Homo sapiens
cgcggcatgggcaggttcactcttgtcagtctgtgcgcgggcctgatgttccgtgtgctccggtcccaatactccggtccctcctgctccaaccacggcgmctgcggctacatcctcggagtcgccgcgtcgctgtcgaaccgcacgaactgcgtgtcgtccacgtagcccactgcgatgtaccggggctccccgcgaccc

SEQ ID NO: 9351 - DNA, 201 bp, Homo sapiens
gcggcgcggcatgggcaggttcactcttgtcagtctgtgcgcgggcctgatgttccgtgtgctccggtcccaatactccggtccctcctgctccaaccackgcgcctgcggctacatcctcggagtcgccgcgtcgctgtcgaaccgcacgaactgcgtgtcgtccacgtagcccactgcgatgtaccggggctccccgcg

SEQ ID NO: 9352 - DNA, 201 bp, Homo sapiens
agctctggtggtagtagcggcgcggcatgggcaggttcactcttgtcagtctgtgcgcgggcctgatgttccgtgtgctccggtcccaatactccggtccmtcctgctccaaccacggcgcctgcggctacatcctcggagtcgccgcgtcgctgtcgaaccgcacgaactgcgtgtcgtccacgtagcccactgcgatgt

SEQ ID NO: 9353 - DNA, 201 bp, Homo sapiens
cgccccaggccggggtcattcaccggcctagctctggtggtagtagcggcgcggcatgggcaggttcactcttgtcagtctgtgcgcgggcctgatgttcsgtgtgctccggtcccaatactccggtccctcctgctccaaccacggcgcctgcggctacatcctcggagtcgccgcgtcgctgtcgaaccgcacgaactg

SEQ ID NO: 9354 - DNA, 201 bp, Homo sapiens
gcggggattttggcctaaacggaaaatgaaacctggtaaaggcgcctgggcctctcccgggtcgaggatctggcgggtcccgcagcctcggggtggatctyggagccggagactcgcgggggggacccgggacgtccgtgggggatgaggaggggtcgtgaccttcgccccaggccggggtcattcaccggcctagctctg

SEQ ID NO: 9355 - DNA, 201 bp, Homo sapiens
ttgatcattcatagctggcaagccagactaatgccagcaaccccaaaggagctgccaatggatcttgacagggaagtcactgactctggattgggctatgwtcaaccaggggtagatgtcaatgcttcaaaggctatacaagaaccagaaaaatggagattacaccaatttggactgttgagtcacatttctttacacaag

SEQ ID NO: 9356 - DNA, 201 bp, Homo sapiens
agtcagtttcagcaatttctatctttgtataaatctgtccattttatctaagtggtctaactgattggcttcaggtttttcagagtattaacttataatgwtttttaacttctaaagggtcattagtgatactctctcttgtgttcacaattttggtaatttatctcatttctcatactgtctgttttgacttttggtcaa

SEQ ID NO: 9357 - DNA, 201 bp, Homo sapiens
ttaaattcctagaagaagagaagtgagtaaatggaaagaggcattccagaaagaggttatcttaaaatattaaggaaatgtattattgtaaataaagtctygatgccacaaagaaatagcactcaaatataaaattttctttttttcttctcagcaaggcaattacttctatacaagggtgtgccctcacagatggagcaa

SEQ ID NO: 9358 - DNA, 201 bp, Homo sapiens
tgatagaattcaccagtgaagatatctgggctttggcatttctttgtgagaaggttttaaaattactgtcttagtgtacagttctcttcagattttctatytatttttgagtcagtttcagcaatttctatctttgtataaatctgtccattttatctaagtggtctaactgattggcttcaggtttttcagagtattaac

SEQ ID NO: 9359 - DNA, 201 bp, Homo sapiens
gtgagttttaggttctacacccagagttacaaaccattatgtcagcattattctataagttagaagttatattagtccattctcacactgctatgaagaartacctgagactgggtaatttataaaggaaagaggtttaattgactcacagttctgcatggctgaggagcctgccccaggaaacttacagtcatgacagaa

SEQ ID NO: 9360 - DNA, 201 bp, Homo sapiens
gaagccgcagtgagttttaggttctacacccagagttacaaaccattatgtcagcattattctataagttagaagttatattagtccattctcacactgcyatgaagaaatacctgagactgggtaatttataaaggaaagaggtttaattgactcacagttctgcatggctgaggagcctgccccaggaaacttacagtc

SEQ ID NO: 9361 - DNA, 201 bp, Homo sapiens
taaatttattcctatttctctctttttgtaactactgtgataggaaagtttagattttaattgcttgtatagagaaatatgttaataatttttaatttgaktttatatcctatgggagcttctggattcattttttagtgctagcaggcttttatctgcttgtgaattctacagacaaggtcatgttatctgtgaatagag

SEQ ID NO: 9362 - DNA, 201 bp, Homo sapiens
cccgaccacaatatcccaaggatctcagggatcagcccacttcatacttacttgcagcttcagagtagctcactctatctgtgggaagaaaatgtcctatragaggccagaaaggagtcagggccatacggccctaaacaaaccccctagcctttgatcccagagaagtttcctgaaagtgtaactgctgatctaggacag

SEQ ID NO: 9363 - DNA, 201 bp, Homo sapiens
aatgcctgctggggttttgatagagattgtacagaacctatagatctcttggtggagaattgtcatcttaacaatattattgagctttccaaccgcatctmtccatgaatttagacctttaatttctctcagtaatgttttgtagttttcaacaaactctgctgtcttcctaaatttattcctatttctctctttttgtaa

SEQ ID NO: 9364 - DNA, 201 bp, Homo sapiens
aggaggctgagatcagtgggtcccttgaacccaggaggtcgacactgcagtgcatggtgatcatgccactgcactccagcctgggtgacagagcgagaccrtgtctcaaaaataataatgatgacgatgatacatttaaagcaaatgcaatttaatgtgtaataatacatcctctcttgtgaaaatgtgttatttatttac

SEQ ID NO: 9365 - DNA, 201 bp, Homo sapiens
caggaggctgagatcagtgggtcccttgaacccaggaggtcgacactgcagtgcatggtgatcatgccactgcactccagcctgggtgacagagcgagachatgtctcaaaaataataatgatgacgatgatacatttaaagcaaatgcaatttaatgtgtaataatacatcctctcttgtgaaaatgtgttatttattta

SEQ ID NO: 9366 - DNA, 201 bp, Homo sapiens
aaatacatcctcttcagccatggaaattctccttaccttttaaaactaagttacatgtttaatatcttataattaatttacgccaggtatggtggctcacrcctgccatcctagcactgtggaaggcagaggaaggcagatttgttgactccagaagttcaagatcagcctgggcaaaacccccatctatacaaaaaatta

SEQ ID NO: 9367 - DNA, 201 bp, Homo sapiens
agctgactgattcacccctctgccacccccaattgaaggaaggagctgtattcttatcttggcccatccatcaactgaatgccgctggacatggaacattrcaagtgtgaagcttccagggttctcagttgctcttcctgctgttgtggagactccattggtgtggctcacatccaggcaggcctgcaggaagctgtttcc

SEQ ID NO: 9368 - DNA, 201 bp, Homo sapiens
ttgcctacatagaccacatgttcttcatctattcatgtgttgatgggtgctttgtttgcttccttgtcttggctatggtgagtaatgttgctgtgaatacrggtatgcaatgtttttcttttttacagcctccctcatttcagtggaattaatgttttagtagctacttctgatagcacatatttaaagtatttttgcatg

SEQ ID NO: 9369 - DNA, 201 bp, Homo sapiens
gttggaataagagttattgatatgcagatggaaataatttttagtccaagtccttcaaggagcagatgccaagatgagcttaaagtctgcgacatcttatraggggacacacccgtaagggaatatgggaagtgagccagaaatccctggaaaaggcggcagaccacgatgcaagtgtgaccccaagtgctggacagaagg

SEQ ID NO: 9370 - DNA, 201 bp, Homo sapiens
taagggaatatgggaagtgagccagaaatccctggaaaaggcggcagaccacgatgcaagtgtgaccccaagtgctggacagaaggagagaaagtttgtthgacgcatcctagagcacaggcaatctaaggagagttgagcaaggccgtggaggagccttccagctacagttggccatcagaggagtcccgtgtctcccag

SEQ ID NO: 9371 - DNA, 201 bp, Homo sapiens
ctcagtgtcaataatctgaccagttctgcatctttcctttcgccagtgtacaatctcctgagtaaatggctataggttcctttgctgaaggactgagggamttgtgccagcatttacttccacggagttgcagggtattcctcctagggatatggactcctcctctgtcactgggatctgaatctgaactttggctgaggt

SEQ ID NO: 9372 - DNA, 201 bp, Homo sapiens
atggtgatcatgccactgcattccagcctgggtgacagagcaagaccctgtctcaaaaataataatgatgatgatgacacatttagagcaaatgcaatttratgtgtaataatacatcctctcttgtgaaaatatattatttactgttgcataacaaattacgtaaaacttagctcgaaacaacaaatgtttctcatctcc

SEQ ID NO: 9373 - DNA, 201 bp, Homo sapiens
gccttccaaagtgctgggattacaggcgtgagccactgcacctggccgagtggccactctggaagctttgtaaggtttatcttcaccttctggagtgcccktgttttgccaagcactacagtgcactttctacctgctgctcatccagccaggtcaacaggaagttgtcaatgatatgagctgatttaatatcctattgga

SEQ ID NO: 9374 - DNA, 201 bp, Homo sapiens
acatacatttttaggattaaattgtcaattttccataaaatgcctgctggggttttgatagagattgtacagaacctatagatctcttggtggagaattgycatcttaacaatattattgagctttccaaccgcatctctccatgaatttagacctttaatttctctcagtaatgttttgtagttttcaacaaactctgct

SEQ ID NO: 9375 - DNA, 201 bp, Homo sapiens
cgttggcttttctgcatcctctgcattttcacatacatttttaggattaaattgtcaattttccataaaatgcctgctggggttttgatagagattgtacwgaacctatagatctcttggtggagaattgtcatcttaacaatattattgagctttccaaccgcatctctccatgaatttagacctttaatttctctcagt

SEQ ID NO: 9376 - DNA, 201 bp, Homo sapiens
aatagacatacagaaaagcctggaggagaaactgggtgagtgagatgggaatatgggttttgaaaagcttccatatccctgggaatctgtatagcctcctbcatgaccagtatgtcgcacagactcacaaagcacctgagaatgccctgtgttcacacctcttgctaactttcaatatctgcacaagtaggaaatgaaggc

SEQ ID NO: 9377 - DNA, 201 bp, Homo sapiens
atgttttttgtattttatgtaagaatcttttgcctaactactcaatgtcacaaaaattttctcctatattttcttttagaaattttatggttttaacttayaaattttagctgtttaggtctctaatttgtttgagcttatattttatatggcgataagtgtcacatcatattacctatgcaacttcattgaagatcaatt

SEQ ID NO: 9378 - DNA, 201 bp, Homo sapiens
aagaatacagtctatacaaaaatagtttagaaaacatgattttcaaagtcaccacatgttagtattcaaaataaaaatgaggtatgcaattaaactagacrgtaagacccattctcaagaaaaaagaggaattgacagaaactgttcctgagaaaggccattgaacatacttactggacaaacaactttgaattgactgct

SEQ ID NO: 9379 - DNA, 201 bp, Homo sapiens
aaaggaaactatgggcaaaaaactaaaggaaatcagaagaactatcttaactcaaatagagaacatcaataaaaagatagaaagtttaaaaagaaaccaartagaaattttggagctgaaaagtgcaataactgaaatgaaaaatttactagagtaattttactattttttactatattttactagagtaaatttactatt

SEQ ID NO: 9380 - DNA, 201 bp, Homo sapiens
aggcgttgggatgacaaatttaaagctgagaaagtaaaaggactatcaaccaagaattgtatgtctgcaaaactctccttcagaaatgatggagaaatcahgacattcacaggttaaaaaaagctgactgagattgtctcaaccctacaagacatatatatatacacacacacatatatatatttgtaattcctctcttgt

SEQ ID NO: 9381 - DNA, 201 bp, Homo sapiens
tttcaccatgttagccaggatggtctcgatctcctgacctcatgatccgcccgcctcagcctcccaaagtgctgggattacaggcgtgaggcaccgcaccyggcccacagccctttcattttcaaagcccatgctggaggaaacccctcatgctgagtccctctcacactgtgagtctctatgctcaggaagaacccagtc

SEQ ID NO: 9382 - DNA, 201 bp, Homo sapiens
tgggactacaggcacccgccactacgcttggctaatttttttttttttttttgtattcttagtagagacagggtttcaccatgttagccaggatggtctcratctcctgacctcatgatccgcccgcctcagcctcccaaagtgctgggattacaggcgtgaggcaccgcacccggcccacagccctttcattttcaaagc

SEQ ID NO: 9383 - DNA, 201 bp, Homo sapiens
tggccggatctcggctcactgccagctatggctcccaggttcacgccattctcctgtctcagcctcccaagcagctgggactacaggcacccgccactacrcttggctaatttttttttttttttttgtattcttagtagagacagggtttcaccatgttagccaggatggtctcgatctcctgacctcatgatccgcccg

SEQ ID NO: 9384 - DNA, 201 bp, Homo sapiens
cttaatgggcttcccagttaggagctgcctgctcagggctggaagtggaggagcactgagctgcaggtggagggcagaaccacagtgtttagggcctgccyttgtgtgcaggtgtctctacaggtgaggtgggactggggactgaggaagagaaggactgtgcgtgtgacccagcccagtcctggaaggacatggagccag

SEQ ID NO: 9385 - DNA, 201 bp, Homo sapiens
gggtgcagtggccggatctcggctcactgccagctatggctcccaggttcacgccattctcctgtctcagcctcccaagcagctgggactacaggcacccrccactacgcttggctaatttttttttttttttttgtattcttagtagagacagggtttcaccatgttagccaggatggtctcgatctcctgacctcatga

SEQ ID NO: 9386 - DNA, 201 bp, Homo sapiens
gggggtcagggtaggcagggcctccttgagcaagggggttcccagggtcaggtcagctgcagaccccatagcagctacatgtttccatgctgggcctgccrtgctgatgggattcttaatgggcttcccagttaggagctgcctgctcagggctggaagtggaggagcactgagctgcaggtggagggcagaaccacagtg

SEQ ID NO: 9387 - DNA, 201 bp, Homo sapiens
ttttattttatttatttattttttggagatggagtcttgctctgtagcccaggcttgggtgcagtggccggatctcggctcactgccagctatggctcccrggttcacgccattctcctgtctcagcctcccaagcagctgggactacaggcacccgccactacgcttggctaatttttttttttttttttgtattcttag

SEQ ID NO: 9388 - DNA, 201 bp, Homo sapiens
cagagactcggggagacccgggcggtccgtgggggatgtagaggggtagtgatctgcgcccccggccggtgtcactcacaggcctcactctggttgtagtrgccgctcagggtccgcaggttcactcggtaaaactgtgctttggccttggcggtccctgtctcctcttcccaatattccggcccctccggctccatcctg

SEQ ID NO: 9389 - DNA, 201 bp, Homo sapiens
cctgctaggaacaggagagaaaggcctttcagcctccccaagcagcagccctggggagaagctgtgcttccagggatgagtggaccaggctggagcaagcwtggcccaagtgcaggtcatgggcctgggggtcagggtaggcagggcctccttgagcaagggggttcccagggtcaggtcagctgcagaccccatagcagc

SEQ ID NO: 9390 - DNA, 201 bp, Homo sapiens
aatgcctccaagttctttgccaatgcataacaaaagtgacctttcctctaggtcccaataagttcctcatctccatgtgagaccttatcagcctggactchattgtccatatcactatcagcattttggtcacaacagcttaacaaatctctaggaagttgcaaattttcccccattttcttgtcttctgaactctccaaa

SEQ ID NO: 9391 - DNA, 201 bp, Homo sapiens
tcaagttcaaagttctacagatccctagggagggggaacaatgcctccaagttctttgccaatgcataacaaaagtgacctttcctctaggtcccaataarttcctcatctccatgtgagaccttatcagcctggactctattgtccatatcactatcagcattttggtcacaacagcttaacaaatctctaggaagttgc

SEQ ID NO: 9392 - DNA, 201 bp, Homo sapiens
ttggctcaggattctgatgtctggaaatgtttgagcatttagcgagggcctcaggctgcttccactcatggcagaaggcaaaggggagctggtatgtgcaraagtcacgtggtaagagaggaacagagggagtaggaaggtgcgagactcttttaacaactagctcttttggaaactaatagggcaacaattcattgactc

SEQ ID NO: 9393 - DNA, 201 bp, Homo sapiens
tctttgatggagcagtaaaaaatttatgtggattaaagtttgatccttgagtatacgtctttaatattctttgtgagaaaatgggaaatatgcataagacmcttactgcacagagaagcaggatggtagccttgagaaagggcacttgtgtgactcagttatgatttcaaccagcagatctcactcacctacggaaagaca

SEQ ID NO: 9394 - DNA, 201 bp, Homo sapiens
tcggaccccaggtcgcagccaatcatccactggagggtgtgagaacctggccccaccccctcggtcagccccgcccaccgagcctcgccctcgcccggacmcacccgcggggattttggtaaaggcgccttggggttctcccaggtagagggtctgggcgggtcccgcggcctcggggtggatcccagacccggagactcg

SEQ ID NO: 9395 - DNA, 201 bp, Homo sapiens
gtgtctttgatggagcagtaaaaaatttatgtggattaaagtttgatccttgagtatacgtctttaatattctttgtgagaaaatgggaaatatgcataaracccttactgcacagagaagcaggatggtagccttgagaaagggcacttgtgtgactcagttatgatttcaaccagcagatctcactcacctacggaaag

SEQ ID NO: 9396 - DNA, 201 bp, Homo sapiens
taaaaggactatcaaccaagaattgtatgtctgcaaaactctccttcagaaatgatggagaaatcacgacattcacaggttaaaaaaagctgactgagatdgtctcaaccctacaagacatatatatatacacacacacatatatatatttgtaattcctctcttgtttttcctatttgatttaaaagaaaatgtccatcg

SEQ ID NO: 9397 - DNA, 201 bp, Homo sapiens
gtcggtagcacacccagcacctcagcagaaccaggcagtggctccaaactgcagtcccatttaagagtgtctttgatggagcagtaaaaaatttatgtggrttaaagtttgatccttgagtatacgtctttaatattctttgtgagaaaatgggaaatatgcataagacccttactgcacagagaagcaggatggtagcct

SEQ ID NO: 9398 - DNA, 201 bp, Homo sapiens
atttaaaagaaaatgtccatcgaccaatgaatggagaaacaacatatagttttttcctacaatagaatattatttggtcataaaatgaataaagcactggyatatgctaaaacattgctgaatcttgaaaacaagacaagtgaaggaagccagtcacaggaggctacgtaacttatgagcccatttttgtgaaatattcat

SEQ ID NO: 9399 - DNA, 201 bp, Homo sapiens
ttacccttctgggtctccatggtccatcatttcacactctccttttatgtatataaagagatattaaccaaatacggcagagtggtaacttgaattttacygcaccgttctttcagcttctttgcacatttgaaaatttatacagttataagttggaagaatgagggaaaatagagagcaagacagtgctgaataggaata

SEQ ID NO: 9400 - DNA, 201 bp, Homo sapiens
agaatgaagaatcggcaagcttaaaggtaagacaattgaaattatccagtttgaggtgcagaaataaaaaaaaattatgaagaaaaatgaacagaacttawgaaaactgtgagacaacaccaagcatatgcattttgggaatcctcaaagaaaggagagagaaaaagaagaatggctatttggaggaataataacttcaaa

SEQ ID NO: 9401 - DNA, 201 bp, Homo sapiens
atattatttggtcataaaatgaataaagcactggcatatgctaaaacattgctgaatcttgaaaacaagacaagtgaaggaagccagtcacaggaggctamgtaacttatgagcccatttttgtgaaatattcataagaggcaagtcgatagagaaagaagtggatttgtggcgacagggtctgctggcaggtggaaatgg

SEQ ID NO: 9402 - DNA, 201 bp, Homo sapiens
cacacacaggcacacacacacattcacacacatgctatacaaacatgtctacctgtatctataaagagacatgttatgttattttattttttatttcttarattcatatatattcatgaggcacaagtgcaattttgctacattgctatattggttgtggtaaagtcagggccttcagagcatccagcactggagacaagc

SEQ ID NO: 9403 - DNA, 201 bp, Homo sapiens
ctctctacacggacacacacacacaggcggacacacacacaggcacacacacacattcacacacatgctatacaaacatgtctacctgtatctataaagaracatgttatgttattttattttttatttcttaaattcatatatattcatgaggcacaagtgcaattttgctacattgctatattggttgtggtaaagtca

SEQ ID NO: 9404 - DNA, 201 bp, Homo sapiens
cagggagggctgtgctcgattcctggtcctcaccagcattctttcctacacagccccttcattttttattttatttatttattttttggagatggagtctygctctgtagcccaggcttgggtgcagtggccggatctcggctcactgccagctatggctcccaggttcacgccattctcctgtctcagcctcccaagcag

SEQ ID NO: 9405 - DNA, 201 bp, Homo sapiens
tcaatgtagagaacagggagggctgtgctcgattcctggtcctcaccagcattctttcctacacagccccttcattttttattttatttatttattttttkgagatggagtcttgctctgtagcccaggcttgggtgcagtggccggatctcggctcactgccagctatggctcccaggttcacgccattctcctgtctca

SEQ ID NO: 9406 - DNA, 201 bp, Homo sapiens
atggagggtgactgcttaatgggtgcagagttccccctgaggtgataaaaacactctggaactagagagtgatgatggttacataacattgtgaacatacraattgtcactgcattgtgcactttaaatggttacggtggtatcctttgtgtttatgtgtattttaccacaatgaaaaagaggctgaggaaggtattccaa

SEQ ID NO: 9407 - DNA, 201 bp, Homo sapiens
ccatgtgtgttttatgtttaagttactttggaatagctcagtcacaaaatcttaatctcttaatttgtgctgcctctctacacggacacacacacacagghggacacacacacaggcacacacacacattcacacacatgctatacaaacatgtctacctgtatctataaagagacatgttatgttattttattttttatt

SEQ ID NO: 9408 - DNA, 201 bp, Homo sapiens
gtccctgttccttgctggctgtcaatgtagagaacagggagggctgtgctcgattcctggtcctcaccagcattctttcctacacagccccttcatttttwattttatttatttattttttggagatggagtcttgctctgtagcccaggcttgggtgcagtggccggatctcggctcactgccagctatggctcccaggt

SEQ ID NO: 9409 - DNA, 201 bp, Homo sapiens
acagacacatttatccatgtgtgttttatgtttaagttactttggaatagctcagtcacaaaatcttaatctcttaatttgtgctgcctctctacacggamacacacacacaggcggacacacacacaggcacacacacacattcacacacatgctatacaaacatgtctacctgtatctataaagagacatgttatgtta

SEQ ID NO: 9410 - DNA, 201 bp, Homo sapiens
aatgcagtttctggcagttgtaagactgaggtccctgttccttgctggctgtcaatgtagagaacagggagggctgtgctcgattcctggtcctcaccagyattctttcctacacagccccttcattttttattttatttatttattttttggagatggagtcttgctctgtagcccaggcttgggtgcagtggccggatc

SEQ ID NO: 9411 - DNA, 201 bp, Homo sapiens
ggcttatacagaggtggcagaatgcagtttctggcagttgtaagactgaggtccctgttccttgctggctgtcaatgtagagaacagggagggctgtgctygattcctggtcctcaccagcattctttcctacacagccccttcattttttattttatttatttattttttggagatggagtcttgctctgtagcccaggc

SEQ ID NO: 9412 - DNA, 201 bp, Homo sapiens
gggcttccaaaagctgtgttttcattttgaatcctccttcaggcttatacagaggtggcagaatgcagtttctggcagttgtaagactgaggtccctgttycttgctggctgtcaatgtagagaacagggagggctgtgctcgattcctggtcctcaccagcattctttcctacacagccccttcattttttattttattt

SEQ ID NO: 9413 - DNA, 201 bp, Homo sapiens
acccatttatctgcttatagttccttgatcagaaatctgggcaaaattgtggatggaatctctcttctgggcttccaaaagctgtgttttcattttgaatvctccttcaggcttatacagaggtggcagaatgcagtttctggcagttgtaagactgaggtccctgttccttgctggctgtcaatgtagagaacagggagg

SEQ ID NO: 9414 - DNA, 201 bp, Homo sapiens
gcaggtcctcgttcaaggcgatgtaatccttgccgtcgtaggcgtcctgccggtacccgcggaggaagcgcccgtccgaccccacgtcgcagccatacatyatctggatggtgtgagaacctggccccgaccccacggtcagcccagtcccccgagccccgtccggccccgaccaacccggggggatttttggcctaaact

SEQ ID NO: 9415 - DNA, 201 bp, Homo sapiens
cagataattataaagtgcaaaacacggaaaaagttcagaaaatttttattttatgtaactagtgtgcatatcaattcatcaattcattcgtgcactaccaygcctggcgaaacaacacccatttatctgcttatagttccttgatcagaaatctgggcaaaattgtggatggaatctctcttctgggcttccaaaagctgt

SEQ ID NO: 9416 - DNA, 201 bp, Homo sapiens
agagcgcaggtcctcgttcaaggcgatgtaatccttgccgtcgtaggcgtcctgccggtacccgcggaggaagcgcccgtccgaccccacgtcgcagccawacatcatctggatggtgtgagaacctggccccgaccccacggtcagcccagtcccccgagccccgtccggccccgaccaacccggggggatttttggcct

SEQ ID NO: 9417 - DNA, 201 bp, Homo sapiens
gacaggatttcattcttttttatggctgaattgcattccattgtgtatatatataccaccatttattcattcacccattgatgaattcacccattgatttvataacttcgctactgtgaatagtgcttcaataaacctgggggtgcaggtagtcttttgatatattgatttcttttcctttatataaatacccatgagtgg

SEQ ID NO: 9418 - DNA, 201 bp, Homo sapiens
aaccataaggtctccaagtggatctcttatttccacacacacatctcctgccctccttgtgtgatagcagccctgcctcctcctcttctcacctgcttgtrtctggacacatactattcaaacatccctgggggcagccataatgtgtatttccatggactctcatttaaatgtctccttgccagggtgccccctttggga

SEQ ID NO: 9419 - DNA, 201 bp, Homo sapiens
tgggtctggtcctccccatcccgctgccaggtcagtgtgatctccgcagggtagaagctcagggcccagcacctcagggtggcttcatggtcagagacagsgtggtgagtcatatgcgttttgggggcgtctgtcaggaagagtcagatcattcaggcattttgcatctgtcatgggacactcctccagcacacatgtggc

SEQ ID NO: 9420 - DNA, 201 bp, Homo sapiens
ccctgaccctgctaaaggtcagagaggctcctgctttccctaaaagacatgacacccccgtctccctccttaccccatctcagggtgaggggcttgggcaraccctcatgctgcacatggcaggtgtatctctgctcctgtccagaaggcaccaccacagccgcccacttctggaaggttccatcccctgcaggcctggtc

SEQ ID NO: 9421 - DNA, 201 bp, Homo sapiens
agtatatacctaggagtggaaatggtagctgtagaggactagcttgtttaactttattagatgatatgaaattgattttcaaaatggatgttttatattcytataggcaatggaggagagtacagattgttccacatccttgctagcatttatagttattaatcattttaattttagccattctaatggttgcttagtggt

SEQ ID NO: 9422 - DNA, 201 bp, Homo sapiens
aatgtttgccattttaactctgtgctttacatgaaagcttgtgactcattttgagttatttttgtatgaagcatgaggttttggctcaggttattttttttccactgtggttgtccagttgttccatcaccatttgatgggaaagctctccttccttcattgaattgcttttgtgcttttgtaaaagtcagttgagcatgt

SEQ ID NO: 9423 - DNA, 201 bp, Homo sapiens
ttctggtctgcgttttatttcaagtgtctgggaagggatagtgtgaggttcaggagagaaggagaggtctgtctccatgctttgacacagcataaagaaabctcccctcctcccccacatctccccaccagttctcagtgagggacagattcacagcaacaccgaaagggctgggaagggatggggggacatttgcagcca

SEQ ID NO: 9424 - DNA, 201 bp, Homo sapiens
ccggcccctcctgctctatccacggtgcccgcggctccatcctctggctcgcggcgtcgctgtcaaaccgcacgaactgcgtgtcgtccacgtagcccackgcgatgaagcggggctccccgcggccgggccgggacacggatgtggtgaaatacctcatggagtgggagcctgggggcgaggagtggctgagacccaccc

SEQ ID NO: 9425 - DNA, 201 bp, Homo sapiens
ctggttgtagtagccgctcagggtccgcaggttcactcggtaaaactgtgctttggccttggcggtccctgtctcctcttcccaatattccggcccctcckgctccatcctgggactcgtggcgtcgctgtcgagccgcacgcactgcgtgtcgtccacgtcgcccacggagaggaagcggggatccgcgcggccgggccg

SEQ ID NO: 9426 - DNA, 201 bp, Homo sapiens
ctcgctctggttgtagtagccgcgcagggtccccaggttcgctcggtcagtctgtgactgggccttcacattccgtgtctgcaggtcccaatactccggcycctcctgctctatccacggtgcccgcggctccatcctctggctcgcggcgtcgctgtcaaaccgcacgaactgcgtgtcgtccacgtagcccacggcgat

SEQ ID NO: 9427 - DNA, 201 bp, Homo sapiens
cctcgctctggttgtagtagccgcgcagggtccccaggttcgctcggtcagtctgtgactgggccttcacattccgtgtctgcaggtcccaatactccggmccctcctgctctatccacggtgcccgcggctccatcctctggctcgcggcgtcgctgtcaaaccgcacgaactgcgtgtcgtccacgtagcccacggcga

SEQ ID NO: 9428 - DNA, 201 bp, Homo sapiens
ctgattcacccctctgccacccccaattgaaggaaggagctgtattcttatcttggcccatccatcaactgaatgccgctggacatggaacattacaagtrtgaagcttccagggttctcagttgctcttcctgctgttgtggagactccattggtgtggctcacatccaggcaggcctgcaggaagctgtttcctaattc

SEQ ID NO: 9429 - DNA, 201 bp, Homo sapiens
cggcctcgctctggttgtagtagccgcgcagggtccccaggttcgctcggtcagtctgtgactgggccttcacattccgtgtctgcaggtcccaatactcmggcccctcctgctctatccacggtgcccgcggctccatcctctggctcgcggcgtcgctgtcaaaccgcacgaactgcgtgtcgtccacgtagcccacgg

SEQ ID NO: 9430 - DNA, 201 bp, Homo sapiens
tagctgggactacaggtgcccaccacagtgttcagccacttttcattgttattttacttcaaatgttttattttgaatgttaaaaatacatgtttctacaytagaaatatgaaaatgtatttgattacagaagaatttaaaatgcacacatcaacacctggttgaattttaaagaaaaaaaaatgcagagaagaaagaaat

SEQ ID NO: 9431 - DNA, 201 bp, Homo sapiens
gtaggaaatgaaggccaaagcagtattgtaaactgcccagcagagtgttgagggcatgccccaaaacacacagagagcccagataaaaagattgaattttyttttcttatttctttttggctgaagatgtttcaggaaatatctatcaaatcatgagttgaccactaagcttacagaatagagacttcagtgatgacacac

SEQ ID NO: 9432 - DNA, 201 bp, Homo sapiens
cggggtcactcaccggcctcgctctggttgtagtagccgcgcagggtccccaggttcgctcggtcagtctgtgactgggccttcacattccgtgtctgcasgtcccaatactccggcccctcctgctctatccacggtgcccgcggctccatcctctggctcgcggcgtcgctgtcaaaccgcacgaactgcgtgtcgtcc

SEQ ID NO: 9433 - DNA, 201 bp, Homo sapiens
gggaggcagaggttgcagttagccgggatcatgccattgcactccaccctgggcaacaagagcaaaactccatcaaaaaaaaaaaaaaaaaaattccctcrgagagctgttaaagcaagaattcctggacctaccaccagatattctgattgggttgataaagaatcaactgcattggaaccctgaaaaatcatcaaaggt

SEQ ID NO: 9434 - DNA, 201 bp, Homo sapiens
tggtctgcgttttatttcaagtgtctgggaagggatagtgtgaggttcaggagagaaggagaggtctgtctccatgctttgacacagcataaagaaaccthccctcctcccccacatctccccaccagttctcagtgagggacagattcacagcaacaccgaaagggctgggaagggatggggggacatttgcagccagtg

SEQ ID NO: 9435 - DNA, 201 bp, Homo sapiens
gttcagccacttttcattgttattttacttcaaatgttttattttgaatgttaaaaatacatgtttctacattagaaatatgaaaatgtatttgattacasaagaatttaaaatgcacacatcaacacctggttgaattttaaagaaaaaaaaatgcagagaagaaagaaatatcacccaggcttcccctccaaagaacca

SEQ ID NO: 9436 - DNA, 201 bp, Homo sapiens
ctttcatcttgtcttttggtaaagaatattttgacaagcatgtttgtacatgaagattcttctatggttgtgattttaaaaattcatagaacactcaggayggacatggtggctcatgcctgtacttccagcactttgggaggctcaggctggcagattgcttgagcccctgagtttgtgaccagcctaggcaacatagag

SEQ ID NO: 9437 - DNA, 201 bp, Homo sapiens
ggactaaattaatttttgtcgactgaatgaatgaaatatgagtgtattaaattgcattacagataattataaagtgcaaaacacggaaaaagttcagaaartttttattttatgtaactagtgtgcatatcaattcatcaattcattcgtgcactaccatgcctggcgaaacaacacccatttatctgcttatagttcctt

SEQ ID NO: 9438 - DNA, 201 bp, Homo sapiens
agcatatgaggggatatctggtttatcgtagggactaaattaatttttgtcgactgaatgaatgaaatatgagtgtattaaattgcattacagataattabaaagtgcaaaacacggaaaaagttcagaaaatttttattttatgtaactagtgtgcatatcaattcatcaattcattcgtgcactaccatgcctggcgaa

SEQ ID NO: 9439 - DNA, 201 bp, Homo sapiens
tagtccccaccacactgtcacttgtgagttgtgacactagcactgtcccatgacctgttacgtgactgttcttttcacagtggtcctgctcctgggagtcrgagtgtgtcatctctccacttaaaacactccagtgtctccacctcggtcttgagaaacttctggagtgtcaggcacgtgagcatatgaggggatatctgg

SEQ ID NO: 9440 - DNA, 201 bp, Homo sapiens
ctccgtccttttcatccttcaggccctcctgtccccttagtccccaccacactgtcacttgtgagttgtgacactagcactgtcccatgacctgttacgtractgttcttttcacagtggtcctgctcctgggagtcggagtgtgtcatctctccacttaaaacactccagtgtctccacctcggtcttgagaaacttctg

SEQ ID NO: 9441 - DNA, 201 bp, Homo sapiens
ctccttttcttcacctcctgcttctccagcccttctctccgtccttttcatccttcaggccctcctgtccccttagtccccaccacactgtcacttgtgarttgtgacactagcactgtcccatgacctgttacgtgactgttcttttcacagtggtcctgctcctgggagtcggagtgtgtcatctctccacttaaaaca

SEQ ID NO: 9442 - DNA, 201 bp, Homo sapiens
atagagcacagtacccagaataaggtaggtgcttaatgatgtttaccatttgaatgagtttcctggaagtacttagcagatcaggaattctgatgcataarcacaattcaaaggtggctgaggagtgacatcagagaacatagtggcataggaactccaagggccacctctgcacagagacaatgtgcttgtaaaacatca

SEQ ID NO: 9443 - DNA, 201 bp, Homo sapiens
acttctatgaagtccaaggaagtttgattcttttatctgaggctcaactccatagagcacagtacccagaataaggtaggtgcttaatgatgtttaccatwtgaatgagtttcctggaagtacttagcagatcaggaattctgatgcataagcacaattcaaaggtggctgaggagtgacatcagagaacatagtggcata

SEQ ID NO: 9444 - DNA, 201 bp, Homo sapiens
aaacctaagaattctgctgctttcgaattctttcctctgctccttttcttcacctcctgcttctccagcccttctctccgtccttttcatccttcaggccstcctgtccccttagtccccaccacactgtcacttgtgagttgtgacactagcactgtcccatgacctgttacgtgactgttcttttcacagtggtcctgc

SEQ ID NO: 9445 - DNA, 201 bp, Homo sapiens
taaaacaatgtatttaaacctaagaattctgctgctttcgaattctttcctctgctccttttcttcacctcctgcttctccagcccttctctccgtccttytcatccttcaggccctcctgtccccttagtccccaccacactgtcacttgtgagttgtgacactagcactgtcccatgacctgttacgtgactgttcttt

SEQ ID NO: 9446 - DNA, 201 bp, Homo sapiens
attaaaatccataaaacaatgtatttaaacctaagaattctgctgctttcgaattctttcctctgctccttttcttcacctcctgcttctccagcccttcyctccgtccttttcatccttcaggccctcctgtccccttagtccccaccacactgtcacttgtgagttgtgacactagcactgtcccatgacctgttacgt

SEQ ID NO: 9447 - DNA, 201 bp, Homo sapiens
tttcatccaagctggcactaagttgtgtctgtagagacctgtccatgactctgtgtggctggcagcccctgggaggtgcaggtggtgataagaccaggggrtgccatggtcatggaccacgcttcatcccctttcctctgaggtgtgtcccgcgggcagataatgtactgaaattctgagccagtggctcaggaatgccaa

SEQ ID NO: 9448 - DNA, 201 bp, Homo sapiens
gctaagtgttgtgtatattttataggaacacttagtaatttttaaacctgattaacattaaaaaattagtttttaggcagacccacatgaggtattaaagrccaactgccaaggacaccctgctaggctctgtagatggatgtattaaaatccataaaacaatgtatttaaacctaagaattctgctgctttcgaattctt

SEQ ID NO: 9449 - DNA, 201 bp, Homo sapiens
gaggctcctgctttccctaacagacatgatgcctccatctccctccttactccatctcagcatgaggggctccggcagcccctcatgctgcacatggcacrtgtatctctgctcctctccagaaggcaccaccacagctgcccacttctggaaggttccatcccctgcaggcctggtctccacgagctccacgtcctgggt

SEQ ID NO: 9450 - DNA, 201 bp, Homo sapiens
agaggctcctgctttccctaacagacatgatgcctccatctccctccttactccatctcagcatgaggggctccggcagcccctcatgctgcacatggcaygtgtatctctgctcctctccagaaggcaccaccacagctgcccacttctggaaggttccatcccctgcaggcctggtctccacgagctccacgtcctggg

SEQ ID NO: 9451 - DNA, 201 bp, Homo sapiens
ccggggtcactcaccggcctcgctctggttgtagtagccgcgcagggtccccaggttcgctcggtcagtctgtgactgggccttcacattccgtgtctgcyggtcccaatactccggcccctcctgctctatccacggtgcccgcggctccatcctctggctcgcggcgtcgctgtcaaaccgcacgaactgcgtgtcgtc

SEQ ID NO: 9452 - DNA, 201 bp, Homo sapiens
cgggccggggtcactcaccggcctcgctctggttgtagtagccgcgcagggtccccaggttcgctcggtcagtctgtgactgggccttcacattccgtgtstgcaggtcccaatactccggcccctcctgctctatccacggtgcccgcggctccatcctctggctcgcggcgtcgctgtcaaaccgcacgaactgcgtgt

SEQ ID NO: 9453 - DNA, 201 bp, Homo sapiens
gccccgggccggggtcactcaccggcctcgctctggttgtagtagccgcgcagggtccccaggttcgctcggtcagtctgtgactgggccttcacattccstgtctgcaggtcccaatactccggcccctcctgctctatccacggtgcccgcggctccatcctctggctcgcggcgtcgctgtcaaaccgcacgaactgc

SEQ ID NO: 9454 - DNA, 201 bp, Homo sapiens
cctgcgccccgggccggggtcactcaccggcctcgctctggttgtagtagccgcgcagggtccccaggttcgctcggtcagtctgtgactgggccttcacwttccgtgtctgcaggtcccaatactccggcccctcctgctctatccacggtgcccgcggctccatcctctggctcgcggcgtcgctgtcaaaccgcacga

SEQ ID NO: 9455 - DNA, 201 bp, Homo sapiens
acctgcgccccgggccggggtcactcaccggcctcgctctggttgtagtagccgcgcagggtccccaggttcgctcggtcagtctgtgactgggccttcayattccgtgtctgcaggtcccaatactccggcccctcctgctctatccacggtgcccgcggctccatcctctggctcgcggcgtcgctgtcaaaccgcacg

SEQ ID NO: 9456 - DNA, 201 bp, Homo sapiens
taatttgtaatctttggtatatgtaactcagtactgtcataaaatattaataatgtagctttcaaagaaaaaagtcatgtaaaatacataacatgctgtgytataatttctttatttatcttcccacccccacctttgacttctatgaagtccaaggaagtttgattcttttatctgaggctcaactccatagagcacagt

SEQ ID NO: 9457 - DNA, 201 bp, Homo sapiens
ggcaggaaaggttttctcgtaggtcactgggacattggccagaaaaaggcatgaaaattacatgttagtttctcaaaattcctgctttaagtattggtgtvcatcaacataatttcagctggataatcttaataggatttcccccaatactgatgttgtaaaggatgttgaatagaacaggaagtcaaatttggggcttcg

SEQ ID NO: 9458 - DNA, 201 bp, Homo sapiens
ttgctcctgctctcacctgcggtgtctcctatagagggattgtcagttctggttccctgtaggcaggaaaggttttctcgtaggtcactgggacattggcbagaaaaaggcatgaaaattacatgttagtttctcaaaattcctgctttaagtattggtgtccatcaacataatttcagctggataatcttaataggattt

SEQ ID NO: 9459 - DNA, 201 bp, Homo sapiens
caaccacagcacgggcagtgcaggtctgtggttgctcctgctctcacctgcggtgtctcctatagagggattgtcagttctggttccctgtaggcaggaawggttttctcgtaggtcactgggacattggccagaaaaaggcatgaaaattacatgttagtttctcaaaattcctgctttaagtattggtgtccatcaaca

SEQ ID NO: 9460 - DNA, 201 bp, Homo sapiens
accaccgaccctgttaaaggtcttcagagaggctcctgctttccctaacagacatgatgcctccatctccctccttactccatctcagcatgaggggctcyggcagcccctcatgctgcacatggcacgtgtatctctgctcctctccagaaggcaccaccacagctgcccacttctggaaggttccatcccctgcaggcc

SEQ ID NO: 9461 - DNA, 201 bp, Homo sapiens
tctatggcttctgcgaggagccaggacatccagatagaatgggccacatgaatcaattggtacgtgtttctcctttcaggcagagtctcactcacttcacrcaagcacagagatccccatataggcaactagattatgagaaacaaacgcacccatccaaacccaaagaatggactctgagacccagagaacagcaaaagt

SEQ ID NO: 9462 - DNA, 201 bp, Homo sapiens
gaagtatccactgctaagtgttgtgtatattttataggaacacttagtaatttttaaacctgattaacattaaaaaattagtttttaggcagacccacatraggtattaaaggccaactgccaaggacaccctgctaggctctgtagatggatgtattaaaatccataaaacaatgtatttaaacctaagaattctgctgc

SEQ ID NO: 9463 - DNA, 201 bp, Homo sapiens
tttattcacctcaaagttgcaactgttcaatgtagtcacaatgcccctcactagtgctcatgcactgcctgtttttaggaagtatccactgctaagtgttrtgtatattttataggaacacttagtaatttttaaacctgattaacattaaaaaattagtttttaggcagacccacatgaggtattaaaggccaactgcca

SEQ ID NO: 9464 - DNA, 201 bp, Homo sapiens
cagtacaggctttattcacctcaaagttgcaactgttcaatgtagtcacaatgcccctcactagtgctcatgcactgcctgtttttaggaagtatccactkctaagtgttgtgtatattttataggaacacttagtaatttttaaacctgattaacattaaaaaattagtttttaggcagacccacatgaggtattaaagg

SEQ ID NO: 9465 - DNA, 201 bp, Homo sapiens
agtcagtacaggctttattcacctcaaagttgcaactgttcaatgtagtcacaatgcccctcactagtgctcatgcactgcctgtttttaggaagtatccrctgctaagtgttgtgtatattttataggaacacttagtaatttttaaacctgattaacattaaaaaattagtttttaggcagacccacatgaggtattaa

SEQ ID NO: 9466 - DNA, 201 bp, Homo sapiens
aggtcggccggattccgcacccctgcctccaaccaccgcccatgggcggggaggagagactaccggccgcaagcagaacgcagaacgagaagagcggtccygttagccatgaatgtgtccctcatctgtaccgcctccggccccgcccgggagaacgcgacgtcaccacatccatcacttgttctctttcactcttcccgt

SEQ ID NO: 9467 - DNA, 201 bp, Homo sapiens
ggcaccggagggacaacctggagggctccgggagcaccgcaaaggtccaagcggagccaatcctcacaagcccagggaagggcaacgtgacaggccggcgsgacagccccaccgccgcgaagaggggctgcccaaaaggcaacagccataggagatgagcaggggtgcctgctgcgtcggagaactcatctccccaacccc

SEQ ID NO: 9468 - DNA, 201 bp, Homo sapiens
ttctctgtttctgcctttctagggagcaaccactttcaagtttcagctgattcttttgactttactttcacatatctaagcaccaaagcaccatttctttrttaacattgcttgatttttcagttgcagccattgactattgcactgcacgatggtggaatcaatagttaagattacttgttctctttctttttgtatttt

SEQ ID NO: 9469 - DNA, 201 bp, Homo sapiens
atacaaagtagcacactgtgtactttgcaaccaggtacgttgcaaccaggagtcagtacaggctttattcacctcaaagttgcaactgttcaatgtagtcrcaatgcccctcactagtgctcatgcactgcctgtttttaggaagtatccactgctaagtgttgtgtatattttataggaacacttagtaatttttaaacc

SEQ ID NO: 9470 - DNA, 201 bp, Homo sapiens
tctcctcaatacaaagtagcacactgtgtactttgcaaccaggtacgttgcaaccaggagtcagtacaggctttattcacctcaaagttgcaactgttcartgtagtcacaatgcccctcactagtgctcatgcactgcctgtttttaggaagtatccactgctaagtgttgtgtatattttataggaacacttagtaatt

SEQ ID NO: 9471 - DNA, 201 bp, Homo sapiens
aagcgttacaacaggactcacaaagcttctaagtttcacttttgcagtgtacctgtgactcccgcttgtcatattttaaatttgccatcattccatagctytgagtttctgtgtgagtccaggatatctcctcaatacaaagtagcacactgtgtactttgcaaccaggtacgttgcaaccaggagtcagtacaggcttta

SEQ ID NO: 9472 - DNA, 201 bp, Homo sapiens
gtgcatgagacagaatagagaccagtttatttatttatttgtttattaaatacattggatagcagaaccttggtaacccctgaatgatcaggaatctaatmggtaaaaaatgtgactttggccccatgatgtataaatgtgcccaaaagcgttacaacaggactcacaaagcttctaagtttcacttttgcagtgtacctg

SEQ ID NO: 9473 - DNA, 201 bp, Homo sapiens
tgacctgcgccccgggccggggtcactcaccggcctcgctctggttgtagtagccgcgcagggtccccaggttcgctcggtcagtctgtgactgggccttsacattccgtgtctgcaggtcccaatactccggcccctcctgctctatccacggtgcccgcggctccatcctctggctcgcggcgtcgctgtcaaaccgca

SEQ ID NO: 9474 - DNA, 201 bp, Homo sapiens
ggaaaggcacgctctctctgttgtgtgggtgatggacagtgggcatgagagtcagcaggcagcccagctggaaggcccttccggttttctatcctagtgakgatggttctggggtggaggtggcagaggagtgagaagtgattggatttggtgttgatatatatttttaaaattgtggtaaaacacacatactatacgatt

SEQ ID NO: 9475 - DNA, 201 bp, Homo sapiens
gagaggtcgtgacctgcgccccgggccggggtcactcaccggcctcgctctggttgtagtagccgcgcagggtccccaggttcgctcggtcagtctgtgastgggccttcacattccgtgtctgcaggtcccaatactccggcccctcctgctctatccacggtgcccgcggctccatcctctggctcgcggcgtcgctgt

SEQ ID NO: 9476 - DNA, 201 bp, Homo sapiens
tgagaggtcgtgacctgcgccccgggccggggtcactcaccggcctcgctctggttgtagtagccgcgcagggtccccaggttcgctcggtcagtctgtgmctgggccttcacattccgtgtctgcaggtcccaatactccggcccctcctgctctatccacggtgcccgcggctccatcctctggctcgcggcgtcgctg

SEQ ID NO: 9477 - DNA, 201 bp, Homo sapiens
tgggggatgagaggtcgtgacctgcgccccgggccggggtcactcaccggcctcgctctggttgtagtagccgcgcagggtccccaggttcgctcggtcartctgtgactgggccttcacattccgtgtctgcaggtcccaatactccggcccctcctgctctatccacggtgcccgcggctccatcctctggctcgcggc

SEQ ID NO: 9478 - DNA, 201 bp, Homo sapiens
cgtgggggatgagaggtcgtgacctgcgccccgggccggggtcactcaccggcctcgctctggttgtagtagccgcgcagggtccccaggttcgctcggtsagtctgtgactgggccttcacattccgtgtctgcaggtcccaatactccggcccctcctgctctatccacggtgcccgcggctccatcctctggctcgcg

SEQ ID NO: 9479 - DNA, 201 bp, Homo sapiens
catcagaactcaaagaggctcatcaggcagtgtgcttccttccttctggtgaggatgcaagatgaaacagtttgtcttttaccttggaggggacacacctrcattcccctaaacacttggcacttgttcacccataaaacttcacttcagtggccactcttgaagctctgtaaggtttaccttcaccttctggagtgtgct

SEQ ID NO: 9480 - DNA, 201 bp, Homo sapiens
gcccgtccgtgggggatgagaggtcgtgacctgcgccccgggccggggtcactcaccggcctcgctctggttgtagtagccgcgcagggtccccaggttcdctcggtcagtctgtgactgggccttcacattccgtgtctgcaggtcccaatactccggcccctcctgctctatccacggtgcccgcggctccatcctctg

SEQ ID NO: 9481 - DNA, 201 bp, Homo sapiens
ggcccagctgttttctctttatctctttgtcttgtgcttttatttattacaatctctcatctccgcacacggggagaaaacccgctaagccccgtagggcyggatcatacagccaaggacaacggagcagcaaagatgacccagctgagcagtgaccacataaagcgcacggtggcctgagcacccactgggcacagcccc

SEQ ID NO: 9482 - DNA, 201 bp, Homo sapiens
cggagtttggtgacagagagtgagcttgctctgggaatggaggtgtagaaactgttttttgttttcctttttttttttttttttattgggaaaagttgtghctgagtgcatgagacagaatagagaccagtttatttatttatttgtttattaaatacattggatagcagaaccttggtaacccctgaatgatcaggaatc

SEQ ID NO: 9483 - DNA, 201 bp, Homo sapiens
agaagaaaagtcacccacggagtttggtgacagagagtgagcttgctctgggaatggaggtgtagaaactgttttttgttttcctttttttttttttttttattgggaaaagttgtgcctgagtgcatgagacagaatagagaccagtttatttatttatttgtttattaaatacattggatagcagaaccttggtaaccc

SEQ ID NO: 9484 - DNA, 201 bp, Homo sapiens
cgatgagatccgccatcactggggagacagtgtcctgggtctcaagtatgtggtttgcattgccaagctcaaaaaggcaaagggtaaagaacatgccactraattgggtgaaatgtatgctgttgagttttctgtatgtaaaaataattaaaataatataaattttccttcaaaaaacaaaaacaaaacaaaaacagaaaa

SEQ ID NO: 9485 - DNA, 201 bp, Homo sapiens
aagttacaattgcacataattgaaagagtaaatatttgcgcaggacttcctgagaaaaacgagtcttctctgcctttctagggagagtcctctcttctctrtttctgcctttctagggagcaaccactttcaagtttcagctgattcttttgactttactttcacatatctaagcaccaaagcaccatttctttgttaaca

SEQ ID NO: 9486 - DNA, 201 bp, Homo sapiens
tagaagaaaagtcacccacggagtttggtgacagagagtgagcttgctctgggaatggaggtgtagaaactgttttttgttttcctttttttttttttttttattgggaaaagttgtgcctgagtgcatgagacagaatagagaccagtttatttatttatttgtttattaaatacattggatagcagaaccttggtaacc

SEQ ID NO: 9487 - DNA, 201 bp, Homo sapiens
tgtggtcgctcctgctctcacctgtggtgtctcctgaagagggattgtcagttctggttccccgtgggcgggaacggttgccttgtaggttactggggcaytggccaggaaaggggtgtgaaagttatgtgctaatttctcaaaattcctgctttaaatgctgatgtccaataaagatgttcgtagtttcagctgggtctt

SEQ ID NO: 9488 - DNA, 201 bp, Homo sapiens
catccaggaatctccgtccctgaactggactccctgtccacctggactcttctagaagaaaagtcacccacggagtttggtgacagagagtgagcttgcthtgggaatggaggtgtagaaactgttttttgttttcctttttttttttttttttattgggaaaagttgtgcctgagtgcatgagacagaatagagaccagt

SEQ ID NO: 9489 - DNA, 201 bp, Homo sapiens
ccggtgggtgcgtggggactttagaaccgggaccgcggcggcaccgattggcttctctagaaacccgacacctagtgggaatgagaactgtgcccgcttcstgagtatccaggaaaaaggacccgtcgcaggttgtgagaagaagagaaactgcggaggtggcgaatccccaaggcggggcctccccaatccatacaccgc

SEQ ID NO: 9490 - DNA, 201 bp, Homo sapiens
cttccctgcccagccacctgtcccagagctggagacgcccaggtttaagccagagactttggatactttccttgatggtgacataatttttgtcttcttctctcctggaagagaagccccagaaccatcagagtgatccagtctgcccactcttcttattattctgtctctccaatcactctccctgagctggactctcca

SEQ ID NO: 9491 - DNA, 201 bp, Homo sapiens
ccctgcgcggctccctgggtcctgcgcccccgccgggcgggcccctcgctcctcccgaccatttccctgcagaccctgcactcacgcgcccaggtctgggycagggccagggcccctgagagcagcaggaggagggttcggggcgccatgagcaccatcctcggcgtctggggagaatctgagtcccggtgggtgcgtggg

SEQ ID NO: 9492 - DNA, 201 bp, Homo sapiens
ctcggtaaaactgtgctttggccttggcggtccctgtctcctcttcccaatattccggcccctccggctccatcctgggactcgtggcgtcgctgtcgagscgcacgcactgcgtgtcgtccacgtcgcccacggagaggaagcggggatccgcgcggccgggccgggacatggtggtgtggaaatacctcaaggagtgga

SEQ ID NO: 9493 - DNA, 201 bp, Homo sapiens
tggcttagagctccctactgtaaattattgggagttagttcattttggagtttataacttaaagcagaaattcagatggttgaaatgtcattttcatgaasgtttgttattagtgtatcatttagattgttttgcaaaagtctcattttttttctaaagggttgccaatcttgttttaaatttacaaaggttgttaattta

SEQ ID NO: 9494 - DNA, 201 bp, Homo sapiens
acagtgaggtggttgggtcttagtgctgtggggaacttttcttgacctcctgatgactggatggagtgtctgagggaggaagggtcttacaggattgactyatgaccctgagggatgtgctcactccaggtctcaggtctgtcctgacacctttatttgtggcttagagctccctactgtaaattattgggagttagttca

SEQ ID NO: 9495 - DNA, 201 bp, Homo sapiens
tgcccagagcagcacagtccagagtccttgaacaggaattccccctcatctaacagttaatcatttattagtggggacagacatctggttgtctctttccrgtgaccccatatcctcattcaaggcatccagatatagcccctgagccagggatctgtatctgccctccagaggcctatgcccaagacaggttgctccctg

SEQ ID NO: 9496 - DNA, 201 bp, Homo sapiens
agtatgtgggggacccagtgtgactgacacaaacagggacagagcatgatgagctcagtccaggtgcactccaggccgacgatggtgctgagcctgtgggrgatgcgggaggaggagcaggggtggctttcacctgggctctgtccatggaggtgaggacagtgaggtggttgggtcttagtgctgtggggaacttttctt

SEQ ID NO: 9497 - DNA, 201 bp, Homo sapiens
actgccacaatgatccagtggggagagaggaaaaaggttgacgataaagataaaaatggtattaattgatgaactgacacctttaagtagatgataagggrtggcaattggggcaccagaagagggtctggctctggctgggagcagaagggttaacccacaacagtccctcacatggtaaaacgcctgacatgtggtgca

SEQ ID NO: 9498 - DNA, 201 bp, Homo sapiens
cggcccgtccgtgggggatgagaggtcgtgacctgcgccccgggccggggtcactcaccggcctcgctctggttgtagtagccgcgcagggtccccaggtycgctcggtcagtctgtgactgggccttcacattccgtgtctgcaggtcccaatactccggcccctcctgctctatccacggtgcccgcggctccatcctc

SEQ ID NO: 9499 - DNA, 201 bp, Homo sapiens
tgggacaggagaccaccagggcagtgcacagctgagatctcagtctctggtgtcagctcctgggttcgctggctccactgagggcaactagactctgcagycaggcgatctggattcaactccttgcctaggcctcaccagcatgttctctctttgtgcctcattttcctcatctatgacatggggaaactacgagcattt

SEQ ID NO: 9500 - DNA, 201 bp, Homo sapiens
ccatgggacatttaagcagggaccttaatggtgtgaggagtgagccatgtggatcactgggcagcacatgcatgtgggagtcacagcaggggcaggtggtrgagacagggtggagtagacaagaaactggtgtgagtggagaagaatgagctaggctgagagtaatgggatgaggccaaagtggccagaggggaccctgtg

SEQ ID NO: 9501 - DNA, 201 bp, Homo sapiens
gcgacccggcccgtccgtgggggatgagaggtcgtgacctgcgccccgggccggggtcactcaccggcctcgctctggttgtagtagccgcgcagggtccscaggttcgctcggtcagtctgtgactgggccttcacattccgtgtctgcaggtcccaatactccggcccctcctgctctatccacggtgcccgcggctcc

SEQ ID NO: 9502 - DNA, 201 bp, Homo sapiens
aaccttaataaatcaacagacaataaacaaataaaacctgtcatagtatcactgataattgccattaagaaaaatatgcttgggttagaagattggtggcrgtggtgggaatggcaggggatagatttcagaagaggtcactggacaagacatttctgaacacttgaccatgggacatttaagcagggaccttaatggtgt

SEQ ID NO: 9503 - DNA, 201 bp, Homo sapiens
gcagccacagtccaatcacctagtggcccagatagaacagaaaggtagatagaagtaaaatttctctctgtctctgtctctctgtctctctctgtctctgwctctctctctggaactggggctgggacacccttcttctcctgccttggacatcaaaactccaggttcgatgatctttggactctgacttttgcaccagtg

SEQ ID NO: 9504 - DNA, 201 bp, Homo sapiens
ccccgagagcagcaggaagagggttcggggcgccatgaccaccatccttggcgtctggggagaatgagtccgggtgggtgagcgaggactttagaaccagraccgcggcgacgctgattggcttctctaaaaacctgtcacctaatgggagtgagaactggggccgcccggtgagtatccaggaagaaggacccgacacag

SEQ ID NO: 9505 - DNA, 201 bp, Homo sapiens
gcttcggggtggatctcggacccggagactgtgggcgacccggcccgtccgtgggggatgagaggtcgtgacctgcgccccgggccggggtcactcaccgkcctcgctctggttgtagtagccgcgcagggtccccaggttcgctcggtcagtctgtgactgggccttcacattccgtgtctgcaggtcccaatactccgg

SEQ ID NO: 9506 - DNA, 201 bp, Homo sapiens
cttccttaccctgccccttgtcttgtatgcaataaatatcagcgagcccagctgttcggggccactaccggtctccgcatcttgatggtagtggtcccccsggcccagctgttttctctttatctctttgtcttgtgcttttatttattacaatctctcatctccgcacacggggagaaaacccgctaagccccgtagggc

SEQ ID NO: 9507 - DNA, 201 bp, Homo sapiens
ccattcctccctgttcaagtcagtagtgatcttgaagacagcagcctggttccttagtgtgggctccaatgccagtgggagccgagtggaccatgttctcraagtgttgtggttgtctaccttttcctgttgggtgactccgtgaaggatgataagaaatggcttacattgggctgggcatggtgactcatgcctgtaatc

SEQ ID NO: 9508 - DNA, 201 bp, Homo sapiens
aaaaaaataaattatagactactcaaattgtaagtattaaaccagtgtctgtgagagtttttctggaagggatgtgagtgggtggactggtggggaagatsctctctcactgtgggcagccacagtccaatcacctagtggcccagatagaacagaaaggtagatagaagtaaaatttctctctgtctctgtctctctgtc

SEQ ID NO: 9509 - DNA, 201 bp, Homo sapiens
ggggatgagggcctattacctgggcctggagagaaggacactcctcttctcacgatgtggtctctgggaacatgctctccaaacttctctggtgactaaartaatgtgtagttcaatgggctctcttttgtctacttttaagggtaccctcctttggaaaccaggacctcctaacccgcacagcccattgttgggagataa

SEQ ID NO: 9510 - DNA, 201 bp, Homo sapiens
accgtgcccggccagctgcggctttgttttactacgagtagttatcgcaaaggatgcttgtgatgaactttggcattttcttttctctttcatttccaaahaatcaatcaggaatggcacacaaggtgcattttgaaaaataccactttaaagatttgtgggccaggagtggtggctcatgcctgtaatctcagcaatttg

SEQ ID NO: 9511 - DNA, 201 bp, Homo sapiens
ttccggtcccaatactccggcccctcccgctccatccacggcgcccgcggctccatcctctggctcgcggcgtcgctgtcgaaccgcacgaactgcgtatmgtccacgtagccgacggagatgaagcggggctccccgcggccgggccgggacatggtggtgtagaaatacctcatggagtgggagcctgggagcgaggag

SEQ ID NO: 9512 - DNA, 201 bp, Homo sapiens
gaggggataaaaagtgctctggggtttcctgattatgaagggtaggggtcagtctgcttctaggagatgtggactgaattagtgaaaaataaatgcacagkgaatgaggatgagtaaagcaagcatcagcatctcccgccatcagttcagactgattcggaggtggggaggtgggatagttcctgaccctgttgcaaggtt

SEQ ID NO: 9513 - DNA, 201 bp, Homo sapiens
agtctgtgcctgggccttgcagatctgtgtgttccggtcccaatactccggcccctcccgctccatccacggcgcccgcggctccatcctctggctcgcgkcgtcgctgtcgaaccgcacgaactgcgtatcgtccacgtagccgacggagatgaagcggggctccccgcggccgggccgggacatggtggtgtagaaata

SEQ ID NO: 9514 - DNA, 201 bp, Homo sapiens
cttaatgtcacaaagaggaggcatgaacaaatcttgcatctcagtccctcacaaggcaatcttagaaaaaacatagtcataaactaatccaggtcagtcayagtaagttgtgacactgaacagcccaccacaccttgaaaaattccaaatcaaagaatctccagagcttagttgtgtcccctctgcccaactcctctttca

SEQ ID NO: 9515 - DNA, 201 bp, Homo sapiens
aagtgctaggatcacagaagtgagccaccgtgcccggccagctgcggctttgttttactacgagtagttatcgcaaaggatgcttgtgatgaactttggcrttttcttttctctttcatttccaaataatcaatcaggaatggcacacaaggtgcattttgaaaaataccactttaaagatttgtgggccaggagtggtgg

SEQ ID NO: 9516 - DNA, 201 bp, Homo sapiens
cgcaccaacacgcccagctaatttttgtatttttagtaaagacgaggtttcaccatgttggtcaggctggtctcgaactcctgatctcgtgatccacaggyctcgacttcccaaagtgctaggatcacagaagtgagccaccgtgcccggccagctgcggctttgttttactacgagtagttatcgcaaaggatgcttgtg

SEQ ID NO: 9517 - DNA, 201 bp, Homo sapiens
ctcgttcagtctgtgcctgggccttgcagatctgtgtgttccggtcccaatactccggcccctcccgctccatccacggcgcccgcggctccatcctctgrctcgcggcgtcgctgtcgaaccgcacgaactgcgtatcgtccacgtagccgacggagatgaagcggggctccccgcggccgggccgggacatggtggtgt

SEQ ID NO: 9518 - DNA, 201 bp, Homo sapiens
cagttcttgccataaacattagtgtgcatgtctcctgggcacataggcaagaaagcccgcagagtgtatgattaggagtgggatgattggatgatatgttrtatggcctttaaccatactagataataataatatgatttccaaagtgattgtgccaacttaaacttatttatttatttatttatttatttatttatttat

SEQ ID NO: 9519 - DNA, 201 bp, Homo sapiens
atgggatggtctccatgatacaatggtaagggaaaacagcaaggtacagaaaagcatatatagtttgctaaaatttgtgtgcaaagggagaaagaacatayacatatacatttatatttgcttgcacagtcacaaaatacctttgaaagaataagcactacctgatgagtttggagtgagagatggtcaggatgatttccc

SEQ ID NO: 9520 - DNA, 201 bp, Homo sapiens
atcagccttctgagtagcttggattacagacacgcaccaacacgcccagctaatttttgtatttttagtaaagacgaggtttcaccatgttggtcaggctsgtctcgaactcctgatctcgtgatccacaggcctcgacttcccaaagtgctaggatcacagaagtgagccaccgtgcccggccagctgcggctttgtttt

SEQ ID NO: 9521 - DNA, 201 bp, Homo sapiens
aaaaacatttagttttgtccctggtttctcctaaaaaccttagaatctcttgagtgattagagtgtctttagaatactgaggaaaggactcttggctgagwggatcctggataccttgagaatgggggctggctgccacagacacatacctatgatgagagggttgtcttattccgttttgtgttgctataaagaaatgtc

SEQ ID NO: 9522 - DNA, 201 bp, Homo sapiens
gaggggtcgtgacctgcgccccgggccggggtcactcaccgccctcgctctggttgtagtagcggagcgcgatccgcaggttctctcgttcagtctgtgcytgggccttgcagatctgtgtgttccggtcccaatactccggcccctcccgctccatccacggcgcccgcggctccatcctctggctcgcggcgtcgctgt

SEQ ID NO: 9523 - DNA, 201 bp, Homo sapiens
atggggaggggtcgtgacctgcgccccgggccggggtcactcaccgccctcgctctggttgtagtagcggagcgcgatccgcaggttctctcgttcagtcygtgcctgggccttgcagatctgtgtgttccggtcccaatactccggcccctcccgctccatccacggcgcccgcggctccatcctctggctcgcggcgtc

SEQ ID NO: 9524 - DNA, 201 bp, Homo sapiens
cagtagtcgggggaaattctctcaatcccaccctgcattaccctcacctctgcagctttttgcctatttccaactctcagctccttccacccccaccccarcccagccctcagggctccctctctccagccctccctctgcccagagcagcacagtccagagtccttgaacaggaattccccctcatctaacagttaatca

SEQ ID NO: 9525 - DNA, 201 bp, Homo sapiens
gggagatgagggaggaggagcaggggtggctctcacctgggctctgtccgtggaggtgaggacaatgaggtggttgggtctcagtgctgtgtggaactttyttttgacctccttatgagtggatggtctgtctgagatagaacgggtcttagaggatttactcattaccctgagagagggggcgtgttcattccaggtttc

SEQ ID NO: 9526 - DNA, 201 bp, Homo sapiens
tcaaaaataataatgatgacgatgatacatttaaagcaaatgcaatttaatgtgtaataatacatcctctcttgtgaaaatgtgttatttatttactattrcataacaaattatgtaaaacttagcttaaaacaacaaatattcctcatctgccacagtttccaatggtcaggagtccaggagaggtttccctgagtgctt

SEQ ID NO: 9527 - DNA, 201 bp, Homo sapiens
tgatatgttgtttggactttagccagcactgttgtaaaacacagaacctgtaaactaccctgggctgctgcccattcacatcccccaaaaggagactccahcctgagtcttgtgattattattcctttatttagatgtgtggtcttatttctgagttctctgttctgttccattggtctatgtgcctgtttttgtaccagt

SEQ ID NO: 9528 - DNA, 201 bp, Homo sapiens
aaaccaagcatattttactttgaaaaaatctgtttaaggaattaggaatttaagtcaattctttcaactcaatgttttcagaacacatcatcaacatcaartattacacatttattttaaaagttccattttaaaagggaatggatgatatgttgtttggactttagccagcactgttgtaaaacacagaacctgtaaact

SEQ ID NO: 9529 - DNA, 201 bp, Homo sapiens
gtgctctggggtttcctgattatgaagggtaggggtcagtctgcttctaggagatgtggactgaattagtgaaaaataaatgcacagggaatgaggatgartaaagcaagcatcagcatctcccgccatcagttcagactgattcggaggtggggaggtgggatagttcctgaccctgttgcaaggtttcttttgactttc

SEQ ID NO: 9530 - DNA, 201 bp, Homo sapiens
cctatttgtagccaaagccattttcatggcctcgtggtcctctctgtcacatggctccttacaattctgtgtggttttgttccaatgtaagtagttcttgbtaaggatgcttgcaatgaactttggtattcttttctctttcatttttataaaaaccaagcatattttactttgaaaaaatctgtttaaggaattaggaat

SEQ ID NO: 9531 - DNA, 201 bp, Homo sapiens
gacccacatgttcttcctcttgcgaacacagaactgtagagacgactctgatttaaacaacgcaccatgtcctgaaagatggcacgcaaccctcagagtgyttcctccaggctggcacttagttgtgcctgtggaagatcacgggactccaagcaactatgtggttccaagtgcctgtgtgacccagaaagtcatagattg

SEQ ID NO: 9532 - DNA, 201 bp, Homo sapiens
attgcatcacagataattataaactgtaaaacacggaaaaagttcagaaagattttattttatgcaactagtgtgtatatcaattcatcagttcatttgcwcactaccacgcctggcaaaacaacacccatttatctgcttataattccttggtcagaaatctgggcaagatgtggatagaatctctgttctgggcttcca

SEQ ID NO: 9533 - DNA, 201 bp, Homo sapiens
cagccagcttcccccagggctcatgattccagagaaagaaagaaccaaagtagaaacttcagtgagtcttatgttctacacccagaatcacaaactattawgtcagcattactctatcagttagaagtgagtcattaagtccaggccacacgaacagggagggaatgaagctgcacttctggaaaggaggagtatcaaaga

SEQ ID NO: 9534 - DNA, 201 bp, Homo sapiens
tctttcctctgctccttttcctcacctcctgcttctccagcccttccctccatccttctcatccttcaggccctcctctccccttagtccccaccacactstcactcgtgaattgtgacactagcactgtcccatgacctgctacgtaactgttcttttcacagtggtcctgctcctgtgagtcagagtgtcatttctcca

SEQ ID NO: 9535 - DNA, 201 bp, Homo sapiens
tggagggtgtgagaacctggccccaccccctcggtcagccccgcccaccgagcctcgccctcgcccggacccacccgcggggattttggtaaaggcgcctkggggttctcccaggtagagggtctgggcgggtcccgcggcctcggggtggatcccagacccggagactcgggagtacccggggcgtccgtggggcatgga

SEQ ID NO: 9536 - DNA, 201 bp, Homo sapiens
gtcctccttctctggctcaaaagagaaccacatgtaacagaaaccaagggctacaattctcatagaacccagaaaactggactaggggcctagagagtcahgtgcctgccattgttccaccgcttacgtgctgtgtgacctcaggagaagctctctgctctttgaatcatctgtgaatcatggacaaacacctccatgcta

SEQ ID NO: 9537 - DNA, 201 bp, Homo sapiens
aaagtagaaacttcagtgagtcttatgttctacacccagaatcacaaactattatgtcagcattactctatcagttagaagtgagtcattaagtccaggcyacacgaacagggagggaatgaagctgcacttctggaaaggaggagtatcaaagaatttataaacatgttaaaagcaaaattaacattattgtttcagggt

SEQ ID NO: 9538 - DNA, 201 bp, Homo sapiens
aatttttaaacctgattaacataaaaaattaggttttaggcagacccacatgaggtattaaaagacaactgccaaggacaccctgctaggctctgtagatkgatgtattaaaatccataaaacaatgtatttaaacctaagaattctgctgctttcaaattctttcctctgctccttttcctcacctcctgcttctccagc

SEQ ID NO: 9539 - DNA, 201 bp, Homo sapiens
ctgtggttgctccattcatgcacccatcctaccaggcctgggctgacccatggtgaaggctggctaactgccatttgtctgtttggttgttcagtgccacwtcacacttgggtgttttctgtgggtgtcaacatgggattcaagctcaacccaggtggaccattttcacctgttgatgaatgctgttgggcctgtgcaatt

SEQ ID NO: 9540 - DNA, 201 bp, Homo sapiens
gtatattttataggaacacttagtaatttttaaacctgattaacataaaaaattaggttttaggcagacccacatgaggtattaaaagacaactgccaagracaccctgctaggctctgtagatggatgtattaaaatccataaaacaatgtatttaaacctaagaattctgctgctttcaaattctttcctctgctcctt

SEQ ID NO: 9541 - DNA, 201 bp, Homo sapiens
ttacataacattgtgaacatacgaattgtcactgcattgtgcactttaaatggttacggtggtatcctttgtgtttatgtgtattttaccacaatgaaaamgaggctgaggaaggtattccaaaatcttttgtatagtaaactcctgagtttgcttgagaatctgcctatctgtcttttcttctcaggacatcatctccta

SEQ ID NO: 9542 - DNA, 201 bp, Homo sapiens
tcattctggcttaagctcacactcctccaggaagtcagttactgtgaaggtcactaacatgctcagtattgtcatgtctccacctgtctttacttctctgyagctttcctcacactcaacgactcctttttattttgctcaatttctgtggattcacttcacaaattttattataaggtagttctagctagaagaaaaaat

SEQ ID NO: 9543 - DNA, 201 bp, Homo sapiens
cttctaagtgttgtgtatattttataggaacacttagtaatttttaaacctgattaacataaaaaattaggttttaggcagacccacatgaggtattaaargacaactgccaaggacaccctgctaggctctgtagatggatgtattaaaatccataaaacaatgtatttaaacctaagaattctgctgctttcaaattct

SEQ ID NO: 9544 - DNA, 201 bp, Homo sapiens
gggaggctcaggctggcagattgcttgagcccctgagtttgtgaccagcctaggcaacatagagaaaccctgtctctacaaaaaattcaaaagaattagcygggcttggtggcacatgcctgtagtcccagctacttgggtgtctgaggtgggagggttgcttaagcctggaagattcaggctgcagtgagccatgaacaa

SEQ ID NO: 9545 - DNA, 201 bp, Homo sapiens
caagggtctcggggtcccgcggtttcggggaggatctcggacccagagactcgaggcgacccggccctccgtgggggatggggaggggtcgtgacctgcgycccgggccggggtcactcaccgccctcgctctggttgtagtagcggagcgcgatccgcaggttctctcgttcagtctgtgcctgggccttgcagatctgt

SEQ ID NO: 9546 - DNA, 201 bp, Homo sapiens
ttttctattctgtaaaagtttaattcacttgtatgtgtggtaaaatgtgagcaacatatcaaattctcaaattctttgcaagatactattgccttacctahcagattgaacactgtgtatcagaaaatgtagagagttgccaactagccaaggatcaaatgacctatttgtagccaaggctgtttttcatggcatcctggt

SEQ ID NO: 9547 - DNA, 201 bp, Homo sapiens
gcccgtcgggccccacgtcgcagccatacatcacctgcatggtgtgagaacctggccccgcccccgcggtcagcccggtcccccgagccccgccctgcccsgaccaacccgcggggattttggcctaaactgaaaatgaaaccgggtaaaggcgcctgggcctctcccaggtcaagggtctcggggtcccgcggtttcggg

SEQ ID NO: 9548 - DNA, 201 bp, Homo sapiens
aaatctaagccaggacttggggctctggcactttcttctcactgtgcgtcctccttctctggctcaaaagagaaccacatgtaacagaaaccaagggctabaattctcatagaacccagaaaactggactaggggcctagagagtcatgtgcctgccattgttccaccgcttacgtgctgtgtgacctcaggagaagctct

SEQ ID NO: 9549 - DNA, 201 bp, Homo sapiens
gagcgatgtaatccttgccgtcgtaggcgtgctgttcatacccgcggaggaagcgcccgtcgggccccacgtcgcagccatacatcacctgcatggtgtgrgaacctggccccgcccccgcggtcagcccggtcccccgagccccgccctgccccgaccaacccgcggggattttggcctaaactgaaaatgaaaccgggt

SEQ ID NO: 9550 - DNA, 201 bp, Homo sapiens
ttggtgatctgagctgccatgtccgccgcggtccaggagcgcaggtcctcgttcagagcgatgtaatccttgccgtcgtaggcgtgctgttcatacccgcrgaggaagcgcccgtcgggccccacgtcgcagccatacatcacctgcatggtgtgagaacctggccccgcccccgcggtcagcccggtcccccgagccccg

SEQ ID NO: 9551 - DNA, 201 bp, Homo sapiens
gcccgacgggccgcctcccacttgcgcttggtgatctgagctgccatgtccgccgcggtccaggagcgcaggtcctcgttcagagcgatgtaatccttgcygtcgtaggcgtgctgttcatacccgcggaggaagcgcccgtcgggccccacgtcgcagccatacatcacctgcatggtgtgagaacctggccccgccccc

SEQ ID NO: 9552 - DNA, 201 bp, Homo sapiens
ctggtacccgcgcgctgcagcgtctccttcccgttctccaggtatctgcggagccactccacgaactcgccctccaggtaggctctcagctgctccgcccsacgggccgcctcccacttgcgcttggtgatctgagctgccatgtccgccgcggtccaggagcgcaggtcctcgttcagagcgatgtaatccttgccgtcg

SEQ ID NO: 9553 - DNA, 201 bp, Homo sapiens
ttgaacccaggaggtcgacactgcagtgcatggtgatcatgccactgcactccagcctgggtgacagagcgagaccatgtctcaaaaataataatgatgabgatgatacatttaaagcaaatgcaatttaatgtgtaataatacatcctctcttgtgaaaatgtgttatttatttactattgcataacaaattatgtaaaa

SEQ ID NO: 9554 - DNA, 201 bp, Homo sapiens
cctggtacccgcgcgctgcagcgtctccttcccgttctccaggtatctgcggagccactccacgaactcgccctccaggtaggctctcagctgctccgcchgacgggccgcctcccacttgcgcttggtgatctgagctgccatgtccgccgcggtccaggagcgcaggtcctcgttcagagcgatgtaatccttgccgtc

SEQ ID NO: 9555 - DNA, 201 bp, Homo sapiens
tttaatatcttataattaatttacgccaggtatggtggctcacgcctgccatcctagcactgtggaaggcagaggaaggcagatttgttgactccagaagdtcaagatcagcctgggcaaaacccccatctatacaaaaaattagaaaattagccaggcatagtagttcatgatggtagtcccagctactcaggaggctga

SEQ ID NO: 9556 - DNA, 201 bp, Homo sapiens
aggagcgtctctccccggccgccccgtctgagaggtgaggagcccctccgcccagcagccaccccgtctgggaagtgaggagtgtctctgcccggcagccrccccgtccaggagggaggtggggggcagcccccgcccggccagccacctcgtccaggaggtggggggcgcctctgcccggccaccccgtctgggaagtga

SEQ ID NO: 9557 - DNA, 201 bp, Homo sapiens
ggagcgcctctgccccgccgccctgtctgggatgtgaggagcccctccgcccagcagccaccccgtctgggaggtaaggagcgtctctccccggccgcccygtctgagaggtgaggagcccctccgcccagcagccaccccgtctgggaagtgaggagtgtctctgcccggcagccgccccgtccaggagggaggtggggg

SEQ ID NO: 9558 - DNA, 201 bp, Homo sapiens
tctataccctgcaggtctggtccccacaagctctgcgtcctaaatttggtcctccccatcccacagttgggtcactgtgatttccacatggtagaagcccrggacccagcacctcagggcggcctcatggtccgagatggggtagtggatcacacatgtattctgggattctgaagggaagagtaagaaaattgaggcact

SEQ ID NO: 9559 - DNA, 201 bp, Homo sapiens
ccccatgattcgatcacctcccatgaagtccctccgccaatatgtggggattagaattcgcatgacaattcaaaatgagatttgggtgggaacacagagabaggccatatcagaagtgcatcattaagtccaagccacacttaagagagggaattaagctgcacctctgaaagagagctgtactaaaggacttacgtatat

SEQ ID NO: 9560 - DNA, 201 bp, Homo sapiens
caaaaaaaagaaagacatagtgtagttcttgatatttcttcatgggatggtctccatgatacaatggtaagggaaaacagcaaggtacagaaaagcatatrtagtttgctaaaatttgtgtgcaaagggagaaagaacatatacatatacatttatatttgcttgcacagtcacaaaatacctttgaaagaataagcacta

SEQ ID NO: 9561 - DNA, 201 bp, Homo sapiens
taaaaaatgcatgcctatacaatggattgccaagaaatttttgaacaaaaaaaagaaagacatagtgtagttcttgatatttcttcatgggatggtctccrtgatacaatggtaagggaaaacagcaaggtacagaaaagcatatatagtttgctaaaatttgtgtgcaaagggagaaagaacatatacatatacatttat

SEQ ID NO: 9562 - DNA, 201 bp, Homo sapiens
ggtaaaaaatgtgactttggccccttgatgtataaatgtgtccaaaagccttacaacaggactcacaaagctactaagttgcattttcccagacaatgtayctgtgactcctgcttgtagtattttaaatttaccatcattccatagctctgagtttctgtgtgagtccaggacatctcctcaatacaaagtagcgactgt

SEQ ID NO: 9563 - DNA, 201 bp, Homo sapiens
tgatcaggaatctaataggtaaaaaatgtgactttggccccttgatgtataaatgtgtccaaaagccttacaacaggactcacaaagctactaagttgcaytttcccagacaatgtatctgtgactcctgcttgtagtattttaaatttaccatcattccatagctctgagtttctgtgtgagtccaggacatctcctcaa

SEQ ID NO: 9564 - DNA, 201 bp, Homo sapiens
gaatgatcaggaatctaataggtaaaaaatgtgactttggccccttgatgtataaatgtgtccaaaagccttacaacaggactcacaaagctactaagttkcattttcccagacaatgtatctgtgactcctgcttgtagtattttaaatttaccatcattccatagctctgagtttctgtgtgagtccaggacatctcct

SEQ ID NO: 9565 - DNA, 201 bp, Homo sapiens
attagatgtggtagaagtgatttggactccagtatgattctgaaaaacactgttattttgtgcttctaatgttgctttaaaagcagctctttcgtgtttthcattcttattgctatttcatcactagttattcatttatgtcttttcatttaatttattttgctcaacaatgctttttttctattctgtaaaagtttaatt

SEQ ID NO: 9566 - DNA, 201 bp, Homo sapiens
aagaaaaatcatcccatggagtttggtgccagagagtaagcttgctctgggaatggaggtgtagatttttgttgttgttgtttttgtttttaatcgggaaragttgcgcctgagtgcatgagacagaatagagaccaatttgctctttgtttattaactacagtgggtagcagaatcttggtaacccctgaatgatcagga

SEQ ID NO: 9567 - DNA, 201 bp, Homo sapiens
tggtaggtggaaatggttaaattcaatctaggaacaagatttttcagtaactggctattcagtgggcatcctgtgatcagtttaacatctttcactgtggbttttaattagatgtggtagaagtgatttggactccagtatgattctgaaaaacactgttattttgtgcttctaatgttgctttaaaagcagctctttcgt

SEQ ID NO: 9568 - DNA, 201 bp, Homo sapiens
ctgtccctgaactggactccctgactcccactccttacctgtccacctggactcttctagaagaaaaatcatcccatggagtttggtgccagagagtaagmttgctctgggaatggaggtgtagatttttgttgttgttgtttttgtttttaatcgggaagagttgcgcctgagtgcatgagacagaatagagaccaattt

SEQ ID NO: 9569 - DNA, 201 bp, Homo sapiens
ctctcctttcacttttcatcccgtaatctctgtccctgaactggactccctgactcccactccttacctgtccacctggactcttctagaagaaaaatcaycccatggagtttggtgccagagagtaagcttgctctgggaatggaggtgtagatttttgttgttgttgtttttgtttttaatcgggaagagttgcgcctg

SEQ ID NO: 9570 - DNA, 201 bp, Homo sapiens
tgtagaaagaagcagacataggagactccattttgttctgtactaagaaaaattcttctgccttgggatgctgttaatctataaccttacccgcaaccccstgctctctgaaacatgtgctgtgtccactcagggttaaatggattaagggcggtgcaagatgtgctttgttaaacagatgcttgaaggcaaaaaaaaaaa

SEQ ID NO: 9571 - DNA, 201 bp, Homo sapiens
aggcttcccctccaaagaaccactgctatcatattattgaaacttcctggactgcagtgtgaatggtcatccctggagctatcttctgcagtgatgctgayttccattcttttgttttctatgtatatatttttatatatgctttcattgtagaaagttgcattcataagttttggggttttttttaagatggagtctcac

SEQ ID NO: 9572 - DNA, 201 bp, Homo sapiens
gcgctctgtctcaatgtctccctgagtcttggcccaagagctgtctgagaaacaagggagaaaccctcggcatgggccccgtccctctcctttcacttttyatcccgtaatctctgtccctgaactggactccctgactcccactccttacctgtccacctggactcttctagaagaaaaatcatcccatggagtttggtg

SEQ ID NO: 9573 - DNA, 201 bp, Homo sapiens
ttattttacttcaaatgttttattttgaatgttaaaaatacatgtttctacattagaaatatgaaaatgtatttgattacagaagaatttaaaatgcacayatcaacacctggttgaattttaaagaaaaaaaaatgcagagaagaaagaaatatcacccaggcttcccctccaaagaaccactgctatcatattattgaa

SEQ ID NO: 9574 - DNA, 201 bp, Homo sapiens
gagcaacacagacaggtctggaaagggatggggggacatctgaagcaaatgttcagggcctgaagctgtgagagtacacctgccctacagagttggagccytcatgtgatgatgcagagctgaagtgttatattctggaggggataaaaagtgctctggggtttcctgattatgaagggtaggggtcagtctgcttctagg

SEQ ID NO: 9575 - DNA, 201 bp, Homo sapiens
cgccctgtggcccctggtacccgcgcgctgcagcgtctccttcccgttctccaggtatctgcggagccactccacgaactcgccctccaggtaggctctcmgctgctccgcccgacgggccgcctcccacttgcgcttggtgatctgagctgccatgtccgccgcggtccaggagcgcaggtcctcgttcagagcgatgta

SEQ ID NO: 9576 - DNA, 201 bp, Homo sapiens
gaacttctttttattattattattttaaatatgaggtctcactatgttctccaggctggagagcagtgactattcacaggtgtgaccatagcctcaaattygtgagctcgagccattctcctatctcagcctcctgagtagctgggactacaggtgcccaccacagtgttcagccacttttcattgttattttacttcaaa

SEQ ID NO: 9577 - DNA, 201 bp, Homo sapiens
ggactccccaatccatacaccgccttcggggcctgagaccctgagagccacgcctggggccctgggacttcgccctgacccctctgcttctgtgccaagckctctgtctcaatgtctccctgagtcttggcccaagagctgtctgagaaacaagggagaaaccctcggcatgggccccgtccctctcctttcacttttcat

SEQ ID NO: 9578 - DNA, 201 bp, Homo sapiens
gggaggcgccctgtggcccctggtacccgcgcgctgcagcgtctccttcccgttctccaggtatctgcggagccactccacgaactcgccctccaggtagrctctcagctgctccgcccgacgggccgcctcccacttgcgcttggtgatctgagctgccatgtccgccgcggtccaggagcgcaggtcctcgttcagagc

SEQ ID NO: 9579 - DNA, 201 bp, Homo sapiens
tccccaaggctgggactccccaatccatacaccgccttcggggcctgagaccctgagagccacgcctggggccctgggacttcgccctgacccctctgctyctgtgccaagcgctctgtctcaatgtctccctgagtcttggcccaagagctgtctgagaaacaagggagaaaccctcggcatgggccccgtccctctcct

SEQ ID NO: 9580 - DNA, 201 bp, Homo sapiens
ctgcctcccagctgcctgccttggcctcccaaagtgccaagatcgcagcctctgcccggccgccatccggtctaggaagtgaggagcgtctctgcccggcygcccatcatctgagatgtggggagcgcctctgccccgccgccctgtctgggatgtgaggagcccctccgcccagcagccaccccgtctgggaggtaagga

SEQ ID NO: 9581 - DNA, 201 bp, Homo sapiens
aggattcttctccctcaggaccagagggagggcgatattatagtgttggtcccatttgtctccctttcttgtgggaggccagccccggagatctacaggcsatccgggaggcgccctgtggcccctggtacccgcgcgctgcagcgtctccttcccgttctccaggtatctgcggagccactccacgaactcgccctccag

SEQ ID NO: 9582 - DNA, 201 bp, Homo sapiens
cattattgtcacctgacacaaatgtgatggtcaagccctgtgccacctggaaggggatagagggtaggataggactagaagacccaaagagggaagactcycagagggaaggatgaggatgtaaagtgtgaaaagatacagaaagtaaggaggtgggagagtgggtgtccctctgggtgtggggcttaactgctgcaggta

SEQ ID NO: 9583 - DNA, 201 bp, Homo sapiens
tcacaatcaaggtgataaatttgtccttcaatttcacaggtgctttacaaaagagtgagagttgacagggcatctgaacagggtaaatgtgtgtggagatrgtgtctcacaactaggcaggaaatgagccaacttccatctggagcttgaaatccacgaatggaagaagaaatcttggaactcacccctttcctacctggg

SEQ ID NO: 9584 - DNA, 201 bp, Homo sapiens
gcaagaataactccactaggtagcatcctctcttttacctgatggatcaggacgatgctgttacgacgatacatacaattcttctgaaggggagaggatgytggaataaagactacacttcacctcaaatttattttttcatatgttatgccatagtaccaggaatagggatgtaaataaaagtgccagaaacaggaatta

SEQ ID NO: 9585 - DNA, 201 bp, Homo sapiens
atcgtctgagggcttcactggggctagggattcacgtgaaacatggcttagtcacatggctgttggaaaagcctagttccttgctgtctggtcccaggggrcctcagttcttagccacatggaccttcctgcagggctgcttatggcacagcagctgggtccccaagagctcatgatcccagagacagagagagagaaggt

SEQ ID NO: 9586 - DNA, 201 bp, Homo sapiens
gagtagctgggactagaggttcgcgccaccatgcctggctaatttctgtattttttgtagagaaagggatttatcatgtttcccagacttgtctggaacgyctggggtcaagcaatctgcccaccttggcctcccaagatgctaggattatgggtataggcccccttgcctggctttacttttagactttttataaattgt

SEQ ID NO: 9587 - DNA, 201 bp, Homo sapiens
ttcagcctctacctgccaggcttaagcaattcctcccttctaggcctcttgagtagctgggactagaggttcgcgccaccatgcctggctaatttctgtawtttttgtagagaaagggatttatcatgtttcccagacttgtctggaacgcctggggtcaagcaatctgcccaccttggcctcccaagatgctaggattat

SEQ ID NO: 9588 - DNA, 201 bp, Homo sapiens
tctcttcagaagtttctaattcggtttaagaatgcccaaaatgccaattttcttactcaagcatctacaaaaatatttgcctaatcagggtgctttgcagytagaaaaatgtgaatctcacacctctgtctatacactagcttagcatcatgacaataatttgtttggctagggtaggcagaaattgtttactccaatcta

SEQ ID NO: 9589 - DNA, 201 bp, Homo sapiens
gacgacactgattggcttctctggaaacccgacacccaatgggagtgagaactgggtccgcgtcgtgagtatccaggaagaaggaccctacataggttggsagagggagaaaagaaactgcggagttggggaatccccaaggctgggactccccaatccatacaccgccttcggggcctgagaccctgagagccacgcctg

SEQ ID NO: 9590 - DNA, 201 bp, Homo sapiens
agggccagggcccccaagagtagcaggaggagggttcggggcgccatgacggccatcctcggcgtctggggagaatctgagtcccggtgggtgcgtgcggrctttagaaccgcgaccgcgacgacactgattggcttctctggaaacccgacacccaatgggagtgagaactgggtccgcgtcgtgagtatccaggaagaa

SEQ ID NO: 9591 - DNA, 201 bp, Homo sapiens
cgcagaggcggtttccccacgaccccgcactcacccgcccaggtctgggtcagggccagggcccccaagagtagcaggaggagggttcggggcgccatgayggccatcctcggcgtctggggagaatctgagtcccggtgggtgcgtgcggactttagaaccgcgaccgcgacgacactgattggcttctctggaaacccg

SEQ ID NO: 9592 - DNA, 201 bp, Homo sapiens
ggatcaaatgacctatttgtagccaaggctgtttttcatggcatcctggtcctctcacatggctccttaaaattggctgtggcttgttttttgtggttgtytgtttgtttgttttgagatggagtatggctctgtcacccaggctggagtgcgatggcaggatctcagctcactgcaacttctgccttccaggttcaagcg

SEQ ID NO: 9593 - DNA, 201 bp, Homo sapiens
tctccccgcagaggcggtttccccacgaccccgcactcacccgcccaggtctgggtcagggccagggcccccaagagtagcaggaggagggttcggggcgscatgacggccatcctcggcgtctggggagaatctgagtcccggtgggtgcgtgcggactttagaaccgcgaccgcgacgacactgattggcttctctgga

SEQ ID NO: 9594 - DNA, 201 bp, Homo sapiens
ctcctggccacaggcacctgggataatctcctattccttggaaagttagtgtctgaggcgttgaataatttagagtctgcagagtgcctgggattgcaggmgcgcaccaccatgcctgactggttttcgtatttttttggtggagacggggtttcactgtgttggccaggctggtctccagctcctaactgggagtgatct

SEQ ID NO: 9595 - DNA, 201 bp, Homo sapiens
ccatatggacttcaaatgagaaatttgttttaggttgagattggaaggagatctgaacttctttttattattattattttaaatatgaggtctcactatgwtctccaggctggagagcagtgactattcacaggtgtgaccatagcctcaaattcgtgagctcgagccattctcctatctcagcctcctgagtagctggga

SEQ ID NO: 9596 - DNA, 201 bp, Homo sapiens
cttctccccgcagaggcggtttccccacgaccccgcactcacccgcccaggtctgggtcagggccagggcccccaagagtagcaggaggagggttcggggmgccatgacggccatcctcggcgtctggggagaatctgagtcccggtgggtgcgtgcggactttagaaccgcgaccgcgacgacactgattggcttctctg

SEQ ID NO: 9597 - DNA, 201 bp, Homo sapiens
atggtaattatatatattataatataatatatatatacataattataatttatatatctataaaagagataatcagtattccataaattgatgatattctyagtgttgacttcattgcccaggtgaacactgtaacagaaggatgagtcatggattgtagaggaacaatattttttttactctctggaggagccatcagta

SEQ ID NO: 9598 - DNA, 201 bp, Homo sapiens
aaaccctaggttctcagggactcagattttcatctgtggaagaaaagaatccatctcactctctcaggtgtgatggtaattatatatattataatataatrtatatatacataattataatttatatatctataaaagagataatcagtattccataaattgatgatattctcagtgttgacttcattgcccaggtgaaca

SEQ ID NO: 9599 - DNA, 201 bp, Homo sapiens
tgtattctgggattctgaagggaagagtaagaaaattgaggcactttgcattcctcatgggacactccagcagcacccatgtgaccatcctgagaatggahaggacatctggggtggggaagggagcacagaacccagacacctcctggccacaggcacctgggataatctcctattccttggaaagttagtgtctgaggc

SEQ ID NO: 9600 - DNA, 201 bp, Homo sapiens
ggcccaaggctgctgccagtgtcaaagggaaccactcatcagtattccagggattgtcttcccttcatttcctcagagatttcatcccttaattgtgtcaragagcacggcggaccctcagagtcactctctggaaacccaggaggattcttctccctcaggaccagagggagggcgatattatagtgttggtcccatttg

SEQ ID NO: 9601 - DNA, 201 bp, Homo sapiens
gggtcctgcgtccccgccgggcgggccccttgcttctccccgcagaggcggtttccccacgaccccgcactcacccgcccaggtctgggtcagggccaggrcccccaagagtagcaggaggagggttcggggcgccatgacggccatcctcggcgtctggggagaatctgagtcccggtgggtgcgtgcggactttagaac

SEQ ID NO: 9602 - DNA, 201 bp, Homo sapiens
agatgcattgacatagcacaaagaaatctcccctcctccctgatatctccccgccagttctcagggaaggacagattcagagcaacacagacaggtctggraagggatggggggacatctgaagcaaatgttcagggcctgaagctgtgagagtacacctgccctacagagttggagccctcatgtgatgatgcagagctg

SEQ ID NO: 9603 - DNA, 201 bp, Homo sapiens
tcccacagttgggtcactgtgatttccacatggtagaagcccgggacccagcacctcagggcggcctcatggtccgagatggggtagtggatcacacatgbattctgggattctgaagggaagagtaagaaaattgaggcactttgcattcctcatgggacactccagcagcacccatgtgaccatcctgagaatggatag

SEQ ID NO: 9604 - DNA, 201 bp, Homo sapiens
gggactcagaagagctggactcagacccccaggcacattgagtgtgaagcagagaacaaggcctgagaggaaaagtcacggggcccaaggctgctgccagygtcaaagggaaccactcatcagtattccagggattgtcttcccttcatttcctcagagatttcatcccttaattgtgtcagagagcacggcggaccctca

SEQ ID NO: 9605 - DNA, 201 bp, Homo sapiens
ctgcgtcctaaatttggtcctccccatcccacagttgggtcactgtgatttccacatggtagaagcccgggacccagcacctcagggcggcctcatggtchgagatggggtagtggatcacacatgtattctgggattctgaagggaagagtaagaaaattgaggcactttgcattcctcatgggacactccagcagcacc

SEQ ID NO: 9606 - DNA, 201 bp, Homo sapiens
tgtgatctccgcagggtagaagcccagggcccagcacctcagggtggcctcatggtcagagatggggtggtgggtcatatgtgtcttgggggggtctgacrggaagagtcagaaaattcaggcattttgcatctgtcatgggacactccaccagcacgcatgtggccatcttgagaatggacaggacgcctggggtgggga

SEQ ID NO: 9607 - DNA, 201 bp, Homo sapiens
aaggttccatcccctgcaggcctggtctccacgagctccgtgtgtgggtctggtcctccccatcccgctgccaggtcagtgtgatctccgcagggtagaarcccagggcccagcacctcagggtggcctcatggtcagagatggggtggtgggtcatatgtgtcttgggggggtctgacgggaagagtcagaaaattcagg

SEQ ID NO: 9608 - DNA, 201 bp, Homo sapiens
gacctatttgtagccaaggctgtttttcatggcatcctggtcctctcacatggctccttaaaattggctgtggcttgttttttgtggttgtttgtttgttygttttgagatggagtatggctctgtcacccaggctggagtgcgatggcaggatctcagctcactgcaacttctgccttccaggttcaagcgattctcctg

SEQ ID NO: 9609 - DNA, 201 bp, Homo sapiens
ttccaggttcaagcgattctcctgcatcagccttctgagtagcttggattacagacacgcaccaacacgcccagctaatttttgtatttttagtaaagacraggtttcaccatgttggtcaggctggtctcgaactcctgatctcgtgatccacaggcctcgacttcccaaagtgctaggatcacagaagtgagccaccgt

SEQ ID NO: 9610 - DNA, 201 bp, Homo sapiens
ctgtctcagtgtttccctgagtcttggcccaggagctgtctgagaaaccaggaagaaaccctcggcatgggccctgtccctctcccttcacttttcatccmggaatctccgtccctgaactggactccctgtccacctggactcttctagaagaaaagtcacccacggagtttggtgacagagagtgagcttgctctggga

SEQ ID NO: 9611 - DNA, 201 bp, Homo sapiens
tgagaactgtgcccgcttcctgagtatccaggaaaaaggacccgtcgcaggttgtgagaagaagagaaactgcggaggtggcgaatccccaaggcggggcmtccccaatccatacaccgccttcggggcctgagaccctgagagccacgcctggggccctgggacttcgccctgaccccgctcctcctgtgccaagcgctc

SEQ ID NO: 9612 - DNA, 201 bp, Homo sapiens
gtcttttcatttaatttattttgctcaacaatgctttttttttttactgtgtaaaagtttaatccacttgtatgtgtggtaaaatgtgagcaacatatcamattctcaaattctttgcaagatacaattgccttgcacatcagattgaacactgtatgccagacaatgtagagagttgccaattagcccagggtcaaatga

SEQ ID NO: 9613 - DNA, 201 bp, Homo sapiens
tagtctccaactcccaacctcaggtgatccatccacctcagccttccaaagtgctgggattacaggcgtgagccactgcacctggccgagtggccactctkgaagctttgtaaggtttatcttcaccttctggagtgcccgtgttttgccaagcactacagtgcactttctacctgctgctcatccagccaggtcaacagg

SEQ ID NO: 9614 - DNA, 201 bp, Homo sapiens
cacagcatcgatgcagctgagaagtaactagccaaagccactgtctttgtaggtttcttccaaccctgtccttattatgcagggcattctatcactgcatstgccatagcactccctaaccaaggcaacttctcagctcagcactggtgagacccccagctgctcagctgcaccttgtgccatggactttctgtgtctgcc

SEQ ID NO: 9615 - DNA, 201 bp, Homo sapiens
ttgaatgtattattatgaaagtagttttccatgtcataaagtctgcataaaatttacacacttctagaagctgcatcccatctcaaacaaggagaagtcascagggttcttttagatccatgtgctttcatcttgtcttttggtaaagaatattttgacaagcatgtttgtacatgaagattcttctatggttgtgatttt

SEQ ID NO: 9616 - DNA, 201 bp, Homo sapiens
ggaggagccaagcttcgggtttggctgcctctgggacatttcatgctagaaaaaccccaacatgtgtagataaatggtatagaggacaccagccacccttygatggagctctgcccagtagtgtcccctcacttccactcagagacaacatgcccatttcactaaattcatgaggacatggccaacataagtaagagaaca

SEQ ID NO: 9617 - DNA, 201 bp, Homo sapiens
ccctcattcatctccttagcccatctcagtgtgaggggctctggcagtgcctcctgctgcacatggcatgtgtatctctacttgtctctagaagacagcaycacagctgcccacttctggaaggttctataccctgcaggtctggtccccacaagctctgcgtcctaaatttggtcctccccatcccacagttgggtcact

SEQ ID NO: 9618 - DNA, 201 bp, Homo sapiens
tgggctgggaagatggccctaagaaaggaggggaacgtgaggggtcctgacccccaggcctcagccctgaccctgctgaaggcctccagaagggctcctghtttccctgagaagagacatggcccctcattcatctccttagcccatctcagtgtgaggggctctggcagtgcctcctgctgcacatggcatgtgtatctc

SEQ ID NO: 9619 - DNA, 201 bp, Homo sapiens
acggtgcccgcggctccatcctctggctcgcggcgtcgctgtcaaaccgcacgaactgcgtgtcgtccacgtagcccacggcgatgaagcggggctccccrcggccgggccgggacacggatgtggtgaaatacctcatggagtgggagcctgggggcgaggagtggctgagacccacccgaccctcctcccggcgcggct

SEQ ID NO: 9620 - DNA, 201 bp, Homo sapiens
tgttgtggagactccattggtgtggctcacatccaggcaggcctgcaggaagctgtttcctaattctcaaggccaacattttcagtgaacccataccaaamccctaggttctcagggactcagattttcatctgtggaagaaaagaatccatctcactctctcaggtgtgatggtaattatatatattataatataatata

SEQ ID NO: 9621 - DNA, 201 bp, Homo sapiens
cttggcccatccatcaactgaatgccgctggacatggaacattacaagtgtgaagcttccagggttctcagttgctcttcctgctgttgtggagactccaytggtgtggctcacatccaggcaggcctgcaggaagctgtttcctaattctcaaggccaacattttcagtgaacccataccaaaaccctaggttctcaggg

SEQ ID NO: 9622 - DNA, 201 bp, Homo sapiens
ggggtggaacaaaaacaaagtctggtcagagcccacaggtgatgtgactaaaggaggaattgtggggtggtgacctcccccatgggctcctgtctacactrttccaaggatctcaggaatcactctcccacccctaccacacttacttgaagcctgagcatagctgactccttttccatatgaggaaagaaaacaaactgt

SEQ ID NO: 9623 - DNA, 201 bp, Homo sapiens
tgtattcttatcttggcccatccatcaactgaatgccgctggacatggaacattacaagtgtgaagcttccagggttctcagttgctcttcctgctgttgyggagactccattggtgtggctcacatccaggcaggcctgcaggaagctgtttcctaattctcaaggccaacattttcagtgaacccataccaaaacccta

SEQ ID NO: 9624 - DNA, 201 bp, Homo sapiens
gtctgcaggtcccaatactccggcccctcctgctctatccacggtgcccgcggctccatcctctggctcgcggcgtcgctgtcaaaccgcacgaactgcgwgtcgtccacgtagcccacggcgatgaagcggggctccccgcggccgggccgggacacggatgtggtgaaatacctcatggagtgggagcctgggggcgag

SEQ ID NO: 9625 - DNA, 201 bp, Homo sapiens
tatactatagatatttagcttttaaatagacatttctggtctgtgttttatttcaagtgtctgggaacggatagagttgaggttcaagggagaatgagagytctgtctagatgcattgacatagcacaaagaaatctcccctcctccctgatatctccccgccagttctcagggaaggacagattcagagcaacacagaca

SEQ ID NO: 9626 - DNA, 201 bp, Homo sapiens
cttcacattccgtgtctgcaggtcccaatactccggcccctcctgctctatccacggtgcccgcggctccatcctctggctcgcggcgtcgctgtcaaacygcacgaactgcgtgtcgtccacgtagcccacggcgatgaagcggggctccccgcggccgggccgggacacggatgtggtgaaatacctcatggagtggga

SEQ ID NO: 9627 - DNA, 201 bp, Homo sapiens
ttgagagacacatcagagccctgggtactgttcctgtttggggtggaacaaaaacaaagtctggtcagagcccacaggtgatgtgactaaaggaggaattktggggtggtgacctcccccatgggctcctgtctacactattccaaggatctcaggaatcactctcccacccctaccacacttacttgaagcctgagcata

SEQ ID NO: 9628 - DNA, 201 bp, Homo sapiens; identical to SEQ ID NO: 1110

SEQ ID NO: 9629 - DNA, 201 bp, Homo sapiens
tcgctctggttgtagtagccgcgcagggtccccaggttcgctcggtcagtctgtgactgggccttcacattccgtgtctgcaggtcccaatactccggccyctcctgctctatccacggtgcccgcggctccatcctctggctcgcggcgtcgctgtcaaaccgcacgaactgcgtgtcgtccacgtagcccacggcgatg

SEQ ID NO: 9630 - DNA, 201 bp, Homo sapiens; identical to SEQ ID NO: 1113

SEQ ID NO: 9631 - DNA, 201 bp, Homo sapiens; identical to SEQ ID NO: 1114

SEQ ID NO: 9632 - DNA, 201 bp, Homo sapiens; identical to SEQ ID NO: 1116

SEQ ID NO: 9633 - DNA, 201 bp, Homo sapiens; identical to SEQ ID NO: 1119

SEQ ID NO: 9634 - DNA, 201 bp, Homo sapiens; identical to SEQ ID NO: 1121

SEQ ID NO: 9635 - DNA, 201 bp, Homo sapiens; identical to SEQ ID NO: 1125

SEQ ID NO: 9636 - DNA, 201 bp, Homo sapiens
cccgccgggccggcccctccctcctccgcgcaggggccgtttccctcctgaccccgcactcacccgcccaggtctcggtcagggtcagggcccccgagagyagcaggaagagggttcggggcgccatgaccaccatccttggcgtctggggagaatgagtccgggtgggtgagcgaggactttagaaccaggaccgcggcg

SEQ ID NO: 9637 - DNA, 201 bp, Homo sapiens
cgggccgggacacggcggcgctgaaatacctcatggagtgggagcctgggggcgaggaggggttgagacccgcccgaccctcctcccggcgcggctgccgrgtcctgcgcccccgccgggccggcccctccctcctccgcgcaggggccgtttccctcctgaccccgcactcacccgcccaggtctcggtcagggtcaggg

SEQ ID NO: 9638 - DNA, 201 bp, Homo sapiens
caggtcgcagccaatcatccactggagggtgtgagaacctggccccaccccctcggtcagccccgcccaccgagcctcgccctcgcccggacccacccgcrgggattttggtaaaggcgccttggggttctcccaggtagagggtctgggcgggtcccgcggcctcggggtggatcccagacccggagactcgggagtacc

SEQ ID NO: 9639 - DNA, 201 bp, Homo sapiens
catcgtaggcatactgttcatacccgcggaggaggcgtccgtcggaccccaggtcgcagccaatcatccactggagggtgtgagaacctggccccaccccytcggtcagccccgcccaccgagcctcgccctcgcccggacccacccgcggggattttggtaaaggcgccttggggttctcccaggtagagggtctgggcg

SEQ ID NO: 9640 - DNA, 201 bp, Homo sapiens
tccgtggaggtgaggacaatgaggtggttgggtctcagtgctgtgtggaactttcttttgacctccttatgagtggatggtctgtctgagatagaacgggycttagaggatttactcattaccctgagagagggggcgtgttcattccaggtttcaggtctgccctgacacctttcttggtggcttagacctccctactgt

SEQ ID NO: 9641 - DNA, 201 bp, Homo sapiens
tcagggcgaggtaatccttgccatcgtaggcatactgttcatacccgcggaggaggcgtccgtcggaccccaggtcgcagccaatcatccactggagggtrtgagaacctggccccaccccctcggtcagccccgcccaccgagcctcgccctcgcccggacccacccgcggggattttggtaaaggcgccttggggttct

SEQ ID NO: 9642 - DNA, 201 bp, Homo sapiens
ttcaaatgttttattttgaatgttaaaaatacatgtttctacattagaaatatgaaaatgtatttgattacagaagaatttaaaatgcacacatcaacacstggttgaattttaaagaaaaaaaaatgcagagaagaaagaaatatcacccaggcttcccctccaaagaaccactgctatcatattattgaaacttcctgg

SEQ ID NO: 9643 - DNA, 201 bp, Homo sapiens
ctggaacagaagatgttaaagagaaacagatatcttaaaatttgccacaggagaaacacagatcctctaagaagcaactggttaaaatgtaactgactatyccctgtcagccacagcagccagaagcaacataatcatcaaagatctgagagaaaaccaatgtcaaactagaaatttgcagctgacaaatctctctttgat

SEQ ID NO: 9644 - DNA, 201 bp, Homo sapiens
attaatttttgttgactgaatgaatgaaatatgaatgtattaaattgcatcacagaaagttataaaatgtaaaacactgaaaaattaagaaatattttatyttatgtaactagtgtgcatatcaattcatccgagtctgttgagcctgtgtatgaattttataagattgcataacaaattatcacaaacattgactttaaa

SEQ ID NO: 9645 - DNA, 201 bp, Homo sapiens
gactacacttcacctcaaatttattttttcatatgttatgccatagtaccaggaatagggatgtaaataaaagtgccagaaacaggaattatccctaagcsaaaaaccataactatatttttacacctttatgtaagaattctcaagtattcatttcatctgaaaagttaggattaacagtaagtagagttatatagcctg

SEQ ID NO: 9646 - DNA, 201 bp, Homo sapiens
cattcagatgccttggcagaaagagaaaacagaggcccttgaagtctcaaagtggagccatgaacaaatcttgcatctcagtccctcacaaggcagtcttrgaaagaaaatagtcgtgaacaaattcaagtcagtcatggtaagtggtgacactgaacagcccaccacacattgaaaaattccaaatcaaagactctctag

SEQ ID NO: 9647 - DNA, 201 bp, Homo sapiens
gccgccatgtccgccgcggtccaagagcgcaggtcctcgttcaaggcgatgtaatccttgccgtcgtaggcgtcctgccggtacccgcggaggaagcgccmgtccgaccccacgtcgcagccatacatcatctggatggtgtgagaacctggccccgaccccacggtcagcccagtcccccgagccccgtccggccccgac

SEQ ID NO: 9648 - DNA, 201 bp, Homo sapiens
aaggatctcaggaatcactctcccacccctaccacacttacttgaagcctgagcatagctgactccttttccatatgaggaaagaaaacaaactgtgagasgccagggaagaggcagggccatgagatcctagaggagtttccagaactgtgactgcagacccaggtcaggatcagaaaacccgagggaagaggatgtgtt

SEQ ID NO: 9649 - DNA, 201 bp, Homo sapiens
gaaaaattccaaatcaaagactctctagagcctagttgtgtcccatctgccccaactcctccttcacttcaggccctctaaggtgtcacttttacaagacdtgagagacacatcagagccctgggtactgttcctgtttggggtggaacaaaaacaaagtctggtcagagcccacaggtgatgtgactaaaggaggaattg

SEQ ID NO: 9650 - DNA, 201 bp, Homo sapiens
cccctaccacacttacttgaagcctgagcatagctgactccttttccatatgaggaaagaaaacaaactgtgagaggccagggaagaggcagggccatgaratcctagaggagtttccagaactgtgactgcagacccaggtcaggatcagaaaacccgagggaagaggatgtgttgaagctgaaccaaatgtccttttga

SEQ ID NO: 9651 - DNA, 201 bp, Homo sapiens
atctgagccgccatgtccgccgcggtccaagagcgcaggtcctcgttcaaggcgatgtaatccttgccgtcgtaggcgtcctgccggtacccgcggaggargcgcccgtccgaccccacgtcgcagccatacatcatctggatggtgtgagaacctggccccgaccccacggtcagcccagtcccccgagccccgtccggc

SEQ ID NO: 9652 - DNA, 201 bp, Homo sapiens
aaaagtaaatgtttactcagattctaattttaagagggaagtaagaagttacagctcagtgcacataaagttgagaaaaagatggagacatctcagcccckcctctctggaacaggaaagatgattggggagggaacacagatcagcgtggggaagagggtcatggtggacatgagggtgggttggtctcccctcctccac

SEQ ID NO: 9653 - DNA, 201 bp, Homo sapiens
ccacttgcgctgggtgatctgagccgccatgtccgccgcggtccaagagcgcaggtcctcgttcaaggcgatgtaatccttgccgtcgtaggcgtcctgcyggtacccgcggaggaagcgcccgtccgaccccacgtcgcagccatacatcatctggatggtgtgagaacctggccccgaccccacggtcagcccagtccc

SEQ ID NO: 9654 - DNA, 201 bp, Homo sapiens
gttttgcttaagtcagcaaagtcctttgctttcctaaaaaggatcctgcttaccagtgagtacagagtttttgtacatttgaggtggagttctcagcagartaattaaagatatctgtagaaacaccacacacattatgtgtagctgactgattcacccctctgccacccccaattgaaggaaggagctgtattcttatct

SEQ ID NO: 9655 - DNA, 201 bp, Homo sapiens
ggacaggttgctggattacgtagagacaatagacagccccaacaccatcccacatccttcagctctgtaatggtgatgtgatccccacaatacttgaagtrtcttacacaagacccaccctgggacacactatgatttttgatttggccaggatgggggcagtgtcagaggtttccctttggctttcagcacaatgaaagt

SEQ ID NO: 9656 - DNA, 201 bp, Homo sapiens
taggctctcaactgctccgccacacgggccgcctcccacttgcgctgggtgatctgagccgccatgtccgccgcggtccaagagcgcaggtcctcgttcarggcgatgtaatccttgccgtcgtaggcgtcctgccggtacccgcggaggaagcgcccgtccgaccccacgtcgcagccatacatcatctggatggtgtga

SEQ ID NO: 9657 - DNA, 201 bp, Homo sapiens
tatccaatcaggataattcatttggagagaaaatgttttgcttaagtcagcaaagtcctttgctttcctaaaaaggatcctgcttaccagtgagtacagastttttgtacatttgaggtggagttctcagcagagtaattaaagatatctgtagaaacaccacacacattatgtgtagctgactgattcacccctctgcca

SEQ ID NO: 9658 - DNA, 201 bp, Homo sapiens; identical to SEQ ID NO: 1044

SEQ ID NO: 9659 - DNA, 201 bp, Homo sapiens
ttggcagaaagagaaaacagaggcccttgaagtctcaaagtggagccatgaacaaatcttgcatctcagtccctcacaaggcagtcttggaaagaaaataktcgtgaacaaattcaagtcagtcatggtaagtggtgacactgaacagcccaccacacattgaaaaattccaaatcaaagactctctagagcctagttgtg

SEQ ID NO: 9660 - DNA, 201 bp, Homo sapiens; identical to SEQ ID NO: 1048

SEQ ID NO: 9661 - DNA, 201 bp, Homo sapiens; identical to SEQ ID NO: 1047

SEQ ID NO: 9662 - DNA, 201 bp, Homo sapiens
tattatttggtcataaaatgaataaagcactggcatatgctaaaacattgctgaatcttgaaaacaagacaagtgaaggaagccagtcacaggaggctacrtaacttatgagcccatttttgtgaaatattcataagaggcaagtcgatagagaaagaagtggatttgtggcgacagggtctgctggcaggtggaaatgga

SEQ ID NO: 9663 - DNA, 201 bp, Homo sapiens
gcattaccccattctactctgtcttcatattttatactatagatatttagcttttaaatagacatttctggtctgtgttttatttcaagtgtctgggaacrgatagagttgaggttcaagggagaatgagagctctgtctagatgcattgacatagcacaaagaaatctcccctcctccctgatatctccccgccagttct

SEQ ID NO: 9664 - DNA, 201 bp, Homo sapiens; identical to SEQ ID NO: 1050

SEQ ID NO: 9665 - DNA, 201 bp, Homo sapiens; identical to SEQ ID NO: 1049

SEQ ID NO: 9666 - DNA, 201 bp, Homo sapiens
ctatttggaggaataataacttcaaatctcctaaatttgatgaaaaatataattttactcatccaacaaacttgatacattttaagcagcaagaattttaraagtccacactgagagacgttataatcaaccagtctacaccaatgacaaacagaccatcttgaaagcaataacagagaaggaacttttcaggtacaatgg

SEQ ID NO: 9667 - DNA, 201 bp, Homo sapiens; identical to SEQ ID NO: 1052

SEQ ID NO: 9668 - DNA, 201 bp, Homo sapiens; identical to SEQ ID NO: 1051

SEQ ID NO: 9669 - DNA, 201 bp, Homo sapiens
actatttacttttttacaaaagcaactttcactatgcagaatgaagaatcggcaagcttaaaggtaagacaattgaaattatccagtttgaggtgcagaartaaaaaaaaattatgaagaaaaatgaacagaacttaagaaaactgtgagacaacaccaagcatatgcattttgggaatcctcaaagaaaggagagagaaa

SEQ ID NO: 9670 - DNA, 201 bp, Homo sapiens; identical to SEQ ID NO: 1054

SEQ ID NO: 9671 - DNA, 201 bp, Homo sapiens; identical to SEQ ID NO: 1053

SEQ ID NO: 9672 - DNA, 201 bp, Homo sapiens
gggcgggatggctggggtggaacgtcatcttgtcctttagtcctggggcattttcactcctcacatggtgggtgctgggcatctggcaggtactgatgttkatggagtcgagggagggtactggccggaactgggaaaaacagggttggggagataattaaggtgaacattattttttctgagtgtaagtcatggcttgaa

SEQ ID NO: 9673 - DNA, 201 bp, Homo sapiens
caactttcctggcacgttgaggtcccctcgccctgtcacactctcctgcattaccccattctactctgtcttcatattttatactatagatatttagcttytaaatagacatttctggtctgtgttttatttcaagtgtctgggaacggatagagttgaggttcaagggagaatgagagctctgtctagatgcattgacat

SEQ ID NO: 9674 - DNA, 201 bp, Homo sapiens
ctctaccatttagtagtcctggcaggggtcctgttgctgcagctccgctaagaattttcctgggtattaaatttccccatttaaatatcagttccagtttygggtcatttctttgctcacacatatgcacataggctattacaggcagccagaccaaatcctgaattctatgctactgagaaatttcttccatcagatacc

SEQ ID NO: 9675 - DNA, 201 bp, Homo sapiens
aatattctttgtgagaaaatgggaaatatgcataagacccttactgcacagagaagcaggatggtagccttgagaaagggcacttgtgtgactcagttatkatttcaaccagcagatctcactcacctacggaaagacagttgtattaattcctgtttgggggtatcatgaataaagctgcaagagtatttgtgcacagga

SEQ ID NO: 9676 - DNA, 201 bp, Homo sapiens
tggctttgttttaacgtgtgtagttattgctaaggatccttgagatgaactttggtattttcttttctctttcatttccaaataatcagtcaggaatggcrcacaaggtgcattttgaaaaatgacactttaaagatttgtgggccgggaatggtggctcatgtctgtaatcccagcactttggaaggccgaagttggtgg

SEQ ID NO: 9677 - DNA, 201 bp, Homo sapiens
ccgagccccgccctcgccaggaccaacctgcggggattttggctgaaaatgaaaccgggtaacggctcctgggcctctcccgggtaaagggtctccaggtbccgctgcctcggcgtggatctcggacccagagactcggggagacccgggcggtccgtgggggatgtagaggggtagtgatctgcgcccccggccggtgtc

SEQ ID NO: 9678 - DNA, 201 bp, Homo sapiens
aggcgcccgtccgaccccacgtcgcagacagacatcctctagatgggtgtgagaccctggccccgcccccgcggccagccccgcccaccgagccccgccchcgccaggaccaacctgcggggattttggctgaaaatgaaaccgggtaacggctcctgggcctctcccgggtaaagggtctccaggttccgctgcctcggc

SEQ ID NO: 9679 - DNA, 201 bp, Homo sapiens
cattatatcccatagtaaccgattgcgacaatggggttttaccatgttagccagactggtcttgaactcctgacctcaggtggtccacccacctcagcctmccaaagtgctgggattacaggcgtgaaccaccacgcctggcttaaacttttgaaataagtgcgtaatacttgatgttgatgatgtgttctgaaaacactg

SEQ ID NO: 9680 - DNA, 201 bp, Homo sapiens
gagccgcagtgtccgctgcggtccaggagcgcaggtcctcgttcagggcgaggtaatccttgccatcgtaggcatactgttcatacccgcggaggaggcgwccgtcggaccccaggtcgcagccaatcatccactggagggtgtgagaacctggccccaccccctcggtcagccccgcccaccgagcctcgccctcgcccg

SEQ ID NO: 9681 - DNA, 201 bp, Homo sapiens
tctggaaacccaggaggattcctctccctcaggaccagagggagggcgatattctagtgttggtcccattttcctcctctccttgtgctaggccaggctgrgaggtctacaggagatcagggaggcgccccactgcccctggtacccgcgcgctgcagcatctccttcccgttctccaggtatctgtggagccactccacg

SEQ ID NO: 9682 - DNA, 201 bp, Homo sapiens
cccacacacattgagtgtaaagcagagagcaaggcctgagaggaaaagtaacggggcccaaggctgctgccagtgtcaaagggaacccctcatcagtattycagggattgtcttcccttcatttcctcagagatttcatcccttaattgtatcagagagcagggcagaccctcagagtcactctcttgtacaggatctgga

SEQ ID NO: 9683 - DNA, 201 bp, Homo sapiens
gggattaccggcatgagccaccgcgcccggcctattttgtcaattttctataaaatccctgctgggattttgatagggattgtgttgaacctatagatctrctgggggagaattgccatcttaacagtattatcgagctttccaactcgcatctctccatttatttagacctttaatttctctgaggaatgtttttttatt

SEQ ID NO: 9684 - DNA, 201 bp, Homo sapiens
gaggctcactagtccaacagagcttggtaccagtgtcatatgccaggagccaaggttacaaggatgcaaagttcccagacctaccagagaaggcaaacccytgcagcatgcagggctagacaggggcaagaaacaaggtcattccgggccagcaggaagagggaaagggaaactacagacgtacctcagagacactgcaga

SEQ ID NO: 9685 - DNA, 201 bp, Homo sapiens
tggctcacacatgcacggtgcatgcacagagctttggttctagttcaggaggtgtgtggggaggaggctcactagtccaacagagcttggtaccagtgtcrtatgccaggagccaaggttacaaggatgcaaagttcccagacctaccagagaaggcaaacccctgcagcatgcagggctagacaggggcaagaaacaagg

SEQ ID NO: 9686 - DNA, 201 bp, Homo sapiens
cttcttgtccccagatgatcaaaaccggggccatccactcccttctgagccacctctgcctggggggcccgtggctgtgtcctccagtcacaacagaacaytccttcagaacactcgcaggaagacaacatcttgtcattggctcacacatgcacggtgcatgcacagagctttggttctagttcaggaggtgtgtgggga

SEQ ID NO: 9687 - DNA, 201 bp, Homo sapiens
gtctcgggcagttttgttttccaaaacatgggtttttatctcaggaccttcttgtccccagatgatcaaaaccggggccatccactcccttctgagccacytctgcctggggggcccgtggctgtgtcctccagtcacaacagaacactccttcagaacactcgcaggaagacaacatcttgtcattggctcacacatgca

SEQ ID NO: 9688 - DNA, 201 bp, Homo sapiens
acccgtgcgctgcagcgtctccttcccgttctccaggtatctgcggagccactccacgcacgtgccctccaggtaggctctcaactgctccgccacacggrccgcctcccacttgcgctgggtgatctgagccgccatgtccgccgcggtccaagagcgcaggtcctcgttcaaggcgatgtaatccttgccgtcgtaggc

SEQ ID NO: 9689 - DNA, 201 bp, Homo sapiens
tggtgatcatgccactgcactccagcctgggtgacagagcaagaccctgtctcaaaaatagtaatatgatgatgataaatttagagcaaatgcaaattaaygtgtaataatacatcctctcttgtgaaaatgtattagttatttactattgtgtaacaaattatgtaaaacttagcagctcaaaacagcaaatattcatca

SEQ ID NO: 9690 - DNA, 201 bp, Homo sapiens
attataattcctgcttggccaggcctggagtaatctcattcattctttagtcctcatcaggcttcctcagggacaggttgctggattatgtagagacaatrgacaaccccaacaccatcccacatccttcagctctctaatggtggtgtgacccccacattactttcagtgtcttcctcaagacacaccctgggacacact

SEQ ID NO: 9691 - DNA, 201 bp, Homo sapiens
ctactcaagaggctgagatcagaggatcccttgagcccaggaggtcgacactgcagtgcatggtgatcatgccactgcactccagcctgggtgacagagcragaccctgtctcaaaaatagtaatatgatgatgataaatttagagcaaatgcaaattaacgtgtaataatacatcctctcttgtgaaaatgtattagtta

SEQ ID NO: 9692 - DNA, 201 bp, Homo sapiens
gtccgctgcggtccaggagcgcaggtcctcgttcagggcgaggtaatccttgccatcgtaggcatactgttcatacccgcggaggaggcgtccgtcggacmccaggtcgcagccaatcatccactggagggtgtgagaacctggccccaccccctcggtcagccccgcccaccgagcctcgccctcgcccggacccacccg

SEQ ID NO: 9693 - DNA, 201 bp, Homo sapiens
ggtacccgtgcgctgcagcgtctccttcccgttctccaggtatctgcggagccactccacgcacgtgccctccaggtaggctctcaactgctccgccacaygggccgcctcccacttgcgctgggtgatctgagccgccatgtccgccgcggtccaagagcgcaggtcctcgttcaaggcgatgtaatccttgccgtcgta

SEQ ID NO: 9694 - DNA, 201 bp, Homo sapiens
gcacatcagattgaacactgtatgccagacaatgtagagagttgccaattagcccagggtcaaatgacctctttctagccaaggctatttttcatgagatyctggtcctctctgtcacatgactctttacaattggctgtggctttgttttaacgtgtgtagttattgctaaggatccttgagatgaactttggtattttc

SEQ ID NO: 9695 - DNA, 201 bp, Homo sapiens
ctggtacccgtgcgctgcagcgtctccttcccgttctccaggtatctgcggagccactccacgcacgtgccctccaggtaggctctcaactgctccgccasacgggccgcctcccacttgcgctgggtgatctgagccgccatgtccgccgcggtccaagagcgcaggtcctcgttcaaggcgatgtaatccttgccgtcg

SEQ ID NO: 9696 - DNA, 201 bp, Homo sapiens
gctactcaagaggctgagatcagaggatcccttgagcccaggaggtcgacactgcagtgcatggtgatcatgccactgcactccagcctgggtgacagagyaagaccctgtctcaaaaatagtaatatgatgatgataaatttagagcaaatgcaaattaacgtgtaataatacatcctctcttgtgaaaatgtattagtt

SEQ ID NO: 9697 - DNA, 201 bp, Homo sapiens
ctgcttccactcatggcagaagacaaaggggagctggtatatgcagagatcacatggtaacagaggaacacagagagtaggaagttgccagggtctttttwacaactagctctcttggaaaataatagagcaacaattcattcattcccgagagagggcagtatctctcgattcataaaagattggtcaccatgacccaaa

SEQ ID NO: 9698 - DNA, 201 bp, Homo sapiens
cctggtacccgtgcgctgcagcgtctccttcccgttctccaggtatctgcggagccactccacgcacgtgccctccaggtaggctctcaactgctccgccdcacgggccgcctcccacttgcgctgggtgatctgagccgccatgtccgccgcggtccaagagcgcaggtcctcgttcaaggcgatgtaatccttgccgtc

SEQ ID NO: 9699 - DNA, 201 bp, Homo sapiens
ctctacaaaaaaattagaaaattagccaggcatgttaattcatgcctatagtcccagctactcaagaggctgagatcagaggatcccttgagcccaggagrtcgacactgcagtgcatggtgatcatgccactgcactccagcctgggtgacagagcaagaccctgtctcaaaaatagtaatatgatgatgataaatttag

SEQ ID NO: 9700 - DNA, 201 bp, Homo sapiens
ttgtctaggtccgggaccctacaccatggcagaagccatcttccctcccagtgtgcagtgatgtcccagatagcgaattggttagccacttttcagtctcrggcagttttgttttccaaaacatgggtttttatctcaggaccttcttgtccccagatgatcaaaaccggggccatccactcccttctgagccacctctgc

SEQ ID NO: 9701 - DNA, 201 bp, Homo sapiens
aaaacatttagtctttgtccctggtttctcctaaaaaccttagactctcttgagtgataagagtgtctttagagtactgatgagaagactcttggctgagwggatcctggatatcttaagaacggtggctagctgccagagacacatacctgtgatgcgagggttatctttttccattttgtgttgctataaagaaatgtc

SEQ ID NO: 9702 - DNA, 201 bp, Homo sapiens
gggaggcgccccgtggcccctggtacccgtgcgctgcagcgtctccttcccgttctccaggtatctgcggagccactccacgcacgtgccctccaggtagrctctcaactgctccgccacacgggccgcctcccacttgcgctgggtgatctgagccgccatgtccgccgcggtccaagagcgcaggtcctcgttcaaggc

SEQ ID NO: 9703 - DNA, 201 bp, Homo sapiens
gtgaatagtaataaaatacatcctcttcagccgtggaaattctcctttccttttaaaactaagttacatgtttaatatcttatagttaatttagaccaggkgtggtggctcacgcctgcaatcctagcactgttgaaggcagaggaaggcagatttgactccagaagttcaagatcagcctgggcaacatggtgaaacccc

SEQ ID NO: 9704 - DNA, 201 bp, Homo sapiens
ggtctttggcctcatttaaaggtgcttcagaagcactgagccataggaaggcctctttgtctaggtccgggaccctacaccatggcagaagccatcttccmtcccagtgtgcagtgatgtcccagatagcgaattggttagccacttttcagtctcgggcagttttgttttccaaaacatgggtttttatctcaggacctt

SEQ ID NO: 9705 - DNA, 201 bp, Homo sapiens
tgtggtcaaagaaaagtgggcaatctgagttatcacaaaaacatttagtctttgtccctggtttctcctaaaaaccttagactctcttgagtgataagagbgtctttagagtactgatgagaagactcttggctgagtggatcctggatatcttaagaacggtggctagctgccagagacacatacctgtgatgcgagggt

SEQ ID NO: 9706 - DNA, 201 bp, Homo sapiens
agaaaacatgattttcaaagtcaccacatgttagtattcaaaataaaaatgaggtatgcaattaaactagacagtaagacccattctcaagaaaaaagagsaattgacagaaactgttcctgagaaaggccattgaacatacttactggacaaacaactttgaattgactgcttaaatatgttcacagagctaaaggaaac

SEQ ID NO: 9707 - DNA, 201 bp, Homo sapiens
caggcgatcagggaggcgccccgtggcccctggtacccgtgcgctgcagcgtctccttcccgttctccaggtatctgcggagccactccacgcacgtgccmtccaggtaggctctcaactgctccgccacacgggccgcctcccacttgcgctgggtgatctgagccgccatgtccgccgcggtccaagagcgcaggtcct

SEQ ID NO: 9708 - DNA, 201 bp, Homo sapiens
gttgggagccatgatagaatcagcccaggaagggctggatcttccttttgtgtttaatttggacacagttggaaattgaagttcaagtaaagtgatcattrtgaatagtaataaaatacatcctcttcagccgtggaaattctcctttccttttaaaactaagttacatgtttaatatcttatagttaatttagaccaggt

SEQ ID NO: 9709 - DNA, 201 bp, Homo sapiens
agtgggaactagtcagctaatcatgaacatgaggtctttggcctcatttaaaggtgcttcagaagcactgagccataggaaggcctctttgtctaggtccrggaccctacaccatggcagaagccatcttccctcccagtgtgcagtgatgtcccagatagcgaattggttagccacttttcagtctcgggcagttttgtt

SEQ ID NO: 9710 - DNA, 201 bp, Homo sapiens
ctaattttgaatgaatggatgagactctgataatatgccaatacctctttactgttacaatcctttttcctgtaaaagatatgtggtcaaagaaaagtggrcaatctgagttatcacaaaaacatttagtctttgtccctggtttctcctaaaaaccttagactctcttgagtgataagagtgtctttagagtactgatga

SEQ ID NO: 9711 - DNA, 201 bp, Homo sapiens
gagacctgtccatgactctgtgtggctggcagcccctgggaggtgcaggtggtgataagaccagggggtgccatggtcatggaccacgcttcatccccttmcctctgaggtgtgtcccgcgggcagataatgtactgaaattctgagccagtggctcaggaatgccaatagtgatactggctgagggtctaagagtagaga

SEQ ID NO: 9712 - DNA, 201 bp, Homo sapiens
gaaggtgaatgaccaggagctggttgttgggagccatgatagaatcagcccaggaagggctggatcttccttttgtgtttaatttggacacagttggaaaytgaagttcaagtaaagtgatcattgtgaatagtaataaaatacatcctcttcagccgtggaaattctcctttccttttaaaactaagttacatgtttaat

SEQ ID NO: 9713 - DNA, 201 bp, Homo sapiens
gggagggcgatattctagtgttggtcccaattgtctcccctccttgtgggaggccagcccgggagatctacaggcgatcagggaggcgccccgtggccccyggtacccgtgcgctgcagcgtctccttcccgttctccaggtatctgcggagccactccacgcacgtgccctccaggtaggctctcaactgctccgccaca

SEQ ID NO: 9714 - DNA, 201 bp, Homo sapiens
acatattcatacaagaggatgataaactggcctaattttgaatgaatggatgagactctgataatatgccaatacctctttactgttacaatcctttttchtgtaaaagatatgtggtcaaagaaaagtgggcaatctgagttatcacaaaaacatttagtctttgtccctggtttctcctaaaaaccttagactctcttg

SEQ ID NO: 9715 - DNA, 201 bp, Homo sapiens
gtatgtcgcacagactcacaaagcacctgagaatgccctgtgttcacacctcttgctaactttcaatatctgcacaagtaggaaatgaaggccaaagcagkattgtaaactgcccagcagagtgttgagggcatgccccaaaacacacagagagcccagataaaaagattgaattttcttttcttatttctttttggctga

SEQ ID NO: 9716 - DNA, 201 bp, Homo sapiens
cactaagttgtgtctgtagagacctgtccatgactctgtgtggctggcagcccctgggaggtgcaggtggtgataagaccagggggtgccatggtcatggmccacgcttcatcccctttcctctgaggtgtgtcccgcgggcagataatgtactgaaattctgagccagtggctcaggaatgccaatagtgatactggctg

SEQ ID NO: 9717 - DNA, 201 bp, Homo sapiens
tgtagagaacagggagggctgcacttaatgcatggtgcccaccagcgttctttcctacacagccccttcattttcaaagcccacagtggaggaaacccctyatgctgaatccctctcacactgtgaatctctatgctcaggaagaacccagtcctttcaaggactctccttattaggacagtccaagcaggataaactcag

SEQ ID NO: 9718 - DNA, 201 bp, Homo sapiens
cttaattgtgtcagagagcagggcggaacctcagagtcactctctggtacaggatctggaaacccaggaggattcctctccctcaggaccagagggagggygatattctagtgttggtcccaattgtctcccctccttgtgggaggccagcccgggagatctacaggcgatcagggaggcgccccgtggcccctggtaccc

SEQ ID NO: 9719 - DNA, 201 bp, Homo sapiens
gagaagatattgtcacttaggtcaattatacgggatgcctaaaagagtgaagctgtatgtccctgagaccatccttgtttttggaacctggtaagattgartgttgtcagcaaagctgagtgatttcattctgggagacatattcatacaagaggatgataaactggcctaattttgaatgaatggatgagactctgataa

SEQ ID NO: 9720 - DNA, 201 bp, Homo sapiens
atcatataaatgaaactgttgcactgtctccataatacccaatttcaaaatatctacaagaacagagaaatatgtaagaacaaaagagagaaagaaagcakaaattttaatttgtaatctttggtatatgtaactcagtactgtcataaaatattaataatgtagctttcaaagaaaaaagtcatgtaaaatacataacat

SEQ ID NO: 9721 - DNA, 201 bp, Homo sapiens
tcatccaagctggcactaagttgtgtctgtagagacctgtccatgactctgtgtggctggcagcccctgggaggtgcaggtggtgataagaccagggggtkccatggtcatggaccacgcttcatcccctttcctctgaggtgtgtcccgcgggcagataatgtactgaaattctgagccagtggctcaggaatgccaata

SEQ ID NO: 9722 - DNA, 201 bp, Homo sapiens
gcagtttctggcagttgtaagactgaggtccctgttcctcactggctgtcactgtagagaacagggagggctgcacttaatgcatggtgcccaccagcgtyctttcctacacagccccttcattttcaaagcccacagtggaggaaacccctcatgctgaatccctctcacactgtgaatctctatgctcaggaagaaccc

SEQ ID NO: 9723 - DNA, 201 bp, Homo sapiens
gtgtgagcaagagaagatattgtcacttaggtcaattatacgggatgcctaaaagagtgaagctgtatgtccctgagaccatccttgtttttggaacctgwtaagattgagtgttgtcagcaaagctgagtgatttcattctgggagacatattcatacaagaggatgataaactggcctaattttgaatgaatggatgag

SEQ ID NO: 9724 - DNA, 201 bp, Homo sapiens
gccctccttgtgtgatagcagccctgcctcctcctcttctcacctgcttgtatctggacacatactattcaaacatccctgggggcagccataatgtgtarttccatggactctcatttaaatgtctccttgccagggtgccccctttgggaaaccaggacctcctcccctacagagcccagatattggagatgagaagtg

SEQ ID NO: 9725 - DNA, 201 bp, Homo sapiens
ggcttatacagaggtggcagaatgcagtttctggcagttgtaagactgaggtccctgttcctcactggctgtcactgtagagaacagggagggctgcactyaatgcatggtgcccaccagcgttctttcctacacagccccttcattttcaaagcccacagtggaggaaacccctcatgctgaatccctctcacactgtga

SEQ ID NO: 9726 - DNA, 201 bp, Homo sapiens
gagaacaaggcctgagaggaaaagtcacgggcccaaggctgctgcctgtgtgtgtcaaagggaaccactcatcagtattcgagggatcgtcttcccgtcaytccttcagagattttatcccttaattgtgtcagagagcagggcggaacctcagagtcactctctggtacaggatctggaaacccaggaggattcctctcc

SEQ ID NO: 9727 - DNA, 201 bp, Homo sapiens
tgagggaagacatgctagaatactattgctgcctgcagtctaggccagcccagcagacaaacctaatgtcactcccaaacctggaaacaactgatataaarggacagagggaggaatagtggctgagggtaagtgaataaatcaaagggttatataatgagaaaaattcaatattagcttaactcctcaaaggtggtgtga

SEQ ID NO: 9728 - DNA, 201 bp, Homo sapiens
cttcctagtcacatggaccacaggcctccttatgacacaacagccagcttcccccagggctcatgattccagagaaagaaagaaccaaagtagaaacttcrgtgagtcttatgttctacacccagaatcacaaactattatgtcagcattactctatcagttagaagtgagtcattaagtccaggccacacgaacagggag

SEQ ID NO: 9729 - DNA, 201 bp, Homo sapiens
tctcctgccctccttgtgtgatagcagccctgcctcctcctcttctcacctgcttgtatctggacacatactattcaaacatccctgggggcagccataargtgtatttccatggactctcatttaaatgtctccttgccagggtgccccctttgggaaaccaggacctcctcccctacagagcccagatattggagatga

SEQ ID NO: 9730 - DNA, 201 bp, Homo sapiens
tcaagactagactgagggaagacatgctagaatactattgctgcctgcagtctaggccagcccagcagacaaacctaatgtcactcccaaacctggaaacractgatataaagggacagagggaggaatagtggctgagggtaagtgaataaatcaaagggttatataatgagaaaaattcaatattagcttaactcctca

SEQ ID NO: 9731 - DNA, 201 bp, Homo sapiens
aaggggaaccataaggtctccaagtggatctcttatttccacacacacatctcctgccctccttgtgtgatagcagccctgcctcctcctcttctcacctkcttgtatctggacacatactattcaaacatccctgggggcagccataatgtgtatttccatggactctcatttaaatgtctccttgccagggtgccccct

SEQ ID NO: 9732 - DNA, 201 bp, Homo sapiens
actggctgggaacagcccatgggaagcagggctttgcaccaatcctgctgaggatgtcagagcacaggagcacagccttgggacattacctatgagtatcrctcaatccttccttcctgagggttctgggctcttgaatatgaaaccctctcaggctgggttgctggatgattctgctcacacttacaacaggacaagggg

SEQ ID NO: 9733 - DNA, 201 bp, Homo sapiens
tgaccagtcactggctgggaacagcccatgggaagcagggctttgcaccaatcctgctgaggatgtcagagcacaggagcacagccttgggacattacctrtgagtatcgctcaatccttccttcctgagggttctgggctcttgaatatgaaaccctctcaggctgggttgctggatgattctgctcacacttacaacag

SEQ ID NO: 9734 - DNA, 201 bp, Homo sapiens
caggcaatctaaggagagttgagcaaggccgtggaggagccttccagctacagttggccatcagaggagtcccgtgtctcccaggaatggcttgccttaahgcctgctgtgaccagtcactggctgggaacagcccatgggaagcagggctttgcaccaatcctgctgaggatgtcagagcacaggagcacagccttggga

SEQ ID NO: 9735 - DNA, 201 bp, Homo sapiens
tgctggacagaaggagagaaagtttgttcgacgcatcctagagcacaggcaatctaaggagagttgagcaaggccgtggaggagccttccagctacagttrgccatcagaggagtcccgtgtctcccaggaatggcttgccttaacgcctgctgtgaccagtcactggctgggaacagcccatgggaagcagggctttgca

SEQ ID NO: 9736 - DNA, 201 bp, Homo sapiens
ccccaagactggccataaacaaaatctctgcagcaccgtaacatgttcataatggccctaatgtccaagctggaaggttgcgggtttacaagaatgagggmaaggaacacctggcctgcccagggcggaaaaccgcttaaaggcattcttaagccacaaacaatagcatgagcgatctgtgtcttaagggtgtgttcctgc

SEQ ID NO: 9737 - DNA, 201 bp, Homo sapiens
agcccaccacacattgaaaaattccaaatcaaagactctctagagcctagttgtgtcccatctgccccaactcctccttcacttcaggccctctaaggtgycacttttacaagacttgagagacacatcagagccctgggtactgttcctgtttggggtggaacaaaaacaaagtctggtcagagcccacaggtgatgtga

SEQ ID NO: 9738 - DNA, 201 bp, Homo sapiens
atgagtcatgcataaccgtagcactaagagacaagagggaaatccctctctcctaaaattttgcaaaagttctgggtttttttttccactgagtgggaacwagtcagctaatcatgaacatgaggtctttggcctcatttaaaggtgcttcagaagcactgagccataggaaggcctctttgtctaggtccgggaccctac

SEQ ID NO: 9739 - DNA, 201 bp, Homo sapiens
agcggggctccccgcggccgggccgggacacggatgtggtgaaatacctcatggagtgggagcctgggggcgaggagtggctgagacccacccgaccctcstcccggcgcggctacccgggtcctgcgtccccgccgggcgggccccttgcttctccccgcagaggcggtttccccacgaccccgcactcacccgcccagg

SEQ ID NO: 9740 - DNA, 201 bp, Homo sapiens
acactgcaattcaagtatgagtcatgcataaccgtagcactaagagacaagagggaaatccctctctcctaaaattttgcaaaagttctgggttttttttyccactgagtgggaactagtcagctaatcatgaacatgaggtctttggcctcatttaaaggtgcttcagaagcactgagccataggaaggcctctttgtct

SEQ ID NO: 9741 - DNA, 201 bp, Homo sapiens
tctcaaagtcctggctgcaagtgttcctcctgtgtcagctcctcaaatgttaggatacaggtgtgcactaccacgcctggccaaataacactcatttgttstttatagtttcttaatcagaaatctgggcatgatgtggatggaatctctgttccggtcttcctaaacctgtgttttcattttgaatcctccttcaggctt

SEQ ID NO: 9742 - DNA, 201 bp, Homo sapiens
gatgagtggaaagatggccagagagtgggaagtgtgaaattgagagtatggaagggctggggttcttgggcatgatgaggcctaggggatgacaggggcaygagattcaggcagagagaggagaaggtcatggaggagaggagttccaggatctgagagtccagggagcaagggcatcttctctgctgtataggtgtctat

SEQ ID NO: 9743 - DNA, 201 bp, Homo sapiens
tgggttgtttaaccttataccatatagttttacatatctataacaacagtagtttgggcctcttgtattctaatagttaagtccttaagctgtgtacacaytgcaattcaagtatgagtcatgcataaccgtagcactaagagacaagagggaaatccctctctcctaaaattttgcaaaagttctgggtttttttttcca

SEQ ID NO: 9744 - DNA, 201 bp, Homo sapiens
tgagggactcagaagtgctggactcagacccccacacacattgagtgtgaagcagagaacaaggcctgagaggaaaagtcacgggcccaaggctgctgcckgtgtgtgtcaaagggaaccactcatcagtattcgagggatcgtcttcccgtcattccttcagagattttatcccttaattgtgtcagagagcagggcgga

SEQ ID NO: 9745 - DNA, 201 bp, Homo sapiens
ctagaaatttgcagctgacaaatctctctttgatgaataaaggtaaaacaaaacattatcatataaatgaaactgttgcactgtctccataatacccaatytcaaaatatctacaagaacagagaaatatgtaagaacaaaagagagaaagaaagcataaattttaatttgtaatctttggtatatgtaactcagtactgt

SEQ ID NO: 9746 - DNA, 201 bp, Homo sapiens
cctggttcattgtagggactaaattattttttcttggctgaatgaatgaattatgagtgtattaaattgcatcacagaaaattataaaatgtaaaacactraaaaagttaaaaaagattttattttatgtaactagtgtgcgtatcaattcatcagttcattccaggagtcttttgagtctgtgtatgaattttataagac

SEQ ID NO: 9747 - DNA, 201 bp, Homo sapiens
tttgttttttttctaaagggctgctaatcttgttttaaatttgcaatgtagttaatttatcttcactgttaattagttgtgggttgtttaaccttataccrtatagttttacatatctataacaacagtagtttgggcctcttgtattctaatagttaagtccttaagctgtgtacacactgcaattcaagtatgagtcat

SEQ ID NO: 9748 - DNA, 201 bp, Homo sapiens
aagatctgagagaaaaccaatgtcaaactagaaatttgcagctgacaaatctctctttgatgaataaaggtaaaacaaaacattatcatataaatgaaacygttgcactgtctccataatacccaatttcaaaatatctacaagaacagagaaatatgtaagaacaaaagagagaaagaaagcataaattttaatttgtaa

SEQ ID NO: 9749 - DNA, 201 bp, Homo sapiens
tccttttcctcacctcctgctcctccagcccttccctccgtccctctcatccctcaggccctcttctccccttaatccccaccaccctctcactcctgaaytgtggctctagcactgttccatgacctgctacatgagtgttctctctatagtggtcctgctactatgagtcagagtgtgtcatttctccacctaaaacac

SEQ ID NO: 9750 - DNA, 201 bp, Homo sapiens
gcctggacacaggcacctgggataatctcctattccgtggaaaattctagtccctgaagagggaacagcgacttctggtcctgacctgagtggaggctgarggactcagaagtgctggactcagacccccacacacattgagtgtgaagcagagaacaaggcctgagaggaaaagtcacgggcccaaggctgctgcctgtg

SEQ ID NO: 9751 - DNA, 201 bp, Homo sapiens
cttcatgaatgtgctcgctgtcaacatgagtggggctgcaagaataactccactaggtagcatcctctcttttacctgatggatcaggacgatgctgttaygacgatacatacaattcttctgaaggggagaggatgctggaataaagactacacttcacctcaaatttattttttcatatgttatgccatagtaccagga

SEQ ID NO: 9752 - DNA, 201 bp, Homo sapiens
cacataagatattaaaggccaactgcaaagaacacccagcgaggctctgtagatggatgtattaaaatctataaaacaatgtgtttaaacctaagagttcygctgctttggaattctttcctctgctccttttcctcacctcctgctcctccagcccttccctccgtccctctcatccctcaggccctcttctccccttaa

SEQ ID NO: 9753 - DNA, 201 bp, Homo sapiens
gcacacatgtggctatcttgagaatggacaggacacctgggatggggaagggagcacagaacccagacaccagcctggacacaggcacctgggataatctyctattccgtggaaaattctagtccctgaagagggaacagcgacttctggtcctgacctgagtggaggctgagggactcagaagtgctggactcagacccc

SEQ ID NO: 9754 - DNA, 201 bp, Homo sapiens
cctgattaacataaaaaacaattagtttctaggcagacccacataagatattaaaggccaactgcaaagaacacccagcgaggctctgtagatggatgtawtaaaatctataaaacaatgtgtttaaacctaagagttctgctgctttggaattctttcctctgctccttttcctcacctcctgctcctccagcccttccc

SEQ ID NO: 9755 - DNA, 201 bp, Homo sapiens
aaactcagatggttgaaatgtcattttcatgaaggatttttattagagtatcatttagattgcctttgcaacctcccatgtgttttgttttttttctaaarggctgctaatcttgttttaaatttgcaatgtagttaatttatcttcactgttaattagttgtgggttgtttaaccttataccatatagttttacatatct

SEQ ID NO: 9756 - DNA, 201 bp, Homo sapiens
aagagtcagatcattcaggcattttgcatctgtcatgggacactcctccagcacacatgtggctatcttgagaatggacaggacacctgggatggggaagrgagcacagaacccagacaccagcctggacacaggcacctgggataatctcctattccgtggaaaattctagtccctgaagagggaacagcgacttctggt

SEQ ID NO: 9757 - DNA, 201 bp, Homo sapiens
tagatgtcaatgcttcaagggctatacaaggaccagaaaagaagaggttgcaccaatttggactgccgagtcacacttctttacacaagaaaacacacttdacagcctcaaacggccaacaatgcagagggacatgtcctcctcaggggaaaatttgatagaaaattgaaatggtcaattgaaacattgtttgtctaaaaa

SEQ ID NO: 9758 - DNA, 201 bp, Homo sapiens
tagcataaccttggtaacccctgaatgatcaggaatctaatcggtaaaaaatgtgactttggcctgttggtatataaatgcatctaaaagcattacaacasgactcacaaagctcttaagtttcactttcccagacagtgtatctgtgactcccgcttgttttattttaaatttaccttcattccgtagccctaagtttcc

SEQ ID NO: 9759 - DNA, 201 bp, Homo sapiens
actgtaaattattgggtgttagtccattttggagttcataacttaaagcagaaactcagatggttgaaatgtcattttcatgaaggatttttattagagtrtcatttagattgcctttgcaacctcccatgtgttttgttttttttctaaagggctgctaatcttgttttaaatttgcaatgtagttaatttatcttcact

SEQ ID NO: 9760 - DNA, 201 bp, Homo sapiens
ggcgtctgtcaggaagagtcagatcattcaggcattttgcatctgtcatgggacactcctccagcacacatgtggctatcttgagaatggacaggacaccygggatggggaagggagcacagaacccagacaccagcctggacacaggcacctgggataatctcctattccgtggaaaattctagtccctgaagagggaac

SEQ ID NO: 9761 - DNA, 201 bp, Homo sapiens
tggatcttgacaggaaaatcactgactctggattgggctatgctcaaccaggggtagatgtcaatgcttcaagggctatacaaggaccagaaaagaagagrttgcaccaatttggactgccgagtcacacttctttacacaagaaaacacactttacagcctcaaacggccaacaatgcagagggacatgtcctcctcagg

SEQ ID NO: 9762 - DNA, 201 bp, Homo sapiens
caagtgtgaccccaagtgctggacagaaggagagaaagtttgttcgacgcatcctagagcacaggcaatctaaggagagttgagcaaggccgtggaggaghcttccagctacagttggccatcagaggagtcccgtgtctcccaggaatggcttgccttaacgcctgctgtgaccagtcactggctgggaacagcccatgg

SEQ ID NO: 9763 - DNA, 201 bp, Homo sapiens
agaccagtttgctttttgtttattaactatagtgggtagcataaccttggtaacccctgaatgatcaggaatctaatcggtaaaaaatgtgactttggccygttggtatataaatgcatctaaaagcattacaacaggactcacaaagctcttaagtttcactttcccagacagtgtatctgtgactcccgcttgttttat

SEQ ID NO: 9764 - DNA, 201 bp, Homo sapiens
gggtagaagctcagggcccagcacctcagggtggcttcatggtcagagacagcgtggtgagtcatatgcgttttgggggcgtctgtcaggaagagtcagawcattcaggcattttgcatctgtcatgggacactcctccagcacacatgtggctatcttgagaatggacaggacacctgggatggggaagggagcacagaa

SEQ ID NO: 9765 - DNA, 201 bp, Homo sapiens
ccaaaggagctgccaatggatcttgacaggaaaatcactgactctggattgggctatgctcaaccaggggtagatgtcaatgcttcaagggctatacaagraccagaaaagaagaggttgcaccaatttggactgccgagtcacacttctttacacaagaaaacacactttacagcctcaaacggccaacaatgcagaggg

SEQ ID NO: 9766 - DNA, 201 bp, Homo sapiens
ttgcctaatcagggtgctttgcagttagaaaaatgtgaatctcacacctctgtctatacactagcttagcatcatgacaataatttgtttggctagggtargcagaaattgtttactccaatctaggaacaagatttttcaataactggctattcagtgggcatcctatgaaagtttaacatctttcactgtgttttttaa

SEQ ID NO: 9767 - DNA, 201 bp, Homo sapiens
tgggagtgagaactggggccgcccggtgagtatccaggaagaaggacccgacacaggttaggagaaggaggagagaatccccaacgcggggcctccccaayccatacaccgcctgtggggcctgagaccctgagagccacgcttgaggccctgggacttcgccctgaccccgctactcttgtgccaagcgttctgtctcag

SEQ ID NO: 9768 - DNA, 201 bp, Homo sapiens
tccagaagacaccactgcagctgcccacttctggaaggttctgtaccctgcaagtctggtctccacaaactctgcatcctgaatttggtcctccccatccsgctcctgggtcagtgtgatctccagagggtagaagcccagggcccagcacctcagcgtggcctcatagttggagatggggtggagggttacctgtgcctt

SEQ ID NO: 9769 - DNA, 201 bp, Homo sapiens
cccgctgccaggtcagtgtgatctccgcagggtagaagctcagggcccagcacctcagggtggcttcatggtcagagacagcgtggtgagtcatatgcgtyttgggggcgtctgtcaggaagagtcagatcattcaggcattttgcatctgtcatgggacactcctccagcacacatgtggctatcttgagaatggacagg

SEQ ID NO: 9770 - DNA, 201 bp, Homo sapiens
ccagaatgatgccagcaaccccaaaggagctgccaatggatcttgacaggaaaatcactgactctggattgggctatgctcaaccaggggtagatgtcaawgcttcaagggctatacaaggaccagaaaagaagaggttgcaccaatttggactgccgagtcacacttctttacacaagaaaacacactttacagcctcaa

SEQ ID NO: 9771 - DNA, 201 bp, Homo sapiens
tactgttataatccttttcgtatgaaaaatatgtggtcaaagaaaagggggtaatatgagttatcacaaaaacatttagttttgtccctggtttctcctawaaaccttagaatctcttgagtgattagagtgtctttagaatactgaggaaaggactcttggctgagtggatcctggataccttgagaatgggggctggct

SEQ ID NO: 9772 - DNA, 201 bp, Homo sapiens
ctctttgataagttgcaacagagttgagaaaatacagtagctaaattaaagtgtcccaagactttggtgccatacaataatgcctttacaatcataactaygtttgtttctcttcagaagtttctaattcggtttaagaatgcccaaaatgccaattttcttactcaagcatctacaaaaatatttgcctaatcagggtgc

SEQ ID NO: 9773 - DNA, 201 bp, Homo sapiens
ccacgagctccgtgtcctgggtctggtcctccccatcccgctgccaggtcagtgtgatctccgcagggtagaagctcagggcccagcacctcagggtggcytcatggtcagagacagcgtggtgagtcatatgcgttttgggggcgtctgtcaggaagagtcagatcattcaggcattttgcatctgtcatgggacactcc

SEQ ID NO: 9774 - DNA, 201 bp, Homo sapiens
taatattctctttgataagttgcaacagagttgagaaaatacagtagctaaattaaagtgtcccaagactttggtgccatacaataatgcctttacaatcrtaactacgtttgtttctcttcagaagtttctaattcggtttaagaatgcccaaaatgccaattttcttactcaagcatctacaaaaatatttgcctaatc

SEQ ID NO: 9775 - DNA, 201 bp, Homo sapiens
tggtctccacgagctccgtgtcctgggtctggtcctccccatcccgctgccaggtcagtgtgatctccgcagggtagaagctcagggcccagcacctcagrgtggcttcatggtcagagacagcgtggtgagtcatatgcgttttgggggcgtctgtcaggaagagtcagatcattcaggcattttgcatctgtcatggga

SEQ ID NO: 9776 - DNA, 201 bp, Homo sapiens
ttgggtcagttttggcaatttctatctctgcacgaattggtcctttttatctaagtggtctaacttattggcttcaggtttttcagagtattcacttatartgttttttaacttcctaagggtcattagtgataatctcttttgttcacaattttggtaatttatcttatttctcataatctcttttttcactgttggtca

SEQ ID NO: 9777 - DNA, 201 bp, Homo sapiens
agttatccatggtcaggaatccaggagaagtttctctgaatgcttctggctcagggcctctcacaacgttgcagtctagttgtcttccagggctgaatcayctgagggctcaaatggggccagggattcacaagacacaagaatctctcacatggcttttggaagaggctttagcttcttattgtctggtcccaggaggac

SEQ ID NO: 9778 - DNA, 201 bp, Homo sapiens
ccaggtctcaccagcactttttctcttgctggctcagctttctcatctatgaaatagggaatgtaacaacatttatttcttgtggttgggtggatgaaaaktgttagtatatatgaggtgtttgcagctgtgccatattatttttgttattttgttatgattttattatattttaatacattaatgtcatgtagttgtatt

SEQ ID NO: 9779 - DNA, 201 bp, Homo sapiens
cagtgttctttccccatgatccctccattttcaaagcccaaagtggaggaagcccctcacgctgaatccctctcacactgtgagtctctattctcaggaaraacccagtccttttcagagcttacctgattaggaccgtctaagcaggataatcctcatcttaaagtcaactgactggggactttaaatatatctgcaaaa

SEQ ID NO: 9780 - DNA, 201 bp, Homo sapiens
ccttcatcagaaatccaggcctaatgtgatagactctttgttcagagtttcgcaaagctgtatcctcatcttaagattggggttctcccccaagcttgtgyagagtttgttggcagaattcggtttctggcaattgtaggattaaggtccctgtttccttcgggctatcagagtagacagtggggagggcttctaattcct

SEQ ID NO: 9781 - DNA, 201 bp, Homo sapiens
tacctcacctcctgcttctccagcccttctctctgtccctgtcatccttcaggccctcctctccccttagtctctactactctgtcactactgaattgtgkccctagctctgtcccttgcctgctgcccatgactgttctccccacaaaggtcagcaatcctgctaatgtgagtcagattgtttcatttcttcacttaaaa

SEQ ID NO: 9782 - DNA, 201 bp, Homo sapiens
ctataaaacactgtatttaagtctgagaattccattgctttagaattctttctctctgttcctttacctcacctcctgcttctccagcccttctctctgtycctgtcatccttcaggccctcctctccccttagtctctactactctgtcactactgaattgtgtccctagctctgtcccttgcctgctgcccatgactgt

SEQ ID NO: 9783 - DNA, 201 bp, Homo sapiens
caggagatcagggaggcgacccgtggcctctggtacctgcgcattgcagcctctccttctcattcttaaggcctttgctgagccactccgcccaccttccsggcaggtaggttttgagcagctctgcatgttcctcctccaaaacatctgagccgccttttccgctgcggtccaagagagcagttcctggtttaggacgag

SEQ ID NO: 9784 - DNA, 201 bp, Homo sapiens
gccactctggaagctttgtaaggtttatcttcaccttctggagtgcccgtgttttgccaagcactacagtgcactttctacctgctgctcatccagccagrtcaacaggaagttgtcaatgatatgagctgatttaatatcctattggatatccagtatgtttagtatagtcttaagactatactatagaggtcaggggag

SEQ ID NO: 9785 - DNA, 201 bp, Homo sapiens
gtgatccatccacctcagccttccaaagtgctgggattacaggcgtgagccactgcacctggccgagtggccactctggaagctttgtaaggtttatcttyaccttctggagtgcccgtgttttgccaagcactacagtgcactttctacctgctgctcatccagccaggtcaacaggaagttgtcaatgatatgagctga

SEQ ID NO: 9786 - DNA, 201 bp, Homo sapiens
gactctggggaagaatccatttccaagctcattcaggttcttgtctgaattcacttccttgcacatagaacagaggtttccacttccttgttaagagccaygcttagctcctagaatcttctttcagctactcacacatggtgcctaaggcacatccaatcctcctgcttggaacgtctgacctcccctcttctatgtctc

SEQ ID NO: 9787 - DNA, 201 bp, Homo sapiens
cagctactcacacatggtgcctaaggcacatccaatcctcctgcttggaacgtctgacctcccctcttctatgtctcctctgccttcctcctctgcagaayctgactccagccagggcaggttctctgcttttagtggctcatttgatttgaatggggccacacagattgtccaggagaatctccctattttaaggtcctt

SEQ ID NO: 9788 - DNA, 201 bp, Homo sapiens
ctccagccagggcaggttctctgcttttagtggctcatttgatttgaatggggccacacagattgtccaggagaatctccctattttaaggtccttaatcrtcattacatgagtaaagtcccttttgccatgtaatgcaacctgttcacaggttccaaggactaagactggacctctttcgggaccattactcagcccacc

SEQ ID NO: 9789 - DNA, 201 bp, Homo sapiens
cagccagggcaggttctctgcttttagtggctcatttgatttgaatggggccacacagattgtccaggagaatctccctattttaaggtccttaatcatcrttacatgagtaaagtcccttttgccatgtaatgcaacctgttcacaggttccaaggactaagactggacctctttcgggaccattactcagcccaccaca

SEQ ID NO: 9790 - DNA, 201 bp, Homo sapiens
taaccaggcagggcacacttctacctggggcttgaaacccccagtgggacaagaaaactcagaccccacttgtcaccccttccttacctgagctcttcttyctccacagcacagcagcgaccgcagctccagtgactacagctgcaaggacaaccaggccagcaacgatacccatgatggggatggtgggcagggaagact

SEQ ID NO: 9791 - DNA, 201 bp, Homo sapiens
ttccaaaacatgggtttttatctcaggaccttcttgtccccagatgatcaaaaccggggccatccactcccttctgagccacctctgcctggggggcccgyggctgtgtcctccagtcacaacagaacactccttcagaacactcgcaggaagacaacatcttgtcattggctcacacatgcacggtgcatgcacagagct

SEQ ID NO: 9792 - DNA, 201 bp, Homo sapiens
ggtctgccctgacacctttcttggtggcttagacctccctactgtaaattattgggtgttagtccattttggagttcataacttaaagcagaaactcagakggttgaaatgtcattttcatgaaggatttttattagagtatcatttagattgcctttgcaacctcccatgtgttttgttttttttctaaagggctgctaa

SEQ ID NO: 9793 - DNA, 201 bp, Homo sapiens
ctggggggcccgtggctgtgtcctccagtcacaacagaacactccttcagaacactcgcaggaagacaacatcttgtcattggctcacacatgcacggtgyatgcacagagctttggttctagttcaggaggtgtgtggggaggaggctcactagtccaacagagcttggtaccagtgtcatatgccaggagccaaggtta

SEQ ID NO: 9794 - DNA, 201 bp, Homo sapiens
tgagagagggggcgtgttcattccaggtttcaggtctgccctgacacctttcttggtggcttagacctccctactgtaaattattgggtgttagtccattytggagttcataacttaaagcagaaactcagatggttgaaatgtcattttcatgaaggatttttattagagtatcatttagattgcctttgcaacctccca

SEQ ID NO: 9795 - DNA, 201 bp, Homo sapiens
tcctcgaccaactgccctcctaaggtctgtccttagccagggaccttcccctgacctgtgattactgggatcaggtccccatcactacaatcatcaaggtrataaatctgtccttcattgtcacaggtgctttacaaaagagaaggtgctggcacacagggcccaggctgggtaggcccatgagtgtggatggtgcttccc

SEQ ID NO: 9796 - DNA, 201 bp, Homo sapiens
tggggggcccgtggctgtgtcctccagtcacaacagaacactccttcagaacactcgcaggaagacaacatcttgtcattggctcacacatgcacggtgcrtgcacagagctttggttctagttcaggaggtgtgtggggaggaggctcactagtccaacagagcttggtaccagtgtcatatgccaggagccaaggttac

SEQ ID NO: 9797 - DNA, 201 bp, Homo sapiens
ggaaggctgtgccagtgctctaaagcaagttctgcctaaagcggcagaaacatttttcacattaggaacaggagttgtttgggatcctgtctggggccagsttgagagcagagcgggagtgggggcctgggtagggccaggcactggagtgaagacaggcctggagagagcctcctgaaggctgctgagcggctcagacag

SEQ ID NO: 9798 - DNA, 201 bp, Homo sapiens
cgggatcaggaaaaacaaggaaagcagatgtgggtcctcgaccaactgccctcctaaggtctgtccttagccagggaccttcccctgacctgtgattactrggatcaggtccccatcactacaatcatcaaggtaataaatctgtccttcattgtcacaggtgctttacaaaagagaaggtgctggcacacagggcccagg

SEQ ID NO: 9799 - DNA, 201 bp, Homo sapiens
ggtctgtctgagatagaacgggtcttagaggatttactcattaccctgagagagggggcgtgttcattccaggtttcaggtctgccctgacacctttcttkgtggcttagacctccctactgtaaattattgggtgttagtccattttggagttcataacttaaagcagaaactcagatggttgaaatgtcattttcatga

SEQ ID NO: 9800 - DNA, 201 bp, Homo sapiens
tccaggagcgcaggtcctcgttcagggcgaggtaatccttgccatcgtaggcatactgttcatacccgcggaggaggcgtccgtcggaccccaggtcgcarccaatcatccactggagggtgtgagaacctggccccaccccctcggtcagccccgcccaccgagcctcgccctcgcccggacccacccgcggggattttg

SEQ ID NO: 9801 - DNA, 201 bp, Homo sapiens
gtgactgcagactcagggcgggatcaggaaaaacaaggaaagcagatgtgggtcctcgaccaactgccctcctaaggtctgtccttagccagggaccttcycctgacctgtgattactgggatcaggtccccatcactacaatcatcaaggtaataaatctgtccttcattgtcacaggtgctttacaaaagagaaggtgc

SEQ ID NO: 9802 - DNA, 201 bp, Homo sapiens
cattaggcataaacttgcatgttaactgaagcttttgtttttattttattcgaagttacaattgcacataattgaaagagtaaatatttgcgcaggacttyctgagaaaaacgagtcttctctgcctttctagggagagtcctctcttctctgtttctgcctttctagggagcaaccactttcaagtttcagctgattctt

SEQ ID NO: 9803 - DNA, 201 bp, Homo sapiens
caggcctggtctccacgagctccgtgtcctgggtctggtcctccccatcccgctgccaggtcagtgtgatctccgcagggtagaagctcagggcccagcayctcagggtggcttcatggtcagagacagcgtggtgagtcatatgcgttttgggggcgtctgtcaggaagagtcagatcattcaggcattttgcatctgtc

SEQ ID NO: 9804 - DNA, 201 bp, Homo sapiens
acaaagttgtcattaggcataaacttgcatgttaactgaagcttttgtttttattttattcgaagttacaattgcacataattgaaagagtaaatatttgygcaggacttcctgagaaaaacgagtcttctctgcctttctagggagagtcctctcttctctgtttctgcctttctagggagcaaccactttcaagtttca

SEQ ID NO: 9805 - DNA, 201 bp, Homo sapiens
ctcggcgcagacaatggtgctgaggctgtgggagatgagggaggaggagcaggggtggctctcacctgggctctgtccgtggaggtgaggacaatgaggtrgttgggtctcagtgctgtgtggaactttcttttgacctccttatgagtggatggtctgtctgagatagaacgggtcttagaggatttactcattaccctg

SEQ ID NO: 9806 - DNA, 201 bp, Homo sapiens
gttccatcccctgcaggcctggtctccacgagctccgtgtcctgggtctggtcctccccatcccgctgccaggtcagtgtgatctccgcagggtagaagcycagggcccagcacctcagggtggcttcatggtcagagacagcgtggtgagtcatatgcgttttgggggcgtctgtcaggaagagtcagatcattcaggca

SEQ ID NO: 9807 - DNA, 201 bp, Homo sapiens
tttcaatttctgacttagttcacagttctcttcaggttttccagttaatttgggtcagttttggcaatttctatctctgcacgaattggtcctttttatcyaagtggtctaacttattggcttcaggtttttcagagtattcacttataatgttttttaacttcctaagggtcattagtgataatctcttttgttcacaat

SEQ ID NO: 9808 - DNA, 201 bp, Homo sapiens
cctcagctccacccaggtaaggcagtggtggcagagagttaggggagcacctatgaaacagaccaaggcagggatgggagcccttggtgcagcaggagtgyatgcaggacttgcctggaagcaagagtattagggaccctagtcaggtcctggtcccctccctgcctaggctcacaggacaaccagtaaagatgctggagt

SEQ ID NO: 9809 - DNA, 201 bp, Homo sapiens
tcaaaatatttgatagaattcaccagtgaagatatctgggctttggcatttctttttgagaaggtttttcaatttctgacttagttcacagttctcttcakgttttccagttaatttgggtcagttttggcaatttctatctctgcacgaattggtcctttttatctaagtggtctaacttattggcttcaggtttttcag

SEQ ID NO: 9810 - DNA, 201 bp, Homo sapiens
cccgcggcctcggggtggatcccagacccggagactcgggagtacccggggcgtccgtggggcatggaggtggggggtcgtgatctgcgccctgggccggrgttactcactggcctcgctctggttgtagtagccgcgcagggtctgcaggttcattctgtcagtctgtgcgtgggccttggtgttccgtgtctcctcttc

SEQ ID NO: 9811 - DNA, 201 bp, Homo sapiens
tgcagagccttgtggggatgtgagtgcagagtatgtgggggacccagtgtcactgacacaaacagggaaaggacatgatgagctgagtcctggtggactcrgcgcagacaatggtgctgaggctgtgggagatgagggaggaggagcaggggtggctctcacctgggctctgtccgtggaggtgaggacaatgaggtggtt

SEQ ID NO: 9812 - DNA, 201 bp, Homo sapiens; identical to SEQ ID NO: 1115

SEQ ID NO: 9813 - DNA, 201 bp, Homo sapiens
aagtcttccctcctctcttcttgtctgaaagagctttcaaaatatttgatagaattcaccagtgaagatatctgggctttggcatttctttttgagaaggyttttcaatttctgacttagttcacagttctcttcaggttttccagttaatttgggtcagttttggcaatttctatctctgcacgaattggtcctttttat

SEQ ID NO: 9814 - DNA, 201 bp, Homo sapiens
gtctgggcgggtcccgcggcctcggggtggatcccagacccggagactcgggagtacccggggcgtccgtggggcatggaggtggggggtcgtgatctgckccctgggccggggttactcactggcctcgctctggttgtagtagccgcgcagggtctgcaggttcattctgtcagtctgtgcgtgggccttggtgttccg

SEQ ID NO: 9815 - DNA, 201 bp, Homo sapiens
gtgcagagccttgtggggatgtgagtgcagagtatgtgggggacccagtgtcactgacacaaacagggaaaggacatgatgagctgagtcctggtggactyggcgcagacaatggtgctgaggctgtgggagatgagggaggaggagcaggggtggctctcacctgggctctgtccgtggaggtgaggacaatgaggtggt

SEQ ID NO: 9816 - DNA, 201 bp, Homo sapiens; identical to SEQ ID NO: 1117

SEQ ID NO: 9817 - DNA, 201 bp, Homo sapiens
tatgagggtaatgccagttctgtaaatgggctggaaagtcttccctcctctcttcttgtctgaaagagctttcaaaatatttgatagaattcaccagtgawgatatctgggctttggcatttctttttgagaaggtttttcaatttctgacttagttcacagttctcttcaggttttccagttaatttgggtcagttttgg

SEQ ID NO: 9818 - DNA, 201 bp, Homo sapiens
ttttggtaaaggcgccttggggttctcccaggtagagggtctgggcgggtcccgcggcctcggggtggatcccagacccggagactcgggagtacccgggscgtccgtggggcatggaggtggggggtcgtgatctgcgccctgggccggggttactcactggcctcgctctggttgtagtagccgcgcagggtctgcagg

SEQ ID NO: 9819 - DNA, 201 bp, Homo sapiens
ggaggttggggagacagaatagtggtgtgcagagccttgtggggatgtgagtgcagagtatgtgggggacccagtgtcactgacacaaacagggaaaggayatgatgagctgagtcctggtggactcggcgcagacaatggtgctgaggctgtgggagatgagggaggaggagcaggggtggctctcacctgggctctgtc

SEQ ID NO: 9820 - DNA, 201 bp, Homo sapiens
tccctccttaccccatctcagggtgaggggcttgggcaaaccctcatgctgcacatggcaggtgtatctctgctcctgtccagaaggcaccaccacagccrcccacttctggaaggttccatcccctgcaggcctggtctccacgagctccgtgtcctgggtctggtcctccccatcccgctgccaggtcagtgtgatctc

SEQ ID NO: 9821 - DNA, 201 bp, Homo sapiens
gttggtcccattttcctccccttcttttggaaggtggctcagggatatctgcaggagatcagggaggcgacccgtggcctctggtacctgcgcattgcagvctctccttctcattcttaaggcctttgctgagccactccgcccaccttcccggcaggtaggttttgagcagctctgcatgttcctcctccaaaacatctg

SEQ ID NO: 9822 - DNA, 201 bp, Homo sapiens
tctccctccttaccccatctcagggtgaggggcttgggcaaaccctcatgctgcacatggcaggtgtatctctgctcctgtccagaaggcaccaccacagmcgcccacttctggaaggttccatcccctgcaggcctggtctccacgagctccgtgtcctgggtctggtcctccccatcccgctgccaggtcagtgtgatc

SEQ ID NO: 9823 - DNA, 201 bp, Homo sapiens
tcttttgagataattatgtcttttattcccttactacagtgcattccattaattgatttctaattgttaatccagccatatattcctgggatgaatcccaytggtcatggaatgtaatccttttttacgtggctttctattgtctgccaatgtttgttaaggatgttttcatttatgtttattggtgacactggtctatgg

SEQ ID NO: 9824 - DNA, 201 bp, Homo sapiens
ctgcctcaggacaagagggagagggatattttagcgttggtcccattttcctccccttcttttggaaggtggctcagggatatctgcaggagatcagggargcgacccgtggcctctggtacctgcgcattgcagcctctccttctcattcttaaggcctttgctgagccactccgcccaccttcccggcaggtaggtttt

SEQ ID NO: 9825 - DNA, 201 bp, Homo sapiens
ccttggaaagttctagtgtctgaggcggaaacagagatttctggtcctgacctgagtggaggccgagggactcagaagagctggaatcagacccccacacrcattgagtatgaggcagagaacaaggcctgagaggaaaattcctggtgcccaaggctgctggggggtcaaaggggaccgcgtatcagtattccagggatt

SEQ ID NO: 9826 - DNA, 201 bp, Homo sapiens
tgacacccccgtctccctccttaccccatctcagggtgaggggcttgggcaaaccctcatgctgcacatggcaggtgtatctctgctcctgtccagaaggyaccaccacagccgcccacttctggaaggttccatcccctgcaggcctggtctccacgagctccgtgtcctgggtctggtcctccccatcccgctgccagg

SEQ ID NO: 9827 - DNA, 201 bp, Homo sapiens
cacctgggataatctcttattccttggaaagttctagtgtctgaggcggaaacagagatttctggtcctgacctgagtggaggccgagggactcagaagasctggaatcagacccccacacacattgagtatgaggcagagaacaaggcctgagaggaaaattcctggtgcccaaggctgctggggggtcaaaggggaccg

SEQ ID NO: 9828 - DNA, 201 bp, Homo sapiens
ttcttggtcagggcggcctcagctccacccaggtaaggcagtggtggcagagagttaggggagcacctatgaaacagaccaaggcagggatgggagccctyggtgcagcaggagtgcatgcaggacttgcctggaagcaagagtattagggaccctagtcaggtcctggtcccctccctgcctaggctcacaggacaacca

SEQ ID NO: 9829 - DNA, 201 bp, Homo sapiens
ttcaggcactttgcattcctcatgagacacagcacccatgtgaccatcctgagaatggatgggacatctggggtggggaagggagcacagaacccagacarcattctggacacaggcacctgggataatctcttattccttggaaagttctagtgtctgaggcggaaacagagatttctggtcctgacctgagtggaggcc

SEQ ID NO: 9830 - DNA, 201 bp, Homo sapiens
gccttcaggggatctgagggcaagaggtagaaaattcaggcactttgcattcctcatgagacacagcacccatgtgaccatcctgagaatggatgggacahctggggtggggaagggagcacagaacccagacaacattctggacacaggcacctgggataatctcttattccttggaaagttctagtgtctgaggcggaa

SEQ ID NO: 9831 - DNA, 201 bp, Homo sapiens
tacctgtgccttcaggggatctgagggcaagaggtagaaaattcaggcactttgcattcctcatgagacacagcacccatgtgaccatcctgagaatggahgggacatctggggtggggaagggagcacagaacccagacaacattctggacacaggcacctgggataatctcttattccttggaaagttctagtgtctga

SEQ ID NO: 9832 - DNA, 201 bp, Homo sapiens
ttggtcctccccatcccgctcctgggtcagtgtgatctccagagggtagaagcccagggcccagcacctcagcgtggcctcatagttggagatggggtggwgggttacctgtgccttcaggggatctgagggcaagaggtagaaaattcaggcactttgcattcctcatgagacacagcacccatgtgaccatcctgagaa

SEQ ID NO: 9833 - DNA, 201 bp, Homo sapiens
gctgcccacttctggaaggttctgtaccctgcaagtctggtctccacaaactctgcatcctgaatttggtcctccccatcccgctcctgggtcagtgtgayctccagagggtagaagcccagggcccagcacctcagcgtggcctcatagttggagatggggtggagggttacctgtgccttcaggggatctgagggcaag

SEQ ID NO: 9834 - DNA, 201 bp, Homo sapiens
ccaggccagcaatgatgcccacaacggggatgatgggctgggaagacagctctaagaaaggaggtgaacgtgaggggccctgacccccaggcctcagcccygaccctgcttaaaggctccagaaggacttctgctttgcctgagaagagacatgacccctcattcgtctccttaccccatcttagtgtgaggggctcaggc

SEQ ID NO: 9835 - DNA, 201 bp, Homo sapiens
ggggcgaggaggggttgagacccgcccgaccctcctcccggcgcggctgccgagtcctgcgcccccgccgggccggcccctccctcctccgcgcaggggcygtttccctcctgaccccgcactcacccgcccaggtctcggtcagggtcagggcccccgagagcagcaggaagagggttcggggcgccatgaccaccatcc

SEQ ID NO: 9836 - DNA, 201 bp, Homo sapiens
tcctccgcgcaggggccgtttccctcctgaccccgcactcacccgcccaggtctcggtcagggtcagggcccccgagagcagcaggaagagggttcggggygccatgaccaccatccttggcgtctggggagaatgagtccgggtgggtgagcgaggactttagaaccaggaccgcggcgacgctgattggcttctctaaa

SEQ ID NO: 9837 - DNA, 201 bp, Homo sapiens
ccttcacttttcatcccggaatccctgtccctgaactggactccctgcctcccactccttgcctgtcctcctgtactcttctagaagaaaaatcaccccasggagcttgttgccagagagtgagctcgccctgggattgtaggtgtaaagacagggttttttttcccccttaaatctggaaaagttgtgcctgagtgcatg

SEQ ID NO: 9838 - DNA, 201 bp, Homo sapiens
gtgtgaaaagatacagaaagtaaggaggtgggagagtgggtgtccctctgggtgtggggcttaactgctgcaggtaggtctcagaatcctcatgcatgtcrtaggtaaaggcaatgctcatctgctccatgtccatggctcagccaaataagttggtagtcaacaaattgatcttatcttttggggtcattctccagcaag

SEQ ID NO: 9839 - DNA, 201 bp, Homo sapiens
ttttttttcccccttaaatctggaaaagttgtgcctgagtgcatgagatagaatagagaccagtttgctttttgtttattaactatagtgggtagcataaycttggtaacccctgaatgatcaggaatctaatcggtaaaaaatgtgactttggcctgttggtatataaatgcatctaaaagcattacaacaggactcaca

SEQ ID NO: 9840 - DNA, 201 bp, Homo sapiens
gggtcattctccagcaagtgcagaacagtaaaaaaatttagtcacctgaggtgcatatcttggcttcctggccagttttcccaaggcctccactgccaccmtgcaccctgggtgccctccacactctccaagtgtccagatgtgtgtgaggagttaagggcaggaagaactattggatcgtggatttaggtgcctttttcc

SEQ ID NO: 9841 - DNA, 201 bp, Homo sapiens
tatagtgggtagcataaccttggtaacccctgaatgatcaggaatctaatcggtaaaaaatgtgactttggcctgttggtatataaatgcatctaaaagcmttacaacaggactcacaaagctcttaagtttcactttcccagacagtgtatctgtgactcccgcttgttttattttaaatttaccttcattccgtagccc

SEQ ID NO: 9842 - DNA, 201 bp, Homo sapiens
gaagacaccactgcagctgcccacttctggaaggttctgtaccctgcaagtctggtctccacaaactctgcatcctgaatttggtcctccccatcccgctyctgggtcagtgtgatctccagagggtagaagcccagggcccagcacctcagcgtggcctcatagttggagatggggtggagggttacctgtgccttcagg

SEQ ID NO: 9843 - DNA, 201 bp, Homo sapiens
taatcggtaaaaaatgtgactttggcctgttggtatataaatgcatctaaaagcattacaacaggactcacaaagctcttaagtttcactttcccagacartgtatctgtgactcccgcttgttttattttaaatttaccttcattccgtagccctaagtttccgtgtgagtccaggacatctcctcaagacaaagtacca

SEQ ID NO: 9844 - DNA, 201 bp, Homo sapiens
ctcccaaacacaagatcccaaggatctcagggatcagcctccttcatacttacttgcagcctgagagtagctccctccttttcaatctgtgggaagaaaaygtcctgtgagaggccagaaaggtggcagggccatgaggtcctagaggaacctcctagtcttggaccctcgagaagtttccagaaatgtgtgactgcagac

SEQ ID NO: 9845 - DNA, 201 bp, Homo sapiens
ggagatggtgcctcacaactaggcaagatatgagcctactcctacctggggcttgaaatccaccaatggaagaaggaaactcagagctcacccctttcctrcctgggatcttattcctccacatcacagcagcgaccacagctacagtgattacagcaactagaagaaccaggccagcaatgatgcccacaacggggatga

SEQ ID NO: 9846 - DNA, 201 bp, Homo sapiens
aaacaattagtttctaggcagacccacataagatattaaaggccaactgcaaagaacacccagcgaggctctgtagatggatgtattaaaatctataaaayaatgtgtttaaacctaagagttctgctgctttggaattctttcctctgctccttttcctcacctcctgctcctccagcccttccctccgtccctctcatc

SEQ ID NO: 9847 - DNA, 201 bp, Homo sapiens
cacaggtgctttacaaaagagtaagtgttgatagacagggcctctgaacagggtaaatgtgtgtggagatggtgcctcacaactaggcaagatatgagccwactcctacctggggcttgaaatccaccaatggaagaaggaaactcagagctcacccctttcctacctgggatcttattcctccacatcacagcagcgacc

SEQ ID NO: 9848 - DNA, 201 bp, Homo sapiens
tatgctgcttagaaatttcttccaccagatacccttatacatcactctcaagttcaaagttctacagatccctagggagggggaacaatgcctccaagttmtttgccaatgcataacaaaagtgacctttcctctaggtcccaataagttcctcatctccatgtgagaccttatcagcctggactctattgtccatatcac

SEQ ID NO: 9849 - DNA, 201 bp, Homo sapiens
ctgatgtctggaaatgtttgagcatttagcgagggcctcaggctgcttccactcatggcagaaggcaaaggggagctggtatgtgcagaagtcacgtggtmagagaggaacagagggagtaggaaggtgcgagactcttttaacaactagctcttttggaaactaatagggcaacaattcattgactcccgagagagggca

SEQ ID NO: 9850 - DNA, 201 bp, Homo sapiens
aggcctgggctgacccatggtgaaggctggctaactgccatttgtctgtttggttgttcagtgccacatcacacttgggtgttttctgtgggtgtcaacawgggattcaagctcaacccaggtggaccattttcacctgttgatgaatgctgttgggcctgtgcaatttatgactttgtgggtcacacagccacttggaac

SEQ ID NO: 9851 - DNA, 201 bp, Homo sapiens
agagggtgtggaggttttgttgatcattgactgagattccagggggtgcactgggaagatttctgtggttcgggaggttggggagacagaatagtggtgtkcagagccttgtggggatgtgagtgcagagtatgtgggggacccagtgtcactgacacaaacagggaaaggacatgatgagctgagtcctggtggactcgg

SEQ ID NO: 9852 - DNA, 201 bp, Homo sapiens
tgtggggtcaaagggaacccctgatcagtcttccagggattgtcttcccctccactccctcagagacttcatcccttaattgtcccagagagcaggacggrccctcagaatcactctctggtacaggatctggaaacccaggaggattcctctccctcaggaccagagggagggcgatattctagtgttggtcccattttc

SEQ ID NO: 9853 - DNA, 201 bp, Homo sapiens
ggagctgggaggtgcaggaacatcctgagagagggtgtggaggttttgttgatcattgactgagattccagggggtgcactgggaagatttctgtggttcrggaggttggggagacagaatagtggtgtgcagagccttgtggggatgtgagtgcagagtatgtgggggacccagtgtcactgacacaaacagggaaagga

SEQ ID NO: 9854 - DNA, 201 bp, Homo sapiens
ctcagaccccacttgtcaccccttccttacctgagctcttctttctccacagcacagcagcgaccgcagctccagtgactacagctgcaaggacaaccagrccagcaacgatacccatgatggggatggtgggcagggaagactgctctgggaaaggaggtgaaggtgagggtctctgacccccagccctcaccaccgacc

SEQ ID NO: 9855 - DNA, 201 bp, Homo sapiens
tggagctgggaggtgcaggaacatcctgagagagggtgtggaggttttgttgatcattgactgagattccagggggtgcactgggaagatttctgtggttygggaggttggggagacagaatagtggtgtgcagagccttgtggggatgtgagtgcagagtatgtgggggacccagtgtcactgacacaaacagggaaagg

SEQ ID NO: 9856 - DNA, 201 bp, Homo sapiens
ctaaaagacatgacacccccgtctccctccttaccccatctcagggtgaggggcttgggcaaaccctcatgctgcacatggcaggtgtatctctgctcctbtccagaaggcaccaccacagccgcccacttctggaaggttccatcccctgcaggcctggtctccacgagctccgtgtcctgggtctggtcctccccatcc

SEQ ID NO: 9857 - DNA, 201 bp, Homo sapiens
tgtgggaggacttcagagggggtcatgtcctcagggagaccaggttgctgctggagctgggaggtgcaggaacatcctgagagagggtgtggaggttttgytgatcattgactgagattccagggggtgcactgggaagatttctgtggttcgggaggttggggagacagaatagtggtgtgcagagccttgtggggatgt

SEQ ID NO: 9858 - DNA, 201 bp, Homo sapiens
ctttccctaaaagacatgacacccccgtctccctccttaccccatctcagggtgaggggcttgggcaaaccctcatgctgcacatggcaggtgtatctctkctcctgtccagaaggcaccaccacagccgcccacttctggaaggttccatcccctgcaggcctggtctccacgagctccgtgtcctgggtctggtcctcc

SEQ ID NO: 9859 - DNA, 201 bp, Homo sapiens
ggcacctacactctgcagccaggcggcctggattgaacgccctgcccaggtctcaccagcactttttctcttgctggctcagctttctcatctatgaaatrgggaatgtaacaacatttatttcttgtggttgggtggatgaaaagtgttagtatatatgaggtgtttgcagctgtgccatattatttttgttattttgtt

SEQ ID NO: 9860 - DNA, 201 bp, Homo sapiens
ttgtcacaggtgctttacaaaagagaaggtgctggcacacagggcccaggctgggtaggcccatgagtgtggatggtgcttcccagtaaccaggcagggcrcacttctacctggggcttgaaacccccagtgggacaagaaaactcagaccccacttgtcaccccttccttacctgagctcttctttctccacagcacagc

SEQ ID NO: 9861 - DNA, 201 bp, Homo sapiens
ccattcctattttgttgaaacttatgaacatgagtgatgttaacatttttgtcaactgtttcttctgcatcttttgagataattatgtctttttttccatyaatacagtgcattccatgaattgattttcaaatgttaatccaaccatatgttcctgggatgaatcccattggtcatggagtgtaatccttttttatgtgg

SEQ ID NO: 9862 - DNA, 201 bp, Homo sapiens
gtcctgtgagaggccagaaaggtggcagggccatgaggtcctagaggaacctcctagtcttggaccctcgagaagtttccagaaatgtgtgactgcagacycagggcgggatcaggaaaaacaaggaaagcagatgtgggtcctcgaccaactgccctcctaaggtctgtccttagccagggaccttcccctgacctgtga

SEQ ID NO: 9863 - DNA, 201 bp, Homo sapiens
ggattggacatccttgcattgatccccatcttaggagaaaagcattcagtcttcagtctttcttcattaagtttgattttagctgtgggttttttatagaygccctttatcagagtgaagaaggtctcctccattcctattttgttgaaacttatgaacatgagtgatgttaacatttttgtcaactgtttcttctgcatc

SEQ ID NO: 9864 - DNA, 201 bp, Homo sapiens
cttttctggaacaggaaaggtgattggggaaggaatgcagttcagcatgaggaagagggtcatggtgggcacaggggtgggctggtctctgcagaaagagragtcagggttcttgaagtcacaaagggacttgccactcagtcccacacagggcagctgtttcacactacagaaaaatattcatgaacaaattcatatcag

SEQ ID NO: 9865 - DNA, 201 bp, Homo sapiens
catgggggaaactcccctatgtgggaggacttcagagggggtcatgtcctcagggagaccaggttgctgctggagctgggaggtgcaggaacatcctgagrgagggtgtggaggttttgttgatcattgactgagattccagggggtgcactgggaagatttctgtggttcgggaggttggggagacagaatagtggtgtg

SEQ ID NO: 9866 - DNA, 201 bp, Homo sapiens
tactcctacctggggcttgaaatccaccaatggaagaaggaaactcagagctcacccctttcctacctgggatcttattcctccacatcacagcagcgacyacagctacagtgattacagcaactagaagaaccaggccagcaatgatgcccacaacggggatgatgggctgggaagacagctctaagaaaggaggtgaac

SEQ ID NO: 9867 - DNA, 201 bp, Homo sapiens
ccagccccttttctggaacaggaaaggtgattggggaaggaatgcagttcagcatgaggaagagggtcatggtgggcacaggggtgggctggtctctgcasaaagagaagtcagggttcttgaagtcacaaagggacttgccactcagtcccacacagggcagctgtttcacactacagaaaaatattcatgaacaaattc

SEQ ID NO: 9868 - DNA, 201 bp, Homo sapiens
agtagagatggggtttcaccgtgttagccaggatggtctggatctcctgacctcatgatccgcctgcctcagcctcccaaagtgctgggattaccggcatragccaccgcgcccggcctattttgtcaattttctataaaatccctgctgggattttgatagggattgtgttgaacctatagatctactgggggagaattg

SEQ ID NO: 9869 - DNA, 201 bp, Homo sapiens
cttcccctgacctgtgactgctgggagtcaggttcccatgaccacaatcaaggtgataaatttgtccttcattttcacaggtgctttacaaaagagtaagbgttgatagacagggcctctgaacagggtaaatgtgtgtggagatggtgcctcacaactaggcaagatatgagcctactcctacctggggcttgaaatcca

SEQ ID NO: 9870 - DNA, 201 bp, Homo sapiens
aagcccccgaccccttcttttagaacagatctttttgtctttgtctttatttctgtgttcatcccccttcattatatcccatagtaaccgattgcgacaayggggttttaccatgttagccagactggtcttgaactcctgacctcaggtggtccacccacctcagcctcccaaagtgctgggattacaggcgtgaaccac

SEQ ID NO: 9871 - DNA, 201 bp, Homo sapiens
gcaacaaatcagcacaagaaacacgtgtactgtggaaagttctcatgtcttccatttattttgtctctcaaatttcaggaatcttctcctttaattaacchatcaatctctcttggaaataatttgaaaaagtaaatttatactcagattctaattttaatacagaagtaagttatagctcagtgcaccacaaatttgaga

SEQ ID NO: 9872 - DNA, 201 bp, Homo sapiens
tttttagtagagatggggtttcaccgtgttagccaggatggtctggatctcctgacctcatgatccgcctgcctcagcctcccaaagtgctgggattaccrgcatgagccaccgcgcccggcctattttgtcaattttctataaaatccctgctgggattttgatagggattgtgttgaacctatagatctactgggggag

SEQ ID NO: 9873 - DNA, 201 bp, Homo sapiens
aggtctgtcctcagcagggaccttcccctgacctgtgactgctgggagtcaggttcccatgaccacaatcaaggtgataaatttgtccttcattttcacargtgctttacaaaagagtaagtgttgatagacagggcctctgaacagggtaaatgtgtgtggagatggtgcctcacaactaggcaagatatgagcctactc

SEQ ID NO: 9874 - DNA, 201 bp, Homo sapiens
gacctatttgtagccaaagccattttcatggcctcgtggtcctctctgtcacatggctccttacaattctgtgtggttttgttccaatgtaagtagttctygttaaggatgcttgcaatgaactttggtattcttttctctttcatttttataaaaaccaagcatattttactttgaaaaaatctgtttaaggaattagga

SEQ ID NO: 9875 - DNA, 201 bp, Homo sapiens
tggaaaatacaattgaaagagacctggaaggaggggaagaggtgtaggggtctgaaaatttttcttctgataacacaggaacttctacgtgtagggaccaycctaggtgatatccaagtctatgtgatcacaggtcctggtgggacaaggttctactgaagggccaaggacaatggagcagcaaagatgacccagctgagc

SEQ ID NO: 9876 - DNA, 201 bp, Homo sapiens
ggaatagcactgctatgagcatgactgtacaattatctgtgtgcatacctgctttcaatttttggggggtatacacccaaaagtggaattgttgcttcatrtggaaattctatgtttaccttcttgagaaagcgtcatcctgtttccatgatggctgcactgttgttcactctcagcagcagtgcacaagcattccatttt

SEQ ID NO: 9877 - DNA, 201 bp, Homo sapiens
cccttctgcatcctctgcattttaatatacatttttaggattattttgtcaattttcttttctttttttctttttttttttttttttgagacggagtctcrctctgtcacccaggctggagtgcagtggcatgatctccgctcactgcaacctccgcctaccgggttcatgccatttttctgcctcagcctcccgaggagc

SEQ ID NO: 9878 - DNA, 201 bp, Homo sapiens
aggtcaggatcagaaaacccaagggaagaggatgtgttgaggctggaccagttgtcctcctgaggtctgtcctcagcagggaccttcccctgacctgtgaytgctgggagtcaggttcccatgaccacaatcaaggtgataaatttgtccttcattttcacaggtgctttacaaaagagtaagtgttgatagacagggcct

SEQ ID NO: 9879 - DNA, 201 bp, Homo sapiens
aaaaaaaaaaagatggaaaatacaattgaaagagacctggaaggaggggaagaggtgtaggggtctgaaaatttttcttctgataacacaggaacttctavgtgtagggaccaccctaggtgatatccaagtctatgtgatcacaggtcctggtgggacaaggttctactgaagggccaaggacaatggagcagcaaagat

SEQ ID NO: 9880 - DNA, 201 bp, Homo sapiens
ggcagggcatgagatcctagagaagtttccagaactgtgactacagacccaggtcaggatcagaaaacccaagggaagaggatgtgttgaggctggaccarttgtcctcctgaggtctgtcctcagcagggaccttcccctgacctgtgactgctgggagtcaggttcccatgaccacaatcaaggtgataaatttgtcct

SEQ ID NO: 9881 - DNA, 201 bp, Homo sapiens
gattattgtagtttcatatgacattccattttttttttcaaatttgtgttggcccttctgcatcctctgcattttaatatacatttttaggattattttgycaattttcttttctttttttctttttttttttttttttgagacggagtctcgctctgtcacccaggctggagtgcagtggcatgatctccgctcactgca

SEQ ID NO: 9882 - DNA, 201 bp, Homo sapiens
cacttacatgaagcctgagcataactgcctccttttccatctgtggaaagaaaacaaactgtgagaggccagggaggaggcagggcatgagatcctagagragtttccagaactgtgactacagacccaggtcaggatcagaaaacccaagggaagaggatgtgttgaggctggaccagttgtcctcctgaggtctgtcct

SEQ ID NO: 9883 - DNA, 201 bp, Homo sapiens
ccacacttacatgaagcctgagcataactgcctccttttccatctgtggaaagaaaacaaactgtgagaggccagggaggaggcagggcatgagatcctaragaagtttccagaactgtgactacagacccaggtcaggatcagaaaacccaagggaagaggatgtgttgaggctggaccagttgtcctcctgaggtctgt

SEQ ID NO: 9884 - DNA, 201 bp, Homo sapiens
acaggtgatgtgactaaaggaggaattttggggtggctgagctcccccatgggctcctgtctacactatcccaaggatctcagggatcactcttcccaccmctaccacacttacatgaagcctgagcataactgcctccttttccatctgtggaaagaaaacaaactgtgagaggccagggaggaggcagggcatgagatc

SEQ ID NO: 9885 - DNA, 201 bp, Homo sapiens
gtcaccttcacacaggttaactcggaagacaaaggtgctttggctaagctggtggaagttctcaggaccaattacaatgacagatacgatgagatccgccrtcactggggagacagtgtcctgggtctcaagtatgtggtttgcattgccaagctcaaaaaggcaaagggtaaagaacatgccactaaattgggtgaaatg

SEQ ID NO: 9886 - DNA, 201 bp, Homo sapiens
agacctgcaccactgtcaccttcacacaggttaactcggaagacaaaggtgctttggctaagctggtggaagttctcaggaccaattacaatgacagatabgatgagatccgccatcactggggagacagtgtcctgggtctcaagtatgtggtttgcattgccaagctcaaaaaggcaaagggtaaagaacatgccacta

SEQ ID NO: 9887 - DNA, 201 bp, Homo sapiens
ttgagtctgtgtatgaattttataagactgggtaacaaattgtcacaaacattggctttaaacagcacccatttattgtattcattgatttatttttagakacagagtctccctctgtcatccaggatgaagtgcagtcacatgatcatggctcactgcagcctcaaattcctgggctcaagggaccctcctacctcagtc

SEQ ID NO: 9888 - DNA, 201 bp, Homo sapiens
tcactgcagcctcaaattcctgggctcaagggaccctcctacctcagtcttcagagtagctaggactgcaggcaagtgccaccatgcccagctaattaaaragaaatgtagagacgagtgtctcactatattatcctagctggtctcaaagtcctggctgcaagtgttcctcctgtgtcagctcctcaaatgttaggatac

SEQ ID NO: 9889 - DNA, 201 bp, Homo sapiens
cctagctggtctcaaagtcctggctgcaagtgttcctcctgtgtcagctcctcaaatgttaggatacaggtgtgcactaccacgcctggccaaataacacycatttgttgtttatagtttcttaatcagaaatctgggcatgatgtggatggaatctctgttccggtcttcctaaacctgtgttttcattttgaatcctcc

SEQ ID NO: 9890 - DNA, 201 bp, Homo sapiens
tctgttcactgtgattgatgatagtttcttttgctgtgcagaaaaaaatgcctaatcaaattgcttttcatttacaaaaatgtgaatctcatacttcagtmaactttattttactttagtaaaaattattagcatgatgccaataattttggcttgatgctgtagcccgaaatggttagttctaattgagaaacaagtttt

SEQ ID NO: 9891 - DNA, 201 bp, Homo sapiens
ttggacatccttgcattgatccccatcttaggagaaaagcattcagtcttcagtctttcttcattaagtttgattttagctgtgggttttttatagatgcsctttatcagagtgaagaaggtctcctccattcctattttgttgaaacttatgaacatgagtgatgttaacatttttgtcaactgtttcttctgcatcttt

SEQ ID NO: 9892 - DNA, 201 bp, Homo sapiens
tctgaacccaggggtacaagtccatgggggaaactcccctatgtgggaggacttcagagggggtcatgtcctcagggagaccaggttgctgctggagctgkgaggtgcaggaacatcctgagagagggtgtggaggttttgttgatcattgactgagattccagggggtgcactgggaagatttctgtggttcgggaggtt

SEQ ID NO: 9893 - DNA, 201 bp, Homo sapiens
tttttttccattaatacagtgcattccatgaattgattttcaaatgttaatccaaccatatgttcctgggatgaatcccattggtcatggagtgtaatccktttttatgtggctttgtattatctgccaatgtttgttaaggatgttttcatttatgtttattggtgacactggtgtatggcactcttttcctgtgagtct

SEQ ID NO: 9894 - DNA, 201 bp, Homo sapiens
gaaagttctgagaaccacagtgaggagcaaggtccccacctcacctctgaacccaggggtacaagtccatgggggaaactcccctatgtgggaggacttcrgagggggtcatgtcctcagggagaccaggttgctgctggagctgggaggtgcaggaacatcctgagagagggtgtggaggttttgttgatcattgactga

SEQ ID NO: 9895 - DNA, 201 bp, Homo sapiens
cagtgcttttctcaccagggctgcttttgtgtcctccctccctccctcctcccacaccaatcctcctgcacactgcagcacacaaccatatttgtctcttsaggaaagataacccaaggcttatggctccaattatccaaccacatatgaatctaaattagactctgctttacaaatccatgagtttggtttggagccagc

SEQ ID NO: 9896 - DNA, 201 bp, Homo sapiens
agaaagttctgagaaccacagtgaggagcaaggtccccacctcacctctgaacccaggggtacaagtccatgggggaaactcccctatgtgggaggacttyagagggggtcatgtcctcagggagaccaggttgctgctggagctgggaggtgcaggaacatcctgagagagggtgtggaggttttgttgatcattgactg

SEQ ID NO: 9897 - DNA, 201 bp, Homo sapiens
gaaaaaaaatgcatggataattttcatgatatctgccactacagataagcaaaaaaatcgtcacattctaaagctgtcctgggccacatgcatcccgagakctgcaggttggacaagcttgcatctagaatgtatacacgacaaggccagaaatttttctgtttttactttaacgatgttttctaaatgcaaaaacagtca

SEQ ID NO: 9898 - DNA, 201 bp, Homo sapiens
tacactaatgacagctgatgagcagaaaaaaatagaaaaaagaaaaaaaatgcatggataattttcatgatatctgccactacagataagcaaaaaaatcrtcacattctaaagctgtcctgggccacatgcatcccgagagctgcaggttggacaagcttgcatctagaatgtatacacgacaaggccagaaatttttct

SEQ ID NO: 9899 - DNA, 201 bp, Homo sapiens
cacatccctcaaatctttactccaaggtcacatttgcaacaaggcccatgctgaccacccagcacaacagccacctccctgtacccacagcccaccctctsgatcacctgccacacagcacttgccaccttctaactcaagcattttctgttcctactctgcttatactatatcatctgcctgcagaggtgtccaatcttt

SEQ ID NO: 9900 - DNA, 201 bp, Homo sapiens
tggctacaatgaggggaatgggggtctaatctgatgacagcctaggggttttagggaggagggaggcagaaagttctgagaaccacagtgaggagcaaggwccccacctcacctctgaacccaggggtacaagtccatgggggaaactcccctatgtgggaggacttcagagggggtcatgtcctcagggagaccaggttg

SEQ ID NO: 9901 - DNA, 201 bp, Homo sapiens
ccagagagaagctttcaaaggataagtcctaccatgtcccactttccaaaactgtcctctaactccccatgtcattcagagcaaaggtcaacatccttcchacaccctccagggcaacctgctctgggcacacctctgacttcatttcagtttctctctgttcaacacttctggcctcttcctccttccaggaacacagac

SEQ ID NO: 9902 - DNA, 201 bp, Homo sapiens
tccagaatcccatcacttcccactatttcccctgctcacaccccagtcaaggtaagcgacgtctccatcctggaatactgcactcctttcccaccgttttycccactgcctcactagtcccccacctctcaattctgttctcagcacagcagccagagagaagctttcaaaggataagtcctaccatgtcccactttccaa

SEQ ID NO: 9903 - DNA, 201 bp, Homo sapiens
gggaatggctacaatgaggggaatgggggtctaatctgatgacagcctaggggttttagggaggagggaggcagaaagttctgagaaccacagtgaggagmaaggtccccacctcacctctgaacccaggggtacaagtccatgggggaaactcccctatgtgggaggacttcagagggggtcatgtcctcagggagacca

SEQ ID NO: 9904 - DNA, 201 bp, Homo sapiens
atctgggcccctcaccttcattcctcgtagatgtcacctccactggatgcctgcaatgccctctcctctgtatgctcctgccagagtctccccatctccaytgacagcagctccacccttctgctcactcagtccaatactgtgggtgtccttgattcttctttctcacaccacagataaatccattagcaagtgctgtga

SEQ ID NO: 9905 - DNA, 201 bp, Homo sapiens
tatctgtgtgcatacctgctttcaatttttggggggtatacacccaaaagtggaattgttgcttcatatggaaattctatgtttaccttcttgagaaagcrtcatcctgtttccatgatggctgcactgttgttcactctcagcagcagtgcacaagcattccattttctccacatcctcaccaacacctggactagtgaa

SEQ ID NO: 9906 - DNA, 201 bp, Homo sapiens
tcttgctcaactatttttcttctgttgccttctttagatgaataaaaaactttgcattattgtggtcttctcagtaagtgttctagttacaaattctcttrttatttctttaattatctgagaaagcacaataatctgtgacttattataaccaacagcagaccataacttccctgactttcacctacctgtgcagacagc

SEQ ID NO: 9907 - DNA, 201 bp, Homo sapiens
ctgccttcagcccctggtaacctgtattctactttctgtttttgtgaatttgcttattctaggtgcctcatataagtgaaatatcatatttgccttttttytggcttattttatttagcgtgttttcaaggttccatccaatccaaatattcttcacttttaaggctgattaatattccatgtgtatatgcaccacatttt

SEQ ID NO: 9908 - DNA, 201 bp, Homo sapiens
caggaggatttttaccgggaacctgtgcgatgagctgtgacatccttctccccaccttcaatctcagccccagcaggcacctcctgggcgcagaagcagtkcagcggcgccacctggcggtctgcactcttcctttcccagatcaagcacagccctgaaatccacctgtccctcctctgtgcctgtgatttcttcagggga

SEQ ID NO: 9909 - DNA, 201 bp, Homo sapiens
ggcatgtctgcagctgtgcccacacttggagtgtgtcagtacattataaacactggctcagtggtgttagtacattataaacattggcttatcatgggttrttttattatttattgtgtattttgatttcactttactggcaacacaataaacaatgacatgatgaccctagcaatcacatcctctttcttgtgtcaaaaa

SEQ ID NO: 9910 - DNA, 201 bp, Homo sapiens
ctgtaaaatgtaaatgtggatatggcttggattactaagtggttttatttcttcattcacctgacatttgttgtgtacctgctgcaagtcaaatacatggyatgatattgtttccttgttcacaccacagcaaatgagaaaatgagacattatagccaggtgtggcggcacaggcttctcgtcctagctactcagaaggct

SEQ ID NO: 9911 - DNA, 201 bp, Homo sapiens
tgccaggcctcttccatgggggcccttttctgcagtgactgggatttctttccatttcactctaccctgtgtcctgacccaagagacaaggcatgtctgcmgctgtgcccacacttggagtgtgtcagtacattataaacactggctcagtggtgttagtacattataaacattggcttatcatgggttattttattattt

SEQ ID NO: 9912 - DNA, 201 bp, Homo sapiens
cttcctggtgcctcagtttcttaatctgtgaaatggtgaggacattacagcacttacctctcgggcgggtttctcaacagcagccctattaagaatttgaracagagaatcccttgtggtctgtcctgtgcattgtgggaggtttgccagcagcaccccactcaccccctcccaccaatccccacgtgacaaccgaaaatg

SEQ ID NO: 9913 - DNA, 201 bp, Homo sapiens
tgtaaatcaaagacttcttttatctaattatttttctttaatgctttaagcttatcttttaatttaatttaatttaatttaattttaagttccagggtacrtgtgcaggatgtgcaggtttgttacataggtaatcgtgtgccatggtggttggctgtacctatcaacccatcacctaggtgttaaccctggcattcatta

SEQ ID NO: 9914 - DNA, 201 bp, Homo sapiens
tttaatgctttaagcttatcttttaatttaatttaatttaatttaattttaagttccagggtacgtgtgcaggatgtgcaggtttgttacataggtaatcrtgtgccatggtggttggctgtacctatcaacccatcacctaggtgttaaccctggcattcattagctatttttcctaatgatccccccatcactgccctc

SEQ ID NO: 9915 - DNA, 201 bp, Homo sapiens
ctatgattctaaatagcatgccatcaggtgcttctgaagtggttttgtttgtttctttgttttcgcagtcctattgtgttttctattcatattgctattcygtcactggttattcctttctactcttttcttgtttcatttattttgatcaatgatgtgcatttccaattctgtaaaagtttaattcagtggtatgtgtgg

SEQ ID NO: 9916 - DNA, 201 bp, Homo sapiens
ttctttgttttcgcagtcctattgtgttttctattcatattgctattccgtcactggttattcctttctactcttttcttgtttcatttattttgatcaawgatgtgcatttccaattctgtaaaagtttaattcagtggtatgtgtggtagaatgtaacatcaaatcctttgcaagatggaattaccttgcacatcagat

SEQ ID NO: 9917 - DNA, 201 bp, Homo sapiens
gccttattgcaccagctgcaatctccagtacaatgttaagtagaagtgttggattggacatccttgcattgatctccatcttaggagaaaagcattcagtmtttcttcagcaagcatgattttagttgtgggttttttatagatgccctttatcagggtgaggaaggtcccctccattcctattttgttgaaacttatgaa

SEQ ID NO: 9918 - DNA, 201 bp, Homo sapiens
cttgcacatcagattgaagattgtatacatgaaaatctacagagatgccagtgagccaaggatcaaatgacctatttgtagccaaagccattttcatggcmtcgtggtcctctctgtcacatggctccttacaattctgtgtggttttgttccaatgtaagtagttcttgttaaggatgcttgcaatgaactttggtattc

SEQ ID NO: 9919 - DNA, 201 bp, Homo sapiens
tgcacatcagattgaagattgtatacatgaaaatctacagagatgccagtgagccaaggatcaaatgacctatttgtagccaaagccattttcatggcctsgtggtcctctctgtcacatggctccttacaattctgtgtggttttgttccaatgtaagtagttcttgttaaggatgcttgcaatgaactttggtattctt

SEQ ID NO: 9920 - DNA, 201 bp, Homo sapiens
aatgtaagtagttcttgttaaggatgcttgcaatgaactttggtattcttttctctttcatttttataaaaaccaagcatattttactttgaaaaaatctrtttaaggaattaggaatttaagtcaattctttcaactcaatgttttcagaacacatcatcaacatcaagtattacacatttattttaaaagttccatttt

SEQ ID NO: 9921 - DNA, 201 bp, Homo sapiens
ctttggtattcttttctctttcatttttataaaaaccaagcatattttactttgaaaaaatctgtttaaggaattaggaatttaagtcaattctttcaacwcaatgttttcagaacacatcatcaacatcaagtattacacatttattttaaaagttccattttaaaagggaatggatgatatgttgtttggactttagcc

SEQ ID NO: 9922 - DNA, 201 bp, Homo sapiens
ttttttcatatgttatgccatagtaccaggaatagggatgtaaataaaagtgccagaaacaggaattatccctaagcgaaaaaccataactatatttttayacctttatgtaagaattctcaagtattcatttcatctgaaaagttaggattaacagtaagtagagttatatagcctggtggtctgatagcccccactagt

SEQ ID NO: 9923 - DNA, 201 bp, Homo sapiens
tgcctgcagtctaggccagcccagcagacaaacctaatgtcactcccaaacctggaaacaactgatataaagggacagagggaggaatagtggctgagggyaagtgaataaatcaaagggttatataatgagaaaaattcaatattagcttaactcctcaaaggtggtgtgagcaagagaagatattgtcacttaggtcaa

SEQ ID NO: 9924 - DNA, 201 bp, Homo sapiens
ataaatcaaagggttatataatgagaaaaattcaatattagcttaactcctcaaaggtggtgtgagcaagagaagatattgtcacttaggtcaattatacdggatgcctaaaagagtgaagctgtatgtccctgagaccatccttgtttttggaacctggtaagattgagtgttgtcagcaaagctgagtgatttcattct

SEQ ID NO: 9925 - DNA, 201 bp, Homo sapiens
agtgaaccaagagctacaagagtcaggattgagaggaaaggccaggggcccacagggaatggctacaatgaggggaatgggggtctaatctgatgacagcytaggggttttagggaggagggaggcagaaagttctgagaaccacagtgaggagcaaggtccccacctcacctctgaacccaggggtacaagtccatgggg

SEQ ID NO: 9926 - DNA, 201 bp, Homo sapiens
aaatcaaagggttatataatgagaaaaattcaatattagcttaactcctcaaaggtggtgtgagcaagagaagatattgtcacttaggtcaattatacggratgcctaaaagagtgaagctgtatgtccctgagaccatccttgtttttggaacctggtaagattgagtgttgtcagcaaagctgagtgatttcattctgg

SEQ ID NO: 9927 - DNA, 201 bp, Homo sapiens
cttaactcctcaaaggtggtgtgagcaagagaagatattgtcacttaggtcaattatacgggatgcctaaaagagtgaagctgtatgtccctgagaccatycttgtttttggaacctggtaagattgagtgttgtcagcaaagctgagtgatttcattctgggagacatattcatacaagaggatgataaactggcctaat

SEQ ID NO: 9928 - DNA, 201 bp, Homo sapiens
aagtcccttttgccatgtaatgcaacctgttcacaggttccaaggactaagactggacctctttcgggaccattactcagcccaccacatgttgaagtcaycaacagtcaaggagactgctggagagggtgacagtgaaccaagagctacaagagtcaggattgagaggaaaggccaggggcccacagggaatggctacaa

SEQ ID NO: 9929 - DNA, 201 bp, Homo sapiens
atcacatggtaacagaggaacacagagagtaggaagttgccagggtctttttaacaactagctctcttggaaaataatagagcaacaattcattcattccygagagagggcagtatctctcgattcataaaagattggtcaccatgacccaaatggtggccattaggccccaagtcccacagtgggcgttagattttaaca

SEQ ID NO: 9930 - DNA, 201 bp, Homo sapiens
ttaatcatcattacatgagtaaagtcccttttgccatgtaatgcaacctgttcacaggttccaaggactaagactggacctctttcgggaccattactcarcccaccacatgttgaagtcaccaacagtcaaggagactgctggagagggtgacagtgaaccaagagctacaagagtcaggattgagaggaaaggccaggg

SEQ ID NO: 9931 - DNA, 201 bp, Homo sapiens
tcttcctggtgcctcagtttcttaatctgtgaaatggtgaggacattacagcacttacctctcgggcgggtttctcaacagcagccctattaagaatttgrgacagagaatcccttgtggtctgtcctgtgcattgtgggaggtttgccagcagcaccccactcaccccctcccaccaatccccacgtgacaaccgaaaat

SEQ ID NO: 9932 - DNA, 201 bp, Homo sapiens
aacttgcatgttaactgaagcttttgtttttattttattcgaagttacaattgcacataattgaaagagtaaatatttgcgcaggacttcctgagaaaaaygagtcttctctgcctttctagggagagtcctctcttctctgtttctgcctttctagggagcaaccactttcaagtttcagctgattcttttgactttact

SEQ ID NO: 9933 - DNA, 201 bp, Homo sapiens
attttttctgagtgtaagtcatggcttgaaatctggagagcctgaaggagatcccgctacctaaacccgttttccttttccctcaagcctcatttggccayaggcccagtgtcaacaccagggggcgccacagaccatgaaggcaccgcgcagctgggattgtttgtggtgggctcctgggtccctgacttaaccagggaa

SEQ ID NO: 9934 - DNA, 201 bp, Homo sapiens
ttagtggctcatttgatttgaatggggccacacagattgtccaggagaatctccctattttaaggtccttaatcatcattacatgagtaaagtcccttttrccatgtaatgcaacctgttcacaggttccaaggactaagactggacctctttcgggaccattactcagcccaccacatgttgaagtcaccaacagtcaag

SEQ ID NO: 9935 - DNA, 201 bp, Homo sapiens
gtcctgtaatgaagtcatgtgtgcatgtaacatcacttctgcacgcagtgtcatgggaaagtgggttcgcggaccccaggttaaaagcctaagcactaaakgcacagagctagagctctaggaggggcgggatggctggggtggaacgtcatcttgtcctttagtcctggggcattttcactcctcacatggtgggtgctg

SEQ ID NO: 9936 - DNA, 201 bp, Homo sapiens
ctgctgcctggggcttagaaaagtgacttggatattttgccaaagttgtatttctttgatggaattcgaaatccatgaacactctgctttcctgctgtatycccagagcgggttgagtaccttgcacttcttttcagcacttccctagaagtggtagaagatttggagttagggcctccctcaatctctgccctttcttta

SEQ ID NO: 9937 - DNA, 201 bp, Homo sapiens
ttaaatgacagctgcccattgttcctgccttcagcccctggtaacctgtattctactttctgtttttgtgaatttgcttattctaggtgcctcatataagwgaaatatcatatttgccttttttttggcttattttatttagcgtgttttcaaggttccatccaatccaaatattcttcacttttaaggctgattaatatt

SEQ ID NO: 9938 - DNA, 201 bp, Homo sapiens
ggcgggccccttgcttctccccgcagaggcggtttccccacgaccccgcactcacccgcccaggtctgggtcagggccagggcccccaagagtagcaggasgagggttcggggcgccatgacggccatcctcggcgtctggggagaatctgagtcccggtgggtgcgtgcggactttagaaccgcgaccgcgacgacactg

SEQ ID NO: 9939 - DNA, 201 bp, Homo sapiens
tgcagccctaaattgaattgtccttcgctctaaatacaggtctcacaaagttttatgtcttcaatgatttcacctgggccgagattttgttttgtttttgrtgttgtttgttttgagctgctgcctggggcttagaaaagtgacttggatattttgccaaagttgtatttctttgatggaattcgaaatccatgaacactc

SEQ ID NO: 9940 - DNA, 201 bp, Homo sapiens
tgatggtggttacacaaacaccaacatgcattttcagaacattttcatcatcccaacagagactgtacccattaaatgacagctgcccattgttcctgccytcagcccctggtaacctgtattctactttctgtttttgtgaatttgcttattctaggtgcctcatataagtgaaatatcatatttgccttttttttggct

SEQ ID NO: 9941 - DNA, 201 bp, Homo sapiens
agtagtaaatgtaaacatcaggaatccaaggagattctatctttttacacagaaatggcctcactatgcactgctgaagggagaaggtccctccaggagamcttcatgatgaggaaaaacccaatatgatgtaggggttttctgctgcagccctaaattgaattgtccttcgctctaaatacaggtctcacaaagttttat

SEQ ID NO: 9942 - DNA, 201 bp, Homo sapiens
caaacagaaacataggctgaaatgaagggtttatgtttatcttgctacaaattctgttggcccacaatctcttatgcttattgcataagagagccacagaktggggtgatagctcaaataaccagtccctggttttctgcttcagaaacaagtttaaattctctgcttagacaaagtaaagaaaataattgaaagatgttg

SEQ ID NO: 9943 - DNA, 201 bp, Homo sapiens
acatgggagcaccatgaatttatttacatgtctttacttcacagttgttttgaggaggctttcactgagaaacctaacagaaatgaatatatatgacttcytataaaatgaaatttaagtaaaattatactttttaaaatgttaagactggagcaagactggaacatcaccagacaaacagaaacataggctgaaatgaag

SEQ ID NO: 9944 - DNA, 201 bp, Homo sapiens
aaagggggagtcatccctaaatatggcggccctgggacagctggcctccctgccaggcctcttccatgggggcccttttctgcagtgactgggatttcttyccatttcactctaccctgtgtcctgacccaagagacaaggcatgtctgcagctgtgcccacacttggagtgtgtcagtacattataaacactggctcagt

SEQ ID NO: 9945 - DNA, 201 bp, Homo sapiens
taatagcgtcctttgatgcaaaaaagtttttacattttgatgaagtcttatttgtcattttccttttattgcttgtacttttggtcaccagccaagaaacsactaccaattctaatgaccataagactttccctcagtattttcttttaagagttttacaggtttaactcttaagattagttctttaaggcattctgactt

SEQ ID NO: 9946 - DNA, 201 bp, Homo sapiens
tttgtaggtttccccctaaccccgtcattattgtgcagggcattctatcaccccacctgccatagcttcccctaaccagggcatcctctcagctcagcackggtgagacccatagcagctcggctgcatcttgtgctatggaatttctgtgtctcccacaaccctggtggcatcctcttggcctgccaggcagtgggcaag

SEQ ID NO: 9947 - DNA, 201 bp, Homo sapiens
ttttaaaagttccattttaaaagggaatggatgatatgttgtttggactttagccagcactgttgtaaaacacagaacctgtaaactaccctgggctgctkcccattcacatcccccaaaaggagactccatcctgagtcttgtgattattattcctttatttagatgtgtggtcttatttctgagttctctgttctgttc

SEQ ID NO: 9948 - DNA, 201 bp, Homo sapiens
tcatgaggtgaaaatgatccacctgggttgagcttgaatcccatgttgacacccacagaaaacagccaagtctgaagtgtcattaaacaacgaaacagacmaatggaagctagccagccttcactatgggtcagcccatgcatgataggatgggcacatgaatggaacaaccacagtggcaggtgtgaggctacatatggg

SEQ ID NO: 9949 - DNA, 201 bp, Homo sapiens
tgaggtatcaggggataaatgtttatatcattgcatcccctccctagccagccaaaggtcatgttcttctcacattgcaaaatataataatctactcccarttgtcccaaatgtgttaggttgttccagcatcaactcaaaattctagagtctcatctgagacgcaaggtaaattcttatagctttgagcctgtaaaattt

SEQ ID NO: 9950 - DNA, 201 bp, Homo sapiens
acagcattcatcatgaggtgaaaatgatccacctgggttgagcttgaatcccatgttgacacccacagaaaacagccaagtctgaagtgtcattaaacaaygaaacagacaaatggaagctagccagccttcactatgggtcagcccatgcatgataggatgggcacatgaatggaacaaccacagtggcaggtgtgaggc

SEQ ID NO: 9951 - DNA, 201 bp, Homo sapiens
aaattactctattgctaaaaaatgctaacggtcgtctgaggcttcagctaattttaatctttttgctgggcagggtcttgcctcaatgttgatgactgccrgctgttcaagagggtggttgctaaaggctgctgtggcaatttcttaaaataagacaatgaagtttatggcatggattataaagggggaatcagtacttaa

SEQ ID NO: 9952 - DNA, 201 bp, Homo sapiens
gacttgtgactgctgggagtcaggttcccatgatcacaatcaaggtgataaatttgtccttcaatttcacaggtgctttacaaaagagtgagagttgacakggcatctgaacagggtaaatgtgtgtggagatggtgtctcacaactaggcaggaaatgagccaacttccatctggagcttgaaatccacgaatggaagaa

SEQ ID NO: 9953 - DNA, 201 bp, Homo sapiens
aagtaggggggatggtggcttagtacattttccttctttatctctttatgaccatgtggcctgcttaaacctatactaaggcacatagaattgaaaatgarccatcacatgtaggttattttttacacccttaagtcctgcccaagccagggctgggccaaggccctcgaacatccagctgtggcctcctcctgctgcagg

SEQ ID NO: 9954 - DNA, 201 bp, Homo sapiens
ttaaaattactctattgctaaaaaatgctaacggtcgtctgaggcttcagctaattttaatctttttgctgggcagggtcttgcctcaatgttgatgactrccggctgttcaagagggtggttgctaaaggctgctgtggcaatttcttaaaataagacaatgaagtttatggcatggattataaagggggaatcagtact

SEQ ID NO: 9955 - DNA, 201 bp, Homo sapiens
gtggcctgcttaaacctatactaaggcacatagaattgaaaatgaaccatcacatgtaggttattttttacacccttaagtcctgcccaagccagggctgrgccaaggccctcgaacatccagctgtggcctcctcctgctgcaggtgaggagtgggcagcagggagggccgtggtgcctgctttgtccccatcccggtct

SEQ ID NO: 9956 - DNA, 201 bp, Homo sapiens
cacgaatggaagaagaaatcttggaactcacccctttcctacctggggtcttattcttccacatcacagcagtgaccacagcacctagaacaaccaggacrgtaacgatgcccatgatgaggaatgtgggctgggaagatggccctaagaaaggaggggaacgtgaggggtcctgacccccaggcctcagccctgaccctg

SEQ ID NO: 9957 - DNA, 201 bp, Homo sapiens
atgaaagaactatgtacataccttaatttaaaattactctattgctaaaaaatgctaacggtcgtctgaggcttcagctaattttaatctttttgctgggsagggtcttgcctcaatgttgatgactgccggctgttcaagagggtggttgctaaaggctgctgtggcaatttcttaaaataagacaatgaagtttatggc

SEQ ID NO: 9958 - DNA, 201 bp, Homo sapiens
aggtgaatctaagagattagacatggagccatacctgcttccaccgtttgatttctggacccacatgttcttcctcttgcgaacacagaactgtagagacdactctgatttaaacaacgcaccatgtcctgaaagatggcacgcaaccctcagagtgcttcctccaggctggcacttagttgtgcctgtggaagatcacgg

SEQ ID NO: 9959 - DNA, 201 bp, Homo sapiens
tggaagaagaaatcttggaactcacccctttcctacctggggtcttattcttccacatcacagcagtgaccacagcacctagaacaaccaggacggtaacratgcccatgatgaggaatgtgggctgggaagatggccctaagaaaggaggggaacgtgaggggtcctgacccccaggcctcagccctgaccctgctgaag

SEQ ID NO: 9960 - DNA, 201 bp, Homo sapiens
tatgaaagaactatgtacataccttaatttaaaattactctattgctaaaaaatgctaacggtcgtctgaggcttcagctaattttaatctttttgctggrcagggtcttgcctcaatgttgatgactgccggctgttcaagagggtggttgctaaaggctgctgtggcaatttcttaaaataagacaatgaagtttatgg

SEQ ID NO: 9961 - DNA, 201 bp, Homo sapiens
gcaaaccaggacctcgtaccctgcacagcccagtgttctgagataaaacatgtcaaataccccattaggtgaatctaagagattagacatggagccatacytgcttccaccgtttgatttctggacccacatgttcttcctcttgcgaacacagaactgtagagacgactctgatttaaacaacgcaccatgtcctgaaag

SEQ ID NO: 9962 - DNA, 201 bp, Homo sapiens
gaaatcttggaactcacccctttcctacctggggtcttattcttccacatcacagcagtgaccacagcacctagaacaaccaggacggtaacgatgcccaygatgaggaatgtgggctgggaagatggccctaagaaaggaggggaacgtgaggggtcctgacccccaggcctcagccctgaccctgctgaaggcctccag

SEQ ID NO: 9963 - DNA, 201 bp, Homo sapiens
ttttaagggtaccctcctttgcaaaccaggacctcgtaccctgcacagcccagtgttctgagataaaacatgtcaaataccccattaggtgaatctaagasattagacatggagccatacctgcttccaccgtttgatttctggacccacatgttcttcctcttgcgaacacagaactgtagagacgactctgatttaaac

SEQ ID NO: 9964 - DNA, 201 bp, Homo sapiens
cttggaactcacccctttcctacctggggtcttattcttccacatcacagcagtgaccacagcacctagaacaaccaggacggtaacgatgcccatgatgrggaatgtgggctgggaagatggccctaagaaaggaggggaacgtgaggggtcctgacccccaggcctcagccctgaccctgctgaaggcctccagaaggg

SEQ ID NO: 9965 - DNA, 201 bp, Homo sapiens
agatttggtttcagaccatggcaacaaacaagtcacacaaatttttgtttttccagtacatataaaagttatattcacactctactgtagcctattaagtrtacaatagcattatgtatgaaagaactatgtacataccttaatttaaaattactctattgctaaaaaatgctaacggtcgtctgaggcttcagctaattt

SEQ ID NO: 9966 - DNA, 201 bp, Homo sapiens
gcttttaagggtaccctcctttgcaaaccaggacctcgtaccctgcacagcccagtgttctgagataaaacatgtcaaataccccattaggtgaatctaaragattagacatggagccatacctgcttccaccgtttgatttctggacccacatgttcttcctcttgcgaacacagaactgtagagacgactctgatttaa

SEQ ID NO: 9967 - DNA, 201 bp, Homo sapiens
tgaggaatgtgggctgggaagatggccctaagaaaggaggggaacgtgaggggtcctgacccccaggcctcagccctgaccctgctgaaggcctccagaarggctcctgctttccctgagaagagacatggcccctcattcatctccttagcccatctcagtgtgaggggctctggcagtgcctcctgctgcacatggcat

SEQ ID NO: 9968 - DNA, 201 bp, Homo sapiens
tactgcagatttggtttcagaccatggcaacaaacaagtcacacaaatttttgtttttccagtacatataaaagttatattcacactctactgtagcctaktaagtatacaatagcattatgtatgaaagaactatgtacataccttaatttaaaattactctattgctaaaaaatgctaacggtcgtctgaggcttcagc

SEQ ID NO: 9969 - DNA, 201 bp, Homo sapiens
gtcttttgtctgcttttaagggtaccctcctttgcaaaccaggacctcgtaccctgcacagcccagtgttctgagataaaacatgtcaaataccccattasgtgaatctaagagattagacatggagccatacctgcttccaccgtttgatttctggacccacatgttcttcctcttgcgaacacagaactgtagagacga

SEQ ID NO: 9970 - DNA, 201 bp, Homo sapiens
cagacaaggacaagaaacaagttcaaaagagggaaagggaaactacagacgtacctcagagatactgcagatttggtttcagaccatggcaacaaacaagycacacaaatttttgtttttccagtacatataaaagttatattcacactctactgtagcctattaagtatacaatagcattatgtatgaaagaactatgta

SEQ ID NO: 9971 - DNA, 201 bp, Homo sapiens
tctgacctcccctcttctatgtctcctctgccttcctcctctgcagaatctgactccagccagggcaggttctctgcttttagtggctcatttgatttgawtggggccacacagattgtccaggagaatctccctattttaaggtccttaatcatcattacatgagtaaagtcccttttgccatgtaatgcaacctgttca

SEQ ID NO: 9972 - DNA, 201 bp, Homo sapiens
atactgtccacacttctctggtgacaaacttaatgtgtagttcagtgggctgtcttttgtctgcttttaagggtaccctcctttgcaaaccaggacctcgbaccctgcacagcccagtgttctgagataaaacatgtcaaataccccattaggtgaatctaagagattagacatggagccatacctgcttccaccgtttga

SEQ ID NO: 9973 - DNA, 201 bp, Homo sapiens
gcttgcaggaccagacaaggacaagaaacaagttcaaaagagggaaagggaaactacagacgtacctcagagatactgcagatttggtttcagaccatggyaacaaacaagtcacacaaatttttgtttttccagtacatataaaagttatattcacactctactgtagcctattaagtatacaatagcattatgtatgaa

SEQ ID NO: 9974 - DNA, 201 bp, Homo sapiens
caatgtccccagacctaccagagaaggcaaactcatacagcttgcaggaccagacaaggacaagaaacaagttcaaaagagggaaagggaaactacagacrtacctcagagatactgcagatttggtttcagaccatggcaacaaacaagtcacacaaatttttgtttttccagtacatataaaagttatattcacactct

SEQ ID NO: 9975 - DNA, 201 bp, Homo sapiens
ttggcaaatattttatcttattctatgcagtttcttttattttcacttttttttttttttttttttttttttttgagacagagtctctctctgatgccccrgctggagtgcaatggtgcaatctcagctcattgcaacctctgcctcccaggttcaagcgattctcctgcctcagcctcccgagtagctgggattacaggt

SEQ ID NO: 9976 - DNA, 201 bp, Homo sapiens
aattctttatcagatatgtgattggcaaatattttatcttattctatgcagtttcttttattttcacttttttttttttttttttttttttttttgagacrgagtctctctctgatgccccagctggagtgcaatggtgcaatctcagctcattgcaacctctgcctcccaggttcaagcgattctcctgcctcagcctcc

SEQ ID NO: 9977 - DNA, 201 bp, Homo sapiens
atcacccaggcttcccctccaaagaaccactgctatcatattattgaaacttcctggactgcagtgtgaatggtcatccctggagctatcttctgcagtgrtgctgacttccattcttttgttttctatgtatatatttttatatatgctttcattgtagaaagttgcattcataagttttggggttttttttaagatgga

SEQ ID NO: 9978 - DNA, 201 bp, Homo sapiens
tagttctgtatgtagtctggatattaattctttatcagatatgtgattggcaaatattttatcttattctatgcagtttcttttattttcacttttttttktttttttttttttttttttgagacagagtctctctctgatgccccagctggagtgcaatggtgcaatctcagctcattgcaacctctgcctcccaggttc

SEQ ID NO: 9979 - DNA, 201 bp, Homo sapiens
gttcttctgcaagtagaaagccctctttcagaacattgtccaagatcagccaggcccaaccctcaaaatgactttctgtctttgacccaaatgctcaaatrcaactctggggctaatttcagtgggagtaagagattatccaatcaggataattcatttggagagaaaatgttttgcttaagtcagcaaagtcctttgctt

SEQ ID NO: 9980 - DNA, 201 bp, Homo sapiens
ttcacttccttgcacatagaacagaggtttccacttccttgttaagagccacgcttagctcctagaatcttctttcagctactcacacatggtgcctaagkcacatccaatcctcctgcttggaacgtctgacctcccctcttctatgtctcctctgccttcctcctctgcagaatctgactccagccagggcaggttctc

SEQ ID NO: 9981 - DNA, 201 bp, Homo sapiens
agttgtagttctgtatgtagtctggatattaattctttatcagatatgtgattggcaaatattttatcttattctatgcagtttcttttattttcactttyttttttttttttttttttttttttgagacagagtctctctctgatgccccagctggagtgcaatggtgcaatctcagctcattgcaacctctgcctccca

SEQ ID NO: 9982 - DNA, 201 bp, Homo sapiens
gaagaatccatttccaagctcattcaggttcttgtctgaattcacttccttgcacatagaacagaggtttccacttccttgttaagagccacgcttagctmctagaatcttctttcagctactcacacatggtgcctaaggcacatccaatcctcctgcttggaacgtctgacctcccctcttctatgtctcctctgcctt

SEQ ID NO: 9983 - DNA, 201 bp, Homo sapiens
tgcgtccccgccgggcgggccccttgcttctccccgcagaggcggtttccccacgaccccgcactcacccgcccaggtctgggtcagggccagggcccccragagtagcaggaggagggttcggggcgccatgacggccatcctcggcgtctggggagaatctgagtcccggtgggtgcgtgcggactttagaaccgcgac

SEQ ID NO: 9984 - DNA, 201 bp, Homo sapiens
gggtggaggtggcagaggagtgagaagtgattggatttggtgttgatatatatttttaaaattgtggtaaaacacacatactatacgatttaccttctaamaatttttttcagtgtacaattcattggcattaagcacatttacaattgatggtggttacacaaacaccaacatgcattttcagaacattttcatcatccc

SEQ ID NO: 9985 - DNA, 201 bp, Homo sapiens
gacagtgggcatgagagtcagcaggcagcccagctggaaggcccttccggttttctatcctagtgaggatggttctggggtggaggtggcagaggagtgaraagtgattggatttggtgttgatatatatttttaaaattgtggtaaaacacacatactatacgatttaccttctaacaatttttttcagtgtacaattca

SEQ ID NO: 9986 - DNA, 201 bp, Homo sapiens
ataaatcacctatctatctatctgtctgtctatctatctatctatctatctatctatctatctatcatcatctaacatctatctatcatctatcatctatctatctattatctatctatcatctatgtacctatgctattggttctttctttcttggtaaccttaataaatcaacagacaataaacaaataaaacctgtca

SEQ ID NO: 9987 - DNA, 201 bp, Homo sapiens
ccaattagcccaataaatcacctatctatctatctgtctgtctatctatctatctatctatctatctatctatctatcatcatctaacatctatctatcawctatcatctatctatctattatctatctatcatctatgtacctatgctattggttctttctttcttggtaaccttaataaatcaacagacaataaacaaa

SEQ ID NO: 9988 - DNA, 201 bp, Homo sapiens
taattgtgtgagccaattagcccaataaatcacctatctatctatctgtctgtctatctatctatctatctatctatctatctatctatcatcatctaacmtctatctatcatctatcatctatctatctattatctatctatcatctatgtacctatgctattggttctttctttcttggtaaccttaataaatcaacag

SEQ ID NO: 9989 - DNA, 201 bp, Homo sapiens
gcctcccacttgcgctgggtgatctgagccgccatgtccgccgcggtccaagagcgcaggtcctcgttcaaggcgatgtaatccttgccgtcgtaggcgtmctgccggtacccgcggaggaagcgcccgtccgaccccacgtcgcagccatacatcatctggatggtgtgagaacctggccccgaccccacggtcagccca

SEQ ID NO: 9990 - DNA, 201 bp, Homo sapiens
aatgggctggaaaaagagaaaacgaggtcgaattcctcacttaccatgagatcttgcaacacaggttccaagggcctcaacccctctaccctggctgatgytccctcctccactccctctgaccagggccctgagccccccacacagctgagctggcccaagctgaggagttgcttgcacagcagctggagctggaccagg

SEQ ID NO: 9991 - DNA, 201 bp, Homo sapiens
aaaatacatcctcttcagccatggaaattctccttaccttttaaaactaagttacatgtttaatatcttataattaatttacgccaggtatggtggctcaygcctgccatcctagcactgtggaaggcagaggaaggcagatttgttgactccagaagttcaagatcagcctgggcaaaacccccatctatacaaaaaatt

SEQ ID NO: 9992 - DNA, 201 bp, Homo sapiens
ggaaggcagatttgttgactccagaagttcaagatcagcctgggcaaaacccccatctatacaaaaaattagaaaattagccaggcatagtagttcatgayggtagtcccagctactcaggaggctgagatcagtgggtcccttgaacccaggaggtcgacactgcagtgcatggtgatcatgccactgcactccagcctg

SEQ ID NO: 9993 - DNA, 201 bp, Homo sapiens
cttgttacttagtggctagttagtcacctaaagaaatagtgccccactggggcacatcatgggcctcaattgctaatgagttggacattcagaggtgtcgrcagctggatctgccttggtaggggggagtcagtgctgttggccccatacgtagcctcatgcctgccactgtggttgctccattcatgaactcatcctacc

SEQ ID NO: 9994 - DNA, 201 bp, Homo sapiens
ccccacaattcctcctctagccacatcttctgtgggatctgaccaggttctgtttttgttctaccccaggcagtgacagtgcccagggctctgatgtgtcyctcacagcttgtaaaggtgagagcttggagggcctgatgtgtgttgggtgttgggcggaacagtggacacagctgtgctatggggtttctttgcattgga

SEQ ID NO: 9995 - DNA, 201 bp, Homo sapiens
gtcggggccggacggggctcgggggactgggctgaccgtggggtcggggccaggttctcacaccatccagatgatgtatggctgcgacgtggggtcggackggcgcttcctccgcgggtaccggcaggacgcctacgacggcaaggattacatcgccttgaacgaggacctgcgctcttggaccgcggcggacatggcggc

SEQ ID NO: 9996 - DNA, 201 bp, Homo sapiens
gccggacggggctcgggggactgggctgaccgtggggtcggggccaggttctcacaccatccagatgatgtatggctgcgacgtggggtcggacgggcgcytcctccgcgggtaccggcaggacgcctacgacggcaaggattacatcgccttgaacgaggacctgcgctcttggaccgcggcggacatggcggctcagat

SEQ ID NO: 9997 - DNA, 201 bp, Homo sapiens
gggactgggctgaccgtggggtcggggccaggttctcacaccatccagatgatgtatggctgcgacgtggggtcggacgggcgcttcctccgcgggtaccrgcaggacgcctacgacggcaaggattacatcgccttgaacgaggacctgcgctcttggaccgcggcggacatggcggctcagatcacccagcgcaagtgg

SEQ ID NO: 9998 - DNA, 201 bp, Homo sapiens
agggcctgatgtgtgttgggtgttgggcggaacagtggacacagctgtgctatggggtttctttgcattggatgtattgagcatgcgatgggctgtttaargtgtgacccctcactgtgacagatatgaatttgttcatgaatatttttttctatagtgtgagacagctgccttgtgtgggactgagaggcaagagttgtt

SEQ ID NO: 9999 - DNA, 201 bp, Homo sapiens; identical to SEQ ID NO: 1184

SEQ ID NO: 10000 - DNA, 201 bp, Homo sapiens
atgtgtgttgggtgttgggcggaacagtggacacagctgtgctatggggtttctttgcattggatgtattgagcatgcgatgggctgtttaaagtgtgacycctcactgtgacagatatgaatttgttcatgaatatttttttctatagtgtgagacagctgccttgtgtgggactgagaggcaagagttgttcctgccct

SEQ ID NO: 10001 - DNA, 201 bp, Homo sapiens; identical to SEQ ID NO: 1185

SEQ ID NO: 10002 - DNA, 201 bp, Homo sapiens
tcattttcagtttaggccaaaaatccccccgggttggtcggggccggacggggctcgggggactgggctgaccgtggggtcggggccaggttctcacaccrtccagatgatgtatggctgcgacgtggggtcggacgggcgcttcctccgcgggtaccggcaggacgcctacgacggcaaggattacatcgccttgaacga

SEQ ID NO: 10003 - DNA, 201 bp, Homo sapiens
tgttgggcggaacagtggacacagctgtgctatggggtttctttgcattggatgtattgagcatgcgatgggctgtttaaagtgtgacccctcactgtgayagatatgaatttgttcatgaatatttttttctatagtgtgagacagctgccttgtgtgggactgagaggcaagagttgttcctgcccttccctttgtgac

SEQ ID NO: 10004 - DNA, 201 bp, Homo sapiens; identical to SEQ ID NO: 1187

SEQ ID NO: 10005 - DNA, 201 bp, Homo sapiens
gcggaacagtggacacagctgtgctatggggtttctttgcattggatgtattgagcatgcgatgggctgtttaaagtgtgacccctcactgtgacagataygaatttgttcatgaatatttttttctatagtgtgagacagctgccttgtgtgggactgagaggcaagagttgttcctgcccttccctttgtgacttgaag

SEQ ID NO: 10006 - DNA, 201 bp, Homo sapiens; identical to SEQ ID NO: 1188

SEQ ID NO: 10007 - DNA, 201 bp, Homo sapiens; identical to SEQ ID NO: 1189

SEQ ID NO: 10008 - DNA, 201 bp, Homo sapiens; identical to SEQ ID NO: 1190

SEQ ID NO: 10009 - DNA, 201 bp, Homo sapiens
gacgacacgcagttcgtgcggtttgacagcgacgccgcgagccagaggatggagccgcgggcaccgtggatagagcaggaggggccggagtattgggaccrgcagacacggaatgtgaaggcccagtcacagactgaccgagcgaacctggggaccctgcgcggctactacaaccagagcgaggccggtgagtgaccccgg

SEQ ID NO: 10010 - DNA, 201 bp, Homo sapiens
acacgcagttcgtgcggtttgacagcgacgccgcgagccagaggatggagccgcgggcaccgtggatagagcaggaggggccggagtattgggacctgcasacacggaatgtgaaggcccagtcacagactgaccgagcgaacctggggaccctgcgcggctactacaaccagagcgaggccggtgagtgaccccggcccg

SEQ ID NO: 10011 - DNA, 201 bp, Homo sapiens
gcagttcgtgcggtttgacagcgacgccgcgagccagaggatggagccgcgggcaccgtggatagagcaggaggggccggagtattgggacctgcagacasggaatgtgaaggcccagtcacagactgaccgagcgaacctggggaccctgcgcggctactacaaccagagcgaggccggtgagtgaccccggcccggggc

SEQ ID NO: 10012 - DNA, 201 bp, Homo sapiens
tcgtgcggtttgacagcgacgccgcgagccagaggatggagccgcgggcaccgtggatagagcaggaggggccggagtattgggacctgcagacacggaawgtgaaggcccagtcacagactgaccgagcgaacctggggaccctgcgcggctactacaaccagagcgaggccggtgagtgaccccggcccggggcgcagg

SEQ ID NO: 10013 - DNA, 201 bp, Homo sapiens
cgtgcggtttgacagcgacgccgcgagccagaggatggagccgcgggcaccgtggatagagcaggaggggccggagtattgggacctgcagacacggaatrtgaaggcccagtcacagactgaccgagcgaacctggggaccctgcgcggctactacaaccagagcgaggccggtgagtgaccccggcccggggcgcaggt

SEQ ID NO: 10014 - DNA, 201 bp, Homo sapiens
ccaccgggactcagattctccccagacgccgaggatggccgtcatggcgccccgaaccctcctcctgctactcttgggggccctggccctgacccagaccwgggcgggtgagtgcggggtcgtggggaaaccgcctctgcggggagaagcaaggggcccgcccggcggggacgcaggacccgggtagccgcgccgggagga

SEQ ID NO: 10015 - DNA, 201 bp, Homo sapiens
cagacgccgaggatggccgtcatggcgccccgaaccctcctcctgctactcttgggggccctggccctgacccagacctgggcgggtgagtgcggggtcgkggggaaaccgcctctgcggggagaagcaaggggcccgcccggcggggacgcaggacccgggtagccgcgccgggaggagggtcgggtgggtctcagccac

SEQ ID NO: 10016 - DNA, 201 bp, Homo sapiens
aacctggggaccctgcgcggctactacaaccagagcgaggccggtgagtgaccccggcccggggcgcaggtcacgacctctcatcccccacggacgggccrggtcgcccacagtctccgggtccgagatccaccccgaagccgcgggaccccgagacccttgccccgggagaggcccaggcgcctttacccggtttcattt

SEQ ID NO: 10017 - DNA, 201 bp, Homo sapiens
tttaaagtgtgacccctcactgtgacagatatgaatttgttcatgaatatttttttctatagtgtgagacagctgccttgtgtgggactgagaggcaagakttgttcctgcccttccctttgtgacttgaagaaccctgactttgtttctgcaaaggcacctgcatgtgtctgtgttcgtgtaggcataatgtgaggaggt

SEQ ID NO: 10018 - DNA, 201 bp, Homo sapiens; identical to SEQ ID NO: 1201
  misc_feature (1)...(201): n = A,T,C or G, or insertion/deletion polymorphism (see Tables 1-2)

SEQ ID NO: 10019 - DNA, 201 bp, Homo sapiens; identical to SEQ ID NO: 1202

SEQ ID NO: 10020 - DNA, 201 bp, Homo sapiens
gcctacgacggcaaggattacatcgccttgaacgaggacctgcgctcttggaccgcggcggacatggcggctcagatcacccagcgcaagtgggaggcggyccgtgtggcggagcagttgagagcctacctggagggcacgtgcgtggagtggctccgcagatacctggagaacgggaaggagacgctgcagcgcacgggt

SEQ ID NO: 10021 - DNA, 201 bp, Homo sapiens; identical to SEQ ID NO: 1204

SEQ ID NO: 10022 - DNA, 201 bp, Homo sapiens; identical to SEQ ID NO: 1206

SEQ ID NO: 10023 - DNA, 201 bp, Homo sapiens
tacgacggcaaggattacatcgccttgaacgaggacctgcgctcttggaccgcggcggacatggcggctcagatcacccagcgcaagtgggaggcggcccrtgtggcggagcagttgagagcctacctggagggcacgtgcgtggagtggctccgcagatacctggagaacgggaaggagacgctgcagcgcacgggtacc

SEQ ID NO: 10024 - DNA, 201 bp, Homo sapiens
gaggtggggctgaggtgtctccatctctgtctcaacttcatggtgcactgagctgtaacttcttccttccctattaaaattagaacctgagtataaatttmctttctcaaattcttgccatgagaggttgatgagttaattaaaggagaagattcctaaaatttgagagacaaaataaatggaacacatgagaaccttcca

SEQ ID NO: 10025 - DNA, 201 bp, Homo sapiens
cgacggcaaggattacatcgccttgaacgaggacctgcgctcttggaccgcggcggacatggcggctcagatcacccagcgcaagtgggaggcggcccgtstggcggagcagttgagagcctacctggagggcacgtgcgtggagtggctccgcagatacctggagaacgggaaggagacgctgcagcgcacgggtaccag

SEQ ID NO: 10026 - DNA, 201 bp, Homo sapiens
gacggcaaggattacatcgccttgaacgaggacctgcgctcttggaccgcggcggacatggcggctcagatcacccagcgcaagtgggaggcggcccgtghggcggagcagttgagagcctacctggagggcacgtgcgtggagtggctccgcagatacctggagaacgggaaggagacgctgcagcgcacgggtaccagg

SEQ ID NO: 10027 - DNA, 201 bp, Homo sapiens
gccttgaacgaggacctgcgctcttggaccgcggcggacatggcggctcagatcacccagcgcaagtgggaggcggcccgtgtggcggagcagttgagagyctacctggagggcacgtgcgtggagtggctccgcagatacctggagaacgggaaggagacgctgcagcgcacgggtaccaggggccacggggcgcctccc

SEQ ID NO: 10028 - DNA, 201 bp, Homo sapiens
aaattagaacctgagtataaatttactttctcaaattcttgccatgagaggttgatgagttaattaaaggagaagattcctaaaatttgagagacaaaatwaatggaacacatgagaaccttccagagtccacgtgttgcttatgctgatttgttgcaggggaggagagtagatggggctgtgcccagtttctgttccggc

SEQ ID NO: 10029 - DNA, 201 bp, Homo sapiens
aggacctgcgctcttggaccgcggcggacatggcggctcagatcacccagcgcaagtgggaggcggcccgtgtggcggagcagttgagagcctacctggakggcacgtgcgtggagtggctccgcagatacctggagaacgggaaggagacgctgcagcgcacgggtaccaggggccacggggcgcctccctgatcgcctg

SEQ ID NO: 10030 - DNA, 201 bp, Homo sapiens
acctgagtataaatttactttctcaaattcttgccatgagaggttgatgagttaattaaaggagaagattcctaaaatttgagagacaaaataaatggaasacatgagaaccttccagagtccacgtgttgcttatgctgatttgttgcaggggaggagagtagatggggctgtgcccagtttctgttccggccaccatgg

SEQ ID NO: 10031 - DNA, 201 bp, Homo sapiens
tgtggcggagcagttgagagcctacctggagggcacgtgcgtggagtggctccgcagatacctggagaacgggaaggagacgctgcagcgcacgggtaccrggggccacggggcgcctccctgatcgcctgtagatctcccgggctggcctcccacaaggaggggagacaattgggaccaacactagaatatcgccctccc

SEQ ID NO: 10032 - DNA, 201 bp, Homo sapiens
gggtaccaggggccacggggcgcctccctgatcgcctgtagatctcccgggctggcctcccacaaggaggggagacaattgggaccaacactagaatatcrccctccctctggtcctgagggagaggaatcctcctgggtttccagatcctgtaccagagagtgactctgaggttccgccctgctctctgacacaattaag

SEQ ID NO: 10033 - DNA, 201 bp, Homo sapiens
ggagaggaatcctcctgggtttccagatcctgtaccagagagtgactctgaggttccgccctgctctctgacacaattaagggataaaatctctgaaggartgacgggaagacgatccctcgaatactgatgagtggttccctttgacacacacaggcagcagccttgggcccgtgacttttcctctcaggccttgttctc

SEQ ID NO: 10034 - DNA, 201 bp, Homo sapiens; identical to SEQ ID NO: 1217

SEQ ID NO: 10035 - DNA, 201 bp, Homo sapiens
tgcggtttgacagcgacgccgcgagccagaggatggagccgcgggcaccgtggatagagcaggaggggccggagtattgggacctgcagacacggaatgtsaaggcccagtcacagactgaccgagcgaacctggggaccctgcgcggctactacaaccagagcgaggccggtgagtgaccccggcccggggcgcaggtca

SEQ ID NO: 10036 - DNA, 201 bp, Homo sapiens
acagcgacgccgcgagccagaggatggagccgcgggcaccgtggatagagcaggaggggccggagtattgggacctgcagacacggaatgtgaaggcccastcacagactgaccgagcgaacctggggaccctgcgcggctactacaaccagagcgaggccggtgagtgaccccggcccggggcgcaggtcacgacctctc

SEQ ID NO: 10037 - DNA, 201 bp, Homo sapiens
cagcgacgccgcgagccagaggatggagccgcgggcaccgtggatagagcaggaggggccggagtattgggacctgcagacacggaatgtgaaggcccagkcacagactgaccgagcgaacctggggaccctgcgcggctactacaaccagagcgaggccggtgagtgaccccggcccggggcgcaggtcacgacctctca

SEQ ID NO: 10038 - DNA, 201 bp, Homo sapiens
gccgcgagccagaggatggagccgcgggcaccgtggatagagcaggaggggccggagtattgggacctgcagacacggaatgtgaaggcccagtcacagaytgaccgagcgaacctggggaccctgcgcggctactacaaccagagcgaggccggtgagtgaccccggcccggggcgcaggtcacgacctctcatccccca

SEQ ID NO: 10039 - DNA, 201 bp, Homo sapiens
cgcgagccagaggatggagccgcgggcaccgtggatagagcaggaggggccggagtattgggacctgcagacacggaatgtgaaggcccagtcacagactsaccgagcgaacctggggaccctgcgcggctactacaaccagagcgaggccggtgagtgaccccggcccggggcgcaggtcacgacctctcatcccccacg

SEQ ID NO: 10040 - DNA, 201 bp, Homo sapiens
cagaggatggagccgcgggcaccgtggatagagcaggaggggccggagtattgggacctgcagacacggaatgtgaaggcccagtcacagactgaccgaghgaacctggggaccctgcgcggctactacaaccagagcgaggccggtgagtgaccccggcccggggcgcaggtcacgacctctcatcccccacggacgggc

SEQ ID NO: 10041 - DNA, 201 bp, Homo sapiens
ggacgcaggacccgggtagccgcgccgggaggagggtcgggtgggtctcagccactcctcgcccccaggctcccactccatgaggtatttcaccacatccrtgtcccggcccggccgcggggagccccgcttcatcgccgtgggctacgtggacgacacgcagttcgtgcggtttgacagcgacgccgcgagccagaggat

SEQ ID NO: 10042 - DNA, 201 bp, Homo sapiens
gaatttgttcatgaatatttttttctatagtgtgagacagctgccttgtgtgggactgagaggcaagagttgttcctgcccttccctttgtgacttgaagwaccctgactttgtttctgcaaaggcacctgcatgtgtctgtgttcgtgtaggcataatgtgaggaggtggggagaccaccccacccccatgtccaccatg

SEQ ID NO: 10043 - DNA, 201 bp, Homo sapiens; identical to SEQ ID NO: 1236

SEQ ID NO: 10044 - DNA, 201 bp, Homo sapiens
cctgagtataaatttactttctcaaattcttgccatgagaggttgatgagttaattaaaggagaagattcctaaaatttgagagacaaaataaatggaacrcatgagaaccttccagagtccacgtgttgcttatgctgatttgttgcaggggaggagagtagatggggctgtgcccagtttctgttccggccaccatggg

SEQ ID NO: 10045 - DNA, 201 bp, Homo sapiens
cctgggcgggtgagtgcggggtcgtggggaaaccgcctctgcggggagaagcaaggggcccgcccggcggggacgcaggacccgggtagccgcgccgggasgagggtcgggtgggtctcagccactcctcgcccccaggctcccactccatgaggtatttcaccacatccgtgtcccggcccggccgcggggagccccgct

SEQ ID NO: 10046 - DNA, 201 bp, Homo sapiens
cacatgtgtgctggaggagtgtcccatgacagatgcaaaatgcctgaatgatctgactcttcctgacagacgcccccaaaacgcatatgactcaccacgcygtctctgaccatgaagccaccctgaggtgctgggccctgagcttctaccctgcggagatcacactgacctggcagcgggatggggaggaccagacccagg

SEQ ID NO: 10047 - DNA, 201 bp, Homo sapiens
aataaatggaacacatgagaaccttccagagtccacgtgttgcttatgctgatttgttgcaggggaggagagtagatggggctgtgcccagtttctgttcyggccaccatgggctttatgtggtcactgcttggctgggtcatctttgctgctccattgtccttggcccttcagtagaaccttgtcccaccaagacctgtg

SEQ ID NO: 10048 - DNA, 201 bp, Homo sapiens
tccgccctgctctctgacacaattaagggataaaatctctgaaggaatgacgggaagacgatccctcgaatactgatgagtggttccctttgacacacacmggcagcagccttgggcccgtgacttttcctctcaggccttgttctctgcttcacactcaatgtgtgtgggggtctgagtccagcacttctgagtccctca

SEQ ID NO: 10049 - DNA, 201 bp, Homo sapiens
cagtttaggccaaaaatccccccgggttggtcggggccggacggggctcgggggactgggctgaccgtggggtcggggccaggttctcacaccatccagakgatgtatggctgcgacgtggggtcggacgggcgcttcctccgcgggtaccggcaggacgcctacgacggcaaggattacatcgccttgaacgaggacctg

SEQ ID NO: 10050 - DNA, 201 bp, Homo sapiens
cacaggcagcagccttgggcccgtgacttttcctctcaggccttgttctctgcttcacactcaatgtgtgtgggggtctgagtccagcacttctgagtccytcagcctccactcaggtcaggaccagaagtcgctgttccctcttcagggactagaattttccacggaataggagattatcccaggtgcctgtgtccaggc

SEQ ID NO: 10051 - DNA, 201 bp, Homo sapiens
ggggtctgagtccagcacttctgagtccctcagcctccactcaggtcaggaccagaagtcgctgttccctcttcagggactagaattttccacggaatagragattatcccaggtgcctgtgtccaggctggtgtctgggttctgtgctcccttccccatcccaggtgtcctgtccattctcaagatagccacatgtgtgc

SEQ ID NO: 10052 - DNA, 201 bp, Homo sapiens
accagaagtcgctgttccctcttcagggactagaattttccacggaataggagattatcccaggtgcctgtgtccaggctggtgtctgggttctgtgctcycttccccatcccaggtgtcctgtccattctcaagatagccacatgtgtgctggaggagtgtcccatgacagatgcaaaatgcctgaatgatctgactctt

SEQ ID NO: 10053 - DNA, 201 bp, Homo sapiens
gttccctcttcagggactagaattttccacggaataggagattatcccaggtgcctgtgtccaggctggtgtctgggttctgtgctcccttccccatcccrggtgtcctgtccattctcaagatagccacatgtgtgctggaggagtgtcccatgacagatgcaaaatgcctgaatgatctgactcttcctgacagacgcc

SEQ ID NO: 10054 - DNA, 201 bp, Homo sapiens
ttctgtgctcccttccccatcccaggtgtcctgtccattctcaagatagccacatgtgtgctggaggagtgtcccatgacagatgcaaaatgcctgaatgwtctgactcttcctgacagacgcccccaaaacgcatatgactcaccacgctgtctctgaccatgaagccaccctgaggtgctgggccctgagcttctaccc

SEQ ID NO: 10055 - DNA, 201 bp, Homo sapiens
cctgtccattctcaagatagccacatgtgtgctggaggagtgtcccatgacagatgcaaaatgcctgaatgatctgactcttcctgacagacgcccccaaracgcatatgactcaccacgctgtctctgaccatgaagccaccctgaggtgctgggccctgagcttctaccctgcggagatcacactgacctggcagcggg

SEQ ID NO: 10056 - DNA, 201 bp, Homo sapiens
ggagtgtcccatgacagatgcaaaatgcctgaatgatctgactcttcctgacagacgcccccaaaacgcatatgactcaccacgctgtctctgaccatgargccaccctgaggtgctgggccctgagcttctaccctgcggagatcacactgacctggcagcgggatggggaggaccagacccaggacacggagctcgtgg

SEQ ID NO: 10057 - DNA, 201 bp, Homo sapiens
tcccatgacagatgcaaaatgcctgaatgatctgactcttcctgacagacgcccccaaaacgcatatgactcaccacgctgtctctgaccatgaagccacyctgaggtgctgggccctgagcttctaccctgcggagatcacactgacctggcagcgggatggggaggaccagacccaggacacggagctcgtggagacca

SEQ ID NO: 10058 - DNA, 201 bp, Homo sapiens
gaggatggagccgcgggcaccgtggatagagcaggaggggccggagtattgggacctgcagacacggaatgtgaaggcccagtcacagactgaccgagcgracctggggaccctgcgcggctactacaaccagagcgaggccggtgagtgaccccggcccggggcgcaggtcacgacctctcatcccccacggacgggccg

SEQ ID NO: 10059 - DNA, 201 bp, Homo sapiens
ggagccgcgggcaccgtggatagagcaggaggggccggagtattgggacctgcagacacggaatgtgaaggcccagtcacagactgaccgagcgaacctgsggaccctgcgcggctactacaaccagagcgaggccggtgagtgaccccggcccggggcgcaggtcacgacctctcatcccccacggacgggccgggtcgc

SEQ ID NO: 10060 - DNA, 201 bp, Homo sapiens
ccggagtattgggacctgcagacacggaatgtgaaggcccagtcacagactgaccgagcgaacctggggaccctgcgcggctactacaaccagagcgaggmcggtgagtgaccccggcccggggcgcaggtcacgacctctcatcccccacggacgggccgggtcgcccacagtctccgggtccgagatccaccccgaagc

SEQ ID NO: 10061 - DNA, 201 bp, Homo sapiens
cgacacgcagttcgtgcggtttgacagcgacgccgcgagccagaggatggagccgcgggcaccgtggatagagcaggaggggccggagtattgggacctgvagacacggaatgtgaaggcccagtcacagactgaccgagcgaacctggggaccctgcgcggctactacaaccagagcgaggccggtgagtgaccccggcc

SEQ ID NO: 10062 - DNA, 201 bp, Homo sapiens
tgaccgtggggtcggggccaggttctcacaccatccagatgatgtatggctgcgacgtggggtcggacgggcgcttcctccgcgggtaccggcaggacgcytacgacggcaaggattacatcgccttgaacgaggacctgcgctcttggaccgcggcggacatggcggctcagatcacccagcgcaagtgggaggcggccc

SEQ ID NO: 10063 - DNA, 201 bp, Homo sapiens; identical to SEQ ID NO: 1260

SEQ ID NO: 10064 - DNA, 201 bp, Homo sapiens; identical to SEQ ID NO: 1262

SEQ ID NO: 10065 - DNA, 201 bp, Homo sapiens; identical to SEQ ID NO: 1264

SEQ ID NO: 10066 - DNA, 201 bp, Homo sapiens
agctcttgggccaagactcagggagacattgagacagagcgcttggcacagaagcagaggggtcagggcgaagtcccagggccccaggcgtggctctcagrgtctcaggccccgaaggcggtgtatggattggggagtcccagccttggggattccccaactccgcagtttcttttctccctctcccaacctatgtagggt

SEQ ID NO: 10067 - DNA, 201 bp, Homo sapiens; identical to SEQ ID NO: 1267

SEQ ID NO: 10068 - DNA, 201 bp, Homo sapiens
gacagatgcaaaatgcctgaatgatctgactcttcctgacagacgcccccaaaacgcatatgactcaccacgctgtctctgaccatgaagccaccctgagrtgctgggccctgagcttctaccctgcggagatcacactgacctggcagcgggatggggaggaccagacccaggacacggagctcgtggagaccaggcctg

SEQ ID NO: 10069 - DNA, 201 bp, Homo sapiens
tgcctgaatgatctgactcttcctgacagacgcccccaaaacgcatatgactcaccacgctgtctctgaccatgaagccaccctgaggtgctgggccctgrgcttctaccctgcggagatcacactgacctggcagcgggatggggaggaccagacccaggacacggagctcgtggagaccaggcctgcaggggatggaac

SEQ ID NO: 10070 - DNA, 201 bp, Homo sapiens; identical to SEQ ID NO: 1277

SEQ ID NO: 10071 - DNA, 201 bp, Homo sapiens
tctgtggtgaacctgagtcctggagtgagtgcacccacctccctcagggtcaggagtgaatgctttaggaaccctccttttcagtgacctgcaaaagataragggcacatttactgtgataacccagagtatcagccaagggggcttgaccttcaaggagttgtggggaaggttaataaagggtggtgtcccagggtcaga

SEQ ID NO: 10072 - DNA, 201 bp, Homo sapiens; identical to SEQ ID NO: 1279

SEQ ID NO: 10073 - DNA, 201 bp, Homo sapiens
ggactgggctgaccgtggggtcggggccaggttctcacaccatccagatgatgtatggctgcgacgtggggtcggacgggcgcttcctccgcgggtaccgscaggacgcctacgacggcaaggattacatcgccttgaacgaggacctgcgctcttggaccgcggcggacatggcggctcagatcacccagcgcaagtggg

SEQ ID NO: 10074 - DNA, 201 bp, Homo sapiens
gagatcacactgacctggcagcgggatggggaggaccagacccaggacacggagctcgtggagaccaggcctgcaggggatggaaccttccagaagtgggyggctgtggtggtgccttctggacaggagcagagatacacctgccatgtgcagcatgagggtttgcccaagcccctcaccctgagatggggtaaggaggga

SEQ ID NO: 10075 - DNA, 201 bp, Homo sapiens
gatcacactgacctggcagcgggatggggaggaccagacccaggacacggagctcgtggagaccaggcctgcaggggatggaaccttccagaagtgggcgkctgtggtggtgccttctggacaggagcagagatacacctgccatgtgcagcatgagggtttgcccaagcccctcaccctgagatggggtaaggagggaga

SEQ ID NO: 10076 - DNA, 201 bp, Homo sapiens
accgcctctgcggggagaagcaaggggcccgcccggcggggacgcaggacccgggtagccgcgccgggaggagggtcgggtgggtctcagccactcctcgyccccaggctcccactccatgaggtatttcaccacatccgtgtcccggcccggccgcggggagccccgcttcatcgccgtgggctacgtggacgacacgca

SEQ ID NO: 10077 - DNA, 201 bp, Homo sapiens
gggaaaccgcctctgcggggagaagcaaggggcccgcccggcggggacgcaggacccgggtagccgcgccgggaggagggtcgggtgggtctcagccactsctcgcccccaggctcccactccatgaggtatttcaccacatccgtgtcccggcccggccgcggggagccccgcttcatcgccgtgggctacgtggacgac

SEQ ID NO: 10078 - DNA, 201 bp, Homo sapiens
cctggcagcgggatggggaggaccagacccaggacacggagctcgtggagaccaggcctgcaggggatggaaccttccagaagtgggcggctgtggtggtrccttctggacaggagcagagatacacctgccatgtgcagcatgagggtttgcccaagcccctcaccctgagatggggtaaggagggagacgggggtgtca

SEQ ID NO: 10079 - DNA, 201 bp, Homo sapiens
aaaaagcattgccatgtgcacaccaataactcttacttattccaacctgtaaaatccatctctttatccaacttctgccacccccataaaatctattttgygcgcgttcgtagtatctctttgaattaacagatatttgttgtattaagccactaaattttgaggtagtttgtgacacagcagttaataactattaaggct

SEQ ID NO: 10080 - DNA, 201 bp, Homo sapiens
ttgccatgtgcacaccaataactcttacttattccaacctgtaaaatccatctctttatccaacttctgccacccccataaaatctattttgcgcgcgttygtagtatctctttgaattaacagatatttgttgtattaagccactaaattttgaggtagtttgtgacacagcagttaataactattaaggctttcttaag

SEQ ID NO: 10081 - DNA, 201 bp, Homo sapiens
tcagggcccctcaccttcccctcttttcccagagccgtcttcccagcccaccatccccatcgtgggcatcattgctggcctggttctctttggagctgtgwtcactggagctgtggtcgctgctgtgaggtggaggaggaagagctcaggtggggaagggatgaagggtgggtctgagatttcttgtctcactgagggttc

SEQ ID NO: 10082 - DNA, 201 bp, Homo sapiens
gcatacgttctagatgcaggcttgtccaacccgcggctcgtgggctgcatgtggcccaggacaattttgaatgtgaggacttttttgcttatctgtggtgmacctgagtcctggagtgagtgcacccacctccctcagggtcaggagtgaatgctttaggaaccctccttttcagtgacctgcaaaagataaagggcacat

SEQ ID NO: 10083 - DNA, 201 bp, Homo sapiens
ggatggggaggaccagacccaggacacggagctcgtggagaccaggcctgcaggggatggaaccttccagaagtgggcggctgtggtggtgccttctggavaggagcagagatacacctgccatgtgcagcatgagggtttgcccaagcccctcaccctgagatggggtaaggagggagacgggggtgtcatgtcttttag

SEQ ID NO: 10084 - DNA, 201 bp, Homo sapiens
ggaggaccagacccaggacacggagctcgtggagaccaggcctgcaggggatggaaccttccagaagtgggcggctgtggtggtgccttctggacaggagmagagatacacctgccatgtgcagcatgagggtttgcccaagcccctcaccctgagatggggtaaggagggagacgggggtgtcatgtcttttagggaaag

SEQ ID NO: 10085 - DNA, 201 bp, Homo sapiens
agtgcggggtcgtggggaaaccgcctctgcggggagaagcaaggggcccgcccggcggggacgcaggacccgggtagccgcgccgggaggagggtcgggtrggtctcagccactcctcgcccccaggctcccactccatgaggtatttcaccacatccgtgtcccggcccggccgcggggagccccgcttcatcgccgtgg

SEQ ID NO: 10086 - DNA, 201 bp, Homo sapiens
cagacctgggcgggtgagtgcggggtcgtggggaaaccgcctctgcggggagaagcaaggggcccgcccggcggggacgcaggacccgggtagccgcgcckggaggagggtcgggtgggtctcagccactcctcgcccccaggctcccactccatgaggtatttcaccacatccgtgtcccggcccggccgcggggagccc

SEQ ID NO: 10087 - DNA, 201 bp, Homo sapiens
ggccctgacccagacctgggcgggtgagtgcggggtcgtggggaaaccgcctctgcggggagaagcaaggggcccgcccggcggggacgcaggacccgggdagccgcgccgggaggagggtcgggtgggtctcagccactcctcgcccccaggctcccactccatgaggtatttcaccacatccgtgtcccggcccggccg

SEQ ID NO: 10088 - DNA, 201 bp, Homo sapiens; identical to SEQ ID NO: 1199

SEQ ID NO: 10089 - DNA, 201 bp, Homo sapiens
ctgcagcaggaacatgcccttaagacacagatcactcatgctattgtttgtggcttaagaatgcctttaagtggttttccaccctgggcgggccaggtgtyccttgccctcattcccgtaaacccacaaccttccagcttgggtgctagggccattatgaacatgttatggtgctgcagaaattttgtttatggccagtct

SEQ ID NO: 10090 - DNA, 201 bp, Homo sapiens
caccaaactccatgggatgatttttcttctagaagagtccaggtggacaggtaaggagtgggagtcagggagtccagttcagggacagagattacgggatraaaagtgaaaggagagggacggggcccatgccgagggtttctcccttgtttctcagacagctcttgggccaagactcagggagacattgagacagagcgc

SEQ ID NO: 10091 - DNA, 201 bp, Homo sapiens
atgaaaagtgaaaggagagggacggggcccatgccgagggtttctcccttgtttctcagacagctcttgggccaagactcagggagacattgagacagagmgcttggcacagaagcagaggggtcagggcgaagtcccagggccccaggcgtggctctcagggtctcaggccccgaaggcggtgtatggattggggagtcc

SEQ ID NO: 10092 - DNA, 201 bp, Homo sapiens
aggagagggacggggcccatgccgagggtttctcccttgtttctcagacagctcttgggccaagactcagggagacattgagacagagcgcttggcacagragcagaggggtcagggcgaagtcccagggccccaggcgtggctctcagggtctcaggccccgaaggcggtgtatggattggggagtcccagccttgggga

SEQ ID NO: 10093 - DNA, 201 bp, Homo sapiens
aaaccagaagcaatattgtgccccagggtgggtcttgtggagggtactgcaggtattataggggtggcactgccattacagacctgaacgatgcggggtgktgttgggattgcctgttatctccatataactcagcaatctgtacctgcagaagcctgatatggctaaagaatgaatggaattactccagacttgaccaag

SEQ ID NO: 10094 - DNA, 201 bp, Homo sapiens
aaggagggagacgggggtgtcatgtcttttagggaaagcaggagcctctctgacctttagcagggtcagggcccctcaccttcccctcttttcccagagcygtcttcccagcccaccatccccatcgtgggcatcattgctggcctggttctctttggagctgtgatcactggagctgtggtcgctgctgtgaggtggagg

SEQ ID NO: 10095 - DNA, 201 bp, Homo sapiens
acagatatgaatttgttcatgaatatttttttctatagtgtgagacagctgccttgtgtgggactgagaggcaagagttgttcctgcccttccctttgtgrcttgaagaaccctgactttgtttctgcaaaggcacctgcatgtgtctgtgttcgtgtaggcataatgtgaggaggtggggagaccaccccacccccatgt

SEQ ID NO: 10096 - DNA, 201 bp, Homo sapiens
ccctggccctgacccagacctgggcgggtgagtgcggggtcgtggggaaaccgcctctgcggggagaagcaaggggcccgcccggcggggacgcaggaccsgggtagccgcgccgggaggagggtcgggtgggtctcagccactcctcgcccccaggctcccactccatgaggtatttcaccacatccgtgtcccggcccg

SEQ ID NO: 10097 - DNA, 201 bp, Homo sapiens
tcctgctactcttgggggccctggccctgacccagacctgggcgggtgagtgcggggtcgtggggaaaccgcctctgcggggagaagcaaggggcccgccyggcggggacgcaggacccgggtagccgcgccgggaggagggtcgggtgggtctcagccactcctcgcccccaggctcccactccatgaggtatttcacca

SEQ ID NO: 10098 - DNA, 201 bp, Homo sapiens
ccaagccaaaccagaagcaatattgtgccccagggtgggtcttgtggagggtactgcaggtattataggggtggcactgccattacagacctgaacgatgyggggtggtgttgggattgcctgttatctccatataactcagcaatctgtacctgcagaagcctgatatggctaaagaatgaatggaattactccagactt

SEQ ID NO: 10099 - DNA, 201 bp, Homo sapiens
tcctcctgctactcttgggggccctggccctgacccagacctgggcgggtgagtgcggggtcgtggggaaaccgcctctgcggggagaagcaaggggccckcccggcggggacgcaggacccgggtagccgcgccgggaggagggtcgggtgggtctcagccactcctcgcccccaggctcccactccatgaggtatttca

SEQ ID NO: 10100 - DNA, 201 bp, Homo sapiens
tgtcatgtcttttagggaaagcaggagcctctctgacctttagcagggtcagggcccctcaccttcccctcttttcccagagccgtcttcccagcccaccrtccccatcgtgggcatcattgctggcctggttctctttggagctgtgatcactggagctgtggtcgctgctgtgaggtggaggaggaagagctcaggtgg

SEQ ID NO: 10101 - DNA, 201 bp, Homo sapiens
tctctgacctttagcagggtcagggcccctcaccttcccctcttttcccagagccgtcttcccagcccaccatccccatcgtgggcatcattgctggcctrgttctctttggagctgtgatcactggagctgtggtcgctgctgtgaggtggaggaggaagagctcaggtggggaagggatgaagggtgggtctgagattt

SEQ ID NO: 10102 - DNA, 201 bp, Homo sapiens
gggactcagattctccccagacgccgaggatggccgtcatggcgccccgaaccctcctcctgctactcttgggggccctggccctgacccagacctgggcrggtgagtgcggggtcgtggggaaaccgcctctgcggggagaagcaaggggcccgcccggcggggacgcaggacccgggtagccgcgccgggaggagggtc

SEQ ID NO: 10103 - DNA, 201 bp, Homo sapiens
gggtcagggcccctcaccttcccctcttttcccagagccgtcttcccagcccaccatccccatcgtgggcatcattgctggcctggttctctttggagctrtgatcactggagctgtggtcgctgctgtgaggtggaggaggaagagctcaggtggggaagggatgaagggtgggtctgagatttcttgtctcactgaggg

SEQ ID NO: 10104 - DNA, 201 bp, Homo sapiens
ggggagaagcaaggggcccgcccggcggggacgcaggacccgggtagccgcgccgggaggagggtcgggtgggtctcagccactcctcgcccccaggctcycactccatgaggtatttcaccacatccgtgtcccggcccggccgcggggagccccgcttcatcgccgtgggctacgtggacgacacgcagttcgtgcggt

SEQ ID NO: 10105 - DNA, 201 bp, Homo sapiens
gggcccctcaccttcccctcttttcccagagccgtcttcccagcccaccatccccatcgtgggcatcattgctggcctggttctctttggagctgtgatcrctggagctgtggtcgctgctgtgaggtggaggaggaagagctcaggtggggaagggatgaagggtgggtctgagatttcttgtctcactgagggttccaa

SEQ ID NO: 10106 - DNA, 201 bp, Homo sapiens; identical to SEQ ID NO: 1232

SEQ ID NO: 10107 - DNA, 201 bp, Homo sapiens
ttctaaagtccgcacgcacccaccgggactcagattctccccagacgccgaggatggccgtcatggcgccccgaaccctcctcctgctactcttgggggcyctggccctgacccagacctgggcgggtgagtgcggggtcgtggggaaaccgcctctgcggggagaagcaaggggcccgcccggcggggacgcaggacccg

SEQ ID NO: 10108 - DNA, 201 bp, Homo sapiens; identical to SEQ ID NO: 1235

SEQ ID NO: 10109 - DNA, 201 bp, Homo sapiens
ggtggggaagggatgaagggtgggtctgagatttcttgtctcactgagggttccaagacccaggtagaagtgtgccctgcctcgttactgggaagcaccayccacaattatgggcctacccagcctgggccctgtgtgccagcacttactcttttgtaaagcacctgttaaaatgaaggacagatttatcaccttgattac

SEQ ID NO: 10110 - DNA, 201 bp, Homo sapiens
cgggtttccagagaagccaatcagtgtcgtcgcggtcgcggttctaaagtccgcacgcacccaccgggactcagattctccccagacgccgaggatggccrtcatggcgccccgaaccctcctcctgctactcttgggggccctggccctgacccagacctgggcgggtgagtgcggggtcgtggggaaaccgcctctgcg

SEQ ID NO: 10111 - DNA, 201 bp, Homo sapiens
gcccggcggggacgcaggacccgggtagccgcgccgggaggagggtcgggtgggtctcagccactcctcgcccccaggctcccactccatgaggtatttcwccacatccgtgtcccggcccggccgcggggagccccgcttcatcgccgtgggctacgtggacgacacgcagttcgtgcggtttgacagcgacgccgcgag

SEQ ID NO: 10112 - DNA, 201 bp, Homo sapiens
ccacaattatgggcctacccagcctgggccctgtgtgccagcacttactcttttgtaaagcacctgttaaaatgaaggacagatttatcaccttgattacrgcggtgatgggacctgatcccagcagtcacaagtcacaggggaaggtccctgaggaccttcaggagggcggttggtccaggacccacacctgctttcttc

SEQ ID NO: 10113 - DNA, 201 bp, Homo sapiens
gtagccgcgccgggaggagggtcgggtgggtctcagccactcctcgcccccaggctcccactccatgaggtatttcaccacatccgtgtcccggcccggcmgcggggagccccgcttcatcgccgtgggctacgtggacgacacgcagttcgtgcggtttgacagcgacgccgcgagccagaggatggagccgcgggcacc

SEQ ID NO: 10114 - DNA, 201 bp, Homo sapiens
tccagagaagccaatcagtgtcgtcgcggtcgcggttctaaagtccgcacgcacccaccgggactcagattctccccagacgccgaggatggccgtcatgscgccccgaaccctcctcctgctactcttgggggccctggccctgacccagacctgggcgggtgagtgcggggtcgtggggaaaccgcctctgcggggaga

SEQ ID NO: 10115 - DNA, 201 bp, Homo sapiens
cagagaagccaatcagtgtcgtcgcggtcgcggttctaaagtccgcacgcacccaccgggactcagattctccccagacgccgaggatggccgtcatggckccccgaaccctcctcctgctactcttgggggccctggccctgacccagacctgggcgggtgagtgcggggtcgtggggaaaccgcctctgcggggagaag

SEQ ID NO: 10116 - DNA, 201 bp, Homo sapiens
gttctaaagtccgcacgcacccaccgggactcagattctccccagacgccgaggatggccgtcatggcgccccgaaccctcctcctgctactcttgggggycctggccctgacccagacctgggcgggtgagtgcggggtcgtggggaaaccgcctctgcggggagaagcaaggggcccgcccggcggggacgcaggaccc

SEQ ID NO: 10117 - DNA, 201 bp, Homo sapiens
gggttggtcggggccggacggggctcgggggactgggctgaccgtggggtcggggccaggttctcacaccatccagatgatgtatggctgcgacgtggggycggacgggcgcttcctccgcgggtaccggcaggacgcctacgacggcaaggattacatcgccttgaacgaggacctgcgctcttggaccgcggcggacat

SEQ ID NO: 10118 - DNA, 201 bp, Homo sapiens
gtccattctcaagatagccacatgtgtgctggaggagtgtcccatgacagatgcaaaatgcctgaatgatctgactcttcctgacagacgcccccaaaacrcatatgactcaccacgctgtctctgaccatgaagccaccctgaggtgctgggccctgagcttctaccctgcggagatcacactgacctggcagcgggatg

SEQ ID NO: 10119 - DNA, 201 bp, Homo sapiens
caagatagccacatgtgtgctggaggagtgtcccatgacagatgcaaaatgcctgaatgatctgactcttcctgacagacgcccccaaaacgcatatgacycaccacgctgtctctgaccatgaagccaccctgaggtgctgggccctgagcttctaccctgcggagatcacactgacctggcagcgggatggggaggacc

SEQ ID NO: 10120 - DNA, 201 bp, Homo sapiens
acatgtgtgctggaggagtgtcccatgacagatgcaaaatgcctgaatgatctgactcttcctgacagacgcccccaaaacgcatatgactcaccacgctrtctctgaccatgaagccaccctgaggtgctgggccctgagcttctaccctgcggagatcacactgacctggcagcgggatggggaggaccagacccagga

SEQ ID NO: 10121 - DNA, 201 bp, Homo sapiens
cagtgtcgtcgcggtcgcggttctaaagtccgcacgcacccaccgggactcagattctccccagacgccgaggatggccgtcatggcgccccgaaccctcstcctgctactcttgggggccctggccctgacccagacctgggcgggtgagtgcggggtcgtggggaaaccgcctctgcggggagaagcaaggggcccgcc

SEQ ID NO: 10122 - DNA, 201 bp, Homo sapiens
cgaaccctcctcctgctactcttgggggccctggccctgacccagacctgggcgggtgagtgcggggtcgtggggaaaccgcctctgcggggagaagcaasgggcccgcccggcggggacgcaggacccgggtagccgcgccgggaggagggtcgggtgggtctcagccactcctcgcccccaggctcccactccatgagg

SEQ ID NO: 10123 - DNA, 201 bp, Homo sapiens
cgtcatggcgccccgaaccctcctcctgctactcttgggggccctggccctgacccagacctgggcgggtgagtgcggggtcgtggggaaaccgcctctgyggggagaagcaaggggcccgcccggcggggacgcaggacccgggtagccgcgccgggaggagggtcgggtgggtctcagccactcctcgcccccaggctc

SEQ ID NO: 10124 - DNA, 201 bp, Homo sapiens
cccggcggggacgcaggacccgggtagccgcgccgggaggagggtcgggtgggtctcagccactcctcgcccccaggctcccactccatgaggtatttcahcacatccgtgtcccggcccggccgcggggagccccgcttcatcgccgtgggctacgtggacgacacgcagttcgtgcggtttgacagcgacgccgcgagc

SEQ ID NO: 10125 - DNA, 201 bp, Homo sapiens
gcggggacgcaggacccgggtagccgcgccgggaggagggtcgggtgggtctcagccactcctcgcccccaggctcccactccatgaggtatttcaccacmtccgtgtcccggcccggccgcggggagccccgcttcatcgccgtgggctacgtggacgacacgcagttcgtgcggtttgacagcgacgccgcgagccaga

SEQ ID NO: 10126 - DNA, 201 bp, Homo sapiens
ttcatgtttcctgatcccgccctgggtctgcagtcacacatttctggaaacttctctgaggtccaagacttggaggttcctctaggaccttaaggccctgrctcctttctggtatctcacaggacattttcttcccacagatagaaaaggagggagctactctcaggctgcaagtaagtatgaaggaggctgatgcctgag

SEQ ID NO: 10127 - DNA, 201 bp, Homo sapiens
agtttaggccaaaaatccccccgggttggtcggggccggacggggctcgggggactgggctgaccgtggggtcggggccaggttctcacaccatccagatratgtatggctgcgacgtggggtcggacgggcgcttcctccgcgggtaccggcaggacgcctacgacggcaaggattacatcgccttgaacgaggacctgc

SEQ ID NO: 10128 - DNA, 201 bp, Homo sapiens
aggccaaaaatccccccgggttggtcggggccggacggggctcgggggactgggctgaccgtggggtcggggccaggttctcacaccatccagatgatgtwtggctgcgacgtggggtcggacgggcgcttcctccgcgggtaccggcaggacgcctacgacggcaaggattacatcgccttgaacgaggacctgcgctct

SEQ ID NO: 10129 - DNA, 201 bp, Homo sapiens
cacacatttctggaaacttctctgaggtccaagacttggaggttcctctaggaccttaaggccctgactcctttctggtatctcacaggacattttcttcycacagatagaaaaggagggagctactctcaggctgcaagtaagtatgaaggaggctgatgcctgaggtccttgggatattgtgtttgggagcccatgggg

SEQ ID NO: 10130 - DNA, 201 bp, Homo sapiens
agccgcgccgggaggagggtcgggtgggtctcagccactcctcgcccccaggctcccactccatgaggtatttcaccacatccgtgtcccggcccggccgyggggagccccgcttcatcgccgtgggctacgtggacgacacgcagttcgtgcggtttgacagcgacgccgcgagccagaggatggagccgcgggcaccgt

SEQ ID NO: 10131 - DNA, 201 bp, Homo sapiens
tcttcccacagatagaaaaggagggagctactctcaggctgcaagtaagtatgaaggaggctgatgcctgaggtccttgggatattgtgtttgggagcccrtgggggagctcacccaccccacaattcctcctctagccacatcttctgtgggatctgaccaggttctgtttttgttctaccccaggcagtgacagtgccc

SEQ ID NO: 10132 - DNA, 201 bp, Homo sapiens
gccacatgtgtgctggaggagtgtcccatgacagatgcaaaatgcctgaatgatctgactcttcctgacagacgcccccaaaacgcatatgactcaccacsctgtctctgaccatgaagccaccctgaggtgctgggccctgagcttctaccctgcggagatcacactgacctggcagcgggatggggaggaccagaccca

SEQ ID NO: 10133 - DNA, 201 bp, Homo sapiens
gatagaaaaggagggagctactctcaggctgcaagtaagtatgaaggaggctgatgcctgaggtccttgggatattgtgtttgggagcccatgggggagcycacccaccccacaattcctcctctagccacatcttctgtgggatctgaccaggttctgtttttgttctaccccaggcagtgacagtgcccagggctctga

SEQ ID NO: 10134 - DNA, 201 bp, Homo sapiens
ggagggagctactctcaggctgcaagtaagtatgaaggaggctgatgcctgaggtccttgggatattgtgtttgggagcccatgggggagctcacccaccycacaattcctcctctagccacatcttctgtgggatctgaccaggttctgtttttgttctaccccaggcagtgacagtgcccagggctctgatgtgtctct

SEQ ID NO: 10135 - DNA, 201 bp, Homo sapiens
gaccaggcctgcaggggatggaaccttccagaagtgggcggctgtggtggtgccttctggacaggagcagagatacacctgccatgtgcagcatgagggtytgcccaagcccctcaccctgagatggggtaaggagggagacgggggtgtcatgtcttttagggaaagcaggagcctctctgacctttagcagggtcaggg

SEQ ID NO: 10136 - DNA, 201 bp, Homo sapiens
ctcgcccccaggctcccactccatgaggtatttcaccacatccgtgtcccggcccggccgcggggagccccgcttcatcgccgtgggctacgtggacgacwcgcagttcgtgcggtttgacagcgacgccgcgagccagaggatggagccgcgggcaccgtggatagagcaggaggggccggagtattgggacctgcagac

SEQ ID NO: 10137 - DNA, 201 bp, Homo sapiens; identical to SEQ ID NO: 1270

SEQ ID NO: 10138 - DNA, 201 bp, Homo sapiens; identical to SEQ ID NO: 1273

SEQ ID NO: 10139 - DNA, 201 bp, Homo sapiens; identical to SEQ ID NO: 1276

SEQ ID NO: 10140 - DNA, 201 bp, Homo sapiens
gggtgggtctcagccactcctcgcccccaggctcccactccatgaggtatttcaccacatccgtgtcccggcccggccgcggggagccccgcttcatcgcmgtgggctacgtggacgacacgcagttcgtgcggtttgacagcgacgccgcgagccagaggatggagccgcgggcaccgtggatagagcaggaggggccgg

SEQ ID NO: 10141 - DNA, 201 bp, Homo sapiens
acttctgaaatggcctggttctgtgctcccacccaaatctcatcttgaattgttatgcaaattgtaatccctacctattgggggagggacctcatgggagktgattggataatgggggcggtgcccccatgctgttctcctgatgctgagggaattctcatgagatctgatggttttataaggggcttttccctgcttcat

SEQ ID NO: 10142 - DNA, 201 bp, Homo sapiens
acacaggcagcagccttgggcccgtgacttttcctctcaggccttgttctctgcttcacactcaatgtgtgtgggggtctgagtccagcacttctgagtcyctcagcctccactcaggtcaggaccagaagtcgctgttccctcttcagggactagaattttccacggaataggagattatcccaggtgcctgtgtccagg

SEQ ID NO: 10143 - DNA, 201 bp, Homo sapiens; identical to SEQ ID NO: 1283

SEQ ID NO: 10144 - DNA, 201 bp, Homo sapiens; identical to SEQ ID NO: 1285

SEQ ID NO: 10145 - DNA, 201 bp, Homo sapiens; identical to SEQ ID NO: 1286

SEQ ID NO: 10146 - DNA, 201 bp, Homo sapiens
ggacgacacgcagttcgtgcggtttgacagcgacgccgcgagccagaggatggagccgcgggcaccgtggatagagcaggaggggccggagtattgggacstgcagacacggaatgtgaaggcccagtcacagactgaccgagcgaacctggggaccctgcgcggctactacaaccagagcgaggccggtgagtgaccccg

SEQ ID NO: 10147 - DNA, 201 bp, Homo sapiens
gtcgcggttctaaagtccgcacgcacccaccgggactcagattctccccagacgccgaggatggccgtcatggcgccccgaaccctcctcctgctactctygggggccctggccctgacccagacctgggcgggtgagtgcggggtcgtggggaaaccgcctctgcggggagaagcaaggggcccgcccggcggggacgca

SEQ ID NO: 10148 - DNA, 201 bp, Homo sapiens
aggatggccgtcatggcgccccgaaccctcctcctgctactcttgggggccctggccctgacccagacctgggcgggtgagtgcggggtcgtggggaaacsgcctctgcggggagaagcaaggggcccgcccggcggggacgcaggacccgggtagccgcgccgggaggagggtcgggtgggtctcagccactcctcgccc

SEQ ID NO: 10149 - DNA, 201 bp, Homo sapiens
tgggctgaccgtggggtcggggccaggttctcacaccatccagatgatgtatggctgcgacgtggggtcggacgggcgcttcctccgcgggtaccggcagkacgcctacgacggcaaggattacatcgccttgaacgaggacctgcgctcttggaccgcggcggacatggcggctcagatcacccagcgcaagtgggaggc

SEQ ID NO: 10150 - DNA, 201 bp, Homo sapiens
cgcgccgggaggagggtcgggtgggtctcagccactcctcgcccccaggctcccactccatgaggtatttcaccacatccgtgtcccggcccggccgcggrgagccccgcttcatcgccgtgggctacgtggacgacacgcagttcgtgcggtttgacagcgacgccgcgagccagaggatggagccgcgggcaccgtgga

SEQ ID NO: 10151 - DNA, 201 bp, Homo sapiens
ttgggatattgtgtttgggagcccatgggggagctcacccaccccacaattcctcctctagccacatcttctgtgggatctgaccaggttctgtttttgtyctaccccaggcagtgacagtgcccagggctctgatgtgtctctcacagcttgtaaaggtgagagcttggagggcctgatgtgtgttgggtgttgggcgga

SEQ ID NO: 10152 - DNA, 201 bp, Homo sapiens
acccaccccacaattcctcctctagccacatcttctgtgggatctgaccaggttctgtttttgttctaccccaggcagtgacagtgcccagggctctgatrtgtctctcacagcttgtaaaggtgagagcttggagggcctgatgtgtgttgggtgttgggcggaacagtggacacagctgtgctatggggtttctttgca

SEQ ID NO: 10153 - DNA, 201 bp, Homo sapiens
tgaccctctactatgaagcactgtgcggtggctgccgagccttcctgatccgggagctcttcccaacatggctgttggtcatggagatcctcaatgtcacsctggtgccctacggaaacgcacaggtgtgtgggcgctggggaaactgaggcacgtgggcaggggagcaggggacccagcctaccagcaggctctcaccct

SEQ ID NO: 10154 - DNA, 201 bp, Homo sapiens
ctagccctgaccactgctgtctgtgcagcccaggaaaacaactacccttctttattttatttatttttttattttttcttgagacagagtctcgctctgtygcccaggctggaatgcagtggcgcaatcccagctcactgcaacctccacctccagggttcaagtgattctccagcctcagcctcctgagtagctgggatt

SEQ ID NO: 10155 - DNA, 201 bp, Homo sapiens
catgttggtcaggcttgtcttgaactcctgaccttgtgatccgcctgccttggcctcccaaagtgctgggattacaggcgtgagccaccgcacccagccctttttttttttttttttttttttttttttttgagacagggttttgctctgtcgcccaggctggagtgcagtggtgcaatcttggctgactgcaaccactgt

SEQ ID NO: 10156 - DNA, 201 bp, Homo sapiens
atgttggtcaggcttgtcttgaactcctgaccttgtgatccgcctgccttggcctcccaaagtgctgggattacaggcgtgagccaccgcacccagccctttttttttttttttttttttttttttttttgagacagggttttgctctgtcgcccaggctggagtgcagtggtgcaatcttggctgactgcaaccactgtc

SEQ ID NO: 10157 - DNA, 201 bp, Homo sapiens
agccctttctgggctggaaccagggtgcatgggttggggtagctgctgggaatatgcgacccctgtcttgctttgtgcagaaacccttggaagatcagacycagctccttacccttgtctgccagttgtaccaggtaagctgggaggggagcagtgggattcaggtggtgggggtagggtctccttccaggaccccaactc

SEQ ID NO: 10158 - DNA, 201 bp, Homo sapiens
aggcccaggcaggcagatcacctaaggtcagaagtttgagaccagcctggcaaacatggcaaaaccctgtctctactaaaaaatacaaaagttggtcaggygcggtggctcacgcctgtaatctcagcactttgggaggccgaggcgggtggatcacaaggtcaggagatcaagtccatcctggctaacacggtgaaaccc

SEQ ID NO: 10159 - DNA, 201 bp, Homo sapiens
ccactgcactccagcctgggcaacaagagcaaaacttgatagctttgcatagggaaagagggcattgatgctggggttttgaaaggtgagtaggagtccakcaggcaaaaaaagtatgtattaattcgaagtattaaacatccctagccacccccattgggaaagatgtgccactgatttgcgaggcgggaggcgggggcc

SEQ ID NO: 10160 - DNA, 201 bp, Homo sapiens
taacggggaggaagctgaggcaaccccctgctccccacccacccagtgcctgcagctctacgccccagggctgtcgccagacactatcatggagtgtgcartgggggaccgcggcatgcagctcatgcacgccaacgcccagcggacagatgctctccagccaccacacgagtatgtgccctgggtcaccgtcaatggggt

SEQ ID NO: 10161 - DNA, 201 bp, Homo sapiens; identical to SEQ ID NO: 1419

SEQ ID NO: 10162 - DNA, 201 bp, Homo sapiens; identical to SEQ ID NO: 1420

SEQ ID NO: 10163 - DNA, 201 bp, Homo sapiens
ccgcagcggtggggattcccgcgtccctcccagagctctcattgaatgcctgccgcgtgccaggccttgggaaggagtccctggtggggtcatccgggacrggggagcacgcggccctggaacggggaaagcttggcggggaggccagccttccgactccccctctcgtctgcccccacagagtggacggcgacaccaagc

SEQ ID NO: 10164 - DNA, 201 bp, Homo sapiens; identical to SEQ ID NO: 1409

SEQ ID NO: 10165 - DNA, 201 bp, Homo sapiens
ccacagacaggcaatctatacctgcgggggcccctgaagaagtccaatgcaccgcttgtcaatgtgaccctctactatgaagcactgtgcggtggctgccragccttcctgatccgggagctcttcccaacatggctgttggtcatggagatcctcaatgtcacgctggtgccctacggaaacgcacaggtgtgtgggcgc

SEQ ID NO: 10166 - DNA, 201 bp, Homo sapiens
atcgggaggcgggcccgggttaggggcgggaccgccgcctggttaaaggcgcttatttcccaggcagccgctgcagtcgccacacctttgcccctgctgckatgaccctgtcgccacttctgctgttcctgccaccgctgctgctgctgctggacgtccccacggcggcggtgcaggcgtcccctctgcaagcgttagact

SEQ ID NO: 10167 - DNA, 201 bp, Homo sapiens
tgtattgagcacctgctgtttgtgggctttgtcgcatcactgtgaagccaactgtaccctcttctcagtgacgaaacaggcttggctcagggctggtgggygggaccgttgagataacggggaggaagctgaggcaaccccctgctccccacccacccagtgcctgcagctctacgccccagggctgtcgccagacactat

SEQ ID NO: 10168 - DNA, 201 bp, Homo sapiens
ttccccgggggattgtgaagaatgactcccagagaagtgactcattggctccaatcatttattcattcatcaaacatccgggtcacccaagaggcctcacytagtgacaccctagtcctgcagggttagatcagggctgagagagtggcaaggagagggcactgaggagacactgtggaaggaggatgaagggtgttcctg

SEQ ID NO: 10169 - DNA, 201 bp, Homo sapiens
ccagatacacaaaattccaccccatgatcaagaatcctgctccactaagaatggtgctaaagtaaaactagtttaataagcccttctggatggtgtaattmatttgataagtcagccattcccccttccccaggcctggcaaaacccgctctctactaaaaatacaaaaattagccaggcgcggtggcgggcgcctgtaat

SEQ ID NO: 10170 - DNA, 201 bp, Homo sapiens
tcggcacctgctacttaccaactggaaaattttatgcatcccatgaagcccagatacacaaaattccaccccatgatcaagaatcctgctccactaagaayggtgctaaagtaaaactagtttaataagcccttctggatggtgtaattaatttgataagtcagccattcccccttccccaggcctggcaaaacccgctct

SEQ ID NO: 10171 - DNA, 201 bp, Homo sapiens; identical to SEQ ID NO: 1417

SEQ ID NO: 10172 - DNA, 201 bp, Homo sapiens
tagccttcctgaccattgtctgcatggaagagtttgaggacatggagagaagtctgccactagtgagtgacgcccctcactccacccaaggagggggacawgggtggtaaccttccctgcatccaggcagacccaaattcaagtcctagccctgaccactgctgtctgtgcagcccaggaaaacaactacccttctttatt

SEQ ID NO: 10173 - DNA, 201 bp, Homo sapiens
tgggaggcagaggttgcggttagccgaaatcacaccattgcacttgagcctgggcaacaagagcaaaactcaatctcaaaaaaaaaaaaaaatagccaggyctggtggctcacacctgtaatcctagctactcgggaggctgaggcatgagaatcacttgaacctgggaggctgcagtgagctgagatcatgccactgcac

SEQ ID NO: 10174 - DNA, 201 bp, Homo sapiens
cctgagtcgcgtaagccaccacgcgtggcctcatggcgtctttgacttggactcctgtttaccaccctccccatcacacccagaatccacacccccactgygacgtcattgtcccttcagccctccccaaccctggggcctcactgtccttgtctgttttgtacagccacctctcaaggcccaacaaggctgaacctgggg

SEQ ID NO: 10175 - DNA, 201 bp, Homo sapiens
gtcagggcaggaaggaacttcactctgctgcttccgagaacctcggccgtgacattcggggccgggcgggacccgccccacagactccaacttcccctccwaaccccgaagtgaaacccgccaccgggttacccccacaagggggccgctgcgagaagttcacccacccccgaaaaaataattaaactcgcaggccaggca

SEQ ID NO: 10176 - DNA, 201 bp, Homo sapiens
ttcgagaccattctggcctacatggagaaaccctgtctctactaaaaatacaaaaattagctgggtgtggtggcatgtgcctataatcccagctactcagraggctgaggcaggacaattgcttgaaccagggagtcgggtgttgcagtgagccgagatcgtgccgcagcacaccagcctagcgacagtgagactccatct

SEQ ID NO: 10177 - DNA, 201 bp, Homo sapiens
cagcctagcgacagtgagactccatctcaaaaaaaaaaaaaaaagtctcaaagtcaagattccacctggcaagttctggaaggcgtgcaagatgaattgcstatcacagccccctttctacaagactaccaagtggggttgagagaagtggggaactgcccagggctacacctgcctcccacgccttcctaatccacagac

SEQ ID NO: 10178 - DNA, 201 bp, Homo sapiens
cagctccttacccttgtctgccagttgtaccaggtaagctgggaggggagcagtgggattcaggtggtgggggtagggtctccttccaggaccccaactcrtggccttcacctccagggcaagaagccggatgtctgcccttcctcaaccagctccctcaggagtgtttgcttcaagtgatggccggtgagctgcggagag

SEQ ID NO: 10179 - DNA, 201 bp, Homo sapiens
cagccctttctgggctggaaccagggtgcatgggttggggtagctgctgggaatatgcgacccctgtcttgctttgtgcagaaacccttggaagatcagasccagctccttacccttgtctgccagttgtaccaggtaagctgggaggggagcagtgggattcaggtggtgggggtagggtctccttccaggaccccaact

SEQ ID NO: 10180 - DNA, 201 bp, Homo sapiens
agtacgcactcatggaggacgaggacgatctcccgcaccacgaggaacgcacttggtacgtgggcaagatcaaccgcacgcaggcagaggagatgctgagyggcaagcgggatggcaccttcctcatccgcgagagcagccagcggggctgctacgcctgctccgtggtgtgagtggaccgcagcggtggggattcccgcg

SEQ ID NO: 10181 - DNA, 201 bp, Homo sapiens
agattgtgcctctcactgcataggtgctcacaggagaaaggttgccatctttatgatcccagctatgctgagctgggggtggaagagaatatcccgtgtgrtctctaaaaacactcaaccactggctgtgtgtccttggcaaaatagccttccctctctgatcagccatttatttgttaccagctggagtcagtagcacct

SEQ ID NO: 10182 - DNA, 201 bp, Homo sapiens
agggtaccctaggccctcttcatgccctctcctgccccctctccaaaccccaggcctgcgtgttggatgaacttgacatggagctagccttcctgaccatkgtctgcatggaagagtttgaggacatggagagaagtctgccactagtgagtgacgcccctcactccacccaaggagggggacatgggtggtaaccttccc

SEQ ID NO: 10183 - DNA, 201 bp, Homo sapiens
cagcacctggcaggggtgggggtgggacactcagaggaaggagtggaggagggagagacgctggcccgggacccgaggggcgtgggcatcgggaggcgggyccgggttaggggcgggaccgccgcctggttaaaggcgcttatttcccaggcagccgctgcagtcgccacacctttgcccctgctgcgatgaccctgtcgc

SEQ ID NO: 10184 - DNA, 201 bp, Homo sapiens
tagaaggtctaggggtgcgtggagacaccaccattcctctcagcctgtgtctgtctcaaaggccccacctcacctcccctaaaggtagtcttgcgccaggrctcacgtgcctgggcagggctgattgccaaggggcccaatggcctcgtgactggggacccagcacctggcaggggtgggggtgggacactcagaggaagg

SEQ ID NO: 10185 - DNA, 201 bp, Homo sapiens
gtcacccctgttaggtcacaggcccactctgagagtgggtctcgggcctcaagtcccctagccgcccctagaaggtctaggggtgcgtggagacaccaccrttcctctcagcctgtgtctgtctcaaaggccccacctcacctcccctaaaggtagtcttgcgccagggctcacgtgcctgggcagggctgattgccaagg

SEQ ID NO: 10186 - DNA, 201 bp, Homo sapiens
ccggctgcctgcctttttttctgatccagaccctcggcacctgctacttaccaactggaaaattttatgcatcccatgaagcccagatacacaaaattccmccccatgatcaagaatcctgctccactaagaatggtgctaaagtaaaactagtttaataagcccttctggatggtgtaattaatttgataagtcagccat

SEQ ID NO: 10187 - DNA, 201 bp, Homo sapiens; identical to SEQ ID NO: 1430

SEQ ID NO: 10188 - DNA, 201 bp, Homo sapiens; identical to SEQ ID NO: 1431

SEQ ID NO: 10189 - DNA, 201 bp, Homo sapiens; identical to SEQ ID NO: 1432

SEQ ID NO: 10190 - DNA, 201 bp, Homo sapiens; identical to SEQ ID NO: 1433

SEQ ID NO: 10191 - DNA, 201 bp, Homo sapiens; identical to SEQ ID NO: 1434

SEQ ID NO: 10192 - DNA, 201 bp, Homo sapiens; identical to SEQ ID NO: 1435

SEQ ID NO: 10193 - DNA, 201 bp, Homo sapiens
accttttgggaagcccttccttactcaagtctatctctctttcctcctgctgcagtgtgagcccttgcacatcagaacccccaagcctaggtttattcccrcccagtactctcttctcagggtcctcctcactcctcagactctttacctttcaggtcctccagctctgcgtgtgggctcattgctcttggggcatctggg

SEQ ID NO: 10194 - DNA, 201 bp, Homo sapiens
cggcatcatcaaaaccttttactgacctcagtcgtcatcaaaaaccaggctgtcttcagcctgtctcctgagcatagaatgttgaggcactggggtccatrggaatggggcatttggagggtggactctactgaaggcctagtttctacctccacctgtttgcctacaggtgtgtggctactgtggggaatattgtaaaag

SEQ ID NO: 10195 - DNA, 201 bp, Homo sapiens
aagggtcctaccccgctcccaactcagctctctcccagctctgagtgaggcttcccttggctgtgtagactgtcccaaagtagtttatttgtttctttctkccctctccccctgaaggaaatcaaagacaggcctcagccttctcgctccagattcctgggcccttcaacaccagccctgacaggaagttctttcacgtat

SEQ ID NO: 10196 - DNA, 201 bp, Homo sapiens
catgtcttccatgccctgcgccagccagacggtgagcaggcaaggggtgggagcaggcgaacggtgagccaggcaccggggtccctgggagttcctgctcrtcccttctctagcattgaccaagccctcctggccagacactgggagactccaggagggtctagacaggggatggtctggctcccgggagcttcagcccgg

SEQ ID NO: 10197 - DNA, 201 bp, Homo sapiens
gtagcagggagaggtgggactcggggtggcagaaactccccaggcagatccaagcgggggtgcaggagaggcaggccctcacttgagctccacccttcccctgctgtgtgatctggggagaggtgcaaaagcttcctaagcttcaggttcctcttctgtgatacaagctggctaagattccagctgcctgcaccaaaggga

SEQ ID NO: 10198 - DNA, 201 bp, Homo sapiens
ccatcacacctacgagcacgcggcagaccacagccatggacttcagctatgccaacgagaccgtatgctgggtgcatgttggggacagtgctgctcagacrcagctcaagtgtgcccgcatgcctggcctaaagggcttcgtggatgagcacaccatcaacatctccctcagtctgcaccgtgagtcacctgctctcagct

SEQ ID NO: 10199 - DNA, 201 bp, Homo sapiens
tgtgaccccctcagtggctgctccctcactctccccaccctcccggcacactcctggaaggagtctcatcctcaccccatgcccacccgcttgcagcccaratgacctgtggtgtggacgagttccgctgcaaggattcgggccgctgcatcccagcgcgttggaagtgtgacggagaggatgactgtggggatggctcgg

SEQ ID NO: 10200 - DNA, 201 bp, Homo sapiens
ctgaaggcctagtttctacctccacctgtttgcctacaggtgtgtggctactgtggggaatattgtaaaagagttccaggtggaagagtctaactagcccygaggcctcctgagatctgaaaccccagttttatctcccctcatccccagtgaacagctgaccagagagccaccatagccagcttgttcatgcccaccctt

SEQ ID NO: 10201 - DNA, 201 bp, Homo sapiens
tcccataccccacacttcgccttccagccaggagagcacctgccccaggctgtcccccacggctcctgtgcaggctgccctctgggccctcctgacaaatsgctgctcctgtctcttcacagacgtgggctccgtggaaggcctggcctatcaccgtggctgggacactctctattggacaagctacacgacatccaccat

SEQ ID NO: 10202 - DNA, 201 bp, Homo sapiens
ccatctaactgtggcttctgactgccccagacaagttctgctcagaggcccagtttgagtgccagaaccatcgctgcatctccaagcagtggctgtgtgayggcagcgatgactgtggggatggctcagacgaggctgctcactgtggtaaggaagctgggattgggccgggggaggtgccccagggagggacagacccca

SEQ ID NO: 10203 - DNA, 201 bp, Homo sapiens
ccagcctgggaaactgagagggctgagcttgcaggggacagagcatagctctagactggagaggaggaacaaggcagggtagatctcctcctgggaggatrccagagaccccttgagagaaagagtaaagcatccagtgagaccagagagatggttttgaattctctaagagaaatggttttggatccttggaaataaggg

SEQ ID NO: 10204 - DNA, 201 bp, Homo sapiens
caggagatgctgactggcctgccctggtgtgtagggtggctggtcccaggcactcacctgcacagtggctgctggcctgtaattagctccccaaggaggaygaagaagaaaggctgcagctttcccctgctttcactctgccctccagggcagccctccctgcaagccttccattctgtgctgtgactgtgacctctgttg

SEQ ID NO: 10205 - DNA, 201 bp, Homo sapiens
ccccatctcctggacgtgtgatctggatgacgactgtggggaccgctctgatgagtctgcttcgtgtggtaagagggatgggcagagggagtcaggctggscctgggggaggggcatcctgagagcatgccagttgggggtgccggagacacctgcaacccagcacttgggtggccttgagtgagttaatctcggtggcct

SEQ ID NO: 10206 - DNA, 201 bp, Homo sapiens
acactgatgagttccagtgccggctggatggactatgcatccccctgcggtggcgctgcgatggggacactgactgcatggactccagcgatgagaagagytgtgagggagtgacccacgtctgcgatcccagtgtcaagtttggctgcaaggactcaggtgaagaggatggttggagggcgtctggaacagcacaatgtg

SEQ ID NO: 10207 - DNA, 201 bp, Homo sapiens
tgcagacgagagcatcgcagctggttgctgtgagtggcggggccacgtggagcgggtggacagcaaatggccacagtctcactttgcagatggggaagcckgggtgcaggagaggaaatgcctcagcggggtccactgggggcggagccatagctgtagcccaggtgtccagactcctcatccagtgccctgcccactcta

SEQ ID NO: 10208 - DNA, 201 bp, Homo sapiens
gtgggaggcatggcacccctggcaggtggagggctgggggccgcctgcttaccggtctcagcgtggccctgctgctgggcttcctgggcctgctgtggggytggggaaggaggcctggctggagctcacttccccacatccacccgtgccccatgtctcccagtttccctatccctgcccctgcccacgcctcatccacac

SEQ ID NO: 10209 - DNA, 201 bp, Homo sapiens
ccttgtgcccaccctcctgggcctgtctccccctgtccttcccagcccctcggccctgctccgagagtgagttctcctgtgccaacggccgctgcatcgckgggcgctggaaatgcgatggagaccacgactgcgcggacggctcggacgaggtgggcagggagatgagaaggaagcagatggcctcagaggagttcaggc

SEQ ID NO: 10210 - DNA, 201 bp, Homo sapiens
agtgtgccagtgaggctgtccaggcacagcagactcagtggggatggaggtctgaagcgacaggggatcaagttttgggggcaagagtggacataaaaagyggaggatatggcctgaggacaccactcactggggtgtggggttcagagcaccccgggggcttccccagcctggccaccacccagctcccttgggaaggaa

SEQ ID NO: 10211 - DNA, 201 bp, Homo sapiens
gcttttctgaggagggtagaggagcaggggaactgtatcattaatggctcagatagaaatatgcattctcagcagggtgaggtggctcacacctgtaatcmcagcactttgggaggccaaggtgcatggatcacctgaggtcaggagtttaagaccagcctggccaacatggagaaatcccatctctactaaaaacacaaa

SEQ ID NO: 10212 - DNA, 201 bp, Homo sapiens
caccaaggcatctacgcacacagatggactctgcacacgcctggcatctcctccacgttgcacacacacattcatgtcacacccgcccctcagggctcatmcatgccctcggtgcccctaccctcaccctggtcactctcctcacttggagccacacagacagccgagagcctgggtgcacgtgccctcagtgggcacgag

SEQ ID NO: 10213 - DNA, 201 bp, Homo sapiens
gccaggtctccagggtgggaggcccagaccctgccacacgcccagcccaaggctccctgtgcctgcagtgccgctgtcgccctggcttccggctgaaggaygacggccggacgtgtgctgatgtggacgagtgcagcaccaccttcccctgcagccagcgctgcatcaacacccatggcagctataagtgtctgtgtgtgg

SEQ ID NO: 10214 - DNA, 201 bp, Homo sapiens
cccctagtgaggccgggtagagggaattggagtctctgagccaggtctccagggtgggaggcccagaccctgccacacgcccagcccaaggctccctgtgyctgcagtgccgctgtcgccctggcttccggctgaaggacgacggccggacgtgtgctgatgtggacgagtgcagcaccaccttcccctgcagccagcgct

SEQ ID NO: 10215 - DNA, 201 bp, Homo sapiens
ggtgggagatgacacggaagcagggcaggcagaatctccccacagctttgagaggctctcaaataactttagtagatgggcaacacaaattatattgggtrtaacttgctttgctcataaaaatcatcatgcatgatatagagacatagagatccagaaaacaaaaagcaccaaaactggggataaactgttccttcctcc

SEQ ID NO: 10216 - DNA, 201 bp, Homo sapiens
acaagtgcaatgcctcgtcacagttcctgtgcagcagtgggcgctgtgtggctgaggcactgctctgcaacggccaggatgactgtggcgacagctcggaygagcgtggctgccacatcaatgagtgtctcagccgcaagctcagtggctgcagccaggactgtgaggacctcaagatcggcttcaaggtatgcccagccc

SEQ ID NO: 10217 - DNA, 201 bp, Homo sapiens
agaaaggctgggtggggcagggcgaccaggatatcaaacggggccgacttggaatggaatgtcttcctgcggacatcttgcccagacaagaagccccagamtcatagttgcagctgcctgagcacagtgctggcccagcagtgggggcaggtcctggggctggctgactgaaggagtctggggtgtggcagtgctctgaat

SEQ ID NO: 10218 - DNA, 201 bp, Homo sapiens
aacaagttcagcgtgaagtgctcctgctacgagggctgggtcctggaacctgacggcgagagctgtcgcagcctgggtgagacaacagtgaggtgtggtgrggcaggccgaggcaggcctctgagctgcagtgggttgggcttggtggccaggtgccaaaggctgagttttccaccctagcccccagtgcccggaccagca

SEQ ID NO: 10219 - DNA, 201 bp, Homo sapiens
cgaatggggccgtgggcagggcacaaggacttggtccaggctgcccaggacttggggcccagcagggccgtggtcttgcctcctctcagcttctgaccctkggtctgttccatgcctgcccctcccctagaccagtgctctctgaataacggtggctgcagccacaactgctcagtggcacctggcgaaggcattgtgtgt

SEQ ID NO: 10220 - DNA, 201 bp, Homo sapiens
aacaccaaccgctgtattcccggcatcttccgctgcaatgggcaggacaactgcggagatggggaggatgagagggactgccgtgagtgtcagaggtggtrgtgggccggtggtgggagatgacacggaagcagggcaggcagaatctccccacagctttgagaggctctcaaataactttagtagatgggcaacacaaat

SEQ ID NO: 10221 - DNA, 201 bp, Homo sapiens
attgaatttgccagcctggatggctccaatcgccacgttggtcagtgtgccagtgaggctgtccaggcacagcagactcagtggggatggaggtctgaagygacaggggatcaagttttgggggcaagagtggacataaaaagtggaggatatggcctgaggacaccactcactggggtgtggggttcagagcaccccggg

SEQ ID NO: 10222 - DNA, 201 bp, Homo sapiens
agagctactgtgccaagcatctcaaatgcagccaaaagtgcgaccagaacaagttcagcgtgaagtgctcctgctacgagggctgggtcctggaacctgayggcgagagctgtcgcagcctgggtgagacaacagtgaggtgtggtggggcaggccgaggcaggcctctgagctgcagtgggttgggcttggtggccaggt

SEQ ID NO: 10223 - DNA, 201 bp, Homo sapiens
ctagaccagtgctctctgaataacggtggctgcagccacaactgctcagtggcacctggcgaaggcattgtgtgttcctgccctctgggcatggagctggrgcccgacaaccacacctgccagatccagagctactgtgccaagcatctcaaatgcagccaaaagtgcgaccagaacaagttcagcgtgaagtgctcctgc

SEQ ID NO: 10224 - DNA, 201 bp, Homo sapiens
cagactgggatgccagcctgccccgcattgaggcagcctccatgagtggggctgggcgccgcaccgtgcaccgggagaccggctctgggggctggcccaaygggctcaccgtggactacctggagaagcgcatcctttggattgacgccaggtcagcaccctctgtgccctgagaaggcccaagtctgtggcaccaggacg

SEQ ID NO: 10225 - DNA, 201 bp, Homo sapiens
tgggcagtgacgggaagtcatgcaagagtgagtgacagggaagggggtgtgtgcccattgggaggctgcgggagggttcctcaggtgtcccccacagcccrgctgcctctgtctgacatgcagggagatgaaggaagtgtcccagagtgtacctgctagtgagggcagagatgggacttgaatccatattcgaaaaaagtg

SEQ ID NO: 10226 - DNA, 201 bp, Homo sapiens
agctatttgaccctggccaagtcacctggctcaatttcttcatctgtgaaatggtggtattagttgtccctatttgtcatactgtggagggaattaaataygatgatacatggaaaaaactgctttaccacagttcctggcacatactgagcccacaataagagttagttgtcagccgggtgcggtggctcacgcctgtaa

SEQ ID NO: 10227 - DNA, 201 bp, Homo sapiens
tgagtggcggggccacgtggagcgggtggacagcaaatggccacagtctcactttgcagatggggaagccggggtgcaggagaggaaatgcctcagcgggrtccactgggggcggagccatagctgtagcccaggtgtccagactcctcatccagtgccctgcccactctaccaggagaaccacaggaggttagagtgagg

SEQ ID NO: 10228 - DNA, 201 bp, Homo sapiens
tacgtattgggcagtgaaggtctagaagatttggcaccactcttggccctgggttctgcaacctgggagctatgggaaggagtttttctttatcattggartttctctgccatggaccctgcttccctcagctcatcaaaacctttttttttgtttgtttgttttgagacagatctcgctctgtcgcccacgctggagtgc

SEQ ID NO: 10229 - DNA, 201 bp, Homo sapiens
gcccactctaccaggagaaccacaggaggttagagtgagggacggtcggccgctggccaggcagggctgaagggctgtgtccacctctgtccacagtgtayaacagcacttgtgacgaccgtgagttcatgtgccagaaccgccagtgcatccccaagcacttcgtgtgtgaccacgaccgtgactgtgcagatggctctg

SEQ ID NO: 10230 - DNA, 201 bp, Homo sapiens
cacggactcttctcttccccattcccagagccagtagaccggccccctgtgctgttgatagccaactcccagaacatcttggccacgtacctgagtggggyccaggtgtctaccatcacacctacgagcacgcggcagaccacagccatggacttcagctatgccaacgagaccgtatgctgggtgcatgttggggacagt

SEQ ID NO: 10231 - DNA, 201 bp, Homo sapiens
aatgggcgctgtctgagctcccgccagtgggagtgtgatggcgagaatgactgccacgaccagagtgacgaggctcccaagaacccacactgcaccagccmaggtgggccccagacctggctcccctctgccccctccccagactgcctgagaccccgctgacctgccgcctccgcccctctgcagagcacaagtgcaatg

SEQ ID NO: 10232 - DNA, 201 bp, Homo sapiens
ccttgggctcgggactgtggcactactgaggcctggagtccttgtgcccaccctcctgggcctgtctccccctgtccttcccagcccctcggccctgctcygagagtgagttctcctgtgccaacggccgctgcatcgcggggcgctggaaatgcgatggagaccacgactgcgcggacggctcggacgaggtgggcaggg

SEQ ID NO: 10233 - DNA, 201 bp, Homo sapiens
gtcccatggggtaagtgcgagcccgcctgtgcccagctgttccataggagcagccagtgggctctgccaggactggctcggcctctgggtcagtcagctgyggccttcagagacacggggatgggccttgggctcgggactgtggcactactgaggcctggagtccttgtgcccaccctcctgggcctgtctccccctgtc

SEQ ID NO: 10234 - DNA, 201 bp, Homo sapiens
aacccacactgcaccagcccaggtgggccccagacctggctcccctctgccccctccccagactgcctgagaccccgctgacctgccgcctccgcccctcygcagagcacaagtgcaatgcctcgtcacagttcctgtgcagcagtgggcgctgtgtggctgaggcactgctctgcaacggccaggatgactgtggcgaca

SEQ ID NO: 10235 - DNA, 201 bp, Homo sapiens
tgtggatcgggcgccaatgcgatggcacggacaactgtggggatgggactgatgaagaggactgtggtgagcagggggccgacgagaggcctgcaggggaygggtagtgcacagtggggtgagtctggtcctcgtgggagctgcactggggttagggttaaccaggaggactcgcccaggaaggggaggatccattgctag

SEQ ID NO: 10236 - DNA, 201 bp, Homo sapiens
cgacctgcggccccagtgagttccgctgtgccaatgggcgctgtctgagctcccgccagtgggagtgtgatggcgagaatgactgccacgaccagagtgaygaggctcccaagaacccacactgcaccagcccaggtgggccccagacctggctcccctctgccccctccccagactgcctgagaccccgctgacctgccg

SEQ ID NO: 10237 - DNA, 201 bp, Homo sapiens
cacccccaaggtcccagaatgggacacagaatgacagccaagggtcaagcagggcagtggggtctgtgttgtgtctggacgcacacccaactctacacctsctgccctggctccagcttggtggccctggggaccgtggctgggctgggtgcctgggtttgggggggtggggcagggtgttggccaagttagcatggcagt

SEQ ID NO: 10238 - DNA, 201 bp, Homo sapiens
tgtggtgagccttcggcggtggtgggaaggaggccctgccctctgccgggccagggcatcagcctcacaggtccattcctcccccagagtacccgacctgyggccccagtgagttccgctgtgccaatgggcgctgtctgagctcccgccagtgggagtgtgatggcgagaatgactgccacgaccagagtgacgaggctc

SEQ ID NO: 10239 - DNA, 201 bp, Homo sapiens
gctttgctagaagatggcccggcctccctttccttccagctcttcccttattccacctctcagcctccctgacccttgatgattggccccaggtcttgtcsgatcctcagatcttcctctgtcctttggctcccaggccagaggccactggcacttgctcagccccataccagaagccccacccctgtgctcttcccgcta

SEQ ID NO: 10240 - DNA, 201 bp, Homo sapiens
gaagatggcccggcctccctttccttccagctcttcccttattccacctctcagcctccctgacccttgatgattggccccaggtcttgtcggatcctcasatcttcctctgtcctttggctcccaggccagaggccactggcacttgctcagccccataccagaagccccacccctgtgctcttcccgctacccccgcct

SEQ ID NO: 10241 - DNA, 201 bp, Homo sapiens
ggcccggcctccctttccttccagctcttcccttattccacctctcagcctccctgacccttgatgattggccccaggtcttgtcggatcctcagatcttyctctgtcctttggctcccaggccagaggccactggcacttgctcagccccataccagaagccccacccctgtgctcttcccgctacccccgccttcccct

SEQ ID NO: 10242 - DNA, 201 bp, Homo sapiens
cctccctttccttccagctcttcccttattccacctctcagcctccctgacccttgatgattggccccaggtcttgtcggatcctcagatcttcctctgtsctttggctcccaggccagaggccactggcacttgctcagccccataccagaagccccacccctgtgctcttcccgctacccccgccttcccctgccccca

SEQ ID NO: 10243 - DNA, 201 bp, Homo sapiens
ctgcagacgacggcgaaccatcacctccactgctagacctgatctacccgctcctaagtctctcagtggccctctctccccctacagaaggcaagacgtgyggcccctcctccttctcctgccctggcacccacgtgtgcgtccccgagcgctggctctgtgacggtgacaaagactgtgctgatggtgcagacgagagca

SEQ ID NO: 10244 - DNA, 201 bp, Homo sapiens
tggtgccagctggtgggtgcaagggtcccaactctggtcctgagggagcccaggaagtcctgggctgaagctcagcctgaagctcagcaggaatggagacraatggggccgtgggcagggcacaaggacttggtccaggctgcccaggacttggggcccagcagggccgtggtcttgcctcctctcagcttctgaccctgg

SEQ ID NO: 10245 - DNA, 201 bp, Homo sapiens
cttcgcctgccctagtgggcgctgcatccccatgagctggacgtgtgacaaagaggatgactgtgaacatggcgaggacgagacccactgcagtgagtgaycactgcacccactcagtgctccaagagcctgctgggccccacttcttagtcccccccagcaaatgcccccttggaaaagggcatccagagccttcaaccc

SEQ ID NO: 10246 - DNA, 201 bp, Homo sapiens
gactaccgagagcagatgatctactggacagatgtgaccacccagggcagcatgatccgaaggatgcaccttaacgggagcaatgtgcaggtgaggcgggyggccctcggcgaccaacactggcccgcctcagatgactgttttcagatcgtctctccttcccgccccaccaacccaaattgcttccttctcactccacta

SEQ ID NO: 10247 - DNA, 201 bp, Homo sapiens
cgcacccttgtgccaacaacacctcagtctgcctgccccctgacaagctgtgtgatggcaacgacgactgtggcgacggctcagatgagggcgagctctgyggtgaggcctggtcccaggagaagggtagggagggtggctgggtaggagtctgggccaaggacagtctttgggggacctgagtctaggagagagcagctc

SEQ ID NO: 10248 - DNA, 201 bp, Homo sapiens
aagctcaacctggacgggtccaactacacgttacttaagcaggtaccaaacccaggccctcctccccgctgcccatctcccagacccagcacagcctcccytgcaagtctccccgcttaggtccaaccatccctcccccagatgcaaatgtggcccctgttgccacaaccgacttctgctgtccttcactccccaaatcca

SEQ ID NO: 10249 - DNA, 201 bp, Homo sapiens
tgctccatcatgctcttaggtcagatgccatttactcagcccgttacgacggctctggccacatggaggtgcttcggggacacgagttcctgtcgcacccrtttgcagtgacgctgtacgggggggaggtctactggactgactggcgaacaaacacactggctaaggccaacaagtggaccggccacaatgtcaccgtgg

SEQ ID NO: 10250 - DNA, 201 bp, Homo sapiens
gagatccgaggtgtggacctggatgctccctactacaactacatcatctccttcacggtgcccgacatcgacaacgtcacagtgctagactacgatgcccrcgagcagcgtgtgtactggtctgacgtgcggacacaggccatcaagcgggccttcatcaacggcacaggcgtggagacagtcgtctctgcaggttcttcc

SEQ ID NO: 10251 - DNA, 201 bp, Homo sapiens
cagcatggccaacatggatggcagcaatcgcaccctgctcttcagtggccagaagggccccgtgggtacgagcttccctgcccacccccacagcccctccstaattccttgaccagcaggtgcttgcagggtccttcagttgcccctcagcctccccagagccctagcttagtgcctgttctcaccatctgctcccttccc

SEQ ID NO: 10252 - DNA, 201 bp, Homo sapiens
tgccgctgccgttccggcttcagcctgggcagtgacgggaagtcatgcaagagtgagtgacagggaagggggtgtgtgcccattgggaggctgcgggaggrttcctcaggtgtcccccacagcccggctgcctctgtctgacatgcagggagatgaaggaagtgtcccagagtgtacctgctagtgagggcagagatggga

SEQ ID NO: 10253 - DNA, 201 bp, Homo sapiens
ctgatcagtgggcacttagctgaaaacctgctattcttccctcatttcctacccttggagtgcagaggtcagaccccagggtattgcggccaggacccatygtcctgtatgttagcgtgtgcgtggtctgtccatctgacccagagcctcgcatccctaacgtctcctgacccatcacagctagggcattgcagccccttg

SEQ ID NO: 10254 - DNA, 201 bp, Homo sapiens
gactttaatcgagggcaaaatgacacaccccagggctattgtggtggatccactcaatgggtgagtcctcccaggccttggggtgggaggagctgggagtstgtgggcctcagataactggaggatgaaatggacagggaagcaggggaaggcaggtgaggcgggatactttagcaggaatgagagtctgcaaggggagaa

SEQ ID NO: 10255 - DNA, 201 bp, Homo sapiens
gaaagcgggcagccccgttttggggacgtgaacgttttaataatttttgctgaattcctttacaactaaataacacagatattgttataaataaaattgtaaaaaaaaaaaaaaaaaaggccaaaaaaaaaaaaagaaagaaaaaaagccgctggtgtctgcctgtgtgtgagagacgctgggagctggggctgcgctttc

SEQ ID NO: 10256 - DNA, 201 bp, Homo sapiens
agggggccgacgagaggcctgcaggggacgggtagtgcacagtggggtgagtctggtcctcgtgggagctgcactggggttagggttaaccaggaggactmgcccaggaaggggaggatccattgctaggagcctgggggcttttcgttaggaaagagaagcccctggggaaggctctgggggctgcctgatgccttaggt

SEQ ID NO: 10257 - DNA, 201 bp, Homo sapiens
ggatatcaaacggggccgacttggaatggaatgtcttcctgcggacatcttgcccagacaagaagccccagactcatagttgcagctgcctgagcacagtsctggcccagcagtgggggcaggtcctggggctggctgactgaaggagtctggggtgtggcagtgctctgaattgcacacacacctcctcacccaccactg

SEQ ID NO: 10258 - DNA, 201 bp, Homo sapiens
acttcgcctgccctagtgggcgctgcatccccatgagctggacgtgtgacaaagaggatgactgtgaacatggcgaggacgagacccactgcagtgagtgrccactgcacccactcagtgctccaagagcctgctgggccccacttcttagtcccccccagcaaatgcccccttggaaaagggcatccagagccttcaacc

SEQ ID NO: 10259 - DNA, 201 bp, Homo sapiens
atggcatcacgctggacctggtcagccgccttgtctactgggcagatgcctatctggactatattgaagtggtggactatgagggcaagggccgccagacyatcatccagggcatcctggtgagggagctactgtctgaggttttgtgggggaaccatgatccagggccttctggtgaggggggaagcctctgtaggggaa

SEQ ID NO: 10260 - DNA, 201 bp, Homo sapiens
gaggggatagacagattgacccctgtgtgacccccttcttggctgagccaaagaggcagggttaggatgggttaggcagcatgggccgtccttgccagccyttgggaaaactcagggtctgtctgcattggcttagagccctggagctgcacacagcacacagccaggggacaactgaggtcttgaattggagacaggcct

SEQ ID NO: 10261 - DNA, 201 bp, Homo sapiens
agggagtgacccacgtctgcgatcccagtgtcaagtttggctgcaaggactcaggtgaagaggatggttggagggcgtctggaacagcacaatgtgggcakgaggagaccgtgttgagagcagagtagcggcaaaggggatggcactgtgctgtgtggagtggtgctggggacagtgcaaggcaaaaggcagtccagagga

SEQ ID NO: 10262 - DNA, 201 bp, Homo sapiens
ggctcagtacccatatgctgctgcccctagtgaggccgggtagagggaattggagtctctgagccaggtctccagggtgggaggcccagaccctgccacaygcccagcccaaggctccctgtgcctgcagtgccgctgtcgccctggcttccggctgaaggacgacggccggacgtgtgctgatgtggacgagtgcagcac

SEQ ID NO: 10263 - DNA, 201 bp, Homo sapiens
gctgtcgccctggcttccggctgaaggacgacggccggacgtgtgctgatgtggacgagtgcagcaccaccttcccctgcagccagcgctgcatcaacacycatggcagctataagtgtctgtgtgtggagggctatgcaccccgcggcggcgacccccacagctgcaaggctgtgactggtgagatgcgcgcttggaggg

SEQ ID NO: 10264 - DNA, 201 bp, Homo sapiens
gacgacccgctcctgcatgtgcacagccggctatagcctccggagtggccagcaggcctgcgagggtcagtgcctggctttcctcccagccttgtcccagstccccaaccctgacccctcctaccctacagccccaccttcctcttcttaccttggggacaagactacattcgtcgtgtaggggacactggactatgaagt

SEQ ID NO: 10265 - DNA, 201 bp, Homo sapiens
tcccagctccccaaccctgacccctcctaccctacagccccaccttcctcttcttaccttggggacaagactacattcgtcgtgtaggggacactggactwtgaagtggctatgactctccagtgcctccagtaggattttggaaaaatagatgtcagcaggcagatcggggcagctgcatggaagaggcatgctctgagc

SEQ ID NO: 10266 - DNA, 201 bp, Homo sapiens
tgcccccttggaaaagggcatccagagccttcaaccccctgccccacaccccaactcttgaggtcagactcagagactctgcctctagctgctgctgagcycccccacagaggggtgctgtgggcatctctcctgtccttcccatggcatcagcctccccaggtgggtgacccccacccttccccatctaactgtggcttc

SEQ ID NO: 10267 - DNA, 201 bp, Homo sapiens
tgccctcagtgggcacgagtacatgccccagcgccccccaccacagacctgcagctttcccaggtgtctcccatgcgccctggggctcactactgcacccrtgatctcagggccctcagactcgaatctctcagaaacactcctcaaagcccacggtgccctgcctaaaagcacacacatcctcaacggcacacctgccga

SEQ ID NO: 10268 - DNA, 201 bp, Homo sapiens
gggctcaccagccacgtgtgagagctgcgagtctggcgcataagctccatgccggttgaatctctttaaagccagggtcctggctgtgagcctggggtgaygttccagcaggctggcagagtggtggcggggggataatggcaggaagacaaagcagtggcccctgaacctgtggcttccattcagatttcagggctgaag

SEQ ID NO: 10269 - DNA, 201 bp, Homo sapiens
tttccttccagctcttcccttattccacctctcagcctccctgacccttgatgattggccccaggtcttgtcggatcctcagatcttcctctgtcctttgsctcccaggccagaggccactggcacttgctcagccccataccagaagccccacccctgtgctcttcccgctacccccgccttcccctgcccccagtaagt

SEQ ID NO: 10270 - DNA, 201 bp, Homo sapiens
cagaggccactggcacttgctcagccccataccagaagccccacccctgtgctcttcccgctacccccgccttcccctgcccccagtaagtggtgtaatcrgaggcagctgttttaactgggagaaaggtccccgcccagcttttgccctgccaagggaagtggagaacttgttggtgggaccccagagtcctgggtagct

SEQ ID NO: 10271 - DNA, 201 bp, Homo sapiens
ttgagacggcagcgatggatgggacgcttcgggagacactggtgcaggacaacattcagtggcccacaggtttgtggggcagggtgcaggagggacgggcrtggagggggcccggctcgcagagcccagctgctgctgaagtcacacaaaagcaagggatgggatggggcttggactggggcagggcagattggccgtgga

SEQ ID NO: 10272 - DNA, 201 bp, Homo sapiens
ctggagcagccccatggccttgtcgtccaccctctgcgtgggtcagtctagggcccagggccggggagcatggggtgtggggctgggaagaagaggaccckgacctttccctcttggcaccctccccccaggaagctctactggaccgatggtgacaacatcagcatggccaacatggatggcagcaatcgcaccctgctc

SEQ ID NO: 10273 - DNA, 201 bp, Homo sapiens
ccctggttcacgccattctcctgcctcagcctcctgagtagctgggactacaggcgcctgccaccacgcccagctaatttttcatatttttagtagagacrgggtttcaccgcgttagccaggatggtctcgatctcctgacatcatgatctgcctgcttcggcctcccaaagtactgggattacaggcatgagccaccat

SEQ ID NO: 10274 - DNA, 201 bp, Homo sapiens
caagtttaagggagtgttggcgatacccatgccttaagtttccttgtctttcaggcgtaggttcctttctcctgtactctgtgcatgagggaatcaggggrattcccctggatcccaatgacaagtcagatgccctggtcccagtgtccgggacctcgctggctgtcggcatcgacttccacgctggtgagccatttggtg

SEQ ID NO: 10275 - DNA, 201 bp, Homo sapiens
ttgtgccactgcactccagcctgggggacagagtgagaccttgtctcaaaaaaaaaaaaaatagggaatggaaatggaagcaaggctctctaccctgcccrttcctgcccagccttgccctcctgtgcctctgctaataccatctccaactactactgtgtgtgccaagggcatccctccccactgctcccatctgggggc

SEQ ID NO: 10276 - DNA, 201 bp, Homo sapiens
aggtcctgagctgaaccacgcctttggcctgtgtcaccatggcaactacctcttctggactgagtatcggagtggcagtgtctaccgcttggaacggggtrtaggaggcgcaccccccactgtgacccttctgcgcagtgagcggccccccatctttgagatccgaatgtatgatgcccagcagcagcaaggtacctcctt

SEQ ID NO: 10277 - DNA, 201 bp, Homo sapiens
ctgcatcaacacccatggcagctataagtgtctgtgtgtggagggctatgcaccccgcggcggcgacccccacagctgcaaggctgtgactggtgagatgygcgcttggagggcatgaggtgacccaggctgtgtgggactgcccgggtggcagagctccagacaggcaggagaccagggccgctagaatgtgccaggagc

SEQ ID NO: 10278 - DNA, 201 bp, Homo sapiens
gctgaaccacgcctttggcctgtgtcaccatggcaactacctcttctggactgagtatcggagtggcagtgtctaccgcttggaacggggtgtaggaggcscaccccccactgtgacccttctgcgcagtgagcggccccccatctttgagatccgaatgtatgatgcccagcagcagcaaggtacctccttggggctggg

SEQ ID NO: 10279 - DNA, 201 bp, Homo sapiens
gtggagactgggcaagaggcctgagcgatgctgtgacggtgatggtgctgtctccacaggtgatcctaaagtcagagcctgtccaccccttcgggctggcygtgtatggggagcacattttctggactgactgggtgcggcgggcagtgcagcgggccaacaagcacgtgggcagcaacatgaagctgctgcgcgtggaca

SEQ ID NO: 10280 - DNA, 201 bp, Homo sapiens
tcaatggggcctatcggacggtgctggtcagctctggcctccgtgagcccagggctctggtggtggatgtgcagaatgggtatgtggctgaggagggttgrgggagcccctgaaagcagcatccaagcccagcctccctgcaggccactggtgcgatgggttacgggatctcccagggctcactgcctacccatcgccagg

SEQ ID NO: 10281 - DNA, 201 bp, Homo sapiens
gaccaggtgttggacgcagacggcgtcacttgcttgggtatgaggtgcctggctgggtgggagtgggaagcagaccccatcaggaggatgccgaagagtgrggaggggaggatccagggtcccagtcagagattaaggaggcaatgaggggcccttagggggccaacaggaagcaagggagggggagagcaaaggctctgg

SEQ ID NO: 10282 - DNA, 201 bp, Homo sapiens
  misc_feature (1)...(201): n = A,T,C or G, or insertion/deletion polymorphism (see Tables 1-2)
actgggtgcggcgggcagtgcagcgggccaacaagcacgtgggcagcaacatgaagctgctgcgcgtggacatcccccagcagcccatgggcatcatcgcygtggccaacgacaccaacagctgtgagtggggctgccgccagctgcctcaccctcctgcnnnnnnnnnnnnnnnnnnnncacaccacacatactatacca

SEQ ID NO: 10283 - DNA, 201 bp, Homo sapiens
cctagagccccctctcctagagcctctgctgacacctacacagtgtcaggcccaggactgggcattttacttccatggttctcccaccagagctgtcagarggagctctaccccattttacacgaggggaggctgagcctcacagaggcttgcaggtcctcccccaggtcacccagagctctccctcccctgccccttcct

SEQ ID NO: 10284 - DNA, 201 bp, Homo sapiens
gtcacactgaagtacagtaagcattaagtagagtaaacatcactattgttgcttgggaaagaattgcagtttccatccagataatttgtttcatgaggaaktttgtactagaaaaaattactttgtattattaaaaaatagtaaaacaaacaaaaatggtgcaaagggcttagtacttgtcccacgaccggggtctgactt

SEQ ID NO: 10285 - DNA, 201 bp, Homo sapiens
taaaagcacacacatcctcaacggcacacctgccgaaaaccccatgcacctggccctcccacagcagccatccccatgccctccccactggctgcaagccrctgtgcctgccgtgactgagcagaggcttgggagctccatgaagtcagtgaatgggtgggtgcactctgggtgcatgcacagcagagaacactctccagc

SEQ ID NO: 10286 - DNA, 201 bp, Homo sapiens
tctgtacctcagttcctgccccacccctccctggccaagctttgtccctgggccccgtggtgtctggttcaaggcactctgtgacaggccagggcaggtgytgtgggccaggagctctgtcctgcgtccttctggcccccacagagaaaactctggcctgacgatacggggcgggcactgttctagagacagcctgtggtg

SEQ ID NO: 10287 - DNA, 201 bp, Homo sapiens; identical to SEQ ID NO: 1516

SEQ ID NO: 10288 - DNA, 201 bp, Homo sapiens
ctccaccaggcagtgctcctgctcctctcctggcctcctgagtcagatctcaggacagcagccagagtgatcctgacaacataagtcagatcatgccctggccctgccctccagcctgtactggctccctgcacccttggaacaaatgccaagcccctctgcacggcctgcagggcccccacccctacccctctgacctgc

SEQ ID NO: 10289 - DNA, 201 bp, Homo sapiens
acctgcgggggaccccagcccagtctctcgcttccttctctccggctattttgccacacccctccaccctctgccagccagctcccctccctgccccagcrcctgcctgctcccaccaccaccagccccaaccctgcccctctgccatcggtgcatctggtgccccccgggagccactgatctctgcctgtcacctcaaga

SEQ ID NO: 10290 - DNA, 201 bp, Homo sapiens; identical to SEQ ID NO: 1473

SEQ ID NO: 10291 - DNA, 201 bp, Homo sapiens
ttttagaggaaaagcccctcaacctgctcagaagcagactcccgcctgcttctctgtagaaggacagaatgccctcctcccagtccccagcagtccctgtscccagaccaagaagctggtgtcctgcctgggcctgcctcctctggccctccggcctgcccacactcaccccttctccctccccaggaccatgtactggtc

SEQ ID NO: 10292 - DNA, 201 bp, Homo sapiens
caagtgcagccgctgtctcgaaggggcctgtgtggtcaacaagcagagtggggatgtcacctgcaagtgagtggggccctcctccacagttccacccagcygggcccctgccctgtcctagccctgccctgcccctcccttcctcagcatcccaggcacgcctctgccagccccagccccagcctctgattccttcctgca

SEQ ID NO: 10293 - DNA, 201 bp, Homo sapiens
cgaactaggtgctacgtatacagacctgtcctttcagccttttctgggacattttctgctgcacgtagtccagcctgcatgtctgtctaaaaatgtagcayccgaagctaaactcggtactccatgctcgtagcttgatcaggagagactggcacatcaatccccagacccctggaagggatgtcccctcacctccggctg

SEQ ID NO: 10294 - DNA, 201 bp, Homo sapiens
tgaggccccagccctctgccgtgagtcacacgccctgccccaccctgttggatggcaggcctgcagggcagctcggctctggcagtgcctatactggagcrggcaggaagctgggggcacccaacttctcgctgacccctgactcattccctccccagatcagcacacctgcccctcggaccgattcaagtgcgagaacaa

SEQ ID NO: 10295 - DNA, 201 bp, Homo sapiens
taaactcggtactccatgctcgtagcttgatcaggagagactggcacatcaatccccagacccctggaagggatgtcccctcacctccggctgtctgcagrccataccacagcatggccctttggcagccaccatcgcttatagccactaacactctagtcttttctcttacactgctgttcggctgtgtctctcactgtg

SEQ ID NO: 10296 - DNA, 201 bp, Homo sapiens
ggatgcacacaggcggagcgctcaggcgctaggggccacaggtcccatccaagtggccccaaagcagaggcttggctcccccatcccccacacttctgttmattgggttagattttgctgtgggtctccatgcctgacgccccgtaattatcgtcagcagaactgccagcctgataattaacaaaatgatcagccttacct

SEQ ID NO: 10297 - DNA, 201 bp, Homo sapiens
catccactttgggaacatccaacagatcaacgacgatggctccaggaggatcaccattgtggaaagtgagcccagaccctaagtcttcccaggaagtgggwcatggggcggggagcagcacagactcttagaccccagccaggcactctaccctaggtctgaatcccagcagctacaactcagctgaatccaactgcaccc

SEQ ID NO: 10298 - DNA, 201 bp, Homo sapiens; identical to SEQ ID NO: 1481

SEQ ID NO: 10299 - DNA, 201 bp, Homo sapiens; identical to SEQ ID NO: 1482

SEQ ID NO: 10300 - DNA, 201 bp, Homo sapiens
gtcaacgtcagcatcagctggcccaacggcatctcagtggactaccaggttcgcacgccaacttggccttggatccgatggtagacccctgacccaggctyctgttccctgtgatgagcccattctgggaggacttggagcccaggggaagtcacagggtctcccagcccagccctccacccagagtaggactcctgctac

SEQ ID NO: 10301 - DNA, 201 bp, Homo sapiens
cagtaccgtgagtgagccatccctgggccccagggcatgcgggagggtgacgggggaccccagagcatggggtgatgttcaacctgtgcctgggacccacmggggcaagttcaggaaagaaggccttatgcagctgagccaggcccgagctgctggcgcttccccacaaaggtgctggcacacttcccctgaggcagtgca

SEQ ID NO: 10302 - DNA, 201 bp, Homo sapiens
caccaacaaaacgctcctcatcagcacgctgcaccggcccatggacctgcatgtcttccatgccctgcgccagccagacggtgagcaggcaaggggtgggrgcaggcgaacggtgagccaggcaccggggtccctgggagttcctgctcatcccttctctagcattgaccaagccctcctggccagacactgggagactcc

SEQ ID NO: 10303 - DNA, 201 bp, Homo sapiens
tcgttgcccttgtcacactggaaatgaccacattcttgccctttcctcggcagattttgatgagtgctcagtgtacggcacctgcagccagctatgcaccracacagacggctccttcatatgtggctgtgttgaaggatacctcctgcagccggataaccgctcctgcaaggccaagaacggtgggtggggttgcctctg

SEQ ID NO: 10304 - DNA, 201 bp, Homo sapiens
cgtcaatttttggcagccgacgtcgtctgccccgctccttgaactctgacatgcagacacctagaaagtcagacactaaggtaacagccataaaacgccgyccagaagggggcagtgaccaaaagcacgttcactggcccctgggaaccgcctggcgcctgccttctgcaaagtatcattcccgtgtgggctgagcctggg

SEQ ID NO: 10305 - DNA, 201 bp, Homo sapiens
agccttgctgctttctctccagggcagcaatcctaggggctttcccacctcttctgctttctcttctatgcctgaaactgcctctggggtcccctgccctwtggggagtaacgtcactccccactagcgacaaaattgagtgtacctgctgctggagaggttgcagaaagatggggtggagaatgggactattgagggccc

SEQ ID NO: 10306 - DNA, 201 bp, Homo sapiens
gacgtggcgtgaagacgtggtgaccaatggcattggccgtgtggagggcattgcagtggactggatcgcaggtgagcagtgggcaggtttgtggggcttgrggtgtggcagaggactgggggacgaagtgagaggaggagttggcgggagcaggaagaggagctgtaggggtgcctgggagcttggagacaccaggtccac

SEQ ID NO: 10307 - DNA, 201 bp, Homo sapiens
tttttctctgcctgtctccatttacccccatccaggcctcttggtatcccaaaagcttcttgggagcaagagtctctctgggctttcccactcaccccctrgctccctcccctctgttttggctatttttcccccttcctggccagacccagtgtccagttcagcaccaaaagtttcctctccactttcctccgacttcct

SEQ ID NO: 10308 - DNA, 201 bp, Homo sapiens
ggccgtgtggagggcattgcagtggactggatcgcaggtgagcagtgggcaggtttgtggggcttggggtgtggcagaggactgggggacgaagtgagagraggagttggcgggagcaggaagaggagctgtaggggtgcctgggagcttggagacaccaggtccacctgtcctcacctaacctccctgagccccaccaac

SEQ ID NO: 10309 - DNA, 201 bp, Homo sapiens
gctgtccaagccaccctgtctgtctgtctgtccaggccgcaaagcagaggcccagactcaggaatgacaaaaatgtgtctgagcctcaggaaagagccacygggcaacacccaaaatacaaaaaattcagtgaaaacctctcggtttgggtttgggaggcccttgctgccccacccccataaggtcgaaaattcagattcc

SEQ ID NO: 10310 - DNA, 201 bp, Homo sapiens
atgctgatgaggccctgtctcctccagggtctgaggactgacccccacttccacccccaccctacaggtacttgttctggactgagtggggtcagtatccrcgtattgagcggtctcggctagatggcacggagcgtgtggtgctggtcaacgtcagcatcagctggcccaacggcatctcagtggactaccaggttcgca

SEQ ID NO: 10311 - DNA, 201 bp, Homo sapiens
tgctcctctctgtctcccctatgcccttccctcctctctgaggagccctgaaggccaccccttaaaatcctctccccactgccagggccagagaacgacarcgttctccctgcaatttcccttccttgttttttgtttttgttttgttttgtttttgagacacagtctcactccatcacccagactgaaatgcaatggcgt

SEQ ID NO: 10312 - DNA, 201 bp, Homo sapiens
acagctgtcttctcaggcgactctggctcctgcagggcagagggtcatctcaccctccttggcaccctgatgcctagtgcagtgcctggcatagagctggmcttcagtgtgtgccagcagaatagaaatgtgatggcacagtctgaggaaaagccacgaaaggccaggagactgggagctcagccttgggtgggggagaag

SEQ ID NO: 10313 - DNA, 201 bp, Homo sapiens
ggccgacgcccgcgaggactacattgaatttgccagcctggatggctccaatcgccacgttggtcagtgtgccagtgaggctgtccaggcacagcagactyagtggggatggaggtctgaagcgacaggggatcaagttttgggggcaagagtggacataaaaagtggaggatatggcctgaggacaccactcactggggt

SEQ ID NO: 10314 - DNA, 201 bp, Homo sapiens
tactgagcccacaataagagttagttgtcagccgggtgcggtggctcacgcctgtaatcccagcactttgggaggctgagatggatgtatcagatgaggtygggagttcgagaccagcctgaccaacatggagaaaccccgtctctactaaaaatacaaaattagccatgcgtggtggcgcatgcctgtaatcccagctac

SEQ ID NO: 10315 - DNA, 201 bp, Homo sapiens
aggtttgaactccagctctgacacttgttagctgtgagaccatggggggtctgtaccatgaaccatctgtaactggggctgacacccacctctcagggtgrtggtagggcttgaggaggtggagtgggccggcaccctgtccgagctccggctgactggcactgtgcctgccccttggccctgcagtgctgagccaggaca

SEQ ID NO: 10316 - DNA, 201 bp, Homo sapiens
cctcgtgtgtgaactgtctgtgcaatagtggggcccttcctgggcattggggcactgctggcctctatggctctggggtggctttgccctggcaggcttcyaggttccaggtgcctacgcgtcctggcctgtgccctctgttgtggattctcaggctttgcctcctgatctctggaccctcttcccccagcctcatgttct

SEQ ID NO: 10317 - DNA, 201 bp, Homo sapiens
gtgacgggggaccccagagcatggggtgatgttcaacctgtgcctgggacccacaggggcaagttcaggaaagaaggccttatgcagctgagccaggcccragctgctggcgcttccccacaaaggtgctggcacacttcccctgaggcagtgcaccccctgcaccaagattatgcaaacagaaaagctctgttcaaccta

SEQ ID NO: 10318 - DNA, 201 bp, Homo sapiens
gggcagattggccgtggaggcttttcccgaaagaggtgactgtgagtggcgtatgaacagggtggagctgtcccgggcatggaggcagttctttccacccsgagcctgggttggggaggccaagctctcacagtgctctctctctccccaggcctggccgtggattatcacaatgagcggctgtactgggcagacgccaag

SEQ ID NO: 10319 - DNA, 201 bp, Homo sapiens
gccaggacatcccgcacatctttgcactgaccctgtttgaggactacgtctactggaccgactgggaaacaaagtccattaaccgagcccacaagaccacrggcaccaacaaaacgctcctcatcagcacgctgcaccggcccatggacctgcatgtcttccatgccctgcgccagccagacggtgagcaggcaaggggtg

SEQ ID NO: 10320 - DNA, 201 bp, Homo sapiens
gcccaaagatttctttacttgttggggaaactgttggagatggagttccaggcaggggtcccagaaagtcactgccttaggagtttcccagtttgcaagargcaccatctctgatggtggtagttgaagggggtagtgagtagatggaaggaagccagtggtcctggagaggaggagcccagaggaggccagcatgtgtcc

SEQ ID NO: 10321 - DNA, 201 bp, Homo sapiens
tagtggccacaggaggaggaaccggtgtggggagagagaatttggtctggatgtgttgagtttgaggtgtctgggaaccacaggtgccagtgtcgtggacrgcatggccagggcctgagtgcccctcaggtcccctctgactccacctcctcccccaggcctaagtcaccccttcagcatcgacgtctttgaggattacat

SEQ ID NO: 10322 - DNA, 201 bp, Homo sapiens
tatcaacatcaactggagatgcgacaatggtaagagcttgctctcctcacctgctgattcctaagacagctagaggctacagccaggccctccagggaagkcaaagggcttcagaatccagcagggcctccctccaggacactgaatccctgctgggttgcctgggagaaaacaggagaagtcagaaatgcctggagggag

SEQ ID NO: 10323 - DNA, 201 bp, Homo sapiens
gaggctacagccaggccctccagggaagtcaaagggcttcagaatccagcagggcctccctccaggacactgaatccctgctgggttgcctgggagaaaayaggagaagtcagaaatgcctggagggagccacgatggaccaaggggagaccatcaccttttagtgtcattcctaccccaggcagggcctgagctgcccac

SEQ ID NO: 10324 - DNA, 201 bp, Homo sapiens
tgagaaatccgagtctctgctgccctctcatggtggctaggggtcctgcaggtggttccccagagctaccagccaggtgcgcttcctcccggcccatgctstggcctcaggctagggtgtgtgtgctgggtggaggatagggatgatggtggggggggatgatatcaaaggagaagcagagaacagttggagggtgacagg

SEQ ID NO: 10325 - DNA, 201 bp, Homo sapiens
aggtacattaggaacgtagcaaattgggggagaaggaatagaagtcagtcatgaatgaccccagaagtctgggggtgatgggaccttttgccagtagtggycacaggaggaggaaccggtgtggggagagagaatttggtctggatgtgttgagtttgaggtgtctgggaaccacaggtgccagtgtcgtggacagcatgg

SEQ ID NO: 10326 - DNA, 201 bp, Homo sapiens
ccaagcatctcaaatgcagccaaaagtgcgaccagaacaagttcagcgtgaagtgctcctgctacgagggctgggtcctggaacctgacggcgagagctgycgcagcctgggtgagacaacagtgaggtgtggtggggcaggccgaggcaggcctctgagctgcagtgggttgggcttggtggccaggtgccaaaggctga

SEQ ID NO: 10327 - DNA, 201 bp, Homo sapiens
gacgggcatggagggggcccggctcgcagagcccagctgctgctgaagtcacacaaaagcaagggatgggatggggcttggactggggcagggcagattgsccgtggaggcttttcccgaaagaggtgactgtgagtggcgtatgaacagggtggagctgtcccgggcatggaggcagttctttccacccggagcctgggt

SEQ ID NO: 10328 - DNA, 201 bp, Homo sapiens
atgtgaaaggagctgagctgggtggggtgcacacctgcatcccacagccccagccctggcctcttgcttctccaggctctgagtaccaggtcctgtacatygctgatgacaatgagatccgcagcctgttccccggccacccccattcggcttacgagcaggcattccagggtgacgagagtgtccgcattgatgctatgg

SEQ ID NO: 10329 - DNA, 201 bp, Homo sapiens
gagggcagagctttcgccaaagcctggatgacaaaggcaccagtgagcctttcccaaggcaggccctgccctctgtaccctcccctcccccaggcaccaaygtgtgcgcggtggccaatggcgggtgccagcagctgtgcctgtaccggggccgtgggcagcgggcctgcgcctgtgcccacgggatgctggctgaagacg

SEQ ID NO: 10330 - DNA, 201 bp, Homo sapiens
aaccatctgtaactggggctgacacccacctctcagggtggtggtagggcttgaggaggtggagtgggccggcaccctgtccgagctccggctgactggcmctgtgcctgccccttggccctgcagtgctgagccaggacatcccgcacatctttgcactgaccctgtttgaggactacgtctactggaccgactgggaaa

SEQ ID NO: 10331 - DNA, 201 bp, Homo sapiens
gaaaggtccccgcccagcttttgccctgccaagggaagtggagaacttgttggtgggaccccagagtcctgggtagctggcacagtcctggtggctccacytttagcctctcccctgcttggttaatctgggccagggtcaaagcgcccctgcattcctaggtccgtctctgttctctctcttgggctttatcctgctcca

SEQ ID NO: 10332 - DNA, 201 bp, Homo sapiens
gtaaggcccagcgatgccagccaaacgagcataactgcctgggtactgagctgtgtgttcccatgtcccgcctctgcaatggggtccaggactgcatggayggctcagatgaggggccccactgccgaggtaaggacttttccactctctactctcccgtctggatgcagcatattatcagcccaccttccgaggactgtc

SEQ ID NO: 10333 - DNA, 201 bp, Homo sapiens
tgcacggctagccaggtgaggctgtcccccagaccccatcaccagtgcccgctccccaacccccaaatcctccttggaccccaacacctgctctgtcctartgtcctcatgcatctggttttcccacactaacacccccacatttcttgcctacctcttgtctccccacagcaatacttttacccccgtcacctcacacag

SEQ ID NO: 10334 - DNA, 201 bp, Homo sapiens
tccagggtctgaggactgacccccacttccacccccaccctacaggtacttgttctggactgagtggggtcagtatccgcgtattgagcggtctcggctaratggcacggagcgtgtggtgctggtcaacgtcagcatcagctggcccaacggcatctcagtggactaccaggttcgcacgccaacttggccttggatccg

SEQ ID NO: 10335 - DNA, 201 bp, Homo sapiens
aggagtgtatgcaggaggcaggagtgagttaggggaggctgaactgagggcctcactctggcccaggcactccctgctgccccagacatggggctggcagygagctcagccctggaggtgaggtgggtgcctctggcctgtaggatgggaagctgtactggtgcgatgcacggacagacaagattgaacggatcgacctgg

SEQ ID NO: 10336 - DNA, 201 bp, Homo sapiens
tggcagcgagctcagccctggaggtgaggtgggtgcctctggcctgtaggatgggaagctgtactggtgcgatgcacggacagacaagattgaacggatcracctggagacaggtgagaaccgcgaggtggttctgtccagcaacaacatggacatgttttcagtgtctgtgtttgaggatttcatctactggagtgacag

SEQ ID NO: 10337 - DNA, 201 bp, Homo sapiens
aagaaggggtgtcacagaaaggggcacgagcatagctgggtgtagacccactgccgggaacagccctgcccatctcagaggctgttacaccagcaaccttaaaagtcaacatctggcagcatcacatttccaaagaaatgcaccacagggctgagaggaagaatctggcctgtggttgatctgaccccctaagggagatta

SEQ ID NO: 10338 - DNA, 201 bp, Homo sapiens
tccccctgttccttgtccactgacctactcaacaggcctgtctgggcagacagcttgtcagtttcctccccagccctgcatcttgccatacagtgggcttstgggtaggtggctatggggtgtcctggaggtaaccttctcaacttctactctggcctcatctccttatctgacttcctccccaggagaagctggtagccc

SEQ ID NO: 10339 - DNA, 201 bp, Homo sapiens; identical to SEQ ID NO: 1475

SEQ ID NO: 10340 - DNA, 201 bp, Homo sapiens
cttctgggtaggtggctatggggtgtcctggaggtaaccttctcaacttctactctggcctcatctccttatctgacttcctccccaggagaagctggtasccctcccttggcaaacagatttgccttgcctcccagtctgctaaactcactgggcctctcaggggcagagtccaggaggctagaagagtccaaggggaaa

SEQ ID NO: 10341 - DNA, 201 bp, Homo sapiens
cctgcatcccacagccccagccctggcctcttgcttctccaggctctgagtaccaggtcctgtacatcgctgatgacaatgagatccgcagcctgttcccyggccacccccattcggcttacgagcaggcattccagggtgacgagagtgtccgcattgatgctatggatgtccatgtcaaggctggccgtgtctattgga

SEQ ID NO: 10342 - DNA, 201 bp, Homo sapiens
ctatttctcatctctctggagatgtacaaaaaaaggaatttctggccaggcgtggtggctcatgcctgtaatcccagcactttgagaggccgaggcgggcrgatcatgaggtcaggagttggagatcagcctggccaacatagagaaaccctgcctttactaaaaatacaaaaatcagctgggtgtggtggcgcgtgcctg

SEQ ID NO: 10343 - DNA, 201 bp, Homo sapiens
tgaataacatctatttctcatctctctggagatgtacaaaaaaaggaatttctggccaggcgtggtggctcatgcctgtaatcccagcactttgagaggcygaggcgggcagatcatgaggtcaggagttggagatcagcctggccaacatagagaaaccctgcctttactaaaaatacaaaaatcagctgggtgtggtgg

SEQ ID NO: 10344 - DNA, 201 bp, Homo sapiens
gtgtggtggcgcgtgcctgtaatcccagctactcaggaggctgaggcaggagaatcacttgaatcccagaggcagaggttgcagtgagccaagattgcacyactgcactccagcctggtgacagagcaagactccatctcaaaaaaaaaatttctacaaatattttttgggttccttctacctacttcccttttctaaaat

SEQ ID NO: 10345 - DNA, 201 bp, Homo sapiens
gtcaggatatgaaagatgggcagtttgtctctgtcatgtgggctttgtaagtaataagtactattattgtttcaattattctgtaatgaaaacactttccycttttggggttcttcctttctagactcccatagtgaccctctctggccacatggaggcagtttcctcagttctgtggtcagatgctgaagaaatctgcag

SEQ ID NO: 10346 - DNA, 201 bp, Homo sapiens
tattttttaatttatttttattattactttttttgtagagagagggtttcgccatgtagcccatgctggtcttgaactcctgggctcaagctgtctgcccrcctggacctcccaaagtgctgagattacaggcatgagccaccgcacccagcccaaataaagttttaagaaattacttggccaggcatagtggggcctttg

SEQ ID NO: 10347 - DNA, 201 bp, Homo sapiens
gcagtggcatgatctcggctcactgcaacatccacttcccaggttcaagcgattctcctgcctcagcctctcgagtagctgggactacaggcacctaccaycacgcctggctaatttttgtatttttagtagagacggggtttcaccatcttggccaggctgatctcgaactcctgacatcatgatccacccgccttggcc

SEQ ID NO: 10348 - DNA, 201 bp, Homo sapiens
ctcaacctccagggctcacaaaatcctcacgcctcagcctcttgagtagctggaactacaggtgcatgccaccatgccctggctaattttttttttttttwaagagatggggtcttgttatattgcccaggctggtcttgaactcctgacctcaagcagtcctcccacctcggccttccaaagtgctgggattacgggcgt

SEQ ID NO: 10349 - DNA, 201 bp, Homo sapiens
tagtagcaaagattctttttaatatattggctatatatgttgtgtgtgttatgtattgtgtgtatattttatgtgtgtattgaatatatatagtgtgtgtrtatatatatatgtatattcctgtatattcaattttgaagccctctttttttgtgagagtgttttattcaagaaataaatgaacacattctttatatttgt

SEQ ID NO: 10350 - DNA, 201 bp, Homo sapiens
tctatctttagtagcaaagattctttttaatatattggctatatatgttgtgtgtgttatgtattgtgtgtatattttatgtgtgtattgaatatatataktgtgtgtgtatatatatatgtatattcctgtatattcaattttgaagccctctttttttgtgagagtgttttattcaagaaataaatgaacacattcttt

SEQ ID NO: 10351 - DNA, 201 bp, Homo sapiens
aaaacccagaatgttacaaaacagatgacccactttcatcaacaaatacatggcaaggagaaaaaggaggaggaactgttaaagattaaaagaaacattartcaaatataatgtatggattatggatgctgatttttgaaagctcactgtaaaagaacattgactatttgatgttagaaggagtgattgttaaattttaaa

SEQ ID NO: 10352 - DNA, 201 bp, Homo sapiens
gttcaagcaattctcctgcttcagcctcccgagtagctgggattacaggcgcgtgccaccacacccggctggctaatttttgtagttttagtagagacggrgtttcaccatgctggtcaggctggtcttgaactcttggcctcccaaagtactgggattacaggtgtgagccactgcgcacagccgagagggagtttatta

SEQ ID NO: 10353 - DNA, 201 bp, Homo sapiens
cagaaggcagagtccaggcttagactgcagttcctcgcttacctgtgcagtctaattttgagctgcctctttgtagtcttaaaaggcaggagcttcgtgtwgtgggtctgctaacccgtacgtttccgtgggcaagtcgtgtgtactcctcgccatggctcagctccaaacacgcttctacactgataacaagaagtaagt

SEQ ID NO: 10354 - DNA, 201 bp, Homo sapiens
ctttgggaggccaaggtgggtggatcatgaagtcaagaatttgagaccagcctgggcaaaatagtaaaccccatctctactacaaatacaaaaattagccrggcatggtggcaggtgcctgtaaacccagctactcaggaggctgaagcaggagaattgcttgaacccgggaggcggaagttgtagtgagccgagctcgtg

SEQ ID NO: 10355 - DNA, 201 bp, Homo sapiens
gcgttgagactacaggtatgagcctctgtgcctggctcttcccactctcttttatatactccttatatttaaggtaggtactctacctagttacctagttyggggcttttagtttagaaagacattagagattgtggagtattaataagtgaactgtgtacattatttaaagattaaataataggacttaaagatactgag

SEQ ID NO: 10356 - DNA, 201 bp, Homo sapiens
ttcttattcttgtgttctcctttctccagatagtttgtcctgcttattattgagtgcttctatggatcagactattctcttatgggagtggaatgtagagmgaaacaaagtgaaagccctacactgctgtagaggtcatgctggaagtgtagattctatagctgttgatggctcaggaactaaagtaagtagctagaatat

SEQ ID NO: 10357 - DNA, 201 bp, Homo sapiens
tgtattttcctcagagttccacaaacatgtggagtttgatttccttattaagggccagtttctgcgaatgcccttggacaaacacatggaaatggagaacrtctcatcagtaagttcaaattcttatcttctgtatttcacttgaggcattatcggctattgtaggtaaactccttttagaatcacactgaatctatcttt

SEQ ID NO: 10358 - DNA, 201 bp, Homo sapiens
tataaagtgttgtaaaaaacaaccccttattaaaacaactgtgggccgagtgcagtggcccactgcaggagtgggcctggctggagtgcagtggcgtgatsgtagctcactgtagcctcaaactgctgggctcaagtgatccttctacttcagcctcccaaatagatatgactatagtcatgtgtcattaagcccagctaa

SEQ ID NO: 10359 - DNA, 201 bp, Homo sapiens
catcacgcctggctaatttttgtatttttagtagagacggggtttcaccatcttggccaggctgatctcgaactcctgacatcatgatccacccgccttgscctcccaaagtgctgggattacaggcgtgagccactgcacccagcctgtttgtttgttttttgaggcagagtctcactctgtcgcccaggctagagtgta

SEQ ID NO: 10360 - DNA, 201 bp, Homo sapiens
tgttatgtattgtgtgtatattttatgtgtgtattgaatatatatagtgtgtgtgtatatatatatgtatattcctgtatattcaattttgaagccctctktttttgtgagagtgttttattcaagaaataaatgaacacattctttatatttgtggaagaactggcaagaaagggaatagcaaatatgtgtgtacaaata

SEQ ID NO: 10361 - DNA, 201 bp, Homo sapiens
agttttcagaaaaaaatttctgtttaatctgtttttaaggccatgtggaaatatggtggttgtagttaaggaataaagattttggtataaagttgtaatayagaggtaatcaagacattgattgttctacagagggctgagttatgcaggcataaaacaagcgttttagtgcttaggccccatttactagtgaagcacaaa

SEQ ID NO: 10362 - DNA, 201 bp, Homo sapiens
ctatctttagtagcaaagattctttttaatatattggctatatatgttgtgtgtgttatgtattgtgtgtatattttatgtgtgtattgaatatatatagwgtgtgtgtatatatatatgtatattcctgtatattcaattttgaagccctctttttttgtgagagtgttttattcaagaaataaatgaacacattcttta

SEQ ID NO: 10363 - DNA, 201 bp, Homo sapiens; identical to SEQ ID NO: 1528

SEQ ID NO: 10364 - DNA, 201 bp, Homo sapiens
gtgtctttatagcagcatgatttataatcctttgggtatatacccagtaatgggatggctggatcaaatggtatttctagttctagatccctaaggaatcrccacactgacttccacaatggttgaactagtttacagttccaccaacagtgtcaaagcgttcctatttctccacatcctctccagcacctgttgtttcct

SEQ ID NO: 10365 - DNA, 201 bp, Homo sapiens
tagcagcatgatttataatcctttgggtatatacccagtaatgggatggctggatcaaatggtatttctagttctagatccctaaggaatcaccacactgwcttccacaatggttgaactagtttacagttccaccaacagtgtcaaagcgttcctatttctccacatcctctccagcacctgttgtttcctgacttttta

SEQ ID NO: 10366 - DNA, 201 bp, Homo sapiens
ctatttttcctctaagattgcaacagagactatcacaaggcatttggcaacctgagaagccctggatggccagataactacgacaatgacaaggattgcaycgttactctcacagccccccagaaccacaccatttccctcttttttcattcacttggcatcgagaactcagttgaatgcagaaacgatttcttggaggtg

SEQ ID NO: 10367 - DNA, 201 bp, Homo sapiens
catttatccccctaatgtggaatgtgtctggaacatcgtcagttcccctggcaaccggctccagctgtcttttatgtaaatccttttttatggtgtattgyttcagtgctaatgaatctgtaggaaagaagttctggtgctaataggatgggcaactcatagtgtacgtgaaatttaggaagtatttttccaaatttcctc

SEQ ID NO: 10368 - DNA, 201 bp, Homo sapiens
agtgtacgtgaaatttaggaagtatttttccaaatttcctctgtttcagtcatagtttgagttataaatagcatgaagtttctctcgaccatggttcttgvgtcctgtctaacatttccaaaagtacattcttgagtccttggtgaatgaatgaatctgtggcgcattcatgttcagagtacaggaatcttatcttttttt

SEQ ID NO: 10369 - DNA, 201 bp, Homo sapiens
tttcttggaggtgatatgcatttgaatatcgtttgaatgaattatttaaaagatggtggatcacttaagattttacaccttttatctagtgctgctaataytatatgattcttatttgtttcattaatttattcattaccctttcattccctaaacatctacagagcaccagtccaaacaccggaaattgggaaccttagg

SEQ ID NO: 10370 - DNA, 201 bp, Homo sapiens
cttccccttgccttccgttcccctcccttcccttcccttcctttcccttccccttccccttcccccttcccttccttttcccttcccttcccttccttttyccttcccttcccttccctttttcctttaccctttcccctttcctgtttgttcatgctttcatttcattggggtataaacctagaagtgaaattgctggtt

SEQ ID NO: 10371 - DNA, 201 bp, Homo sapiens
gtttcttggtagcttcagcctttgttcccaacaaaacatcttctgcttcttagcaccaagggctttctttctttcttttctttcttcttctttcttttctsccctgcaacccccctcatccgatttggctcctagggctgctggcaccttctgcccagcctggccaggaagggtgttctggcatatggtctttgcatatgg

SEQ ID NO: 10372 - DNA, 201 bp, Homo sapiens
cctctttgttctgaagacgtgattcttgttgtttccctgctcactttgttttgttttgtttgtttttgtttgtttgtttttgagacagagtcttgctcttsacacccaggctggagtgcaattgctgcaacctctgcatcctgggtacaagcaattctcctacctcagcctcccgagtagctgggattacaggcacctgac

SEQ ID NO: 10373 - DNA, 201 bp, Homo sapiens
cacttcagcctctatctcccaggcttaagccatcttcctgcctcagcctcccaagtagctgggattataggcacaggccaccacacatagctacattttawtttttgtagagagggggtttcactgtgttgctcaggctggtctcaaactcctgggttcaagtgatcctcccacctcagcctcccaaagtgctgagattat

SEQ ID NO: 10374 - DNA, 201 bp, Homo sapiens
tttcttggtagcttcagcctttgttcccaacaaaacatcttctgcttcttagcaccaagggctttctttctttcttttctttcttcttctttcttttctgscctgcaacccccctcatccgatttggctcctagggctgctggcaccttctgcccagcctggccaggaagggtgttctggcatatggtctttgcatatggg

SEQ ID NO: 10375 - DNA, 201 bp, Homo sapiens
ctctttgttctgaagacgtgattcttgttgtttccctgctcactttgttttgttttgtttgtttttgtttgtttgtttttgagacagagtcttgctcttgwcacccaggctggagtgcaattgctgcaacctctgcatcctgggtacaagcaattctcctacctcagcctcccgagtagctgggattacaggcacctgaca

SEQ ID NO: 10376 - DNA, 201 bp, Homo sapiens
tccttaaatgtttatttgtgaaagtaaaacgagcatcttagatttcttctcatgtcaacatttccaggaatctttgagtcagtgctcgcaacaactgcaartttttagagtttatagtctcttgtaagatgtgaagactgagtgggagagtgtagcacaaagaaataggggtgaacgcatcgtgatatgagatgtggggtt

SEQ ID NO: 10377 - DNA, 201 bp, Homo sapiens
acttcagcctctatctcccaggcttaagccatcttcctgcctcagcctcccaagtagctgggattataggcacaggccaccacacatagctacattttattttttgtagagagggggtttcactgtgttgctcaggctggtctcaaactcctgggttcaagtgatcctcccacctcagcctcccaaagtgctgagattatg

SEQ ID NO: 10378 - DNA, 201 bp, Homo sapiens
tagcttcagcctttgttcccaacaaaacatcttctgcttcttagcaccaagggctttctttctttcttttctttcttcttctttcttttctgccctgcaayccccctcatccgatttggctcctagggctgctggcaccttctgcccagcctggccaggaagggtgttctggcatatggtctttgcatatgggtttagctt

SEQ ID NO: 10379 - DNA, 201 bp, Homo sapiens
ggtgggaagatcgcttgaacctgggaggcagatgttgcagtgagccgagatcgcaccactgcactccgcctgggcacaagaccctgtctcaaaacaaaacraaacaaaacaaaacaaaaaggtgcataaaaatgcagcatcttcatataactctacttatcagaatgtaagaatataacatgcaggaacaatggtgcagga

SEQ ID NO: 10380 - DNA, 201 bp, Homo sapiens
ttgttcttctctctccctctccctttttgtctctttctctctctcctccctgtatctctctctcactctctctttcttccctccctcctttatgccccacsacaggaatttttgtttccatctgatacttgaggatgatctttttcaaacgtttatcttgtgacttgcatttgtattaacatgcttagctactttgcttcc

SEQ ID NO: 10381 - DNA, 201 bp, Homo sapiens
gaaagatggaataatcccgttaggttggagtcacagtgcaactaactcttaactcactccagcttgaatggaccattattgatcagagtcaacgtttgccrtttgcctgatagatgctgggaagcaaagccttgctttccagccgtggagagtgagaattcctcctcctagctgtccttcattactccacagaatggatct

SEQ ID NO: 10382 - DNA, 201 bp, Homo sapiens
cttggtgggacgatactgtggaaactccttccctctcaattattcttccatcgttggacataccctgtgggtcagatttatctcagatggttctggcagcrgcacgggcttccaggccacatttatgaagagtaagttgtttctattttagtgatagcttccagaatatgtcttacaaactagaaataataattttctcag

SEQ ID NO: 10383 - DNA, 201 bp, Homo sapiens
tgtaaaataggatttttttttttttttttttttgagatggagcctcactctgtcacccaggctggagtgcagtggcacgatctcagctcactgcaaccttyacctcccaggttcaagcaattctcgtgactcagcctcctgagtagctgggattacaggagcatgccaacatgcctggctaattttggtatttttagtaga

SEQ ID NO: 10384 - DNA, 201 bp, Homo sapiens
ccctttctttgttcttctctctccctctccctttttgtctctttctctctctcctccctgtatctctctctcactctctctttcttccctccctcctttaygccccacgacaggaatttttgtttccatctgatacttgaggatgatctttttcaaacgtttatcttgtgacttgcatttgtattaacatgcttagctact

SEQ ID NO: 10385 - DNA, 201 bp, Homo sapiens
caagttgtcagcagtgtcagtggaaattagtatcctgctgctcctctcagagcaacggcattttgaaagaggaccctgagggaaaaacgcccaaactcaaragcgtggtgctggctatggcagccctcccatctactagtggatgactggctactctgtcatggcaaggttactttgtttaaacacttagcagaataatcc

SEQ ID NO: 10386 - DNA, 201 bp, Homo sapiens
tggaaattctttgacatttcatttttactccgactcttcaatctcagggaagggattccttctggagtggtttgcagtggatgcacctgatggtgttttamctaccattgctccaggtgtgtttggtaataaatgaagttctttttaggactgatatgtgcaggccaatgtttcaaaggatcctatcataacaggggtcag

SEQ ID NO: 10387 - DNA, 201 bp, Homo sapiens
gattgcaccactgcactccagcctgggtgacagagcaagactctgtctcaaaaataaataaataaataaataaataaataaataaataaataaataaatargaggatcctccttttatagatgaaataatgaaaagtaggtgaagctaaacattttttgttaacacttcttagcttgtaattgtaatagttgaatttcaaa

SEQ ID NO: 10388 - DNA, 201 bp, Homo sapiens
agccagtttctttgggaatgttctttcctaattttgattaggaaggatggatctccttttctagctattgtacactattagattcgtgggaaatgtagcakttttcaagtcagagaagcaatggtgtgtgcctgttggctgagttaaatcaagtgtagccactcatggcaaaccactgtttagggaaaagtttgaggaaag

SEQ ID NO: 10389 - DNA, 201 bp, Homo sapiens
tttccttccttccatttagttttcatgaattctatttcctggcattgaaaacattcttttgaaaaaaaaatattcttaggtgagaaacttgtaatactttyattaccaattcgcaagaaaattcatcttgtttttttcttgattattgtgatttcatatcttctcactcataatggacataatatggtagaaaatatatac

SEQ ID NO: 10390 - DNA, 201 bp, Homo sapiens
atctcagggaagggattccttctggagtggtttgcagtggatgcacctgatggtgttttacctaccattgctccaggtgtgtttggtaataaatgaagttmtttttaggactgatatgtgcaggccaatgtttcaaaggatcctatcataacaggggtcagatataaaaataagtacagccccaaagcccttccaccatat

SEQ ID NO: 10391 - DNA, 201 bp, Homo sapiens
tggcaaaccactgtttagggaaaagtttgaggaaaggaattagaggaagtaatacagtagacaggtttttcagactgaatcagagagtgctggaaaggaartactgaaagacaaccctagaccaaatcttaggtctgcaggtggtccactgtgtaagtgtgcacgtgtgtacttgtgtgtgttttaatgtcaatttaaaag

SEQ ID NO: 10392 - DNA, 201 bp, Homo sapiens
agcagttttcaagtgtataatacaatattgttaatgatagtcaccatgctgtacattagatctctagaagctattcattccagagaacataaacgttttascctttgaccaacatttccctattgcccccacctctcagctcctggccaccaccattctactttctgcttctatgagtttaactttttttagatttcacat

SEQ ID NO: 10393 - DNA, 201 bp, Homo sapiens
ggccacccgagctagcagcggcaacctgctcgggtccccttccacgctgtggaagctttgttctctcactcttcacaataaatcttgctgctgctcactctgggttcacactacctttatgagctgtaacactcactgtgaaggtttgcggcttcattcctgaagtcagcaagaccacgaacccaccgggaggaacaaata

SEQ ID NO: 10394 - DNA, 201 bp, Homo sapiens
agcccttccaccatatgttcagatgttgttttaaattcataaacactaccttttgtagaaattgtacgtttctttctaaaaaatgcaggtcccattatatwttttatattaattaggggcttgatatccataagatcgtctacttacaatttctagagaccactttagaaatccctgaaaatttgatttgcagatactaca

SEQ ID NO: 10395 - DNA, 201 bp, Homo sapiens
acaaacaaaaattgtatatttatggtgtacaacatgttttgacatatgtacatgttgtagagtggctaaatccagttaattaacatgtctgctcactcacwtacttagcactttttgtggggagagcatttaaaacctctcttagcaatttttaagtattcggcaagtaatcaagtatttcaggtattcaaccttgttatt

SEQ ID NO: 10396 - DNA, 201 bp, Homo sapiens
cagaatggtggaacctgcctcaatctgcatgattcctttttttgtatctgtcccccacagtggaaggtgagtcatctactctttggttaagaatgatggcmggtcagcatctgtggtttccttggaatcatcaggcatatttaattctccatctaaagtttctaggattctgtggcctcccaaatcaaattgaaatatacc

SEQ ID NO: 10397 - DNA, 201 bp, Homo sapiens
agcatgctaatgcactataattagcatatagtgagcagtgaggacgaccagaggtcactttcctcaccatcttggttttggtggtgtttgactgccttctytactgcatcctgttttatcaacaaggtctttgcgacctgtatcttgtgccgacctcctatctcatcccgtgactatgaattccttaaactcctggaaatg

SEQ ID NO: 10398 - DNA, 201 bp, Homo sapiens
ccttctctctctctccctctgtctctccttctttctctctccgtctctccttctctctctttctccctccttctcttcttatctttccctttctttgttcytctctctccctctccctttttgtctctttctctctctcctccctgtatctctctctcactctctctttcttccctccctcctttatgccccacgacagga

SEQ ID NO: 10399 - DNA, 201 bp, Homo sapiens
ctgaggcaggagaattgcttgaacctgggaggtggaggttgcagtcagctgagatcgcaccactgcactccagcctggtgacagagcaagactccatctcaaaaaaaaaaaaaaaaaaattcagacagagagaaggcattggggtgatgggagaaggagacacactttgctgaacctcagccatgagttacatttggatgt

SEQ ID NO: 10400 - DNA, 201 bp, Homo sapiens
attgcatgctgctataatgagaaaagggaaaaactggattttttgacttctgttgaaattgtgatggcatcgagcggagctaatcaggaagctggacttgmaggcaggtttcaacacatttggtaatatatttgcactttctgctcagtcaccttcaagtgtctggtgtaattaaccttgggctctcctcaatgacacatc

SEQ ID NO: 10401 - DNA, 201 bp, Homo sapiens
ttattcctcctgatgccatcagtttatggcatatagtttcaggaaaatgccagccagcaaagcgctgactgcatttgagcagtcgccgggcaatacagcakttactttttaaattttgtgccttggattccatttagctgtttcattactggtttgcttttattaaagctcttataaaaaaaacacacagatacgaactta

SEQ ID NO: 10402 - DNA, 201 bp, Homo sapiens
tgtattctgccagagatggaggctatgaaaaatcaccattgctgggaatattctatggctcaaatctacccccaacaatcatctctcatagtaacaaactrtggttaaaatttaagagtgaccaaatagacacaaggtctggattctcagcttactgggatgggtcatcaacaggtaaatagcaaagagctgtcttttact

SEQ ID NO: 10403 - DNA, 201 bp, Homo sapiens
tgaggcaggagaatcgcttgaacctaggaggtggaaattgcagtgagtcaagatcatgccgttgcattccagcctgagtgacccagtgagactccatctcaaaaaaaaaaaaaaaaatagaaaaaaataaaaattggatttttaggctataactactctttcatgatgccattttgctgtgcaatttgatttaaaggatag

SEQ ID NO: 10404 - DNA, 201 bp, Homo sapiens
aagaaagtcaatggtagcttgatgggtatagcattgaatctataaattactttggacattatggccattttcatgatattaattcttcctatccatgagcrtggaatgtttttccatttgtttgtgtcctctcttatttccttgagcagtggtttataattctccttgaagagatccttcacatcccttgtaagttgtatt

SEQ ID NO: 10405 - DNA, 201 bp, Homo sapiens
cttggtttggaatagatactgtggaaagtcgatcccgccatctctcacaagcagtggtaactcattgatgctggtgtttgtgactgactccgacctcgctyatgaaggcttcttaataaactatgaagcaatcagtgcagcaacaggtaacaaaacagcattgcatactcggttttattgactccattgcaaaacagtgct

SEQ ID NO: 10406 - DNA, 201 bp, Homo sapiens
gaaattccttcaaatagatgggtattttcaaccactcataaccatattaattttcttgttacatatcagctttctatttctaaaccacaatttatctgcaratttgtcaagctacctcggtatattcgaaatttcttactcttgggttagtctctcatggcagtgaaaagttacactttgcaaaatgttctatagcattca

SEQ ID NO: 10407 - DNA, 201 bp, Homo sapiens
gatcatatgttttttgtcctctattctgtaaatatagtgagttaaattgattgattttgaatggtgaatcaactttgcattcatcaaatattttccatttkttcatggcaagttatgctttttatacattgctagattttatttgctaatatgtatttttaggatttttatatctatatttgggtgatattcttttgtaat

SEQ ID NO: 10408 - DNA, 201 bp, Homo sapiens
gctgggcaccataatcgtgatttggtaaagcgtaatggagaaagctacagaaaggaggatgcttttgaattgggctttaaaggaggctttggcagaaagagggggggaggaaagagatgaaacatttccaggacctgaactccatttctttcgactcatttgaggatgaaatggcaacaaaaaggtgtttaaaaactcaaa

SEQ ID NO: 10409 - DNA, 201 bp, Homo sapiens
atctgtgtacaattttctttatgtcacattcgtgaaaagttcttctactgaaaaccatggtttcatggctaagttcagtgctgaggatttgggtaagagaytgttcccttttttttttcctcctcttgggcttgtatcagaataagtgaatgatagaaataaattatatgaaaatcatctgtactgtgaaaaattttaaag

SEQ ID NO: 10410 - DNA, 201 bp, Homo sapiens
gaagttcatgaggcattagagagttattcgcatctcagatgttattttgagaattacagtaatatttgtcattaatggaatgcccatcatgtgctagacastactaccaatactttgatagatataattgtctgtcctcatagtagtccagtaactgagtataagtatgctcacaggagaacagggattgagatggggaac

SEQ ID NO: 10411 - DNA, 201 bp, Homo sapiens
tcttggtttggaatagatactgtggaaagtcgatcccgccatctctcacaagcagtggtaactcattgatgctggtgtttgtgactgactccgacctcgcytatgaaggcttcttaataaactatgaagcaatcagtgcagcaacaggtaacaaaacagcattgcatactcggttttattgactccattgcaaaacagtgc

SEQ ID NO: 10412 - DNA, 201 bp, Homo sapiens
ttgaaggactcacacttcctgatttcaaaacttagaacaaagctacaataatcaagacagtatcttattgaagtaaggatataaatatagatctatggaayacaattgcaagtccagaagtgaacacatacttttatggccaattgatatatgaaaatgatgccaaaacatatcaatggagaaaaatcattttttcaacaa

SEQ ID NO: 10413 - DNA, 201 bp, Homo sapiens
catggacttctccataagggctttgctttctctctgtgctctccgaatctgtttaaaggcaaatttcttctgtccttggaaagaccttgcatccgctctartaagtgaagcgtaaatcagtgtttgtgtttgcagtgcacgtcactgctggtcacatgatggcataacagattccaaacaggtgccaaggatgattcttca

SEQ ID NO: 10414 - DNA, 201 bp, Homo sapiens
aaaattgagataaaattattaatatctggacaagcactactataatttttatgcttacagcttgcggggatgaattaactggagaaggggtcattcgctcrcctttttttcctaacgtgtatcctggagaaagaacctgtaggtggaccatccaccagccccaaagccaagtcattctcctcaacttcactgtctttgaaa

SEQ ID NO: 10415 - DNA, 201 bp, Homo sapiens
tagtcattttatgtcctcaagtgttaagtggaaaatattctcatagaaatgttatattcggttatctcctcaggcagtattagattttgcaataaaattgrgataaaattattaatatctggacaagcactactataatttttatgcttacagcttgcggggatgaattaactggagaaggggtcattcgctcgccttttt

SEQ ID NO: 10416 - DNA, 201 bp, Homo sapiens
tgcactattattattcccatatttgatctggtatataagctggcaatggactgtgaatttatttttctagaactgtgtttaggatttgtgtatctatattrataggtgacatcagtctatagtttttatttctataatctatgttgggatttggtaacagcgttctaacaaaaattatttggaaattattctatgtttgag

SEQ ID NO: 10417 - DNA, 201 bp, Homo sapiens
gatgcttattttaatgcataattttctccccccaaaggcaaaaagaaactaattgtcattcatcagtgttgccccccaaacctactgcctagcccctccacccccacccagtacttttacaatgtgttattaaagaccactgaacagctgagatccaggggtctccttcaatgcgtaatcccatccagaaggaaggaaaaa

SEQ ID NO: 10418 - DNA, 201 bp, Homo sapiens
atttgaattgctttgaattaaaatttaatgcttattattttagaaattatagtataaaaccaaatctggattcatagcagaggaagacaaatgagcgtgcrtattaagacatggctttgggacttgactcattccagatgttaaagctcacgactcactaggctcaaaagcccacatttaaaatttcatgtaaatggtgtt

SEQ ID NO: 10419 - DNA, 201 bp, Homo sapiens
gtcctccgtctgaaccttttctttcaccaccttcccctgcatccttccctctacttctccctccccgctacactcctgcttcagcctaagcagccctcccrcatctcctgcatgtctttagatgaatgcaaattcacaaaggacctccttttgtgacttcttaggcattgagatgattccactatgagcttgggattgggt

SEQ ID NO: 10420 - DNA, 201 bp, Homo sapiens
gagagttccataagcactcattaaagaatagattttaactgcaaaagataagaatgatattgacccagtgtagcatatctttctttttttttaacacaagkaacacacattaacatgttaattcttagatttatatatctctcttaagtgaagtttctacttttaaagatatacattacccatggaagatgtgacatggct

SEQ ID NO: 10421 - DNA, 201 bp, Homo sapiens
ggtttagaggggggttgactttgtcctttactgactccattgatgagtaaaagcagtccacccaaaattttagaaagagtggagaagagaaaagaaattcyacagagatgtgggagaatgatcctaaggacatttactttgcatgtgaataggtgtacttttaagaatcctagatcttctctttgtgtggttttaggtgcc

SEQ ID NO: 10422 - DNA, 201 bp, Homo sapiens
tttgtgaactgaacccgttttctaaaaagtatattcacttctcttgttgttcttcagatagtggtcatacaagaaagtgatacaggaaccaaattctaatracattattatgactcaatatattgttccctaaaatgatgtcttcattttttaaagctatctctaaaaaatgaaatatttatgaaaaagaattaaaaaaag

SEQ ID NO: 10423 - DNA, 201 bp, Homo sapiens
aagagtaacaaagaacatctttacttgtcccctttcttcatttccttttctttccacggaatctggtgccaacctcctgttcccctttcaattgttttccrtgcaaatcaactccccctggctacatcttgctattctgtattcattttttctttaatctgcttcatgtatacagttatgtagtttattttgttacatgtt

SEQ ID NO: 10424 - DNA, 201 bp, Homo sapiens
gcttcccaagtagctgagattacaggcatgcgccaccatgcccagccgatttttgtatttttagtagacagagcgtttccccatattggccaggctggtcycaaactcctgaactcaggtgatccaacctcccaaagtgctgggattacaggcatgagccaccgcgcccggccagattactttaaattctacatttattca

SEQ ID NO: 10425 - DNA, 201 bp, Homo sapiens
cacatcactggcgtcaactctgggcatgcaaagatctctacaccatcgaaagcacacagacaacaacttgattttctcccacagttactttatcaagtttkttttttttttttttttccattctgctctcaacccccaattttcaaagtacagtcctggaggaagttatccctgggttgtgatatgcaggcaaaggcacgt

SEQ ID NO: 10426 - DNA, 201 bp, Homo sapiens
ctctgggcatgcaaagatctctacaccatcgaaagcacacagacaacaacttgattttctcccacagttactttatcaagtttgttttttttttttttttycattctgctctcaacccccaattttcaaagtacagtcctggaggaagttatccctgggttgtgatatgcaggcaaaggcacgtgtgtggaggatggaaga

SEQ ID NO: 10427 - DNA, 201 bp, Homo sapiens
agcagtgtttgtggggcgagagcaggaaccagacagtgtaaagaggtacaaagaggagagtgagtgtagactgaagtctaggtccctgaattctgaggctstctgtaacaaaccagagtaagtgatggcttcttttctccaatccttatccttcatttccctaactggtcctcatctagttcacgtgtgtgggacacactc

SEQ ID NO: 10428 - DNA, 201 bp, Homo sapiens
gcccttccaccatatgttcagatgttgttttaaattcataaacactaccttttgtagaaattgtacgtttctttctaaaaaatgcaggtcccattatattktttatattaattaggggcttgatatccataagatcgtctacttacaatttctagagaccactttagaaatccctgaaaatttgatttgcagatactacac

SEQ ID NO: 10429 - DNA, 201 bp, Homo sapiens
tctgacacatttgccagaggctttattcgaaagggtgaagattaaacatattctctcagtttgtgattggttatataaaacaccataccagctatgaatgwtggttattctttgttaagtcattcaaatatgatttttaaaaatttaaaagtgaaaatcgtgttttttagagtaagtgtagtgtttgagagaaattacttc

SEQ ID NO: 10430 - DNA, 201 bp, Homo sapiens
catcgaaagcacacagacaacaacttgattttctcccacagttactttatcaagtttgttttttttttttttttccattctgctctcaacccccaattttmaaagtacagtcctggaggaagttatccctgggttgtgatatgcaggcaaaggcacgtgtgtggaggatggaagaggtggaggtggcagtgggaagagagg

SEQ ID NO: 10431 - DNA, 201 bp, Homo sapiens; identical to SEQ ID NO: 1538

SEQ ID NO: 10432 - DNA, 201 bp, Homo sapiens
tgagcattgtcctatcagtatttctttctttttttttttctttttttttttttttttgagatggagtctcgctctgtcgcccaggctggagtgcagtggcrcaatctcggctctctgcaagctccgcctcccgagttcataccattctcctgcctcagcctcccaagtagctaggactacaggtgcccaccaccacacctg

SEQ ID NO: 10433 - DNA, 201 bp, Homo sapiens
gcaagctccgcctcccgagttcataccattctcctgcctcagcctcccaagtagctaggactacaggtgcccaccaccacacctggctgatttttttgtakttttagtacagatggggtttcaccgtgttaggcaggatggtctcgatctcctgacctcatgatctgcccacctcggcctcccaaagtgctagaattacag

SEQ ID NO: 10434 - DNA, 201 bp, Homo sapiens
cagaatcacctgtggagttacttacattagacttccagttcccaccgaaacccactgaatcgggatttcccagggaggagtcacagcacgctgtttttttwaaaaaaagctccctctgtgacgtcagtgcactgcctagggttgaatacccatgtttatttctgcataaatagaactgtagaaaatttggacacgtggctc

SEQ ID NO: 10435 - DNA, 201 bp, Homo sapiens
tgaggcaggagaattgcttgaacctgggaggtggaggttgcagtcagctgagatcgcaccactgcactccagcctggtgacagagcaagactccatctcaaaaaaaaaaaaaaaaaaattcagacagagagaaggcattggggtgatgggagaaggagacacactttgctgaacctcagccatgagttacatttggatgtg

SEQ ID NO: 10436 - DNA, 201 bp, Homo sapiens
aggctcccgactctaccgtggaactcaacattctttccctggacattgaatctcaccgaacgtgtgcctatgatagccttgtgatacgagatggtgagaayattataaagaatgctgagtttcaaccctgacacataattagttctagtccattatcatcagacttgcatactgcctccatccgtttggtttggaattaca

SEQ ID NO: 10437 - DNA, 201 bp, Homo sapiens
tttaatgtcttaatacctgcagcgtggcagtgccttgatcaatatttgccaaatgaatgaatagaaagtgagagacaacggggacccatgtatccccccaacacacacacacacacacacacacacacacacacacacacacactgttccacagaagtatatgaaaataaatctcaagaggaaaaactataaacactgagg

SEQ ID NO: 10438 - DNA, 201 bp, Homo sapiens
gaggcaggagaattgcttgaacctgggaggtggaggttgcagtcagctgagatcgcaccactgcactccagcctggtgacagagcaagactccatctcaaaaaaaaaaaaaaaaaaattcagacagagagaaggcattggggtgatgggagaaggagacacactttgctgaacctcagccatgagttacatttggatgtga

SEQ ID NO: 10439 - DNA, 201 bp, Homo sapiens
gctgaaaaaaatacttataattgtaatgtgactggacatagtggttcacaccataatcccagcactttgggaggtcgaggagaaggatcacttgagtccargagttccagaccagcctgggcagcagaatgagaccctgtctctaaaataataataagaagaatataaaatagtaatgtattcatttctctttgtcccctg

SEQ ID NO: 10440 - DNA, 201 bp, Homo sapiens
ttaatgtcttaatacctgcagcgtggcagtgccttgatcaatatttgccaaatgaatgaatagaaagtgagagacaacggggacccatgtatccccccaacacacacacacacacacacacacacacacacacacacacacactgttccacagaagtatatgaaaataaatctcaagaggaaaaactataaacactgagga

SEQ ID NO: 10441 - DNA, 201 bp, Homo sapiens
ttcagacggtaaagaaatataatgtctccaaagtactctgaattggctgagataataagtgtgaatatttgtgtgtctgtgcatgtgtgtgtggggggggkggagagagagagagaaatgataaagtaatgggagcagaatacaaatacataataaatctgggtaaaaagaattcaggagctcattcttgcatcttttaaa

SEQ ID NO: 10442 - DNA, 201 bp, Homo sapiens
cctgcctctactaaaaatacaataattagtcagaagtggtggttcacccctataaaaccagctactcaggaggctgaggcaggagaatcacttgaaccccrgaggcagaggctgcattaaaccgagactgtgccactgcactccagcctgcgcaacagaggaagactccatctcaaaaaaaaaaaaaaaggggggggtggg

SEQ ID NO: 10443 - DNA, 201 bp, Homo sapiens
taatgtcttaatacctgcagcgtggcagtgccttgatcaatatttgccaaatgaatgaatagaaagtgagagacaacggggacccatgtatccccccaacacacacacacacacacacacacacacacacacacacacacactgttccacagaagtatatgaaaataaatctcaagaggaaaaactataaacactgaggat

SEQ ID NO: 10444 - DNA, 201 bp, Homo sapiens
atttccctgatgactaatagtgctgagtccttttcacatgctttttgacaattcatttattttcttttgtgaggtgttcattaaaaccatatggttcatttttgtttgtttcttattaatgagtcatatgttgtatattctgcatacaaatacgtcctttgccagataaatgtattgcaagtattttcttccagtgtgtgg

SEQ ID NO: 10445 - DNA, 201 bp, Homo sapiens
acttgaaccccggaggcagaggctgcattaaaccgagactgtgccactgcactccagcctgcgcaacagaggaagactccatctcaaaaaaaaaaaaaaargggggggtggggtggggtgggggtaaagaaaagggcaggaagcaccattgcaagctggagccagaatgatatcacccctgaggggtccttctttttgagg

SEQ ID NO: 10446 - DNA, 201 bp, Homo sapiens
cgagctacagattcgctagctacagtaaaagtaacctttccccagcccttctaaagtgagcctgagggattcatgtgcaatatattgggatgaaaccgagrattgctctgaaggaaggtcatagctttattgagggagccttggcctttctagctgctataggcacttggaactgtttctgagagactctgttcaaatggc

SEQ ID NO: 10447 - DNA, 201 bp, Homo sapiens
aatgtcttaatacctgcagcgtggcagtgccttgatcaatatttgccaaatgaatgaatagaaagtgagagacaacggggacccatgtatccccccaacacacacacacacacacacacacacacacacacacacacacactgttccacagaagtatatgaaaataaatctcaagaggaaaaactataaacactgaggatg

SEQ ID NO: 10448 - DNA, 201 bp, Homo sapiens
tttccctgatgactaatagtgctgagtccttttcacatgctttttgacaattcatttattttcttttgtgaggtgttcattaaaaccatatggttcatttttgtttgtttcttattaatgagtcatatgttgtatattctgcatacaaatacgtcctttgccagataaatgtattgcaagtattttcttccagtgtgtggc

SEQ ID NO: 10449 - DNA, 201 bp, Homo sapiens
cttgaaccccggaggcagaggctgcattaaaccgagactgtgccactgcactccagcctgcgcaacagaggaagactccatctcaaaaaaaaaaaaaaagrggggggtggggtggggtgggggtaaagaaaagggcaggaagcaccattgcaagctggagccagaatgatatcacccctgaggggtccttctttttgagga

SEQ ID NO: 10450 - DNA, 201 bp, Homo sapiens
ctctgaaggaaggtcatagctttattgagggagccttggcctttctagctgctataggcacttggaactgtttctgagagactctgttcaaatggctaagyatttctgagcccaggatcccagcagagccagtgttgacttaggtggtgatgaaggttctagatctgtcatcttggtggaccattagcacaaaaggtggga

SEQ ID NO: 10451 - DNA, 201 bp, Homo sapiens
ttccctgatgactaatagtgctgagtccttttcacatgctttttgacaattcatttattttcttttgtgaggtgttcattaaaaccatatggttcatttttgtttgtttcttattaatgagtcatatgttgtatattctgcatacaaatacgtcctttgccagataaatgtattgcaagtattttcttccagtgtgtggct

SEQ ID NO: 10452 - DNA, 201 bp, Homo sapiens
tggcttaagagcatgggctttggaactagacctaagatacattttcacctctacaatttaactagctgtgtgagatgtctgcccttactgatgagcttctrgtccctgacaactggagaattaatgcctcctccttttatcctcttcctttatctcctgccctctcactctcatgtatatattactatgtatcgcaactca

SEQ ID NO: 10453 - DNA, 201 bp, Homo sapiens
tccctgatgactaatagtgctgagtccttttcacatgctttttgacaattcatttattttcttttgtgaggtgttcattaaaaccatatggttcatttttgtttgtttcttattaatgagtcatatgttgtatattctgcatacaaatacgtcctttgccagataaatgtattgcaagtattttcttccagtgtgtggcta

SEQ ID NO: 10454 - DNA, 201 bp, Homo sapiens
ctttcttccctttctgctttctgagaagcagaagaaaacaattttgcgtatttcacattgttgatcatattatgagtaataaaattgagcctgaatgtatrcacaaaagttggcagccatcccaaagatggatttagaccaattccttgcaaaataaaaaaaagattgaagatagaaatattgtgttataaatcatcagat

SEQ ID NO: 10455 - DNA, 201 bp, Homo sapiens
gtgtgtgtctatgtatatatacatacttggcagctcccggtctagaatgtatttcaaatttaacctgtgagtggtataatggactttggagactcagaagyggggaggatgggtggggtatgagggataaaaaactacatattaggtgtaatgtatactagtcagggaaccagcgcactaaaatatagacttcaccagtat

SEQ ID NO: 10456 - DNA, 201 bp, Homo sapiens
ggattaactgaagtcccagtttatgggttatatctaatagaaagcttaaagaaaaaaagtaaaaaaaaattagttttagatttttctttttgacatttttytccccatcaagaagcacaataaatgagctttgtcagttttctttatttcctcctatttaaattttttaaaaactggtattgctcaactgctgtttcttct

SEQ ID NO: 10457 - DNA, 201 bp, Homo sapiens
ggctggagtgcagtggcatgatctcggctcaccgcaagctccacctcccaggttcaagcgatcctcctgccttagcctcctgagtagctgggactacaggygcccaccaccacacccagctaattttttgtatttttagtagagatggtgtttcaccatgttggccaggatggtcttgatctcttgacctcatgatccacc

SEQ ID NO: 10458 - DNA, 201 bp, Homo sapiens
tgtgttataaatcatcagattgtcaaaggagacaaatatgtggtttgttttgtctgatgtggatatatcctgatttcaattatcagttatagcttgctgtraaaattccatctagtctagtccagatggtctatactgtagtgacccaccttggtgggattctgagagccaccagcttaccaccaggcttactgatttggt

SEQ ID NO: 10459 - DNA, 201 bp, Homo sapiens
agaaaaaagtgggcagtggtccttttgaaatgtttcctattgatattttattcaactggcagagcactggagcagatggtgtagtttctgtgaaatccctygtttgcctgtgttacactccaatttgctttaatttgtttggccttcgtgcgcaatggaacttagctgtatactagtacatgcttccccctcctctgaatc

SEQ ID NO: 10460 - DNA, 201 bp, Homo sapiens
cattatttattctcattaataatctttcctaggaagattaaggaaaaaaatatggaaattctctgcaaagctccctgctgtgcactttcttgcaagaaataaagtttgtcatttggagcctgacttaggagaaatacaggaattgcataagattctgtggttattttgaagtgattattttattggaaatacttgaaaata

SEQ ID NO: 10461 - DNA, 201 bp, Homo sapiens
ctttcctttccttccttccttctttttccttccttcctttcttttcttttcttttcttcacagagtcttgctctgttgcccaggctggactacagtggtgsgatctcagctcactgcaacctccgcttcccaggttcaagcaattctcatggctcagcctcccgagtagctgggattacaggcaccagacaccatgcccag

SEQ ID NO: 10462 - DNA, 201 bp, Homo sapiens
taatcattatttatgtttttccacatatgcattgaaaaatcacaatttagaagacagttttggcgaagtagagaagataatatgagtcattccactaggayttttcacagtacagcaattcaccattgttcatttgttaaaaatctaaataaaaatgtattgaagtgtcatgaatcataaactatggaatcaaaaaacaag

SEQ ID NO: 10463 - DNA, 201 bp, Homo sapiens
ttcttttcttcacagagtcttgctctgttgcccaggctggactacagtggtgcgatctcagctcactgcaacctccgcttcccaggttcaagcaattctcrtggctcagcctcccgagtagctgggattacaggcaccagacaccatgcccagctaataattgtatttttagtagaggtggggtttcaccttgttggccgg

SEQ ID NO: 10464 - DNA, 201 bp, Homo sapiens
tgagcagtcgccgggcaatacagcatttactttttaaattttgtgccttggattccatttagctgtttcattactggtttgcttttattaaagctcttatwaaaaaaacacacagatacgaacttaaagatagtacctacataggagattattattaaatgtttcagtactggaattttataactcatggcttgttttgga

SEQ ID NO: 10465 - DNA, 201 bp, Homo sapiens
cagctcactgcaacctccgcttcccaggttcaagcaattctcatggctcagcctcccgagtagctgggattacaggcaccagacaccatgcccagctaatwattgtatttttagtagaggtggggtttcaccttgttggccgggctggtctcaaactcctgacctcaagtgatctgcctgcctcggcctcccaaagtgttg

SEQ ID NO: 10466 - DNA, 201 bp, Homo sapiens
ccagggaagcgttcacactggaggcgacatttaagtggcagagtctcgccagtagaaatgcagcagtgaggccacgaggggaggctgcaagggaaggatgrggaaatggtgcacgcacatttgggaataaaaaatgagagtgttgtccctggagcgtgaagaaatgctggggagcatgtggagaccaaggggctacagaag

SEQ ID NO: 10467 - DNA, 201 bp, Homo sapiens
cagattgtcaaaggagacaaatatgtggtttgttttgtctgatgtggatatatcctgatttcaattatcagttatagcttgctgtgaaaattccatctagwctagtccagatggtctatactgtagtgacccaccttggtgggattctgagagccaccagcttaccaccaggcttactgatttggttagagacctaccaat

SEQ ID NO: 10468 - DNA, 201 bp, Homo sapiens
taagaatttgaaattatcctataggtagtatggagtcagtgaaaattttctgtaaaacgggaataacatactcagagctgtattctacagtgacaacaggyagcagtgtgtgaagaatggcttggcagagaaaaagaaagatggtagcatgtctgtttgggaagcaatggaaaaagcttggatcagaggtgataaggtctc

SEQ ID NO: 10469 - DNA, 201 bp, Homo sapiens
ttctttgcttatattcattttcttctagatcactaagaatttataatgaaaaaaatcaaaagggaaagatctttgattagtaacatcatgacaaaaattcwaactatatgtccagccttggaattgaaatccagtcacaggccaggcgcggtggctcatgcctgtaatcccagcactttgggaggccgagatggtcagatc

SEQ ID NO: 10470 - DNA, 201 bp, Homo sapiens
tctccttctgagactcaaattacacatatgctgaaggttttgactgtttctaatagttcttatggttttatattcttgccttctttttttgctttgattcyatttggttattttgttttggaaagtctgtaagtactgttgaaatgttcttcaactattttgtcaaccttttcctctaagttttatcataattattttgga

SEQ ID NO: 10471 - DNA, 201 bp, Homo sapiens
agaattagaaaaaacttttttgttgttttttaaagaaaaaataccctatatattcatagtgatcttacactatattggaatattgagattatagagttgctttttttttttttttttactttacatttctacctcttctctcatacagtaaaaatcctggttcccaatgacatgaacatattatttatgtacttagtccta

SEQ ID NO: 10472 - DNA, 201 bp, Homo sapiens
ctcagaaaaagtaccttttaagtttcaatatcaggaagagtaacaaagaacatctttacttgtcccctttcttcatttccttttctttccacggaatctgstgccaacctcctgttcccctttcaattgttttccgtgcaaatcaactccccctggctacatcttgctattctgtattcattttttctttaatctgcttca

SEQ ID NO: 10473 - DNA, 201 bp, Homo sapiens
aatgttgaatagtcaagtaagattaatacacatccaactacatccttgtttgagatagttgtctgttgagagaaagggcatattgggtattgcagattgcktagcaatagtcctggcccctacccactagatactacccatcacaccgagtgtgacaatagaaaaatgactacaaaccttgccagaggtcccaaaattgct

SEQ ID NO: 10474 - DNA, 201 bp, Homo sapiens
tattttttcaaatattgcattgccacttttttcctctttcttctccttctgagactcaaattacacatatgctgaaggttttgactgtttctaatagttcytatggttttatattcttgccttctttttttgctttgattccatttggttattttgttttggaaagtctgtaagtactgttgaaatgttcttcaactattt

SEQ ID NO: 10475 - DNA, 201 bp, Homo sapiens
agagaggtttgtgcatgcgagcagtgcagtctctctggattttatcctcgggtcaagtccagctgcacaggggctggggctggcttccagcatcacagtgycccagactctagagcttcacttccagccaaatactattagctgttaggacctcagttgctttgataccttaaaacaaacaaacaacaaaacacaggaaat

SEQ ID NO: 10476 - DNA, 201 bp, Homo sapiens
aaccttctcaaatgaaaattatgtcacacttaaccattttaatatgcaaagtgatctggtttgctgaaacacacagaggttggcagaagttctggaattcyttacaatttcacatacagaaattaatatcatcaaagtgaaaaagatgactctacaatcctggtattcatcgctcagatggttcagccctgtttaaatagt

SEQ ID NO: 10477 - DNA, 201 bp, Homo sapiens
tatgtaaatttcatatcttacacatctaaaatgttacctatctcacttatttctaatgtctgtattactacagtctggatttttattatttagtgtttctrtcatttgatttacagtagcatttctcatagaaatctaagccactacagattctttgttaaataaatgtgggtattaatgaagagcaggttcttccagtca

SEQ ID NO: 10478 - DNA, 201 bp, Homo sapiens
tcacacccagtcttgtttccaatcttttggaattccaaatgttactgcaacaaaataccttattcacttgtcgtattgtatttttgccaatgtacctttgsgatatctttccaatggtagtattgtttggtcaaaagaaaatgaaatgcataggtttttgctaggtattgctatattctcttatgtagtgatcgtaccatc

SEQ ID NO: 10479 - DNA, 201 bp, Homo sapiens
ctattgacggacatttggcttgtttccagtcctttggccattttctttttagtcttttgttttttatttttgagacagggtgcgatcgtgtctcacagcarcctcaacctcccaggctcaagtgatcctccttcctcagtctccccagtagctgggactacagacacgcaccaccatacccagctaatttttattttttta

SEQ ID NO: 10480 - DNA, 201 bp, Homo sapiens
ataaactagaattaaggccccagaagtttttaggaaaatgctatttccagaattttgctaagtatatcaaatatgatatattacatttcaaaaatttccawatcagaaggaaaacgttgaaagattctctgtaaaatacagcagtatgtttatatagttaatagtatagtttctttatcgtgttttctctgacacatttgc

SEQ ID NO: 10481 - DNA, 201 bp, Homo sapiens
ttctgatctcctcaggttgaacttcccattaaaagcctcttttgcactttctctaatggttttagcattctttaggttcagtatttagatgagttattcaytgagacctacaacatgataatagtttgattttattatttcttctttatttatttattatttgaagttctttaatggaatagaagttactcatatcagcta

SEQ ID NO: 10482 - DNA, 201 bp, Homo sapiens
aatgcagtctagtaggtctcagccctattttatccagcccctattcaagatggagttgctctggtttgaatgcctatggtttattaccccactcccttttmcaaggggacctttaatcctaagggttgtagagggatgtcagtccattttctgtaactccttcaggatgaataggggtgatgatattcctgcctaactatt

SEQ ID NO: 10483 - DNA, 201 bp, Homo sapiens
acgcctggctaatttttgtattttttttagtagagacagggtttcaccatgttggccaggctggtctcggactcctgacctcaggtgatctgcccacctcrgcctcccaaagtgctgggattgcaggcatgagccaccgcacccagcctacttctctctatattataaattcaccttactattatttttgctttaaatcac

SEQ ID NO: 10484 - DNA, 201 bp, Homo sapiens
gtgactatgaattccttaaactcctggaaatgcagtctagtaggtctcagccctattttatccagcccctattcaagatggagttgctctggtttgaatgyctatggtttattaccccactcccttttacaaggggacctttaatcctaagggttgtagagggatgtcagtccattttctgtaactccttcaggatgaata

SEQ ID NO: 10485 - DNA, 201 bp, Homo sapiens
tgttcatatggtatatcttttttcattcttttagttacaacttagtttcaccattatatataatggcatcattatatataatgtgcatgcatagtaaaaarcatataattgggtcctgctttttctgtgttttagttgaagtatttagaccatttacaactaatgtaattatttttatggttgaatttaacataccattat

SEQ ID NO: 10486 - DNA, 201 bp, Homo sapiens
aactattacttcatgcatgcacatttaggattattatgttttactgataaattgtcccctttgtcattatgaaatgtctttctataaatctaataatattwtccttcttgaagtcacttttgtttgatattatttcagtgatttcagctttcttatatttactgttcatatggtatatcttttttcattcttttagttaca

SEQ ID NO: 10487 - DNA, 201 bp, Homo sapiens
atgtcttaatacctgcagcgtggcagtgccttgatcaatatttgccaaatgaatgaatagaaagtgagagacaacggggacccatgtatccccccaacacmcacacacacacacacacacacacacacacacacacacactgttccacagaagtatatgaaaataaatctcaagaggaaaaactataaacactgaggatga

SEQ ID NO: 10488 - DNA, 201 bp, Homo sapiens
ttggcctttttcttaatcttgacaggaaagcgtttagtcctttaccacttaagtatgatgttagctttggattttccatagatgccattcatcagtttgtkgagttcccttctgggcatacttgctgagtttttatcctggataggtgttgaatttttctgcatcttttggtatctttcaaagcttttctttttttattct

SEQ ID NO: 10489 - DNA, 201 bp, Homo sapiens
cgtgcatccttctagaagttgttttttttttgagacggagtctcactctgtcgcccaggctggagtccggtggtgcgatctcggctcactgcaagctccgwctcccgggttcacgccattctcttgcctcagcctcccgagtagctgggactgcaggcgcccgccaccatgcccaggtaattttttgtatttttagtagag

SEQ ID NO: 10490 - DNA, 201 bp, Homo sapiens
acgtgcatccttctagaagttgttttttttttgagacggagtctcactctgtcgcccaggctggagtccggtggtgcgatctcggctcactgcaagctccractcccgggttcacgccattctcttgcctcagcctcccgagtagctgggactgcaggcgcccgccaccatgcccaggtaattttttgtatttttagtaga

SEQ ID NO: 10491 - DNA, 201 bp, Homo sapiens
gtataatggactttggagactcagaagcggggaggatgggtggggtatgagggataaaaaactacatattaggtgtaatgtatactagtcagggaaccagygcactaaaatatagacttcaccagtatgcaattcatccatgtaacgaaaaaccacttgtatcccaattagattagatagatagatagatagatagataga

SEQ ID NO: 10492 - DNA, 201 bp, Homo sapiens
gtgtaatgtatactagtcagggaaccagcgcactaaaatatagacttcaccagtatgcaattcatccatgtaacgaaaaaccacttgtatcccaattagaytagatagatagatagatagatagatagatagaaaaaaaaatttcacctttgaaagttgaacactttattcccacccttttccatgccaccaccccccaat

SEQ ID NO: 10493 - DNA, 201 bp, Homo sapiens
gacataaatggataagaattgcgtactccttcttttgcaatgtaaaggagttgatgaaattttaatttgtctttccagctaagaaatggtcctgatatctrttctccacccttgggaccccctggaggaaatggtcatttttgtggcagtcatgcttcatcaactctgttcacctcggataatcaaatgtttgttcagttt

SEQ ID NO: 10494 - DNA, 201 bp, Homo sapiens
gtatttaatgcaaatataaacatatgtgttgaatacatatataaaaatatatgtattaaataaatttattttataaatatattatatataatgaatatttataatattttatatataattacatatatttatttataatatatatacataataaatatatatattttttcttcctcacttcttctggattatagtccttta

SEQ ID NO: 10495 - DNA, 201 bp, Homo sapiens
tttcacctggtaccaaagcatttcaagagtagcagtgtcctgagtctagtgagtagacgtcagcccatcctacccatcctacataactctactcttttgtttttgtttataatagactcagtcttttttttctttcttgagacagggtctctctgtcgcccaggctagagtacagcggcatgatctcagcctactgcaacc

SEQ ID NO: 10496 - DNA, 201 bp, Homo sapiens
tatttaatgcaaatataaacatatgtgttgaatacatatataaaaatatatgtattaaataaatttattttataaatatattatatataatgaatatttataatattttatatataattacatatatttatttataatatatatacataataaatatatatattttttcttcctcacttcttctggattatagtcctttac

SEQ ID NO: 10497 - DNA, 201 bp, Homo sapiens
ttcacctggtaccaaagcatttcaagagtagcagtgtcctgagtctagtgagtagacgtcagcccatcctacccatcctacataactctactcttttgtttttgtttataatagactcagtcttttttttctttcttgagacagggtctctctgtcgcccaggctagagtacagcggcatgatctcagcctactgcaacct

SEQ ID NO: 10498 - DNA, 201 bp, Homo sapiens
atttaatgcaaatataaacatatgtgttgaatacatatataaaaatatatgtattaaataaatttattttataaatatattatatataatgaatatttataatattttatatataattacatatatttatttataatatatatacataataaatatatatattttttcttcctcacttcttctggattatagtcctttaca

SEQ ID NO: 10499 - DNA, 201 bp, Homo sapiens
tcacctggtaccaaagcatttcaagagtagcagtgtcctgagtctagtgagtagacgtcagcccatcctacccatcctacataactctactcttttgtttttgtttataatagactcagtcttttttttctttcttgagacagggtctctctgtcgcccaggctagagtacagcggcatgatctcagcctactgcaacctc

SEQ ID NO: 10500 - DNA, 201 bp, Homo sapiens
ccaaatatatatgtgtgtgtgtctctgtgtgtgtatatatacacacacatatatacacatcatatatgtgtgtgtgtacatacacagatgatttttatttwttttttttaaaggaaaatctcatcttggagcacttatgaagtatataatagtggttcttaacagtcatttctttttccagcatgtgagaatgtggtaata

SEQ ID NO: 10501 - DNA, 201 bp, Homo sapiens
cacctggtaccaaagcatttcaagagtagcagtgtcctgagtctagtgagtagacgtcagcccatcctacccatcctacataactctactcttttgtttttgtttataatagactcagtcttttttttctttcttgagacagggtctctctgtcgcccaggctagagtacagcggcatgatctcagcctactgcaacctct

SEQ ID NO: 10502 - DNA, 201 bp, Homo sapiens
aacttccttattgttcaatacagacatttaataaattgttgatgagttttgattatgtctcgtaccactgccatttcatgaatgaactttctgtatttcarctagttcctttaatcaactatttgtcaacataatcaagtataagtgacactataccttatgtttcacagccttttcactgttttctaagacaactgccac

SEQ ID NO: 10503 - DNA, 201 bp, Homo sapiens
acttctccataagggctttgctttctctctgtgctctccgaatctgtttaaaggcaaatttcttctgtccttggaaagaccttgcatccgctctagtaagygaagcgtaaatcagtgtttgtgtttgcagtgcacgtcactgctggtcacatgatggcataacagattccaaacaggtgccaaggatgattcttcaatttc

SEQ ID NO: 10504 - DNA, 201 bp, Homo sapiens
acctggtaccaaagcatttcaagagtagcagtgtcctgagtctagtgagtagacgtcagcccatcctacccatcctacataactctactcttttgtttttgtttataatagactcagtcttttttttctttcttgagacagggtctctctgtcgcccaggctagagtacagcggcatgatctcagcctactgcaacctctg

SEQ ID NO: 10505 - DNA, 201 bp, Homo sapiens
caagatttcaatccagcatcagcaatttttccctacattctgtgattttggttttataacttgatatattgttgctaaataatttctataactaatgcacmatttttttattctcaaactcatctactttgaattttttaaaattccagtggagcttttgatgtcttaaagacaaatactgaggttataactaaggtacat

SEQ ID NO: 10506 - DNA, 201 bp, Homo sapiens
tcttccagctcaaaggtctatgatttcacgttgttctatgaaccaggttcttctctgttcctgagaccatctgcagcaggtggtgagaattttaagaggcwtaataataataataataataataataataataataaatgtttagtgttttactgtagcaggataattggcagagggaaggctgaggtttatggaattaaa

SEQ ID NO: 10507 - DNA, 201 bp, Homo sapiens
ggtaccaaagcatttcaagagtagcagtgtcctgagtctagtgagtagacgtcagcccatcctacccatcctacataactctactcttttgtttttgtttataatagactcagtcttttttttctttcttgagacagggtctctctgtcgcccaggctagagtacagcggcatgatctcagcctactgcaacctctgcctc

SEQ ID NO: 10508 - DNA, 201 bp, Homo sapiens
ttgggtcattcccaatggggcatttgtaagtaagtaaattttgtgtgttggggtgatgtggatcattagatatatgttcaagttagcatcgccatgaaatraaagcattttgttcttgtggcttgtaaatgaaaatgggaaaatatttcacattgttaatcatcagagcaattaaaattaaatatcacaatgaagtttcgt

SEQ ID NO: 10509 - DNA, 201 bp, Homo sapiens
ggttcaccaatcagaaagacataatctttgcccaaagccccattgtagggggtactatctggaattttaggatccctcctcagacaagcaggcctatcaawagctattcctgaagctaggatatgggtagcatcagaaattgtatccttcctattcatataagtgaggacaaaaggcatcactcttccaactctggagatc

SEQ ID NO: 10510 - DNA, 201 bp, Homo sapiens
tagcagcgctattgacatgttgggctaggtagttttttgtgggtcccagagggtccggggtgtaggtgctgccctgtgtatagcagcatcttcaggagcawccctggtctctactccactctacagtgtgacagcaaaaatgccttcagatagtgctaggtgttcttggggaggcaacacggtccccagtttacagtcact

SEQ ID NO: 10511 - DNA, 201 bp, Homo sapiens
gcaaagaaatctccaagggaccacaaaaacccccgggatattggttatgtacccttcaagctgtaggggaaggagaatttggcccaacccaggtacatgtmcccttctccctctctgatttaaagcagatcaacgcagacctggggaagttttcagatgatcctgataggtacatagatgtcctacagggtctagggcaaa

SEQ ID NO: 10512 - DNA, 201 bp, Homo sapiens
gctgtgccctgtggttgggccccttcattctccttcagacctggcatataggaagcctgcccagaaagcagccgagctgacctccgtccccctgtgactarcctcttacccacaattgtgtctactatgtgtttacagcattgaatctatgagggcaaggacagctgtttcttaactcagggttttcctcaaccctagttc

SEQ ID NO: 10513 - DNA, 201 bp, Homo sapiens
ggggtgtaggtgctgccctgtgtatagcagcatcttcaggagcatccctggtctctactccactctacagtgtgacagcaaaaatgccttcagatagtgcyaggtgttcttggggaggcaacacggtccccagtttacagtcactgagttaaaggaaccgttatctaaagaaaggaaattctgaattgtttcaaggtggaa

SEQ ID NO: 10514 - DNA, 201 bp, Homo sapiens
tgacctccgtccccctgtgactaacctcttacccacaattgtgtctactatgtgtttacagcattgaatctatgagggcaaggacagctgtttcttaactmagggttttcctcaaccctagttctcaatttttagagaccagcaactgtcatacatattcatttattcatttgttcatcaaacatttattgcctgtatgtg

SEQ ID NO: 10515 - DNA, 201 bp, Homo sapiens
ggtggaaagtgtctactgtgaagtcctacctgttttatcatacctgtgcttgttttgtagttagagtaaacattgtttcaacaggaaactaagttaaatayctcgtttctcattttaatttttatagcaattgcatgagtcatcatcacatttttgtttttatttttatggccttaattgtttgtgtaggttctgatcata

SEQ ID NO: 10516 - DNA, 201 bp, Homo sapiens
atcagatgaagagtgttctttcctatgtcaactactattgctgtataactaatttcccacaaatttagtgttgtagaacattaatcatttgactttgtttytgattttgtgggccaggaatttggaaagaacctaacatgacagttgctacttgaaatctattcagcagttataagcgggtgtcagctgggactgtagctg

SEQ ID NO: 10517 - DNA, 201 bp, Homo sapiens
tacatagatgtcctacagggtctagggcaaacctttgatctcacttgaagagatatcttgctattgttagatcaaaccctggcctttaatgaaaagaatgyggctttagctgcagcccaagagtttggagatacctggtgtcttagtgaagtaaatgataggatgacagctgaagaaagggacaaattctctactggtcaa

SEQ ID NO: 10518 - DNA, 201 bp, Homo sapiens
gtgcccatgcctgggttccaatatccagagacaggattcagttggtctgcagtggggccctgactattgctaatttctaaatgctccttaagtgattcatccgtacagtcaggatggagagtttgggagggcagtgattttgctgattactttctcctaagtggctgcttcctctcccctccaggctgttctagccttact

SEQ ID NO: 10519 - DNA, 201 bp, Homo sapiens
gtctatctatctatatatatatgtatgtatacaatctaaatgtattttttcagttttcagcctggatcctggagctcaccataatgaaatttacatctgcrtgtttattttattttacttatttatttatttgagactagctctcactctgtcgcccaggctggagtgcagtggcgtgatctcagctcactgcaacctcca

SEQ ID NO: 10520 - DNA, 201 bp, Homo sapiens
attttttttctcaaggctgttgaaaggaagcatttattatatattttatatataaatatatattatttagtctatattttcaaaattattccatattatgrattgtttattagagctactgccaaaataaattgaaaatgcaggctgggcatggtgtcccatgcctgtaatcccagcacagggaggctgaggcaggcaggt

SEQ ID NO: 10521 - DNA, 201 bp, Homo sapiens
taagctataataaacccaccacaaaactctaaagtaaatccatgtaagaagccttgcttgttcaggaactctagaaatcgttatttgaaatgacaaagaayaagacctgaattaaacactgtataagacagagaaaagttagggatgcatctgtcaggataggttatgcacatagtaacaaacaactccacctcacagcag

SEQ ID NO: 10522 - DNA, 201 bp, Homo sapiens
ttaagaaatgggagaggctttacagtaagatgggaaacacagcaaccaggtatgtgtgaacctggagaaaaaagcaagcaaaattttgaggttattaagtkttcttaatcagtgttagacttttggatacatgagatgttttgggatctgaagatatataatatttttataatttattttattttattcatttatttattt

SEQ ID NO: 10523 - DNA, 201 bp, Homo sapiens
actatttttgttccacatcctacatttactaacagatctaagccaaagggtgtagttgcttataaaatgtaccagcctaaagcaaagacttccaagcatawtaaagctttttttatagtttaatttaatccttctaggtatttgcctaccaccatgtccaacggaatgtcttttctgccatctagcactggattgcagtag

SEQ ID NO: 10524 - DNA, 201 bp, Homo sapiens
ggaagagtaaatatggtatttttaatgagacctaaaaaactaaagtattgctgggatagtaaatatcagttcaacttgtcaaaagttgttctcagatggaytttaatatgccctagactgtgaattccttgaaaagtaagactgtatcttactcactttgacatccccagctgctgtcacagtttttgttgtattgtaatt

SEQ ID NO: 10525 - DNA, 201 bp, Homo sapiens
gacttgtctatagagctaaacttttaaatcctcttgttttcctaggctggcaaggcaatggatatatttgcgaagatatcaatgaatgtgagataaataayggcggctgttctgtggctccacccgttgagtgtgtgaatacacctgggtcttcccactgccaggcctgtccaccaggtgctgcctcggttcaatgtcaac

SEQ ID NO: 10526 - DNA, 201 bp, Homo sapiens
tagtaatgcgtaagagttctaatttctccatatcctcatcagcacttcttattttctatttttaaataatagtcttcctggtggtttgtagtgttatctcwttgtggttttgatttgcatttctctaatgactaataatgtttgaaaatcttttcatgtttttattggccattcataaatcttctttggagaaatgtgtat

SEQ ID NO: 10527 - DNA, 201 bp, Homo sapiens
aaggaaatgcctgtacatttttgaggtgccatttccatgcagctgctttccttatagtatgcagctccaaaaccgccagatgctttggtagccctaaatcrtgagttgtttgtttgccatagcaagggtattgctgtctccttgggcttcacttctttgaattcttgagtgtgtatgggacatactttatatgcttctctt

SEQ ID NO: 10528 - DNA, 201 bp, Homo sapiens
atctctcacctgaactagggcaaaacctacctgactgttttccggcatcctttctgactcctattttccgaattgtaatgttttccaaaaaccaatcttcytggtggctccttgctgtattcaggacagtggcccgagtctctaacgtgtcctgcagccccctctgcaggcttcctcaccccttcctccttggttttctct

SEQ ID NO: 10529 - DNA, 201 bp, Homo sapiens
tcttctctgtgcatttgcagcttgggaatgagctaaggacccaaggaaatgcctgtacatttttgaggtgccatttccatgcagctgctttccttatagtrtgcagctccaaaaccgccagatgctttggtagccctaaatcgtgagttgtttgtttgccatagcaagggtattgctgtctccttgggcttcacttctttg

SEQ ID NO: 10530 - DNA, 201 bp, Homo sapiens
ttttccaaaaaccaatcttcttggtggctccttgctgtattcaggacagtggcccgagtctctaacgtgtcctgcagccccctctgcaggcttcctcaccmcttcctccttggttttctctctcttctctgaactagccacggcctttcctgccatcggggttcgctcggggcaggctcacttcccccagttaggtaaagc

SEQ ID NO: 10531 - DNA, 201 bp, Homo sapiens
aaagtatctcctttctgactgaatgaggcaacacatcccttcagtatttattatgcagtctctcttcaattcttagcaacttccctcccctccgaaactgytctctgttagttagacctgctgtcttctctgtgcatttgcagcttgggaatgagctaaggacccaaggaaatgcctgtacatttttgaggtgccatttcc

SEQ ID NO: 10532 - DNA, 201 bp, Homo sapiens
gggcttgaaacacatgcagattcctgagcctcactccaggcccaactgaattcagaatttccatgacgaagtctttcctgttttttttttttttttttgasacggcgtctcactctgtcgccaggctggagtgcagtggtgcaatctcggctcactgcaccctccacgtcctgggttcacgccattctcctgcaacctcca

SEQ ID NO: 10533 - DNA, 201 bp, Homo sapiens
ccaggcctctgggcctgtgatgggaggggtttcagcaaaggtttctgaaatgcctttggggacttttctccattatcttggatattagcagttggcttttrgttatgcaaatatctctagcaagtggatgcctcacagcctgcttgaattcctctcctgaaaaagctttttctttctctgccatatggccaggctgtaaat

SEQ ID NO: 10534 - DNA, 201 bp, Homo sapiens; identical to SEQ ID NO: 1556

SEQ ID NO: 10535 - DNA, 201 bp, Homo sapiens
tttcataaaagtatctcctttctgactgaatgaggcaacacatcccttcagtatttattatgcagtctctcttcaattcttagcaacttccctcccctccraaactgttctctgttagttagacctgctgtcttctctgtgcatttgcagcttgggaatgagctaaggacccaaggaaatgcctgtacatttttgaggtgc

SEQ ID NO: 10536 - DNA, 201 bp, Homo sapiens; identical to SEQ ID NO: 1559

SEQ ID NO: 10537 - DNA, 201 bp, Homo sapiens
tagagatggcattgaactgtagactgctttgcatagtatggacattttaacagtattctttcaatttgtgaacaccaaatattttctttttttcattaatstggtatagttttcaaaatacagatatttcactttcttggttaaatacattcctaagtatttaactttttgacactattgtaaatgggattttcttcttaa

SEQ ID NO: 10538 - DNA, 201 bp, Homo sapiens
tgaaatagaagggattaaaaaacatgagtcttagttggtcccttatcaaattactgaacagcctttttataagctctactagtagtttactgcaggaataytgaggacattgtccaccccttcatgtagtattccttcatcttaatgatcactcaataattttttctttttgttattattttgttttaattattctatttt

SEQ ID NO: 10539 - DNA, 201 bp, Homo sapiens
tcaagcaatccatctaatttggcctcccaaagtgctgggattacaggcatgagccactgtgaccaaccataattactttaaaatcaaatcaacctagaatkaattagaatttattttgtgtctaaaggcaacaaaataagcatgaaatagaagggattaaaaaacatgagtcttagttggtcccttatcaaattactgaac

SEQ ID NO: 10540 - DNA, 201 bp, Homo sapiens
ttgtgaatggtaatattagccagttcaacttaattcaggtagattttcaaatctccaatttattttactgctttagaaacaatgtcagttatatatttgamataccttggtctggtggacttgacaagtttaatgaaattggggtaaatctatgttattaacattaagattttttgatatattttgatattagttgaagtt

SEQ ID NO: 10541 - DNA, 201 bp, Homo sapiens
ggatagttcaattaatgaacatttgagtttcatttaaactgttttaagaaagtcatgtagtaataggtaactgatcttaaaataccctagcacagaatttwaaaaattccttatattctttttcattaactgaatattgttgtgattttaggttctgatgaaaattaaattcgacagccttcttttgattgtttatctcaa

SEQ ID NO: 10542 - DNA, 201 bp, Homo sapiens
aaagaattttatgggaattacattgaaactataattaactttggaagaaatgacatcttaaaaatattcagcctgccaatgcatgaacataaactattttwaaatttagttctcttttcatttatcctggcaatgttttatagctttcagtgtctaagtattccatatctttgttagatttatttacagatatttgatata

SEQ ID NO: 10543 - DNA, 201 bp, Homo sapiens
ttcagcctgccaatgcatgaacataaactatttttaaatttagttctcttttcatttatcctggcaatgttttatagctttcagtgtctaagtattccatrtctttgttagatttatttacagatatttgatatattatgcttagtgaaatattaattttctaaaatttaatttttcacttgttatgtaaaaatatgtatt

SEQ ID NO: 10544 - DNA, 201 bp, Homo sapiens
tagtaagtcgattcgtcttttaaagatttactttcttactggctagtgttttctcataattttgtatgtacaggtgtcccagcacttctctgctcagttcrtttatcttgtttgttatatttcttactccttagaataaaaatgcaacaaaatgcttaatcatgatattctgagttccctacttgtcttcatccttaaatt

SEQ ID NO: 10545 - DNA, 201 bp, Homo sapiens
catctttcacaatgaaggattttcgtatgattgcattaatttgcagcagttaatgaaccaacgttccaaccttcaaaagagcctctgctctcagattcaaragaaactctgcgtgtttcctctcttcaaacatgaaggacagaattaggatgaataataatcaaacctaaaataatttctgaactaccctgaagcagtaaa

SEQ ID NO: 10546 - DNA, 201 bp, Homo sapiens
ctttgggaggccgaggcgggtggatcatgaggtcaggagatcgagaccatcctggctaacaaggtgaaaccccgtctctactaaaaatacaaaaaaaaatyagccgggcgcggtggcgggcgcctgtagtcccagctactcgggaggctgaggcaggagaatggcgtgaacccgggaagcggagcttgcagtgagccgaga

SEQ ID NO: 10547 - DNA, 201 bp, Homo sapiens
ggatcatgaggtcaggagatcgagaccatcctggctaacaaggtgaaaccccgtctctactaaaaatacaaaaaaaaatcagccgggcgcggtggcgggcrcctgtagtcccagctactcgggaggctgaggcaggagaatggcgtgaacccgggaagcggagcttgcagtgagccgagattgcgccactgcagtccgcag

SEQ ID NO: 10548 - DNA, 201 bp, Homo sapiens
ggagaatggcgtgaacccgggaagcggagcttgcagtgagccgagattgcgccactgcagtccgcagtcccgcctgggcgacagagcgagactccgtctcaaaaaaaaaaaaaaaaaaaaaagagatgacatcttttgttgtggagtgcattctccttctgcataactgttagtgccatagtctgagtcattatttctaat

SEQ ID NO: 10549 - DNA, 201 bp, Homo sapiens
tatggtatttttaatgagacctaaaaaactaaagtattgctgggatagtaaatatcagttcaacttgtcaaaagttgttctcagatggactttaatatgcyctagactgtgaattccttgaaaagtaagactgtatcttactcactttgacatccccagctgctgtcacagtttttgttgtattgtaattactaaaaacaa

SEQ ID NO: 10550 - DNA, 201 bp, Homo sapiens
gttactgttcctgtattgtttatctcttccgttgtggcctgaatcttactactactttctctgttgccttctgttttcttagtgtgtggtgggtctcttcsaaatactcctgaaggaaactttacttctcctggctatgacggagtcaggaattactcaagaaacctgaactgcgaatggactctcagcaatccaaatcag

SEQ ID NO: 10551 - DNA, 201 bp, Homo sapiens
aaggctggaagatgtctttccggcagacattgggtaagaattctggacttgtaaatctatttttcaggactgttacctttctgctttatttaatttccccrccccccccccacccccacctgattatgattgcttttccttgaagcttagaagaatatgccatgtaagggcttggttttaaaacttacgtatgacatattt

SEQ ID NO: 10552 - DNA, 201 bp, Homo sapiens
acaggtgtacatcaccacatacaactaattattaaaattttttgtagagatggggtctccctatgttgtccaggctggtctcaaactcctggcctcaagtratcctccctctttggcctcccaaagtgctggggttacaggcatgagccaccacggctggcctacaatattcttcatatgcttggagactactaacaatga

SEQ ID NO: 10553 - DNA, 201 bp, Homo sapiens
ctagcctgggtgacagaatgagactctgtctcaaaaaaaaaaaaaaaaaaaatcactttggtagcacagtggaggaaggctagaagaacctacaacatggraaggaagaagcttatgatagaaatctagatgggaagtgtcaaagccttgaacggacccagaggggaaagagataaagggaagggcagaaatctgagagac

SEQ ID NO: 10554 - DNA, 201 bp, Homo sapiens
gctgaggcaggagaatagcttgaaactgggaggcagaggttgcagtgagccaagatggcaccactgcgctccagcctgggcaatagagtgagattctgctaaaaaaaaaaaaaaagagctatttagaaggtaggatgggcagatctgatggtggagtagatgtgtgtcaatctgggagacagaagaaggaatcatggatag

SEQ ID NO: 10555 - DNA, 201 bp, Homo sapiens
caagttgtagtcagtgccacaaagaatccatgtggctggttgtataaaagggcatatttactcatgtctcatattctatttttgttttttataaactcgaratttattaattctctgccttaggacaaaagagaaaaaaacaacatattttcccagccacggcatccaagtctgctataatcccctttgctccattttggt

SEQ ID NO: 10556 - DNA, 201 bp, Homo sapiens
ggtctccctatgttgtccaggctggtctcaaactcctggcctcaagtgatcctccctctttggcctcccaaagtgctggggttacaggcatgagccaccayggctggcctacaatattcttcatatgcttggagactactaacaatgaagggagtcaaatggctctaacataggtacacacgatccaaaagaactctgttc

SEQ ID NO: 10557 - DNA, 201 bp, Homo sapiens
aaaaaagacatatggccagatggaaagagctgattgatgcatgatatcattgcttggtgatacggctttagaaaagccctataacgttttgaatctcaatytttatctactaaaaaactgatcaatttgaaatattacaactatttaagaatgtgatggggataaagcagataatttctggaaagcaccttagctgtcaga

SEQ ID NO: 10558 - DNA, 201 bp, Homo sapiens
ccactcccacttctcagcctttaacctaggtccttttgtgaacattttttgacatcaaatcacctagttttataccatttttctccagagacactccttcrctatggttgattgagatttctaggaccctgtggtagatgccttttattctcacctgattaataggcctgttaattaattagtcaaacatttacaaggtgt

SEQ ID NO: 10559 - DNA, 201 bp, Homo sapiens
gatatcattgcttggtgatacggctttagaaaagccctataacgttttgaatctcaatttttatctactaaaaaactgatcaatttgaaatattacaactrtttaagaatgtgatggggataaagcagataatttctggaaagcaccttagctgtcagagtgaaagactctatgtattagaaagtaatattgaagtcccaa

SEQ ID NO: 10560 - DNA, 201 bp, Homo sapiens
atctttgggagaaattatagcttgcttttactctgaaataaagatgtttccctttttgcatggtctggtctaaatgcttaatcatatgggaagaaaaagasaagccagtggattggccttatggaaatgaacgttagaggataaacagttaggggcttgatgaaatgttcaaaggcttttcttgctgattttcatgattgt

SEQ ID NO: 10561 - DNA, 201 bp, Homo sapiens
ctcccacttctcagcctttaacctaggtccttttgtgaacattttttgacatcaaatcacctagttttataccatttttctccagagacactccttcgctrtggttgattgagatttctaggaccctgtggtagatgccttttattctcacctgattaataggcctgttaattaattagtcaaacatttacaaggtgtttc

SEQ ID NO: 10562 - DNA, 201 bp, Homo sapiens
actctatgtattagaaagtaatattgaagtcccaaattttcaagccccccgcccaaccctatttccaaggttggagggtggctgagggtggggtgggcagsgatcaacattctcaacaggaccacatcatgctacagtgatttttcgttctttcctacccactttgcagtgacacctaaccgtcaaatcctaaagtacatt

SEQ ID NO: 10563 - DNA, 201 bp, Homo sapiens
tatggttgattgagatttctaggaccctgtggtagatgccttttattctcacctgattaataggcctgttaattaattagtcaaacatttacaaggtgttycacatcatgcaaaccaccgagttctgccaaggagttcacagtgtggtaaaggagacagacaagcaaaggcacaattagaacatgatataaggctgggcac

SEQ ID NO: 10564 - DNA, 201 bp, Homo sapiens
atgtaataaggaagttgaattataacttgaataattggataaatcactgatcaaacaactctcagtttagcaataatgagggtattgctccaaagcaaccrtggaatgtcatttttctggtttcctaatgtcatttgctccctgtgatgaagtctgagaatgagatgagctgaaactgtaaacccatttaaagaaaaaccc

SEQ ID NO: 10565 - DNA, 201 bp, Homo sapiens
cacctgattaataggcctgttaattaattagtcaaacatttacaaggtgtttcacatcatgcaaaccaccgagttctgccaaggagttcacagtgtggtaraggagacagacaagcaaaggcacaattagaacatgatataaggctgggcacggtggttcacgcctgtaatcccagcactttgagaagccaaggcaggagg

SEQ ID NO: 10566 - DNA, 201 bp, Homo sapiens
cagaaacacctacttcagcccaggacatcagagagggttccaggggaagtggatgaagagatttgcccatcagtgataaaaagatgtgaatgcatagaaartctcaatgttacaagtcatattcaataatttgaaagaattcactactgctagagatcagagtcaaaaagagataaacataatagtgatgaagcaggcagg

SEQ ID NO: 10567 - DNA, 201 bp, Homo sapiens
aaaaggttatgggaggcattggaagtttttgctccaaagcctgaacagcgtgatcagattaaaaacactaatgtagctgcaacactgaaaacattggagayggggaaggctgaagagagagagaccagatgaaagagtaatttagggaaaaaatttactccctgaactaaggcaatggcagtaagaaggtaggagagaggg

SEQ ID NO: 10568 - DNA, 201 bp, Homo sapiens
tgaggctcagatttggacagagtttaaagggtcacagaacaccactgccatggacgtggtgctgcccacctgtgtccatttctccgggtggagtcctctcmctgcagagggaaggttagaggttggaggaggtgagggaaggaatcagggagaggcctgcaatgtaggtccctggaggctctttgagcttttccctgcaag

SEQ ID NO: 10569 - DNA, 201 bp, Homo sapiens
ttctgagctcttagttaccaattcacatcacacctgccttaccaaaagggtccttgctggcagtttctcttctgtgtcctcccttcctccacaagctgcctttttttttttttttttagatggagtctcactctgttgccaggctggagtgcagtggtgtgatctcagctcactgcaacctccacttcttgggttcaagtg

SEQ ID NO: 10570 - DNA, 201 bp, Homo sapiens
aacttcttccataaagtcacttttgactcttctgcccctcacttaaactcctgatttggaatcaacacatttattgagaggttgttgttatatgtttaggrcaatagtagaccctatggaaaaatatgaaagtgtaaaatactgtctccacttatgaactgctcaccttgcagctgaggagacaagaccaaccccaatggg

SEQ ID NO: 10571 - DNA, 201 bp, Homo sapiens
aacttcactcaagcaagttttctttcgtcaccggaccccatgtaccaccatgagtattttccactgtgttcatttatttggaatgtttctcccgataaacstcctcacacatcttccttgtttctcatccagatgtgtctgtccctcaggagcacttccctctcaacttcttccataaagtcacttttgactcttctgccc

SEQ ID NO: 10572 - DNA, 201 bp, Homo sapiens
caatgatcttctataaccaagtctcactcaatccatctaaccttttttttcactagttccctagaaataacttcactcaagcaagttttctttcgtcaccrgaccccatgtaccaccatgagtattttccactgtgttcatttatttggaatgtttctcccgataaacctcctcacacatcttccttgtttctcatccaga

SEQ ID NO: 10573 - DNA, 201 bp, Homo sapiens
gccaggctggtctcaaactcctgaactcaggtgatccaacctcccaaagtgctgggattacaggcatgagccaccgcgcccggccagattactttaaattytacatttattcattatttctgtttataaaagaatatatattcatatatgaaacatatataaggtaaggtaggaagattcaaaaattccttggtaaattaa

SEQ ID NO: 10574 - DNA, 201 bp, Homo sapiens
ggcactacattcctattatttgggttgattaaagtttagtgtctatccatttgttttatggtattatgtgttttttttccccttaggacactgtctctggytatttttgtaagtgtgactcaggttggacaggtgtcaactgtacagaaaacatcaatgagtgtttgagcaacccctgtttgaatggaggaacttgtgttg

SEQ ID NO: 10575 - DNA, 201 bp, Homo sapiens
agtaactttatatttttagctacctgtgtacctgattagtttatgttaagaatagagattttaacattgaaagtacagattacttttttttttttgaaatrgaatctcgctgtgtcatccagcctggagtgtagtggcgtgatcttagctcactgcaacctccacctcccaggttcaagtgattctcctacctcagcttcc

SEQ ID NO: 10576 - DNA, 201 bp, Homo sapiens
cagaggaggagacctgtatttacacgtttgtttttatttctgaacaggttccttacctctctgcacgtgtctcccgggttatactggaaatggttatgggmcaaatggatgtgtgcagctcagtaatatttgcctaagtcacccctgtctaaatggacaatgcatcgtgagtcctttgtttttcctgtggacagagagtac

SEQ ID NO: 10577 - DNA, 201 bp, Homo sapiens
aaccaaagtttaaaccatggaattatatagggaacagaggaacttccaatattttgaatacatagatcagtaaaatcagcatttccgcatgtcaggctggktccaacatacattgcccgcgtaacgtttccgtaagaagcgtcgagagccctcctggaagcagggctggttgtgaatgcagggtagcagccaggctggggg

SEQ ID NO: 10578 - DNA, 201 bp, Homo sapiens
taaaaaattttttcttggaaatggagtctcactctgtcacccaggctggagtgcagtggcactatctcagctcactacaacctctgcctcctgggttcaartgattctcctgcctcaccctcccaagtagctgggattacaggcgtgtgccaccatgcctggctaatttttgtatttttagtagagacagggtttctccac

SEQ ID NO: 10579 - DNA, 201 bp, Homo sapiens
atccgcctgcctcggcctcccaaagttcagggattacagattccatagggctctttattagtattattattattataattaaaaaattttttcttggaaayggagtctcactctgtcacccaggctggagtgcagtggcactatctcagctcactacaacctctgcctcctgggttcaagtgattctcctgcctcaccctc

SEQ ID NO: 10580 - DNA, 201 bp, Homo sapiens
cgtggatgttaattcatgttttaaatagacacgatcatttcaaattccttttgaccaagttccttcctaacctaattcgattgccattgttttaaccttgwaccttggcaatgaggagctcatcagaagtgtgggagaagttttggtgctggtattttgttgatgtccccatatatttatgttactatattatcttcaatc

SEQ ID NO: 10581 - DNA, 201 bp, Homo sapiens
acaggcgtgagccaccacaaccagcctctgtgattcttgctttgcaatttctactgttgttacaggaacatttcaaagcccttcaaatttaaagtaacctraacttggataaagttccaagtttttccaggagatgtgagtgcaaacctcagcaacaacatttttaacaatcaccctaatgaggcctctccacagatcctg

SEQ ID NO: 10582 - DNA, 201 bp, Homo sapiens
ggatattaaatttagtaaaattttgtaatgtctatgacgagtatttttaacctaacattgcgtaagaaaactgtcaagatgctggatgctctaaaactctwgttagctattacctcatgtacatcataattaatcgtggatgttaattcatgttttaaatagacacgatcatttcaaattccttttgaccaagttccttcc

SEQ ID NO: 10583 - DNA, 201 bp, Homo sapiens
tctagaaggactaaggagaattaggaaaaagcccatgaattattcaatgatgtccaccataactcagggaaaggaagaaaatccttctgccttcctcaagyggctatgggaggccttaagaaaatatactcccctgtcacctgactcactcgagggtcaattgatcctaaaagataagtttattacccaatcagctgcaga

SEQ ID NO: 10584 - DNA, 201 bp, Homo sapiens
ccttgagcagtggtttataattctccttgaagagatccttcacatcccttgtaagttgtattcctaggtattttattctctttgtagcaattgcgaatggsagttcactcatgatttggctttctgtttggctattactggtgtataggaatgcttgtgatttttgcacattgattttgtgtcctgagactttgctgaagt

SEQ ID NO: 10585 - DNA, 201 bp, Homo sapiens
ttgctagcttttaacttttctgtatgttaaatttcgttagaaatttatatatgaggccgggcacagtggctcatgcctgtaatcccagcactttgggaggmtgaggtggatggattgcttgaggtcaggagttcgaaaatagcctggccaacatggagaaaacctgtccctactacaaatacaaaaaattagctgggcgtg

SEQ ID NO: 10586 - DNA, 201 bp, Homo sapiens
cgtgtagaacacattggattccatgcaaagtattcctttacaggtaagaattataattaagatcttgataaaattacttataaagattaatgatttttttccataaagatttcatatatattttgttagatttatttctacatagctattagttttgttaatattatcaatgagattttctaaattacattttttaattgg

SEQ ID NO: 10587 - DNA, 201 bp, Homo sapiens
atatatagtgtgtatatatatactatatatggtgtgtgtgtgtatatatatatactatatatggtgtgtgtgtatatatataccctatatatggtgtgtgtatatatatatatatacacactatatatggtgtgtgtgtatatatatactatatatggtgtatatatatacacactatatatggtgtatatatatatatac

SEQ ID NO: 10588 - DNA, 201 bp, Homo sapiens
tatatagtgtgtatatatatactatatatggtgtgtgtgtgtatatatatatactatatatggtgtgtgtgtatatatataccctatatatggtgtgtgtatatatatatatatacacactatatatggtgtgtgtgtatatatatactatatatggtgtatatatatacacactatatatggtgtatatatatatatact

SEQ ID NO: 10589 - DNA, 201 bp, Homo sapiens
atggtgtgtgtgtatatatatactatatatggtgtatatatatacacactatatatggtgtatatatatatatactatatatggtgtgtgtgtgtgtgtgwgtgtatatatatatatatatatactatatatggtgtatatatataatatggtttttttttgagatagagtcttgttctgtcaccctgactggagtgcaat

SEQ ID NO: 10590 - DNA, 201 bp, Homo sapiens
tggtgtgtgtgtatatatatactatatatggtgtatatatatacacactatatatggtgtatatatatatatactatatatggtgtgtgtgtgtgtgtgtrtgtatatatatatatatatatactatatatggtgtatatatataatatggtttttttttgagatagagtcttgttctgtcaccctgactggagtgcaatg

SEQ ID NO: 10591 - DNA, 201 bp, Homo sapiens
gtgtgtgtgtatatatatactatatatggtgtatatatatacacactatatatggtgtatatatatatatactatatatggtgtgtgtgtgtgtgtgtgtrtatatatatatatatatatactatatatggtgtatatatataatatggtttttttttgagatagagtcttgttctgtcaccctgactggagtgcaatggc

SEQ ID NO: 10592 - DNA, 201 bp, Homo sapiens
ctacaccatcgaaagcacacagacaacaacttgattttctcccacagttactttatcaagtttgttttttttttttttttccattctgctctcaacccccmattttcaaagtacagtcctggaggaagttatccctgggttgtgatatgcaggcaaaggcacgtgtgtggaggatggaagaggtggaggtggcagtgggaa

SEQ ID NO: 10593 - DNA, 201 bp, Homo sapiens
ccttgaccacaaaatcccgtggggggcttgaaacacatgcagattcctgagcctcactccaggcccaactgaattcagaatttccatgacgaagtctttcmtgttttttttttttttttttgacacggcgtctcactctgtcgccaggctggagtgcagtggtgcaatctcggctcactgcaccctccacgtcctgggttc

SEQ ID NO: 10594 - DNA, 201 bp, Homo sapiens
ccagctttaaatgtctttgtattctgcttcctgtagtttccagtaaagcttccttcagctgcagcctaaagccacagatggcttgctggaaacaggagagsgcctgaagtcaagccagtctgtatctgctcgtacagcacactgtgcaccttctcagtagtggtcaaccagagacaggcagagatactatccagacaacct

SEQ ID NO: 10595 - DNA, 201 bp, Homo sapiens
tgaccacaaaatcccgtggggggcttgaaacacatgcagattcctgagcctcactccaggcccaactgaattcagaatttccatgacgaagtctttcctgytttttttttttttttttgacacggcgtctcactctgtcgccaggctggagtgcagtggtgcaatctcggctcactgcaccctccacgtcctgggttcacg

SEQ ID NO: 10596 - DNA, 201 bp, Homo sapiens
ctgtagtttccagtaaagcttccttcagctgcagcctaaagccacagatggcttgctggaaacaggagagggcctgaagtcaagccagtctgtatctgctsgtacagcacactgtgcaccttctcagtagtggtcaaccagagacaggcagagatactatccagacaacctcaggaaaatgtcagccgtatagaatgtgag

SEQ ID NO: 10597 - DNA, 201 bp, Homo sapiens
gcaccttctcagtagtggtcaaccagagacaggcagagatactatccagacaacctcaggaaaatgtcagccgtatagaatgtgagccacaaaaatgtcarttctccaaataatgatttaaaaatgtatctaactccactgaagccttcgagatgttttatccaagagaatgtaactattttttcccttatcagattgatc

SEQ ID NO: 10598 - DNA, 201 bp, Homo sapiens
tgccatctatgcaactataactcagacaaattctaagtattgttgaaagaacaaaatcacagtaacctgtcaaaataattgtaaaagttgtttgaagagamtatcagctatcactctgtgcatcagggtcatagaataaattttaagagtgaatgatcacgacaaatggcaaaaccggagaggctgtgggaagctaagcct

SEQ ID NO: 10599 - DNA, 201 bp, Homo sapiens
gtaatcccagctactcgggaggctgaggcaggagaatcgcttgaacccaggaggcggaagttgcggtgagcctagatcatgccattgcactccagcctggscgacaagagcgaaactctgtctcaaaaagaaaaaattaatatatgtgccctgcttttagtaaatactaccattgggcgttctttcttctgctccatctcg

SEQ ID NO: 10600 - DNA, 201 bp, Homo sapiens
gcctggccaacatggtgaaaccctgtttctactaaagacacaaaaaattagccgggtgtggcggcgggcgcctgtagtcccagctgctccagaggctgagrcaggagaatcgcttgaacccgggaggtggaggttgcagtgagctgagatctcgccactgcactctagcctgggtagcagagcaagactccgtctcaaaaa

SEQ ID NO: 10601 - DNA, 201 bp, Homo sapiens
ggctccggtgagaagacagctccacgaatagagaggacacagcaaagagccttccttccatcaggagaaaggatgctttcttagagggagtcagcatagattttcagagagtcaggctctcagctccaggaaaagtacccagggaggcaactggagaaggcaaaaggcacaggaaaagaacagacgcgtcatgaaaagata

SEQ ID NO: 10602 - DNA, 201 bp, Homo sapiens
tactgaaaggatgactggtatctctgtatgcatgagggggccctgactctttagcaaaacctgcaaacctacaaatgtcatatccacaggtcttttctctyggggaggttaaaactccagcgacgaatcactttcagaattaatttttcttctgagtctttagttctaatgtccacattcctttttttgaaatgtattttt

SEQ ID NO: 10603 - DNA, 201 bp, Homo sapiens
aactggcagatcaaagaatagcccttggaatgtggagcttggagctttctttattaaagagatttttctgtgataaatgggacggttgattccttttagatttttttttagagattataatcaaatcactttttagaaaagctaatttaactgaactctgtggtagatacacaagtaaaatcataccaattccattattca

SEQ ID NO: 10604 - DNA, 201 bp, Homo sapiens
ctcaaaaaataaataaataaaaattaaagtaaataaagaaaaatatctgctttattatgtacatgaaatcatcagaaactgatatttaagcttcccttccwagtaacaaatgtcctgatgcattgttaagaaaaactgcccatcagtgagctctgcagaccacattgtaagcacaatggctcatctcctttacattgagag

SEQ ID NO: 10605 - DNA, 201 bp, Homo sapiens
acttccacaatggttgaactagtttacagtcccaccaacagtgtaaaagtgttcctatttctccacatcctctccagcacttgttgtttcctgactttttratgatcgcacataaaaagccttgatgaagaataagagaaggtaattggaagaatttaccaaccaataaagaatattaaaaaaaaaaaaaaaaagaaaaag

SEQ ID NO: 10606 - DNA, 201 bp, Homo sapiens
gtaggatgttgtaaatgccccccattttaatcaggggcactgcagatgcccccagctactgccaatggcagcagagccatccattttccctttagtgatayttgaaatctttgacataagacaaacacacataagcagatgaaaaacgcactgcagacagaaaaaaagctttctgatttcagaaagaaactgccatagtga

SEQ ID NO: 10607 - DNA, 201 bp, Homo sapiens
aatattaaaagaaaaacgctaagttatttcattggtacaagaagcatctgttcctttattaaaagggggcaaattaatggcaaattaatgtcctattatckgtttgatttaaaataatttattagatcaagtggagaattgctaatcaagccattaggacctgccaccattatatttatgtattcctctaaagtaaatatt

SEQ ID NO: 10608 - DNA, 201 bp, Homo sapiens
ctggatattaaatttagtaaaattttgtaatgtctatgacgagtatttttaacctaacattgcgtaagaaaactgtcaagatgctggatgctctaaaactmttgttagctattacctcatgtacatcataattaatcgtggatgttaattcatgttttaaatagacacgatcatttcaaattccttttgaccaagttcctt

SEQ ID NO: 10609 - DNA, 201 bp, Homo sapiens
aaagataaatcttttctcttactatttctcccttcacagtcatgtttaggaaggctttctttactgaactctttaaaaattgtcaagtacatgttcttttwtacttctatggtttctttttttatggtaagatattttatatttttagaatgtattttttatccgtagcatcaaatagagatctggcttggtatttttgct

SEQ ID NO: 10610 - DNA, 201 bp, Homo sapiens
taaataaaatttaaaaaatgaaaaaaattgggtagtaacattaattcaccttggtgataatgaggaatttagaaattctcaatttaaaaattctacacgcmgtaaactgtaaactcagtgtttctcagatccagtaattcttgacaagcattggagggtgcagcagcgcttagctcgtgaggtggaaacaccaaagggaca

SEQ ID NO: 10611 - DNA, 201 bp, Homo sapiens
gggcatggtggctcacgcctgtaattcccccactttgggaggccgaggtgggcggatcatgaggtcagggggtcgagaacatcctggctaacacggtgaawccttgtctctactaaacaaaatgcaaaaaattagccgggcgtggtggcgggcgcctgtagtcccagctactcgggaagctgaagcaggagaatggcgtga

SEQ ID NO: 10612 - DNA, 201 bp, Homo sapiens
cttcccaggttcaagcaattctcatggctcagcctcccgagtagctgggattacaggcaccagacaccatgcccagctaataattgtatttttagtagagrtggggtttcaccttgttggccgggctggtctcaaactcctgacctcaagtgatctgcctgcctcggcctcccaaagtgttgggattacaggtgtgagcca

SEQ ID NO: 10613 - DNA, 201 bp, Homo sapiens
tcatggctcagcctcccgagtagctgggattacaggcaccagacaccatgcccagctaataattgtatttttagtagaggtggggtttcaccttgttggcsgggctggtctcaaactcctgacctcaagtgatctgcctgcctcggcctcccaaagtgttgggattacaggtgtgagccactgtgcctggcccctagaacc

SEQ ID NO: 10614 - DNA, 201 bp, Homo sapiens
atttaggggaacacaaacattccaaccatggtatacataccaactcatagaggtatgttatatattctctctctctttatctgtctatctatctatatatmtatgtatgtatacaatctaaatgtattttttcagttttcagcctggatcctggagctcaccataatgaaatttacatctgcatgtttattttattttact

SEQ ID NO: 10615 - DNA, 201 bp, Homo sapiens
agaatcacttgaacccaggaggcagaggttgcagtgacccagtgacccaagatagcaccattgcactccagcctgggcaacaagagcaaaactccgtcccaaaaaaaaaaaaaaaaaaaaaaaaaaaaagctgggcatggtggctcacgcctgtaatctcagcactttgggaggccgaggtgtgtgaatcacctgaggtcg

SEQ ID NO: 10616 - DNA, 201 bp, Homo sapiens
agctgcgtataatggtgtagatcctaaaggcaccatttatatcccagtttatatatgattccccctcctcatcattggatagggcgtcccctgcaacgcaytgtagggcaacctggcaaaagtctgtagtgaaggtttagtgttatcagagaacaagagagcagatagagatcttgggtttgaggcagaggagtttagagc

SEQ ID NO: 10617 - DNA, 201 bp, Homo sapiens
tgggaggatcacttgagcccgggaagttgaggctgcagtgagccacgatcataccactgcactccagcctgagtgacaaagcgagaccctgtctcaaaggaaaaaaaaaaaaaaagaacatggtatatggtataataagtgctagaaagaggaatgcacagaacagaaacacctacttcagcccaggacatcagagagggt

SEQ ID NO: 10618 - DNA, 201 bp, Homo sapiens
gaatcacttgaacccaggaggcagaggttgcagtgacccagtgacccaagatagcaccattgcactccagcctgggcaacaagagcaaaactccgtcccaaaaaaaaaaaaaaaaaaaaaaaaaaaaagctgggcatggtggctcacgcctgtaatctcagcactttgggaggccgaggtgtgtgaatcacctgaggtcgg

SEQ ID NO: 10619 - DNA, 201 bp, Homo sapiens
atcatgaaattttaacttgtttaccagaaaaagtgcatgacctaaaacttggcaaatgtgctcttccatgaaacaaaggggtgaagattagaaaactcgastttcatctgattctgaattaactaaaatcatgtttaagttggaaagacagtgccatctagtggtgcatttctttttcttttacaatgactggttttagtc

SEQ ID NO: 10620 - DNA, 201 bp, Homo sapiens
ggtaagtatggctaaggcaagagatttccttcctctctgagtgtgtcaagaggagttgagatatttgggggtagggtgggggtggggggacctaagccackaaaatcctaaatgaataatctctttaagagaataacaaaagatttcacagaggaaggttttgtaatatacacatctccgcatctgaagatatatttaatg

SEQ ID NO: 10621 - DNA, 201 bp, Homo sapiens
ttaaaaacctaagtaactgtactatatccgaatattaaatttttaaagggtagatattaaattatttttaaatgcatgcactactagattatcacaattctggaaggaaacatattattcttccagtatgctatatttttagaggacaatgaagaagcagcattccatggctttgtgaaaacgtgatttcatttgcgtttc

SEQ ID NO: 10622 - DNA, 201 bp, Homo sapiens
ttgttaggtttttggctgggtggatccattcttcccacagacatttatcaagaactttccatgggacagacactgtatcaggccccggggatgtggcagtaaacaaacaaaatccatgtcctcatggaacctaattctagtgttaagatgcagacaataaataagtaaaatatataatatgccatatggtgaaaggtatca

SEQ ID NO: 10623 - DNA, 201 bp, Homo sapiens
aatcacttgaacccaggaggcagaggttgcagtgacccagtgacccaagatagcaccattgcactccagcctgggcaacaagagcaaaactccgtcccaaaaaaaaaaaaaaaaaaaaaaaaaaaaagctgggcatggtggctcacgcctgtaatctcagcactttgggaggccgaggtgtgtgaatcacctgaggtcggg

SEQ ID NO: 10624 - DNA, 201 bp, Homo sapiens
cagtctgggaactagaaggctcaagagggcaatatgtaagttgagacctaaaaggatcagagggaagtctaaggacaacatgctggttctgtaaaatgaarctcaatgatactaaatagctcacctaattttcctgacagctacagtaagtttggggcatcgtcaacatcctctaaagacaagtgtttccttgaataaatg

SEQ ID NO: 10625 - DNA, 201 bp, Homo sapiens
aaatattaaaaagctcctttatcctctggcataacattactaataaattatttcattccattgatcttggttctcaaatgcatctaaatcctgaagaaatstaatgaatgaatgctccccgagttgtgcaaagatatatctgcttagtcttttaaatataccaagatcatagctctgcatcattctgctgtactgaatgct

SEQ ID NO: 10626 - DNA, 201 bp, Homo sapiens
aactggaactgtaacccacaaaatgtgcaaggcacgtggtaaacataaacagggtgacagcctgctaaaataaaagatttgaataggacccaaagttcccyaacataataaatgacatgtcctgggtacaatcagaaagaacacgttgtatcaggaatcaagaacatcacaacttgaaagagaaaagaatcaagtgatgtc

SEQ ID NO: 10627 - DNA, 201 bp, Homo sapiens
tcaacatcctctaaagacaagtgtttccttgaataaatgctccctggtctcaggggggtgtggtctgtcctttcttcaccacaactccagagcttgaattkgggcacagaaatgacttcactgtttgcccatcgtccacacacccaccctccactcccaccccaggacacactgagagagaagcccccttgtgcctggagc

SEQ ID NO: 10628 - DNA, 201 bp, Homo sapiens
ccttctggcccatcactactaccaacacttttaatgaattcctacctgaaactaatgctttgcgcttcatataagagtgaatgaagttctattttgaaggktttttttttctttctgtttttaaattttttggctacctaattttcttttattattgttattattattatactttaagttctgggatacatgtgtagaagc

SEQ ID NO: 10629 - DNA, 201 bp, Homo sapiens
gcttataagggaaagggaagttgtggtttgagaatgttctccatggaattctgataaaccctcaccccctctgcctgtttcaaaaccaccggcttgtggtmttaagcagaacagctgtatctcaaatttcagtcagctaaatgctgtcttctctttatttgctcaggtttagaggcagttaaaatactatatatcattgat

SEQ ID NO: 10630 - DNA, 201 bp, Homo sapiens
tcaggggggtgtggtctgtcctttcttcaccacaactccagagcttgaatttgggcacagaaatgacttcactgtttgcccatcgtccacacacccacccyccactcccaccccaggacacactgagagagaagcccccttgtgcctggagcaggcagaaccatgcgcctcgtgggcctgaaactttggggtcctccagtg

SEQ ID NO: 10631 - DNA, 201 bp, Homo sapiens
taattttaaaattattcaataataaactgcataattttaaaattattaaattttaaaattatccaataattatttaataattaataataataaataattawtaataataattattatttaataattttaaaattattttataatttgcataattattataaattttataattttgcatacatgtaactttagtccaaagat

SEQ ID NO: 10632 - DNA, 201 bp, Homo sapiens
accacaactccagagcttgaatttgggcacagaaatgacttcactgtttgcccatcgtccacacacccaccctccactcccaccccaggacacactgagaragaagcccccttgtgcctggagcaggcagaaccatgcgcctcgtgggcctgaaactttggggtcctccagtgcccccgatgagctccctctgtgctcttt

SEQ ID NO: 10633 - DNA, 201 bp, Homo sapiens
aaattattaaattttaaaattatccaataattatttaataattaataataataaataattattaataataattattatttaataattttaaaattattttrtaatttgcataattattataaattttataattttgcatacatgtaactttagtccaaagatctagctatcctcttattagttttaatatgttgtctatag

SEQ ID NO: 10634 - DNA, 201 bp, Homo sapiens
ctaatgccagccttcaccttgggcattaagaccccacagtctgaaaaaaccgtgagaaagccatgtaaaaatgatgggaatggggcatcaggagagcaaakctctttcaaaatctaaagttataaatgctgctcgtgtggcagtggcttgtcactttccactgacttgtgactatgatgactgtcttagaaattcatttca

SEQ ID NO: 10635 - DNA, 201 bp, Homo sapiens
taatgccagccttcaccttgggcattaagaccccacagtctgaaaaaaccgtgagaaagccatgtaaaaatgatgggaatggggcatcaggagagcaaagytctttcaaaatctaaagttataaatgctgctcgtgtggcagtggcttgtcactttccactgacttgtgactatgatgactgtcttagaaattcatttcat

SEQ ID NO: 10636 - DNA, 201 bp, Homo sapiens
atatatatatacatataataaaatacatttaatatacacttttcttaatggctttttccatgaactaaatgaactctcttctcatgaaatgaatcaatatmaagtattcagacttaagtaaaactttcaagtgctccagttgtaaaactggaatgtggaaaatggcctaggctcattccttctctggattgaatgggggtc

SEQ ID NO: 10637 - DNA, 201 bp, Homo sapiens
tcatgaaatgaatcaatatcaagtattcagacttaagtaaaactttcaagtgctccagttgtaaaactggaatgtggaaaatggcctaggctcattccttstctggattgaatgggggtccctctgataacatcgggcaagcccaacgctgctgccgagtgggatgtattaggaaccctgccaaaaataagtggccgtggg

SEQ ID NO: 10638 - DNA, 201 bp, Homo sapiens
tacccacccagagacaccagggtaggtgggactggaaaaatgggtcccagtcacagaaaggggccagtctgggaagcctctttgtccccacaggccagacmtgctcctcttccacccagagacattgaggtacccgggggtattggtaggggaaaattactataccctttgccttcaactgagaaacacacagagtccctc

SEQ ID NO: 10639 - DNA, 201 bp, Homo sapiens
tggcggcttcactgcttcctatacctccagtgaagatgcaggtaatgtaggatgttgtaaatgccccccattttaatcaggggcactgcagatgcccccakctactgccaatggcagcagagccatccattttccctttagtgatacttgaaatctttgacataagacaaacacacataagcagatgaaaaacgcactgca

SEQ ID NO: 10640 - DNA, 201 bp, Homo sapiens
ggggccagtctgggaagcctctttgtccccacaggccagacctgctcctcttccacccagagacattgaggtacccgggggtattggtaggggaaaattastataccctttgccttcaactgagaaacacacagagtccctcaggtagcaccagcaagaaccagtgagagccccggtagcaccaatgtaaaccaagcagac

SEQ ID NO: 10641 - DNA, 201 bp, Homo sapiens
gaagcctctttgtccccacaggccagacctgctcctcttccacccagagacattgaggtacccgggggtattggtaggggaaaattactataccctttgcyttcaactgagaaacacacagagtccctcaggtagcaccagcaagaaccagtgagagccccggtagcaccaatgtaaaccaagcagaccagaattccacca

SEQ ID NO: 10642 - DNA, 201 bp, Homo sapiens
tatcagcaaaaaaacaatggttacaataaagaactaaatagaaattatagaactgaaaaatacactaacataaataaagaacatgctgaataggctcaatrgtagcatggagatgacagagaatagaatcagtgaacttgaagatagaacaatagaattcacccagtctgcacaataaagagaaaatagactgaaaaaaca

SEQ ID NO: 10643 - DNA, 201 bp, Homo sapiens
agttcagacatatcttaattaaacttctgaacactgaaggcaaacaaaaagtcttgaaagcagtcagagagaattgggacattacctagagaggaagaccrgttagaataaaagcagatttctcatctgaaaccatggaggccctaatgaattgacaatatattcttcaagtgctgaaacaaaggaattgtcaaccataca

SEQ ID NO: 10644 - DNA, 201 bp, Homo sapiens
tcttcaagtgctgaaacaaaggaattgtcaaccatacattttatatctggaaaactatctttcaggagtaaagaggaaataaaaacttctcatatgaaggwaaactaaacaaaattatcactaggaaacctaccattaaagatggtcaaacagaagttcttcaaacaaaaatgaaattattaaagaaccgtggagcatgag

SEQ ID NO: 10645 - DNA, 201 bp, Homo sapiens
aaagatggtcaaacagaagttcttcaaacaaaaatgaaattattaaagaaccgtggagcatgagaaaagaaaaaggaaagtggaaaaagcaaaaatatgtrtacatacaatagaatatccttttccccataaagcttgtgaatcatatttaataaaacaagaaattataatgccctctgttattcagtataatgatatgga

SEQ ID NO: 10646 - DNA, 201 bp, Homo sapiens
ggcaatacagcaaaatcccctctctacaaaacatttaaaaattagccaagtgtggtggtgcacacctgtagtcccagctatttgggaggctgaggtgggaggatcccttgagcccaggaggtcaaggctgcagtgagctgtcacaccactgtatgccagcctgggtgacagggtaagaccctgactacaaaaataacaatt

SEQ ID NO: 10647 - DNA, 201 bp, Homo sapiens
acaacagaaaaagaggaatcttacataatgataaaaggatcaatccaccaggaagacataatgatcctcctaaatgtgtatgcaccaaacaacagaggcayaaaatacataaagcaataactgatagagctaagaagagaagtagacaaatcttcggttatagctgaggacttcaacactctcctctcagtaattgataga

SEQ ID NO: 10648 - DNA, 201 bp, Homo sapiens
agatggatcagtgtagatatagaaatggtctcattgccaagtaagccccaaacaaatatgtgcaggatctgagtgctaaaaataatgaaatgctggcataracctaaatgaaagagacaattatatttatgaattggaagactcaacatagtaaagatgtcccttctccccaaaatgatggataggtttaatgcaattcct

SEQ ID NO: 10649 - DNA, 201 bp, Homo sapiens
tggtggatatttattcatgcttctgtgatgttctgccccgtgcaccatgtgccataatcatttggttggctttaagaaagaatgaaatttccaatgagaayagataaatggtctggcaaaataaaaagtgtcacacctcgtagctccctcgatagcaaattgagaatttgtttgctggaaaagaaaatgaggatcataaca

SEQ ID NO: 10650 - DNA, 201 bp, Homo sapiens
ccatgtgaaatattttcatccagtctgtagccagtctgttcattttcttcacataggcaatgtactactatgtaaaatatataaagaagtctcaaactcargagtaaaatacaaacagttctattagaatatggacaaaagacatgggcagatagtccaccaaagagactctacagatgataaataccagaaaagatgttc

SEQ ID NO: 10651 - DNA, 201 bp, Homo sapiens
tactatgaaaggggctaaggttgggaggccagaaaaataacagtgtggtttggtgagagcaagacagacaagtgagactgcagtgggcagagaatggaacrgggctccggtgagaagacagctccacgaatagagaggacacagcaaagagccttccttccatcaggagaaaggatgctttcttagagggagtcagcatag

SEQ ID NO: 10652 - DNA, 201 bp, Homo sapiens
ttccaaaagtaacacacacataaagagtcaaaatgtgtattcatgccaggcttcctccaaacaccacatcctcaatgtttcccaatactgtctctcaaagkatacattttcttttttcttttcttttttttttttttttgagagaaggtctcactttgtcacccaggctggagtgtagtggcacaatctcggctcactgca

SEQ ID NO: 10653 - DNA, 201 bp, Homo sapiens
aatctcatttcagattgtggcggaatacagataggtgacagtggagtgatcacaagccccaactatccaaatgcttatgacagcctgacccactgctcttsgctgttggaggccccacaagggcacaccatcactgtgagtgctaatgactgggtgaaatgcttctgagacaatagaaccacaatagcctgtcctgcatga

SEQ ID NO: 10654 - DNA, 201 bp, Homo sapiens
gataggcaaggcagaaatgaatattgaataactctttaccattgtcatcaccattatcatcattattattaaacttatgttcccaggccaaaaggtagagwtgtcgaatctataattaatgacttcagaaaagtataagcacttaagcattcttggattccttcattaaagaacttgaggctctttattaagttttagccc

SEQ ID NO: 10655 - DNA, 201 bp, Homo sapiens
tgagtaatttggtatcattccatgtgaagaaaatgttgaatagtcaagtaagattaatacacatccaactacatccttgtttgagatagttgtctgttgakagaaagggcatattgggtattgcagattgcgtagcaatagtcctggcccctacccactagatactacccatcacaccgagtgtgacaatagaaaaatgac

SEQ ID NO: 10656 - DNA, 201 bp, Homo sapiens
ccccggtagcaccaatgtaaaccaagcagaccagaattccaccacacagattctgaatattgaagagcaactggaactgtaacccacaaaatgtgcaaggcacgtggtaaacataaacagggtgacagcctgctaaaataaaagatttgaataggacccaaagttccctaacataataaatgacatgtcctgggtacaatc

SEQ ID NO: 10657 - DNA, 201 bp, Homo sapiens
ttatataatattttgaaatgatagtgttttagaaatggaaagcagagagccagaggttagagagaaggcaatgtaggagtaaattgtgtgtggttataaayaacaaaagcaacttagggattcctgtggtattggaatttcagtatcttgaatgcaattgtgtacaacttgtatataacttaatacacacacacacacaca

SEQ ID NO: 10658 - DNA, 201 bp, Homo sapiens
tgatgttgaataaatcccttttttgttgtttgtttcaaaaagctacagattataaactagaattaaggccccagaagtttttaggaaaatgctatttccaraattttgctaagtatatcaaatatgatatattacatttcaaaaatttccaaatcagaaggaaaacgttgaaagattctctgtaaaatacagcagtatgtt

SEQ ID NO: 10659 - DNA, 201 bp, Homo sapiens
tggtgtgtgcctgttggctgagttaaatcaagtgtagccactcatggcaaaccactgtttagggaaaagtttgaggaaaggaattagaggaagtaatacartagacaggtttttcagactgaatcagagagtgctggaaaggaagtactgaaagacaaccctagaccaaatcttaggtctgcaggtggtccactgtgtaag

SEQ ID NO: 10660 - DNA, 201 bp, Homo sapiens
aaagatatttctttctgtttcgaaaaccagggatgcatgtaagaatttgataagagttgggattaataaatccagctagttttaaaaagcaaccattgttktggctagattacaatggtaatgaaaatagcagttttctaataataagacattttaaaaacattaattgtgtaaagtactaatcagatacaaatcattttt

SEQ ID NO: 10661 - DNA, 201 bp, Homo sapiens
ttccctcccttcctcccctcttcttccccttcctctcctccccttccttttcctcatctctctttccctccccttccctttctttccacagggtctctctytgtcacccaggctggagtgcagtggtgcaatcacggctcactgaagcctcgacctcccaggctcaggcaatcctcccacctcagcctcctgagtagctgg

SEQ ID NO: 10662 - DNA, 201 bp, Homo sapiens
atcctcccacctcagcctcctgagtagctgggactataggtgcacccccacgcctggctattttttttcttttttagagatgggatctgctctgttgcccrggctggtctcaaactcctggcctcaagtgattctcctgtcttagcctcccaccatacctggccatttttgttcttaaatcaccacttctccaagaccttt

SEQ ID NO: 10663 - DNA, 201 bp, Homo sapiens
tccatgttgtcacaaatgacaggatttccttttctttttaaggataaataatatcccatttatgtctgtgtgtgtgtttttgtgtatttatatattgcacwttttctttatccatttacctgttgatgagcacttagattgattccatatcttggctatggtgaatgtatgaatgtattgtgaataatgctgcaatgaaca

SEQ ID NO: 10664 - DNA, 201 bp, Homo sapiens
gttagcaacaaccagtgtggctggcctgtggcaccttgaccacaaaatcccgtggggggcttgaaacacatgcagattcctgagcctcactccaggcccawctgaattcagaatttccatgacgaagtctttcctgttttttttttttttttttgacacggcgtctcactctgtcgccaggctggagtgcagtggtgcaat

SEQ ID NO: 10665 - DNA, 201 bp, Homo sapiens
tgaagattcagagaatttaagggaaaaagattgtcagtgaggttcatggttaaaaaatacatatacacattttttcttaaaaagaagaggacctttttcakgaactttggctagaactactctgaaaatcaaatgaagaattgacatttgttttgtaatttaatttaaataaatactactgctatttttttgtttttctta

SEQ ID NO: 10666 - DNA, 201 bp, Homo sapiens
caaagtgaacagcaaatgccatacccaagaagcagcaacacacctggtttggctcaagaagcggaatcgaacaaagtgaagacaataagaaattagattaraaaggtcaggggtgggagaggagagaaagccattgtgatgcctttggctgtttgattgagtggatgggaagcagttaggaggatttcagcagagcagtga

SEQ ID NO: 10667 - DNA, 201 bp, Homo sapiens
aattttttctttttcagttccaaacttagaaacaataccatgaacaaataatggaacccaggtagtaatctcatgcaagggtttaagaaatatacttagayattggtggaacttggagagttaagtctgttaggattaagagaggaagtgacatcaaagtggaaagaatttggttaattgtaggtgtagtaataaattgcc

SEQ ID NO: 10668 - DNA, 201 bp, Homo sapiens
acaaggtacatttcacaggttcagtgattttgatgtggttccctccacctcctgctcccatgactacctggcaatttacgatggtgccaataccagcgatccccttcttggcaaattctgcggttccaagcgcccaccaaatgtgaagagcagcaataatagtatgctcctggtgttcaagacagattcatttcagacagc

SEQ ID NO: 10669 - DNA, 201 bp, Homo sapiens
cacagcctttaacaaattgagcagttttccaacttgcctttctattatgggagcatgagtgccatctggtgggcattgcattaaattactattaagagttmcaaaaatcagccctgcgtcagaatcacctgtggagttacttacattagacttccagttcccaccgaaacccactgaatcgggatttcccagggaggagtc

SEQ ID NO: 10670 - DNA, 201 bp, Homo sapiens
caagagatattaaatatgcttggcttctatagcactgcttgtattatgggcagatgctcaataaacacttatgagtgaatgaaggaataaataaatggaaytgggaagctattttacctctttcaaattttagaaatacgaagacagttaagtttctaccgtaattaccagaattacaacgtgcaggtttgttacatatgt

SEQ ID NO: 10671 - DNA, 201 bp, Homo sapiens
gctctttttattaaagaaaaccttgtggattatttgctttaaatactaggaaaaaagacattgtgggtccatataactatactgtaatttttttaaagcawtactgaatgccccgaatctgtattaccattccagtttacagcgacaatttaagggtattagtatcctgttatttgcgaaggaattcacaaggaaacgtaa

SEQ ID NO: 10672 - DNA, 201 bp, Homo sapiens
cacacaagtacttacaggcacatagagaagagtgctccctgcaaggtgggctcagttgaggcaaaaacagtaaagaaataaagagcctgacatggcagccycaatttgttcctcatttctgaggatgtaaagtggaacgtgtccactgatagtgtataaaccatggaaatacttcaaaatgcgttaaccccattataattt

SEQ ID NO: 10673 - DNA, 201 bp, Homo sapiens
caggctttgaacatgagtttgactgtcccccaaactcctgattttcttagtaagccttcattgcctctgtggcaattgataaaaatacccagggatgtgakgtgtgtgtgtgtgtgtgtgtgtgtgtgtgtgtgtgagagagagagagagagacggagtctcactctgttgccaggctggagtgcaatggcgtgatctccg

SEQ ID NO: 10674 - DNA, 201 bp, Homo sapiens
agaagttgttgacacgtgccatgcatttcacacttccatggcctggcatttattactgtctggctgggatacccttcctgttttgtaggtctggaaggtctttttttttttttttttgggacagagtttcgctcttgtcgcccaggctggaatgcagtggtgcgatcttggctcactgcaacctctgcctcccgggttcaa

SEQ ID NO: 10675 - DNA, 201 bp, Homo sapiens
gcaattcatccatgtaacgaaaaaccacttgtatcccaattagattagatagatagatagatagatagatagatagaaaaaaaaatttcacctttgaaagytgaacactttattcccacccttttccatgccaccaccccccaattctacactcctcataatctcagcaaatggaaagtacatttttctcattatttaagt

SEQ ID NO: 10676 - DNA, 201 bp, Homo sapiens
tgtgtgtgtgtgtgtgtatatatatatatattttaaatatatagctttaaaatattttgttgtagtttataaaattatataattcattataattatataaygtactatatagttacattatttatgtaatattcttatataattttataacatatatagatatgtcccagatatatgtaatatattatgtagtatattata

SEQ ID NO: 10677 - DNA, 201 bp, Homo sapiens
actggaggtgagtgagaaaaggaggtttcctaaagtacttaagccgagccctcgttaaatttcatgaaatgcttgggaaaacgtatgaaggctacacactkataacttagtgacatcccaaagggcagcctactgagacctgacatatacccttccctaaaatacgtgataaagtttaacttcctaagggtcaccacatat

SEQ ID NO: 10678 - DNA, 201 bp, Homo sapiens
tgatcaaaaagtgaagatgtatttggcctgtagttattcagtaagaaactttgttattttggtttaaaaattgtacttgctaattactgatgcattctctsgtttgaattatataggcctcgaatggctacagagagaggaaatttggtgtttcttacggggtctgctcaaaacattgagtttagaaccggatccctggga

SEQ ID NO: 10679 - DNA, 201 bp, Homo sapiens
tactagaatcattaatagagctgctattcttattttgaaggtgaatggatgattaatattaaaaacttgctttttcccataatttaattctcatcccagcrtgtgcttcccaggatgcagatgcagagctgagtctaagacagatgaaatgacaaggctgaggtctccgagcctgttagggcttctgaccctgagtttgca

SEQ ID NO: 10680 - DNA, 201 bp, Homo sapiens
attctcccatcagggactggggctcggaaagcaagcatcctctctgacgctaagctcggaagtctaggtgtatcacaaaatagtccgaattttcttaaaaygacatttgctggtaattaaacttgaacagtttcttacagaaaacattgtataactgtactacatgcttgtagactgatctatgtaaacttaggcttctta

SEQ ID NO: 10681 - DNA, 201 bp, Homo sapiens
tatgaggattatctctagtccttacaaccaccctgtgagggaagtccgcttcatatcctcatcttaccagtgtggacactgaagcttagaaaggttagtgkcttgcccaaagttccacagctagaaaacgtcaaagcacatatgtgattccagactacgttatggccacacttcttcaactctatcataaccaaggtatct

SEQ ID NO: 10682 - DNA, 201 bp, Homo sapiens
acataaatttcaagcattgtctccagtcaaacctcggtcaaaacactgccatataagcatatttagtgaatatattacttatgggtgtttttaatgtcgawtcataggaaaccaaactattggcaacttaaaatataaggacatttattttttacctaaaaacaaatcaggaagtagataatctctaggttttttagcaag

SEQ ID NO: 10683 - DNA, 201 bp, Homo sapiens
caaaaagtttggttaaatccagggggttttatgtggtaaaaaataatcttttcaggagatacatgaaatctgcttttctattatgaagttaacattggtcrgagtgttctgatctcctcaggttgaacttcccattaaaagcctcttttgcactttctctaatggttttagcattctttaggttcagtatttagatgagtt

SEQ ID NO: 10684 - DNA, 201 bp, Homo sapiens
ttgagttcccaggttgtcctgtattttttatcaccataaatctcagccccttgcagcagtgtgaaaaagacaatacgcatttccaagtccattagagaggratagagtcaatgcaattattcataaaggatagaaggatgtggtgtcaaaaaggggctctgcaagtaaaagtcattagtaattcagcaataatggatttga

SEQ ID NO: 10685 - DNA, 201 bp, Homo sapiens
cagtacctctgaatggttcatcctctcaggctttgcagaacactagaactgaatttcagtgagcggttccatgaactcctctgaattcttctgaaaagttygcacaaaaaatcataaaactggctttggaagttttaatttcataaaccagaatggtggaatgttttgtagccagaaggggattaaagttagttcacctaa

SEQ ID NO: 10686 - DNA, 201 bp, Homo sapiens
ctacccacaaaactttcttcctttccgttataattccttgcttttgttcctcacccccacccacaggaaaccacaaatctactttctatctctgtagattygtttgcatatcatctaaatggaatcatactatacgtactgaatgtttttctgactttcctcaattagcataatttttgttgagcttcttggatccgaaga

SEQ ID NO: 10687 - DNA, 201 bp, Homo sapiens
tgcagacaaaaagattcaatttccccagaaggaaaggggtgtgtgtcattccacttctttctcctgtaggttgcgggggtaatctcaccacttcaagcggyacgttcatatctcccaactacccgatgccctattaccacagctctgaatgctactggtggttgaaatctagccacggcagcgcatttgaactggaattca

SEQ ID NO: 10688 - DNA, 201 bp, Homo sapiens
cttgaaacaaactgaaataagtgtaacgcattggtgtgagcaattgaacttcatcttagtttcttctgtgaatcgtttaactccatttgagggagaaataygtattaaatttaatctcatataactaaaacatctggcaaactatagaaacttagaagagtatttaatatgctgagagagttgcaattcagtgaaagatca

SEQ ID NO: 10689 - DNA, 201 bp, Homo sapiens
agctagttcgtatgtgtacccataaaatggtcagaaagttccatggagcctcttggatttctgcttagattgatttctttagagggttctccttttttgcmccccccaaaattattcctgattttgtagtgagaatttagtttttcagaatttgccaattttctagaatgttctttcctttttcaattgcgttttcatttg

SEQ ID NO: 10690 - DNA, 201 bp, Homo sapiens
cccaccacaccagtgtccccagctgtactctttccatgtattagcaagctcatagttttgggtaaagagagctttattcaatgctatgtcaaaatgtgacyataacgaggtcaaagattaaactgaggttcaatgaatgaagtaactctctctgaccacagtcatcattatcagtacagctctatcttctcttctgactta

SEQ ID NO: 10691 - DNA, 201 bp, Homo sapiens
aggtcaaagattaaactgaggttcaatgaatgaagtaactctctctgaccacagtcatcattatcagtacagctctatcttctcttctgacttattctgtmaagtgacttgtccacagaattctcctgctcagctcaggcatcactttctgcaggaaactttcccttccctttttaagcagagtgaggcatctcagggcct

SEQ ID NO: 10692 - DNA, 201 bp, Homo sapiens
aaaagaaaacttgagcctcagaatcatctggacctgcaaaaatgtagtcatggcatcaaagttcgctttggagtttggacctcattcagtttctttaactmtttgagctcttttacttggacggaaaaaggagtctttaactggattaataatttgccattgtaaagacctctgaaaaggtgcagatactcattcatggaa

SEQ ID NO: 10693 - DNA, 201 bp, Homo sapiens
tttgcattgctggctgacgattccaagttaacatcgttgatttgtaatttgaattatttttctcattgatattaagagacaggcactggccccaaagcgcrtgccctgacattgtgctcttgtgtaaccaacagttgtcactgcccacctgagacgtacggaccccagtgtgcatccaaatatgacgactgtgaagggggt

SEQ ID NO: 10694 - DNA, 201 bp, Homo sapiens
tggcatcaaagttcgctttggagtttggacctcattcagtttctttaactctttgagctcttttacttggacggaaaaaggagtctttaactggattaatmatttgccattgtaaagacctctgaaaaggtgcagatactcattcatggaaagtcctgtttcatacctgtttcataggtaaacttctggtggaaattcttt

SEQ ID NO: 10695 - DNA, 201 bp, Homo sapiens
acaatgattatagcacaagaaacatcattttctgtttccactgattcttttggcttgaggtctagacccagagcttcagacaactaacacaattacatttygccacttctccatgctgttactccctctttgttctgaagacgtgattcttgttgtttccctgctcactttgttttgttttgtttgtttttgtttgtttgt

SEQ ID NO: 10696 - DNA, 201 bp, Homo sapiens
attcttatataattttataacatatatagatatgtcccagatatatgtaatatattatgtagtatattatatacttacactataaattataataattaatmattacaataattaatatttattataacagattattatattatatattttaatgtaagtatataatacactacatattatgtaatatgttatatatagtta

SEQ ID NO: 10697 - DNA, 201 bp, Homo sapiens
aataaatggaaagacatttaatgttcatggattagaagacaatattgttaagatggcaatactccctaaagtgagctaaagattcaattcaatccccatamaaatcacagcgggctcttttaaaaaaatacataagctgatcgtaaaattcatatgaatatgcaagggaaccagaataaccaaaatgttcttgaaaaatta

SEQ ID NO: 10698 - DNA, 201 bp, Homo sapiens
tggaaggggagtggaagagctaataactgaagccagtcactgctcaacactccagtaaatcctgagaccatagatgggtgcagggtgcaaggggtcgataygaatagtatggacgttacaggaaactttaacaaaaactttaattataaaacaagttcttaccttgaaaagaaatggaattatcccctcagtgagagtcac

SEQ ID NO: 10699 - DNA, 201 bp, Homo sapiens
atagcagcatcttcaggagcatccctggtctctactccactctacagtgtgacagcaaaaatgccttcagatagtgctaggtgttcttggggaggcaacayggtccccagtttacagtcactgagttaaaggaaccgttatctaaagaaaggaaattctgaattgtttcaaggtggaaagtgtctactgtgaagtcctacc

SEQ ID NO: 10700 - DNA, 201 bp, Homo sapiens
atctgagcttgccatgcatggatggtgtgtgttgtacatttagggctcagatctagaaggctttccagaaaaacaaaaagttgagtttctctggttttccrgaaacatgatgattagtaaattttatttcacttatttccattcatatcactggtagattttacatcatgcagagtttaaacaatgaggataatctagttt

SEQ ID NO: 10701 - DNA, 201 bp, Homo sapiens
ggccatatcaagacaccttgaaaatatattttgcctgttaaccctgttatgtttaaaaggtacatgaggctgggcacggtggctcacacctgtaatcccarcattttgggaggccgaggtgggtggatcacctgatgtcaggagttcgagaccagccttgctaacatggtgaaaccctgtctctaccaaaaaatgcaatac

SEQ ID NO: 10702 - DNA, 201 bp, Homo sapiens
aaaaatgcaatacttagcttacgtgctggcacgcatctgtagtcccagctacttgagaggcagaggtgggaagatcgcttgaacctgggaggcagatgttkcagtgagccgagatcgcaccactgcactccgcctgggcacaagaccctgtctcaaaacaaaacgaaacaaaacaaaacaaaaaggtgcataaaaatgcag

SEQ ID NO: 10703 - DNA, 201 bp, Homo sapiens
aaacaaaacgaaacaaaacaaaacaaaaaggtgcataaaaatgcagcatcttcatataactctacttatcagaatgtaagaatataacatgcaggaacaayggtgcaggagtcgggtagacctaagtgtctatttatcttctgccaattattcattttgtggttttgggaaatgttagtctgtaaaatgggattaataata

SEQ ID NO: 10704 - DNA, 201 bp, Homo sapiens
gtccatgaaccagaatctcctctcaaatcttatgtcattttgcaatagttaagcacttagtgataaaataaagacaatcttcttagcacttgctacagggraatgcctgtagactgcaatatgaccataattcacagagattaccactattatttcataagaaattgaggcagagggagttagtacattgtctgggtaaac

SEQ ID NO: 10705 - DNA, 201 bp, Homo sapiens
aatcaattggtttcaccacatggtgaaaacccatctctactaaaaaaagaaataaaaaattagccgggtgtggtggcacgcacctgtagtcccagctactygggaggctgaagcaggagaattgcttgaacctgggaggcggaggttgcagtgagctgagatcatgccactgcagtccagcctgggtgacagagtgagact

SEQ ID NO: 10706 - DNA, 201 bp, Homo sapiens
gactccatctcaaaaaaaacaaaaacaaaaataaaaaagattcttaaacattgttgggaggtgttgggacaggtggcaaagtaaacttttagtaatgaagyctcctggatcaaatgctcaaatatgtgtatgaactgttttaaagttccataatcctcaagagtctaattaaattctctatacaaatattctatgtaaaga

SEQ ID NO: 10707 - DNA, 201 bp, Homo sapiens
tttaaagttccataatcctcaagagtctaattaaattctctatacaaatattctatgtaaagatgggaggacaaagaggaaagaaaacaatatgagaaggraagtagagagagatgcggggaatataaatgtctatgggggggatggataattcaatttctctttaattttaatcatttattgttattttcctatgacttt

SEQ ID NO: 10708 - DNA, 201 bp, Homo sapiens
agacatttaatgttcatggattagaagacaatattgttaagatggcaatactccctaaagtgagctaaagattcaattcaatccccataaaaatcacagcrggctcttttaaaaaaatacataagctgatcgtaaaattcatatgaatatgcaagggaaccagaataaccaaaatgttcttgaaaaattacaaagttgaag

SEQ ID NO: 10709 - DNA, 201 bp, Homo sapiens
acacacccataggatagctataataaaaagagtcagataatggtgtggacaaggatgtggagaaattggaacctttatacactcctggtggagatgtaaamtggtacagccaccttgaaaaacagttggcagttcctcaaaaagttaaacatagagatactatctgatccagcaattctacttttagatatattctcaagg

SEQ ID NO: 10710 - DNA, 201 bp, Homo sapiens
caggtatttctgaatccaaatgcaaatgttttttgatctacacgtggaacatttttcccctttgcaagtgaaggtgacttctgcatgtattttcagaaaaygcttcattcttaactgtataaaaagacaaagcttttccgaccaatgtcatcattcaaattgtctccattttaatgtatataccttagagaagaaagtgta

SEQ ID NO: 10711 - DNA, 201 bp, Homo sapiens
tggcaactgagcaagactccatctaaaaaaaaaaaaaatggagcagtaatacacagcctccatcctctttcacagaacccacagcagtagtctttatatcrccaaagcaccaatgtttttgatgcatgaattgttaatagatgcatagctgaataaatgaatttttgtcatctctgctcctgcaatgctcagtgctttggt

SEQ ID NO: 10712 - DNA, 201 bp, Homo sapiens
atacacagcctccatcctctttcacagaacccacagcagtagtctttatatcgccaaagcaccaatgtttttgatgcatgaattgttaatagatgcatagmtgaataaatgaatttttgtcatctctgctcctgcaatgctcagtgctttggtggaaaatctcagaggacaccatcgggaatgtgctgtactgagttcact

SEQ ID NO: 10713 - DNA, 201 bp, Homo sapiens
ctatgactttatcttagtgagccgttccaaaggcaactttggaatgctcagaaatgtcatatattaatgaatcagcttttatgtaaatatatactgatgtygtaaattgcatggaacatatttataccaaaaaatattcatttattggaaactcacatttatttgggcatgctgtatttttatttgctaagtctggcctcc

SEQ ID NO: 10714 - DNA, 201 bp, Homo sapiens
tttctggccacactcattgctctcctcttccttagaaactgccaaaaagctgccaccccagcaattggttctggggcccaccacaggcaagccgaatcctrtgcctggaggttggttcttgatgcctttcaaacagtcaaatgctaatttcccacaatgtcgttcatacattgtcatccatgaacattactaagctccttg

SEQ ID NO: 10715 - DNA, 201 bp, Homo sapiens
cactcattgctctcctcttccttagaaactgccaaaaagctgccaccccagcaattggttctggggcccaccacaggcaagccgaatcctgtgcctggagkttggttcttgatgcctttcaaacagtcaaatgctaatttcccacaatgtcgttcatacattgtcatccatgaacattactaagctccttgtacctcactg

SEQ ID NO: 10716 - DNA, 201 bp, Homo sapiens
ttttgttttcagtttaatcgtctcctgttgggtagtgaatttcaaaaatatgaaatatctttgtatcttatgaccactttgtattgccgtaaaatgatctyattcaaccttcagattttatttccaagttctaatatctgaaggactgaactgttttctttcagatcttgaaaataagaaaccaagtgtgttttcttttat

SEQ ID NO: 10717 - DNA, 201 bp, Homo sapiens
gccgaatcctgtgcctggaggttggttcttgatgcctttcaaacagtcaaatgctaatttcccacaatgtcgttcatacattgtcatccatgaacattackaagctccttgtacctcactgtgtcttgttaaaatagctcttttcctttgtagaatggcatgggagggaggcctggccacgcaggcacgccctgttccttg

SEQ ID NO: 10718 - DNA, 201 bp, Homo sapiens
aaaattgagtaggtgcattttttttcctgacatttttattgatcttaggcatttggcagaatatctgcacttttgttctcagtaggtccagcgccaggcasctcccttatctaataaatggctaatataatttgtcttcagtaggatgactaacagctggatacccagtgcttaaaaatcaattgaaacaatacggcttta

SEQ ID NO: 10719 - DNA, 201 bp, Homo sapiens
ttcaaaggcttttcttgctgattttcatgattgtctttattcacgctgttgtcatcctgccagcccaagtacagctgcgtctgtgatgctgggtggatgtyttcacccaacagccctgcctgcacgctggacagagacgagtgcagcttccagcccgggccttgctccacacttgtgcagtgtttcaacactcaaggctct

SEQ ID NO: 10720 - DNA, 201 bp, Homo sapiens
agacacactttgctgaacctcagccatgagttacatttggatgtgatggggaaacttccttgagcgatcacttttaaatgatagattttatgaagttaatwtccaaagtgacctagtttgttaaaaatctgaccactttgagcttaatgattcatccttttgttttagattcgagatggtcctttgtatcaggaccccctt

SEQ ID NO: 10721 - DNA, 201 bp, Homo sapiens
tgattgaacttgtgtgttcctaaggcacagggagtgcctttgaaaactcagctcaagtttatagtgcatccccacccagggaggctgagatttcaatctcyaataatcatagaacccaaggagccgggggtcaaaatgagccagagcaagggcctgtaattgcttaaaatattttttaaagtcttttttcctacatcccat

SEQ ID NO: 10722 - DNA, 201 bp, Homo sapiens
cgaattactacccaagaagttcagggagtactaagggataaactgaaaccttgtatgtttaaataacatggaactacagtactttgggcttctataataaytgacctctaagaacatcagagtcactgtaatataaaaatattaactttcttagtgtcagcactttctaagtctaccagtagttttatacatatttttttc

SEQ ID NO: 10723 - DNA, 201 bp, Homo sapiens
cctaagggtcaccacatatgtgaaagcaagaatgtaagtgtgtaagtccatggtgagagcagaactagggtgataggccagacccactctccaagggctcrtacctcttaaccagcctccatacctcatgccatagtacagacctttagattcttggcaaatatcaaacttgcaaacattaaatttgtgaatcccaaggaa

SEQ ID NO: 10724 - DNA, 201 bp, Homo sapiens
tgtcagttttcccaaagaattttatgggaattacattgaaactataattaactttggaagaaatgacatcttaaaaatattcagcctgccaatgcatgaamataaactatttttaaatttagttctcttttcatttatcctggcaatgttttatagctttcagtgtctaagtattccatatctttgttagatttatttaca

SEQ ID NO: 10725 - DNA, 201 bp, Homo sapiens
acatatgaatttaggggaacacaaacattccaaccatggtatacataccaactcatagaggtatgttatatattctctctctctttatctgtctatctatmtatatatatatgtatgtatacaatctaaatgtattttttcagttttcagcctggatcctggagctcaccataatgaaatttacatctgcatgtttatttt

SEQ ID NO: 10726 - DNA, 201 bp, Homo sapiens
cctgggaggcagaggttgcagtgagtggagatcacagcactgcactccagcctgggtgacagagtgaaactctatctcaaaaaaaaaaaaaaggcattcaytgggaaaatggacaatctatggagaaataaaacacatgcacaaagttacaggtgcatcccatttcaatggatgccagctaacctgaacattggtaatgct

SEQ ID NO: 10727 - DNA, 201 bp, Homo sapiens
tcaaaaaaaaaaaaaaggcattcattgggaaaatggacaatctatggagaaataaaacacatgcacaaagttacaggtgcatcccatttcaatggatgccrgctaacctgaacattggtaatgctttggggcataaggcagagaacaataggtgctgagagaggagagatatgcaaaggccaggcatggagggctctgtat

SEQ ID NO: 10728 - DNA, 201 bp, Homo sapiens
gtgctgcgtgggaatttttcagcctatgtttggaagtcattgtgttatttctgccatactcaatgggttaacttagtcacaagctgacccaaattcaaggygaggggacataggcccacttctaaatgggagaggtgtcagaatttataaagaattaaaaaaaaacccacaccttttgttcctagttaccaagaattttaa

SEQ ID NO: 10729 - DNA, 201 bp, Homo sapiens
gaggtggcatcttattgtggttttgatttgcatttccatgatgattagtgatgttgagcattttctcatatatttgttgaccatttatatgttttctattsagaaatgtctatttggatcctttgcccatttttaagattgggttagtttgttttgttgatattgagttgagttttttatatatttcagttgtgcttttgt

SEQ ID NO: 10730 - DNA, 201 bp, Homo sapiens
taccattcttttagttttatgattcctaaatattaccagactaaatacacattttaatttagattaagctgggtttcaaattaggataactaaagtgagtsaaattaagtgaagcaactaaaaacaaacaaaacaataaaaaacctcattacaaaaactactaacttttttcttgtaaaacataaatattatacctgaagt

SEQ ID NO: 10731 - DNA, 201 bp, Homo sapiens
gagttttttatatatttcagttgtgcttttgtggtcatatccaaaaaaatcactactcagactaatgtcatagggcttttcctgtatgttttcctggattrgttcttcagttttaggccttatgtttaagtctttaattttgagttgactttgtatgtggtgtgggataagggttcagtttcatttttctgcaaatggata

SEQ ID NO: 10732 - DNA, 201 bp, Homo sapiens
actgggtgtgtcatcgtctctagacctttcagtggacagaattagaaaaaacttttttgttgttttttaaagaaaaaataccctatatattcatagtgatyttacactatattggaatattgagattatagagttgctttttttttttttttttactttacatttctacctcttctctcatacagtaaaaatcctggttcc

SEQ ID NO: 10733 - DNA, 201 bp, Homo sapiens
ccctaagacattaaaacagttgtgggggttccttggaatcatcggcttttgctgactgtggatccccagatacaaggagatagccaggcccctctatactstaatcaaggagacccagagggcaaatactcatctagtagaatgggaaccaggggcagaaacagccttcaaaaccttaaagcagaccctagtaaaagctcc

SEQ ID NO: 10734 - DNA, 201 bp, Homo sapiens
cacatttgggttggttccaagtctttgccattgtgaatagtgctgcagtaaacatacgtgtgcatctgtctttatagtagaatgatttataatcctttggktatatacccagtaatgggattgctgagtcaaatggtatttctggttctagatccttgaggaattgccacattgtcttccacaatggttgaactaatttac

SEQ ID NO: 10735 - DNA, 201 bp, Homo sapiens
gaactgggttaggttcctggaataaagtaatcattattactgagaggagaggtatcagccgaagctccttctgcctacccattagtaaaagattaaaatayggaggaggagaaaaggctcttatattcaaatgccgtttgtacgtaggtgcatcaaaaagtgttgctcttcatttgtagactgacaagataatggagaaga

SEQ ID NO: 10736 - DNA, 201 bp, Homo sapiens
cttatttccttgagcagtggtttataattctccttgaagagatccttcacatcccttgtaagttgtattcctaggtattttattctctttgtagcaattgygaatggcagttcactcatgatttggctttctgtttggctattactggtgtataggaatgcttgtgatttttgcacattgattttgtgtcctgagactttg

SEQ ID NO: 10737 - DNA, 201 bp, Homo sapiens
ctcttatattcaaatgccgtttgtacgtaggtgcatcaaaaagtgttgctcttcatttgtagactgacaagataatggagaagattgagttcccaggttgycctgtattttttatcaccataaatctcagccccttgcagcagtgtgaaaaagacaatacgcatttccaagtccattagagagggatagagtcaatgcaat

SEQ ID NO: 10738 - DNA, 201 bp, Homo sapiens
ctttagattcttggcaaatatcaaacttgcaaacattaaatttgtgaatcccaaggaattactgtgtgttctatggtgactttctgcccaagattttaggyagtctaaataaattgcctgttgtatatttttaaactataacaaaaatctatggcacaaaatagtgtaacagatgttagcatatgcaactactagagatag

SEQ ID NO: 10739 - DNA, 201 bp, Homo sapiens
ggcaaaaagcatagatagtcaatccttttacaggaagggaagtgaataactatgtaaaataatgccatccatcccagttcatgagcataaaggaaagaggtttttttttttttttttggtgggggtgcaaatttatcaagtcctagattattgaacgcaatacatgcttcagaggtagctagggtcactttagaacatttg

SEQ ID NO: 10740 - DNA, 201 bp, Homo sapiens
atcaaacttgcaaacattaaatttgtgaatcccaaggaattactgtgtgttctatggtgactttctgcccaagattttaggtagtctaaataaattgcctrttgtatatttttaaactataacaaaaatctatggcacaaaatagtgtaacagatgttagcatatgcaactactagagatagccacatttgcagaatgctt

SEQ ID NO: 10741 - DNA, 201 bp, Homo sapiens
tttgtgaatcccaaggaattactgtgtgttctatggtgactttctgcccaagattttaggtagtctaaataaattgcctgttgtatatttttaaactatarcaaaaatctatggcacaaaatagtgtaacagatgttagcatatgcaactactagagatagccacatttgcagaatgcttactgtgtactaggcacttttc

SEQ ID NO: 10742 - DNA, 201 bp, Homo sapiens
atattaaccatccaaatgagtcttcagagtctaagttggctaagcatcatgcagactgaaagcgtagaacatccagctactctcctgacaaagaccatttygaaattttggatgacatttacaaacatctttctaaaagtagccagtggttcatgaggtagtgtgaagtttctgagtgaatatctgagagaggtgtgagtc

SEQ ID NO: 10743 - DNA, 201 bp, Homo sapiens
tataatttttcatgtgtaatagccgattaaataagagagttccctgacctccgttacaggacattcaacaggggtgtgtctcatctgttcaagtgctgcakgttcaaaccccttatgggcagggaaacatgcagacaggggtgcaggagccggggagagtgcttctggactccgggccccatggtagcatctaggggtggg

SEQ ID NO: 10744 - DNA, 201 bp, Homo sapiens
aaacacacacacaatgagaaaggtgtaatagttgactggaagcagagcaggcaacattgcccccgcccatctccaccttttaaaaattcactttacctacrttctccagaatgtttccccaaaagcaaaggctgcaggatcacagcacaaactacggtataaaaaagctgcctggtgttttaattgctgtaggttaacagg

SEQ ID NO: 10745 - DNA, 201 bp, Homo sapiens
tcatcttaccagtgtggacactgaagcttagaaaggttagtggcttgcccaaagttccacagctagaaaacgtcaaagcacatatgtgattccagactacsttatggccacacttcttcaactctatcataaccaaggtatctatataagagctctcccctaaagttaattatgtaggaatttaaataaacacacacacac

SEQ ID NO: 10746 - DNA, 201 bp, Homo sapiens
atcatgcagactgaaagcgtagaacatccagctactctcctgacaaagaccatttcgaaattttggatgacatttacaaacatctttctaaaagtagccartggttcatgaggtagtgtgaagtttctgagtgaatatctgagagaggtgtgagtccagtctttgggaccattttttcctgcagggcctttactgatccac

SEQ ID NO: 10747 - DNA, 201 bp, Homo sapiens
gaggggacaatataacaaaaatgagatgtaatatgagtaagagacaatagaaacaaatccactaatatgccagatagtaaagttacctggcacacttgctrtacaactgtgattactcaactcatggaaataaaagtcaaactgagaactttcagcaaggaactgcatactatagaaagtgacattgcaatatgaagaaga

SEQ ID NO: 10748 - DNA, 201 bp, Homo sapiens
gaggccacgaggggaggctgcaagggaaggatggggaaatggtgcacgcacatttgggaataaaaaatgagagtgttgtccctggagcgtgaagaaatgcyggggagcatgtggagaccaaggggctacagaagacatctgagctctcttctgctccagttaagaatttgaaattatcctataggtagtatggagtcagtg

SEQ ID NO: 10749 - DNA, 201 bp, Homo sapiens
acacaatgagaaaggtgtaatagttgactggaagcagagcaggcaacattgcccccgcccatctccaccttttaaaaattcactttacctacattctccaraatgtttccccaaaagcaaaggctgcaggatcacagcacaaactacggtataaaaaagctgcctggtgttttaattgctgtaggttaacaggtatttctg

SEQ ID NO: 10750 - DNA, 201 bp, Homo sapiens
ttttaagatggaatctcgctcttgtcacccaggctggagtgcagtggtgcgcgcaatctcaactcactgcaacctccgcctcctgggttcaagcaattctyctgcctcagcctcctgagtagctgggattacaggtgcctgccaccacactcagctaatttttgtacttttagtagaaacagggttttgccatgttgacca

SEQ ID NO: 10751 - DNA, 201 bp, Homo sapiens
agagaaacagtgaactggaagataagtcaagaatctactcagaaaaaagtatggataaaaaaaggatgaaaaatatataagagaggttaagacacatagarcacactcagaaaatatataacacacagttaattggagtctcacaaggaaaagagagatatatggaacagaagcaaactttgaagagctactgactaaaat

SEQ ID NO: 10752 - DNA, 201 bp, Homo sapiens
caagaatctactcagaaaaaagtatggataaaaaaaggatgaaaaatatataagagaggttaagacacatagaacacactcagaaaatatataacacacasttaattggagtctcacaaggaaaagagagatatatggaacagaagcaaactttgaagagctactgactaaaatttttccaaaactggtggaagtcatcat

SEQ ID NO: 10753 - DNA, 201 bp, Homo sapiens
gaggactagaagaagagacagcgcggaatactaggagcagaaatgcacttagaagtcagagtcagacatgcatgcccgtgttcatcgcggcactgtccacratagcaaaggcatggaatcaacctagatgcccatcaatggtggatgggatgaagaaaacgtgctacgtatacaccagggaatgtgacacagccacaagaa

SEQ ID NO: 10754 - DNA, 201 bp, Homo sapiens
tgaggtggaaggatcccctgaacccagaaggtataagctgcagtcagtcgtgattgcatcactgcacaccagcctgggcaacagagtgagatactttcgcmaaaaaaaaaaaaaaaaaaaaaaaaaaaaaaggctgggagagaccaaaatgactagagcagtcctaaagctgaattcaaaactgtttgagagctctcctgg

SEQ ID NO: 10755 - DNA, 201 bp, Homo sapiens
tgaggataatttctgtatattgggtggttattaaagttgtgggagtaggtatgatcacttttaggagtattttaccaagagaaaggggccaagccaactcytggggaaacactgccatgtaacgggtggatgaaagatcagaggagaggaggctgaggaggtgcgctgagtgcttggtggagaaccagaagagagtggtag

SEQ ID NO: 10756 - DNA, 201 bp, Homo sapiens
gatctacgagattctagaatgaatctttccccatcttggaagctggaacgttttcccttcagccccctggcagccctgctggttctccttgtctgggctcrcactcttggtggtggcaccgaaacacaatctgagccacatgaagaggacaggcgcatgtgacaggctggttactttgagaaggctcacacctccccacac

SEQ ID NO: 10757 - DNA, 201 bp, Homo sapiens
tgggagagaccaaaatgactagagcagtcctaaagctgaattcaaaactgtttgagagctctcctggctttacagaaaggtaataaggtttagagacggasagtatggggactctaacccaattttgctgtcagacaaatttcctaatctccccgattcctcatcatttcgtcaatttttctttaaatcacataatagtac

SEQ ID NO: 10758 - DNA, 201 bp, Homo sapiens
gcatgaaggagaaaaagaaaacttcagagatttcaagccctaactgtttctttccctctttctcatgatcatacaatatttttcctgacagagtatcactkataaaattgaaatttctcagctgggcatggtggctcacacctgtaatcccagcactttgggaggccaaggcgggtggatcacctaaggtcaggagttcga

SEQ ID NO: 10759 - DNA, 201 bp, Homo sapiens
agcattactgaatgccccgaatctgtattaccattccagtttacagcgacaatttaagggtattagtatcctgttatttgcgaaggaattcacaaggaaaygtaaaacaattggaaaagacaatggaaaaatgttacacagagttttatgtgaatcaactaagataaaaaaattgaatcagattggctgatgaacgaatgc

SEQ ID NO: 10760 - DNA, 201 bp, Homo sapiens
cataagccttcctcaaattttacctcttctgcaaagttttctcttcctctccatactgaaatctctgtctgaattcctgcaaacgatttgagagcctgtgyggtatagtaatgaagtattaagatacaaccagatcacctcagttagtatcctagcatcaattaaccttggaaaatccacaccacctctgtttgcactgat

SEQ ID NO: 10761 - DNA, 201 bp, Homo sapiens
actagaccagagaatggcggttggaccagagaaggacaaggaggagcttcatatctgaatccaggaatagaatcaagtttatgtggcaacgatagaagttstgggtttatgtattgaccccagacactgcgctctttgttacccattctgctaagtgagccatgctgggaatcccatgcacgttcactggaatggaatgca

SEQ ID NO: 10762 - DNA, 201 bp, Homo sapiens
agaaggacaaggaggagcttcatatctgaatccaggaatagaatcaagtttatgtggcaacgatagaagttgtgggtttatgtattgaccccagacactgygctctttgttacccattctgctaagtgagccatgctgggaatcccatgcacgttcactggaatggaatgcaggacagatgccaaccacttggaaagccac

SEQ ID NO: 10763 - DNA, 201 bp, Homo sapiens
ctagaccccaagagagggttcttggacctttcacaagaaagaatatggggtgagtccatacagtaaagtgaaagcaagtttattaagaaagtgaaggaatraagaatggctactccataggcagagcggcccattgttcaaatttatttgtgaaagaaatggattgtttgttctgtagatcatcccacatcttggattttg

SEQ ID NO: 10764 - DNA, 201 bp, Homo sapiens
catggtcaccatgcctggctaattttgtatttttagtagagacagggtttcaccgtgttggtcaggctggtcctgaactcctgacctcaggtgatcccccygcctcagcctcccaaagtgctgttattacaggcatgagccaccgcacccagccataatttggaatactttggacaactcacaagcctctctgattatttc

SEQ ID NO: 10765 - DNA, 201 bp, Homo sapiens
acctgagatctctcatctacacctctctaaaaagtgtggtgataatgcctggctgttttgcaaagttgaggaagacaaaatgagacattcaatgtgaaaaytacattagagttgtaaaggaccatgactttgccagatataaaatatgattctcaatatccaaggacaattttacaatagctactttgcttatttctatat

SEQ ID NO: 10766 - DNA, 201 bp, Homo sapiens
gctaccatgaacattgacttgcaggttttttgtggacgtattcattctcttgcgtaaaatacctaggagtagaacttctgggtctcatatggtaatgataygtttaactttataagaaagtgccaaattgttttccaaagtggttatgccattttatattcccacctatatgattgacaattctgaaataggagttggggc

SEQ ID NO: 10767 - DNA, 201 bp, Homo sapiens
gaacttctgggtctcatatggtaatgatatgtttaactttataagaaagtgccaaattgttttccaaagtggttatgccattttatattcccacctatatrattgacaattctgaaataggagttggggctccacaccagaccagatggaagactggctaaaacagggaagagacagaagcacctctgcataagacatgcc

SEQ ID NO: 10768 - DNA, 201 bp, Homo sapiens
accttcctgggtggagtcccaatatgggggcttgcctgccttgcagcagttcttttctccatctttcccaatccttaatattgccaatcttttcatttttrgccactggcagttgcatagcagtatctgatggttttattttgcatttccctgatgactaatagtgctgagtccttttcacatgctttttgacaattcatt

SEQ ID NO: 10769 - DNA, 201 bp, Homo sapiens
catcatttattctcataaattacttggttgaagtcagccatctgagggttggcaggaagagtttgttgctcttgaaatatgaatttgatgagtcaaaagcrggcaccatatatgggataccatcatgcacagtatgattgagacttttcaaacttgacatgtgaagtccagtaacagccttaaatccaaactaactgaaag

SEQ ID NO: 10770 - DNA, 201 bp, Homo sapiens
atctttttttttttttttttttttttgagacagtcttgcactgtcacccaggctggagtgtagtggcaccatctcagctcactgtaacctccacctcctarattcaagttattctcctgcctcagcctcccaagtatatgggattacaggggtgtaccaccacgcccggccgagttggggatatgtgagtaaagacctgaa

SEQ ID NO: 10771 - DNA, 201 bp, Homo sapiens
aggctctggatggctggctccccttacatcagtgctgagtcctcatccaaagcactggggccaagtcgtacaaaagtgtgctgccttcaggtctctggtgkggcatcttcgctccaaaggaggtgtgtccagggaatgcatgagagagagctttaaagcaatttttcagcctagctgagggctggaactagatagagcaca

SEQ ID NO: 10772 - DNA, 201 bp, Homo sapiens
ttgcataccttttggtgaatgatattgtaacattagtgtaggatctgaggtcaaagagccaactgtttttttttttcttttacctacttgaccttcagcartcagagtaactgaggtcagagtctctaatcgacagacatatcatcactgggtctccatcgcttcccaatcccaggtactctgattttgagttttagtgac

SEQ ID NO: 10773 - DNA, 201 bp, Homo sapiens
cctcatatacaaaatggggataaaaataaatgcccacctaatagtgtcactgtgaagataaaatcagatagtacatgtgaagcacttaaaggggtatatastaattgctcaataaatgtcagtcttgaataatcttggggcctcagtgtctatatctgtaaattgaagaggttggactagagaaagaattgccaagttgcc

SEQ ID NO: 10774 - DNA, 201 bp, Homo sapiens
ccaggcaaagtgaacagcaaatgccatacccaagaagcagcaacacacctggtttggctcaagaagcggaatcgaacaaagtgaagacaataagaaattarattagaaaggtcaggggtgggagaggagagaaagccattgtgatgcctttggctgtttgattgagtggatgggaagcagttaggaggatttcagcagagc

SEQ ID NO: 10775 - DNA, 201 bp, Homo sapiens
cttgcatacagcaaagtggcttgtaactcctgtaagattcagttcctcatatacaaaatggggataaaaataaatgcccacctaatagtgtcactgtgaasataaaatcagatagtacatgtgaagcacttaaaggggtatatagtaattgctcaataaatgtcagtcttgaataatcttggggcctcagtgtctatatct

SEQ ID NO: 10776 - DNA, 201 bp, Homo sapiens
taaagtcacttttataatgaagtcattcctgccgtcacctacaataacgcactccctcttggtttagtgctgaattttacttctaattttacttcactcayatcactggcgtcaactctgggcatgcaaagatctctacaccatcgaaagcacacagacaacaacttgattttctcccacagttactttatcaagtttgtt

SEQ ID NO: 10777 - DNA, 201 bp, Homo sapiens
tttttgtatttttagtagaggtggggtttcactgtgttaaccaggatggtcttgatctcctgacctcgtgatctgcccaccttggcctcccaaagtgctgkgattacaggtgtgagccaccacacctggcctatgactaaattttaaatcccacttcaattatttgttctttgcccagccagccttttgcttctgagtagc

SEQ ID NO: 10778 - DNA, 201 bp, Homo sapiens
taggtgaccagtagaagaaaagtgcctggtgccaatttttattccatagtataaaatagtctctcaggacagggtttttggtgagagaagcacaggatgtygctgggtgactgagaccgggtcaggaaatagggaggcagagggcaacagtttctctagaatttaaaatttggttgcttttggaagagaaagcaagagatt

SEQ ID NO: 10779 - DNA, 201 bp, Homo sapiens
attcctttttatgcactggcaatgtgagtagatgctcaataaggttccttccttcctcatttgtttaattatttattcaagaaatagttattgagtgcctrgtctgtgtcagttggtgagtattgtagtcatttacacattgttaatatatttttatgactaaatttgatgtttttttttttttgagacggagtctcactc

SEQ ID NO: 10780 - DNA, 201 bp, Homo sapiens
tttttgttccatcactaacttctcttggaagcagagagtctggggagcagtccttttttcctgtgtggctttgcacaggtcacaaagtggctccaaacccsttctacctgtgagatagacaaatacctccctcacaggctttttctgaggattaaggaaagtaataaatgaaatctttttagcaaaagtacaagcattttg

SEQ ID NO: 10781 - DNA, 201 bp, Homo sapiens
tctctgaaatatattgctacataaaagtgatggcaaaaataattgttaaaatcaactttttgagaactctggaaatagaccaaagccttatagcaatctgyggcatatttattcaagaaaaatcactgaatctaagtaagagtcatttttgtggcattctcttcctattcccatctctctctctcctcctagctttgtagt

SEQ ID NO: 10782 - DNA, 201 bp, Homo sapiens
tgctcatagttcattggccaaaactggtcaaatggcctctctcagccacttgcagaatgcagttctaccatgtgtttggaagtggagacaaaggaaatatytggcaaacagcactaatgacccacagtcattataaccatattttacaaattcaagataagaaatatttcacatagaggaaaaccttaaaatttgaagata

SEQ ID NO: 10783 - DNA, 201 bp, Homo sapiens
ccatggtagaatcttggagatggacatagaagaaatacaaaactgctattatgacaaattaagggtgagtttccacatgcaatcaatgttcataaatattrgtgaattgctattggtaaaaataaatccaaggtaacgtctattcaagcatttgcaaatcatgtgggatagtctgctctaaatcatgtttagagcagactg

SEQ ID NO: 10784 - DNA, 201 bp, Homo sapiens
catggagatccaaatatttatatgaagtgtaaagcagaaagaatgaggagagtgggatctggaggaaagatggaataatcccgttaggttggagtcacagygcaactaactcttaactcactccagcttgaatggaccattattgatcagagtcaacgtttgccatttgcctgatagatgctgggaagcaaagccttgctt

SEQ ID NO: 10785 - DNA, 201 bp, Homo sapiens
aaagaaagtttaaaaaagtgaacgggttaacctagcatgtgatccgggagaatcccaaagtctattctctcaatttaatccctttaaatatttttttcccmaaatcagatctttccagttggaagactctcaggactgcagcagagattttgtggagatccgtgaaggaaatgccacgggtcacttggtgggacgatactg

SEQ ID NO: 10786 - DNA, 201 bp, Homo sapiens
tggctgagccaggggctgaatccaggtagcctggctccagcatccacacttttctgtgctacaaaatagtggatattagtgcatttatttgtatgggtccractgggctggagatttttgctttaggtacatgtgtcccttggtcatctaagtttttcctctggtcctattgttcttgatcatgtttataaatcacctctc

SEQ ID NO: 10787 - DNA, 201 bp, Homo sapiens
cacttgcctaggatcacacaactagcaaatggctgagccaggggctgaatccaggtagcctggctccagcatccacacttttctgtgctacaaaatagtgratattagtgcatttatttgtatgggtccgactgggctggagatttttgctttaggtacatgtgtcccttggtcatctaagtttttcctctggtcctattg

SEQ ID NO: 10788 - DNA, 201 bp, Homo sapiens
agcgggtgatgctggggcccttctgaatcctgtttcagaggagccctgccctcctttgaggtttgcaggaaaatacagtttcaggcataatgtaggaaagkctttaagttcttcactctgcacagtaattaatcgcctgtgtgaaaatagggaagtcacttaagctaatcaggccatgaaaaagtaatctgcaaaatgaag

SEQ ID NO: 10789 - DNA, 201 bp, Homo sapiens
agtttttgacatgtgtgccttgagtatagctgatgttcaagacagttgctgagtgaacaaatgaagaagagtcacagactggagaatcagtgactcacggrccagaatgcaatgcgcgcacctatccatcaaagcaaacattcataaaacctgggctctcctgcaaggtactattccagcacaggcctagaagaaacattg

SEQ ID NO: 10790 - DNA, 201 bp, Homo sapiens
caccacttctccaagacctttttacccattgcctttcatctgctcgttctaagagatgaaccccttatcccatagtcagagatgacttgtattcagatgaytcagaacattcactacaaatacatttagtctgtgtagtcattatgtctatcttagtcaactcgcttatattctgtagtaaagagctctggatggggacag

SEQ ID NO: 10791 - DNA, 201 bp, Homo sapiens
atatcaagaaatctaatagtggctctgacagaggaagtcctgctgaaattcacgtcagcatccctagaaatgaccaaagacttgttacagctgtgagaaargacaataaagccagtttccctagatccagcaaacgtgtgattatccactagtatatcggcgtgcagacagttcgtggaatacaggccttctagatgtgaa

SEQ ID NO: 10792 - DNA, 201 bp, Homo sapiens
tttgccagaaaaaccccagagctcacggggtttgagctttgcaagctctgtcgaaaatgcattcatccttaggaaatatacttaggtggaacctaaaaacmaagagcataaagatgctgagttcctctgtgagtggagtttaaatctaaacctcatcctgaccgtctctaaactggctttgtaccacacaagagtcttcag

SEQ ID NO: 10793 - DNA, 201 bp, Homo sapiens
cacatagtaagcactaatgaatgggagttattattaatcatccaagcaaaggaactcatttcccccctgatttacacataagagtattcaaaaattcatcyagacactgagttccaagcaaattagtaagcttcaaattttacaaatcaatacagagatttcaggtatatgtgacatagattccatttcattacatgcctg

SEQ ID NO: 10794 - DNA, 201 bp, Homo sapiens
atcatacctgtggctaaagagaacatgcagaatcatacctgtgtgctaaacagaacactgattataatcatcaccagatttttaaagtcacttgcgagtamcttccttacattgaatctccgaactttctatttttttccccaagattttcttatgaaatataaatggcaatttgtttttaatgaaatggccatattttac

SEQ ID NO: 10795 - DNA, 201 bp, Homo sapiens
tagcaatagaaatgaacacaatcctgtcatttgtggcatcatggatgagcctgaaggactttatgttcatggaaataagccaggcacagaaagataaataytgcatgatgtcactcatttgtggagtgtaaaaatgctgatctcgcacaagtacagggtagaatagtggttaccagaggctggggacggtagcagggagga

SEQ ID NO: 10796 - DNA, 201 bp, Homo sapiens
agctcactgcaacctctgcctcctgggttgaagcaaatctcatgcctcagcctcctgagtagctgggattacaggtgcccaccaccatgcctggctaattkttttttgtatttttagtagagacatggttttgtcatgttggccaggctggtcttgagaaaaccttctatttttgatccattccttgtgaagtattacttc

SEQ ID NO: 10797 - DNA, 201 bp, Homo sapiens
gactttttaatgatcgcacataaaaagccttgatgaagaataagagaaggtaattggaagaatttaccaaccaataaagaatattaaaaaaaaaaaaaaamagaaaaagaggcccagaaatgttaagagcaaaaaatgttttgttaatcaccaaaaattgctgttggaaaacaagataatttcttttctaattgtgtctct

SEQ ID NO: 10798 - DNA, 201 bp, Homo sapiens
cttactagcctacattgaatgagacagtagtttaatagcttagcacttgcctccctgtctttatttttatagaaaatcacacaggttaggatgtttgtgayggagcttgtaaaattataacatgctcatcacatttggggtgtcattggtatataatttgaattccgggacacatgaaaaccttctttttattgagatgga

SEQ ID NO: 10799 - DNA, 201 bp, Homo sapiens
ccaccctccccagccccacacatacacacaggagataaacaggacccagaggagactgagaaacctgtctgtgaggcctcctggaggcctggcctaggctmtccttgcctgcaagatgccctccgtgagcccaaggagactctttccagaggactatgtcactggggtattggattccagtcagacagacagtttgggaga

SEQ ID NO: 10800 - DNA, 201 bp, Homo sapiens
gagccgagattgcaccactgcactccattctgggcgacagagcgagactctgtctcagaaaaaaaaaaaatgtagtaaagcataagggtccaggtgagaargaggccacactagaccagagaatggcggttggaccagagaaggacaaggaggagcttcatatctgaatccaggaatagaatcaagtttatgtggcaacga

SEQ ID NO: 10801 - DNA, 201 bp, Homo sapiens
aaaaaaaaaaaatgtagtaaagcataagggtccaggtgagaaagaggccacactagaccagagaatggcggttggaccagagaaggacaaggaggagcttyatatctgaatccaggaatagaatcaagtttatgtggcaacgatagaagttgtgggtttatgtattgaccccagacactgcgctctttgttacccattctg

SEQ ID NO: 10802 - DNA, 201 bp, Homo sapiens
ccctcaccacagcaatgtcctttcacctggtctcatctccttcagtctcgttcccttgcatgtaaaatgctggttctggatcaatttttagatcagacttrattagcaagtgcatcctgattctaccacttatttgattaaaaatctttcaactgaatcccattagccaaagaacacagtctgacagccaaactctgtata

SEQ ID NO: 10803 - DNA, 201 bp, Homo sapiens
tgatcagaaaagttcaaaggatgctcgagtattcgtctttaaaggagaagcctcctgtgtcatgcttcctgtaggcgtgtttgtgtgaacgagctgttgcrttgcacctgtgtgtgctgcttgagcaattcacttcactgctcagggtctcaattatctcaaaggtaaacgaagaagctggattacttttttctaaagttt

SEQ ID NO: 10804 - DNA, 201 bp, Homo sapiens
atggaaaataattcccgtccaatgatggggatggaagggttgaggaggtgggtaggaggaagaactttccaaagaaaaacaaacggaattgattttccaargtctgtgcctacatgggtgtttttccctctaaaaacatagcaggctgagttgattgactttaattatattgacttacagttcttgattgttgttactctt

SEQ ID NO: 10805 - DNA, 201 bp, Homo sapiens
tgcaatggtcattttcaaatctggagttgtaaacagaaactctagaatgagtttcacctatcagattgcaggtgaggccaggaacttcatcttttattcaraaaagctgccatcattaccattattcgtagaataattacaattatttctagaattgactcctgtgagtaaattaggatttgttaacaaaaaccacatccc

SEQ ID NO: 10806 - DNA, 201 bp, Homo sapiens
ccttctgaactgttagaaataaatttctgctctttataaatcacctggcctcaggtattctatggtatcacaaagaagcagactgaggtgtgtcatgagcwttttaaagagaagtaacatggtaaatctagaatttggagagagaagacgctgctactcactagtgatgtgaacttggatgacttactagcctacattgaa

SEQ ID NO: 10807 - DNA, 201 bp, Homo sapiens
cgggcgcggtggtgggcgcctgtagtcctagctactcaggaggctgaggcaggagaatggcgtgaacccgggaggcggaggttgcagtgagtcgagatcgygccactgcactccagcctgggccacagagcgagactccgtctcaaaaaaaaaaaaaaaaaaaaaaagggattgcttttccctctaaaaggaatcctgcca

SEQ ID NO: 10808 - DNA, 201 bp, Homo sapiens
gcctggtaccaaaaagcaaaagcaaaagcaatatgattagtaacttctgaagctttttgtggctatctaggagaaagaaagaaaagtgtctgatgtgatcyggaaaaaaaaaaaattccctgtgctcccacccaaagctgcaatgtctgttgttgttccattattcgacaataaaatgcagggtggaacagggcagatacc

SEQ ID NO: 10809 - DNA, 201 bp, Homo sapiens
ccatcggctgggcatggccttgtctggtcagcacgcaagtggcttcattacgtttcctttcacgaaggctgagtattaaagtgacctctggctgacagttwaattgcttaattagagcctttcttctaagtcttcgattcatgtagctctgcaagctcttattgatctcctagaaaggctgcttgtagctcagtgtgagag

SEQ ID NO: 10810 - DNA, 201 bp, Homo sapiens
gctgtgggacccatcggctgggcatggccttgtctggtcagcacgcaagtggcttcattacgtttcctttcacgaaggctgagtattaaagtgacctctgrctgacagtttaattgcttaattagagcctttcttctaagtcttcgattcatgtagctctgcaagctcttattgatctcctagaaaggctgcttgtagctc

SEQ ID NO: 10811 - DNA, 201 bp, Homo sapiens
atgcccagcaacagcattttcctgtctacctacctccaactcttcagtgctcctacctgcagccctcaccacagcaatgtcctttcacctggtctcatctycttcagtctcgttcccttgcatgtaaaatgctggttctggatcaatttttagatcagacttgattagcaagtgcatcctgattctaccacttatttgatt

SEQ ID NO: 10812 - DNA, 201 bp, Homo sapiens
gtaattaaccttgggctctcctcaatgacacatcaggagcatttcttgctaaggaagctgtgggacccatcggctgggcatggccttgtctggtcagcacrcaagtggcttcattacgtttcctttcacgaaggctgagtattaaagtgacctctggctgacagtttaattgcttaattagagcctttcttctaagtcttc

SEQ ID NO: 10813 - DNA, 201 bp, Homo sapiens
ctgaagaaatggctcttttgtgtgagagagatatttccaattcagggaagaaagagtgacgtttgttcttggacgcagggtgtgtcatcagagagtgactracacacctgattgatgaggcaggtgctgatggatgagagctgtctaggtggccccaaaatgtgtagtaatgaggaaatgatggattggtgatgctaaaca

SEQ ID NO: 10814 - DNA, 201 bp, Homo sapiens
ccttttaaaattattatttatacatcctgtgactcttgtttcagtagttaccttagagattacagtattcaaccttaatatgttagaatctaatttaaagktgatacttttatcatgttataatcaataatcaatccaaggaccttggaacattttaaacccacttacccacttcctgtcttttgtgctatctatgccaag

SEQ ID NO: 10815 - DNA, 201 bp, Homo sapiens
ggcaaaatataaaatgtaataatagtccaaacaagttgtcagaatcagataatgctgtatgaagtacagttgactcttgaacaatgctgggattagggtcrttggccccctgcttccctgtcgtgcagtgaaaaatctacatacaactttcaagtcccccaaaacttaactactaatacctatgacggacagaaggcttac

SEQ ID NO: 10816 - DNA, 201 bp, Homo sapiens
cccttttaaaattattatttatacatcctgtgactcttgtttcagtagttaccttagagattacagtattcaaccttaatatgttagaatctaatttaaarttgatacttttatcatgttataatcaataatcaatccaaggaccttggaacattttaaacccacttacccacttcctgtcttttgtgctatctatgccaa

SEQ ID NO: 10817 - DNA, 201 bp, Homo sapiens
atgccagcatggctaggattttccctcttgtggtcatgaggagggttttccacctacatgggacataaacacacagacaaggttttctatgaacactgccrtatttcagcatgcagctgggcttggcttaacaaagtgcagcaggaggaaacagcaggagtgaaacctcaaatgtgatcgggtcttaggcacggagatgga

SEQ ID NO: 10818 - DNA, 201 bp, Homo sapiens
tatctgataaaattactaacaatattagttttagatagacctttgtactatttgtgttttgtttgtcccacttctttttgttttcctttaactatcttttytttttaaaattaatcacttttttattactccccttttaaaattattatttatacatcctgtgactcttgtttcagtagttaccttagagattacagtatt

SEQ ID NO: 10819 - DNA, 201 bp, Homo sapiens
atctaatcctcagagctaccagatgagacaggaattaccccattttacaaaggaagaaagaaaaatttaagagattaagtaatttgtctgtggtccaaagrgtttgtaagaggtaaagccaggctttgaacatgagtttgactgtcccccaaactcctgattttcttagtaagccttcattgcctctgtggcaattgataa

SEQ ID NO: 10820 - DNA, 201 bp, Homo sapiens
gctcctggtgttcaagacagattcatttcagacagcaaaaggctggaagatgtctttccggcagacattgggtaagaattctggacttgtaaatctatttktcaggactgttacctttctgctttatttaatttccccaccccccccccacccccacctgattatgattgcttttccttgaagcttagaagaatatgccat

SEQ ID NO: 10821 - DNA, 201 bp, Homo sapiens
aggggaacacaaacattccaaccatggtatacataccaactcatagaggtatgttatatattctctctctctttatctgtctatctatctatatatatatrtatgtatacaatctaaatgtattttttcagttttcagcctggatcctggagctcaccataatgaaatttacatctgcatgtttattttattttacttatt

SEQ ID NO: 10822 - DNA, 201 bp, Homo sapiens
tgtaggattgattattgccttgttctgttcaggttgctttaacaaaatatcataaactgggtggcttataaacaacaaaaggctgcaaaagtccaaggtcraggcagattcgttgtctggtgagctcctgttttctggcttatagaaggtaccttcttgctgtgtcttcatgagctggaagggcctcttataaaacactaa

SEQ ID NO: 10823 - DNA, 201 bp, Homo sapiens
gtgtcaacgatggcgtgcacattatcagaggttacagcgtcatgtccaccccatttgctactgtgtgtggggatgagatgccagctcccctcaccatcgcygggccggttctgcttaacttctactccaacgagcaaatcacagacttcggattcaagttttcctataggataatctgtgagtagccataatgacagagtt

SEQ ID NO: 10824 - DNA, 201 bp, Homo sapiens
tgctcagctgatgttaacgaatgtgagatttactcaggaacacccttgagctgccagaatggaggcacatgtgttaatacaatgggaagttacaggtaactttttttttttttttttggtaaatatcaggtatatttttgaaggcctaaaacatcccatagttaagagcatcctaaattaactatctgtattccaccaaaa

SEQ ID NO: 10825 - DNA, 201 bp, Homo sapiens
atttaagttttggagagtattccgttgcacgagtgtggcctaatttatttaatgaagcccctctaagtggacatttaggtctcttgaactttttgcaactrcagacaacacttaataaactttttggtagtgatatctttatacatatagttacattacttggtgagaaatggtaatcacaggaccagcagacactgtatc

SEQ ID NO: 10826 - DNA, 201 bp, Homo sapiens
ggcagggaagacagaattgcaaagattgcctgagatgagacatgaataaaatgtctcctgtgttgctttttcctccctctccagtgccttgtggtggaacrtacaatgcaacttggaccccacaaaatatttcatcacccaattcatcagacccagatgtcccattttccatctgtacttgggtcattgattcccctccgc

SEQ ID NO: 10827 - DNA, 201 bp, Homo sapiens
cattatgcaaaagtaaaattaaccacttctgacttaaatttagtgttatgttattaaagagctttttgattccaggactctgtttctcatttaaatgaagmcttttttccctgcctttgttaggcttgggctggaagcaaaatgcagtctagtctctcatttccgtgaacccattatctcctgatttctgtttatgggcat

SEQ ID NO: 10828 - DNA, 201 bp, Homo sapiens
gttttcagcacgttattttttccccctgcaaaatgaaaaacaaaacaaaaacccttttactatttaccactctgcagcatgtcagaggttagagttctttwtccacacacacatatgacagaatgagagctaggaggaaaggaaccatttatttgttgaaagctgcatttctaaatgacagattcaactttgtaagaacag

SEQ ID NO: 10829 - DNA, 201 bp, Homo sapiens
gggtatgtgacctcccccaaccaccctcataattatcccccgcacgctgattgcatttggatcttagcggctccaccggaaacacgcatacagctgcaatktgaagatcgattcgatattgaagtaacacccaagtatgtcacttccattttcatttttttcctaccccaagttagtattttttaaccgtcatgtctcaaa

SEQ ID NO: 10830 - DNA, 201 bp, Homo sapiens
tgtgtgtgtgtgtgtgtgtgtgtgtgtgtgtgtgtgtgtctgctgagtctggggcttggagttcttatgggcaccagatgggcgcagggcaggccaaaagrcaacatttgggtgggaaaacagggatggttctcactttgagtggcagatccaggcttgagggtggagcactcaccagggacctcaacctcttctaccaag

SEQ ID NO: 10831 - DNA, 201 bp, Homo sapiens
agcattccatggctttgtgaaaacgtgatttcatttgcgtttccttttaattatttttaaaataaattttggcatctgtatttaaagtgtttgaagtattytcttagtatcatccatgtcatcccttcttattctgttgggataaatggcttaatgtggatatcaaattcttcagtgtttttagcatcgactaactgattc

SEQ ID NO: 10832 - DNA, 201 bp, Homo sapiens
ggtagatattaaattatttttaaatgcatgcactactagattatcacaattctggaaggaaacatattattcttccagtatgctatatttttagaggacartgaagaagcagcattccatggctttgtgaaaacgtgatttcatttgcgtttccttttaattatttttaaaataaattttggcatctgtatttaaagtgtt

SEQ ID NO: 10833 - DNA, 201 bp, Homo sapiens
taactgtactatatccgaatattaaatttttaaagggtagatattaaattatttttaaatgcatgcactactagattatcacaattctggaaggaaacatrttattcttccagtatgctatatttttagaggacaatgaagaagcagcattccatggctttgtgaaaacgtgatttcatttgcgtttccttttaattattt

SEQ ID NO: 10834 - DNA, 201 bp, Homo sapiens; identical to SEQ ID NO: 1551

SEQ ID NO: 10835 - DNA, 201 bp, Homo sapiens
agttttctattattggcttatattatcataaatccaagaaatggtgggtcatagagaagacattgaactaacaggtatttgataacatcaaaggaattttwaaaaacctaagtaactgtactatatccgaatattaaatttttaaagggtagatattaaattatttttaaatgcatgcactactagattatcacaattctg

SEQ ID NO: 10836 - DNA, 201 bp, Homo sapiens
ccttaattgtttgtgtaggttctgatcataatgcggttgttccatgccttttccagctcgttccgctgtgacgggaagctgtgtcaacgatggcgtgcacrttatcagaggttacagcgtcatgtccaccccatttgctactgtgtgtggggatgagatgccagctcccctcaccatcgctgggccggttctgcttaactt

SEQ ID NO: 10837 - DNA, 201 bp, Homo sapiens
ttatgggagggggagcatgcagattggcaggtgcaggaacccaggcaagatgctacccacagtacggtctagtggtgggtgcctgtgactctcaaagcccycatgggcaggctacagtattcttttagctctgccatccacagagggctcaagtgttaaccagctcagtgactcttggtacccgacttcctgtctggcatc

SEQ ID NO: 10838 - DNA, 201 bp, Homo sapiens
gtgtcatttcctattaatacaaattaggtatgatccaagttaatattttaacagtatgtgttcacctacaaaaatcactggatatgttgtagtggacacayatctttttaatttcttgtttattttgttttatatttttctttgggggatggtaggctggagcatatattcacattataattggcaaacaaaacaataata

SEQ ID NO: 10839 - DNA, 201 bp, Homo sapiens
taatcatcagagcaattaaaattaaatatcacaatgaagtttcgtttcgcatgcaccagaatggctaaaattaaaaagactgacaatgtcaaatgttggcrtccctgcagagcactggaagtcccacacatccctggtgagaatgtatactgatgtaactactatgagatatagtttggcagtttcttgtaaaattaaata

SEQ ID NO: 10840 - DNA, 201 bp, Homo sapiens
ataccacatcagtgtcttgtcacttccataatttttttggggagaggaacctcagcagtaattcttgttgttctcctgaagataatgtgtctttttctccmccctcactgcttttattgtgtgtttatatttaattttccacaacttgattatggcgtatctagatctggttttctctgtgtttgtcctgcttgagagtca

SEQ ID NO: 10841 - DNA, 201 bp, Homo sapiens
ggatcatgaggtcagggggtcgagaacatcctggctaacacggtgaatccttgtctctactaaacaaaatgcaaaaaattagccgggcgtggtggcgggcscctgtagtcccagctactcgggaagctgaagcaggagaatggcgtgaacccgggaggcggagcttgcagtgagccaagattgcgctactgccctccagcc

SEQ ID NO: 10842 - DNA, 201 bp, Homo sapiens
ttttggagtcttgtgggccaatagagcgacaagtatgggcaaactgtgatgagatccatagaccaagataaaggctgttgctgttttcagcacgttatttyttccccctgcaaaatgaaaaacaaaacaaaaacccttttactatttaccactctgcagcatgtcagaggttagagttctttatccacacacacatatgac

SEQ ID NO: 10843 - DNA, 201 bp, Homo sapiens
tagaaaggtcaggggtgggagaggagagaaagccattgtgatgcctttggctgtttgattgagtggatgggaagcagttaggaggatttcagcagagcagkgacatggtgtgacttacattttaacagtatcctctcgatgacattttgaggatacactaaagaggaacacgagcagaatcaggggcttcatgggaggctg

SEQ ID NO: 10844 - DNA, 201 bp, Homo sapiens
tattaaacagtccaaaattttgtgttctcattattcatgtggccaactagaagccctcaatctgctaaaaaaaaaaaaaattatagatccagttttcttayttcatagataaagcacttcttgaggcaaaatgaagcaagccagtgccttctaaaccttgattattctttcattaaaattagatagtaggccgggcatggt

SEQ ID NO: 10845 - DNA, 201 bp, Homo sapiens
tgaaagctgcatttctaaatgacagattcaactttgtaagaacagtacgaaattctctcttgcactcttttataaaggagagcaagaatacagaagaactratgatgtgtggatggctttggaaatgatcttgattcctagactctgcccttcatagatttgctggaggacattagagaacagagcatttaaatcagggtt

SEQ ID NO: 10846 - DNA, 201 bp, Homo sapiens
gaggtaaagatggctctgggagaacagttttgggagggctagtgggacagaggaatcaaagcacttgtttatttatttattagatatttattgagagcctstcacgtgcagacacttttctaaaaactgggaacatggcagtgagcagaaaagaaatctgtacattcatggaacttgtattgtcttcagagagaaagccaa

SEQ ID NO: 10847 - DNA, 201 bp, Homo sapiens
attttggaatctggtattattaaataactgcttattttattttcccaaatattaaacagtccaaaattttgtgttctcattattcatgtggccaactagawgccctcaatctgctaaaaaaaaaaaaaattatagatccagttttcttatttcatagataaagcacttcttgaggcaaaatgaagcaagccagtgccttct

SEQ ID NO: 10848 - DNA, 201 bp, Homo sapiens
caaaaggtgggattggcaaggaaaagatgtggtatcccaggctacaaaatactgtgaggaaacacacttgtccctatatggcgtctactaaacattgacamctgcttagggagggttttaccatgaagggaaaaatacagattgttgaaccacactcaactcttaggttacaaaggctcagtgacctactttccgcttacc

SEQ ID NO: 10849 - DNA, 201 bp, Homo sapiens
gaagtaatacagtagacaggtttttcagactgaatcagagagtgctggaaaggaagtactgaaagacaaccctagaccaaatcttaggtctgcaggtggtycactgtgtaagtgtgcacgtgtgtacttgtgtgtgttttaatgtcaatttaaaaggatagagatattttcgtgcttgatagatcagagagtgaagtggat

SEQ ID NO: 10850 - DNA, 201 bp, Homo sapiens
tctaacactgctacacaaagtcacataataaaatagattccttttatatgtagaatggtggtgaataaaaagtataaatgtaaacaaatacgggtgggttrtatttgcaacccgcatgccaatagcagcatcaccatctgcaagataagtttccagaatggtggaaaaactcaaaacaaacatttctaaaccaaacaaagt

SEQ ID NO: 10851 - DNA, 201 bp, Homo sapiens
gtatataatagtggttcttaacagtcatttctttttccagcatgtgagaatgtggtaatagtcaatcaaacctatggcatcttagagagtatagggtatcygaatccttattctgaaaatcagcattgcaactggaccatccgggcaacaacaggcaacactgtgaactacacatttttagcatttgacttggaacatcac

SEQ ID NO: 10852 - DNA, 201 bp, Homo sapiens
gtcagttgccaaggtttagttatacaaactcgcttacaagagggagaagttatattaaagtgaagagtaaaagggtagctgctcccagaacaacttggccrggctagagtggaccatgggaatggggtggagcatgtgaggatttgggtaatttagttgtttttcttcccctaagctaaggacccaggctggctggatgca

SEQ ID NO: 10853 - DNA, 201 bp, Homo sapiens
tgatccagtttcaaaggcttcccactaagtgacacaattcattctttctttaggttcaagtagcaataatatgtgggttggggcggaggggcgcattgctwggcaaaagacaagttcgaaatagctgatgttatttgcaatccttaaacacaatttctgctttattactcatttataaagtgctgttctggagctgctata

SEQ ID NO: 10854 - DNA, 201 bp, Homo sapiens
aacatcacagaagtgcgttttctagaattgcatgctgctataatgagaaaagggaaaaactggattttttgacttctgttgaaattgtgatggcatcgagsggagctaatcaggaagctggacttgaaggcaggtttcaacacatttggtaatatatttgcactttctgctcagtcaccttcaagtgtctggtgtaattaa

SEQ ID NO: 10855 - DNA, 201 bp, Homo sapiens
gcacacaccacctttaagagctgtaacactcactgtgaaggtctgcagcttgacacctgaagtcagcaagatcacgaacgcaccagaaggaagaaactccrgacacatctgaacatttgaaggagcaaactccggacacaccatctttaagaactgtaacactcactgttcaggtccgtggcttcattcttgaagtcagcg

SEQ ID NO: 10856 - DNA, 201 bp, Homo sapiens
ttatgaattgtggtcagcaaagattctagcgcaggttcacagggctgggctgtgaatcacactgtctggttctaatctcaggcgcagaccttctctccgtwggtaatggaattgctttcacagtgtcgcttcctgctaggctgtgatagacataatgtcacacagagagaaatggtaaagcacccatccatccgcctccaa

SEQ ID NO: 10857 - DNA, 201 bp, Homo sapiens
tatttagaaggtaggatgggcagatctgatggtggagtagatgtgtgtcaatctgggagacagaagaaggaatcatggatagctcccgttttcctgcggtrtatgatttggtgcatggtggtgccattattcatagataggaaatcccagataaagaccatgtttgggggaaaattgtgagcttctatttgaacatgctga

SEQ ID NO: 10858 - DNA, 201 bp, Homo sapiens
gtgagccacatgagcacttagataacatcacagaagtgcgttttctagaattgcatgctgctataatgagaaaagggaaaaactggattttttgacttctrttgaaattgtgatggcatcgagcggagctaatcaggaagctggacttgaaggcaggtttcaacacatttggtaatatatttgcactttctgctcagtcac

SEQ ID NO: 10859 - DNA, 201 bp, Homo sapiens
caggtggaccatgaggtcaggagtttgagactggcctggcccaccccatctctactaaaaattcaaaaattagccagctgtggtggtgcgtgcctgtaatmctagctactcaggaggctgaggcaggagaatagcttgaaactgggaggcagaggttgcagtgagccaagatggcaccactgcgctccagcctgggcaata

SEQ ID NO: 10860 - DNA, 201 bp, Homo sapiens
gcatgaattgttaatagatgcatagctgaataaatgaatttttgtcatctctgctcctgcaatgctcagtgctttggtggaaaatctcagaggacaccatygggaatgtgctgtactgagttcactccctggcattgttattgatatacaatcttcgtgttgtgagccacatgagcacttagataacatcacagaagtgcg

SEQ ID NO: 10861 - DNA, 201 bp, Homo sapiens
taagtgcattaaaatattgatgggaaacccttgagcattaaagttctgtgtatgtccgtgctaggtgtgggcaggaactgaggaggtggacaaagccctgmtagccactggctgtgggaacgtggctccgggtcccgttatcacaccaagtaacacattcactgccgtcttccagtctcaggaggcaccagctcagggctt

SEQ ID NO: 10862 - DNA, 201 bp, Homo sapiens
caggcagctttgacatttgaactgagttttaaagaatgggcaagaattgatcagacaaatatctgggagaggaaggcttttctaagtagaagcagcaaggygtgagggcacaaaagttttgcaaagagcaagtccttcagctagaccacacattctctgcattctccattggggcagtatcaactccaaggaggtaaaatt

SEQ ID NO: 10863 - DNA, 201 bp, Homo sapiens
aaatatgaaatggaaagtgtccttgctttgaagtcaggaggtcagggtttccttcattactttccccttcggtgccaaatatgtaccagacactgccaggygcttgtttctggacgtgtaccacccctcaccctcttcatggcttggggttcttagtttgcttatttagaaaatcaggtgcctggggaacagaagcagaaa

SEQ ID NO: 10864 - DNA, 201 bp, Homo sapiens
atttccattcactttgaagatttttacctagaaagtcaccaagactgtcaatttgatgtcctcgagtttcgagtgggtgagttctatctaagaatgcgttytcccatttatctacaatattctttttatcttttttgttgttgtcgctgctgttgttgttgttttgagacaggagcttgctctcttgcccggactggagtg

SEQ ID NO: 10865 - DNA, 201 bp, Homo sapiens
ggcttaagcagcagaagtgtgctgtctcctggaggctggaagtccaaggtcaaggtgtcggcagggttggtttctcctgaggcctctctccttggcttgcrgatgctgccttttccctgtgtcctcacatggtgttttctctgtgtgtgttcatcctgatagctctgtgtgtccaaatttgctccttataaggacaccagt

SEQ ID NO: 10866 - DNA, 201 bp, Homo sapiens
tcctactaccacacactctcaaagcatttctcagacagtttgcaagaaataacaaaatctgtccagtaaggatagtaactacaatcccaaatagactcttyggcagcagtgactctccaaaactgctgaggcctagaccctcctcactgctgagaaaggaggactttgcaccttctttgggaaagagtgttgcttttacac

SEQ ID NO: 10867 - DNA, 201 bp, Homo sapiens
caagccttgagaagtttcagaaattagaagagaacattttaaaaaccgtgtcaacatcttttatgactggctcggtttggatgtaagccagtgccttcttractacctgtgggcatgaggcactgtaccaaagggcttttaaaaaacatctttagagcactggcagaaaaccgccatgaggtcggcagtgtttctcttaaa

SEQ ID NO: 10868 - DNA, 201 bp, Homo sapiens
ttattaatagcaaagaaaaattaaaatcccaaacttacaaggttttctactaacgtagagtttgctaaaagttaacagtgtaacatgcattatcctactaycacacactctcaaagcatttctcagacagtttgcaagaaataacaaaatctgtccagtaaggatagtaactacaatcccaaatagactcttcggcagcag

SEQ ID NO: 10869 - DNA, 201 bp, Homo sapiens
taacatatcagaaggaaaataattagaaaggcttctccttgcacagccccgcaagggatgttctcagaatcaggtggagggctcaggacagccccgctaaygctggtcctggagttgctcttcgtgccctggccaggtcaagtggctttaaactcctagcctcttttcctcagaatcctatcaccttgcaatcccttcccc

SEQ ID NO: 10870 - DNA, 201 bp, Homo sapiens
acctctgaaccaaaacctaaaaaataagcaggagttaactaggcaagcaggataaggaaaaggattccaggtagaagaaagaccctgtgataggagggagyggggagagcccgagggacctgagaagtcaagaggatggaactgagtcgaagagaaacagcgctgccaaggtggctgcagagctaagcacataatgtggct

SEQ ID NO: 10871 - DNA, 201 bp, Homo sapiens
ctgaagtaggtctttagtttgagataacctgagaaggggagcccacagagagggcgagctcttccatgggagaggtcccgccatttttgatccattggagktaaatgcaagacgtaaatcatgatgtatcattcacgcatttgttcattccacagacactaaggatgtcttttgtgccaggtactgtgctgagacggggga

SEQ ID NO: 10872 - DNA, 201 bp, Homo sapiens
gcttcctacgaagtgaataagtattttggtaaaatataaaaattgcagttatgtacaggaaacggaatggcagactagaaaaatagagggagaaaataaayttagggtcaggctggagccactttgattttttttttttttttgagatggagtttcactcttgttgcccaggctggagtgcaaaggcgtgatctcagctca

SEQ ID NO: 10873 - DNA, 201 bp, Homo sapiens
gaaattaacagcaggatcagcactaaaacgaaagccttatgcttcctacgaagtgaataagtattttggtaaaatataaaaattgcagttatgtacaggawacggaatggcagactagaaaaatagagggagaaaataaacttagggtcaggctggagccactttgattttttttttttttttgagatggagtttcactct

SEQ ID NO: 10874 - DNA, 201 bp, Homo sapiens
ctacccagatgctcctgtgcacatgaaccctggggatcttgttggatagaggatggggtctggggcaaggcccgtgaatctgcatttctaacaagctcccrggtaatgctgctggtgctgctctatggaccgctctgaggaacaaggtgagagcaagtgttgagactggagaaatgagatggtagaaagacagtatcccta

SEQ ID NO: 10875 - DNA, 201 bp, Homo sapiens
atagacttcattcagaaaacaaaatgataatttttctctcctgggacataaatggataagaattgcgtactccttcttttgcaatgtaaaggagttgatgmaattttaatttgtctttccagctaagaaatggtcctgatatctattctccacccttgggaccccctggaggaaatggtcatttttgtggcagtcatgctt

SEQ ID NO: 10876 - DNA, 201 bp, Homo sapiens
tataccaggaaccaagcatagacatctaagctgtggccctgctgtcaaaatcagggctgagctctagctgagcacacatgaatgtgtgcagtggttgactmttaacattgttcacattctggtgcactcattataggaatgtcagagctacttataactgaatagccctattatacacttaggagtgctaggcgttctgag

SEQ ID NO: 10877 - DNA, 201 bp, Homo sapiens
attatttattctcattaataatctttcctaggaagattaaggaaaaaaatatggaaattctctgcaaagctccctgctgtgcactttcttgcaagaaataaagtttgtcatttggagcctgacttaggagaaatacaggaattgcataagattctgtggttattttgaagtgattattttattggaaatacttgaaaataa

SEQ ID NO: 10878 - DNA, 201 bp, Homo sapiens
taacaataaagtacccttctccctcctctcatccatttttctttatagaatttatcaccatctcacatatcatgtatttgtttattgtatgtcttccccakctataaagaaatctttatgaaagcaggtaatttgtcttgtttacttacctctgtatcccagatctcaatgaccaccacaaactgagtagccaatagcatg

SEQ ID NO: 10879 - DNA, 201 bp, Homo sapiens
tttcacatatgattaactgtcataaacctatagatacatagaatgttaaggttggaagaagaaagcttagagttcgtttgctgttgtcacctaattttttwaaaaaagacattgaggtggaggtggggcagtgcaaaaaataaaaattaattaaaaaataaaaaagatactgagatccagaaatgtcagggtcaaggctaa

SEQ ID NO: 10880 - DNA, 201 bp, Homo sapiens
tgtcctgttcctgttgcttagacagagttattagcaaagagaaaaatattcagttgccagtgatgctgtcagataatgttggggttcaggagatttttaayagagttcaagtgtactctttaaataccagtgaaaattatgctggaatgggaccagccatcctgttttttcaaaacttctataacaatttgggttgttaga

SEQ ID NO: 10881 - DNA, 201 bp, Homo sapiens
ggaggccgagatggtcagatcatgaggtcaagagattgagaccatcctggccaacatggtgaaaccctgtctctactaaaaatacaacaaatagctgggcstggtggcaggtgcctgtagtcccagctacttgggaggctgaggcaggagaattgcttgaacctgggaggtggaggttgcagtcagctgagatcgcaccac

SEQ ID NO: 10882 - DNA, 201 bp, Homo sapiens
cttcaccgtcctgagacccaggctctagagcttgctgggggaaaagtaaaagatggttgaattatgcagtgacttccaaagcttctatgtggaaattggtktatcacttttgctcacactctgttgggcaaagcaagtcctatggctaagcccatagtcaatgggaagattatgtattaattctccgtatggcagtattgc

SEQ ID NO: 10883 - DNA, 201 bp, Homo sapiens
acacattttttttttgtaggatgcctactatgagcaaagcactgtgctgggtgcattggtaggcaattagccagacctcaggttcatctgcgctccagggrtgttcttagaaatggagccacaaagataatgtaataatagtagctggttttgttttgttttgttgttgttgttttgagacagagtctctccctgtcaccc

SEQ ID NO: 10884 - DNA, 201 bp, Homo sapiens
ttacttttgctcagtaagagagttccataagcactcattaaagaatagattttaactgcaaaagataagaatgatattgacccagtgtagcatatctttctttttttttaacacaaggaacacacattaacatgttaattcttagatttatatatctctcttaagtgaagtttctacttttaaagatatacattacccatg

SEQ ID NO: 10885 - DNA, 201 bp, Homo sapiens
taagaactgtaacactcactgtgagggtccgtggcttcattcttgaaatcagcgagaccaagaacccaccagaaggaataaattccagacacactactgtsttagagtgatctagccctggaacatgtagtgcttgtgggtctcatagcagtagttctcaaccatgatgctagagctcattggtgtatttcaatcaactgg

SEQ ID NO: 10886 - DNA, 201 bp, Homo sapiens
acccatagcattcctatcaaacatccttaacccagcaagtttcctaacaggggatctaaatcttaattaccatacaaaggtcccaccagacataggaggarctcccttcaggacaggatatagatggttcctcccaggtgattaaggaaaaagacacaatgggtattcaggaaactcttatggaagcagagttaggaaaat

SEQ ID NO: 10887 - DNA, 201 bp, Homo sapiens
aaactcaactccctggtaaaatctttaagatttaaaagaagagaaccaaaataattgggaaagcaggagagcagaagctgaggcaggaaggtctgtcctcygtctgaaccttttctttcaccaccttcccctgcatccttccctctacttctccctccccgctacactcctgcttcagcctaagcagccctcccgcatctc

SEQ ID NO: 10888 - DNA, 201 bp, Homo sapiens
cagccttgatactaattaggaatacttttgtttgtttgtttttgggttttttttgttgttgtttttgttgtttgttggtttgttttttgagatggagtttyactcttgttgcccaggctggagtgcaatggcaatatctcagctcactgcaacctctgcctcctaggttcaagtgattctcctgcctcagcctcccaagta

SEQ ID NO: 10889 - DNA, 201 bp, Homo sapiens
agccttcagtgtaagctcacacgcttattactgctgcacatgtccacagcttaattgcctgagtttatggcctgagtttataaatacctaaatataatttwtaaggttattttatttcatggctattcttttgtgatgtcatatatataacaaaaaatatatatttattatatataaagatatatttattttatatatatt

SEQ ID NO: 10890 - DNA, 201 bp, Homo sapiens
aaaaagaataaatgtgtatacagatagcaagtatgcttatctaatcctacatgcccgtgctgcaatatggaaagaaagggagttcctaacctctgggggawcccctattaaataccacaaggaaatcatggagttattgcactcagtgccaaaacccaaggaggtggcagtcttacactgctgaagccatcaaaaagggga

SEQ ID NO: 10891 - DNA, 201 bp, Homo sapiens
ccatactgaagtaagcctcttcccccagggaccagcaactagttagcagaactagtggcacttactcgagccttagaactgggaaagggaaaaagaataartgtgtatacagatagcaagtatgcttatctaatcctacatgcccgtgctgcaatatggaaagaaagggagttcctaacctctgggggatcccctattaaa

SEQ ID NO: 10892 - DNA, 201 bp, Homo sapiens
tgatgtaaatggcatactaggtgccaaaggaagtttatggctatcagacaaccgcctacttagataccaggtgctactccttgagggaccagtgcttcagmtacgtacatgcacggccctcaaccctgccacttttctcccagaggatggggaaccaattgagcatgactgccaacaaattatagtccagatttatgcagc

SEQ ID NO: 10893 - DNA, 201 bp, Homo sapiens
tgcttttctaggttctcctgtaagaatgatttctaatataaactccaggactctgttaccttctttaggcacctgggttcaccaatcagaaagacataatytttgcccaaagccccattgtagggggtactatctggaattttaggatccctcctcagacaagcaggcctatcaatagctattcctgaagctaggatatgg

SEQ ID NO: 10894 - DNA, 201 bp, Homo sapiens
aagacttgcccatctatcctatctatcctgacccttgcctcctgggtcctaatgcctgtcagacaaatttcctctcgcctctcttctctgaggctagtccygcttctaaaaaccactccctgtctctgttgcttttctaggttctcctgtaagaatgatttctaatataaactccaggactctgttaccttctttaggcac

SEQ ID NO: 10895 - DNA, 201 bp, Homo sapiens
cagactaaagacacgggtgtcaggctttctgggaaacggctctctaacaacccccaactcttcggagttgggagcgttggttggcctggaaccagcttccrcttttcctgtacttctgggctgagctgagggttgacagagaggaaagccattcagctctggggtcccaacaacaagttggttggccctgcagccatgagt

SEQ ID NO: 10896 - DNA, 201 bp, Homo sapiens
gttctctgggcaagaagtccccaaccagatgatccaacaacaggactgagggtgcccagggcaagtgccagctcatgttatgacccttattgagccccggktacatttaaccattgagggccaggaaattgacttcctcctggacactggcatggccttctcagtgttaatctcttgtcctggatgactgtcctcaaggtt

SEQ ID NO: 10897 - DNA, 201 bp, Homo sapiens
gcaagtgccagctcatgttatgacccttattgagccccggttacatttaaccattgagggccaggaaattgacttcctcctggacactggcatggccttckcagtgttaatctcttgtcctggatgactgtcctcaaggttttaccatccaaggaatcctgggacatcctgtaaccaggtatttctcctacctcctcagtt

SEQ ID NO: 10898 - DNA, 201 bp, Homo sapiens
ttgatgcctaaatagtcagcacttgatattaaatgggttatatagcaaaattatggtgaaaatggagaacacaatgcattttttttacatcaaagatcaaytgcggaaattgcagctttccgaatcagtgggttacatacgatattcattgatttctctgagaaattgtttcaattggttgcttcttttcagtagagggct

SEQ ID NO: 10899 - DNA, 201 bp, Homo sapiens
gcaggcgactctagatctcttgaaatttctagctaatcaagggtacaaggcatctaggtcgaagacccagctttgcctacagcaggccaaatatctaggcytaatcttagccagagggaccagggccctcagcaaggaacgaaagcagcctacactggattatgctcaccctaagacattaaaacagttgtgggggttcct

SEQ ID NO: 10900 - DNA, 201 bp, Homo sapiens
acgcccgcctaattggagcttactgtggtacccagactgaatctttcagctccactggaaattctttgacatttcatttttactccgactcttcaatctcrgggaagggattccttctggagtggtttgcagtggatgcacctgatggtgttttacctaccattgctccaggtgtgtttggtaataaatgaagttcttttt

SEQ ID NO: 10901 - DNA, 201 bp, Homo sapiens
tggaatcatcggcttttgctgactgtggatccccagatacaaggagatagccaggcccctctatactctaatcaaggagacccagagggcaaatactcatytagtagaatgggaaccaggggcagaaacagccttcaaaaccttaaagcagaccctagtaaaagctccagctttaagctttcccacaggacaaaacttttc

SEQ ID NO: 10902 - DNA, 201 bp, Homo sapiens
tttatgttagagtattaaaaattttaatgatcatataaaaataaatataaatataaaaatcatggtgatcattgctatccagacattggctaccatatcarttccagaaacacaatcggatgcttacaggctatgaccccaccttattcatcttggattcttggtcatgaatagatcccagtgcctgatgggtgcccaata

SEQ ID NO: 10903 - DNA, 201 bp, Homo sapiens
gaaacgtaccccaaagtccaacatcttacataatatctctgcagtctcagttcatataaagccaatccttcattttggagacattcaagttaatgtcctgktcctgttgcttagacagagttattagcaaagagaaaaatattcagttgccagtgatgctgtcagataatgttggggttcaggagatttttaatagagttc

SEQ ID NO: 10904 - DNA, 201 bp, Homo sapiens
tacactgctgaagccatcaaaaaggggaaggagagaggagaacagcagcataagtggctggcagaggcagggaaagaccagcagaaaggaaagaaagagayagaaagtcagacagagagacagagagaggaagagagagacaaagagggagtcagagagaaagagaaagaaagagaaggagacagagagatagaaagtcag

SEQ ID NO: 10905 - DNA, 201 bp, Homo sapiens
aaagagcagctgaatgtgagagccaggcgaacagtagagaaaatcatgttttcagcacagagacaccaagaagcgccagattggttctatgaatgttgtaytttttagaataagaaattgaaacccatggcttggcacaagatttttctgatttataaattcattatgttaaaaattgcataaattgtatacaaactaagt

SEQ ID NO: 10906 - DNA, 201 bp, Homo sapiens
aaaaaaaatggagaaatataagttgtgtgaagagggcaggtggaaaaagagcagctgaatgtgagagccaggcgaacagtagagaaaatcatgttttcagsacagagacaccaagaagcgccagattggttctatgaatgttgtattttttagaataagaaattgaaacccatggcttggcacaagatttttctgatttat

SEQ ID NO: 10907 - DNA, 201 bp, Homo sapiens
agtaatgacaataatatactctgtccctgatttttttctcctcctagttccacaggctactcaaatatagactattttgaccctgtgtaccaaaataatgmaattgaaggaatgcaggataaataatatagattttaccacctaaatgtaatcttaaatttgtctgaagatattatgataaaaataaactatcttgccatg

SEQ ID NO: 10908 - DNA, 201 bp, Homo sapiens
gcaatgataatattgtgggaactcatgggaaagtcgcctctcctttctggcctgaaaactacccacataactccaattaccaatggacagtaaatgtgaaygcatctcacgttgtccatggtagaatcttggagatggacatagaagaaatacaaaactgctattatgacaaattaagggtgagtttccacatgcaatcaa

SEQ ID NO: 10909 - DNA, 201 bp, Homo sapiens
gctaggcaaaagacaagttcgaaatagctgatgttatttgcaatccttaaacacaatttctgctttattactcatttataaagtgctgttctggagctgctatatatgttgctgatggaatccaccgatctgggagaaaccacggagatcatctggtcagttgccaaggtttagttatacaaactcgcttacaagagggag

SEQ ID NO: 10910 - DNA, 201 bp, Homo sapiens
gttctacatggctgaaggcatcttcaacagccctggctacccagacatttatccccctaatgtggaatgtgtctggaacatcgtcagttcccctggcaacyggctccagctgtcttttatgtaaatccttttttatggtgtattgtttcagtgctaatgaatctgtaggaaagaagttctggtgctaataggatgggcaac

SEQ ID NO: 10911 - DNA, 201 bp, Homo sapiens
tacacaatgtatatgtgtattgaaacatcacactatccctcatacatgtgttcaattattatgcatcacttaaaaccaaaataaaaaataaatataaactrtatatattcataaaattgaatcttaaacttttataaaaatgaaaaaatgctattctaaacaaataaatgaataaattatcttgagagaagtaaatagtct

SEQ ID NO: 10912 - DNA, 201 bp, Homo sapiens
atagtgctgtggaccgtgacactgcactcaagttttgtctcctggagggcttcattatattcgctcagccagtcctcctaccctcatccctcaggaggaaygttgaatgattttcaaatgtgaatgctttgtgcctttggatagggcaaatgctctctggccaccacagtccccaccactccctattgtcttcctcctgac

SEQ ID NO: 10913 - DNA, 201 bp, Homo sapiens
aaaaaaaaaaaaaaaatagctgggcatggtggcatgagcctgtactcacagctacttgggaggctgaagtgggaggatggcttgagccagggaggttgagrctgcagtgagctatgatcatgccactgtgctccagcccaggcaacagagtgggaccttgccagaaaaaaaaaaaaaaaaaaagaaagagagagagagaga

SEQ ID NO: 10914 - DNA, 201 bp, Homo sapiens
cataaacagtcaattaacagatattttatatgttttatatattacatactgtattctttcaacaaagtaagctagagaaaataaaatgctatcaagaaaaytgtaaagaagagaaaatatatttactatttattaagtggaagttgatcatcataaaggtcttcatcctcatcatcttcacattgagtgggttggggagga

SEQ ID NO: 10915 - DNA, 201 bp, Homo sapiens
cgtgatccaccagcctcggcctcccaaagtggtgggattacaggtgtgagccacctcgctcaccctggtgttctttttggcttgtttgttaaggcagcccyaacctggggaggagaggaacgaggagctacccaggactgggtttcttagcctcttagcccagagagtgctgttggtcactgccatcttccttgtttttag

SEQ ID NO: 10916 - DNA, 201 bp, Homo sapiens
ggacttgtggaatgcatgaggcacttgcttccctcaagtggacctgctgctcagagtctcatggctgcaattcacagactacacacctaaatgtcagaaamagaataaggcctggagcaagcaaacacaccacataggctgaatagtattgtgtttttcagttaagtacatattgaaattaattgtaggtcagaaaaatat

SEQ ID NO: 10917 - DNA, 201 bp, Homo sapiens
agtaatgccccatgattgctgtgataataattaacacaaaaccaaaaaggtactctcacacatttcccaaatgctagattgtggtccctgctgagaaccaytggttaggtaacaatgaagtatcctgcgcttccccaaaaaccgcagtcatcatacttttcaaaaatgttcctgcctattgtaagttccttgtgagcagtg

SEQ ID NO: 10918 - DNA, 201 bp, Homo sapiens
acgaatgcaggaaccggggtgaacgaaccctagaactggctggtccctcctctctggtggaagcaggctctgtgcacggcccacggcagcgtccaagcttsttacaatgctcttttagctctgccatctcggagagggtgtctgcgaccccaagagccccaaagggcatgtgttgcaatcagtgctcttttagcatttgcc

SEQ ID NO: 10919 - DNA, 201 bp, Homo sapiens
agatgggacaatcaccaagcggtgagtaccactggacccctttcgcttgctattctgtcctatttttccttagaatttgggggctatataccgggcacctsttggccagttaaaagtgactagcatggccgccagactaaagacacgggtgtcaggctttctgggaaacggctctctaacaacccccaactcttcggagtt

SEQ ID NO: 10920 - DNA, 201 bp, Homo sapiens
ggcttatttgcttggctgcctagctgaattcaggagggagcacacgaatagacgaatgcaggaaccggggtgaacgaaccctagaactggctggtccctcmtctctggtggaagcaggctctgtgcacggcccacggcagcgtccaagcttcttacaatgctcttttagctctgccatctcggagagggtgtctgcgaccc

SEQ ID NO: 10921 - DNA, 201 bp, Homo sapiens
atagaacaggttgggagatgggagtggaggagaaggaatatggctatgaattggtcagatgacaaaaagagtttctgctactgagatgggaaagtttcctkgactcctttacaggacttgcgaagggggtggcttatttgcttggctgcctagctgaattcaggagggagcacacgaatagacgaatgcaggaaccggggt

SEQ ID NO: 10922 - DNA, 201 bp, Homo sapiens
ggacttgctaggttgacataaaaccaaaagttactagttgggtttccaaatttattgggcttaggaatcagatccatctctaataccctctctatgcaatyatcaatttttaattcttatgttgagttctgtgtactcaacccacctcagcagatttacctctaacttttgaaccaaggaacagcttttgctacttgtgta

SEQ ID NO: 10923 - DNA, 201 bp, Homo sapiens
caaataggtatattacacatatatacaaatgaaaaaagtatcaagagaaatttttggatttaatgaaatattaacagtgtttgtctttagtcgaatcaatrtttgtattttcctttttcatatatttctaaaatgtctgattattttacaggtagcatttattttaaaaattacctcttgaagggatggctaccccatttt

SEQ ID NO: 10924 - DNA, 201 bp, Homo sapiens
aaaaaaaaatccttcaatgtcaaagtaattaaaataacacaagttaagacaattacaaaaaggcagtttttcactgtcagtactagtttaaaacatgatcrtcatcataattgacaaagctccactgaaagaaacacctctgttaactgcttgtgggaggataggttggtataaactttctggtaagaaatttaataatat

SEQ ID NO: 10925 - DNA, 201 bp, Homo sapiens
gaatgcctggggatgtgatcatttccacaaaagaagcacagatgaaaagcaagggctttcaaaggcagactaatttatgcctgactgcagggattaggggyggctccatggaggtgctttgtaacatttggtggtaaagttctccacactcaaatcaatatgtttcaaacaatatttcatgtcataacattttttttcaat

SEQ ID NO: 10926 - DNA, 201 bp, Homo sapiens
tcttctcttattctcccctattcattataggggaggcttctgataaatgtgtagaatattagaaacttgataataaatatacacattcaaagcagcagtamgaaaaacagaaaaaaaggaagctacagcagtaagcctgaaaaataaaactcatctttattcatttgcttaaaatgcttaggtttagtgctttggggtgaa

SEQ ID NO: 10927 - DNA, 201 bp, Homo sapiens
tctgttccgtttcgtttccctcttcattttctgttgctttattcttctcttattctcccctattcattataggggaggcttctgataaatgtgtagaataytagaaacttgataataaatatacacattcaaagcagcagtacgaaaaacagaaaaaaaggaagctacagcagtaagcctgaaaaataaaactcatcttta

SEQ ID NO: 10928 - DNA, 201 bp, Homo sapiens
gaaaaactctaaagctgagatgaatctcctgcagggaagcagggatttagaagcacaggctgcaaggttggcctctcgccctccggtttctccgcctgcakgagagggtgggactgaacgctaaggtgaaaagcttctgttccgtttcgtttccctcttcattttctgttgctttattcttctcttattctcccctattca

SEQ ID NO: 10929 - DNA, 201 bp, Homo sapiens
tctttaagtcacgtgaaaatgccacatttcttaatcttgcagagctgacaggcaaaaatgctatgctgttcatgaccttgtgcaggattgaaatataattycgcaacatgctgcgacctagtattccgtaagacacatcgagcttagggtgattatagttatggagaaatcttacctatgttttgttggataagggttatg

SEQ ID NO: 10930 - DNA, 201 bp, Homo sapiens
ctaggcaaaagacaagttcgaaatagctgatgttatttgcaatccttaaacacaatttctgctttattactcatttataaagtgctgttctggagctgctatatatgttgctgatggaatccaccgatctgggagaaaccacggagatcatctggtcagttgccaaggtttagttatacaaactcgcttacaagagggaga

SEQ ID NO: 10931 - DNA, 201 bp, Homo sapiens
gagagcagtgctgtgatctcggctcaatgcgacttccacctcctgggttcaagcaattctcctgcctcagtctcctgaatagttgagattacaggcgcatrccaccacgcccagctaatttttgcatttttagtagagacagggtttcaccatgttgggacaggctggtctcgaactcatgacctcaggtgatctgcccac

SEQ ID NO: 10932 - DNA, 201 bp, Homo sapiens
gtttccagcttcatccatgtccctaaaaaggatatgaactcatcattttttatggctgcatagtattccatggtgtatatgtgccacattttcttaatccrgtctatcattgttggacatttgggttggttccaagtctttgctcttgtgaatagtgcgggaataaacatacatgtgcatgtgtctttatagcagcatgat

SEQ ID NO: 10933 - DNA, 201 bp, Homo sapiens
aaaaaaaaaaaaaaaaaaagggattgcttttccctctaaaaggaatcctgccaccaacttttaaataatgcaacatgcttttaaataatgcttatttatargacaaaggtgtgtatgagaattaaaaagttccctttgcttggcttctttattttcccacattaccgttctttagaactatgatcacaggcctccagaact

SEQ ID NO: 10934 - DNA, 201 bp, Homo sapiens
catagtattccatggtgtatatgtgccacattttcttaatccggtctatcattgttggacatttgggttggttccaagtctttgctcttgtgaatagtgcsggaataaacatacatgtgcatgtgtctttatagcagcatgatttatattcctttgggtatatacccagtaatgggatggctgggtcaaatggtatttgta

SEQ ID NO: 10935 - DNA, 201 bp, Homo sapiens
agcttctgagcttttccccagagttacggaaatgagtggcataaggagaaaatgggcagtaaccaatgggttaaccaaaatcagtggagagttggtttttwaaaaaaaatggagaaatataagttgtgtgaagagggcaggtggaaaaagagcagctgaatgtgagagccaggcgaacagtagagaaaatcatgttttcag

SEQ ID NO: 10936 - DNA, 201 bp, Homo sapiens
tttttacctccatgttctcatttaaacattaaatcgttccatgaggtaagaggggaattttattcccattttacagtggtcaaaactaacgctcaaaaagrttaatgggcttttccatgaccacatggaaggggagtggaagagctaataactgaagccagtcactgctcaacactccagtaaatcctgagaccatagatg

SEQ ID NO: 10937 - DNA, 201 bp, Homo sapiens
acacagaggcatgaataccaggacgtggggctcactgagagctgggtcagaagttgcctaccaccccccacccctacaatctccagttggaaaattttcayttcttatctctcccactcctacctacccatatttctggacaacccccaccccaccccttggttctcttttcttttttgcctccatagctttctaattccc

SEQ ID NO: 10938 - DNA, 201 bp, Homo sapiens
ttaccccagtccttataggagcaacacagactgttcttgggtcattcgggttgacagaaatcatcgtgttctcttgaacttcactgactttgatcttgaaycacaagactcttgtattatggtaagtgacataaatttcaagcattgtctccagtcaaacctcggtcaaaacactgccatataagcatatttagtgaatat

SEQ ID NO: 10939 - DNA, 201 bp, Homo sapiens
acaagacagaaagtgctagcaagagggcaggaaccatcttttctcacctcattatggaggtgacagactatcacttccattgtattctgttaattagaacmaatcacgaggtctatcccatacgccagggaggagattacacagaggcatgaataccaggacgtggggctcactgagagctgggtcagaagttgcctacca

SEQ ID NO: 10940 - DNA, 201 bp, Homo sapiens
atcacaagactcttgtattatggtaagtgacataaatttcaagcattgtctccagtcaaacctcggtcaaaacactgccatataagcatatttagtgaatrtattacttatgggtgtttttaatgtcgaatcataggaaaccaaactattggcaacttaaaatataaggacatttattttttacctaaaaacaaatcagga

SEQ ID NO: 10941 - DNA, 201 bp, Homo sapiens
tcatgtgaatgtacacagggttcagttccttgcaggctgttggctgaggcctcccttgactccctgccacacaggcctcgccacggagtatctcagaacayggcaccttgctcaccagggcaagcaatagagaggacaagagagagtccaacaagacagaaagtgctagcaagagggcaggaaccatcttttctcacctca

SEQ ID NO: 10942 - DNA, 201 bp, Homo sapiens
aaaacaaatcaggaagtagataatctctaggttttttagcaagtcagtttctgcgctaccattattagcctgttggcttttcattttgttgttacttcatkgtcaaaaaatggctgcagtggtttttatctgaatgtcctacctgagtctacctctgaaaaaaggaagaagcaatagtgttaactatttctgttttgtttg

SEQ ID NO: 10943 - DNA, 201 bp, Homo sapiens
ttttgtttgtgtttcttttaataaggaaagcaaattttccaaaaaagcccctgatatatcattagccagaactgactacaaaagagatccagaaagtatcrtggaatagatttatcataaatgttttagatcaattattattattaagcatctgggattttcacaggattctgcttctcttgagacaaggatatcttgatt

SEQ ID NO: 10944 - DNA, 201 bp, Homo sapiens
cctgcgtgcttcctggctcactcatgtgaatgtacacagggttcagttccttgcaggctgttggctgaggcctcccttgactccctgccacacaggcctckccacggagtatctcagaacatggcaccttgctcaccagggcaagcaatagagaggacaagagagagtccaacaagacagaaagtgctagcaagagggcag

SEQ ID NO: 10945 - DNA, 201 bp, Homo sapiens
tggtcagatgacaaaaagagtttctgctactgagatgggaaagtttcctggactcctttacaggacttgcgaagggggtggcttatttgcttggctgcctmgctgaattcaggagggagcacacgaatagacgaatgcaggaaccggggtgaacgaaccctagaactggctggtccctcctctctggtggaagcaggctct

SEQ ID NO: 10946 - DNA, 201 bp, Homo sapiens
tcttcattccacacccgcagacttaccccagaacttaccagcttaagacaacaacatttacagtttccgtgggtcaggaagccaggtgccactcacctgcrtgcttcctggctcactcatgtgaatgtacacagggttcagttccttgcaggctgttggctgaggcctcccttgactccctgccacacaggcctcgccacg

SEQ ID NO: 10947 - DNA, 201 bp, Homo sapiens
tattttgcatattttaagactttatgtacatcatgtcacacgctacatatccttcttcaacttgctctattcactcattattctgtttttcacattttctrcattgtaatgcatacagatctaatgcattcttttagtcactacacattctattttatatatgcaccacaagtcatttgcccattctcctgttaatgaaca

SEQ ID NO: 10948 - DNA, 201 bp, Homo sapiens
atgttctgatagaacaggttgggagatgggagtggaggagaaggaatatggctatgaattggtcagatgacaaaaagagtttctgctactgagatgggaargtttcctggactcctttacaggacttgcgaagggggtggcttatttgcttggctgcctagctgaattcaggagggagcacacgaatagacgaatgcagga

SEQ ID NO: 10949 - DNA, 201 bp, Homo sapiens
catgttctgatagaacaggttgggagatgggagtggaggagaaggaatatggctatgaattggtcagatgacaaaaagagtttctgctactgagatgggaragtttcctggactcctttacaggacttgcgaagggggtggcttatttgcttggctgcctagctgaattcaggagggagcacacgaatagacgaatgcagg

SEQ ID NO: 10950 - DNA, 201 bp, Homo sapiens
taatggattattttcgagcatccatgattcctctcatgaaataattgtgttccccacttccaggttgtggtgggattttccaggctcccagtggagagatwcattctccaaattaccccagtccttataggagcaacacagactgttcttgggtcattcgggttgacagaaatcatcgtgttctcttgaacttcactgact

SEQ ID NO: 10951 - DNA, 201 bp, Homo sapiens
accactgaacagctgagatccaggggtctccttcaatgcgtaatcccatccagaaggaaggaaaaaaaagaaatctctttaagtcacgtgaaaatgccacrtttcttaatcttgcagagctgacaggcaaaaatgctatgctgttcatgaccttgtgcaggattgaaatataattccgcaacatgctgcgacctagtattc

SEQ ID NO: 10952 - DNA, 201 bp, Homo sapiens
taaagtaacctgaacttggataaagttccaagtttttccaggagatgtgagtgcaaacctcagcaacaacatttttaacaatcaccctaatgaggcctctscacagatcctgctgtggtggttgtttggggtggggaacatctgagcagatgccctgagaattccctaggtcccatccttctggatctccagtgattcagc

SEQ ID NO: 10953 - DNA, 201 bp, Homo sapiens
tatgataaaaggaagcattataggcaaaatatgattttaaattaatgctggagcagattaccttacatggtaacatttcagtggattaatttttacatatmaccttgagatacttaagaaaagattatggagatagacaatttaatatttttagtaggccaggtgtttatttgacagtctaaaagggtatgaaattctgag

SEQ ID NO: 10954 - DNA, 201 bp, Homo sapiens
ataattaatgattcatttctcaagacatttaattttcctcttgttttctgcctgcagcctgcatggttaatgcattttgacacttctcactaaggataaaygacaaatgataaaaccaacaatttttgtccacttattttactcaaagctccgttaagaaaaataatgaaaaaaattttaatttcagtgactaacaggagt

SEQ ID NO: 10955 - DNA, 201 bp, Homo sapiens
catctcagtaaggtatagagaaattcacaaatagagagccttcaattctttaggttgagatataattaatgattcatttctcaagacatttaattttcctyttgttttctgcctgcagcctgcatggttaatgcattttgacacttctcactaaggataaatgacaaatgataaaaccaacaatttttgtccacttatttt

SEQ ID NO: 10956 - DNA, 201 bp, Homo sapiens
caccttgaccactatcatcttccattaaatcatttccttattccttccccttttccactaaagtccatttcaagtcctcgtgatagtgtgggggacttcartcaaaggcatttccctccagtctttataacatgcatttcatctcttgccaaatccttgctgatgtcatcctgttcaccccagatgcttatatcacagttt

SEQ ID NO: 10957 - DNA, 201 bp, Homo sapiens
caccctccaccctcaggtaggccccagtgcctgctgtttccctgtcctgtgtccatgtgttctcagcacttagctcccacatataagtgagaacatgcagyacttggttttctgtttcctgcattagtttgctgaggaaaatggcctccagctccattcacattcttgcaaaggacctgatcttgctcttttttatggctg

SEQ ID NO: 10958 - DNA, 201 bp, Homo sapiens
ttggctgcctagctgaattcaggagggagcacacgaatagacgaatgcaggaaccggggtgaacgaaccctagaactggctggtccctcctctctggtggragcaggctctgtgcacggcccacggcagcgtccaagcttcttacaatgctcttttagctctgccatctcggagagggtgtctgcgaccccaagagcccca

SEQ ID NO: 10959 - DNA, 201 bp, Homo sapiens
ctggtggaagcaggctctgtgcacggcccacggcagcgtccaagcttcttacaatgctcttttagctctgccatctcggagagggtgtctgcgaccccaaragccccaaagggcatgtgttgcaatcagtgctcttttagcatttgccgtccatggacagctaagtgttaaccagctcagtggagggtcagggtgacagcc

SEQ ID NO: 10960 - DNA, 201 bp, Homo sapiens
gctggatagattgcaaaaattttctcctattctgtagattgcctgttcactctggtgatagtttcttttgctatgaagaagctctttagtttaattagatsccatttgttaattttggcttttgttaccattgctcttggtgtttaagtcatgaagtctttgcccatgcctatgtcctgaatggtattgcctgggttttct

SEQ ID NO: 10961 - DNA, 201 bp, Homo sapiens
atacttttatggccaattgatatatgaaaatgatgccaaaacatatcaatggagaaaaatcattttttcaacaaatggtgctcaatagccacatgcaaaaytatggtgctggaccccttccttatagcatacacaaaaattaactaaaaatggattatagacctaaatgtcagagctaaaaccatgaaactcttaggagaa

SEQ ID NO: 10962 - DNA, 201 bp, Homo sapiens
ccagactggccaaatcttcatattttgccacatttgcttcaagttcttttgttttctcccaaacagaaatgaactgttcaagacacaggtgaagtcccacrtgctcctatcattgatcccatgccctgttccccgtcccagaggaaactgctaatgagatttctggtttgtgattcccatgaaggtttttatagttttttc

SEQ ID NO: 10963 - DNA, 201 bp, Homo sapiens
cactctggtgatagtttcttttgctatgaagaagctctttagtttaattagatgccatttgttaattttggcttttgttaccattgctcttggtgtttaartcatgaagtctttgcccatgcctatgtcctgaatggtattgcctgggttttcttctagggtttttatgattttaggttttacatttaagtctttaatcca

SEQ ID NO: 10964 - DNA, 201 bp, Homo sapiens
gactgacatttcagtcaggtggtcacgagccatttaatcaccccagggttttgattacagcagagaggggcagccgctgaagtgctctgcatcacgtccaygtcaatcacgtggtctttagtgcttaggcaaagcatgcgtgattactggtctttatttcgtgcaatttaaaaatgtatgctcagctttactttagtatgt

SEQ ID NO: 10965 - DNA, 201 bp, Homo sapiens
ttccaacaatctcagggaatatattcctgtttttttttttttttttttagaaataaaaatacagatattactgaggaagctacaattcatttccccctcaktcatgaggggtgcaaacgatgactgacatttcagtcaggtggtcacgagccatttaatcaccccagggttttgattacagcagagaggggcagccgctga

SEQ ID NO: 10966 - DNA, 201 bp, Homo sapiens
ttttcttctagggtttttatgattttaggttttacatttaagtctttaatccatcttgagttaatttttgtataaggtgtaaggaaggggtccaatttcasttttctgcatatggctagccagttttcccaacaccatttattaaatagggaatcctttcctcattgcttgtttttgtcaggtttgttaaagatcagatgg

SEQ ID NO: 10967 - DNA, 201 bp, Homo sapiens
gttactgtaggcttgtagtatagtttgaagtcaggtaacgttatgtctccagctttgttctttttgcttaggattgtcttggctgtacaggctcttttttkgttccacatgaaatttagagttttttttctaattccgtgaagaaagtcaatggtagcttgatgggtatagcattgaatctataaattactttggacatta

SEQ ID NO: 10968 - DNA, 201 bp, Homo sapiens
aaatgtatttaaagtacctatcagtgtctggttcagataagtatttgctgctattcctaatttttctattacaatgactcctgcttctattactattaackctatgttaaagatcttaaggaatcttttaaaaaaattttctccctgagcaagatgaaacttagtaaacaagataaaaaatccagtagaaaaaaattcctc

SEQ ID NO: 10969 - DNA, 201 bp, Homo sapiens
gcttaggattgtcttggctgtacaggctcttttttggttccacatgaaatttagagttttttttctaattccgtgaagaaagtcaatggtagcttgatggrtatagcattgaatctataaattactttggacattatggccattttcatgatattaattcttcctatccatgagcgtggaatgtttttccatttgtttgtg

SEQ ID NO: 10970 - DNA, 201 bp, Homo sapiens
ccattctgctaagtgagccatgctgggaatcccatgcacgttcactggaatggaatgcaggacagatgccaaccacttggaaagccacaggagcccagtayaagactttctcaaatgctactgaggatgcttgattgcaggttcagatgcaaaggatgggggactcccaccctatttccagagctgctgtggttttctttc

SEQ ID NO: 10971 - DNA, 201 bp, Homo sapiens
ccgtgaagaaagtcaatggtagcttgatgggtatagcattgaatctataaattactttggacattatggccattttcatgatattaattcttcctatccaygagcgtggaatgtttttccatttgtttgtgtcctctcttatttccttgagcagtggtttataattctccttgaagagatccttcacatcccttgtaagtt

SEQ ID NO: 10972 - DNA, 201 bp, Homo sapiens
tacccattctgctaagtgagccatgctgggaatcccatgcacgttcactggaatggaatgcaggacagatgccaaccacttggaaagccacaggagcccartacaagactttctcaaatgctactgaggatgcttgattgcaggttcagatgcaaaggatgggggactcccaccctatttccagagctgctgtggttttct

SEQ ID NO: 10973 - DNA, 201 bp, Homo sapiens
tgtgcatatatatagacacatatataatatatatgtatgtgtgtgcatacatatatatgaaatgtaatcaacagtttgcccctattttaactttttaaaarcagagaattaggttgggtacggtggctcacgcctgtaatcccagcactttaggaggccgaggcaggtggatcatgtgaggtcgggagtttgagatcagcc

SEQ ID NO: 10974 - DNA, 201 bp, Homo sapiens
attcaacttggacctgtgtacctcccccaccatggagatccaaatatttatatgaagtgtaaagcagaaagaatgaggagagtgggatctggaggaaagawggaataatcccgttaggttggagtcacagtgcaactaactcttaactcactccagcttgaatggaccattattgatcagagtcaacgtttgccatttgcc

SEQ ID NO: 10975 - DNA, 201 bp, Homo sapiens
aaattagccaggcgtagtgggacattcctgtagtcccagctactgaggaggctgaggcatgagaatcgcttcaacccaagaggtggaggttgcagtgagcygagatcataccactgcactccagcctgggtgacagaccgaggctccatctcaaaaacaaacaaacaaacaaaacaacgataccaaccaaaacccagacaa

SEQ ID NO: 10976 - DNA, 201 bp, Homo sapiens
ctcatcttaccagtgtggacactgaagcttagaaaggttagtggcttgcccaaagttccacagctagaaaacgtcaaagcacatatgtgattccagactaygttatggccacacttcttcaactctatcataaccaaggtatctatataagagctctcccctaaagttaattatgtaggaatttaaataaacacacacaca

SEQ ID NO: 10977 - DNA, 201 bp, Homo sapiens
aaaccctgtctctactaaaaataaaacaaataaaaaaaaattagccaggtgtagtggcacattcctgtaatcccagctactcgggaggctgaggcaggagaattgcttgaatccaggaggcggagtttgtagtgagcagagacagtgccactgtactccagcctggccaacagagtaagactccatctcacaaaaaaaaaa

SEQ ID NO: 10978 - DNA, 201 bp, Homo sapiens
gatggctaacacctcacacttgcagtctgagaaagctcccccagaaagagcattcgtgtggcggagcatagagactgggcactgccaacaagcacagggayggcctaccagggctgccgctgctcttcaaggggccgccagggccatctgccgcagagcgcttttgtaaaaaaatggccacctaggtagcatgaggcattt

SEQ ID NO: 10979 - DNA, 201 bp, Homo sapiens
ataaaatggtatgtctgaatagataaaattttcccttgaaatcctattaactttttccagcaaactattacagagggcattgtacaagggtcaaaaaacatttttttttcctttgaggagggaggactatttgcgacctggtaacctcacactaaaataaactccaaaataaatttcccagtgggtatgctatgtgaattt

SEQ ID NO: 10980 - DNA, 201 bp, Homo sapiens
taattataactttattgtaacttaacggttttctcctaaattaagcattgtatatttttgatggcctttcggtgagttgaatttggaattattttccacgkgctgttgcccactttgaactgactgaacctttctgttttaacaggttgtggtggagagctgtctggggccacaggctccttcagcagccccgggttcccc

SEQ ID NO: 10981 - DNA, 201 bp, Homo sapiens
aaggcaaagatacattgtgagttttagaaaagtctagttttgtgatttttgtaatggtccacagaaggcatttgtatgttttttcatttctttctttacattttttttttttgaggttggtcagagagaaaaatatgtgagttttgccaacagttgtctttgatcctcagagatgtgcttttccattgctagttcagttga

SEQ ID NO: 10982 - DNA, 201 bp, Homo sapiens
aaataattcagggcaccaggtccctcgtggtgtttgatgtttagttgtgagagaggtttgtgcatgcgagcagtgcagtctctctggattttatcctcggrtcaagtccagctgcacaggggctggggctggcttccagcatcacagtgtcccagactctagagcttcacttccagccaaatactattagctgttaggacc

SEQ ID NO: 10983 - DNA, 201 bp, Homo sapiens
aactccacaccgatgctctcagccataacaccacataccccgggagcactctcacagtgtcctgtcaccctcacagggatcatggggaagtgttcctgctkcccccaagtctaccattctattgacactgccgcaaagagaaatcaatgttttgcatgactccatagataagcaggtgccatttattataatcacctcttt

SEQ ID NO: 10984 - DNA, 201 bp, Homo sapiens
tttctttcgactcatttgaggatgaaatggcaacaaaaaggtgtttaaaaactcaaattaaaaaatgcttgttccagcaactgcagagtagctcattagasccccttatggatgacgtgtctgtcatgttatggtcatgccatttctcttgtgcaacattgacggtgaaagagcaaaaatacaaaatgagaaccagaagtt

SEQ ID NO: 10985 - DNA, 201 bp, Homo sapiens
tcctacaaattggagcacaaaccaaaataggactcatgatcttgccgagcgttgcacgtataacagtgtgctgggcaccataatcgtgatttggtaaagcrtaatggagaaagctacagaaaggaggatgcttttgaattgggctttaaaggaggctttggcagaaagagggggggaggaaagagatgaaacatttccagg

SEQ ID NO: 10986 - DNA, 201 bp, Homo sapiens
atgtaagttcatttcagtatatttttatttttgtaaaattgaagtttcaattgttataatcatgaccactagtaacatttattcaactgtctgtatgcaayttcaggcaataaatcttgcttaaatattaggcaaccttgaatataaggtaatatgttatttttgcaataagaaattttaacttaaaaagctttttgataa

SEQ ID NO: 10987 - DNA, 201 bp, Homo sapiens
caggcacctcccttatctaataaatggctaatataatttgtcttcagtaggatgactaacagctggatacccagtgcttaaaaatcaattgaaacaatacrgctttaaagagctgagaattattaaaccaatgctatgaatcagtgctatttcacatctcttgctatggactgatttcccaatagaaatgtttttaatgac

SEQ ID NO: 10988 - DNA, 201 bp, Homo sapiens
atggtatttgaacaggtatatttcatatttaatgtattaaattgtgaatacagagaactatctatgtttttaggtttcagtgtaacttctggactcattgrcctcatattacttaacttacatggaaggagagtaataacctctattttttgttggttgtttttatgtttgttctctgtgtataagagatcagaaaatgtt

SEQ ID NO: 10989 - DNA, 201 bp, Homo sapiens
tgaatcagtgctatttcacatctcttgctatggactgatttcccaatagaaatgtttttaatgacttgatgttttattgctgtgggtgaggaatatccttsagaagagatgtgtttggaatgagtaatttggtatcattccatgtgaagaaaatgttgaatagtcaagtaagattaatacacatccaactacatccttgtt

SEQ ID NO: 10990 - DNA, 201 bp, Homo sapiens
gaagaaaatgttgaatagtcaagtaagattaatacacatccaactacatccttgtttgagatagttgtctgttgagagaaagggcatattgggtattgcasattgcgtagcaatagtcctggcccctacccactagatactacccatcacaccgagtgtgacaatagaaaaatgactacaaaccttgccagaggtcccaaa

SEQ ID NO: 10991 - DNA, 201 bp, Homo sapiens
aagggtgaagattaaacatattctctcagtttgtgattggttatataaaacaccataccagctatgaatgatggttattctttgttaagtcattcaaataygatttttaaaaatttaaaagtgaaaatcgtgttttttagagtaagtgtagtgtttgagagaaattacttcatccaataaactgctaatgtttgcaatccc

SEQ ID NO: 10992 - DNA, 201 bp, Homo sapiens
ctctgtgtgtgggtcaatgagtctgtctgttctgtcaactcagggatactgggtcattgctttcatttgatgtcctttttttagcttagtaagtttcattrctgggtctgaaatattaatagaccaatgctatactcctccccgctctctttatccctcttttctgcctttcctgttgtctcccttctgtctgtcttattc

SEQ ID NO: 10993 - DNA, 201 bp, Homo sapiens
ctgcactctgactcccagtttctctttgcctttgaggataccacagaccacacgtcccaacttacatggatagttgtgccccaagggtttagggatagccytcatctgtttgctcaggcactggcccaagatctaggtaacttctcaagtccaggcactctggtccttcaatatgtggatgatttacttttggctacctgt

SEQ ID NO: 10994 - DNA, 201 bp, Homo sapiens
attggtttgctgttctggacctcaaggatgccttcttctgtattctcctgcactctgactcccagtttctctttgcctttgaggataccacagaccacacrtcccaacttacatggatagttgtgccccaagggtttagggatagccttcatctgtttgctcaggcactggcccaagatctaggtaacttctcaagtccag

SEQ ID NO: 10995 - DNA, 201 bp, Homo sapiens
gggaggctgaggcaggagaatcgcttgaacctgggaggtgaaggttgtggtgagccaagattgtgcccagcctgaggaacaagagcaaaaaaatccatctaaaaaaaaaaaaaaaaaagaaagaaaaaaagacatatggccagatggaaagagctgattgatgcatgatatcattgcttggtgatacggctttagaaaagc

SEQ ID NO: 10996 - DNA, 201 bp, Homo sapiens
tgacttcgatgtggagtatcattcaaggtgcaactttgatgtcttggaggtaggaagtgagatggttttttcagcacattccaaagtttggggtagaacargaaatcactctgccaagattccgaattctttccagtagtcagcagtgttctattcttagacattttaatgagcatcagcccttcggtgatcatttggtag

SEQ ID NO: 10997 - DNA, 201 bp, Homo sapiens
acaggttcgtctgaaacctagtagaatgtttttacatgaatacactgctttggagcaattgtgtatctgcagctttataaattacagtaaggctgattccaaaaaaggataatgcatttctagccctgcatccctgggtggtagaaaggaagctgtctaggtgtgctcgaatttccctaaggcaccagctttaaatgtctt

SEQ ID NO: 10998 - DNA, 201 bp, Homo sapiens
gggaggcaaagatagagggagggagggaaagatagagggagggagggaaagatggagggagggatggaaagatggagggagggaaagatagagtgaggaakggaaagatggagggagggagggaaagatagagggagggatggaaagatggagggagggaaagatagagtgaggaagggaaagatagagggagggagggag

SEQ ID NO: 10999 - DNA, 201 bp, Homo sapiens
gagaaacagtgaactggaagataagtcaagaatctactcagaaaaaagtatggataaaaaaaggatgaaaaatatataagagaggttaagacacatagaasacactcagaaaatatataacacacagttaattggagtctcacaaggaaaagagagatatatggaacagaagcaaactttgaagagctactgactaaaatt

SEQ ID NO: 11000 - DNA, 201 bp, Homo sapiens
tgatggagggagggaaagatggagggagggaaagatagagggagggagggaaagatagagtgagggaggcaaagatagagggagggagggaaagatagagkgagggagggaaagattgagggagggaaagatggagggagggaaagatagagggagggagggaaagatagagtcagggagggaaagatggagggagggaaa

SEQ ID NO: 11001 - DNA, 201 bp, Homo sapiens
gtaccccaaagtccaacatcttacataatatctctgcagtctcagttcatataaagccaatccttcattttggagacattcaagttaatgtcctgttcctrttgcttagacagagttattagcaaagagaaaaatattcagttgccagtgatgctgtcagataatgttggggttcaggagatttttaatagagttcaagtg

SEQ ID NO: 11002 - DNA, 201 bp, Homo sapiens
agatggagggagggaaagatagagggagggagggaaagatagagtgagggaggcaaagatagagggagggagggaaagatagagggagggagggaaagatkgagggagggaaagatggagggagggaaagatagagggagggagggaaagatagagtcagggagggaaagatggagggagggaaagatagagggagagagg

SEQ ID NO: 11003 - DNA, 201 bp, Homo sapiens
ggaaacaagtcttctttaaatatttactgttttacaaacaaatccatgacagaaaccagtctctctctctcccctcctcttcctctctccctctcttttcctctctctctctctcttttcctctctctctctccctgtctttctgtccctctttctttccctcttcctcttgctctctctccctctcttcctctttccccc

SEQ ID NO: 11004 - DNA, 201 bp, Homo sapiens
aagaggtggaggttgcagtgagccgagatcataccactgcactccagcctgggtgacagaccgaggctccatctcaaaaacaaacaaacaaacaaaacaaygataccaaccaaaacccagacaattggactatgagtgaaattcataaagtggccatcattgcataatcaagtgttccctctaaagaagttttctctggct

SEQ ID NO: 11005 - DNA, 201 bp, Homo sapiens
agatagagtgagggaggcaaagatagagggagggagggaaagatagagggagggagggaaagattgagggagggaaagatggagggagggaaagatagagkgagggagggaaagatagagtcagggagggaaagatggagggagggaaagatagagggagagagggaaagagagtgagggagggaaagacagagtgaggga

SEQ ID NO: 11006 - DNA, 201 bp, Homo sapiens
gaaacaagtcttctttaaatatttactgttttacaaacaaatccatgacagaaaccagtctctctctctcccctcctcttcctctctccctctcttttcctctctctctctctcttttcctctctctctctccctgtctttctgtccctctttctttccctcttcctcttgctctctctccctctcttcctctttccccct

SEQ ID NO: 11007 - DNA, 201 bp, Homo sapiens
gatagagggagggagggaaagatagagggagggagggaaagattgagggagggaaagatggagggagggaaagatagagggagggagggaaagatagagtsagggagggaaagatggagggagggaaagatagagggagagagggaaagagagtgagggagggaaagacagagtgagggagggaaatatagagggagggag

SEQ ID NO: 11008 - DNA, 201 bp, Homo sapiens
gctctttgttacccattctgctaagtgagccatgctgggaatcccatgcacgttcactggaatggaatgcaggacagatgccaaccacttggaaagccacrggagcccagtacaagactttctcaaatgctactgaggatgcttgattgcaggttcagatgcaaaggatgggggactcccaccctatttccagagctgctg

SEQ ID NO: 11009 - DNA, 201 bp, Homo sapiens
aaacaagtcttctttaaatatttactgttttacaaacaaatccatgacagaaaccagtctctctctctcccctcctcttcctctctccctctcttttcctctctctctctctcttttcctctctctctctccctgtctttctgtccctctttctttccctcttcctcttgctctctctccctctcttcctctttccccctc

SEQ ID NO: 11010 - DNA, 201 bp, Homo sapiens
atcatttggtagacatgggattaatgtgtggtttgggttttcctgaagcaatgcctgagggccttgcagcagctgagttaggaggtaatgccaggaagccrgagcccaggacgagtgagtgaaggaaaggaggagggggaaccagcagagggagcccctgggggcaacttgggctccatccgctgggaccttctgaaggac

SEQ ID NO: 11011 - DNA, 201 bp, Homo sapiens
gaggctgaggcgggcggatcacgaggtcaggagatcgagaccatcctggctaacacggtgaaaccccgtctctactaaaaatacaaaaaattagctgggcrtggtggcgggcgcctgtagtcccagctacttaggaggctgaggcaggagaatggcatggacccgggaggcagagcctgcagtgagcggagatcgcgccac

SEQ ID NO: 11012 - DNA, 201 bp, Homo sapiens
aagtatggaaccagcagagagaggtcctcatcctaacattgcccagtttttcctcaaccccatccgtgccccttttctttttctttttctttttcttttcttttttttttttttgagacagagtttctatcttgtcacccaggctcgagtgcaatggtgtgatattggcttactgcaacctctgcctcccgaattcaagtg

SEQ ID NO: 11013 - DNA, 201 bp, Homo sapiens
atgtttcctctattttggagaagttcgtattccaaagtgggaattccattagcagctataccgccatattataacatgtgaaaatacctcatggactctcratcctcaaaatcactttgcacctccatgtgaattatctctcctgtgccctaaatgtcttattcttcaccacatttttgcaccctgctaagatcaaaggca

SEQ ID NO: 11014 - DNA, 201 bp, Homo sapiens
aacaagtcttctttaaatatttactgttttacaaacaaatccatgacagaaaccagtctctctctctcccctcctcttcctctctccctctcttttcctctctctctctctcttttcctctctctctctccctgtctttctgtccctctttctttccctcttcctcttgctctctctccctctcttcctctttccccctct

SEQ ID NO: 11015 - DNA, 201 bp, Homo sapiens
ggcggatcacgaggtcaggagatcgagaccatcctggctaacacggtgaaaccccgtctctactaaaaatacaaaaaattagctgggcgtggtggcgggcrcctgtagtcccagctacttaggaggctgaggcaggagaatggcatggacccgggaggcagagcctgcagtgagcggagatcgcgccactgcactccagcc

SEQ ID NO: 11016 - DNA, 201 bp, Homo sapiens
agtatggaaccagcagagagaggtcctcatcctaacattgcccagtttttcctcaaccccatccgtgccccttttctttttctttttctttttcttttcttttttttttttttgagacagagtttctatcttgtcacccaggctcgagtgcaatggtgtgatattggcttactgcaacctctgcctcccgaattcaagtga

SEQ ID NO: 11017 - DNA, 201 bp, Homo sapiens
cccaattcctgatgtgcttaagaacaagcatttcctaatctgatagggaagtcatttctacagttgcttctaaatttaaaaacaatttcttttttttcatktcaaggcctagcaaaggttaaaaaacacacacacgcacaacaacacaacacacctacaaccttgctgtattaacaggcgtatgcaggcgtatgagattgg

SEQ ID NO: 11018 - DNA, 201 bp, Homo sapiens
aacagcttgtataatttcctgagggatttccctccctatcacttaatgtttcctctattttggagaagttcgtattccaaagtgggaattccattagcagstataccgccatattataacatgtgaaaatacctcatggactctcaatcctcaaaatcactttgcacctccatgtgaattatctctcctgtgccctaaatg

SEQ ID NO: 11019 - DNA, 201 bp, Homo sapiens
acggtgaaaccccgtctctactaaaaatacaaaaaattagctgggcgtggtggcgggcgcctgtagtcccagctacttaggaggctgaggcaggagaatgkcatggacccgggaggcagagcctgcagtgagcggagatcgcgccactgcactccagcctgggcgacagagcaagactccgtctcaaaaaaaagaaaaaaa

SEQ ID NO: 11020 - DNA, 201 bp, Homo sapiens
aaggggtcttatgtcttgaagatctggaaagggctttacatgtccttgtatgcctgggatctagcacagaggcctggcatacaggtcccagaataaaaatscttgctaatataaatgtgatcataaagacagcaatgattatcatgaaattttaacttgtttaccagaaaaagtgcatgacctaaaacttggcaaatgtgc

SEQ ID NO: 11021 - DNA, 201 bp, Homo sapiens
ctgccatgttgtcattcattctccttgtcattatcttcattatttaggccgttactgtggcaccgacatgccccatcctatcacatccttcagcagcgccytgacgctgagattcgtctctgattctagcatcagtgctgggggtttccacaccacggtcaccgcatcagtgtcgggtaagaaaccctagcacctgactct

SEQ ID NO: 11022 - DNA, 201 bp, Homo sapiens
aaattagctgggcgtggtggcgggcgcctgtagtcccagctacttaggaggctgaggcaggagaatggcatggacccgggaggcagagcctgcagtgagcrgagatcgcgccactgcactccagcctgggcgacagagcaagactccgtctcaaaaaaaagaaaaaaaaatcaaaaagaaaagaaaaaagaaaaaagaaaa

SEQ ID NO: 11023 - DNA, 201 bp, Homo sapiens
ttgcagaaattccttctaatccaccacactgcatggcccttggtcttcagtttgcagaattgttcccttattttatatgacatgaatgttttaaaatgtgwgatggaaatactatctattcttttacattgataatggctctagcgttctttctcctttattttatagtgtctgatgcagtctttgctctgatactcactt

SEQ ID NO: 11024 - DNA, 201 bp, Homo sapiens
gctgggcgtggtggcgggcgcctgtagtcccagctacttaggaggctgaggcaggagaatggcatggacccgggaggcagagcctgcagtgagcggagatygcgccactgcactccagcctgggcgacagagcaagactccgtctcaaaaaaaagaaaaaaaaatcaaaaagaaaagaaaaaagaaaaaagaaaaaaaaga

SEQ ID NO: 11025 - DNA, 201 bp, Homo sapiens
ttgttcccttattttatatgacatgaatgttttaaaatgtgagatggaaatactatctattcttttacattgataatggctctagcgttctttctcctttrttttatagtgtctgatgcagtctttgctctgatactcactttatttctattttcttccagcttgtggtggaacgttctacatggctgaaggcatcttcaa

SEQ ID NO: 11026 - DNA, 201 bp, Homo sapiens
cacatttatgactgtaacagcttgtataatttcctgagggatttccctccctatcacttaatgtttcctctattttggagaagttcgtattccaaagtggsaattccattagcagctataccgccatattataacatgtgaaaatacctcatggactctcaatcctcaaaatcactttgcacctccatgtgaattatctct

SEQ ID NO: 11027 - DNA, 201 bp, Homo sapiens
ttccatgtattagcaagctcatagttttgggtaaagagagctttattcaatgctatgtcaaaatgtgaccataacgaggtcaaagattaaactgaggttcaatgaatgaagtaactctctctgaccacagtcatcattatcagtacagctctatcttctcttctgacttattctgtcaagtgacttgtccacagaattctc

SEQ ID NO: 11028 - DNA, 201 bp, Homo sapiens
tccatgtattagcaagctcatagttttgggtaaagagagctttattcaatgctatgtcaaaatgtgaccataacgaggtcaaagattaaactgaggttcaatgaatgaagtaactctctctgaccacagtcatcattatcagtacagctctatcttctcttctgacttattctgtcaagtgacttgtccacagaattctcc

SEQ ID NO: 11029 - DNA, 201 bp, Homo sapiens
ggttgtgaattgaacttagtattgaatttccaaggagcgtaactggaaaaaaatcactgacaaaggaaactgatgcttcctccttcctcagccccaagaaragatgctataatgagtaatattttcatttccttccgcattcacatttatgactgtaacagcttgtataatttcctgagggatttccctccctatcactta

SEQ ID NO: 11030 - DNA, 201 bp, Homo sapiens
ccatgtattagcaagctcatagttttgggtaaagagagctttattcaatgctatgtcaaaatgtgaccataacgaggtcaaagattaaactgaggttcaatgaatgaagtaactctctctgaccacagtcatcattatcagtacagctctatcttctcttctgacttattctgtcaagtgacttgtccacagaattctcct

SEQ ID NO: 11031 - DNA, 201 bp, Homo sapiens
ggtccacactaccttaatgagctgtagcactcactgcgaaggtctgcggcttcattcctgaagtcagcgagaccatgaacccaccggaaggaaaaaactgyggacgcatctgaacatctgaacaaacaaaatccggacacaccatctttaagaactataacactcaccacgagggtccgcagcttcattcttgaagtcagc

SEQ ID NO: 11032 - DNA, 201 bp, Homo sapiens
caacatttccaggaatctttgagtcagtgctcgcaacaactgcaaatttttagagtttatagtctcttgtaagatgtgaagactgagtgggagagtgtagmacaaagaaataggggtgaacgcatcgtgatatgagatgtggggttgtgaattgaacttagtattgaatttccaaggagcgtaactggaaaaaaatcactg

SEQ ID NO: 11033 - DNA, 201 bp, Homo sapiens
catgtattagcaagctcatagttttgggtaaagagagctttattcaatgctatgtcaaaatgtgaccataacgaggtcaaagattaaactgaggttcaatgaatgaagtaactctctctgaccacagtcatcattatcagtacagctctatcttctcttctgacttattctgtcaagtgacttgtccacagaattctcctg

SEQ ID NO: 11034 - DNA, 201 bp, Homo sapiens
cataattataactttattgtaacttaacggttttctcctaaattaagcattgtatatttttgatggcctttcggtgagttgaatttggaattattttccaygggctgttgcccactttgaactgactgaacctttctgttttaacaggttgtggtggagagctgtctggggccacaggctccttcagcagccccgggttcc

SEQ ID NO: 11035 - DNA, 201 bp, Homo sapiens
ccgtccaggccttgcttgtctacatcccgcctactccgcccacacctgagcgtgtcggtctgggctggcgtcagaatcttagcccctctggaatcaacatmcctggcgggcagtgatgaacgtctgtgtgtttgataacaggccacaggttattcagggaattagggtgtacattcttgtgaatggtaatattagccagtt

SEQ ID NO: 11036 - DNA, 201 bp, Homo sapiens
agctgatgtctaatgatgtattctgttagattttgcctcaaagtcaattaaaagatttttgctttgtttacgttttccaggttgctatggtgattgtcttyagtggagggacaggacagtaatgagggcagcattcaacattgttagttccgtgcctttgagctgaagttctcggcaaggcatgggggagagagaacacag

SEQ ID NO: 11037 - DNA, 201 bp, Homo sapiens
aatgtcattaattcaggttcctccacctgagacctaatcacacttaacattctcccacagacaagttgcattagagatatgcaagacaattgtatttcccytccaggagtacagtgagtaagcaagaacaagtgacgacagataatttcctctaaatatttgatttactggccaaagctctctgtgtgtgggtcaatgagt

SEQ ID NO: 11038 - DNA, 201 bp, Homo sapiens
agtacagtgagtaagcaagaacaagtgacgacagataatttcctctaaatatttgatttactggccaaagctctctgtgtgtgggtcaatgagtctgtctrttctgtcaactcagggatactgggtcattgctttcatttgatgtcctttttttagcttagtaagtttcattactgggtctgaaatattaatagaccaatg

SEQ ID NO: 11039 - DNA, 201 bp, Homo sapiens
ggtggcgggttaggtaaagggtaaagcatttcagacaaagtgaatggtgtaaatatcattggaacacatcaagaactgtagtttacttttgtgccagcaayagaaaagaagcttggtgagtaaatcaaaatttcagtacagattaacagactcccaccagttgttccagaataatcacattcatgtaagcaagataaaggg

SEQ ID NO: 11040 - DNA, 201 bp, Homo sapiens
aacaaaagcattcaaaccagattttctttgtaaaatatttcagatttggagggcataggagattgagtgggtggtaataaacacagaatcgactgaatagrtaacgttaaaactgttaaactagaaaagtttttaaagaagatatttatttaggacttcaaaattgtccaggtactatgctaaatgttttataaatgacct

SEQ ID NO: 11041 - DNA, 201 bp, Homo sapiens
aaaattttattatgctaaataaattaattctgcttggttgggaaaggtttcagccaaccttaaatgatgggtaagagtgtatatgttaaactgtgtattgkcaggggttgttgggtggcgggttaggtaaagggtaaagcatttcagacaaagtgaatggtgtaaatatcattggaacacatcaagaactgtagtttactt

SEQ ID NO: 11042 - DNA, 201 bp, Homo sapiens
tatacagattttctggaaatcaggtcagcacttttatttatttcattataatcttttcattatttattctcattaataatctttcctaggaagattaaggaaaaaaatatggaaattctctgcaaagctccctgctgtgcactttcttgcaagaaataaagtttgtcatttggagcctgacttaggagaaatacaggaatt

SEQ ID NO: 11043 - DNA, 201 bp, Homo sapiens
agacatacctttgtaaaacaattctattaccatcctagcttgtaaggcaatattttgtgcagaaagaacccagagcagttaaaataattgggcagggaggwtattagattttaattctaaaagttttcagaaagataagatacacgtaaaataaaaatgagtcaggaaaagagatagaagcaaactggacaggaaaggaaa

SEQ ID NO: 11044 - DNA, 201 bp, Homo sapiens
atacaggcagggcctcctgaaaatgtggaaatctttgtaatgatatgcaaagtaagacatacctttgtaaaacaattctattaccatcctagcttgtaagrcaatattttgtgcagaaagaacccagagcagttaaaataattgggcagggaggatattagattttaattctaaaagttttcagaaagataagatacacgt

SEQ ID NO: 11045 - DNA, 201 bp, Homo sapiens
tttatctgttttatttctttatctgcatgaaccatattctatcattgctcgtttatcctttcttaatatcttaatattaagggatttgcagtagatttgtsgtaatattacgaggactcagtccataaaactctgcagcattttctaaaaatgtataatattcttattaagcacatatgtatgtttttaaatcagagcttt

SEQ ID NO: 11046 - DNA, 201 bp, Homo sapiens
tgaagttttcagacggtaaagaaatataatgtctccaaagtactctgaattggctgagataataagtgtgaatatttgtgtgtctgtgcatgtgtgtgtgkgggggggggagagagagagagaaatgataaagtaatgggagcagaatacaaatacataataaatctgggtaaaaagaattcaggagctcattcttgcatc

SEQ ID NO: 11047 - DNA, 201 bp, Homo sapiens
ggcaactaagaaacatttttccttttaatctttgaagaggttattatcagagccttttaatttgaaatccaggtagcttggttacttgctgcagtaattawaatttttatttcaacagcatgtggagaaattcttacagaatcaacagggaccattcaaagtcctggccatccaaatgtctacccccacggtatcaactgt

SEQ ID NO: 11048 - DNA, 201 bp, Homo sapiens
cctcttgggcttgtatcagaataagtgaatgatagaaataaattatatgaaaatcatctgtactgtgaaaaattttaaagtacactcaaagacaaagaatrtatattttctaatcaacatttatatcaaaagttaattgttacttattaataagagaaaaatcaggttatcttaagtggcaactaagaaacatttttcctt

SEQ ID NO: 11049 - DNA, 201 bp, Homo sapiens
gtgtgcatgtgtctttatagcagcatgatttataatcctttgggtatatacccagtaatgggatggctggatcaaatggtatttctagttctagatccctraggaatcaccacactgacttccacaatggttgaactagtttacagttccaccaacagtgtcaaagcgttcctatttctccacatcctctccagcacctgt

SEQ ID NO: 11050 - DNA, 201 bp, Homo sapiens
aaaactttcttttggttccccaactaatttttttttggtcgagggaccgcctgctgatgtggacagaataaacttttcagaaagtatgcatgtgcagtgargaggctgggacacctggttctcctgagcatcaagacaaggcatttgttgcaaattctttatttgacttggaattaaaattgatttgtcatagagaattac

SEQ ID NO: 11051 - DNA, 201 bp, Homo sapiens
ggaaaatttccggaaacttcataagttccagaaatttatgaaatcaggtaaaaacggaaaatccatcaggaaaggcagagaaattcctagccaacttaggrgtttcggaaaaagaaagttatttggaataagttatagtaaaactccattctaactgactaataaaaatgagggtagattttcctcatgtttttaaagggt

SEQ ID NO: 11052 - DNA, 201 bp, Homo sapiens
ttttaaatgggtgaaatggtaaattttatgttatgcatattttaacataacaatgataataattttaactaagtacgttgcctccttatttcctacagggycaagttcaaactccctggcatagcttacaccttgtagtccccatacctgtaacctcatgtctgctatcttcccccagccccttcatctgatctatgttca

SEQ ID NO: 11053 - DNA, 201 bp, Homo sapiens
taacttcctttaattatttcttatggcattaccatttaaggataatctaaatgcgtgacctgtacatatttggagatgcatttagggggctaacatcttargtgtgtttactggaagaatagacccttgggaaattatatcggtacttttttcttttttcatccattcaacacatttttattgcatgtttctctgtcccca

SEQ ID NO: 11054 - DNA, 201 bp, Homo sapiens
taattacattcagtggtttttgtaacttcattatttattgggaattagtgatttagtcagtgggagttttgtaaaacttaagattttggcttttttccccmtcctcctggataaccagttaacccaataatggcttggccgatggaagggtaaaatgaggacagttatattttttaaatgtcattactgtcaccaaatcac

SEQ ID NO: 11055 - DNA, 201 bp, Homo sapiens
tgctttcttatatgtcatttatgccataaatcccattgttagaaggtaatgcttctaacggattccattcatgcttttgagataaatggcattgactttcwtattgatcacatggaaagctgttacctgattcctttcctgagatcacttccagcctaatgtgcatttggctggaatatggttgtctcagaataacatcat

SEQ ID NO: 11056 - DNA, 201 bp, Homo sapiens
aatgaggtgggggggaaatcttttgtgtaatgctttataaacatctgcagcttgaatccataaatggcttctcagtgattcagaatgtggagagctgcccwttatgcagctccacaaggaactcatggttacacatttcaaactttggttgagagatgttgtttttccccttaggacactcacatgggagtcaagaaggtg

SEQ ID NO: 11057 - DNA, 201 bp, Homo sapiens
gtaatctgcttccctgaatccccatcttgcttgtagttgtgaagctatgcaactttccttcctctaagcatagtctgactcgtatatgtgtagtagtgatrtgttacaggaaagaggaagcattgcattaggctgggtggggtgaagcaatggacagtaaccagggaaaagatcaaggtcgtactcttccatagcaacttt

SEQ ID NO: 11058 - DNA, 201 bp, Homo sapiens
gatgaatgaatgcatagggggatggctgggtgcatttctctcaacttttcaatttcttgaaataaataacaaaatcttaccttccctcagaagtcctggcrtggttcctttcatcttgccacagccactgataatcactttcattttctgtgtaactcaccaggcaagaagtccatgcagatttacttttagtagttcaca

SEQ ID NO: 11059 - DNA, 201 bp, Homo sapiens
actccttactggtttttggaaagcaaccaacagctaattccaacaccatgggcagcccatacagtctctaattatctgagaaaatcaaatgatgctgttayaataattacgctggtacaagttaataaaagtgccatgttacagtcaaacagctatgttgctatctataccattgagggcatagttttaaaaagtagttat

SEQ ID NO: 11060 - DNA, 201 bp, Homo sapiens
tgatctctgaagccccttaaggtctagtgctccttcttaaattcttataactaggaataacttaaaaattagaatttgtctcttaaaagcacttattagaygcctagagcactgaatattggaatgagttatttatgagaatcatcctaccctcctgaaactactcagacagatagaaacacataaatccaaagggaaatg

SEQ ID NO: 11061 - DNA, 201 bp, Homo sapiens
atgtaaggtggataggtggatgctcttatacaggaaaaaaatgttcctttcaaaagaagcctacatttccttttatatgtttaataatattataccaaagrcatctacaagattcaacaagtcatcctgtccttttttagaaacatagttctcctgaagggacttgaaaatcctgactgatgataaaagattaaagcaaga

SEQ ID NO: 11062 - DNA, 201 bp, Homo sapiens
agggaaagggccttggactgttttggagatttgtaaagtcaaaggccactgtcaacataggataggggatgttgaaacacccagatgtctggtaggaactkgttttgctcccttttaagttttaacaaaagcatcaaattgcataaacaagagccatcctgtccccatataaccattgtaatcaagatttcagtgtgcaca

SEQ ID NO: 11063 - DNA, 201 bp, Homo sapiens
gcttcctgagttcaagcgattctcctgcctcagcctcctgagtagctgagattacagcatgccaccatgcccagctaatttttgtagttttagagatgggrtttcaccatgttggtcaggctggtctcaaactcctgacctcgtgattcacccacttcagcctcctaaagtgctgggattacaggcgtgagccaccgcacc

SEQ ID NO: 11064 - DNA, 201 bp, Homo sapiens
tttttttttgagatggagttttgctttgttgcccaggctggagtgcagtggcgcgacctcggcccactgcaacctctgcttcctgagttcaagcgattctyctgcctcagcctcctgagtagctgagattacagcatgccaccatgcccagctaatttttgtagttttagagatggggtttcaccatgttggtcaggctgg

SEQ ID NO: 11065 - DNA, 201 bp, Homo sapiens
atccagaaataccatggttaccattttaatatacgtcttttttttttttttttttttgagatggagttttgctttgttgcccaggctggagtgcagtggcrcgacctcggcccactgcaacctctgcttcctgagttcaagcgattctcctgcctcagcctcctgagtagctgagattacagcatgccaccatgcccagct

SEQ ID NO: 11066 - DNA, 201 bp, Homo sapiens
ctccagtgacagtgcaggtgggatatctcagggctggaaaccagggccacagtgggcaggagtagaaaggaagaacagaaatcgggccctcctgtcagtcycccccacttctgactctacctccctctccaaactcatctaaaccaggaaaaggtgaggcaaaggtagtgctgagcaggaaatcagagataaaccaaaatt

SEQ ID NO: 11067 - DNA, 201 bp, Homo sapiens
ttcttcctgggttctgcaaactagctgagctcatactcagatctgtccctggcctgtcccagagaagtgccatgttagttactaaagcttccttcctaaaygaatgatcaccaagaggaccccatgtcatacctaggtcctttctatcccaatccaatttccacttatttctggggtccaaggtgaagcatgtaattttcc

SEQ ID NO: 11068 - DNA, 201 bp, Homo sapiens
cactgctgggacagggattgcactttgagagctactgctctggaggaaagccttgcatctgaaagcctcaggaagaattcaagcagtgtcccaatttaacmttgcactacaccagagtgattaagagcttgagctttgtagcaaaaatggcctgagttcgattccagccctccgcatattaactgagcaagatgctttaaa

SEQ ID NO: 11069 - DNA, 201 bp, Homo sapiens
agaccaattaggtaaagtcactcaaaatttttgagagtggatgctcagaggtaacactttggcatagaattgttaaatagcatgcactttaatggaagaayagaatcattaaagattggttgataacaagtcacagtgtatttaaccatcatcacagcagatgtagacagaaatggcaccactgcttatgaaggaaactgg

SEQ ID NO: 11070 - DNA, 201 bp, Homo sapiens
ggctatgaatggcttgctcatgacatattttgtatttgatgagaataccatagtgtttgataaatattcagaaatgtatcgctaaaacatatggctattckaggtattctttttcagaatcatctataggaaagctctagctgctcaggcattcctttccccactgaaattactaacaacataaagtgattatcatggtat

SEQ ID NO: 11071 - DNA, 201 bp, Homo sapiens
aggcctgtttgacaggaggaaaactgatgcttagagacgttaagtgacttgctggcattcacatagccaggagcagtgctggatggaaacccagctccacygagctccaaagcctaggcttagaatatgttagactgtataagatggacgaacttggaaggatttcagggagggaaggattttggtggactctaggcctta

SEQ ID NO: 11072 - DNA, 201 bp, Homo sapiens
gcatgacttgccccaggatccagtggtggagttgggatttccgcattatctaacatcctcccatgttagactccaatgcttatgctccttcaattcattaygtgtctggaggactttggaagctatacgtggctctcccacactacctgtcccctgtggccagcataagtgaactcttgcatgggtggcttctctctccat

SEQ ID NO: 11073 - DNA, 201 bp, Homo sapiens
tgaagaatgtgatgaggagggtattaattaaaagttgtaggccaggcgtggtggctcacacctgtaatcccagcaccctgggaggccgaggcgggcagatsacgaggtcaggagatcgagaccatcctggctaacacagtgaaaccccatctctactaaaaaatacaaaaaattaaccaggcgtagtggcgggtgcctgta

SEQ ID NO: 11074 - DNA, 201 bp, Homo sapiens
cataagaaattaccttgggcaaggttgtgagaggatttggaatctaaatggagaaaagtgtagaggcatatttttcaatcttctacttctatgtcattttycctgtgtgttggattgctaagattatgtatctattgctggcagaaatatcatatcctaaattcttggagaatgatattggttgcccaagattgtatagaa

SEQ ID NO: 11075 - DNA, 201 bp, Homo sapiens
ggaaaaggtctttttggcagtgtttcatcttcttggttcatttttgggctttcttgatagctgaaaaaaaaatctaactcaccttactattttgtttgggsatgatggtttcagcctctctgcttgaacttgttctcagttttttgtctactgttagctcatattcttccaatgcacatttttgggcattattggttatag

SEQ ID NO: 11076 - DNA, 201 bp, Homo sapiens
ttctttacatttgtttgccttatatgacattggataaattatattctttacttctataaataatcgtgaggaaaatagtgctcatgttatgttatggttgycatatcacaatgtctaagatcatgcaggggtggggaggggggatacagagattgcagaataaagacaatgctatttttaaatgttgacaatgtttatctt

SEQ ID NO: 11077 - DNA, 201 bp, Homo sapiens
acccagtgtgtggctctaggtgacatgtggccacccaagtgaggtttcggatccacctgcagtgtcagatgcttcaaggctggggtcccctgatggagagraggtggttggagatcacctgggcctcctcagcactgcctcctggctggggctggggctggggataagagagtaactgcaattgtgcttccccggcacctt

SEQ ID NO: 11078 - DNA, 201 bp, Homo sapiens
gtctactctattggtccataacctctatcgagacagtgaccttgtctgctttattcaatgcctggatcttttcctagcacagtgcccagcacatggagacwctgaatttggattctcctttttgaagtccccatatccacttcagtattggggtgattttgatgggattgtgacttaccatggtggatgcatcctgtgagt

SEQ ID NO: 11079 - DNA, 201 bp, Homo sapiens
tcgaaaacctccagctcatggctcagtcgcccaatcaagtaaatagaaaatctctttccttcacaggttattaaattgctgcttgattttgctttgatcakgaattcaggggattcagtttgaagaatgagtagcatgaaatttatacccatgaggaatttgcatttctgatgttgtcctaagattgtgggagacattagg

SEQ ID NO: 11080 - DNA, 201 bp, Homo sapiens
ttgtctcccctttttatgcccaagtttgagtgaggctcaccatcagatttaaatgtttacacattgaaaacaaatatgaagatggatatttacatggtggyttccacaataactctctatggaggagcactaggaggtagggattcattagaaatgcttctgaaatagagacagaagtcacaggttcactggggactttag

SEQ ID NO: 11081 - DNA, 201 bp, Homo sapiens
ttgttggaaatgcagaatccttggccaacccagacctactgaatcaggatctgcattttaactacactctcccacccaggtggtttatatgcacattaaartttggaagcttagactgtgctagactgcttttctcaccattgaagccaattgaacaatctctgtgcatatgtctcagattacatgtcatctcccaacagg

SEQ ID NO: 11082 - DNA, 201 bp, Homo sapiens
gctagactgcttttctcaccattgaagccaattgaacaatctctgtgcatatgtctcagattacatgtcatctcccaacaggaatatcaagtgctcctctytgtggaacttgctactgtggccagtcctaccctggctggatttgtagacatctagggcacaaggcaagacctgctatctcacatccatcttctgtggctt

SEQ ID NO: 11083 - DNA, 201 bp, Homo sapiens
ttggagaccagagggctcaacggaaaacattcttggtttatttccagccagaaaggcttgtttgagagatgcaatcagccatttagtattagcttcttgartcaaagtggatcctgaatcacagagttctctgtttctcaggagagacacacagacatctgaggagtcttgcctctctatagtggtttgcagcatggctag

SEQ ID NO: 11084 - DNA, 201 bp, Homo sapiens
gctcatttatcgctcagagggaggcacttgggacattttattcattacatgatgcaggagatttattggagaccagagggctcaacggaaaacattcttgrtttatttccagccagaaaggcttgtttgagagatgcaatcagccatttagtattagcttcttgaatcaaagtggatcctgaatcacagagttctctgttt

SEQ ID NO: 11085 - DNA, 201 bp, Homo sapiens
tcacaatacaatgagggtaaatccttgcaatcaccagttaccagcaattgtgaagcaatggatggcatagatgtcagggggtcaggagagccttgcaagcrttcagagggcttgggagtggacacatcacagttgcactctgctgggcagcgctgtaagtctctgattggattttgccttgaattttttctggtcaagact

SEQ ID NO: 11086 - DNA, 201 bp, Homo sapiens
gaaagaaaaatggaaatcataaagattgcacgacttaggattttgtcaaaatgtgtcagaggctataatataaggctagtttttggcattctgtcagtcaytgaatgtccttcgtcagatcacagctccttttggttgtgctgactttatacccatctggaatccactgaccattagctgaaataaaatcccagatgtgct

SEQ ID NO: 11087 - DNA, 201 bp, Homo sapiens
agtttggcactacagaccagctttataggacaaaaaaaccttctttcagagctcctttttctcgccttcctgacagctccctagcagacctcttcccatgygggtagggagataaggttcctagacactgggacactggtctccatgacccctctgtgctgcccacagccctatagtaatgagcgtgctaaaggcctggtg

SEQ ID NO: 11088 - DNA, 201 bp, Homo sapiens
catggagacactgaatttggattctcctttttgaagtccccatatccacttcagtattggggtgattttgatgggattgtgacttaccatggtggatgcakcctgtgagttccaaactcaacttcttaaaaaaccttgtctatcatctatccatctatctgtctgtctgtctatctatctatctatctatctatctatcta

SEQ ID NO: 11089 - DNA, 201 bp, Homo sapiens
caccatttgccccaactgtgttcctgctgcacttgaaaatgattccagctgcctctggaagattttcatcccatttctgggaaaaacattagccaataaaytctcattgaatttggcagggcgggcacaccagcaagctgacactatgtgcatacaggcttcctggaacaactgttgctgagcaaatgaagcagcatggaa

SEQ ID NO: 11090 - DNA, 201 bp, Homo sapiens
cttctgcaaaccaagcgggccgtgctgctagctactcactgcttcttgggttccctgtctttttaaagtaaccatgtcgaaggtgcttatcattatggtakgcaattttgtcggatgttagcgaacacaataattagtggtctcagcaggaaggagaataggtctaccctaaagtaccacttcccaccaaagaagaaaatc

SEQ ID NO: 11091 - DNA, 201 bp, Homo sapiens
cggcaaatgctcttctgtatttagacctgctggtttcctagccagaagtgggtgtttgcacaagtggacaaaacttgccccttaaaaaagaaaatcaaaakcttcatcattttgcagatgtatcttccctgctgaggctattagtctgctacttcaaatccttttcggaggaatatatggaattaatagcaacacatttta

SEQ ID NO: 11092 - DNA, 201 bp, Homo sapiens
gaaaccacagatgttgatcttcatgtatatctgtgcttgttaatttccaggttgaatttcacagagaacggcaaatgctcttctgtatttagacctgctgrtttcctagccagaagtgggtgtttgcacaagtggacaaaacttgccccttaaaaaagaaaatcaaaatcttcatcattttgcagatgtatcttccctgct

SEQ ID NO: 11093 - DNA, 201 bp, Homo sapiens
aaatcagctgtagaccataagccaccttcaggtagtggtttgggaaatcaagcaataacactaatattgattccttcagatatggactccagtcatagtayaacgcttcagcctactgcaaatccaaacacaggtttggtggaagatttggacaggacaggacctctttcaatgacaacgcgtaagaataacgatgctcag

SEQ ID NO: 11094 - DNA, 201 bp, Homo sapiens
ttgtgttggaccacattcaaagtcatcctggaccacacaaggcctgtgagccgcaggttggacaagcttgccctatatgaagtctgaaagtgataaaagtkctataaaaaagaaagcaaaatacgaggctaatgagtgctagggatgcttttattttctgagaaggtggtcagggaaagtgcctcctggactgttctgaga

SEQ ID NO: 11095 - DNA, 201 bp, Homo sapiens
ttaaatgtcattgaatgggatattatgaaattcccatcttagccatttaggtcaatatcctgttgtttttctcttacaggtatgggttcatagaagggcaygtggtgattccccggatccaccccaactccatctgtgcagcaaacaacacaggggtgtacatcctcacatccaacacctcccagtatgacacatattgct

SEQ ID NO: 11096 - DNA, 201 bp, Homo sapiens
acagtccaggcaactcctagtagtacaacggaagaaacagctacccagaaggaacagtggtttggcaacagatggcatgagggatatcgccaaacacccaragaagactcccattcgacaacagggacagctggtaatggatggtttaacaagtaaatttggatggaaacttccttttgggttaaacggtagacattgagg

SEQ ID NO: 11097 - DNA, 201 bp, Homo sapiens
gaaaaacctgctggatttagcttcctcctctctgccctcctgctgcaccacagcttcccttgcacatggcattttctcagcccacatctcattttttgagrcattttatattcaaaaaaaattgtgtttttagcacaattaaaaaataagcaagtttttagccaccaggatgctgctagaagaggctgggctgtgtatgtt

SEQ ID NO: 11098 - DNA, 201 bp, Homo sapiens
gctaacccattcctatttaggctgaaaacaattaagagttatgggtacttaaaaaaatcattatgtttataaaattagtgatagaaggagcatagtgttctatacagtcacacacatacacttccttatttcttttatttaaactttgagtaacatagcagtctatgtttgggtcagttttcccttttttgtaattacatt

SEQ ID NO: 11099 - DNA, 201 bp, Homo sapiens
tgcttagtagtggaatctggaaagaaagtttgtcaagtgaattgatctttggaatccttattttctatgaagatctttgatgaatacagtgtcttttttgyattctgtccctgactgttctatagaaagacatcccttgtactctttagagcaaagttggtagctcttatggtcttcatttgaattctaccactgcttctt

SEQ ID NO: 11100 - DNA, 201 bp, Homo sapiens
agccaccgcgcccggccttatttgactttttaaggagtctgtcctaaactgaacttattactgtctccaaattatttatgcaaaagaatctaacatttctrtttcttcccatagatttgaatataacctgccgctttgcaggtgtattccacgtggagaaaaatggtcgctacagcatctctcggacggaggccgctgacc

SEQ ID NO: 11101 - DNA, 201 bp, Homo sapiens
ccaggctggtcttgagctcctgacctcaggtgatccacccacctcggcctcccaaagtgctgggattgtaggcatgagccaccgcgcccggccttatttgrctttttaaggagtctgtcctaaactgaacttattactgtctccaaattatttatgcaaaagaatctaacatttctatttcttcccatagatttgaatata

SEQ ID NO: 11102 - DNA, 201 bp, Homo sapiens
tttctaacaggttccaagatgatgcttttgctgctggtccagggacctcactttgaggagtgctggttgttatgagtctggttgttaagtgctggttgttwgttgttaaagtagagaaaacccctagcacagtgcttggcacacactaaagccatcataaaccatagtgatcatcaatgatggtgctcagtaaggatgatg

SEQ ID NO: 11103 - DNA, 201 bp, Homo sapiens; identical to SEQ ID NO: 1561

SEQ ID NO: 11104 - DNA, 201 bp, Homo sapiens; identical to SEQ ID NO: 1568

SEQ ID NO: 11105 - DNA, 201 bp, Homo sapiens
cctgagatttaagggaagaggagataaaggtaagacacagatccatgaggatctctgatcttcagagtcagaagatccaagctgtggctgggcgcgggggytcacacctgtaatcccagcactttgggaggctgaggcaggcagatcatttgaggtcaggagtttgagaccagcgtggccaacatggagaaaccctacctc

SEQ ID NO: 11106 - DNA, 201 bp, Homo sapiens
ctcataaggtaaaagaaacttatttccaagcaggaccacctttattgtgtccccagatcacctcacagggcagaaaaatgcccctcagtctgggagaagayctagagagaattatggactccttactggtttttggaaagcaaccaacagctaattccaacaccatgggcagcccatacagtctctaattatctgagaaaa

SEQ ID NO: 11107 - DNA, 201 bp, Homo sapiens
gtttcatcgtcttcttgctgttaggaggtctatgaagcagagaagaactttcctttggaaaacaactaaatgaagacagtcacctcgctagaactgacacrtgggctgtttttatattcttgaaggccactctctccctacctgaaccaagacctataggtttacatgttatttacattttatatataatatatatatata

SEQ ID NO: 11108 - DNA, 201 bp, Homo sapiens
ataagaagagcactgtttcatcgtcttcttgctgttaggaggtctatgaagcagagaagaactttcctttggaaaacaactaaatgaagacagtcacctcsctagaactgacacatgggctgtttttatattcttgaaggccactctctccctacctgaaccaagacctataggtttacatgttatttacattttatatat

SEQ ID NO: 11109 - DNA, 201 bp, Homo sapiens
tctaccactgcttctttttctgtttttaagcccatggtaacttggggaaggctttgatgctcttactgttatttctactattatgaaaactcaggttttcyaaaacaatctcaagttgcggcagtggactgtgagaatagggggccccctcactccccaaacataagaagtatgtgcttttcttcttttatctatcccgct

SEQ ID NO: 11110 - DNA, 201 bp, Homo sapiens
gttctttgaccttccagaaagttaacaaacaaaatgccttgagcatctcagacaacggctgccatgaccttggctctacactggtccacctgctttgactkgtccacttttgctttgactggaccacttccacctcttggtagctattcctttgattgtgctttgtcttcaggatcacacacataaggccatgtttcatct

SEQ ID NO: 11111 - DNA, 201 bp, Homo sapiens
aagtagaaagatatgttgacagctattggtgaggaaaatagacaattatgtctcccaactgatattcttctcacagtccaggcaactcctagtagtacaayggaagaaacagctacccagaaggaacagtggtttggcaacagatggcatgagggatatcgccaaacacccagagaagactcccattcgacaacagggaca

SEQ ID NO: 11112 - DNA, 201 bp, Homo sapiens
ttctcacagtccaggcaactcctagtagtacaacggaagaaacagctacccagaaggaacagtggtttggcaacagatggcatgagggatatcgccaaacmcccagagaagactcccattcgacaacagggacagctggtaatggatggtttaacaagtaaatttggatggaaacttccttttgggttaaacggtagacat

SEQ ID NO: 11113 - DNA, 201 bp, Homo sapiens
ggaaaatgaggatactaatattacccacctcataggaatgttttaaggataaaatgagtaaataattctaaagtgcctaaaatagagcctggcatatacayaatgaatgcacaataaatattagccactgctcttgctgttggcattattaatatcctcccgggtaataatttgggtttgcgttagtatcaaggaaacctg

SEQ ID NO: 11114 - DNA, 201 bp, Homo sapiens
acccagaaggaacagtggtttggcaacagatggcatgagggatatcgccaaacacccagagaagactcccattcgacaacagggacagctggtaatggatrgtttaacaagtaaatttggatggaaacttccttttgggttaaacggtagacattgaggacattgaacaaaaggacactggaggaattgtcacgagatgtt

SEQ ID NO: 11115 - DNA, 201 bp, Homo sapiens
aggttaagtaattaacaacctgtgtcacctaaagtgagtggcagggtcaggaattgaaccaggtttgaggaggtcctaactaggttgaactactgaccttmataaaagtttggcactacagaccagctttataggacaaaaaaaccttctttcagagctcctttttctcgccttcctgacagctccctagcagacctcttc

SEQ ID NO: 11116 - DNA, 201 bp, Homo sapiens
attaaacatttggatcatttgatttctcatatcccttttagaatatcagtggcctgtttccttggtgcctttcttttctaccttccctccccatgtgtatmtgcccttaaagtagaaagatatgttgacagctattggtgaggaaaatagacaattatgtctcccaactgatattcttctcacagtccaggcaactcctag

SEQ ID NO: 11117 - DNA, 201 bp, Homo sapiens
aaaccctgacaggttcgcattgtcatcccatcaaggaagaggtggagagtcagagaggttaagtaattaacaacctgtgtcacctaaagtgagtggcaggktcaggaattgaaccaggtttgaggaggtcctaactaggttgaactactgaccttcataaaagtttggcactacagaccagctttataggacaaaaaaacc

SEQ ID NO: 11118 - DNA, 201 bp, Homo sapiens
taatggcatttgggatcagtgatggtttatccaggagagaatgcatagtacctgtaaccaggagcctgaataggaggcaacatagcatagaggttagaatsctgactttcccacttggatgacattgggcaaaggacttcaccactttgtgcctcagtttcctcatctctaaaatgggtttagcaatagtgcctacctcat

SEQ ID NO: 11119 - DNA, 201 bp, Homo sapiens
cacacctgggtggctcaagttagaaaacaaattaactcattttgcagaatctggagacgtctggtctggagaactgacagtgccctctctttgggcatagyatgactgtaggttgtctttgggtggtcttcatatggaatgtactgtgtttgccatgttccctaggagatctggcctcagaaatggccctgtgatggtatg

SEQ ID NO: 11120 - DNA, 201 bp, Homo sapiens
atccctcctgaggagatgacaaatagggatcaggcacacctgggtggctcaagttagaaaacaaattaactcattttgcagaatctggagacgtctggtckggagaactgacagtgccctctctttgggcatagtatgactgtaggttgtctttgggtggtcttcatatggaatgtactgtgtttgccatgttccctagga

SEQ ID NO: 11121 - DNA, 201 bp, Homo sapiens
aaatttggagagcttaccagtgcttctggctgcccaagtggtttgtgtgtggttgactcccaggagctcaatcactttgggtgcagtccacccagagagcyatgttccagctacatcaacctggagccttagcttggtcagtctagatttttgggtttggctgcagacatctcgtaatgtcacaaggacagcctgtgtcct

SEQ ID NO: 11122 - DNA, 201 bp, Homo sapiens
ggtgacgatcaggttactatagattccttataaggtgccttcataatggataactgtagccattttatgtaagcattgtcctgtgattaaaaaaaaaaaaagattccagtatgcttttgaaaaatgtgggtgggggagagagttttaatatgctgcattcaagatttgacctatggatttagattctagcaattcatgagg

SEQ ID NO: 11123 - DNA, 201 bp, Homo sapiens
aacttgggtatattttagataaaagaatgcttccttttgccagtgttttttccatttgtctgtgtttgcatgtgtgtgtgtgtgtgtgtgtgtgtgtgtgttgtgtgtacaagttggctgttatgatggaattgctttctttgtcttatcttgtgatatatgaagttgaaccacatgaaactgatatttttgcaggtgaaa

SEQ ID NO: 11124 - DNA, 201 bp, Homo sapiens
cacaagtgatatataattattgaaaacatttgaaaaaatacaactaaataaaataatggaaatataaatcaattattatcaatctcaccatccagaaatamcatggttaccattttaatatacgtcttttttttttttttttttttgagatggagttttgctttgttgcccaggctggagtgcagtggcgcgacctcggcc

SEQ ID NO: 11125 - DNA, 201 bp, Homo sapiens
caataatgctttaaaacaacaaaaccttgtccttttcccttcctacttctgatcagaaccagctcagtaagatttattagttgtgcaatctgttttggacwtgagctcagcaaatcagaggacagaaatagaatcctggctttttaatgataaacactgtaaaaataaaaaatttggagagcttaccagtgcttctggctg

SEQ ID NO: 11126 - DNA, 201 bp, Homo sapiens
aaacttgggtatattttagataaaagaatgcttccttttgccagtgttttttccatttgtctgtgtttgcatgtgtgtgtgtgtgtgtgtgtgtgtgtgtgttgtgtgtacaagttggctgttatgatggaattgctttctttgtcttatcttgtgatatatgaagttgaaccacatgaaactgatatttttgcaggtgaa

SEQ ID NO: 11127 - DNA, 201 bp, Homo sapiens
tagctgagattacagcatgccaccatgcccagctaatttttgtagttttagagatggggtttcaccatgttggtcaggctggtctcaaactcctgacctcrtgattcacccacttcagcctcctaaagtgctgggattacaggcgtgagccaccgcacccggcctttcctgtcattttaaaatgtaaaatatataccaaaa

SEQ ID NO: 11128 - DNA, 201 bp, Homo sapiens
gactcatggtctgcactgggcagccaaaggcgattcggccaccaagtgtgattctggcctcattcagaagtggatgctaaacaatacaccctttcaccagsagcccatcacatgggcatcaggagatgggggcgagtgatgtgccagccttctagactggcaggcctggggggcagcagagggcacaatagctagaaagac

SEQ ID NO: 11129 - DNA, 201 bp, Homo sapiens
ctttgagacgataaaggagaggacactaactaaacaagaagacaatgatctgatcaggacaagaagacttggagtacaaaatgagaagaagataatagggkaatggattttttagtggcacagtgggaaatggcgtaggtgtttacactgcactggagccctcactgtgcttggaactggttccctgtgcacagtcttgca

SEQ ID NO: 11130 - DNA, 201 bp, Homo sapiens
ctgcccaccacagcatcacagaaaggtgaattggacttggtttatgaaaaataaaaaaaccctggatagtcagagaaaggaagtgggtggtgggggttggwggggggggcagttttcctaagaaggagactcctgtaaggagaaacgtgaaggaagaaaagccaaggaatgaatatgtcagtgagtggatccatttttcac

SEQ ID NO: 11131 - DNA, 201 bp, Homo sapiens
tcaaaataaagtttgaaacaattaggatggatttgcaaataacctttcacaaaacatgttgactcagattttgtcatgatccttctgttaggtgcatctcwtattccagccctaacagattgggtgacaatatcagggtgctggtggatgtacgcctctttctttccagtgtgctgctatgatggtggctggttacctgtg

SEQ ID NO: 11132 - DNA, 201 bp, Homo sapiens
acccaaacagatctacctgtaaatgaattgtatggtcaggcttcagggaaaaatttcccatggtgttggttttttttttttttttttttttttttaatttkttaaatctctatggcatatttttccaatttctgcttttctttttttttcttttctgcttagcacctatggacataattcaacatgatgccctctttcttc

SEQ ID NO: 11133 - DNA, 201 bp, Homo sapiens
tagaatggatgagggagggagagaaactctgagaaaagaggctgtcaggagtagggctgtacatatccagggcacaaggaatttggcaaaagctggaagtrtactatagcccttctctccagccctagcctaaaccagatgaccaggcttctatttggcccagcatgtgaccatcccatcagggagcaagagagtttcctc

SEQ ID NO: 11134 - DNA, 201 bp, Homo sapiens
cagctgggtcattaagacagctcagcctgcatgcagtaaattctactcagcaaatatttattaacccagttccacgggagtactgagaaattgaaacacayagtctcacccaggtagtttagattgagtacccagtataaagtatcttgaattactttctgctttctctatcttcctactttctgcagtaggaagaaagtg

SEQ ID NO: 11135 - DNA, 201 bp, Homo sapiens
tatagtaatgagcgtgctaaaggcctggtggcatttctaccacgggaagtctcctctccaaatccaaaagtggcctcaaacagtcagtgttttcagttgarctcatttatcgctcagagggaggcacttgggacattttattcattacatgatgcaggagatttattggagaccagagggctcaacggaaaacattcttgg

SEQ ID NO: 11136 - DNA, 201 bp, Homo sapiens
aagaagaaaatgacttcttcgtgtcctattaagacagtgagttgtggcttttttgagagcagcttgctcagacctcttatgaaagatagatcagtagcaasagcactggtgtaggagtcagaaatctgcaattatgaaccactgagttttgtgtgtgtgtgtgtgtgtttttgtttttgttttttgtttgttttgttttgt

SEQ ID NO: 11137 - DNA, 201 bp, Homo sapiens
cagggtaacagctaggagaacccttgggattcttctccaatgtgacaggcccctccatgttggttcagcgttgactgccatgacaggctccaggctccacrgaaaaaaggcagagaaatcagggggtccagccaggcgccaagacgttggggtgccttgcatttctaagtgccaagtgatgaatagctcagttgaaagcaa

SEQ ID NO: 11138 - DNA, 201 bp, Homo sapiens
ttacgaaagtcttccctcaaactaaagctaagcagttccacaaaatgccagctatagacattagcagaaactgtatattgattaggtgatgtatcagtcaytgtaactacccagaaaaaaaaatacaatgacaaaaccaagtggcccaaccttattttctacttgcaagaggaaaaaccctatttgggccccaagatgctt

SEQ ID NO: 11139 - DNA, 201 bp, Homo sapiens
aagtcttttttaaaaataaaatcggtgtatccctgaccaagcgtccattaacactttgacaattgctcaaactgcatggtcacagcagcctcagctcatamcagccatccaatgcaaggaaggacaacaccaagcccagaggacagttcctggactgatttcttcaacccaatctcacaccccatgggacgaggtcatcaa

SEQ ID NO: 11140 - DNA, 201 bp, Homo sapiens
catcttgggtggcaggaaggcaaggtgtgcctgggggagctacagggagttattcaaggtcacataattagcttataattaacagagtttaggctagaacyagtgcatcccactcccagatgggggcccccggcttatctcagcatgtcagcaacccatgaatcagccctgaaatatagatattacctatgagtaacagtt

SEQ ID NO: 11141 - DNA, 201 bp, Homo sapiens
gcttttgtgtcctccagttcacatgctgattgctaagaagaaaatgagcatgagtgaacccaaagctgctgaaacattctgcgtttatgcaacttccttgscctctatacaaggaagatggtttcattgtcttgtctagagaataaagtcttttttaaaaataaaatcggtgtatccctgaccaagcgtccattaacactt

SEQ ID NO: 11142 - DNA, 201 bp, Homo sapiens
gagagagacatttgcatgtggcccctgagaaagaagagatttgtctgcctcaccccctgctggtgcaaacttgcacctctctcagcctcagttttcttatrtgtatcaagtttcaatgatcgcaatagtacttatctcatgtgactactgtgggattgaaacgagatagttcatgtgaagtaccgagcacagagcctggca

SEQ ID NO: 11143 - DNA, 201 bp, Homo sapiens
agagcttctctacatcacatgaaggcttggaagaagataaagaccatccaacaacttctactctgacatcaagcagtaaggattataaaacctagttggcytcagctattgataagaatcaatcaattatgggtacttttgcagtgtctttggtggaggtgcatccattagctgccgttacactgttacttttaatcaaaa

SEQ ID NO: 11144 - DNA, 201 bp, Homo sapiens
tttctctatgaaattctccctgtcttctttggtctcatggctacttcctgggaggaaaaagtagtaatcagctccctccccccagctaaatgtgcatggtrttagcaaattctaacccaagatgttaaaactatctgagaagaggcatgattctgcttcttgtctgtaccctcctaaagtcaaggtgcagcaaggagagag

SEQ ID NO: 11145 - DNA, 201 bp, Homo sapiens
cctcctaaagtgctgggattacaggcgtgagccaccgcacccggcctttcctgtcattttaaaatgtaaaatatataccaaaatgtgattacaccttacayggtgtttagcaaacattgcctactggttaaccatggcttccatgtcattgaatatttcctcctcatattgtagtgcgtaatgcaatagatgtaccctaat

SEQ ID NO: 11146 - DNA, 201 bp, Homo sapiens
atacttgcaaaatatagatatgctgccatgtgctgaggaccaggggagttcttacaactgccactggccaatcatcaagcacttagatgctgggagccctrctgcccacctggccaaacccctcacttaatcctcaaactgcagtattggtcaatattatcacctcattttatggatgaagcagccgaggcttagcgaatt

SEQ ID NO: 11147 - DNA, 201 bp, Homo sapiens
acggaaaaaaggcagagaaatcagggggtccagccaggcgccaagacgttggggtgccttgcatttctaagtgccaagtgatgaatagctcagttgaaagyaacccagggcacattctggaggaaattctctgggtatgattgtgcatgactgttttctctgctcattaaaccctcatctgcctccagggcaattccggga

SEQ ID NO: 11148 - DNA, 201 bp, Homo sapiens
gcaccctgtgaatcatagtggtggtatggggaaaggggtaaaaaagcatcaatctatggagtatgcgaaccagatggcatctgtcctgggaagaacaaatrtccttcataggagaattagaggactatactagtcaggcagaaatccagtccattcatcaagcttttcctcttgctgtggtccctacagggtcagccctgt

SEQ ID NO: 11149 - DNA, 201 bp, Homo sapiens; identical to SEQ ID NO: 1569

SEQ ID NO: 11150 - DNA, 201 bp, Homo sapiens
gtcacataattagcttataattaacagagtttaggctagaaccagtgcatcccactcccagatgggggcccccggcttatctcagcatgtcagcaacccawgaatcagccctgaaatatagatattacctatgagtaacagtttctcatcctacctcaactgttacgaaagtcttccctcaaactaaagctaagcagttcc

SEQ ID NO: 11151 - DNA, 201 bp, Homo sapiens
gtcagtggtggttgtaaggtaaattgtaagtaagagctattggccaccaagtgccaagggttatgaatgatttacctttttttttttttctaaactgaagsaaactcatggttgttcctagaaaaacatgcacactcacttgcttgcattcggataagcttctttgagtaacagggaagaggccactaggattacaaggca

SEQ ID NO: 11152 - DNA, 201 bp, Homo sapiens
aagctgccagagccttagtgttacagccacatccattaccccaccattcacatacatttcatgccccagggtgagaatccacatatcccaagcagagaggcacagctttggtaaactgagtcttagctaactcatgtcagaaaccaagtgttatcctggggtttgactcctggctcttgccacattcatagcaggatgctg

SEQ ID NO: 11153 - DNA, 201 bp, Homo sapiens
tttttgcagctgcatcacttcattgctaatatatttgaagaaggcaagataacctaaaggcatgaatcttgttctgttttaatccacctgtaagtcagtgktggttgtaaggtaaattgtaagtaagagctattggccaccaagtgccaagggttatgaatgatttacctttttttttttttctaaactgaaggaaactca

SEQ ID NO: 11154 - DNA, 201 bp, Homo sapiens
tgaatccaattgctcctctttacaagttaaaggatgaatgagaatactacaccctcttggtaggaaaagatggaatagtcttttcttcctgggttctgcamactagctgagctcatactcagatctgtccctggcctgtcccagagaagtgccatgttagttactaaagcttccttcctaaatgaatgatcaccaagagga

SEQ ID NO: 11155 - DNA, 201 bp, Homo sapiens
tatcaagtttcaatgatcgcaatagtacttatctcatgtgactactgtgggattgaaacgagatagttcatgtgaagtaccgagcacagagcctggcacasagtaggtactctattagtgttaatatcactggaaaacccagctgggggctcagcagtagaagctgccagagccttagtgttacagccacatccattaccc

SEQ ID NO: 11156 - DNA, 201 bp, Homo sapiens
ggctttatatccttgctgctcagagcgtagtccctggaaccagcagcctgggtaccctgggagtttgttggaaatgcacaatctcagacccaaccccagayctcctatggcagagtctgcatcttaacaagtttccagggattcatgtgcatggtgcagcttaagacatctttctctgccccggtttttagagacaggaga

SEQ ID NO: 11157 - DNA, 201 bp, Homo sapiens
tggctcctaattatcaggaagcctggaggtcttgagtggttgtaaccaaggatactgaaagtggttgaccagttaataaagaattaagttagagtaagagrcactttacttttaagctgcctttaatacactttaatctttgagatgattggctaatatctgttaagtaccaggctctttgcagagagtcaggtcctttgc

SEQ ID NO: 11158 - DNA, 201 bp, Homo sapiens
gatataggaaaggagcccgattatctgtttgagcttcctgttctttgtattgtttggaaggctaaagtcaacagccacttttgtattctgcattgtttgcrttgttaaaaactctggaaaactcatctggtttcttctccaaaagtagcttcccagagccctgggagacactcagaaataagatccttttcaaataggcca

SEQ ID NO: 11159 - DNA, 201 bp, Homo sapiens
attggctgtgcatggtggcatgcacctgtagtcccagctgctcaggaggctgaggtgggaggagtgcttgggcccaggagtttgaggttacactgagctargattgtgctactgcactccagcctgggtgatggagccagaccctgtctctattaaaaattaggaaaagaaatagcctgtctactctattggtccataacc

SEQ ID NO: 11160 - DNA, 201 bp, Homo sapiens
caggagaatggtgtgaacccaggaggagatcgcgccactgcactccagcactctaacctgggtgacagagccagactccatctcaaaaaaaaaaaaaaaaagttgtggaagttcctaaattgaaggccctaaaggcttaaatgatgggagctagaactcaagaattatcttagttaatcaaagcccagctgaggtcaaagg

SEQ ID NO: 11161 - DNA, 201 bp, Homo sapiens
tcccttttctactgcactcttagagtgcattaatgtgtgtgaagtgttttcggttccattatctaaagcagccctcatattaacatcgtggttggcattaytggcctcctgtatgggatgaaagtttaatgacttctgcaaggttatgaaaggtcaagatcacagctaattagtgcaaattcaggatttgaattctagttt

SEQ ID NO: 11162 - DNA, 201 bp, Homo sapiens
tcactcttgctaattaggcttctgacttcagacaggtcagaagctctgtccagcaaaatttttaaatctttaatataaggagcatgaaccagatgacatttaagatccttccctctctgacattctataaacttcagtttgagtctctgaaaaaaatggaacttttttgctttttccctttcttttcaccatctatatcaa

SEQ ID NO: 11163 - DNA, 201 bp, Homo sapiens
agagcataatagggagatctcatctgatttaaagcaccagggaaagcctcccaggacctgttggatgaatagcagtaaccatgtctccaggatccccacarttccttgaggacccttgttgtcagacttctcagagctgtaccagccctctcactgtctcaccattgggtcttctgagtaagaaagcaagaaaaaaaattt

SEQ ID NO: 11164 - DNA, 201 bp, Homo sapiens
aacctaaactaattcaggaagcagactcctgccttggaacactgtatttccttgtcttctgggtgtcaaaggaattctttcttttttttttttttttttttcagatctggtatggcctatttgggtggggaaaattagaaattctgctggctaggcagtagctttttccatttttccccctcataccactcctttcaggaa

SEQ ID NO: 11165 - DNA, 201 bp, Homo sapiens
aaacctaaactaattcaggaagcagactcctgccttggaacactgtatttccttgtcttctgggtgtcaaaggaattctttcttttttttttttttttttttcagatctggtatggcctatttgggtggggaaaattagaaattctgctggctaggcagtagctttttccatttttccccctcataccactcctttcagga

SEQ ID NO: 11166 - DNA, 201 bp, Homo sapiens
tacttttaaatttttttacaatgttcctgcattacttttgtaatcacaaattttaaaaatcctccctaatgtgtttgcattagagaaggagccgtgtctatcttatttaaaattgtacccccaggcttccacagtgcctgatatagaatgtatatttattaatgaatgaattcactgtggtgggaaaatttccggaaactt

SEQ ID NO: 11167 - DNA, 201 bp, Homo sapiens
ttacttttaaatttttttacaatgttcctgcattacttttgtaatcacaaattttaaaaatcctccctaatgtgtttgcattagagaaggagccgtgtctatcttatttaaaattgtacccccaggcttccacagtgcctgatatagaatgtatatttattaatgaatgaattcactgtggtgggaaaatttccggaaact

SEQ ID NO: 11168 - DNA, 201 bp, Homo sapiens
tgcactaggcagagatggagtaagaaagaactggaggctacatttcttgtcttaaaggagttaacaatcttgttgaagcaatgagacaaaaaaaaaaaaaagaaagaaactggagaagaggataaatgtgtttaaggataaataaattctgaatgtcttggattagagtcagatgataggggtattaagtgagctaaagat

SEQ ID NO: 11169 - DNA, 201 bp, Homo sapiens
gtggcaaaaactcagtaatagcttacaaagagaatgcaatagattctagaatgttggtgttatccatacttgatgacatgatgtgatgggggtgagttggygggtaggttcaccaagaagtattatttagaaaaactgtgccaaagaaatctatcatttcacccataactggtattaagtattgcaaaactcatttccata

SEQ ID NO: 11170 - DNA, 201 bp, Homo sapiens
aaataaatatgtggctgttagagtcttggccctgcagacttggatcaaagcagacttttcaaactactctctcttactctctcttaaaaaaaattttttttggtttctcttctatgtttctctggtttgaaaaagtaaataaaaaggcatgaaagttattaagctatattatattaagatatattatttttgggagccctg

SEQ ID NO: 11171 - DNA, 201 bp, Homo sapiens
gagtgctgcatgagtggcttaagagaacaccattaggcttgaaaaagagtgaactgcaaaaacacattttctccatttcacctagttgttattttccccccatgtgctaatgatgcaaacaaaagaaaataaaaataatagacattggcttatgtcttttcaagttccatttcttgtttcttcttttactattttcagaat

SEQ ID NO: 11172 - DNA, 201 bp, Homo sapiens
tgtattgatggtcagcaatgtaaatagcacagcgttaagcatcaaaggagatgcaaataagcctatgaatggtccttgccaaagaaggacttatatttccrttttatgtcactgttggcttttgttctgacattgggtttgggatttagtgactgtctttctcctggttgtaatatttattcggtggtgggcatggcttat

SEQ ID NO: 11173 - DNA, 201 bp, Homo sapiens
cagctctaaaacagtgcaaaataaatccctaaatatcgttaaggattgtcaggtagaagagtcatgagatcagttgccaagttacccacctaaatcttttragataaattctgccatgccataaaagtatgttacctggcttctaaaccccagccagcctgccctctctttcctggtgaggtctcagtctgcctccttcca

SEQ ID NO: 11174 - DNA, 201 bp, Homo sapiens
cagacatgtacacccatgttcgctttagcatctgatagaaaaagaggaacatgaggaaagacagagattgagtcaccaacatgtgacctggtgatttctgwgtcctctgactttgaaatcagtggaaatttagagctctactttgtcacttgtaatgctttgttgttgcaaataaatatttttgcagctgcatcacttcat

SEQ ID NO: 11175 - DNA, 201 bp, Homo sapiens
gctttatatccttgctgctcagagcgtagtccctggaaccagcagcctgggtaccctgggagtttgttggaaatgcacaatctcagacccaaccccagacstcctatggcagagtctgcatcttaacaagtttccagggattcatgtgcatggtgcagcttaagacatctttctctgccccggtttttagagacaggagac

SEQ ID NO: 11176 - DNA, 201 bp, Homo sapiens
acacacacatacatgcacacacacacagacatgtacacccatgttcgctttagcatctgatagaaaaagaggaacatgaggaaagacagagattgagtcaycaacatgtgacctggtgatttctgagtcctctgactttgaaatcagtggaaatttagagctctactttgtcacttgtaatgctttgttgttgcaaataaa

SEQ ID NO: 11177 - DNA, 201 bp, Homo sapiens
tttaaaaatatccccacaatccagcttctccctctgtagggcttctgcttgggaaagtttgtgtaactccccaaaacatctgaagagtgaatagcagtagkgttcttggactgcgaaggagaccctgcttcttatgtgcatgctcttgtgcacacagacagaaacacacacatacatgcacacacacacagacatgtacac

SEQ ID NO: 11178 - DNA, 201 bp, Homo sapiens
ctttatggaaactaatggtgctttaagaggcacagatttcatagaaagagacccagttgttcccaccctgatggttctaggtctaggtctaggtcaccaaygtctatggtgaaagaatgggcttttgcgaggtatggtctcctgtcatgtatgagggtcatttatttaagggaaaaccaagaccttattttctttgacaac

SEQ ID NO: 11179 - DNA, 201 bp, Homo sapiens
ccttagacatacagaccacctgtcaaaagagccctgtcattctctattatattatcctcttttattttctgtgtaacactatgagtatctgaaattaccgkattcatgtattaatcatttacctgtatactatatcctcactctagaggtaagctctttgagggcacagatcgtgtctgactccccagcccccaagattgt

SEQ ID NO: 11180 - DNA, 201 bp, Homo sapiens
gtctttcttggatctttccgatccaagccatatggttactgcaatctcacaatacaatgagggtaaatccttgcaatcaccagttaccagcaattgtgaarcaatggatggcatagatgtcagggggtcaggagagccttgcaagcgttcagagggcttgggagtggacacatcacagttgcactctgctgggcagcgctg

SEQ ID NO: 11181 - DNA, 201 bp, Homo sapiens
actctccccaggggcaatggggcctccaaggccaccaaagatcaaggtgccaggtgggggatgcctcccagcttcccattcatttttcagttgggggccastcagcagctcctcaggtgaggattgtctcagaactgaagaatggttcaaattggcccaagatgctgaaatttattgcagggatcactgggacagtgtgta

SEQ ID NO: 11182 - DNA, 201 bp, Homo sapiens; identical to SEQ ID NO: 1566

SEQ ID NO: 11183 - DNA, 201 bp, Homo sapiens
caaaacaattgagaactcttgggaggcatcttcaggaaaggaggtggtggaaactttcctctcctcactctccccaggggcaatggggcctccaaggccaycaaagatcaaggtgccaggtgggggatgcctcccagcttcccattcatttttcagttgggggccactcagcagctcctcaggtgaggattgtctcagaac

SEQ ID NO: 11184 - DNA, 201 bp, Homo sapiens
tagtctcctctctcctggaacttacagtctatctggaagacagacagtaaacaactaatgatgcctttgtttaattacacttgtggtaagtgctatgaagragaagcactggatcttgtgagagcataatagggagatctcatctgatttaaagcaccagggaaagcctcccaggacctgttggatgaatagcagtaacca

SEQ ID NO: 11185 - DNA, 201 bp, Homo sapiens
gcagctgggcttagaactggaaggctcctttcccacagctgaatggattattgcctaaggagtcaaccccacgtattaatttggccaagtcaatctgcaayctgtatgacaactggagtttaaagtcagctaaagacacctttgtgaatcatagagcgggaacccagaggaagccattaggggtcctctcggctggaatcc

SEQ ID NO: 11186 - DNA, 201 bp, Homo sapiens
aggtgggaggagtgcttgggcccaggagtttgaggttacactgagctaagattgtgctactgcactccagcctgggtgatggagccagaccctgtctctaytaaaaattaggaaaagaaatagcctgtctactctattggtccataacctctatcgagacagtgaccttgtctgctttattcaatgcctggatcttttcct

SEQ ID NO: 11187 - DNA, 201 bp, Homo sapiens
caccccaactccatctgtgcagcaaacaacacaggggtgtacatcctcacatccaacacctcccagtatgacacatattgcttcaatgcttcaggttggtyctcaggggggtgtctgttggcgtgaaaggctgtgggagcctggtctttggagctcagcttaagtggggattcatgtagcctccatttacataacaaatgc

SEQ ID NO: 11188 - DNA, 201 bp, Homo sapiens
ctttcaattctgccactcccagtgtcttcctgcaatttagcacccctcatgttcctaaactaaatcccacagttccaggcatcctaggaaaaaaaaaatcmatatttagcagcagaagaaagagtgtatattcacaaacatctcttctaaaattggaggagcggctttttgggaagtccttaattgacctctccttatttc

SEQ ID NO: 11189 - DNA, 201 bp, Homo sapiens
ttaatctgagtgataccaaattgtatctctcttgagaagtagttaatgtgaaaaatgggtgaacctatgatcataccttagttatatcttgatgagattayggaagaagaaatagaatgttttgagaagtggggaaaatatctcacaaaatttctcttgtctcatgttcttcctgttttatttatctatgggatctactgc

SEQ ID NO: 11190 - DNA, 201 bp, Homo sapiens
acaaaacaaattccaatgtatcttctcctgtcttctgcagcactgggggagtcccctgataacagggatcatgtcacattcatttttgtgggcccagatcycagtaatattgacccataactgttgaactgcaatgaatgtctagaatataaaagtcatgatatctatatatatggaagcatgctgtcagtatgggctaag

SEQ ID NO: 11191 - DNA, 201 bp, Homo sapiens
tggagaggaggtggttggagatcacctgggcctcctcagcactgcctcctggctggggctggggctggggataagagagtaactgcaattgtgcttccccrgcaccttcgctttaggtcactccaccgaagagcctgaaagggaagtggttcttgcgaaagaatgagctgaagcaggtggcagatgctaccaggcaccgtg

SEQ ID NO: 11192 - DNA, 201 bp, Homo sapiens
gtgttgagaaagaggagagcgtctgagagccctgggtcttagggctggcacacacctttctgctcccttctctctaattgagcattagagactccgccccytgctgggagttagaactttagctgtgttttcccatgtgaaggagcaaagaggcaaagcttcatctctgttggggctagcatcaactaattcaggtattcc

SEQ ID NO: 11193 - DNA, 201 bp, Homo sapiens
aggatcttttcaaacatgtcttatccttgttagtgcctcaaactagatcctgttcagatatatcaagttagtgagagtttattttggtgcaaaaaaaaaaatttgaaatctatgtatagttttttcatagcacgtatttttcatggaacttttggaagacccgtcatatagacacactcacacaatggatgcatgtattgt

SEQ ID NO: 11194 - DNA, 201 bp, Homo sapiens
cggccctcgctttcatgtgcttgtaaagttgtttggcaggaactgggacttggaaaggagacatgactttgtcagagggcttggggctgggcatggtgtgrgtggcgaaggggagaaggaggaaaggggaaggaaaggagctcttgttgccccattctggggagtggtggactctggacaaccacgaggaaactttggaaa

SEQ ID NO: 11195 - DNA, 201 bp, Homo sapiens
cttgtaattctttacctggttgtgtcacagactttgaaaaccaatgaaaaccagagatgttgccctacctaaacacacacacacacacacacacacacacatccatacacacaatcttgcatataatctcacaggtccatggatgtattgaccagctcctggattccatattgaaaatcccttgcagcccagctccaatac

SEQ ID NO: 11196 - DNA, 201 bp, Homo sapiens
gagcatgaatatgagaggcaaccactggaccagctgcttggtcctcaccacctcctgcttctgccaatcagtgtggggaaatctcaacagtaaggtggctyatattccctgcctggcagcctcagagcagagagaagagccttgataccagggcaacatcagggaccctggagctagggctccaatatctcatccaaacag

SEQ ID NO: 11197 - DNA, 201 bp, Homo sapiens
tcttgtaattctttacctggttgtgtcacagactttgaaaaccaatgaaaaccagagatgttgccctacctaaacacacacacacacacacacacacacacatccatacacacaatcttgcatataatctcacaggtccatggatgtattgaccagctcctggattccatattgaaaatcccttgcagcccagctccaata

SEQ ID NO: 11198 - DNA, 201 bp, Homo sapiens
gagctgcagcacatggcagaaagtaaccgttctcccggatgcgcacagtcgttgtctggactaacaggctcctgtgcccaagggctcgccaagccccaccrggctgtgtctaggcagggcagagctgggcggggcagagactggggctggaacagggcgagtggctgttatcaaggtggtcacagaagggatcacaattcc

SEQ ID NO: 11199 - DNA, 201 bp, Homo sapiens
caacttcttaaaaaaccttgtctatcatctatccatctatctgtctgtctgtctatctatctatctatctatctatctatctatctatctatctatcatcygtctgtattctatgttccatctatcatctatctgtcatatatctatctctatctattaattatctctatctttatctatttatatctatcatctatctgc

SEQ ID NO: 11200 - DNA, 201 bp, Homo sapiens
actcaacttcttaaaaaaccttgtctatcatctatccatctatctgtctgtctgtctatctatctatctatctatctatctatctatctatctatctatcatctgtctgtattctatgttccatctatcatctatctgtcatatatctatctctatctattaattatctctatctttatctatttatatctatcatctatc

SEQ ID NO: 11201 - DNA, 201 bp, Homo sapiens
ccaaactcaacttcttaaaaaaccttgtctatcatctatccatctatctgtctgtctgtctatctatctatctatctatctatctatctatctatctatctatcatctgtctgtattctatgttccatctatcatctatctgtcatatatctatctctatctattaattatctctatctttatctatttatatctatcatc

SEQ ID NO: 11202 - DNA, 201 bp, Homo sapiens
ggcggcagcccctccggctgagtcggccctgggggactggagtcaagtgagctgtctgcgaagtgcattgggctccggaaagcagggctgggatttgcgcyaaaccgttggagaatgtgtctgtggaagcaccatttggttgaaagaaaaagagaaagagaagaaagtttgttgggcaggctgccggcgcgcagttttggg

SEQ ID NO: 11203 - DNA, 201 bp, Homo sapiens
ttgtgacttaccatggtggatgcatcctgtgagttccaaactcaacttcttaaaaaaccttgtctatcatctatccatctatctgtctgtctgtctatctrtctatctatctatctatctatctatctatctatctatcatctgtctgtattctatgttccatctatcatctatctgtcatatatctatctctatctatta

SEQ ID NO: 11204 - DNA, 201 bp, Homo sapiens
gggattgtgacttaccatggtggatgcatcctgtgagttccaaactcaacttcttaaaaaaccttgtctatcatctatccatctatctgtctgtctgtctrtctatctatctatctatctatctatctatctatctatctatcatctgtctgtattctatgttccatctatcatctatctgtcatatatctatctctatct

SEQ ID NO: 11205 - DNA, 201 bp, Homo sapiens
ttaggaacatgtcccagtcacacaactgaaactgcaggaagtcagtcctgggattaactgcaggatctgaacactgtactctttatattgtactttaaaaacattgcttcacatggccagaaaagccaacctctgaagaagagaaaaattgttcccttcactctcagagcttcatgagcaccttggacttgccagctttcc

SEQ ID NO: 11206 - DNA, 201 bp, Homo sapiens
gtcaagtgaattgatctttggaatccttattttctatgaagatctttgatgaatacagtgtcttttttgcattctgtccctgactgttctatagaaagacrtcccttgtactctttagagcaaagttggtagctcttatggtcttcatttgaattctaccactgcttctttttctgtttttaagcccatggtaacttgggg

SEQ ID NO: 11207 - DNA, 201 bp, Homo sapiens
gggaacatctggctcagtccacaggaagggatgcaggccttttcctgggaatgaggactcatcccatattccagcccccttcccccaacttttttttttttcaattttagtgcatctctttacacttaacaggtctgcagtgacttctaggaggatccacacaccaatcgtggaactaggcagcatctttttccacttcct

SEQ ID NO: 11208 - DNA, 201 bp, Homo sapiens
actctatttctccctatttatggataacaagtggaaagcttttgcagcaattgtgtgttctggagacaagcacatggtgggtggtgatcttacaaatacgrgttcatcactgattccacctccacacagataggaatgatgtcacaggtggaagaagagacccaaatcattctgaaggctcaactactttactggaaggtt

SEQ ID NO: 11209 - DNA, 201 bp, Homo sapiens
atgtacaatgtctagtctcaacctcatacctgcaaagatatcacaatatttttgttagcatgttccttaccacagttcttggatttctaccaaaacaaagyttctacaaaacttcctgtggtcatccttcttagcctttgctgccccagtttccttaattcttattaaagttctagctcatttatcagtggattaagcaat

SEQ ID NO: 11210 - DNA, 201 bp, Homo sapiens
agagaagattttcctttaaagaatctatctgggccaggtgcagtggctcactccatgtgcagtggctcactttgggaggccgaggcagtggattagttgakcctaggagttcaagaccagcctgggcaacatggcgaaaccccatctctacaaaaaacacaaaaattagccgggcatagtggcgcatgcctgtggtctcag

SEQ ID NO: 11211 - DNA, 201 bp, Homo sapiens
agtgcttgggcccaggagtttgaggttacactgagctaagattgtgctactgcactccagcctgggtgatggagccagaccctgtctctattaaaaattargaaaagaaatagcctgtctactctattggtccataacctctatcgagacagtgaccttgtctgctttattcaatgcctggatcttttcctagcacagtgc

SEQ ID NO: 11212 - DNA, 201 bp, Homo sapiens
acagatggcagagtctcatgggttaggataaaaccttagcagctactctcttttgtctgccccaccctgattggtagcaactcttagatatatgaaaactyattaccatttaattgtgcccacaccccctgccaagctaaggaggctttggggaaaccagtttgtctgttcagatgagaaattagtcatgcgagctacaat

SEQ ID NO: 11213 - DNA, 201 bp, Homo sapiens
aatagaaatatttaaaaattagtagagtataggcactagctaattcaaatgcttggttgtaaacaactatgtcttgtaaatgagaataaagtttattctcycaatgacgatgataacatctttctcactcacttttactcaaattggctttattgggcaggagagacagagatggagttataggtatcatgattgaactta

SEQ ID NO: 11214 - DNA, 201 bp, Homo sapiens
tgtttctctggtttgaaaaagtaaataaaaaggcatgaaagttattaagctatattatattaagatatattatttttgggagccctgagagggctcctacyagttattctagagctgcatagagccttcctcaaactatggctccaagcaagataatcacaacaagcaaggactttattttttgaatttccaatggccttg

SEQ ID NO: 11215 - DNA, 201 bp, Homo sapiens
tatttggtatttttttatcctttttgacttaatgagcatttggaaaccataaggcccacagcaacctgacctttgacttgcccagactctctgagcaattytgtgagttgagtcaacaatcaatggttttcaaattattcaattgttcactcaacgcatactagttgaacaccaatatctgtgctctgctaggcactgggg

SEQ ID NO: 11216 - DNA, 201 bp, Homo sapiens
atgcagcaacaccaaaatatgtgttcaaagagggagaagaggagaaaaagagaaaggaagttatcgtggtctgataacagggcatgtcagaatgggaaagrgtgttaggaattatgtagccaacttgtttgattggaaagataaggaagcctcaagggctgcaagtgactttcccaaggtcacaaaactaattggtggcaa

SEQ ID NO: 11217 - DNA, 201 bp, Homo sapiens
tttcaacaatcaattcaatcatgattacaacagctttgatgagcactagtgctacagcaactgagacagcaaccaagaggcaagaaacctgggattggttytcatggttgtttctaccatcagagtcaaagaatcatcttcacacaacaacacaaatggctggtaatgagttattattatctcatagcgtatgttttcttg

SEQ ID NO: 11218 - DNA, 201 bp, Homo sapiens
atactgtgtgaaccatttggggataataatccctctgcctcccctagacctctccacctttgcctgctggtgtgaaagtgttttgtgctagtaggcagaarcacgtgatataaaactacaaggtcctattattacctaggataactttcgcctctatctatgtctcctgttgctggttgaccccaatcattgaaactgtat

SEQ ID NO: 11219 - DNA, 201 bp, Homo sapiens
agagaggggagaggagagaaacccagggaaaggcaaaacatgagccaggtgtttaaagtgggggaataagaatggcttgattggggccaggggaggggtcwgtctgcttggataagagaattcatgaaaagaacagtgagagatgaggtcggacagattccaggcaatcaagtaacagtggcactgtccactggcagaaga

SEQ ID NO: 11220 - DNA, 201 bp, Homo sapiens
taatctgagtgataccaaattgtatctctcttgagaagtagttaatgtgaaaaatgggtgaacctatgatcataccttagttatatcttgatgagattatrgaagaagaaatagaatgttttgagaagtggggaaaatatctcacaaaatttctcttgtctcatgttcttcctgttttatttatctatgggatctactgct

SEQ ID NO: 11221 - DNA, 201 bp, Homo sapiens
agagactggggctggaacagggcgagtggctgttatcaaggtggtcacagaagggatcacaattccaagtgtgagactagctggcaatgggttttccagaraggggtcctgggttctcccagctccccactgagccttgttccaaagcttacagtccgcagtgtcactgccaccttagcgctgtggaagcttgaaccagct

SEQ ID NO: 11222 - DNA, 201 bp, Homo sapiens
gagagcataaccaagtgtcagaagacaggaaaaacagacatctcgattgcatgtgaaggcttcaaggaatttgaggatgagttgaatgtggaaaagaagayagacagagagaggggagaggagagaaacccagggaaaggcaaaacatgagccaggtgtttaaagtgggggaataagaatggcttgattggggccagggga

SEQ ID NO: 11223 - DNA, 201 bp, Homo sapiens
aaatcataaagattgcacgacttaggattttgtcaaaatgtgtcagaggctataatataaggctagtttttggcattctgtcagtcactgaatgtccttcrtcagatcacagctccttttggttgtgctgactttatacccatctggaatccactgaccattagctgaaataaaatcccagatgtgctcagatctcacatc

SEQ ID NO: 11224 - DNA, 201 bp, Homo sapiens
ctttaaatgagtagctactacatgccaatcacagatgttgcctctgctgagtatccagtcaaaaaaccagaatctaacagagctaactaagcaccatcttrcaggaaaccagctgacgtcagctccgcagccaccagtgagttactgggcccacatctgcctgcaagagggggaggggaattcaggtaacccacaagaggg

SEQ ID NO: 11225 - DNA, 201 bp, Homo sapiens
aaaaatgaaggaggaggaagttgtaatggaaacttctgccaatgcatattctgagttgactcattcattctgatctctgaatagaagctctactctcttcyatgtgatggaaagttgaggatagggtagggctgagagggatgtgaattgagttgtttgttcattaggataggatagggctgaaagggatgtgaattgagt

SEQ ID NO: 11226 - DNA, 201 bp, Homo sapiens
tgtcactatgttagagtgcttctcttggtatattaagatatcgaggcaccctagaaatccagacgattgtacctggaagtactgtagttgttttcaaaaayttcatttgggaatctagttgtgggtgaggtcataacatccactgagcttttaaacatgatgtcagaggaaggggttagaattgcaaaaatgaaggaggag

SEQ ID NO: 11227 - DNA, 201 bp, Homo sapiens
tggggtatgcaagtcaactccctcactttcttttaaaaatcctgggaaatccattataccttctgtgcctgattttcttcctttgcaagtgggttgcttgscgtccagctcagccactaatgcaagtcaccacaacaggtacgtcttcaaataccatctcagcaggctgggagccaaatgaagaaaatgaagatgaaagag

SEQ ID NO: 11228 - DNA, 201 bp, Homo sapiens
tagttaatgtgaaaaatgggtgaacctatgatcataccttagttatatcttgatgagattatggaagaagaaatagaatgttttgagaagtggggaaaatrtctcacaaaatttctcttgtctcatgttcttcctgttttatttatctatgggatctactgctacagattgtctttgaatgatcaggctttatcagagaat

SEQ ID NO: 11229 - DNA, 201 bp, Homo sapiens
gctcaagaaataacatttttctaattgcttcaatcatcgttatcacagtttcaaccacaccacgggcttttgaccacacaaaacagaaccaggactggacycagtggaacccaagccattcaaatccggaagtgctacttcagacaaccacaaggatgactggtaatgggttctgcatatttaatgaaagatttttttccc

SEQ ID NO: 11230 - DNA, 201 bp, Homo sapiens
ttaagccttcacatctaggaaggctaaaggttgagtttgtctgtttcatcctgtcttggctgatcacatgcacatacaaccacacactcacttgcatacamacatataagtatgaggagaattcaaaatgttcatggaaaaatgagattaaaagataaaagtttaaagatgtaaactttacttctcaacataagcaccatc

SEQ ID NO: 11231 - DNA, 201 bp, Homo sapiens
attcaagatactgttataagctatgatagcggccatttagtccatccctaaagaactgagggtcctgggaatttaatcacatcaatgcaatctttcttacwttgttaactaaagaaaaatgggtgccctttgaagatttttaaagattaagtaacaaaaaaaaaaaagtcagaaggagtcaaatttggactataaggtgga

SEQ ID NO: 11232 - DNA, 201 bp, Homo sapiens
acatgactttgtcagagggcttggggctgggcatggtgtgggtggcgaaggggagaaggaggaaaggggaaggaaaggagctcttgttgccccattctggrgagtggtggactctggacaaccacgaggaaactttggaaaggagcaaggctttgaggaggagtccagtctttgtatgggaaagcaaaaagtggagaaatg

SEQ ID NO: 11233 - DNA, 201 bp, Homo sapiens
ggctttttatgttttaacttgatttacattcatactattgatagtgtaatattcagtgattttcaccaacgataatttactcaacaattcctttgtttttrgtccaaggaagcatatctggaagagttttctggtgaaattaaatcagcttaagagctctataatccagcctgttggggaatgttctcaatacttacttgg

SEQ ID NO: 11234 - DNA, 201 bp, Homo sapiens
taggggtgaactgaatgaagtgttgcacggcattaaatgtcattgaatgggatattatgaaattcccatcttagccatttaggtcaatatcctgttgtttytctcttacaggtatgggttcatagaagggcacgtggtgattccccggatccaccccaactccatctgtgcagcaaacaacacaggggtgtacatcctcac

SEQ ID NO: 11235 - DNA, 201 bp, Homo sapiens
ctgtggcagcatggcatgggtcaagaagtacttctccttcatcttcctttgatgtcggtaactcatcctttctgcactgcgggagttgttaatgcttttgkgtcctccagttcacatgctgattgctaagaagaaaatgagcatgagtgaacccaaagctgctgaaacattctgcgtttatgcaacttccttgccctctat

SEQ ID NO: 11236 - DNA, 201 bp, Homo sapiens
agtttctacaaaacttcctgtggtcatccttcttagcctttgctgccccagtttccttaattcttattaaagttctagctcatttatcagtggattaagcratgaacggtaattaacattgtggacccattcaaggctgttttgccatcattttttggaataccttaaaaagactaaactttgtgataggctgtataagaa

SEQ ID NO: 11237 - DNA, 201 bp, Homo sapiens
ggctgggcatggtgtgggtggcgaaggggagaaggaggaaaggggaaggaaaggagctcttgttgccccattctggggagtggtggactctggacaaccaygaggaaactttggaaaggagcaaggctttgaggaggagtccagtctttgtatgggaaagcaaaaagtggagaaatggccaaatgtagttaagtgacattg

SEQ ID NO: 11238 - DNA, 201 bp, Homo sapiens
ttgtcactatgttagagtgcttctcttggtatattaagatatcgaggcaccctagaaatccagacgattgtacctggaagtactgtagttgttttcaaaamcttcatttgggaatctagttgtgggtgaggtcataacatccactgagcttttaaacatgatgtcagaggaaggggttagaattgcaaaaatgaaggagga

SEQ ID NO: 11239 - DNA, 201 bp, Homo sapiens
ccatcatcacagcagatgtagacagaaatggcaccactgcttatgaaggaaactggaacccagaagcacaccctcccctcattcaccatgagcatcatgargaagaagagaccccacattctacaagcacaagtaagcaagatggcggtcggcagttctgggttagatgaattagtaaagacattccagcaatagggaaga

SEQ ID NO: 11240 - DNA, 201 bp, Homo sapiens
gtctgattacccttgttttgtggctgggattaccgaaactcccagaggttaagtcatcctctgataagggggaaagccaatgctcagacctggactttctyggtccaaggctgctgattgaattctggattcttcccaaatagtgtaatctcgtgtcaactcaaatcaattcaagtttcctttccagtttcccacatccca

SEQ ID NO: 11241 - DNA, 201 bp, Homo sapiens
ggagatgacaaatagggatcaggcacacctgggtggctcaagttagaaaacaaattaactcattttgcagaatctggagacgtctggtctggagaactgayagtgccctctctttgggcatagtatgactgtaggttgtctttgggtggtcttcatatggaatgtactgtgtttgccatgttccctaggagatctggcctc

SEQ ID NO: 11242 - DNA, 201 bp, Homo sapiens
aagcgtttccttggtgcagtgatgaaaatcccaatgcacaggtgaaattaagaaataacttaataatggagtaaaatggtaactttaatttaatgaccttyacaaggtagctaagtatttccttgtataaatttgatctgtgttacttgagtaggctattctagataggcttctttttcttttgtggttacaactagacta

SEQ ID NO: 11243 - DNA, 201 bp, Homo sapiens
tcaacctccagttgatatatgtcactgagggccctgtgtttgcccaggcaagcgtttccttggtgcagtgatgaaaatcccaatgcacaggtgaaattaaraaataacttaataatggagtaaaatggtaactttaatttaatgacctttacaaggtagctaagtatttccttgtataaatttgatctgtgttacttgagt

SEQ ID NO: 11244 - DNA, 201 bp, Homo sapiens
gcaaacaacacaggggtgtacatcctcacatccaacacctcccagtatgacacatattgcttcaatgcttcaggttggttctcaggggggtgtctgttggygtgaaaggctgtgggagcctggtctttggagctcagcttaagtggggattcatgtagcctccatttacataacaaatgctcactgaatatctgtacagca

SEQ ID NO: 11245 - DNA, 201 bp, Homo sapiens
tatttcagaatctgaagctccccatgaagaaagcccttcaattttagttgaaaggtttttgctttcaaagcaaggctaacaagcagggagtccaggaagcwaataactggcattcgttgattaaatcttggccatctaggttgtggctgtaggttaaccaaagttgggcatccacccaaggctttgatcgtcacctccagg

SEQ ID NO: 11246 - DNA, 201 bp, Homo sapiens
actgcaaaaacacattttctccatttcacctagttgttattttccccccatgtgctaatgatgcaaacaaaagaaaataaaaataatagacattggcttaygtcttttcaagttccatttcttgtttcttcttttactattttcagaatcaaggaagataatacagaattttaacagttttcttacctcattttgcatttg

SEQ ID NO: 11247 - DNA, 201 bp, Homo sapiens
taactgtgaaactctgttcacacatcttaaatattttgagtcagtaaagagacagtaaaaccttcatagggtggctatgaggattaaatttaacaagtacrtgtcagtgctggggtatattaggtcctcaaaaatattaattcctacctgccatcacccacatatgcacagtaggtacttaacttcttccttcaccatttc

SEQ ID NO: 11248 - DNA, 201 bp, Homo sapiens
cctgctggatttagcttcctcctctctgccctcctgctgcaccacagcttcccttgcacatggcattttctcagcccacatctcattttttgaggcatttwatattcaaaaaaaattgtgtttttagcacaattaaaaaataagcaagtttttagccaccaggatgctgctagaagaggctgggctgtgtatgttgtatct

SEQ ID NO: 11249 - DNA, 201 bp, Homo sapiens
tcttacaggtatgggttcatagaagggcacgtggtgattccccggatccaccccaactccatctgtgcagcaaacaacacaggggtgtacatcctcacatmcaacacctcccagtatgacacatattgcttcaatgcttcaggttggttctcaggggggtgtctgttggcgtgaaaggctgtgggagcctggtctttggag

SEQ ID NO: 11250 - DNA, 201 bp, Homo sapiens
gactttttcagaacagcgagatagttgtgctgacaaaacaaaaacaaaaacatcatttaagatgccttcagatgcaagtacatgtcataatagaaatattyaaaaattagtagagtataggcactagctaattcaaatgcttggttgtaaacaactatgtcttgtaaatgagaataaagtttattctctcaatgacgatga

SEQ ID NO: 11251 - DNA, 201 bp, Homo sapiens; identical to SEQ ID NO: 1563

SEQ ID NO: 11252 - DNA, 201 bp, Homo sapiens; identical to SEQ ID NO: 1564

SEQ ID NO: 11253 - DNA, 201 bp, Homo sapiens
atattaagatatattatttttgggagccctgagagggctcctaccagttattctagagctgcatagagccttcctcaaactatggctccaagcaagataawcacaacaagcaaggactttattttttgaatttccaatggccttgcggtaagcggtgcacaagaagagcaagccacggtggcaatcacagtgaattgttgt

SEQ ID NO: 11254 - DNA, 201 bp, Homo sapiens; identical to SEQ ID NO: 1567

SEQ ID NO: 11255 - DNA, 201 bp, Homo sapiens
acatccgacggggagccactttggcaatggcaaacggtgtctcctctccacagagcttgtgatgtcagaaattacccataactggggcaggttttgtcttyccaaagattgtctgcccagctagacctgagagacagggagacaaacacagaatgagggggtgggtcttgtgggggtggggaacgatggaaactcacagag

SEQ ID NO: 11256 - DNA, 201 bp, Homo sapiens
aatggacagtaaccagggaaaagatcaaggtcgtactcttccatagcaactttcttttgcgtttgggtcttaagtaatgtttgagaaaccttaaattaacragaataatttgtcttatgttattaaacttcctatatcagggttgtatgagttagccaatgttaggaaaacatcactatggccttatacctctagaaaaat

SEQ ID NO: 11257 - DNA, 201 bp, Homo sapiens
ggatgcctgtctcttttttttttttgagacagagttttactcttgttgcccaggctggagtgcaatggcttgatcttggctcaccgcaacctccgcttccrgggctcaagcgattctcctgcctcagcctcctgagtagctgggattacaggcatgcaccaccatgcccagctaattttgtatttttagtagagatggggt

SEQ ID NO: 11258 - DNA, 201 bp, Homo sapiens
ttacttgttttggcctcctaaatccccttggattataggtatgagccactgtgcccagtctaagtagaattttaaaaatctccttttctaaagaaaattgmatttgttgatagtaaagttttaaaattgggaagttatattgaaatgtgtctggtgcaaccagtggagtttaaattatttttgaccaaaatggattctgaa

SEQ ID NO: 11259 - DNA, 201 bp, Homo sapiens
gcggtggttcacacctgtaatcccaacattttgggaggccaaggcaggcagatcacctgaggtcaggagctcgagaccagcctggccaacatggcgaaacsccatctctactaaaaatacaaaaattagccaggcgtggtggcaggcgcctgtaatcctagctactaggaaggttgaggcaggagaatctcttgaacccgg

SEQ ID NO: 11260 - DNA, 201 bp, Homo sapiens
ttataggtatgagccactgtgcccagtctaagtagaattttaaaaatctccttttctaaagaaaattgaatttgttgatagtaaagttttaaaattgggamgttatattgaaatgtgtctggtgcaaccagtggagtttaaattatttttgaccaaaatggattctgaagaaatggtatggatagaaaacaaagaatgtaa

SEQ ID NO: 11261 - DNA, 201 bp, Homo sapiens
gagcagctgccctccagttgcaatgctggtctctgagatgagtgactgtaatgaagagattgatgataaccccatgtcctcagaccttcattgtttctgcrgaagggaactgggaaagtcttccaccaaggaatcttttgtgaggcagtgagcttgccttcctgttttctgtaattcctcccattctcccatgtgcttgcg

SEQ ID NO: 11262 - DNA, 201 bp, Homo sapiens
ctgtgcccagtctaagtagaattttaaaaatctccttttctaaagaaaattgaatttgttgatagtaaagttttaaaattgggaagttatattgaaatgtrtctggtgcaaccagtggagtttaaattatttttgaccaaaatggattctgaagaaatggtatggatagaaaacaaagaatgtaagttttatcttgaataa

SEQ ID NO: 11263 - DNA, 201 bp, Homo sapiens
taatagtgggtgtgctcagctgggagtgggtttggtttggtttggtttggttcaaaggcagcagaagtctgcatcttagctgtcttaatgtgaatgtgggrtcttgtgacagggtctcttctgtatcctgggggtggatctgcactctgcctgatggcctagctactttgccagaccctgcctgcttggtcttcaccaggt

SEQ ID NO: 11264 - DNA, 201 bp, Homo sapiens
aggctatgccctttcagtaccccctcttccctggctctgtttctaatctaggaataaacaagaaagtccttagtctttgaaaagaaaatgattccaaaatmcaaaaaaaaaaaaaaaaaaaaaaaagttaaaaagttaaacatcacgtttgtttggcttaaaataattatacatggcttgtaatgagggaaatccaaaatt

SEQ ID NO: 11265 - DNA, 201 bp, Homo sapiens
agattgtatttgcatgaagggcatgtagttagcctacaggtatgatgctagtgcttatttaattttctgaaatcttttagaagaaggctgcttgtgccacrtggggtacctgtgttcttttggctgtggagtttgcgcaggaagaggtttggagatccaggagcctgaagtcagatgacaggtgccttgacctctgtggca

SEQ ID NO: 11266 - DNA, 201 bp, Homo sapiens
gcaattcattcatgaaaacttaaaaacaatttatccacagtaaatgtcaaaaatacttgatcagaggtatcatgtggatgtaatagtcccatccttctttycccctccctagttcttaatccacatcctatcaaagtttcctcatttcaaagttttataaaaatgacaacggtttggagggacctcgctttttaggaagca

SEQ ID NO: 11267 - DNA, 201 bp, Homo sapiens
ggtagattctagtattaccttcctttttcagaagaggagaccaatggggagcattggaatgatttggttgcaagcatactacactacttgtaaactgcagrcacaggcttaaaaaaagtgaaaaactaaccatgcaataaagaatggaatgaaccatgaagctgtttctgtggccagtcatgtttttgaagcatatcccat

SEQ ID NO: 11268 - DNA, 201 bp, Homo sapiens
ggcccccaacaaagctggtgttcttttctttttgtctgtagtttcttatcctcctttgggtgtctaagggtcttttacatctcttgagtttttcaatactyacctttggatgtctggccagaccatgtcctagaactgttctgtcttcccaaagtcctggacctttaatggggcagctgacaactaaatatttttcatgtt

SEQ ID NO: 11269 - DNA, 201 bp, Homo sapiens
cttccctctcataatacattttaatattatggaaatgtggtccttgaaaaagtggtcattgagcacttaccaggtgctacggatacaattcctctgcagcwtgcattctagtggggagagacaggaaacaaatgctaaaatgtgcagggtgccaggagtggcccattccctgaaagaaaaggaaaggggagagtggttgtg

SEQ ID NO: 11270 - DNA, 201 bp, Homo sapiens
cttatgatggctgtgggtgctggcccccaacaaagctggtgttcttttctttttgtctgtagtttcttatcctcctttgggtgtctaagggtcttttacayctcttgagtttttcaatacttacctttggatgtctggccagaccatgtcctagaactgttctgtcttcccaaagtcctggacctttaatggggcagctga

SEQ ID NO: 11271 - DNA, 201 bp, Homo sapiens
caagttagcaaaaatgatgaggaggttggaaagctccaatgaaaccatggtcagtgggtgataagtgtgtgttgcagtttgataacatgaaagactgaaamtgagagagagttgaaaaataagtctttagaaaaatagagtttagggactggaagcctcaatgaggtagaaaaccagggtggagtaaggaggaactgaaag

SEQ ID NO: 11272 - DNA, 201 bp, Homo sapiens
ggaggaactgaaagcaaaagaaaagcacgtgtgtgacttgagagtgagatttccaaagtcagtttcagttaccacccaagcaatcactaacccttctaaaktgtcattatttcgtatattgatatggtattttattaattaatacactttttttttcaagatagagtttttctctgtcacctagattgaagtgcaatactg

SEQ ID NO: 11273 - DNA, 201 bp, Homo sapiens
cactaacccttctaaattgtcattatttcgtatattgatatggtattttattaattaatacactttttttttcaagatagagtttttctctgtcacctagrttgaagtgcaatactgtgatcatggcttactacagcctcagcttcccaaacgatccttctaatctcagcctcctgagtagctgggaccacaggaatgtgc

SEQ ID NO: 11274 - DNA, 201 bp, Homo sapiens
caagatagagtttttctctgtcacctagattgaagtgcaatactgtgatcatggcttactacagcctcagcttcccaaacgatccttctaatctcagcctsctgagtagctgggaccacaggaatgtgccatcttgcttgtctaactaaaaaaaaattttttattttagacatggagtctcactattttgcccaggctggt

SEQ ID NO: 11275 - DNA, 201 bp, Homo sapiens
tagctttcacagaaccaagggaaagctgtcttcttttcttgaaaaagacttgcctcaggaaataatgggcctcattggctgctgctaattggtgaaatgtkttttttttttttttttggtctgtgtagatattgtcactacttcagcatcatgagtgtggtgggtgattaatattctggatatattttacattatttgatc

SEQ ID NO: 11276 - DNA, 201 bp, Homo sapiens
acacttacctgcctgaaggcagtgtgctgaaatgaagaggcacattcaacagcattgtcatacattggacctgtgaggggtgtcattgaattgaccacttrggatgtttaaatgtttatttaaagttgcccttggctataaagcctgaagtgggtgttggagtagtcaacgactaacccaggatggatttgtgccaataca

SEQ ID NO: 11277 - DNA, 201 bp, Homo sapiens
cggaagggaactgggaaagtcttccaccaaggaatcttttgtgaggcagtgagcttgccttcctgttttctgtaattcctcccattctcccatgtgcttgyggcgagaggaggacgtgaggattgtgttaaagggtgatgagagagcaggagtggttgcagttctggaaaaagatctaataaaacacttacctgcctgaag

SEQ ID NO: 11278 - DNA, 201 bp, Homo sapiens
aaaataagtacataaacaccccagaaggttatatcagaagtcaaagtactatgatctctctgcatgcttttcagacatggtgagcgagcgttctgaacccycgggcccactttgcctggaggaccactgaggttttctactctctagtcttggggtgctgaagcctcaagagattagaaacaaatgcaattctctcccacc

SEQ ID NO: 11279 - DNA, 201 bp, Homo sapiens
aaaatattcaaaagtggagctgctgtggtggggtcattgaggggagagggatttcgagggcttaccgaggagccctgcagggcctctgacttgctcctggyagggtagcttggaaaccagcagatcaggtcattatttggatttcttgaagctgtggtgcaggaatgtgtttctaagacatctgcaacctaatgggaagta

SEQ ID NO: 11280 - DNA, 201 bp, Homo sapiens
atttttctgttcctagaggaatctagggaggaagtaaggtggagaggttaaagtcacagctcttcaatgatcttataactcacagagtttctgtttaagtyctcaaagtgacactgtgatgagcatctgtaaatgtgtgtgtttgtgctctcctggccacttcctcagatgaccttctaggcagaattgccagatcaaaag

SEQ ID NO: 11281 - DNA, 201 bp, Homo sapiens
ctcaagagattagaaacaaatgcaattctctcccacctagcaatttgggatgcaagctcaaaggtgagctcctcatcccctggagaagtacaactggccamacactacttttcttggactttcacggtggaattatttacttttcatggggaagaatgctactcagagatagctttcacagaaccaagggaaagctgtctt

SEQ ID NO: 11282 - DNA, 201 bp, Homo sapiens
gatgacattcaatttgctaatcagctgatctaagagtagagagatgatcctggattatctgggtgaatccagtgtaagcagtgtcctcaaaagtagaagcrggtagaaggtcagtccagagggagcagcatgagaaagactcaaccagacattgctggtatggacaatggaaggggccacaagtcaaggaatgtgggcagc

SEQ ID NO: 11283 - DNA, 201 bp, Homo sapiens
ttctctcccacctagcaatttgggatgcaagctcaaaggtgagctcctcatcccctggagaagtacaactggccaaacactacttttcttggactttcacrgtggaattatttacttttcatggggaagaatgctactcagagatagctttcacagaaccaagggaaagctgtcttcttttcttgaaaaagacttgcctca

SEQ ID NO: 11284 - DNA, 201 bp, Homo sapiens
agaggaatgaaggtgcagatgacattcaatttgctaatcagctgatctaagagtagagagatgatcctggattatctgggtgaatccagtgtaagcagtgwcctcaaaagtagaagcgggtagaaggtcagtccagagggagcagcatgagaaagactcaaccagacattgctggtatggacaatggaaggggccacaagt

SEQ ID NO: 11285 - DNA, 201 bp, Homo sapiens
ggaagaatgctactcagagatagctttcacagaaccaagggaaagctgtcttcttttcttgaaaaagacttgcctcaggaaataatgggcctcattggctsctgctaattggtgaaatgttttttttttttttttttggtctgtgtagatattgtcactacttcagcatcatgagtgtggtgggtgattaatattctggat

SEQ ID NO: 11286 - DNA, 201 bp, Homo sapiens
ataacttctaaagggggaactgttaaggtcacagtttgatggatataacaaacatgcaaacccttaagacaagctgagatttaatttgcagtgcacacacrcacacacatacacagagatgtcatcttagtgtgttggaaagcaccgttgggtaaaattatgaaatgtatcttaggaagtaaaggactgtatgattgaaga

SEQ ID NO: 11287 - DNA, 201 bp, Homo sapiens
aattttcttcactttccacatccataaaaagggttattaggatggttatgtttatttgtggtaaactcttaggaacatgcctggcatttaggaagcacaaytgagcagttgctactactttttttttgtctaaaacagattccattaatatactgtttttgatattacatagatctaattcatactcatatttttaatgta

SEQ ID NO: 11288 - DNA, 201 bp, Homo sapiens
ttttactttatacatataagtaacattttttctatcatatataatttaataaaatccaatctcactgtgaacactgtactgctgaaaattcatttttactrtaaaatagaattctgtaaattgctttaagaaagcatttattggctgggtgtggtggctcacacttgtaatcccagcactttgggaggccaaggtgggtgg

SEQ ID NO: 11289 - DNA, 201 bp, Homo sapiens
gtggcatgcactttttgaattatgtaatctgggcatattgtatacctttattttaaaaattttgtttaaaaatgccaatcacgtttattttactttatacmtataagtaacattttttctatcatatataatttaataaaatccaatctcactgtgaacactgtactgctgaaaattcatttttactataaaatagaattc

SEQ ID NO: 11290 - DNA, 201 bp, Homo sapiens
gggtttcactatgttggccaggatagtcttgatctcttgaccttgtgatccgcccgctttggcctcccaaagtgctaggattacaggtgtgagccaccgcrcccggcccaaaatgtttagtcctcaaataaggataataactgaatggcccagtgtgacacagagaagaggacttatgatggctgtgggtgctggccccca

SEQ ID NO: 11291 - DNA, 201 bp, Homo sapiens
cccagacaaccagtagtcaccattccaagtgaggggtggctgcaactctacagccccgttcgtctctcctcactgtcaaagctgctgagaccccagactcracacttgaaagaaacccatgtctgtgaagcacttgtggaccattcaagattgtggaagaatcactcaagagaaggagataggtgatgggatctagcttct

SEQ ID NO: 11292 - DNA, 201 bp, Homo sapiens
tcactcaagagaaggagataggtgatgggatctagcttctgatggtttctattttattgaatgtctaatagggcaagaatttgaaaaacgagaatgtttgycatgcaggaggacctgggaaggagataacacatttacagggagaaagattgggattcagttgggaggagtaactgaggaaaggggtcactcaaaatattt

SEQ ID NO: 11293 - DNA, 201 bp, Homo sapiens
ggagaaagattgggattcagttgggaggagtaactgaggaaaggggtcactcaaaatattttgtattttaggtcctttttctattaaggaggaatggattrtcaaagccttaacattaaattgtattgtgtcaggtgaattgctatggtttgaatgtggtgtgtccccctcccaaactcacattgaatttttttttttttt

SEQ ID NO: 11294 - DNA, 201 bp, Homo sapiens
agtctttgaaaagaaaatgattccaaaatacaaaaaaaaaaaaaaaaaaaaaaaagttaaaaagttaaacatcacgtttgtttggcttaaaataattatayatggcttgtaatgagggaaatccaaaattcacaagcctcttgatgtaaaataatttaaatatctttggtttgggattatgtggttactacaaaacatacc

SEQ ID NO: 11295 - DNA, 201 bp, Homo sapiens
atgtacttttgatgcttcaaggaataaaaagtctaaatagaattctaaatgcaaaacctctctctgtactactgaggattctcagatggaagaatacattkgttaaccatggtaacaacatatataatcaaagttttgcattattttgagcttggttataacaatgtgctacatccatccacacacacacagaaagagaag

SEQ ID NO: 11296 - DNA, 201 bp, Homo sapiens
ttctctgatccttttaggtagattctagtattaccttcctttttcagaagaggagaccaatggggagcattggaatgatttggttgcaagcatactacacwacttgtaaactgcagacacaggcttaaaaaaagtgaaaaactaaccatgcaataaagaatggaatgaaccatgaagctgtttctgtggccagtcatgttt

SEQ ID NO: 11297 - DNA, 201 bp, Homo sapiens
tcctgtgactcggctgaggccggtgtgatggagacttcccggcagcctcccggacctggtctctccaaggtcagatcttgaaacttctgggcacccatgcraatgcctgtcctggtgtgccgacttgctcttggtctgcgaagcctgtggacacatggtcaacatgaaaccaccttaacccgcttcccatcaggtctcgtg

SEQ ID NO: 11298 - DNA, 201 bp, Homo sapiens
tttcaaaatgtgcttacatttattgtgcacttactatgtgccaggtgcaacgctagccctttgcacgagttgttccattttaccctttctctgatcctttkaggtagattctagtattaccttcctttttcagaagaggagaccaatggggagcattggaatgatttggttgcaagcatactacactacttgtaaactgca

SEQ ID NO: 11299 - DNA, 201 bp, Homo sapiens
ggctctctgggcaacttttatggggcagaggtttagaaagctaggagtaagctgccaggtatcaggaaaccactagatggcagggccatcccttggagccygttcttcaatcaagaaagtggtcagagaggaaagtggagtggggaagagtccaagtacacatgttaaatgcacgttaataagtggatggtgaagatgagc

SEQ ID NO: 11300 - DNA, 201 bp, Homo sapiens
attgtgtcatttaatcttcacaataacacagttaattaggtcccaccgttttctgaatttcatcaatgaggaaatagcagcaaagaggaggtaacaaattyggtgcaggtgcttagcccaaagactaataatacatttcaaaatgtgcttacatttattgtgcacttactatgtgccaggtgcaacgctagccctttgcac

SEQ ID NO: 11301 - DNA, 201 bp, Homo sapiens
tgagatgaaagggactaggaaaggaataagaatattgtggcattctttccagagtaattttgttgaagtctcatcagagttttcaattttcccacaatgtrtattttaacacttaaaagtacattagaaaaattgcagaatcactttaattcaatacttttatttttagaacacttaaaaatatttttcaaatacacttga

SEQ ID NO: 11302 - DNA, 201 bp, Homo sapiens
caccttcaggatggatattttcccttcttagcaattcattcatgaaaacttaaaaacaatttatccacagtaaatgtcaaaaatacttgatcagaggtatyatgtggatgtaatagtcccatccttctttccccctccctagttcttaatccacatcctatcaaagtttcctcatttcaaagttttataaaaatgacaacg

SEQ ID NO: 11303 - DNA, 201 bp, Homo sapiens
tggccaaacactacttttcttggactttcacggtggaattatttacttttcatggggaagaatgctactcagagatagctttcacagaaccaagggaaagmtgtcttcttttcttgaaaaagacttgcctcaggaaataatgggcctcattggctgctgctaattggtgaaatgttttttttttttttttttggtctgtgt

SEQ ID NO: 11304 - DNA, 201 bp, Homo sapiens
cactttggaaggccgaggcaggcagaccacgaggtcaggagatcaagaccatcctggccaacatggtgaaaccccgtctctactaaaagtacaaaaattarctgggcatggtggcatgtgcctgtaaccccagctactcaggaggctgaggcaggagaatcgcttgaaccagggagtcagaagttgcagtgagccgatatc

SEQ ID NO: 11305 - DNA, 201 bp, Homo sapiens
aggagtaactgaggaaaggggtcactcaaaatattttgtattttaggtcctttttctattaaggaggaatggattatcaaagccttaacattaaattgtaytgtgtcaggtgaattgctatggtttgaatgtggtgtgtccccctcccaaactcacattgaatttttttttttttttttgagacggagtctcgctctgttg

SEQ ID NO: 11306 - DNA, 201 bp, Homo sapiens
ccctcctctccctaagcttggggcatgtttctctggattacatattttttcattatgtaaacacaataaatcatgtcaacagcctgtgctaaccagcctcyacacctcactgtgacacttgcttctggtgaaaattgtttcttcttttgctaaagtgactgtattctatgaatacctatttcaagtataacttctaaaggg

SEQ ID NO: 11307 - DNA, 201 bp, Homo sapiens
cattgttgcaaaaaaaaccattttttaaaaataatttttctcccaaatctaacttctgaagtaggaccagttaaaatcccataatgatggataccagaaaygtgaatttttagaagcaggtgagatttgatgcacagtttttaaccacactgcatgctctgggaggaaaatcctttataccttggttaattccaatggtaa

SEQ ID NO: 11308 - DNA, 201 bp, Homo sapiens
aaaaaaaaccattttttaaaaataatttttctcccaaatctaacttctgaagtaggaccagttaaaatcccataatgatggataccagaaacgtgaatttytagaagcaggtgagatttgatgcacagtttttaaccacactgcatgctctgggaggaaaatcctttataccttggttaattccaatggtaaacaggcctc

SEQ ID NO: 11309 - DNA, 201 bp, Homo sapiens
cttctggtgaaaattgtttcttcttttgctaaagtgactgtattctatgaatacctatttcaagtataacttctaaagggggaactgttaaggtcacagtytgatggatataacaaacatgcaaacccttaagacaagctgagatttaatttgcagtgcacacacgcacacacatacacagagatgtcatcttagtgtgtt

SEQ ID NO: 11310 - DNA, 201 bp, Homo sapiens
atgatttctgccaccatatttttatcccatgtcctcgtcaccaaagcagtcaccctcgcttatataaatatttgttttatattagcatctgtgttatggtrattcagaacataacaaagcaagttcttgcctatgaataacattatagatgccccagatgataggtcattcttttatttggttcacattttggttcacaat

SEQ ID NO: 11311 - DNA, 201 bp, Homo sapiens
agtataacttctaaagggggaactgttaaggtcacagtttgatggatataacaaacatgcaaacccttaagacaagctgagatttaatttgcagtgcacasacgcacacacatacacagagatgtcatcttagtgtgttggaaagcaccgttgggtaaaattatgaaatgtatcttaggaagtaaaggactgtatgattga

SEQ ID NO: 11312 - DNA, 201 bp, Homo sapiens
atttgtctggaatcaagctgtgtctttgggaatagctatagaacatgtggcttggttatttataagcttgggttcagagagttatgcaaatgcaaaagcargcaaggggctgctgtcctcttagtaaggatggtgtgtgcagctgagtcagaggaagggttggaagcccagccccagtgctgccctagctttgggactgta

SEQ ID NO: 11313 - DNA, 201 bp, Homo sapiens
ctaatgggtggcaggcactccattaggtactaagaacatgacagagaagaggaccatgtataccctcctggattgcaagtttagctgctgagacagacaaktgcccaaatgaccaggaggcatcagtaggtgagacatggtgagaagggcatgaagcttctgaggaggggcaggaagggaagcaaagcttcctagagttgg

SEQ ID NO: 11314 - DNA, 201 bp, Homo sapiens
aaagacatcatctctcttgaagtccaagatgtgttggaaggtgagcagaaaattatatcttagttatttgtctggaatcaagctgtgtctttgggaatagytatagaacatgtggcttggttatttataagcttgggttcagagagttatgcaaatgcaaaagcaggcaaggggctgctgtcctcttagtaaggatggtgt

SEQ ID NO: 11315 - DNA, 201 bp, Homo sapiens
caattgcccaaatgaccaggaggcatcagtaggtgagacatggtgagaagggcatgaagcttctgaggaggggcaggaagggaagcaaagcttcctagagwtgggacacccacattaagaggagtaaagtgtcgacaatggaggagggaaatttcagacagaggtaacagcatgagccaagaagcaaggcctgaaaattca

SEQ ID NO: 11316 - DNA, 201 bp, Homo sapiens
ccaagaagcaaggcctgaaaattcagaatacgtttgggcacaagtagtaaaatccctttctgtggtagctagaccaattctccacctccaaagacatccayctcccaatccctggaacccggtaatgagctatgtgacctgccaaagaggaatgaaggtgcagatgacattcaatttgctaatcagctgatctaagagtag

SEQ ID NO: 11317 - DNA, 201 bp, Homo sapiens
ggagaatgaacagtaagcatgacttacatggtattccaaaattcaaatattcattcataaaaatgagtgaagccagtacatgtctcagagcctgcaactcrgtcccttatgccactcctaaacccaatccaaatctactctcagccagatcaccaggcagaatgagaaaagaaatactcattttccaagcacatccatctt

SEQ ID NO: 11318 - DNA, 201 bp, Homo sapiens
tctactaaaaatacaaaaattagccaggcgtggtggcaggcgcctgtaatcctagctactaggaaggttgaggcaggagaatctcttgaacccggcaggcrgaggttgcagtgagccgagatcacaccactgtacttcagacagagcaagactgtctcaaaaaaaaaaaaaaaaaggcttgtaagtaaataatgatacaaa

SEQ ID NO: 11319 - DNA, 201 bp, Homo sapiens
ctaggaaggttgaggcaggagaatctcttgaacccggcaggcagaggttgcagtgagccgagatcacaccactgtacttcagacagagcaagactgtctcaaaaaaaaaaaaaaaaaggcttgtaagtaaataatgatacaaagaagatacatgagcagtgtcaaaaggcaggtttatttttcttccctttatccataact

SEQ ID NO: 11320 - DNA, 201 bp, Homo sapiens
cccaagactagatagtggaaaatctcagtagctctccaggcaaagctggccgggtggcggctggggggcattgggggcggggttgggattcagaacgctcmcccaccatgtctgaaaagcatccagagagatcataatgctttgacttctgatataaccttttggggtgtttatgtacttttgatgcttcaaggaataaaa

SEQ ID NO: 11321 - DNA, 201 bp, Homo sapiens
cagtagctctccaggcaaagctggccgggtggcggctggggggcattgggggcggggttgggattcagaacgctcacccaccatgtctgaaaagcatccaragagatcataatgctttgacttctgatataaccttttggggtgtttatgtacttttgatgcttcaaggaataaaaagtctaaatagaattctaaatgcaa

SEQ ID NO: 11322 - DNA, 201 bp, Homo sapiens
gtagctctccaggcaaagctggccgggtggcggctggggggcattgggggcggggttgggattcagaacgctcacccaccatgtctgaaaagcatccagaragatcataatgctttgacttctgatataaccttttggggtgtttatgtacttttgatgcttcaaggaataaaaagtctaaatagaattctaaatgcaaaa

SEQ ID NO: 11323 - DNA, 201 bp, Homo sapiens
cacttcttcagcatcctaaatttgcacatgataacatctgttgtcctccatcagatataatcagtattgctaatctacagtgccacattggcagtagtgatttttttttttttttgagacggagtcttgctctgtcgcccagcctggagtgcagtggcaagatcttggctcactgcaagctctgcctcctgggttcacgcc

SEQ ID NO: 11324 - DNA, 201 bp, Homo sapiens
atattttcccttcttagcaattcattcatgaaaacttaaaaacaatttatccacagtaaatgtcaaaaatacttgatcagaggtatcatgtggatgtaatrgtcccatccttctttccccctccctagttcttaatccacatcctatcaaagtttcctcatttcaaagttttataaaaatgacaacggtttggagggacct

SEQ ID NO: 11325 - DNA, 201 bp, Homo sapiens
tgatgaataaatactttcatatcttcctcacaaaaagtctaaaagaaagctagaataaagtcaccccattttatactggaggaaactgaggcacagagggkttaagtgacttgggaatagttgtctggttactggtagaattgattctagcacccaaatcacccaactcttggtcctaaaaatgaaatagcaactacagct

SEQ ID NO: 11326 - DNA, 201 bp, Homo sapiens
agcacaaccactttaaaaaggtgaaagtaggaaaactagctcaatgagagggctaatatttttatggggccaatgatttgaattggtagacatatatgccytcctacatgatataggagatagagtgcaaaaatcaaaccaaagtgttttttcctaccctcactcaccacacactactcctcacatgccaagcaagcaagc

SEQ ID NO: 11327 - DNA, 201 bp, Homo sapiens
caactcagtcccttatgccactcctaaacccaatccaaatctactctcagccagatcaccaggcagaatgagaaaagaaatactcattttccaagcacatscatcttcaatgagctctgaaaagacccttaaaactatttagaaaaaatcatcagtgggagttgtgtcttagaaagaaacagttcctttaaaatgacatct

SEQ ID NO: 11328 - DNA, 201 bp, Homo sapiens
aaaggccctgaggcaggagcgtgcctttgaaaagaaatggcaaggaatggctggaggacagcaagtgcagggaggctgggaggagacggaggaaagggcartgagatcctagagggccctggccacactgaaagaagctcctgtgaaacggagtctctcagaataggtcccttttaaagtcacctgaaaccaggtgtcagt

SEQ ID NO: 11329 - DNA, 201 bp, Homo sapiens
tttggttcacattttggttcacaatgggtcataatcaggcaccaatcttgcttgtttcccagcaatatttgcagatatgcaaactggccccttgcatgcamatcctggagcacgtcctggagcctttagaggtgagtgagaaggtaagtgtagtgaaatcctcttgaaggattttaagaggcagagcctcagacaagtggt

SEQ ID NO: 11330 - DNA, 201 bp, Homo sapiens
aagggtgagaaagcaaatataataattgtctcatctctataacatttaaagatttgattaagtgaaacaaagccccagctgctggagcagaggttccactygggttccacagacacccacagcccaaatccctggaggtcagtggggctcacagtgagtgtggggatgcttctaatagtgggtgtgctcagctgggagtgg

SEQ ID NO: 11331 - DNA, 201 bp, Homo sapiens
tctctgatagggcagcatctgagcagagaccagaggatatgaggggagtgagcaacagggctatttgtgggggaagacagtaagtgcaaaggccctgaggyaggagcgtgcctttgaaaagaaatggcaaggaatggctggaggacagcaagtgcagggaggctgggaggagacggaggaaagggcaatgagatcctagag

SEQ ID NO: 11332 - DNA, 201 bp, Homo sapiens
aatcctagctactcaggaggctgaggcacaagaatcgcttaaacctgggaggtgaaggttgcagtgagccgattatgtcagtgcactctagcctagatgamaagagtgagactctgtctcaaaaaaaaaaataataataataaattaaaaaagtacaccatgattggttacattaaccacatttatttatttaatattttt

SEQ ID NO: 11333 - DNA, 201 bp, Homo sapiens
gcttcctgatgtatggcagattgttcctggctttcaaatttccacaccttgaaagatgcccagggagcctatgaaaagcccaagacctggctgggcgcggyggctcaggcctgtaatcccagcactttggaagaccgagacgggtggatcacctgaagtcaggagttcaagacgagcctggccaacatggcaaaaccccgt

SEQ ID NO: 11334 - DNA, 201 bp, Homo sapiens
ttttagtagagatggcgtttgaccatgttgggcaggctggtcttgaactcctgacgtcaggtgatccacttgccttggcctcccaaagtgctgggattacwggcatgagccacagcgcccggcctaaccactttaaaaatatatttaagtgcccccagtatcactgctttctaaactatttcaaaaactgaagggtactat

SEQ ID NO: 11335 - DNA, 201 bp, Homo sapiens
ctgaggcaggagaatcgcttgaagctgggaggcagaggttgcagtgagctgagattgcaccatcgcattccagcctggcgacagagcaagactccatctcaaaaaaaaaaaaaaaaaaaaagagagagagaaaagaaaagcccaagacctcggggccatccccaaacctactgttatcagattttgaatctatcttttttt

SEQ ID NO: 11336 - DNA, 201 bp, Homo sapiens
ataaagatcacatgtattccttctgcccaaagataatgaacacctcacaatgctgtagactcttctaggaggctcctgtgtggccagccacagtaatgctktttatttattattttattattattattattattatttgagatggagttttgctcttcttgaccaggctggagtccaatgttgcgatctccgctttctgca

SEQ ID NO: 11337 - DNA, 201 bp, Homo sapiens
tttttgttgttgttgttttgttttttttgagacagagtcttgctctgtcccccaggctggagtgcagtggcgggatcttggctcactgcaggctctgcttyccggattcatgccattctcctgcctcagcctcccgagtagctgggactacaggcgcccaccaccacacccgctaattttttgtattttagtaaatacggg

SEQ ID NO: 11338 - DNA, 201 bp, Homo sapiens
gttgttgttgttttgttttttttgagacagagtcttgctctgtcccccaggctggagtgcagtggcgggatcttggctcactgcaggctctgcttcccggrttcatgccattctcctgcctcagcctcccgagtagctgggactacaggcgcccaccaccacacccgctaattttttgtattttagtaaatacggggtttc

SEQ ID NO: 11339 - DNA, 201 bp, Homo sapiens
tcaccatgttggtcaggctggtcttgaactcctgacctcaggtgatttacctgccttggcctcccaaagttctgggattacaggcatgagccaccgtgccyggccagtaatgctgtttaaaatgaaagaaggctctacaatggggccatgacgcacaccgcatatgaagtgggcatcttccgtgtcagtaagttttatgta

SEQ ID NO: 11340 - DNA, 201 bp, Homo sapiens
tttgtgctctcctggccacttcctcagatgaccttctaggcagaattgccagatcaaaagggtacacaccttggaagcattgatgtgggatgcctgtctcttttttttttttgagacagagttttactcttgttgcccaggctggagtgcaatggcttgatcttggctcaccgcaacctccgcttccggggctcaagcgat

SEQ ID NO: 11341 - DNA, 201 bp, Homo sapiens
gggtgccaggagtggcccattccctgaaagaaaaggaaaggggagagtggttgtgtcaggagattctctctgatagggcagcatctgagcagagaccagasgatatgaggggagtgagcaacagggctatttgtgggggaagacagtaagtgcaaaggccctgaggcaggagcgtgcctttgaaaagaaatggcaaggaat

SEQ ID NO: 11342 - DNA, 201 bp, Homo sapiens
agaagaggaagggtgttgtccccgctgcaatagagagagcaaattctctcttcctctgcctttgtgttctatccaggccctcagccctttggatggtgccygcccacattggtgaggtcagatcttccttattcagttcactgattcaaatgccaatctcttccggaaataccttcacagacatacccagaaataatgtgc

SEQ ID NO: 11343 - DNA, 201 bp, Homo sapiens
ctcgacctcctgacctcaagtgatctgcgagctttagcctcccaaaatgttgggattacagacgtaagccaccacgcctggcccagaaacacatattctawaaaccaacttgaattagcagcagagatgtatatcccttagatatggtattttctttctttctttctctttctttctttctcttttctttctttctttctt

SEQ ID NO: 11344 - DNA, 201 bp, Homo sapiens
ctgtgactcggctgaggccggtgtgatggagacttcccggcagcctcccggacctggtctctccaaggtcagatcttgaaacttctgggcacccatgcaartgcctgtcctggtgtgccgacttgctcttggtctgcgaagcctgtggacacatggtcaacatgaaaccaccttaacccgcttcccatcaggtctcgtggg

SEQ ID NO: 11345 - DNA, 201 bp, Homo sapiens
agcactgttatctttgcaccagagcccactctcacctaatctccgtgtgctggtgctacgtcaagtgtggtggtggttaggagtcaccttccgtgtgaggycaagcgttctggctcccgttgtccttgaagttgcatctcaggcttctgggcatggcagagcctgcgttcctgtgactcggctgaggccggtgtgatggag

SEQ ID NO: 11346 - DNA, 201 bp, Homo sapiens
cagcactgttatctttgcaccagagcccactctcacctaatctccgtgtgctggtgctacgtcaagtgtggtggtggttaggagtcaccttccgtgtgagrtcaagcgttctggctcccgttgtccttgaagttgcatctcaggcttctgggcatggcagagcctgcgttcctgtgactcggctgaggccggtgtgatgga

SEQ ID NO: 11347 - DNA, 201 bp, Homo sapiens
gatctgacaggaggcggagctcaggtggtaatacttgctcacctgccactcacctactgctgtggggcccactgcccaacaggccacagaccagtaccacwccatggcctggggatcggggactcctggtttagagaattaaaaagatggaatttaacatttagctcattaagagcacatctcttaagccaaagtaaggca

SEQ ID NO: 11348 - DNA, 201 bp, Homo sapiens
ttgcatgtgtagttcacaatagggttcacactcctatgagaatctaatgctgccactgatctgacaggaggcggagctcaggtggtaatacttgctcacckgccactcacctactgctgtggggcccactgcccaacaggccacagaccagtaccactccatggcctggggatcggggactcctggtttagagaattaaaa

SEQ ID NO: 11349 - DNA, 201 bp, Homo sapiens
cctaaatttaaagttcagctttatcaggggagcctgggagaatggttacattaacctctttgtggcctttgaaacatacatagaaaatatcaagggatagwtgtaaaaatgaggataaaaacatctaaagtgctaagtagaaagtaactgagtagaatggaagcctgtagagcaaaaaattagattgtggtttgagtgagt

SEQ ID NO: 11350 - DNA, 201 bp, Homo sapiens
caggtatgatgctagtgcttatttaattttctgaaatcttttagaagaaggctgcttgtgccacgtggggtacctgtgttcttttggctgtggagtttgcrcaggaagaggtttggagatccaggagcctgaagtcagatgacaggtgccttgacctctgtggcatgtctctttggactctgtgaaagttatttaattgct

SEQ ID NO: 11351 - DNA, 201 bp, Homo sapiens
gtttggagatccaggagcctgaagtcagatgacaggtgccttgacctctgtggcatgtctctttggactctgtgaaagttatttaattgctgtggttttcyagaagaatatgaagataattgtaaggtgccacatgcactgcttggactcttacagttctgacagttattcctgacaaatttcaaaaccaaagtctgtttc

SEQ ID NO: 11352 - DNA, 201 bp, Homo sapiens
ccactaaaaagaagagcaagcactctgaattttagtctctgttatgccatttcctggcatttggaggaaaagcacattctacagaaaaatcacgggatggyactatctgttttgtatctgattttaacatgtgttatctcttaggtacagggtcatacacttggaaggtgtgatattgtgaaatatgtatttggtcttcct

SEQ ID NO: 11353 - DNA, 201 bp, Homo sapiens
tgatagggcagcatctgagcagagaccagaggatatgaggggagtgagcaacagggctatttgtgggggaagacagtaagtgcaaaggccctgaggcaggrgcgtgcctttgaaaagaaatggcaaggaatggctggaggacagcaagtgcagggaggctgggaggagacggaggaaagggcaatgagatcctagagggcc

SEQ ID NO: 11354 - DNA, 201 bp, Homo sapiens
ggaggcctgagtgggcggatcacgagatcaagagatggagaccatcctggccaacatggtaaaaccctgtctctactaaaaatataaaaattagctgagcrtggtggtgtggtaaaaccccgtctctactaaaaatataaaaattagctaggcctgtagtcccagctacttgggaggctgaggcaggagaatcacttgaac

SEQ ID NO: 11355 - DNA, 201 bp, Homo sapiens
accctgtctctactaaaaatataaaaattagctgagcatggtggtgtggtaaaaccccgtctctactaaaaatataaaaattagctaggcctgtagtcccrgctacttgggaggctgaggcaggagaatcacttgaacccgggaggtggaggttgcagtgagtcgagatcgcgccactgcactccagcctggtgacagagc

SEQ ID NO: 11356 - DNA, 201 bp, Homo sapiens
gcaggggctggttttgtggaagacaatttttccacagacccggggggcagggggcaaagatagtttcgggatgaaactgttccacctcgtattatcaggcrttacttagattcttataaggagcatgcagcctagatcccttgcatgtgtagttcacaatagggttcacactcctatgagaatctaatgctgccactgatc

SEQ ID NO: 11357 - DNA, 201 bp, Homo sapiens
ctataactttggggatgtttgaaagtgttgaccgagtcacccacctggtcttctgccatgtcacttggccctgctggtccatttgtttttggccagtgccygtttgggagccaaaccttgtcacctacctccagcccaccttgcccctggggagtcaggtgcagatgcttctccgggcccttcccactgtcctgttctgat

SEQ ID NO: 11358 - DNA, 201 bp, Homo sapiens
gttctctagagaaacatatgcatttgtatgtaagatatagaaaagattcatttcaaggaattggcctgtgtgattgtggggactggcaagtctgaaatgtrcaggacaggcaggaaatgtgcaagaattgatgctaaagtcgcggcagaattccttccctctaaaacctcaatttttgctcttaaagccttcaactggtta

SEQ ID NO: 11359 - DNA, 201 bp, Homo sapiens
gtgaaatcctcttgaaggattttaagaggcagagcctcagacaagtggtttaactctcctaaggtttggttccctcctttgtgcagatcccatatggttgytttgaggctgacataagaaaatgcacaaaaacatttgccgagtgtgggggataccacagagtgaatactttggagtctgcttttcataatgtgatctgct

SEQ ID NO: 11360 - DNA, 201 bp, Homo sapiens
ctgtgtcagggaaataaggagacgtgggagtgaggccatgtgcttgtgctgggcaggactgtgcatggggcgcacctgtgaggtcgagtaggagagacgtygggtgcttctgggggtggagattagatttgcagattggggagtaggttagatgccctccctgggctctcaacgtggaaaggaggctgggagtgggcagtg

SEQ ID NO: 11361 - DNA, 201 bp, Homo sapiens
gggtgcttctgggggtggagattagatttgcagattggggagtaggttagatgccctccctgggctctcaacgtggaaaggaggctgggagtgggcagtgrggcctggggcgttagcagctggaggtgggatgacagagaagaacgagaaggccaatggagaaatggcattcccactccagctttctgcaaggttgtatca

SEQ ID NO: 11362 - DNA, 201 bp, Homo sapiens
gattagatttgcagattggggagtaggttagatgccctccctgggctctcaacgtggaaaggaggctgggagtgggcagtggggcctggggcgttagcagytggaggtgggatgacagagaagaacgagaaggccaatggagaaatggcattcccactccagctttctgcaaggttgtatcattgaagtcgtgcatgtcag

SEQ ID NO: 11363 - DNA, 201 bp, Homo sapiens
agctggaggtgggatgacagagaagaacgagaaggccaatggagaaatggcattcccactccagctttctgcaaggttgtatcattgaagtcgtgcatgtsagccttctagatgtgtgggtagaggggtaagactggaggagcagggccgagtcaaggctgggtaggacttgggtgacaccaaatgaaattagtattaaag

SEQ ID NO: 11364 - DNA, 201 bp, Homo sapiens
aagttattcagataagtagatgtatggaatacctaacagatccctaatatcattacatttatgcagcaaaataaaaattctggaggacagaggccgggcayggtggctcatgcctgtaatcccagaactttaggaggctgaggcaggtggatcacttgaggccaggagttcaagcccagcctggccaacatggtgaaaccg

SEQ ID NO: 11365 - DNA, 201 bp, Homo sapiens
gggcacccatgcaaatgcctgtcctggtgtgccgacttgctcttggtctgcgaagcctgtggacacatggtcaacatgaaaccaccttaacccgcttcccrtcaggtctcgtgggagggatggggcagtgcctggagcacagagaggctcaggaaagggcagttcaactggtttcactgtggtggatcccttatgggggtc

SEQ ID NO: 11366 - DNA, 201 bp, Homo sapiens
atgaaaccaccttaacccgcttcccatcaggtctcgtgggagggatggggcagtgcctggagcacagagaggctcaggaaagggcagttcaactggtttcrctgtggtggatcccttatgggggtctttctagcccaaactgggtgtgatcctgggatagtcaagagctcatgggaagctcttgtttttctcgtattttat

SEQ ID NO: 11367 - DNA, 201 bp, Homo sapiens
ccgcttcccatcaggtctcgtgggagggatggggcagtgcctggagcacagagaggctcaggaaagggcagttcaactggtttcactgtggtggatccctyatgggggtctttctagcccaaactgggtgtgatcctgggatagtcaagagctcatgggaagctcttgtttttctcgtattttataggaacgtggagtttt

SEQ ID NO: 11368 - DNA, 201 bp, Homo sapiens
tggtggatcccttatgggggtctttctagcccaaactgggtgtgatcctgggatagtcaagagctcatgggaagctcttgtttttctcgtattttataggmacgtggagttttcaggaagtccaaaaaagtgcccagtggtcttggcaggctttgagtcttggccacctgacttgttgccagttcccttcacccctggtga

SEQ ID NO: 11369 - DNA, 201 bp, Homo sapiens
ggtgtgcaccaccacgcctggctaatttttgtatttttagtagagacggggttttgccatgttggctgggctggtctcaaactcctggcctcaagtgaccygcccgcctcagcctccaaaagttctggaattataggcgtgagccaccgctcctggcctcttagtgcttttgaatgaaataaaaacccgtaattattttaa

SEQ ID NO: 11370 - DNA, 201 bp, Homo sapiens
tcttaatccacatcctatcaaagtttcctcatttcaaagttttataaaaatgacaacggtttggagggacctcgctttttaggaagcattcagatagctcrtcactctatcaatagtcactgcccgaattctgaaagcatgaagaagtatgcagagcttgattttagttttataaaaatccggttcttcaagggaggattt

SEQ ID NO: 11371 - DNA, 201 bp, Homo sapiens
gtggatcccttatgggggtctttctagcccaaactgggtgtgatcctgggatagtcaagagctcatgggaagctcttgtttttctcgtattttataggaaygtggagttttcaggaagtccaaaaaagtgcccagtggtcttggcaggctttgagtcttggccacctgacttgttgccagttcccttcacccctggtgacc

SEQ ID NO: 11372 - DNA, 201 bp, Homo sapiens
cacatcctatcaaagtttcctcatttcaaagttttataaaaatgacaacggtttggagggacctcgctttttaggaagcattcagatagctcatcactctrtcaatagtcactgcccgaattctgaaagcatgaagaagtatgcagagcttgattttagttttataaaaatccggttcttcaagggaggatttttgtggca

SEQ ID NO: 11373 - DNA, 201 bp, Homo sapiens
tttgagtcttggccacctgacttgttgccagttcccttcacccctggtgacccctaacgtttatctggggtctcatcatggggtcagaatttgttacttcmgtttcttttatgaaagagtgcatttgggtgtatttgaattgtttattttatactctatgaagtcaataaacccattcctatcacccatcccactgcctga

SEQ ID NO: 11374 - DNA, 201 bp, Homo sapiens
ttgtgctctcctggccacttcctcagatgaccttctaggcagaattgccagatcaaaagggtacacaccttggaagcattgatgtgggatgcctgtctcttttttttttttgagacagagttttactcttgttgcccaggctggagtgcaatggcttgatcttggctcaccgcaacctccgcttccggggctcaagcgatt

SEQ ID NO: 11375 - DNA, 201 bp, Homo sapiens
gggatgcctgtctcttttttttttttgagacagagttttactcttgttgcccaggctggagtgcaatggcttgatcttggctcaccgcaacctccgcttcyggggctcaagcgattctcctgcctcagcctcctgagtagctgggattacaggcatgcaccaccatgcccagctaattttgtatttttagtagagatgggg

SEQ ID NO: 11376 - DNA, 201 bp, Homo sapiens
ggatgtaagtctgttaagtaagatattaatctccttaattacggaaattacatagaaacctttatttttattttaaagtaatacacacatcatttattaattgttgtttccagatatattaattacaagcatggttttagacagcattggaaaagtatttatatggtaaataaaataacttctagttgtcaaggaaagtga

SEQ ID NO: 11377 - DNA, 201 bp, Homo sapiens
gatgtaagtctgttaagtaagatattaatctccttaattacggaaattacatagaaacctttatttttattttaaagtaatacacacatcatttattaattgttgtttccagatatattaattacaagcatggttttagacagcattggaaaagtatttatatggtaaataaaataacttctagttgtcaaggaaagtgaa

SEQ ID NO: 11378 - DNA, 201 bp, Homo sapiens
atgtaagtctgttaagtaagatattaatctccttaattacggaaattacatagaaacctttatttttattttaaagtaatacacacatcatttattaattgttgtttccagatatattaattacaagcatggttttagacagcattggaaaagtatttatatggtaaataaaataacttctagttgtcaaggaaagtgaaa

SEQ ID NO: 11379 - DNA, 201 bp, Homo sapiens
gcatgaaccagggaggcagaacttgcagtgagccaagatcgcgccactgcactccagcctgggtgacagagcgatattccatctcaaaaaaaaaaaaaaawttatttatatagtacttatatattatctatgtactttttcccagacacacacagtgaacaagtgatcactgggctcctttcccaggcacagtttttgtaa

SEQ ID NO: 11380 - DNA, 201 bp, Homo sapiens
ggaggctgagtcaggagaattgtttgtacctggaaggtggaggttgcagtgagccaagatcgccattgcactccagcctgggcaacaagagtgaaacttcrtctcaaaaaaaaaaaaaaaagaaagaaagaaagaaagaaaaaattagaactaaacaggtgttcttgtctgtccaacatagactggtagactcagagggag

SEQ ID NO: 11381 - DNA, 201 bp, Homo sapiens
gtttgtacctggaaggtggaggttgcagtgagccaagatcgccattgcactccagcctgggcaacaagagtgaaacttcgtctcaaaaaaaaaaaaaaaaraaagaaagaaagaaagaaaaaattagaactaaacaggtgttcttgtctgtccaacatagactggtagactcagagggagtattccaatgttcggaaactg

SEQ ID NO: 11382 - DNA, 201 bp, Homo sapiens
accttttgggcagcaggggctggttttgtggaagacaatttttccacagacccggggggcagggggcaaagatagtttcgggatgaaactgttccacctcrtattatcaggcattacttagattcttataaggagcatgcagcctagatcccttgcatgtgtagttcacaatagggttcacactcctatgagaatctaatg

SEQ ID NO: 11383 - DNA, 201 bp, Homo sapiens
gcgattctcctccctcagcctcccaagtagctgggattacaggcacctgccaccatgcctggctaatttttgtatttttagtagtgacagggtttcaccaygttggccaggctggtctcgaactcctgactttgtgatctacctgccttggcttcccaaagtgctgggattacaggcgtgagccaccatacctggccccat

SEQ ID NO: 11384 - DNA, 201 bp, Homo sapiens
agtgctgggattacaggcgtgagccaccatacctggccccatccttgacttttaacatgtacagagcaaccaataacgagtccttcctcaaagtaaagtgaaatgaataataaatgtctaagactttgtggttaaacctaactccacactgaggtgggtcctgtccctgttgatctaaattttcctccactaggggtctaa

SEQ ID NO: 11385 - DNA, 201 bp, Homo sapiens
tgaaacctaagatttacatgatttacagcagtggtccgcaaccttttgggcagcaggggctggttttgtggaagacaatttttccacagacccggggggcrgggggcaaagatagtttcgggatgaaactgttccacctcgtattatcaggcattacttagattcttataaggagcatgcagcctagatcccttgcatgtg

SEQ ID NO: 11386 - DNA, 201 bp, Homo sapiens
cgcctgtaatcccagcactttgggaggccgaggcgggcagatcacctgaggtcaggagttcaagaccagcctggccaaaatggtgaagcgttttctctacyaaaaatacaaaaattagtcaggagtggtggtgtgcgcctgtagtcccagctgaggcataagaattgtttgaaccagggaggaggaggctgcagtgagctg

SEQ ID NO: 11387 - DNA, 201 bp, Homo sapiens
cactgtattgtgtcatttaatcttcacaataacacagttaattaggtcccaccgttttctgaatttcatcaatgaggaaatagcagcaaagaggaggtaamaaattcggtgcaggtgcttagcccaaagactaataatacatttcaaaatgtgcttacatttattgtgcacttactatgtgccaggtgcaacgctagccct

SEQ ID NO: 11388 - DNA, 201 bp, Homo sapiens
cacacttaatatgctgagtgccatgggggacagcacatcagcgggtgttctgatgtcttgtgagaactgtgacaaatttatgttgagtaataactaggtgytggcactgtattgtgtcatttaatcttcacaataacacagttaattaggtcccaccgttttctgaatttcatcaatgaggaaatagcagcaaagaggagg

SEQ ID NO: 11389 - DNA, 201 bp, Homo sapiens
accctgccttttgccctcatacttcacaccaggcagccgcttgtgccgaccacacttaatatgctgagtgccatgggggacagcacatcagcgggtgttckgatgtcttgtgagaactgtgacaaatttatgttgagtaataactaggtgctggcactgtattgtgtcatttaatcttcacaataacacagttaattaggt

SEQ ID NO: 11390 - DNA, 201 bp, Homo sapiens
cacatgctgagccggcactgcagggacacagggcgagccgctggatgcagacctgtggccgcggcaggtgagggcggtggctgggaggctgacccaggggrccacatttttataattgtcccgaggcgcggcaggactttcccgggactctggtctcttgctttctgtctccttctgtgtctctctctacatcagcttctc

SEQ ID NO: 11391 - DNA, 201 bp, Homo sapiens
taggacttgggtgacaccaaatgaaattagtattaaagccagacttgtgatttgagctcaaattcaaacaattaaattctcttttatccattttcaaagaygaacaggctcctttgatgtgaaacagactggttgtggactcagggagaatttagaaaagaaattaattgagtttggatctcttttacaaaatgtatgatt

SEQ ID NO: 11392 - DNA, 201 bp, Homo sapiens
atctgctcacatttgtgctccctatagacggcaccctcaaggctgtcttcttgaaaatgtaggtctgtcaggcctttaaaaggcctccagacctctttttrtatctctttatcaaagaccctggctggttatctttagcatgaaaaaggtgctctcactgatagaatgaagtcttacctgcatcagctcatcaataactgc

SEQ ID NO: 11393 - DNA, 201 bp, Homo sapiens
ttttatccattttcaaagacgaacaggctcctttgatgtgaaacagactggttgtggactcagggagaatttagaaaagaaattaattgagtttggatctsttttacaaaatgtatgatttttaaaataaatcatttctactctttattcagtgtgtgcatttcctgacctttgttttcatttaagacaggacaacagttc

SEQ ID NO: 11394 - DNA, 201 bp, Homo sapiens
ataacaggaaaattcactgctcttccctctcataatacattttaatattatggaaatgtggtccttgaaaaagtggtcattgagcacttaccaggtgctayggatacaattcctctgcagcttgcattctagtggggagagacaggaaacaaatgctaaaatgtgcagggtgccaggagtggcccattccctgaaagaaaa

SEQ ID NO: 11395 - DNA, 201 bp, Homo sapiens
acttaccgagtgcttgctgcctgccaggcacaatccccacctgtgatttaatttccataactttgtggaggtgataatattgtaactcccatttaacagayaaggaaagtgaggcacagagagactcaattacacacatagaggcacatgctcaggcaacacgtggccagtgcagataacaggaaaattcactgctcttcc

SEQ ID NO: 11396 - DNA, 201 bp, Homo sapiens
tataaagggacacgttcagcacccccttgctctctctctcaccttccgccatatgatgatggggcacaaaggccatcatcagatgttggccccttgttctygaacttcccaacctccagagcagtaaaaaaataaatcactgttctttacaaatggcccagtctcagatattctgttacagcagtacaaaatgaactaagt

SEQ ID NO: 11397 - DNA, 201 bp, Homo sapiens
ctgtgatttaatttccataactttgtggaggtgataatattgtaactcccatttaacagacaaggaaagtgaggcacagagagactcaattacacacataraggcacatgctcaggcaacacgtggccagtgcagataacaggaaaattcactgctcttccctctcataatacattttaatattatggaaatgtggtcctt

SEQ ID NO: 11398 - DNA, 201 bp, Homo sapiens
gtgacatgcacttgtgctcctagctgcttgggaggcttgaggactccttgagcccaggagttccagggtacagtgagcataacttgccactgtgctgcaayctggaggacaaaaccctgtctctactaaaagaaaaaagaagaataaggagaagaagaagaagataaggaagtttttccttcgttctttgaaatctctttc

SEQ ID NO: 11399 - DNA, 201 bp, Homo sapiens
aaagtggtcattgagcacttaccaggtgctacggatacaattcctctgcagcttgcattctagtggggagagacaggaaacaaatgctaaaatgtgcaggrtgccaggagtggcccattccctgaaagaaaaggaaaggggagagtggttgtgtcaggagattctctctgatagggcagcatctgagcagagaccagagga

SEQ ID NO: 11400 - DNA, 201 bp, Homo sapiens
ctggcttgacactggacctttgattgatgttaactgtgactcaccctctcttgcctcctttcagtttccaaattctctctgcttgggtcaaaagtcattgyttgccagaagtttaatagtgtgtgcattgtgtgtatgtgtgtgcatgccaatatgtatgcaacccatacaatgcctggaacaccaatttagcttcatatt

SEQ ID NO: 11401 - DNA, 201 bp, Homo sapiens
agcttcatattttaacagaccatgattccaacatcatgtcaaagtcttatatgttaaaagttctgcatccacattagaaggtactatggatcactgtgtakcccatgccaaatggtacatgagctctctttctcctctgggtcctgatattttaaacaaagaaacagtgtgccattatgggcccttgattctgtgcaaagt

SEQ ID NO: 11402 - DNA, 201 bp, Homo sapiens
cctggccttaacctccttgccttaccagcctgtttctattaaccttctggtgttactcacctggtcttaacctcatggtcttacccattgtgcttacccayctggtattatccacctggttttgatctcctggccttagcaattaggccttactcacctggcactagcttttggccataccactttgccttacttacctag

SEQ ID NO: 11403 - DNA, 201 bp, Homo sapiens
agaagataacagatgggaaagagctatccagaattggtgtgggcgctggtaccaggcctggccatggagaggactcccccatatttaacctagggcatctrttttctgcagccttgctgcttaaaatggggtctgggaaccaaggtaccatgaggatcagcatcaactgagagcagcttgttaagacgcgaagtctcagcc

SEQ ID NO: 11404 - DNA, 201 bp, Homo sapiens
tctaattcaactcaactcttacactagctatctagagatactgtcagatcccacaggttaagggctcagtcccacaagactgtcccccacttcagaggccwgttataagactgaattgccagaacttctgatccactggctacaaattggggctcccaagaccctgcccaggggttcaattaatttgttacagtggctcac

SEQ ID NO: 11405 - DNA, 201 bp, Homo sapiens
aatcatggatgatgagaagaaaaggaagtctgctttttgacactgctcttctttgtattatttacttacaggtcctgttttaaagcatcctattccttggytgtctttcctttggctctttggcaatagttggttttgatcccagctctttggctcctgggccaaggctgagtgagtgccagacagggtaaactagttcac

SEQ ID NO: 11406 - DNA, 201 bp, Homo sapiens
ttgtttattttatactctatgaagtcaataaacccattcctatcacccatcccactgcctgagctaaggggccttccacagttgacctggagagttcaagygcactgcactcgagtgcgcttctgggttgaagctgccacctggtactcccagagcctgtgcctctgaggcttcctcttaggttgtggatccgtggaagag

SEQ ID NO: 11407 - DNA, 201 bp, Homo sapiens
catctcttgagtttttcaatacttacctttggatgtctggccagaccatgtcctagaactgttctgtcttcccaaagtcctggacctttaatggggcagckgacaactaaatatttttcatgttaattctctgatttagtcattcttaggtgtgagatacactttcaaggtttagtttcttttgaataaagtagtttgtta

SEQ ID NO: 11408 - DNA, 201 bp, Homo sapiens
tctaattgtttgcatacacaatctctttttactcttaacagtgagactctagtaagtggtctcttgatgcttactataactttggggatgtttgaaagtgktgaccgagtcacccacctggtcttctgccatgtcacttggccctgctggtccatttgtttttggccagtgcccgtttgggagccaaaccttgtcacctac

SEQ ID NO: 11409 - DNA, 201 bp, Homo sapiens
gcatacacaatctctttttactcttaacagtgagactctagtaagtggtctcttgatgcttactataactttggggatgtttgaaagtgttgaccgagtcmcccacctggtcttctgccatgtcacttggccctgctggtccatttgtttttggccagtgcccgtttgggagccaaaccttgtcacctacctccagcccac

SEQ ID NO: 11410 - DNA, 201 bp, Homo sapiens
gaccctggctggttatctttagcatgaaaaaggtgctctcactgatagaatgaagtcttacctgcatcagctcatcaataactgccagcatgttttgatcyagaaagatctgcctcttaggatccatcagaagctttgcattcatggtcttgaactccacctggtacatcttcaagtcttcataaatactactaaggcaca

SEQ ID NO: 11411 - DNA, 201 bp, Homo sapiens
ctacttcattgaggcttctagaccctcacctccatttttccgaagtcttatttttctgccctctcatagtttcacagtgtttcatgtttcaaactgggacrtgagtttaccgttgacaaccgtttcctaagagctttctaacctcctcaccatctttgcttaaatcattctccaatctggaaatgactcagcatttacaga

SEQ ID NO: 11412 - DNA, 201 bp, Homo sapiens
gtaaatgattccatggtgaaagacaagaaaataacttctccagtaggatgaggtggtctcataccaaccaaagcaaccaaagcttgcataccaacattgtyaggtgggtgagaattgcattcattcctaacctcttgaggcttcagcatcccaagactagatagtggaaaatctcagtagctctccaggcaaagctggccg

SEQ ID NO: 11413 - DNA, 201 bp, Homo sapiens
aaccaaagcttgcataccaacattgtcaggtgggtgagaattgcattcattcctaacctcttgaggcttcagcatcccaagactagatagtggaaaatctyagtagctctccaggcaaagctggccgggtggcggctggggggcattgggggcggggttgggattcagaacgctcacccaccatgtctgaaaagcatccag

SEQ ID NO: 11414 - DNA, 201 bp, Homo sapiens
ccagggaggaggaggctgcagtgagctgagatcttgccactgtattccagcctgggtgacagagtgagactctgtctcaaaaaaaaaaaaaaaaaaaaaaraaaagaaaaagaaaaagaaaaaacaaaaattgggttcattttgggttttgttgcacaaatatacatatttaagcacctgttaggtgcaaggcattatggc

SEQ ID NO: 11415 - DNA, 201 bp, Homo sapiens
tataataaactgtctttattaatgagctatagtttgagtaattaacacaaattcagaataagtagtaccatttaatgagtttatgtttttaacaagtacadtaattagaaaggcctcatgcacacttcctgggaagctagaatagctgatcatattctgctaatgcggagggaggttcccccaagaacaacagggacaatg

SEQ ID NO: 11416 - DNA, 201 bp, Homo sapiens
cacaattcagtgttgactatgatattctgaaaagcacacaggccgggcatggtggctcatgtctgtaatcccaatgcttttggaaggagaagcaggtggaycctcggtgccaggagtttgacaccagcctgggcaacaaagggagacctcagttcttttttttttgaggtggagtcttgctctgtcacccaggctggagtg

SEQ ID NO: 11417 - DNA, 201 bp, Homo sapiens
tcaatagtcactgcccgaattctgaaagcatgaagaagtatgcagagcttgattttagttttataaaaatccggttcttcaagggaggatttttgtggcayagtctcactgttgaaattcagggcctaggagaatgaacagtaagcatgacttacatggtattccaaaattcaaatattcattcataaaaatgagtgaagc

SEQ ID NO: 11418 - DNA, 201 bp, Homo sapiens
ttagtagagacggggtttcaccatgttggttaggctggtctggaactcctgacctcgtgatgcgcctgcctcggcctcccaaagtgctgggattataggcrtgagccactgcgcctggccgagaccccatttctataaaaatttttaaaaattagccaggcatggtggtgcgttcctgtggtctcagctacttgggaggct

SEQ ID NO: 11419 - DNA, 201 bp, Homo sapiens
gccactgcgcctggccgagaccccatttctataaaaatttttaaaaattagccaggcatggtggtgcgttcctgtggtctcagctacttgggaggctgagrtgggaggatagcttgagcctgggaggttaaggctgctgtgagccatgatggctgcagtgagtcatgatggtgccagtgcactccagcctgaatgacagag

SEQ ID NO: 11420 - DNA, 201 bp, Homo sapiens
tgttttccaacgtgctgagtgatattgtaggagactattattttgctggaatttctatgaatacatctatgaatacatttaaaataaaaagtgttttttgtttttttttttgagatggagtttcactcttattgcccaggctggagtgcaatggcgctcccttggctcacacaacctctgcctcctcggttcatgctattc

SEQ ID NO: 11421 - DNA, 201 bp, Homo sapiens
gactatagttaccctgttgtgctatcaaatagttggtcttattcattctttctaattattttcttggtagtcaaaataaaatgtttatttttatgacttctttttttttttttttttttttttgagatggagtctcgctctgttgcccaggctggaatgcagtggcgtgatctcggctcactgcaacctctgcctcccggg

SEQ ID NO: 11422 - DNA, 201 bp, Homo sapiens
gatcagcctagaaccttctgagacaaggattctgaaaacttttagtctttatttgccattttatcttcaatgctgtttttaaaagctggttctcttgcaayccctggtcccccaacactgccctgataggccaattgtctaggcagcagttgtggcaacagctggaactgcctgcactttctgggcactagtgctggcata

SEQ ID NO: 11423 - DNA, 201 bp, Homo sapiens
actaatagattgacttcctttgcatatttttgcaatgttctgtgagatatcaagtcacttccctggtagtttcttattcagtatttcactgtactgctttaaaaaaaaaaaaaagtcaggcctcaaccctaacagagtcacttggagatcttgttaaaaagttgagtttagagtctgatacaggttttgagatggccctga

SEQ ID NO: 11424 - DNA, 201 bp, Homo sapiens
caggcacctgccaccatgcctggctaatttttgtatttttagtagtgacagggtttcaccatgttggccaggctggtctcgaactcctgactttgtgatcyacctgccttggcttcccaaagtgctgggattacaggcgtgagccaccatacctggccccatccttgacttttaacatgtacagagcaaccaataacgagt

SEQ ID NO: 11425 - DNA, 201 bp, Homo sapiens
taatttttgtatttttagtagtgacagggtttcaccatgttggccaggctggtctcgaactcctgactttgtgatctacctgccttggcttcccaaagtgytgggattacaggcgtgagccaccatacctggccccatccttgacttttaacatgtacagagcaaccaataacgagtccttcctcaaagtaaagtgaaatg

SEQ ID NO: 11426 - DNA, 201 bp, Homo sapiens
gcaatggtggctacaaatcccactttctgatttgaaatgtgggattgacagcagttgaaaaataaggattaggtctataataaactgtctttattaatgarctatagtttgagtaattaacacaaattcagaataagtagtaccatttaatgagtttatgtttttaacaagtacattaattagaaaggcctcatgcacact

SEQ ID NO: 11427 - DNA, 201 bp, Homo sapiens
caccttcacccatccattcatgcttggcacccacctccctcaacccatttccaacacttttccttcaacacctgagagatgactcgagttattacaaagcrccactctattctagggctagaagccagctccctgtgagggtctagagatgagcttggacaagggtgttgaacccaacactcacccagagaaagcctacat

SEQ ID NO: 11428 - DNA, 201 bp, Homo sapiens
ctacaaatcccactttctgatttgaaatgtgggattgacagcagttgaaaaataaggattaggtctataataaactgtctttattaatgagctatagtttragtaattaacacaaattcagaataagtagtaccatttaatgagtttatgtttttaacaagtacattaattagaaaggcctcatgcacacttcctgggaag

SEQ ID NO: 11429 - DNA, 201 bp, Homo sapiens
ctgctaatgaacttccacaatttctctgcagttccatcaggtaccagaggggaggatcagaggccccttcctcagggagggtgcaggtccacagtggagasgacaggaaaggctcaccttctggagcatgttgctgacggccctcagcaggttttgggagtggtgaaggcatgggaacattcctgggtctggagtggccac

SEQ ID NO: 11430 - DNA, 201 bp, Homo sapiens
agttgaaaaataaggattaggtctataataaactgtctttattaatgagctatagtttgagtaattaacacaaattcagaataagtagtaccatttaatgrgtttatgtttttaacaagtacattaattagaaaggcctcatgcacacttcctgggaagctagaatagctgatcatattctgctaatgcggagggaggttc

SEQ ID NO: 11431 - DNA, 201 bp, Homo sapiens
aacttgtggaaaagtccactttgtcctgagaagaactgacttgcaggaggtcaagtgaggtccttgacagtgctctgagccatcctgtccacttcctatgwgtcaggcagactatgagcccaaaggtcttgaagtattacggtgttaggttttgtttaaacattagttatttctgatttttctaattgtttgcatacacaa

SEQ ID NO: 11432 - DNA, 201 bp, Homo sapiens
taatctgcagtaggcaggattccaaggcaactcttgttcacatcagaatttgagaagcaactgttctagaatacactagggagccatatgagatctcaggrtcaagtgtagagtgacttgaggtttctccttggttgagagctcctcaaataagataggcctcccaggttaactaatttcagagcaatttttcagatttag

SEQ ID NO: 11433 - DNA, 201 bp, Homo sapiens
tttactataaaatagaattctgtaaattgctttaagaaagcatttattggctgggtgtggtggctcacacttgtaatcccagcactttgggaggccaaggygggtggatcatgaggtcaggagatggagaccatcctggctaacacggtgaaaccccgtctctactaaaaatacaaaaaattagctgggcgtggtggcagg

SEQ ID NO: 11434 - DNA, 201 bp, Homo sapiens
atctcaggatcaagtgtagagtgacttgaggtttctccttggttgagagctcctcaaataagataggcctcccaggttaactaatttcagagcaatttttyagatttagaaaattggagtcaggcgcagtggctcacgcctgtaatcccagcactttgggaggccgaggcgggcagatcacctgaggtcaggagttcaaga

SEQ ID NO: 11435 - DNA, 201 bp, Homo sapiens
tttatttggttcacattttggttcacaatgggtcataatcaggcaccaatcttgcttgtttcccagcaatatttgcagatatgcaaactggccccttgcakgcaaatcctggagcacgtcctggagcctttagaggtgagtgagaaggtaagtgtagtgaaatcctcttgaaggattttaagaggcagagcctcagacaag

SEQ ID NO: 11436 - DNA, 201 bp, Homo sapiens
cacacacgaaaagaataaaagtaaaacaattacttttcagacaatgatttctgccaccatatttttatcccatgtcctcgtcaccaaagcagtcaccctcrcttatataaatatttgttttatattagcatctgtgttatggtgattcagaacataacaaagcaagttcttgcctatgaataacattatagatgccccaga

SEQ ID NO: 11437 - DNA, 201 bp, Homo sapiens
acatatatgccttcctacatgatataggagatagagtgcaaaaatcaaaccaaagtgttttttcctaccctcactcaccacacactactcctcacatgccvagcaagcaagcaagcaatttttctgcagattctgcagtgcacaccagctgggtgtcctctaattcaactcaactcttacactagctatctagagatactg

SEQ ID NO: 11438 - DNA, 201 bp, Homo sapiens
ttttgtatgtgtgtggatggatgtagcacattgtcataactgagctcaaatcaattcaagactttgattattatatgttgttactacaacgaatatagtgttttttttttctaagaatcctcagtaattcagagagaggttttatttaaaattctatttagatttttttattcctggccgggcgcggtggctcatgcctgt

SEQ ID NO: 11439 - DNA, 201 bp, Homo sapiens
tgtggtgtgtccccctcccaaactcacattgaatttttttttttttttttgagacggagtctcgctctgttgcccaggctggagtgcagtggtgcgatctyggctcactacaagctctgcctcccgggttcaagagattctcctgcctcagcctcccgagtagctgggattacagatgttcgtcaccacacctggctaatt

SEQ ID NO: 11440 - DNA, 201 bp, Homo sapiens
cactatgttggctaggctggtctcaaactcccgacatcaggtgatccacccacctcggcctcccaaagtgctgggattagaggagtgagccactgcacccmgcctcacgttgaggtttaattgccattgtaacagtataaagatgtgggacctttacgaggtgattaggcaatgaggactctgccctcatgaatggattaa

SEQ ID NO: 11441 - DNA, 201 bp, Homo sapiens
tggagagattttctggttgcaaattagagacaacttttctctcagagcccaaagggtcacaaaaattagaataattaggctagaaggcctcttagtgacattttttttctggttgaagaatactatgaagtatttttctaatgcacagcatacttttagtcttatgttgaacaaaaataataaaccctcaaaaaccatgac

SEQ ID NO: 11442 - DNA, 201 bp, Homo sapiens
atgctaacattctttgatacttggatgaagctcattgcctttcaaacaagaaatctggcacatgcacacacacacacacacacacacacacacacacacamacacacgaaaagaataaaagtaaaacaattacttttcagacaatgatttctgccaccatatttttatcccatgtcctcgtcaccaaagcagtcaccctcg

SEQ ID NO: 11443 - DNA, 201 bp, Homo sapiens
agtgttttaaaaacagtggagtgagaaagcctgactttttttgtttttttaagacggagtctcactctgtggcccagactggagtgcagtggcacgatttyggctcactgcaacctccacctccgagttcaagcaattttccctgccttagactcccgagtagatgggattacaggcacccaccaccacactcggctaatt

SEQ ID NO: 11444 - DNA, 201 bp, Homo sapiens
gagtctcactctgtggcccagactggagtgcagtggcacgatttcggctcactgcaacctccacctccgagttcaagcaattttccctgccttagactccsgagtagatgggattacaggcacccaccaccacactcggctaatttgtgtatttgttagtagagacggggtttcaccatgttggtcaggctggtcttgaac

SEQ ID NO: 11445 - DNA, 201 bp, Homo sapiens
ctccacctccgagttcaagcaattttccctgccttagactcccgagtagatgggattacaggcacccaccaccacactcggctaatttgtgtatttgttastagagacggggtttcaccatgttggtcaggctggtcttgaactcctgacctcaggagatctgtccgccttggcctcccaaagtgctgggattacaggcgt

SEQ ID NO: 11446 - DNA, 201 bp, Homo sapiens
tttcacagaaccaagggaaagctgtcttcttttcttgaaaaagacttgcctcaggaaataatgggcctcattggctgctgctaattggtgaaatgtttttkttttttttttttggtctgtgtagatattgtcactacttcagcatcatgagtgtggtgggtgattaatattctggatatattttacattatttgatccata

SEQ ID NO: 11447 - DNA, 201 bp, Homo sapiens
tttgtagctggtgggtcagaagttctagaggctcagatctgcaactggtatctgaagttggggacagttttgtgagactaacccctgaacctatgagatctaacactgtctttaggtagggagtgtcaaaattgagttgaattagaggacacccagctagtgtccactggagaacctgctggaaaacggattgtttggtgt

SEQ ID NO: 11448 - DNA, 201 bp, Homo sapiens
tgcatttcccttgtttaatgttggtgctgggaagccctcttgcaaccactcctttaatatcctcctttctcctgggagaagctggagagagctacaggtcmtgaggtcctcctctgggagaagggagatggagagaaacaccagatacacctccatctcctgcagctgttttgagtttgatttcttattctatttgaagga

SEQ ID NO: 11449 - DNA, 201 bp, Homo sapiens
ggggtggatctgcactctgcctgatggcctagctactttgccagaccctgcctgcttggtcttcaccaggttgctcctgctgtgtatgattacagccttgrcatgggactgcatttcccttgtttaatgttggtgctgggaagccctcttgcaaccactcctttaatatcctcctttctcctgggagaagctggagagagc

SEQ ID NO: 11450 - DNA, 201 bp, Homo sapiens
ctgttttgagtttgatttcttattctatttgaaggaaattttttagaataacagatacatgtataataaacacattttcgaacgtaaagagggaaagtagsaatgggatggaagtgagaccactgaaattcactggctccatgtgggagctcagggccatagtgtcatcatctacaaatggcactgaagtttctcctgcca

SEQ ID NO: 11451 - DNA, 201 bp, Homo sapiens
cagcagaagtctgcatcttagctgtcttaatgtgaatgtggggtcttgtgacagggtctcttctgtatcctgggggtggatctgcactctgcctgatggcytagctactttgccagaccctgcctgcttggtcttcaccaggttgctcctgctgtgtatgattacagccttggcatgggactgcatttcccttgtttaatg

SEQ ID NO: 11452 - DNA, 201 bp, Homo sapiens
gtatttgcaaacctggaacctctctgaaccctgtccttttggttttatagaagctttaatttgtaggcatgattgattacatcactggccgttagtgatcractccattttcagccctcctccctatctgctggttatggggtggagctgaaaatcctaactttccaatccagccttggtttttactgtgacccactccta

SEQ ID NO: 11453 - DNA, 201 bp, Homo sapiens
aaaaaattttttattttagacatggagtctcactattttgcccaggctggtgtcaaactcctgggcccaaggaatttacttgttttggcctcctaaatccycttggattataggtatgagccactgtgcccagtctaagtagaattttaaaaatctccttttctaaagaaaattgaatttgttgatagtaaagttttaaaa

SEQ ID NO: 11454 - DNA, 201 bp, Homo sapiens
gaactatcactgtgaatgaacattacactctaacagtggtatgttatatgaaatggtaccatttagtccttaaaattgattggaaaacagtgattggggarcatttaaatatattttaaaagtgagagaagtaacaattaatgctatactttttttaataaggagagtatattttcattgtaagtatctattaatgattga

SEQ ID NO: 11455 - DNA, 201 bp, Homo sapiens
ttttctgcaggttggtctaattgaaggcaatggagaagtaagtctttatggatcaaaatcttagctctagaaaaggtgagggggcctgttttggaaatacrtctattcataaatatattgtttgatgtaattatgaatttgatgatattgaagcctctcagtactctcaattacccttatgggtaatcttagggcttataa

SEQ ID NO: 11456 - DNA, 201 bp, Homo sapiens
tgaatctcctttctcatctttacctattgtaagtccagttaaaatgagggtagacgtggatggtgaactgaaagtagcaaagtagacagatgcaatggtgrctacaaatcccactttctgatttgaaatgtgggattgacagcagttgaaaaataaggattaggtctataataaactgtctttattaatgagctatagttt

SEQ ID NO: 11457 - DNA, 201 bp, Homo sapiens
taatatgctgagtgccatgggggacagcacatcagcgggtgttctgatgtcttgtgagaactgtgacaaatttatgttgagtaataactaggtgctggcastgtattgtgtcatttaatcttcacaataacacagttaattaggtcccaccgttttctgaatttcatcaatgaggaaatagcagcaaagaggaggtaacaa

SEQ ID NO: 11458 - DNA, 201 bp, Homo sapiens
cttcttgggttgattgtttttttcctatgtagaagatttccttggacttggccttcagaaaacctaaatttaaagttcagctttatcaggggagcctgggmgaatggttacattaacctctttgtggcctttgaaacatacatagaaaatatcaagggatagttgtaaaaatgaggataaaaacatctaaagtgctaagta

SEQ ID NO: 11459 - DNA, 201 bp, Homo sapiens
agggaggctgggaggagacggaggaaagggcaatgagatcctagagggccctggccacactgaaagaagctcctgtgaaacggagtctctcagaataggtyccttttaaagtcacctgaaaccaggtgtcagtgcctgcctgcctgccttccctccttctttcctttctttctttctttctttccttcttctttctttctc

SEQ ID NO: 11460 - DNA, 201 bp, Homo sapiens
gtccagaagttcaagaccagcctgggcaattagcaagaccctgtctctataaaaaattaaaaattagctggatgtggtggtgtgcacctgtagtcccaacratttggtaagctgaagagagaggatagcttgagcccaggaagctgaggctgcagtgagccacatcactccagccaaggtgacagatggagatgctgcctc

SEQ ID NO: 11461 - DNA, 201 bp, Homo sapiens
ctgtatttcctccagacttgctgtcaaacctggacaggagccgaggaggtgggaggcaagggccagtgcatgtagtggggttcaaattccagttctacccyttcctagaggaggacttgggcaaatggagtagctcctctgaggttctctgtccataatatagtgataagagggctttctggggggaaggtggtattcagt

SEQ ID NO: 11462 - DNA, 201 bp, Homo sapiens
gtccaattaagattaattgaattgtgaggagcaatgcacagcacattatgaaagattgaaaggggaaaggagccctttaagaaggcttggtggcattgagyttattttaagatattcctaaggcaacaagctagaaaatactcaagaaaaaattcctagagagcagaaaggcagaggacatcttttaaaacattagccttt

SEQ ID NO: 11463 - DNA, 201 bp, Homo sapiens
gtacaaaacattaaattgatttctataatcttttgacccttaggactatatctgggagtaggggtgtcagcttttgcacaaaaaaatctatatgaattggrgcacctaaaagttacccattttgaacctttcttcgggaaacaaagcagttttcacttgagccccctgtccaattaagattaattgaattgtgaggagcaa

SEQ ID NO: 11464 - DNA, 201 bp, Homo sapiens
tttgctaatcagctgatctaagagtagagagatgatcctggattatctgggtgaatccagtgtaagcagtgtcctcaaaagtagaagcgggtagaaggtcrgtccagagggagcagcatgagaaagactcaaccagacattgctggtatggacaatggaaggggccacaagtcaaggaatgtgggcagcctctagacctga

SEQ ID NO: 11465 - DNA, 201 bp, Homo sapiens; identical to SEQ ID NO: 1684

SEQ ID NO: 11466 - DNA, 201 bp, Homo sapiens
gctctgaccaccagtttcaggattctcagtgcaaggttcctagcggcgtggagccccacgaggatctttcctgagcagctcagggcggccacacggcgggktctctggagctggagtctgggccccctgcagcctgctcctccacacagcctagatggggcccatatggggtctagatggggcctgggccagaagcagcct

SEQ ID NO: 11467 - DNA, 201 bp, Homo sapiens
ttcctgagcagctcagggcggccacacggcggggtctctggagctggagtctgggccccctgcagcctgctcctccacacagcctagatggggcccatatrgggtctagatggggcctgggccagaagcagcctggttttagggcgaaagaggcaaacgagcagtctctgacctactctgttaggcaagtgttgagacaaa

SEQ ID NO: 11468 - DNA, 201 bp, Homo sapiens
ccgagtagctgggactacaggcatcaccagcatacctggctaatttttaatttttttgtagatatgggtctcagtatgttgcccaggctggtcttgaaccyctgccttcaagtcatcctcctgccttggcctcccaaagtgctaggagtacaagctcgaggcaccgtgcctggctgagcctcagattttctttctgttaga

SEQ ID NO: 11469 - DNA, 201 bp, Homo sapiens
tggcccacgccctgtaatcccagcactttgggaggccgaggtgggcagattgcttgtggtcaggagtttgagaccagcctgaccaacatggcgaaaccccrtctctactaaaaatacaaaaattagctgggcatagttgtgtgcgcctgtagtcccagctacttgggaggctgaggaaggagaattgcttgaacccgggag

SEQ ID NO: 11470 - DNA, 201 bp, Homo sapiens
gatggggtctcactttgatgccgaggctggtctcaaactcctggcctcaagcctcttgcgttggcctcccaaagtgctgaaattacaggtgtgacccaccrgccccagcctcccattaacttacttccctccctggccagtttgcctgcagcgtctggcttggcggcattctgattttgaaaatcagagaaaccatgagtg

SEQ ID NO: 11471 - DNA, 201 bp, Homo sapiens
gaacccgggaggcggaggttgcagtgagccaaggtcgtgccactgcactccatcctgggcaacagagcgagactctgtcttggagaaaaaaaaaaaaaaaraaaagaaaagaaaccaacataattctaactaacatatgaaagagatcagattgaacctggctggaaggtgaggggcccgtgagtgagttacagtcacccg

SEQ ID NO: 11472 - DNA, 201 bp, Homo sapiens
actccagcctgggtgacagagcaagactccatctaaaaaaaaaaaaaaagaaaaaaggagtgacatgaaaagttaatagaactagaagcagaagcactaawtctttctacaccccagtggattgtcttgtccacaaataaagtggcttaaccaaaatggagagggaggcaaatcaatttctatgcaccatctagaagaagt

SEQ ID NO: 11473 - DNA, 201 bp, Homo sapiens; identical to SEQ ID NO: 1685

SEQ ID NO: 11474 - DNA, 201 bp, Homo sapiens; identical to SEQ ID NO: 1686

SEQ ID NO: 11475 - DNA, 201 bp, Homo sapiens
aacttagctaggtgtagtggtgtatgcctgtggtctcagctacttgggaggctgaggtgggaggatcacttgaacctgggagggggaggtcgcagtaagcygagattgtgccactgcactccaacccgggtggcagagtgagaccctgtctcaaaaaaaaaaaaattagaatactcttattagtttgtatttgagatactt

SEQ ID NO: 11476 - DNA, 201 bp, Homo sapiens
ttggtagtaggttccatggacagggcctctgtggcactgggttctgtggacagggcctccatggctgccagtggagtggtctgtgcctccgtggctgtggyttgagtggtctgtgcctccgtggcttctggtgcagtggtctgtgcctccatggctgtggtttgagtggtctgtgcctccatggctgctggtggagtggtc

SEQ ID NO: 11477 - DNA, 201 bp, Homo sapiens; identical to SEQ ID NO: 1680

SEQ ID NO: 11478 - DNA, 201 bp, Homo sapiens
  misc_feature (1)...(201): n = A,T,C or G, or insertion/deletion polymorphism (see Tables 1-2)
agagtctcttccgaggccgtgccctgggtggttgatgcctccctcagcaggcttggccagcagccaggggagttaaacctcagagagcggaagggctgggntgctaggctgggcccagagtggggcattcagaggagctggggaatcaatcatccgagaaccttggagggtggacagtgccccttttacagatgagaaaac

SEQ ID NO: 11479 - DNA, 201 bp, Homo sapiens
tcattgaattcatttgtgccaagtaccttactgcctctggatcaggccagcaagtttgggttccaacaggtgtaacttggttcttggtggggtggagggtrgggaggggggtgtaacaaaaaaatctcaactaacactgtggtttgcaagccaccaaacattaaacagatacacagcatatctgtgctattaacttttcat

SEQ ID NO: 11480 - DNA, 201 bp, Homo sapiens
ctgagatagcgccactgtactccagcctgggtgacagagcaagactccatctaaaaaaaaaaaaaaagaaaaaaggagtgacatgaaaagttaatagaackagaagcagaagcactaaatctttctacaccccagtggattgtcttgtccacaaataaagtggcttaaccaaaatggagagggaggcaaatcaatttctat

SEQ ID NO: 11481 - DNA, 201 bp, Homo sapiens
gggatgccaggagacccaggagagctcctgccctccaaaaacttgtggtctggtgggggcagcagagcagacagccacagtggttgccagccactggggcragtgttgcgaggggtgtgtgcctgcccatcggctgaatcctgggcctgtggcctgatcagcaagacagctgtggttcctgccttctggaagtttaggagt

SEQ ID NO: 11482 - DNA, 201 bp, Homo sapiens
cctctgagtctgagacctccatttcctctgctcatctgcctgcagcgccgaagagagtccttcagataaagtacccccggctggaagccagcgtctgggamcttccatacactcattcaattctcatgatgattttttttaagcaatattgccggttttacaatgaggaaactgaggcttagagagggtgaagcaacctgc

SEQ ID NO: 11483 - DNA, 201 bp, Homo sapiens
ggggatggctgtaggggaagggtgggcaacagtgacagcctacctgaagaactgggccccagcaccctccgtgtttctgtgttattctcccagcctccggsctgctgcaagtccggccctgactcaccaagatgcctcccccaacccgggaaccagggagaccaggccttgcaactttgcccccaccttctctgcttccag

SEQ ID NO: 11484 - DNA, 201 bp, Homo sapiens
ggtggatggcctgagctcaggagttctagaccaacctgggcaacatggtgaaacctcgtctctaccaaaaatacaaaaacttagctaggtgtagtggtgtrtgcctgtggtctcagctacttgggaggctgaggtgggaggatcacttgaacctgggagggggaggtcgcagtaagccgagattgtgccactgcactccaa

SEQ ID NO: 11485 - DNA, 201 bp, Homo sapiens
atctgggatgggagcacatattgcattatccgcccagcggtactttgctcacagaataagactgtcccggagcacagtcaactccaggtgacctatgagcyccttggagccaccatcagtggcatcagatctgggttttcctttatgggggcctgggagttggggaagccagggaccacgcaggcagagcagatacacagt

SEQ ID NO: 11486 - DNA, 201 bp, Homo sapiens
cacttgaacccgggaggtggaggttgcagtgagctgagatagcgccactgtactccagcctgggtgacagagcaagactccatctaaaaaaaaaaaaaaaraaaaaaggagtgacatgaaaagttaatagaactagaagcagaagcactaaatctttctacaccccagtggattgtcttgtccacaaataaagtggcttaa

SEQ ID NO: 11487 - DNA, 201 bp, Homo sapiens
gggtttcaccatgttggccggactagtcttgaactcctgacatcaggtaagccacctgccttggcttctcaaacagttgggattacaggcgtgagccactrcacctggcctaagaaattattttaagatgtgggtcgggtgtggtggctcatgcctataatctcagtgctttgagaggccgaggcaggaggattgcttgag

SEQ ID NO: 11488 - DNA, 201 bp, Homo sapiens
tagtagagacagggtttcaccatgttggccggactagtcttgaactcctgacatcaggtaagccacctgccttggcttctcaaacagttgggattacaggygtgagccactacacctggcctaagaaattattttaagatgtgggtcgggtgtggtggctcatgcctataatctcagtgctttgagaggccgaggcaggag

SEQ ID NO: 11489 - DNA, 201 bp, Homo sapiens; identical to SEQ ID NO: 1682

SEQ ID NO: 11490 - DNA, 201 bp, Homo sapiens
gatactttcaggacactaaaaggaaatggtgggggccagttgtgccctgctgtacacacattcacacacacacacacacacacacacacacacacacacaccccatattgtcgatatctgggcttctgttgcctggaattctcttcctctttcctctttcttctgttttccttttttttccatctctgactttgaggcccc

SEQ ID NO: 11491 - DNA, 201 bp, Homo sapiens; identical to SEQ ID NO: 1683

SEQ ID NO: 11492 - DNA, 201 bp, Homo sapiens
agatactttcaggacactaaaaggaaatggtgggggccagttgtgccctgctgtacacacattcacacacacacacacacacacacacacacacacacacaccccatattgtcgatatctgggcttctgttgcctggaattctcttcctctttcctctttcttctgttttccttttttttccatctctgactttgaggccc

SEQ ID NO: 11493 - DNA, 201 bp, Homo sapiens
aaataaataaataaacctttcataagggcgatgataagtgggaaaaaatgtctacagagactccctgatgtgagttgaggtagatgacggaaagaggttgsaaagtgtcagctggcaaatgtggtgtgaaaagtgtgaagacagcacgtgctgtgcagttctgtgcacgttcccctgcctcagtcacatgtcctcttctgc

SEQ ID NO: 11494 - DNA, 201 bp, Homo sapiens
agtctcagtgatggcagatgtccctcccccgaccaagcttgattgtccgagttcgacttcagactgcagtgctagcatcgagaatttcaagtcagtagttygtgacttgctgcgctttgtgggagtgggacccgctgagtgagaccacttggctcccttgcttcagccccctttccaggggagtgaaaggttctgtctccc

SEQ ID NO: 11495 - DNA, 201 bp, Homo sapiens; identical to SEQ ID NO: 1688

SEQ ID NO: 11496 - DNA, 201 bp, Homo sapiens
ccagagaacacttaggaaaataagagtaaaaaatccctatcttcaccagatccctttctctctctctctctctctctctgtgtgtgtgtgtgtgtgtgtgkaaataaaggaacttccattcaaacttgtttaaaaagaagagaatactggctcacaaaactgggaaatccagagggtatagttagcctcatgcatggttgg

SEQ ID NO: 11497 - DNA, 201 bp, Homo sapiens
gacaagtcctcttataaaagataaattttgtaaaaatataaattttaggccaggcacggtggctcacgcctgtaatcggactttgggagtccgaggtgggyggatcacgaggtcaggagatcgagaccatcctggctaacatggtgaaaccccgtctctactaaaaatacaaaaaattagccgggtgtggtggtgggcgcc

SEQ ID NO: 11498 - DNA, 201 bp, Homo sapiens
acctgtgaatatttcactgcaacctctttaaaaagctcaaaaatgagttgtaaactggttaggtttgtggataatctttagtattttatgctaattatatytatacaaatgttaactttgttgaaaagtgatgctttttaaataactctaaagtaaatgtaacttttactcatgcaacaaaaaggcttcagaaaacacagt

SEQ ID NO: 11499 - DNA, 201 bp, Homo sapiens; identical to SEQ ID NO: 1703

SEQ ID NO: 11500 - DNA, 201 bp, Homo sapiens
aaattctgcattttttaagcatcagtgagcacacggttttcttttcaaagtgaggcttacccaaatattttaccatgtgtaagactccttaggtttttagyctctcacacctgagtcattaatgcattctgcccatcaactccattcaaccacacccatattttaggttgcattactagaataccttacttatggtaacat

SEQ ID NO: 11501 - DNA, 201 bp, Homo sapiens
actaaaaatacaaaaaattagccgggtgtggtggtgggcgcctgtagtcccagctacttgggaggctgaggcaggagaatggtgtgaacctgggaggcggrgcttgcagtgagccgagattgtgccactgcactccagcctgggtgacagagcgagactctgtctcaaaaaaaaaaaaaaaatatatatatatatatatat

SEQ ID NO: 11502 - DNA, 201 bp, Homo sapiens
tttgtacttttgtttctttatttacttgatactttcaatgatgacatactgtctctgtcaatgatgatatgctgtctctgtgcctgccaaattcaagctaygaatttgatcatctgtttaaattgtttaacttttatatagtacagggctatacagcttaaaagaaccaggagaattcaactaagcaggagaattggaaac

SEQ ID NO: 11503 - DNA, 201 bp, Homo sapiens
tgaggcaggagaatggtgtgaacctgggaggcggagcttgcagtgagccgagattgtgccactgcactccagcctgggtgacagagcgagactctgtctcaaaaaaaaaaaaaaaatatatatatatatatatatatacatatatatatataaattttaatatgcacattcagtaaaattttaaatagttttttttttttt

SEQ ID NO: 11504 - DNA, 201 bp, Homo sapiens; identical to SEQ ID NO: 1729

SEQ ID NO: 11505 - DNA, 201 bp, Homo sapiens; identical to SEQ ID NO: 1732

SEQ ID NO: 11506 - DNA, 201 bp, Homo sapiens
ctccatgggagaagagactggccagcccctcggaggagacctggatcacatgtgacagtgagtatccatcgacctatatgaaaattccattctgcagcccygctatcatcttctgataatggacactggattttattttcctattctcacactggcttaaattgttagattgaattaagcaagaatgggtaacttgtgggt

SEQ ID NO: 11507 - DNA, 201 bp, Homo sapiens
ggctgtgcagacaaagggaaaatcaaccctgcatctttagacaaggccatgtccattcccatgtgggtggacaatgttcagtgtccaaaaggacctgacaygctgtggcagtgcccatcatctccatgggagaagagactggccagcccctcggaggagacctggatcacatgtgacagtgagtatccatcgacctatatg

SEQ ID NO: 11508 - DNA, 201 bp, Homo sapiens; identical to SEQ ID NO: 1697

SEQ ID NO: 11509 - DNA, 201 bp, Homo sapiens
gccttagcccactctgacaagaacagttaaaaggcaaacaatttttctgaaggccaagtagcatctaaaaactaggtgacatgctccatgtattcaaaggrtcagatattattaaaagcacacaataaaaatctaaccaaaatattagcatggttcctcaccaaatgaaataaactcacaggagagaaatgaattttactt

SEQ ID NO: 11510 - DNA, 201 bp, Homo sapiens
gaatgagtcagctctttgggattgcaaacatgatggatggggaaagcatagtaactgtactcaccaacaagatgctggagtgacctgctcaggtaagactwgcattagtcaaagcctcaacacaaaatccttggtgggaaaaaaatatgtagatgggttaaaacctagaataagccactttcctgtaagcaatctagttca

SEQ ID NO: 11511 - DNA, 201 bp, Homo sapiens
acctgttgtgtgtctctgttacagagggagcagatctgagcctgagactggtagatggagtcactgaatgttcaggaagattagaagtgagattccaaggrgaatgggggacaatatgtgatgacggctgggacagttacgatgctgctgtggcatgcaagcaactgggatgtccaactgccgtcacagccattggtcgag

SEQ ID NO: 11512 - DNA, 201 bp, Homo sapiens
acgaaatatagattaagacaaaggataagagttggaactcttaaagtacatgaaatataaattgtgaatatctataaaatgcagagctaattttacatacyatatatatacacacatagatacatagagttcttagaaactgtacagagcacaaaagggttaatatatgtgaatgtaaattgtatgtatgtgtatgtgtaa

SEQ ID NO: 11513 - DNA, 201 bp, Homo sapiens
gaggcaggagaatggtgtgaacctgggaggcggagcttgcagtgagccgagattgtgccactgcactccagcctgggtgacagagcgagactctgtctcaaaaaaaaaaaaaaaatatatatatatatatatatatacatatatatatataaattttaatatgcacattcagtaaaattttaaatagtttttttttttttt

SEQ ID NO: 11514 - DNA, 201 bp, Homo sapiens
ttccatggaataaaagtaattcttatgcacactgaagttaaaaaaaaatagcatttaaaatttctgctcaggaaagtagtataatttttaacataagtgartttctctttgtgttataatgtaatgaattcttatacgcatatggagaggaaaatgacatttttctatttatggttttagttcagcctttaagataccttg

SEQ ID NO: 11515 - DNA, 201 bp, Homo sapiens
aactcttaaagtacatgaaatataaattgtgaatatctataaaatgcagagctaattttacatactatatatatacacacatagatacatagagttcttakaaactgtacagagcacaaaagggttaatatatgtgaatgtaaattgtatgtatgtgtatgtgtaacatctaatagataattgggcaaagctatgaaaaga

SEQ ID NO: 11516 - DNA, 201 bp, Homo sapiens
aggcaggagaatggtgtgaacctgggaggcggagcttgcagtgagccgagattgtgccactgcactccagcctgggtgacagagcgagactctgtctcaaaaaaaaaaaaaaaatatatatatatatatatatatacatatatatatataaattttaatatgcacattcagtaaaattttaaatagttttttttttttttt

SEQ ID NO: 11517 - DNA, 201 bp, Homo sapiens; identical to SEQ ID NO: 1689

SEQ ID NO: 11518 - DNA, 201 bp, Homo sapiens
gtttgctcttacttctctagttcttttaattgtgatgttagggtgttgattctaaatatttcccactttctgatgtgggcatttagtgctatacatttccytcttaacactgctttagctgtgtcccagagatttttgtatgttgtgtctttattctcattggtttcaaagaacttcattatttctgccataattttgtta

SEQ ID NO: 11519 - DNA, 201 bp, Homo sapiens
tgtgaacctgggaggcggagcttgcagtgagccgagattgtgccactgcactccagcctgggtgacagagcgagactctgtctcaaaaaaaaaaaaaaaatatatatatatatatatatatacatatatatatataaattttaatatgcacattcagtaaaattttaaatagtttttttttttttttaagtttcaaatctc

SEQ ID NO: 11520 - DNA, 201 bp, Homo sapiens
ctcctttagctcagacaagtttgttagtatccaccttctgaagcccacttctgtcaattcatcaacctcattatctgtccagttttgtgcccttgctggasaggagttgtgatcaattaaaggagaagagccattctggtttttggaattttcagcatttatgcactggtttttcctcatcttcatcgatttatctacctt

SEQ ID NO: 11521 - DNA, 201 bp, Homo sapiens
tgaacctgggaggcggagcttgcagtgagccgagattgtgccactgcactccagcctgggtgacagagcgagactctgtctcaaaaaaaaaaaaaaaatatatatatatatatatatatacatatatatatataaattttaatatgcacattcagtaaaattttaaatagtttttttttttttttaagtttcaaatctctc

SEQ ID NO: 11522 - DNA, 201 bp, Homo sapiens
atcaattaaaggagaagagccattctggtttttggaattttcagcatttatgcactggtttttcctcatcttcatcgatttatctacctttgatatttggrgctgatgacctttgttggggtttttgtgtaggggtcctttttgttgatgttaatattattgatttctgtttgttagtttttcttataacagtcaggcccc

SEQ ID NO: 11523 - DNA, 201 bp, Homo sapiens; identical to SEQ ID NO: 1704

SEQ ID NO: 11524 - DNA, 201 bp, Homo sapiens; identical to SEQ ID NO: 1705

SEQ ID NO: 11525 - DNA, 201 bp, Homo sapiens
tttcagcccacagggaacccagactggttggaggggacattccctgttctggacgtgttgaagtgaagcatggtgacacgtggggctccatctgtgattcrgacttctctctggaagctgccagcgttctatgcagggaattacagtgtggcacagttgtctctatcctggggggagctcactttggagagggaaatggac

SEQ ID NO: 11526 - DNA, 201 bp, Homo sapiens
aggtctggtttatttcccagtaattattttcttcctttcagaaaattcccatgagtcagctgatttcagtgctgctgaactaatttctgtgtctaaatttmttcctatttctggaatggaaaaggaggccattctgagccacactgaaaaggaaaatgggaatttataacccagtgaggtgagtgatgagaatttattagt

SEQ ID NO: 11527 - DNA, 201 bp, Homo sapiens
gttgttttctttagaagaacatttctagggaataatacaagaagatttaggaatcattgaagttataaatctttggaatgagcaaactcagaatggtgctrcttgaagactctggatctgctggtaaaagcttctcatttattctacatttcccctttaatggggtatgtaattattatgacagtcaatggatgtgattta

SEQ ID NO: 11528 - DNA, 201 bp, Homo sapiens
cacctctaggttgcctataaacatgaacattttcaaaaccatttcactgaaactatatgagcctgggtatgaatgttttctgcctgccttgcaatttagawtgaagagttttctgtcttggtttgagcttctttgttaattaacctctgaaaccatctatcttctccaaagtctctttttgggaagatgctacttttgccc

SEQ ID NO: 11529 - DNA, 201 bp, Homo sapiens
aaagtacatgaaatataaattgtgaatatctataaaatgcagagctaattttacatactatatatatacacacatagatacatagagttcttagaaactgyacagagcacaaaagggttaatatatgtgaatgtaaattgtatgtatgtgtatgtgtaacatctaatagataattgggcaaagctatgaaaagacaattga

SEQ ID NO: 11530 - DNA, 201 bp, Homo sapiens
aacctctgaaaccatctatcttctccaaagtctctttttgggaagatgctacttttgccctcttttctttttcacagacttcagaagacattttgtcaacytgagtcccttcaccattactgtggtcttacttctcagtgcctgttttgtcaccagttctcttggtgagtactttgtcaaatttacttacagccttagccc

SEQ ID NO: 11531 - DNA, 201 bp, Homo sapiens
tgtactattgtacctatttttaaagccattcttacatcaaggtaaagggaaggagtctctgaatcttcagaaaagatgcaaaactactaattctatgtttygctgcagaattcatgtctctgagactgaccagtgaagccagcagagaggcctgtgcagggcgtctggaagttttttacaatggagcttggggcactgttg

SEQ ID NO: 11532 - DNA, 201 bp, Homo sapiens
ctggaaaaatgacggtttaggcaactaaaaaagaaaaaatcattataaaatataataatattccatttatgtattggctataattaaatacaatgcttacrtctataaaattatgcattcatatgtgcataaagaagctaaaaattctagtgttgtaaactgagaaccatgaataatatttgatttataatctgaagcata

SEQ ID NO: 11533 - DNA, 201 bp, Homo sapiens
atgtccaactgccgtcacagccattggtcgagttaacgccagtaagggatttggacacatctggcttgacagcgtttcttgccagggacatgaacctgctrtctggcaatgtaaacaccatgaatggggaaagcattattgcaatcacaatgaagatgctggcgtgacatgttctggtaagttaaaaccaaaccaaaacca

SEQ ID NO: 11534 - DNA, 201 bp, Homo sapiens
ttaaacctgggaggtggagtttgcagtgagctgagattgagccactgcactctagcctgggcaacaagagcgaaactctgtctcaaaaaaaaaaaaaaaaagtgaaggtgcccagtgtctgcaactatgtcaccccgggcatatcacatatcactctgtttttccgtctgtaaaacgggagcaacaatgccattgccttat

SEQ ID NO: 11535 - DNA, 201 bp, Homo sapiens
tactcgggaggctgaggcaggagaagcgcttaaacctgggaggtggagtttgcagtgagctgagattgagccactgcactctagcctgggcaacaagagcraaactctgtctcaaaaaaaaaaaaaaaaagtgaaggtgcccagtgtctgcaactatgtcaccccgggcatatcacatatcactctgtttttccgtctgta

SEQ ID NO: 11536 - DNA, 201 bp, Homo sapiens
tattttatggcatcagaaatgttctttccatgtcaagaatatttatgaactggcaagatgaaaataatttcaatagtattgcaaaatcattaatcataaaraagtctttgtcagagaattactgctgtccatcatattttcataatgtaacctatatttttatgggagggagggagggagggaagaagcatggaagagagg

SEQ ID NO: 11537 - DNA, 201 bp, Homo sapiens
tctaatcccagctactcgggaggctgaggcaggagaagcgcttaaacctgggaggtggagtttgcagtgagctgagattgagccactgcactctagcctgrgcaacaagagcgaaactctgtctcaaaaaaaaaaaaaaaaagtgaaggtgcccagtgtctgcaactatgtcaccccgggcatatcacatatcactctgtt

SEQ ID NO: 11538 - DNA, 201 bp, Homo sapiens
acatgaaaaatggtggatatggaaggtggagaagagaggagataacagctttatctttcaaaatagagaattgagagatggtaccaaaagctgatgaagtaaaaaaaaaaaaaaaaaaaaaaagatacttaatataatactttaaattacaaatataaacacaagaagaacaaatataatgatacaaatgtcagacactgg

SEQ ID NO: 11539 - DNA, 201 bp, Homo sapiens
tagaatcataaagataatccatgctattaaaagtattctttccttttttttttgtttgtttttgtttttgtttttttgagagagagtttcgctcttgttgyccaggctggagtgtatggcacaatctcggctcactgcaacctctgcttcctgggttcaagcaattctgctgcctcagcctcctgagtagctgggattaca

SEQ ID NO: 11540 - DNA, 201 bp, Homo sapiens
tccagtttactcccatttcattcattaacacaattttgagacaacagaaaacttcatgtgaagtgtgtttgtgtgtgtgtgtgtgtgtgtgtgtgtgtgtgatgttacatcatatacataaggattgggaagaataattagataattatttatataatttttaaacctcattgacatgatttaatgtcaaaaatataatta

SEQ ID NO: 11541 - DNA, 201 bp, Homo sapiens
gtccagtttactcccatttcattcattaacacaattttgagacaacagaaaacttcatgtgaagtgtgtttgtgtgtgtgtgtgtgtgtgtgtgtgtgtgtgatgttacatcatatacataaggattgggaagaataattagataattatttatataatttttaaacctcattgacatgatttaatgtcaaaaatataatt

SEQ ID NO: 11542 - DNA, 201 bp, Homo sapiens
aatcagctgggcatggtggtgcgtgcctgtaattgcagctacttgggaggttgaggcaggagaatagcttgaacccaggaggcagaggttgcagtgagccragaccgcgccactgcactccagcctgggcaacagagtgagaccccatctcaaaaacaacccaaaaaaccaaaaaacaaacaaacaaaaagaaatataatc

SEQ ID NO: 11543 - DNA, 201 bp, Homo sapiens
cctgccgcaactactgtgatgcggtacccaataatggtggaagagtttagcggggtccacctcaggccgatgcttgaatcggttatatcaacaaagcttaygtcagtgagttggggcacctctattgagttacaaagcaaagggagggggaggcaaaaggaaaatagagggaaaaaaagaggaaaaaataaagcagtgtat

SEQ ID NO: 11544 - DNA, 201 bp, Homo sapiens
tctataaagcttttcagctcttcaaaataaaatgtctgagaggtagatattttcctattttctaattacagttgacctttctctctgaatgccaaaggagrtaatctacacattactagttatatatttcttgaaatggatgaatttgatatataccaaggaaacgttttaaaataccaaaactttacatggatgagccaa

SEQ ID NO: 11545 - DNA, 201 bp, Homo sapiens
actggtagtatctataaagcttttcagctcttcaaaataaaatgtctgagaggtagatattttcctattttctaattacagttgacctttctctctgaatrccaaaggagataatctacacattactagttatatatttcttgaaatggatgaatttgatatataccaaggaaacgttttaaaataccaaaactttacatg

SEQ ID NO: 11546 - DNA, 201 bp, Homo sapiens
tattgaagtatttgtagatactataaagccagccctgggaaccactggtagtatctataaagcttttcagctcttcaaaataaaatgtctgagaggtagawattttcctattttctaattacagttgacctttctctctgaatgccaaaggagataatctacacattactagttatatatttcttgaaatggatgaatttg

SEQ ID NO: 11547 - DNA, 201 bp, Homo sapiens
acagatctctagtcatcactgtttttatttgaatgtctctcatccctctcaactcttttactgcccaatttctgtgattcctgaagacttcaacaatcaayactctctttttttgtttgttttgtttttttttttgagacagagtctcactctgtcacccaggcttggagtgcagtggcgccatctcaactcactgcaacc

SEQ ID NO: 11548 - DNA, 201 bp, Homo sapiens
cccaactccaccagtggtccactgtgtgacttccctgctccctctaagcaagtcactcctctcctctgggtctctgtttccttacctataaaatgagaacrtttcttcatgtgatctcaagtcccttttaaaatcgctaggattctttgaaaaccttttctatcatctagtgcagagaacttgttgaggaagttgggattg

SEQ ID NO: 11549 - DNA, 201 bp, Homo sapiens; identical to SEQ ID NO: 1776

SEQ ID NO: 11550 - DNA, 201 bp, Homo sapiens
tgcagcccacagtggagtatgtggttagtgtctatgctcagaatccaagcggagagagtcagcctctggttcagactgcagtaaccagtacgtaaccactkcttggtttccattttcaaagtcaaattttgttcttgggtgtctgaatgcccacgacatgtcttttgcaattacacatagggaaagtgaacttgttggtta

SEQ ID NO: 11551 - DNA, 201 bp, Homo sapiens
ggacagaaatagaacccacccctagatcaagtctgcagtattgttctcagcttatgcgtgcatctgtcttgtgtctatatgcagatgaggcaacgtgttaygatgatgggaagacataccacgtaggagaacagtggcagaaggaatatctcggtgccatttgctcctgcacatgctttggaggccagcgggtaagactgg

SEQ ID NO: 11552 - DNA, 201 bp, Homo sapiens; identical to SEQ ID NO: 1760

SEQ ID NO: 11553 - DNA, 201 bp, Homo sapiens
ttcagtgaaagaaactgactgttctctgaattgttttttgtgggccattaaaaatggtcacacagggctggccatggcattttggcacagtcaccagcagycaagtggtgtataatttcagaggtactaaaaggcatcgggtcacccatcccagtcatgtccccccaccccccaccaaacaccatcaaaataataacatac

SEQ ID NO: 11554 - DNA, 201 bp, Homo sapiens
taatttttggttatgtctatccttttgctcaacattttaaaggaagtggtcttaaatctcccacatatctacatcacaataacaacctctattcacaaacygattcctattaaatacatttccatttacattacagagaattatgagactccttatttctagctgaacatcatttgttattttcaactcgacattttgaat

SEQ ID NO: 11555 - DNA, 201 bp, Homo sapiens
gctgcagaagattaaagtacttttgcagacggaatcgctcttttcttaaattactcttgaaattcctcagaggagaaaaatactaacaataatttttggtyatgtctatccttttgctcaacattttaaaggaagtggtcttaaatctcccacatatctacatcacaataacaacctctattcacaaaccgattcctatta

SEQ ID NO: 11556 - DNA, 201 bp, Homo sapiens
tttctctctgctttggatgtaccgataattgcagttcagggttcctggaacttctaccagtgccactctgacaggcctcaccagaggtgccacctacaacrtcatagtggaggcactgaaagaccagcagaggcataaggttcgggaagaggttgttaccgtgggcaactctggtatgtaaacacgtactatttagacaca

SEQ ID NO: 11557 - DNA, 201 bp, Homo sapiens
cacctcgggcccagataacaggataccgactgaccgtgggccttacccgaagaggacagcccaggcagtacaatgtgggtccctctgtctccaagtacccmctgaggaatctgcagcctgcatctgagtacaccgtatccctcgtggccataaagggcaaccaagagagccccaaagccactggagtctttaccacacgta

SEQ ID NO: 11558 - DNA, 201 bp, Homo sapiens; identical to SEQ ID NO: 1753

SEQ ID NO: 11559 - DNA, 201 bp, Homo sapiens
atctgtttggctcagagctaactgtgaacttcagaagtgtttgttttgcctttttaaaaataccattgctttaatgtaactataatttctgagactgatgygaaagtcttgctggaaaattagacttcccaaaggatcacagtcaagcaaaatggttccacaatttctcatgactggcagagttttggcaaagttttgtgt

SEQ ID NO: 11560 - DNA, 201 bp, Homo sapiens
ccttgtgggaggtggggatcttcgaattgtttgtttgtttttgttttgttttgtttttgagacagagtcttgctctgtcaccaggctggagtgcagtagcrctatctcagctcactgcaacctctgcctccagggttcaagcaattctcctgcctcagcctcctgagtagctgggactacaggcacatgccaccacaccca

SEQ ID NO: 11561 - DNA, 201 bp, Homo sapiens
gagggatggcattgtacctgttgagagaaaatacaaaatacttgccgtaatattagacacacacacacacacacacacacactctctctctctctcacacwcacatacacacacacacacaaaattgttagctggccatgttattgtaactcctaccacacatatttttacattataatacattaataattttaatattta

SEQ ID NO: 11562 - DNA, 201 bp, Homo sapiens
tatcatttataaaagagggatggcattgtacctgttgagagaaaatacaaaatacttgccgtaatattagacacacacacacacacacacacacactctcwctctctctcacacacacatacacacacacacacaaaattgttagctggccatgttattgtaactcctaccacacatatttttacattataatacattaat

SEQ ID NO: 11563 - DNA, 201 bp, Homo sapiens
agtgttttgtttttaacagtagtacactataacttaaaatagacttagattagactgtttgcatgattatgattctgtttcctttatgcatgaaatattgrttttacctttccagctacttcgttagctttaattttaaaattacattaactgagtcttccttcttgttcgaaaccagctgttcctcctcccactgacctg

SEQ ID NO: 11564 - DNA, 201 bp, Homo sapiens
ctctttttttccctctattttccttttgcctccccctccctttgctttgtaactcaatagaggtgccccaactcactgacctaagctttgttgatataacygattcaagcatcggcctgaggtggaccccgctaaactcttccaccattattgggtaccgcatcacagtagttgcggcaggagaaggtatccctatttttg

SEQ ID NO: 11565 - DNA, 201 bp, Homo sapiens
taccatcattgctttaacattccaccaattttactactagtaacctgatatacactgctttattttttcctctttttttccctctattttccttttgcctycccctccctttgctttgtaactcaatagaggtgccccaactcactgacctaagctttgttgatataaccgattcaagcatcggcctgaggtggaccccgc

SEQ ID NO: 11566 - DNA, 201 bp, Homo sapiens
aaacagattgcatattaccatcattgctttaacattccaccaattttactactagtaacctgatatacactgctttattttttcctctttttttccctctrttttccttttgcctccccctccctttgctttgtaactcaatagaggtgccccaactcactgacctaagctttgttgatataaccgattcaagcatcggcc

SEQ ID NO: 11567 - DNA, 201 bp, Homo sapiens
tattagtttttccctaaacttctgatatttagctgaaatgtcataagtaacttatcaaagctggctactggcctttctgattaaaaactgacaccataacrtccatctacaaattttcccctagaagcttaagggtcatttcatttttgattcttaagtattataaaatgattcagtaaaacaaaaactgttacattattt

SEQ ID NO: 11568 - DNA, 201 bp, Homo sapiens
caccccacgctcaggtaacttttttaagaagacacttcctatgttatcttatcaggattgttcctgaaggagggttgttttgtctctgtcaacagtcctcwcattcaagaaatcttatatattagtttttccctaaacttctgatatttagctgaaatgtcataagtaacttatcaaagctggctactggcctttctgatt

SEQ ID NO: 11569 - DNA, 201 bp, Homo sapiens
aagaaaatcaagaaagtacacctgttgtcattcaacaagaaaccactggcaccccacgctcaggtaacttttttaagaagacacttcctatgttatcttawcaggattgttcctgaaggagggttgttttgtctctgtcaacagtcctctcattcaagaaatcttatatattagtttttccctaaacttctgatatttagc

SEQ ID NO: 11570 - DNA, 201 bp, Homo sapiens
ggtggagtttgcagtgagctgagattgagccactgcactctagcctgggcaacaagagcgaaactctgtctcaaaaaaaaaaaaaaaaagtgaaggtgccyagtgtctgcaactatgtcaccccgggcatatcacatatcactctgtttttccgtctgtaaaacgggagcaacaatgccattgccttatcatcagaaggat

SEQ ID NO: 11571 - DNA, 201 bp, Homo sapiens
tcctgtttccttaaataaattagatatctatgggattgaaatataaaagtttcttccaaaatgtaaggtgggctttccacttcaagctccactatgcataygattctagtgtattttcagtgcagtaaatatatcaaactatcatggttttggttgaccaaatacttttctaatcacttatttccttcccccagaatcaat

SEQ ID NO: 11572 - DNA, 201 bp, Homo sapiens
cggaggttgcagtgagccaggatcacgccactgcactccagcctgggcaacaagagcgaaactccatctcaaaaaaaaaaaaaaaaagtacattgaattgraaagtcttcaaaaagcagcagtgatgaattttttgagatttttaacaattacaaaaattcagggttttttctaatggatgccacctgagactttattttc

SEQ ID NO: 11573 - DNA, 201 bp, Homo sapiens
tccaaaatgtttccaacttttttatgtagacccctggccagatggaaatgacatcattgtatataacttttagcaaagttaaaaggaaaaaaatatgtacstcaatattcacatgaagaaaattccataattttgggaaaaggagaaatgcaaatgtaacgttttccttcaattatttgcagccggttgttatgacaatgg

SEQ ID NO: 11574 - DNA, 201 bp, Homo sapiens
ttaaaaggaaaaaaatatgtacgtcaatattcacatgaagaaaattccataattttgggaaaaggagaaatgcaaatgtaacgttttccttcaattatttkcagccggttgttatgacaatggaaaacactatcagataaatcaacagtgggagcggacctacctaggcaatgcgttggtttgtacttgttatggaggaag

SEQ ID NO: 11575 - DNA, 201 bp, Homo sapiens
taaaaggaaaaaaatatgtacgtcaatattcacatgaagaaaattccataattttgggaaaaggagaaatgcaaatgtaacgttttccttcaattatttgyagccggttgttatgacaatggaaaacactatcagataaatcaacagtgggagcggacctacctaggcaatgcgttggtttgtacttgttatggaggaagc

SEQ ID NO: 11576 - DNA, 201 bp, Homo sapiens; identical to SEQ ID NO: 1752

SEQ ID NO: 11577 - DNA, 201 bp, Homo sapiens
acatggggagggaggtgctcccaattctgatggaggagaattggagattggaatttagattgaattcagtatctctctctgtctctctctctctctctctcccattaacacttacaacgactgtgattgtatgaccttagaactcagtcattctggtatgaaattgtgtgatggagaatgaatttgctgggaagttgattt

SEQ ID NO: 11578 - DNA, 201 bp, Homo sapiens
aaattttatttctttaacagctgggctgttcttccctaacaagacctgccagaacccatagctcacacttagaatcacatcctttgtttgacatcgtttgkgggtttgtggtttggtgattttcccataatggccttcccaggcagagagcatcatcttaaacttgggaagactctaggtggctggctcaagcaatagaaa

SEQ ID NO: 11579 - DNA, 201 bp, Homo sapiens
tacatggggagggaggtgctcccaattctgatggaggagaattggagattggaatttagattgaattcagtatctctctctgtctctctctctctctctctcccattaacacttacaacgactgtgattgtatgaccttagaactcagtcattctggtatgaaattgtgtgatggagaatgaatttgctgggaagttgatt

SEQ ID NO: 11580 - DNA, 201 bp, Homo sapiens
gacacttccaataagagtggggattagcatcttaatccccagatgcttaagggtgtcaactatatttgggatttaattccgatctcccagctgcactttcyaaaaccaagaagtcaaagcagcgatttggacaaatgcttgctgttaacactgctttactgtctgtgcttcactgggatgctgtgtgttgcagcgagtatg

SEQ ID NO: 11581 - DNA, 201 bp, Homo sapiens
ctttaaagtaatgatattagggaagcggtgaatacaaatgaatatgtttaaaagaattccattctttggcatttagtgtgaagagagaaatatttgttatygctggaaatcatgactcaatccccttgattgtttaaaaaaatacaccaaagataaagtttgtaaatggccatatttatgattatgctactcaaatataga

SEQ ID NO: 11582 - DNA, 201 bp, Homo sapiens
ttacatggggagggaggtgctcccaattctgatggaggagaattggagattggaatttagattgaattcagtatctctctctgtctctctctctctctctctcccattaacacttacaacgactgtgattgtatgaccttagaactcagtcattctggtatgaaattgtgtgatggagaatgaatttgctgggaagttgat

SEQ ID NO: 11583 - DNA, 201 bp, Homo sapiens
aataacagtgacagtggagtcctcagtaaatgccaagtcctgcattccgccctgtgaatccatcattggagtctagttaaatatgctctggctcacagatyctctgtgcaataacttcccttttcttttttctccagacattactggttatagaattaccacaacccctacaaacggccagcagggaaattctttggaaga

SEQ ID NO: 11584 - DNA, 201 bp, Homo sapiens
aatacaaatgaatatgtttaaaagaattccattctttggcatttagtgtgaagagagaaatatttgttatcgctggaaatcatgactcaatccccttgatygtttaaaaaaatacaccaaagataaagtttgtaaatggccatatttatgattatgctactcaaatatagaagaactttctgaagagtgccagtatacctt

SEQ ID NO: 11585 - DNA, 201 bp, Homo sapiens
ggccagtcctacaaccagtattctcagagataccatcagagaacaaacactgtaagtgcattagcagcacaagtgtgttccctcatactagacagtctctktctacaggtatctttcttcagaatgaaccaagtgttttaattaattaaaaaaaaaaacaactcataaatgacttaagtgaaacactgtattccataatat

SEQ ID NO: 11586 - DNA, 201 bp, Homo sapiens
aaccagtattctcagagataccatcagagaacaaacactgtaagtgcattagcagcacaagtgtgttccctcatactagacagtctctttctacaggtatstttcttcagaatgaaccaagtgttttaattaattaaaaaaaaaaacaactcataaatgacttaagtgaaacactgtattccataatatagtttaagttat

SEQ ID NO: 11587 - DNA, 201 bp, Homo sapiens; identical to SEQ ID NO: 1762

SEQ ID NO: 11588 - DNA, 201 bp, Homo sapiens
tcctgtctacttcacaaacaacaggtacatgtgtgctacatagtgttaaaagaatctttttctgtaaaacacaggcctgtagtagcacttcctgactgttygccccactttctttctttcttagcgcctgatgccccacctgacccgactgtggaccaagttgatgacacctcaattgttgttcgctggagcagaccccag

SEQ ID NO: 11589 - DNA, 201 bp, Homo sapiens
cctggcacactgcttaacaaatggtgaatgaaaaaaaaaaaagaaaagtcattctttttcttctttcaccctatgtccataatctggccatttgcagaacwtgatgtccagtgatcgaaatcaacagcatcagtgcatccaatatcttctagtctctcatcttcttattacatcattaattttatttactttaaaattaag

SEQ ID NO: 11590 - DNA, 201 bp, Homo sapiens
gaggtgtaagcatgttgtctacatggaggcaagaccagaataatagaaaatggaaacagattcccttaaagaggggaatcgtgtctttctcattggctcartgtagtctccgtagagtctagaatgcttcagcacctggcacactgcttaacaaatggtgaatgaaaaaaaaaaaagaaaagtcattctttttcttctttc

SEQ ID NO: 11591 - DNA, 201 bp, Homo sapiens
ccaagatggcactactgcactccagcctgggagacagagaaagaccctgtgtcaacataaataaatatataaataaatcatcaagtctcatattaaagacyctgtaaatatgacttattgttgacaaatgaaacaaatagaggtgtaagcatgttgtctacatggaggcaagaccagaataatagaaaatggaaacagatt

SEQ ID NO: 11592 - DNA, 201 bp, Homo sapiens
gccaagatggcactactgcactccagcctgggagacagagaaagaccctgtgtcaacataaataaatatataaataaatcatcaagtctcatattaaagastctgtaaatatgacttattgttgacaaatgaaacaaatagaggtgtaagcatgttgtctacatggaggcaagaccagaataatagaaaatggaaacagat

SEQ ID NO: 11593 - DNA, 201 bp, Homo sapiens
ctaaaaatacaaaaattagccaggcttgggggcgcacgcctgtagtcccagctcctcaggagctgaggtaggagaatcacttgaacccaggaggcaaaggktgcagggagttgagccaagatcgcgccattgcaccctagcctgggcaacagagcgagattctgtttcaaaaaacccccaagtgtattataaggcaataat

SEQ ID NO: 11594 - DNA, 201 bp, Homo sapiens
ttccaaggataaaaagaaacttttaaagtcttctatactcagccaggttatcaatcaaatatgagggcaaaataatattttcagacagattttaggcagtktatcttccatatatccttttctttaagggtatttgtagatacactccagaaaaacaagagtgaaatatgaaggaagttgtggggtccagcaaacagtgct

SEQ ID NO: 11595 - DNA, 201 bp, Homo sapiens
cagaggtgaacatttagactcaaaaacagcctccttcaacataaaccaaacatgcacatatcatagtacccatgcacacacttttgcatcacacacatagyccaggtagcttgaacgttgctagaaatatgaaagaaaaaacagataatctgcttttagatcattaaaaatcaacttgaattgataaatgtttgattttca

SEQ ID NO: 11596 - DNA, 201 bp, Homo sapiens
catcataaagatagtgttttaagaaaagatagttttctgttctgcaagcataaattttctagctatttcattattatcttaaatggagttaacactacttwgaaattgatgctacttcccttattttccttttattttaaacaaaagaaccaaaaccatactttaaattttgttgataacagtgatatacatcaaggtgta

SEQ ID NO: 11597 - DNA, 201 bp, Homo sapiens
tgttgaatgagatcagaggtgaacatttagactcaaaaacagcctccttcaacataaaccaaacatgcacatatcatagtacccatgcacacacttttgcrtcacacacatagcccaggtagcttgaacgttgctagaaatatgaaagaaaaaacagataatctgcttttagatcattaaaaatcaacttgaattgataaa

SEQ ID NO: 11598 - DNA, 201 bp, Homo sapiens
tcaaatattatttagtacaacactctgagtccttacttgtgagtatctgagttgatatagggcacaggtttcctgatgtcttttcccagaccctctccatytcaccatgctgctgtcctcttgagtgattaaatactgaaacgattacctataaagaaaataccccttctgcagacatggggacagttggcttttgctcct

SEQ ID NO: 11599 - DNA, 201 bp, Homo sapiens
acttcctgaacaaaaacatgctaaattccattgctgttcagtccatttcctttaaaggtgggctatgccacagggctagattttaaaacgtggaatttcasaccagtgctcgaaatcttatgaaagcaaaagggacctctgtagttgtactccactttggcttgagtaaaaaccactgctgtaccctttttctttcctttc

SEQ ID NO: 11600 - DNA, 201 bp, Homo sapiens
ccagggcttccagagggcttatgcagacctgcgactgaagcaagatcaatggcaggccgtctctagtattgtcgagggctcctgttaactacggagcacgyaggtagattgttggcaggaaaatctggcaggaacgatggcccctatccttgttccatttctctcctcagctggttaggaccactataccctccctctttt

SEQ ID NO: 11601 - DNA, 201 bp, Homo sapiens
ccacatagctgcttgctggaagcatttaggtggacatgttggagataaaatctggaaaggaaggaatccttgagtattggagtattacatgttgaccttaytcctactctttaaaaaggagaacagcaagatcccactgagcatagaggtgatttcggagggaagagattggaatttgacctcagatatgctctttggtgc

SEQ ID NO: 11602 - DNA, 201 bp, Homo sapiens
tggccaaaggtagtgttagccaagcctcattcctccatttcctcatctgtaatatgggaagattgtagctgattacctttaatgttccatcctaaatactraacacccagatgcaccttttctaggaacttggaagattctgcttttcccaaccctcagacactgtcagtgctggggaaggtgacttcacttttgaaggct

SEQ ID NO: 11603 - DNA, 201 bp, Homo sapiens
aggtaacaaggagaaagataggacaaaactaataacaaatgagcaatcttgcaatatgaaaaggttctccatgttttgatgcatttcttgtgatttttttwatctaacagcatagtgtatatattgtattctttaataggagaaataatttaacatgcactgcagagtttggttttattttttttctttactacagccact

SEQ ID NO: 11604 - DNA, 201 bp, Homo sapiens
attacatggggagggaggtgctcccaattctgatggaggagaattggagattggaatttagattgaattcagtatctctctctgtctctctctctctctctctcccattaacacttacaacgactgtgattgtatgaccttagaactcagtcattctggtatgaaattgtgtgatggagaatgaatttgctgggaagttga

SEQ ID NO: 11605 - DNA, 201 bp, Homo sapiens
ctcaaccatttctaaaatatgcccagtataacaaaaaataataagcctttctctaatatgatttcaaatttcaaaatgaaattatgtgtaactcaaataaaagcaatggaatgtgacagccctttgttttcaacgaagacatgccctcccagcaactccccaaatcctggtgggtgaggggcatgcttcacactcaagggt

SEQ ID NO: 11606 - DNA, 201 bp, Homo sapiens
gattaagccaggtattgttttctggattcctagagagaagggtaatactatgttactcagaacacatccagtatatcagcatgctttggtaacttctggawgtcaagaaaactttcataaccaacttattccgcatcttcagagaagactacataaatagaaaaacatatcactttgataaggttcaatctcagctcactg

SEQ ID NO: 11607 - DNA, 201 bp, Homo sapiens
tctcaaccatttctaaaatatgcccagtataacaaaaaataataagcctttctctaatatgatttcaaatttcaaaatgaaattatgtgtaactcaaataaaagcaatggaatgtgacagccctttgttttcaacgaagacatgccctcccagcaactccccaaatcctggtgggtgaggggcatgcttcacactcaaggg

SEQ ID NO: 11608 - DNA, 201 bp, Homo sapiens
atttatcccataaattaaaatgatttatctactctggagttagggatagtgtctctgacctaacgcatttgattagtgctgtaaagaagctggcctctggygtctttactgctccttctaagattgtcttggggtcttaattgttgcctttgggtttgaaggctccttttttgatattgtaaactaataacagctagagag

SEQ ID NO: 11609 - DNA, 201 bp, Homo sapiens
ttctcaaccatttctaaaatatgcccagtataacaaaaaataataagcctttctctaatatgatttcaaatttcaaaatgaaattatgtgtaactcaaataaaagcaatggaatgtgacagccctttgttttcaacgaagacatgccctcccagcaactccccaaatcctggtgggtgaggggcatgcttcacactcaagg

SEQ ID NO: 11610 - DNA, 201 bp, Homo sapiens
acctaacgcatttgattagtgctgtaaagaagctggcctctggtgtctttactgctccttctaagattgtcttggggtcttaattgttgcctttgggtttsaaggctccttttttgatattgtaaactaataacagctagagagtttgttgaagtaaaacagccattaactactggtgttgtaaataagtttaaaatcaaa

SEQ ID NO: 11611 - DNA, 201 bp, Homo sapiens
cttctcaaccatttctaaaatatgcccagtataacaaaaaataataagcctttctctaatatgatttcaaatttcaaaatgaaattatgtgtaactcaaataaaagcaatggaatgtgacagccctttgttttcaacgaagacatgccctcccagcaactccccaaatcctggtgggtgaggggcatgcttcacactcaag

SEQ ID NO: 11612 - DNA, 201 bp, Homo sapiens
aactgcatgaacccaggagatggaggttacagtgagccgagattgcaccacttcactccagtctgggcgacagagaaagactttgtctcaaaaaaaaaaawaaataaaaagtaaataaataaataaaataaatggcccattataggggtttttatctttaacttgctatttttccagatcatggttctgaagaccctgtga

SEQ ID NO: 11613 - DNA, 201 bp, Homo sapiens
taactgcatgaacccaggagatggaggttacagtgagccgagattgcaccacttcactccagtctgggcgacagagaaagactttgtctcaaaaaaaaaaataaataaaaagtaaataaataaataaaataaatggcccattataggggtttttatctttaacttgctatttttccagatcatggttctgaagaccctgtg

SEQ ID NO: 11614 - DNA, 201 bp, Homo sapiens
ctcggctcactgcaacctctgcctcccaggttcaagcaattctcctgcctcagcctcccaaatagctgggattacaggcatgtgccaccgcacccagctaatttttgtatttttagtagagacggggtttcacgatgttggccaggatggtctcgatctcctgacctcgtgatccgcccgccttggcctcccaaagtgctg

SEQ ID NO: 11615 - DNA, 201 bp, Homo sapiens
tgcatcccactaaagttctccactagcttcaattgcctcaagatctgttccatgttctatgaagtagtttcaacagaaatggcaattatcttagaagcaakggaaaaataaaagatgggcttcctgtcgggtgcctgtgacaggtgtcacatctaaccatggttttttagagcagttaatgccttgatagaacagatgaat

SEQ ID NO: 11616 - DNA, 201 bp, Homo sapiens
aaaggccaggcgcggtggctcacgcctgtaatcccagcactttgggaggccgaggcaggcagatcacaaggtcaggagatcgagaccatcctggctaacayggtgaaaccccatctctactaaaaatacaaaaacaaaattagccaggcgtggtgatgggtgcctgtagtcccagctactcgggtggctgaggcaggagaa

SEQ ID NO: 11617 - DNA, 201 bp, Homo sapiens
tctgtatagagtatcacctggactttaaaattcccacagaacatacagacattagaaggagacactggctttttagaattggggggaacaggaaaatagaagcagacatgagaggaattgaactagacacttcccacagaggctgcacaaacactggccaatctctcctacccttcacttgcctttagtttcacttttcat

SEQ ID NO: 11618 - DNA, 201 bp, Homo sapiens
acatagtgttaaaagaatctttttctgtaaaacacaggcctgtagtagcacttcctgactgtttgccccactttctttctttcttagcgcctgatgccccwcctgacccgactgtggaccaagttgatgacacctcaattgttgttcgctggagcagaccccaggctcccatcacaggtcagctaagcctccccctctttg

SEQ ID NO: 11619 - DNA, 201 bp, Homo sapiens
tcaacttttaaaatatgatttccatcttcccgttggaccctttccagtgtattaggtctaatttttggaagtgccaccctaagatctgtatagcagtactrctcttagggatgattcacataaatatgtggtgtttgcgctgtgatgatacaaatttaggacagaaatagaacccacccctagatcaagtctgcagtattg

SEQ ID NO: 11620 - DNA, 201 bp, Homo sapiens
cagtgctactgctatggccgtggcattggggagtggcattgccaacctttacagacctatccaagtaagtagctctattactgcaagttgagaactgccarttgggttataacaacagggcagtgattattaatgctctcatgcctaagttgggggtctcccctctttcccacccttttctcttgttattatctaataatc

SEQ ID NO: 11621 - DNA, 201 bp, Homo sapiens
tgggagaagtatgtgcatggtgtcagataccagtgctactgctatggccgtggcattggggagtggcattgccaacctttacagacctatccaagtaagtwgctctattactgcaagttgagaactgccaattgggttataacaacagggcagtgattattaatgctctcatgcctaagttgggggtctcccctctttccc

SEQ ID NO: 11622 - DNA, 201 bp, Homo sapiens
ctcttccccaaatttgaaataatcattttatcacaatttgaatgggctctgtaaccccttatcttgaattcgtcataatataaaattctgctaattacacrtagtatttacatgattgtatggaagaatcattaagacaattatctggaaaatgaacaaacagtaaatctgaatattgtttgaaaattacggatgtgaaaa

SEQ ID NO: 11623 - DNA, 201 bp, Homo sapiens
agacatgtatttgttcaaatactggcttctcacaggaaagtgtattttaccacattctttacttgagcatactgtaacctctgcaaaagttacacattttrggaagaaaaaaatttttttggcaaaaattgtattactgaccaaactttgaaaaaaatgttattctatgcttgtagaaaagttattttagtggaaggtgtt

SEQ ID NO: 11624 - DNA, 201 bp, Homo sapiens
cttcctgtaactattttctatgacacgtttggactacgttttctgcctccagggctcaaaaattctaccccttcacctgacagcacttagatgtctttgaygcacacaaagcttcttcccaagtgagaattcttaggatgaccaaactgaactgatccttttgcacacatacatgtttagacctggtgatcatttatcaag

SEQ ID NO: 11625 - DNA, 201 bp, Homo sapiens
agtttagaagaaaaaacccacttttgcttgtaattctatatccaaacccatagtttttatttgatccagaataaactggaactgggaaaagttatgaagcygtagttaaatccaggcttctagaacagcaagaaccctttgtgtggatgtgtagatattatcttagtttaacatcccctaacccttcctgtaactattttc

SEQ ID NO: 11626 - DNA, 201 bp, Homo sapiens
gtctctcatccctctcaactcttttactgcccaatttctgtgattcctgaagacttcaacaatcaatactctctttttttgtttgttttgtttttttttttgagacagagtctcactctgtcacccaggcttggagtgcagtggcgccatctcaactcactgcaacctccgtctcctgggctcaagcgattctcgtgcctc

SEQ ID NO: 11627 - DNA, 201 bp, Homo sapiens
aatactctttctgcacagaccacactggtgagtgtcccaagggggagccacagaagtgagaaaaactcactttcatgccctagttttatttgccagcattytagccatttattttgaacccgcccaagaagcatcgcttttgttcagtttggactcaagagatcgcagcgctcacgtaacagctgaggattcttccatctt

SEQ ID NO: 11628 - DNA, 201 bp, Homo sapiens
tttgcattccagaatttactttaccagtgtccttgtctgtatcagtgattcactttcgagatatgtttcttgttaacagttaacatccatagcatgctctmctttactgttcaaatgtggaccactttggtagtctatataaatatgggatgatagaagaacccagaaaaattgcaggctagcttgagaattctcctagta

SEQ ID NO: 11629 - DNA, 201 bp, Homo sapiens
taaaagagtccccaaatcatttcccaataaaagtacactgtgcagtttctgaagagtttacactatttaaagcataatcatagcctcacagcagtaacagkcctctggaaatatttgtccttggtgtttactttgcattccttcctctagctgggtgtacgaccaagccagggaggagaggcaccacgagaagtgacttca

SEQ ID NO: 11630 - DNA, 201 bp, Homo sapiens
atggcaataacaattgctacacaattctcccccagaatagtctcatatattaattttatggcatagatatagtcataaatattatcccaacatccttaagyagcatccttaattgacctgtataaatatagctttacaaatagagaaactgaggcatggcagcagaagtggtcatgaaggacatcagcagaagaactcagg

SEQ ID NO: 11631 - DNA, 201 bp, Homo sapiens
tgctaaagctcaccatgcccttatttctctaggtggccaccaaatatgaagtgagtgtctatgctcttaaggacactttgacaagcagaccagctcagggwgttgtcaccactctggagagtaagtaacaaaatgtcttcatatggacaaaccttctgtatagacaaaaattaaagaatggtaaatcagtggggttcagtg

SEQ ID NO: 11632 - DNA, 201 bp, Homo sapiens
ccgacattgaactctttttgtagtggaaaccatcctttatatgtggtttctatgctctggcaaactttgttacattctataaagtaacacacaattatttycttcatgtattggcattcgaaattttagaaattcagagaggacttagagatggccatgaaagacatgatatctaagcattctttttaaaaaacaagtttt

SEQ ID NO: 11633 - DNA, 201 bp, Homo sapiens
ttcctctgcatcaaataatcttattgtaattttatatcaacggaattcctttatgttgacctaagttttccagatgactattgggacagaattttataaayagctttggattttgtgcagctcttttagatgtattgtgcttattttaaaaggttgtggggggcaatttacatatccattggttgaatgcataaatcgact

SEQ ID NO: 11634 - DNA, 201 bp, Homo sapiens
aaaataggtctctcatgaaaagtggtaaccattttgaccaaagctttcccagaaacttgctggtttattagatattttgcatttaaaatgttactgtgatyatcagacttccaagatctttgtggcaatattttagcttaagacaaattagatgtctgattcaaaccttatctgttatttagaactctttaaatagcaagt

SEQ ID NO: 11635 - DNA, 201 bp, Homo sapiens
acatgcctgtagtcccagctactcaagaggctgaggtagaggatcacttgagcctacgagttcaaggctgcagtgagctatgataactccactgcactgcygcctggatgacacagagagaccgtttctaaattaattaattaacaattttaagaaagaaaaagggccattgcttatttttccatacaaaagtaaaataaa

SEQ ID NO: 11636 - DNA, 201 bp, Homo sapiens
aggtgactgagaccaccattgtgatcacatggacgcctgctccaagaattggttttaaggtaaactgcagatgttcctaatctctgtgatacagccctgaagctgtccttgtgtttcccatgtagtggaaacagggtgctcaggagtcaggagacctgggttttgtcacctgcttctgtccatacatctttgactacattg

SEQ ID NO: 11637 - DNA, 201 bp, Homo sapiens
gcgcctggccaaagtaatattttcaataagaaaaataacagtgatgtcaggatgctagaaaatgcaaaataaatttgttataattcctgattctggtgatraaatactaaatttttgcagtattattctgaaagaataatcacgtatttaaagtacaaatctttagacttcaaagtgcatccatggtggcagattttgttt

SEQ ID NO: 11638 - DNA, 201 bp, Homo sapiens
aaaagaacaagtcccgtgtgaataggcccaatcaactttccccatatttcatgttagggtttatccaagttcacaggcaaatcgcaagaggcaagggtccrtagtgtttacaatctagttcagcatttgaatgtgccattgggcttaacaacttagaaaactaccaggatttccacactttatatgcatatgtctgtttgc

SEQ ID NO: 11639 - DNA, 201 bp, Homo sapiens
cgagggacctggaagttgttgctgcgacccccaccagcctactgatcagctgggatgctcctgctgtcacagtgagatattacaggatcacttacggagaracaggtacagcagtaaaatgctattttacactctgattaaatcagattctgttgtggataacctgaaagcccaacagtgaacaaagaattaaagaaactt

SEQ ID NO: 11640 - DNA, 201 bp, Homo sapiens
gaatctgacattgcaaatcagctttaccacttccaaggtatagaaaatccaggtctatgagactaacatcacattgtaaaaatcaaatcgtggtagaatayctttaaattaatataaatacatccccattgtggggacattttgcagggtatctgcttatctcacatacacctatgttttaataagtgatgcaacattgca

SEQ ID NO: 11641 - DNA, 201 bp, Homo sapiens
gcagaagaatcacttggacccaggaggcagaagttgcagtgagccaagatcatgcctctgcaccccagcctaggtgatagagtgagactccatctcaaaamaaaacaaaacaaaacaattataacaatttgaatctgacattgcaaatcagctttaccacttccaaggtatagaaaatccaggtctatgagactaacatca

SEQ ID NO: 11642 - DNA, 201 bp, Homo sapiens
atttacagagaaagaagttgtgaaaccaccatagttagttgctgtgctttgaatttcttttgctcaaatggcctcagcgaaatcttatttgcctatagcawatctacaaaaaattttcctagaccgtcttttctacaactggatggtaaagttgattgaagtgtgcctcatgtagctttatgtttggggcatttgaagggc

SEQ ID NO: 11643 - DNA, 201 bp, Homo sapiens
caaccatctcaaaaataggaaatggtattgagatgcctgccccatccctctaaaagctctctctgtattctttcgagaagaaatacctttctcatgtaagmgatcattcgaatatgtaccagacctagagaggaggacttgtccaatcttgtctccaaggactggggcttcactggtttctccctgcttttatttgtagaa

SEQ ID NO: 11644 - DNA, 201 bp, Homo sapiens
attcccgtgtaagggtgaaaaagaattattaggaaagatcctctttaaagaggaatagtaagaaacaataaaacttaggtgatatttaaggaaacaagtcwgattaaaagaaattttggagtatcctggcttatacacaagaccataaagcaagacatttgaagaggatactaaagttgtggattatttcctaagctctga

SEQ ID NO: 11645 - DNA, 201 bp, Homo sapiens
cttattcagatactgttttgcaatgttctcccaaggtatttttctaattgtagaatagattttcctttttaatgagcaacaacctgcagctagcacctgcrgcgaacagagttttgagccagataaagaaggaagcaccccaagggcaggaagttcagtcagttttgtcgatatattccgcatgtctgcaatacgacaggc

SEQ ID NO: 11646 - DNA, 201 bp, Homo sapiens
aaccaccaagtgagttatgctgggagtaaaggtttggggctttatattatgattcttaacagagaagctgcatagagagatggcatgaaatgcagcataakgtacgtgttcattcaacatgtcatctaagctccctttgcatcaaacttttcatttgtttgatcagttgccaccaggaacacagtatgttgggccaagggt

SEQ ID NO: 11647 - DNA, 201 bp, Homo sapiens
tttgactgaaaatatggcctacattcagaaacaaaagagtttcagggtgtcagaatctgcatgcgacagaaattaagattaactctgtgataaaagattcrctgtgacagagaacaagctatgggaacaacttggccaaaggtagtgttagccaagcctcattcctccatttcctcatctgtaatatgggaagattgtagc

SEQ ID NO: 11648 - DNA, 201 bp, Homo sapiens
taaaagagggatggcattgtacctgttgagagaaaatacaaaatacttgccgtaatattagacacacacacacacacacacacacactctctctctctctyacacacacatacacacacacacacaaaattgttagctggccatgttattgtaactcctaccacacatatttttacattataatacattaataattttaat

SEQ ID NO: 11649 - DNA, 201 bp, Homo sapiens
gcctgatgccccacctgacccgactgtggaccaagttgatgacacctcaattgttgttcgctggagcagaccccaggctcccatcacaggtcagctaagcstccccctctttggctgctatgttaatcttaatgacatcagcagggagggcgcagattctgactgcggacctgcatatcactttaaatctccaatataatt

SEQ ID NO: 11650 - DNA, 201 bp, Homo sapiens
atgctgtcactggccgtggagacagccccgcaagcagcaagccaatttccattaattaccgaacaggtacaaacttctactctggggtgacaccagcttttacttattcagatactgttttgcaatgttctcccaaggtatttttctaattgtagaatagattttcctttttaatgagcaacaacctgcagctagcacctg

SEQ ID NO: 11651 - DNA, 201 bp, Homo sapiens
tatgctgtcactggccgtggagacagccccgcaagcagcaagccaatttccattaattaccgaacaggtacaaacttctactctggggtgacaccagcttttacttattcagatactgttttgcaatgttctcccaaggtatttttctaattgtagaatagattttcctttttaatgagcaacaacctgcagctagcacct

SEQ ID NO: 11652 - DNA, 201 bp, Homo sapiens
attcacaaacatattatcagtggtggaaataagtgatttttattttttcttctctttacttttctgtattttccaaattttatttaaaaggaatgtattctgttaaaagttttaaaaaggacacaatgcatgcaatcctgggttgagggcttaccttctcccacttctaatgctactctactactcagtgacattttaaag

SEQ ID NO: 11653 - DNA, 201 bp, Homo sapiens
cctcctccttgtgtccttgtggacatagaaatatgattaggcttagaggtgaacagtaaaggtcatttatgttatcttttcaaaacttaatagacatttawccatcataagcttgtcccccctcaaaatcatgattgacaagactaaataaaatgtatatcaggtgtctctttatggaggaaattgtagtaggatttattt

SEQ ID NO: 11654 - DNA, 201 bp, Homo sapiens
aattcacaaacatattatcagtggtggaaataagtgatttttattttttcttctctttacttttctgtattttccaaattttatttaaaaggaatgtattctgttaaaagttttaaaaaggacacaatgcatgcaatcctgggttgagggcttaccttctcccacttctaatgctactctactactcagtgacattttaaa

SEQ ID NO: 11655 - DNA, 201 bp, Homo sapiens
gtcatttcatttttgattcttaagtattataaaatgattcagtaaaacaaaaactgttacattattttctgcagttatttcaaaggctttttctaaaaaawtttttagtatcttttcttataaccctctccccccaccaccatatgacacttcatatgctggtaactcacttattacctattttagataaaaggttcaaat

SEQ ID NO: 11656 - DNA, 201 bp, Homo sapiens
ttaaatagtcacatctccaaaatttttcttgaatagttgtctttaaaaatgtgtttacatttgtaaggatcttcataaacagaaggggtaattcaaagatrggcatggaattgacttatgccaattgattaaaacaaacatcctgtgtgttctgtgaaatacatacaactttaaaatgaaaaactcataattttatgcatg

SEQ ID NO: 11657 - DNA, 201 bp, Homo sapiens
ggccggacggggtggctcacgtcagtaatctcagcactttgggaggccgaaatgggcagatcacttgaggtcagaagttcaagaccagcctggccaacatrgtgaaaccccatctctactaaatatacaaaaattagcaaggtgtggtggcatgcacctgtaatcccagctactggggaggctgaggcaggagaatctttg

SEQ ID NO: 11658 - DNA, 201 bp, Homo sapiens
aaactcctgacctcaagtgatccacccactttggcctcccaaagtgctgggattacaggcgtgagccatcgtgcccagccggaaggtcttactagtatccktattgaatacttaaagaaactgaggctttaaaaaagttctgcaacttgtagggtcacagagataggaagggatagagctggctctataacctatgtccga

SEQ ID NO: 11659 - DNA, 201 bp, Homo sapiens
gcttagataataaagtttgaaaatcaatgtattttttttcctagaagctttcagaaaacttaaatctgttaataatctggtgaagtgctttattacacatrcaaaattttgctctgtttgacagagtgtcagttagaaattcttgaaaaggttactataagacacaatttttatttctagtaatttaaacattgactgaca

SEQ ID NO: 11660 - DNA, 201 bp, Homo sapiens
tggtggcagtaaagaagataatttttttcctctcaagaaatttctcacctgatttgggtatttatgcatttctaataacacaagttttgttgaaaatgtaraaaattggccggacggggtggctcacgtcagtaatctcagcactttgggaggccgaaatgggcagatcacttgaggtcagaagttcaagaccagcctggc

SEQ ID NO: 11661 - DNA, 201 bp, Homo sapiens
agccactggagtctttaccacacgtaagctgaaaattaagtgccttttcttaactatatttacattctctattcttcatgctttaaaacaaaacaaaacamaacaaaaaaaacattaaaaaattagtacataatttaaatcagtgatactaaaaatgtgctccatagactggctgctggcccgttaattgtttgctgctag

SEQ ID NO: 11662 - DNA, 201 bp, Homo sapiens
aaagaaactcagaagactttcctacccagttggtagattctgtaaagtagcttgctgttgtctgtcatcagctctcaaaaaaaaaaaaaaaaaaaaaaaaatagatcattgtcatggtacatggagagggaagtgagaaaatgtggagaaacatcttccttagaatatggtaaagaagcccgggcgtggtggcagtaaaga

SEQ ID NO: 11663 - DNA, 201 bp, Homo sapiens
aacccttcctgtaactattttctatgacacgtttggactacgttttctgcctccagggctcaaaaattctaccccttcacctgacagcacttagatgtctytgatgcacacaaagcttcttcccaagtgagaattcttaggatgaccaaactgaactgatccttttgcacacatacatgtttagacctggtgatcatttat

SEQ ID NO: 11664 - DNA, 201 bp, Homo sapiens
caaagaaactcagaagactttcctacccagttggtagattctgtaaagtagcttgctgttgtctgtcatcagctctcaaaaaaaaaaaaaaaaaaaaaaaaatagatcattgtcatggtacatggagagggaagtgagaaaatgtggagaaacatcttccttagaatatggtaaagaagcccgggcgtggtggcagtaaag

SEQ ID NO: 11665 - DNA, 201 bp, Homo sapiens
ataaatgcattcagaggttttttcccaatgggaacaaaatttgattgagatgtaaagagaggaagaattgtggagatgtcaaacatgtgaccagagctatkaacacacttgatacccttgaacttaaacttacccaactcaaaatatctggccttctgcgatcttacctttctacatttataataagatttgcaaggttgt

SEQ ID NO: 11666 - DNA, 201 bp, Homo sapiens
gtatgttttacatctttatgttaaagattaagccaggtattgttttctggattcctagagagaagggtaatactatgttactcagaacacatccagtataycagcatgctttggtaacttctggaagtcaagaaaactttcataaccaacttattccgcatcttcagagaagactacataaatagaaaaacatatcacttt

SEQ ID NO: 11667 - DNA, 201 bp, Homo sapiens
aaatattaacctagagcatagcaaatgaattctaaattctcaagtaggaggagctaagagcaagagagctgcaaccaagctacaaactaaactctgaattsaatgcacagctccattaattttgaaagatgtaatgtttgttgctatcttaatatacttttgatatctacagctttaaaaaaatcatagtggaaaaacacc

SEQ ID NO: 11668 - DNA, 201 bp, Homo sapiens
gatgctgggtgtgtcattctttctgaacagagtgccacttaaaaaaaatgtggctgaatttttgcttacacactacactttaaattacagggagcttgcayaattcaaaataacctttttttcctgtttttcttccaaatttccctacagctgagaagtgttttgatcatgctgctgggacttcctatgtggtcggagaaa

SEQ ID NO: 11669 - DNA, 201 bp, Homo sapiens
agagagaagggtaatactatgttactcagaacacatccagtatatcagcatgctttggtaacttctggaagtcaagaaaactttcataaccaacttattcygcatcttcagagaagactacataaatagaaaaacatatcactttgataaggttcaatctcagctcactgccactgacatagagttgaacaaaaggtttag

SEQ ID NO: 11670 - DNA, 201 bp, Homo sapiens
aatttcctgtgatctctctgggaaagcaggattcatgacctcttccttgccatccagatttctctgtggttttccattgtgttctaagcaagacacttaaytgaattgactccaagtgaccagacctgttaacgtttcccctgtctctgatgggaaagctgttgtctgtgtctctactttagccaacctaagtacctacca

SEQ ID NO: 11671 - DNA, 201 bp, Homo sapiens
cgggccagcagaattggtattatctgtgtttgtcagaaatgcaaactccctagttttttgttggacctccagaaacagaatctgcattttagccagacccmagatgatgtgtgtggcacattaaagattgagaagcctgatcctctcccaattctcacccaatgaaaaaatatgttacatcctctatccactgcttggtta

SEQ ID NO: 11672 - DNA, 201 bp, Homo sapiens
atctgtatctctcacttcattttattctttgaggtgtaccatgttacttgtggaatagagaagtgggttttcctttagaggggattagtgaactagaaaarcttgtacctaagtgaggctcacatggactttccttttcccctcagctgaagagacttgctttgacaagtacactgggaacacttaccgagtgggtgacac

SEQ ID NO: 11673 - DNA, 201 bp, Homo sapiens
ttaaaaaatattctgctctcattttaatatggcagaaccgattgctttctaagtgtggcttttttccagtaaaggttaattattaagaccactagtcctgscctgggtcaatcccagtatgatcctgggcaagtaaattaaagaagataacttctctgtgcctcagtttttttttgttttgttttttgttttttcatttac

SEQ ID NO: 11674 - DNA, 201 bp, Homo sapiens
ctctacaaaaaatacaaaaaaaaaaaaaaaaaaaaaaatagcactgtggggagtgcctgtaatcccagctactcaggaggctgaggcaggataactgcatraacccaggagatggaggttacagtgagccgagattgcaccacttcactccagtctgggcgacagagaaagactttgtctcaaaaaaaaaaataaataaaa

SEQ ID NO: 11675 - DNA, 201 bp, Homo sapiens
cagtaagacatgcttaggggagttgcccattttaaatcacctggatatcttcaagctagacaaatcatgagacttttctgcagtgactgggaaggtgttcrtgaagagtgaaccagccatgtgttgtctggtcttcatgtttgcaatgcagagacctcttgcacctcacagaaacagtctggtttcttggtgaccagtagg

SEQ ID NO: 11676 - DNA, 201 bp, Homo sapiens
gcccctgcatcacaatgtctgtcccttagccgtagacctgtcacatgttaatcatgtgttctaagaccttattataatcctaatgctacagatgacctcarggtagcccctctccctcctagcaaagtcattattatcctcttttaaagatgaagcaaaccagtgcagtggctctcgcctgtataatcccagcactttggg

SEQ ID NO: 11677 - DNA, 201 bp, Homo sapiens
atttggcattcgattacaaaaattatacgtctttagaaaaaaagttggaaaaatgaaaggaagaaggaggaggaggagaaaggagaaagacaagaagtggkgttttcccatagtacattaataatcacagattaggtgggtgcggtggctaactcctataatctcagcacttcgggaagctgaggctggtggatcacttga

SEQ ID NO: 11678 - DNA, 201 bp, Homo sapiens
ggttcctgtgtttcttaaagacgggtatgagcacagatggaatcagtgtttgatgtgtgtgcgtttatgagtgtgtgtgcatttatgagtgtgtgtgtttstgtacatagtagaaccaagagacctcttgggttccatttcagtaagacatgcttaggggagttgcccattttaaatcacctggatatcttcaagctagac

SEQ ID NO: 11679 - DNA, 201 bp, Homo sapiens
tacatgaagtggtaattgttaaactttgcattagtaagtaaaaatacatacaccatttttctaatagaattacctgtcatttcctcttaagtttaaaaackgcttatatttgcttttcacatgcttttacctttaaaacaaagaaacgaatctttcccaaattagttcctagagtcttctttttgctttactctcccaaag

SEQ ID NO: 11680 - DNA, 201 bp, Homo sapiens
cccccaaggagaagaccggaccaatgaaagaaatcaaccttgctcctgacagctcatccgtggttgtatcaggacttatggtaagacatgaccgttgttcrttggaataaagatggagatcatctctaacacagtttctaaggtggtgaaaatataatatcataataaatctaactgttcttttcctctgcatcaaataat

SEQ ID NO: 11681 - DNA, 201 bp, Homo sapiens; identical to SEQ ID NO: 1830

SEQ ID NO: 11682 - DNA, 201 bp, Homo sapiens
tgagacaggaacgaaatgttggatgtacgttaatttcccctacaccttcctcacttcctaaactggtggtgtcttttcttttttttttctcttcctccccygggtgggaaaaacaggtcttgattccccaactggcattgacttttctgatattactgccaactcttttactgtgcactggattgctcctcgagccaccat

SEQ ID NO: 11683 - DNA, 201 bp, Homo sapiens
aaaatgcatacgtaattgacagactctcaaatggtgatatgattatagatctggaagggatttcaaatattatttagtacaacactctgagtccttacttstgagtatctgagttgatatagggcacaggtttcctgatgtcttttcccagaccctctccatctcaccatgctgctgtcctcttgagtgattaaatactga

SEQ ID NO: 11684 - DNA, 201 bp, Homo sapiens
tgtgcgagtgtgtgcgcgctttactgagagaaaccagctgtgcacacaaaaggaccgagttttgagcacgctggttctgagggcctgggatgataagaccrtgcattggaggacgaggactctgcgactttcccgtgttctaataaattctgcacgttcagattgtccttctaggaattaaccaaaacttgcctttaaaga

SEQ ID NO: 11685 - DNA, 201 bp, Homo sapiens
aaatacatctccattttttgttgtcatggtgtgtgtacctttgtcatcacagtatgattttatcgctggtctcaaaaactaaaagataccttactcaacartcacctagactttcagtcactaacaaattaagaaatttgttgtctgtccttttaaaaaacattttctaagaagatctttgttatttagatttagcagaca

SEQ ID NO: 11686 - DNA, 201 bp, Homo sapiens
ttggcaggaaaatctggcaggaacgatggcccctatccttgttccatttctctcctcagctggttaggaccactataccctccctcttttttttttttttkttttttgttttttgtcttcctttgctttgtttaaacagtgagggttattggtaagaggagagcccgtgtcattcctcactataatgctttctctctgctt

SEQ ID NO: 11687 - DNA, 201 bp, Homo sapiens
gtaggctataggactggacatttggatatttcatcagttcaaatagtcctgggcgtgctttagtttctcatgcttttgagcagagttttaaaataagcccsatttgcccctacagatctcctgcctggtacagaatatgtagtgagtgtctccagtgtctacgaacaacatgagagcacacctcttagaggaagacagaaa

SEQ ID NO: 11688 - DNA, 201 bp, Homo sapiens
gaaaatctggcaggaacgatggcccctatccttgttccatttctctcctcagctggttaggaccactataccctccctcttttttttttttttgttttttkttttttgtcttcctttgctttgtttaaacagtgagggttattggtaagaggagagcccgtgtcattcctcactataatgctttctctctgctttggatgt

SEQ ID NO: 11689 - DNA, 201 bp, Homo sapiens
attcagatttccataattgctcatgctcctccttaaccttctggaataataaaatttcccaataccattgccccccgccacccacacccccctagttcccraaaatatatgtgcttctttttgttacaaaaagtttaaattgcctgaggctctgggaaaattctatcactatggcaattccaagaagaaacaaggcacagt

SEQ ID NO: 11690 - DNA, 201 bp, Homo sapiens
aagaagaagctgggcacagtggctcacgcctgtaatcccagcactttgagaggccaaggcgggtggatcacaaggtcaggatttccagtccaagcctggtyaacacggtgaagccccgtctctattaaaaatacaaaaattagccaggcatggtggcaggcacctgtaatcccagctactcaggagtctgaggcaggagaa

SEQ ID NO: 11691 - DNA, 201 bp, Homo sapiens
aagctacaaactaaactctgaattcaatgcacagctccattaattttgaaagatgtaatgtttgttgctatcttaatatacttttgatatctacagctttwaaaaaatcatagtggaaaaacacctgcaggaaagttccatgacttcaaacaaattctgcttctaaataagcacgtaaaaataagtgaatatcaagagaaa

SEQ ID NO: 11692 - DNA, 201 bp, Homo sapiens
agggttttaccgtgttggccaggctggtctcgaactcccaacctcaggtgatctgcctgcctcaacctcccaatcaatactctttctagaataagtatcascacttttgtttctcaccttttctcctttcttggttctcttcctataaatcccatagtttcagaccttttaaattaggagagctctctggggaatgtgctt

SEQ ID NO: 11693 - DNA, 201 bp, Homo sapiens
taaccaggttctcccagctttgagacgtctcagacttaccagttctccaaaacgctattttctttaagggtgacaccttttaaaaattaggcacctcaaayatctactgcttttgagcttttgagttttgcactgtaaaaagaaaaatacacagtgggattttaagtcaaattagtttatctaatttttagggaataattt

SEQ ID NO: 11694 - DNA, 201 bp, Homo sapiens
gcaaagaaactcagaagactttcctacccagttggtagattctgtaaagtagcttgctgttgtctgtcatcagctctcaaaaaaaaaaaaaaaaaaaaaaaaatagatcattgtcatggtacatggagagggaagtgagaaaatgtggagaaacatcttccttagaatatggtaaagaagcccgggcgtggtggcagtaaa

SEQ ID NO: 11695 - DNA, 201 bp, Homo sapiens
aatcccagtagccccagctgagctggaggatggagaccacttggtagacacttgtggattatttcctaggctaaatgcaaaagctactgctgaataagggwcatttttttccagtcccaggccagtagcgacatagatttcagagtgatctctgtgagatcctgaagatcctgactgcagaaagtagtgaattgtcttctc

SEQ ID NO: 11696 - DNA, 201 bp, Homo sapiens
tcagaaagttttgtgtttggcatcattaccactctgttgacatataaatttcctcttgagcttaggaggcttctctgagagtcaaacatttactttgagagtgggcagatcttgctttacttggaaggatacacttacaggatagaaacacagaatacttgaacactgaagaatttgaaaatgtcaattctcagaagatct

SEQ ID NO: 11697 - DNA, 201 bp, Homo sapiens
ttcagaaagttttgtgtttggcatcattaccactctgttgacatataaatttcctcttgagcttaggaggcttctctgagagtcaaacatttactttgagagtgggcagatcttgctttacttggaaggatacacttacaggatagaaacacagaatacttgaacactgaagaatttgaaaatgtcaattctcagaagatc

SEQ ID NO: 11698 - DNA, 201 bp, Homo sapiens
catcattttcataatttgaaaaaaaaagccaaattaatatatttcttttttgattcactttttaagtgatcatttttaaaactttacttttgacccactgwatttatttagatagaaggaaaagagatgatgggagggaagtttagataaaggatggaagttggttttatttaaacaatagccctgtgatttcctaatgag

SEQ ID NO: 11699 - DNA, 201 bp, Homo sapiens
gagtaaaacctcgtcaaaaagaaaaaataataaaaataaaaaaaaatggaacaagatactcagggatgtatatttaattttttaaaaaatattctgctctcattttaatatggcagaaccgattgctttctaagtgtggcttttttccagtaaaggttaattattaagaccactagtcctggcctgggtcaatcccagtat

SEQ ID NO: 11700 - DNA, 201 bp, Homo sapiens
agagtaaaacctcgtcaaaaagaaaaaataataaaaataaaaaaaaatggaacaagatactcagggatgtatatttaattttttaaaaaatattctgctctcattttaatatggcagaaccgattgctttctaagtgtggcttttttccagtaaaggttaattattaagaccactagtcctggcctgggtcaatcccagta

SEQ ID NO: 11701 - DNA, 201 bp, Homo sapiens
gcagctcagcgtgaccataatcttggtttcttactttgtggctgagggcaagaatatctttatattggcatatccaccaccccagggctgttgcttctgtmcaccctggaatcactaattacagcatcacccagtatacaagcccctgcatcacaatgtctgtcccttagccgtagacctgtcacatgttaatcatgtgtt

SEQ ID NO: 11702 - DNA, 201 bp, Homo sapiens
gtgttggccaggctggtctcgaactcccaacctcaggtgatctgcctgcctcaacctcccaatcaatactctttctagaataagtatcaccacttttgttyctcaccttttctcctttcttggttctcttcctataaatcccatagtttcagaccttttaaattaggagagctctctggggaatgtgcttaaggtggagaa

SEQ ID NO: 11703 - DNA, 201 bp, Homo sapiens
taacctagagcatagcaaatgaattctaaattctcaagtaggaggagctaagagcaagagagctgcaaccaagctacaaactaaactctgaattcaatgcmcagctccattaattttgaaagatgtaatgtttgttgctatcttaatatacttttgatatctacagctttaaaaaaatcatagtggaaaaacacctgcagg

SEQ ID NO: 11704 - DNA, 201 bp, Homo sapiens
gaagacctagaatttttcttcttaaataccaaacacgaataccaaattgcgtaagtaccaattaattataagaaatatatcaccaaaatgtaccatcatgmtcttccttctaccctttgataaactctaccatgctccttctttgtagctaaaaacccatcaaaatttagggtagagtggatgggcattgttttgaggtag

SEQ ID NO: 11705 - DNA, 201 bp, Homo sapiens
ttcttatttttggtgctaaaacccaaaacaaatcttttatttaaaaataagattttttttttttttggccaggtgtgatggctcatgcctgtaattccagyactttgggaggccgaggtgggtagatcacctaaggtcaggagttcgagactggcctggccaacatagtgaaaccccatctttactaaaaatacaaaaatt

SEQ ID NO: 11706 - DNA, 201 bp, Homo sapiens
catagatgaaacagcccactaaaccagtagtacctcaattcagccattagagctatcattatgaagtggcccacacatatatttggctttttctcacacartatttttaaaataaaaataaaaaatggctccttagaatccagactgaaaaaaaaatgcgagaattgcgatgttgattctaaattcccacatggcaaagaa

SEQ ID NO: 11707 - DNA, 201 bp, Homo sapiens
ctgaagagacttgctttgacaagtacactgggaacacttaccgagtgggtgacacttatgagcgtcctaaagactccatgatctgggactgtacctgcatyggggctgggcgagggagaataagctgtaccatcgcaagtaaggaagagattgtgtaaaatgatgccaaaatatcaaatatgaatttctctgttaccatca

SEQ ID NO: 11708 - DNA, 201 bp, Homo sapiens
tatgtcttctcctatctctatctcccctccaaattctccaccctcacttgcagcctgtgagaaagtgcagtaaaccattcactcagaggtgtatggcttasagagagggaaatacccagccggcaagggaatgcatagtgaacacaaagcacattaaacttgaaaacaaaactcagacaagctccatggatgctaagtggt

SEQ ID NO: 11709 - DNA, 201 bp, Homo sapiens
taggtctccttgaggagtgaacagtgggtttcttaatcttttgatttgggaaagtggagacaagcttcaaaaatgagtcatgatttaatgttattacaggrcactttagcacttgtccaacctgagtattttgaccattatctgcagtaaaatgctacaaagaagctttattggtctgtagattcaacttttaaaatatga

SEQ ID NO: 11710 - DNA, 201 bp, Homo sapiens
tttcattatcaggctgtaactctcattcacagaaatgattggagactttaggtctccttgaggagtgaacagtgggtttcttaatcttttgatttgggaargtggagacaagcttcaaaaatgagtcatgatttaatgttattacaggacactttagcacttgtccaacctgagtattttgaccattatctgcagtaaaat

SEQ ID NO: 11711 - DNA, 201 bp, Homo sapiens
ttaaaccacaagtagatataaagctagagaaatacagatgtctgctctgttaaatataaaatagcaaatgttcattcaatttgaagacctagaatttttcktcttaaataccaaacacgaataccaaattgcgtaagtaccaattaattataagaaatatatcaccaaaatgtaccatcatgctcttccttctaccctttg

SEQ ID NO: 11712 - DNA, 201 bp, Homo sapiens
tgttgcttctgttcaccctggaatcactaattacagcatcacccagtatacaagcccctgcatcacaatgtctgtcccttagccgtagacctgtcacatgytaatcatgtgttctaagaccttattataatcctaatgctacagatgacctcaaggtagcccctctccctcctagcaaagtcattattatcctcttttaaa

SEQ ID NO: 11713 - DNA, 201 bp, Homo sapiens
agagaagtgggaccgtcagggagaaaatggccagatgatgagctgcacatgtcttgggaacggaaaaggagaattcaagtgtgaccctcgtatgtcatcasagatcatttttagtgccttattaagcattctcactttcattatcaggctgtaactctcattcacagaaatgattggagactttaggtctccttgaggagt

SEQ ID NO: 11714 - DNA, 201 bp, Homo sapiens
tcttcatgcaagcttattttctactaaaacagttttggaattattaaaagcattgctgatacttacttcagatattatgtctaggctctaagaatggtttygacatcctaaacagccatatgatttttaggaatctgaacagttcaaattgtaccctttaaggatgttttcaaaatgtaaaaaatatatatatatatatat

SEQ ID NO: 11715 - DNA, 201 bp, Homo sapiens
aggctctaagaatggtttcgacatcctaaacagccatatgatttttaggaatctgaacagttcaaattgtaccctttaaggatgttttcaaaatgtaaaawatatatatatatatatatattccctaaaagaatattcctgtttattcttctagggaagcaaactgttcatgatgcttaggaagtcttttcagagaattta

SEQ ID NO: 11716 - DNA, 201 bp, Homo sapiens
ttgataattaagtggaagtagttgtatgctttgagaagcataccttttttctttcatcaatggaactttaaaaagtttctcactcacccacctgtttcctraacagatcagtgcattgttgatgacatcacttacaatgtgaacgacacattccacaagcgtcatgaagaggggcacatgctgaactgtacatgcttcggt

SEQ ID NO: 11717 - DNA, 201 bp, Homo sapiens
tgaatcaggctttaaactgttgtgccagtgcttaggctttggaagtggtcatttcagatgtgattcatctagtgagtagttgctttgtccatccacttccrtgtttgtctcctcaagttccatgcatgcactcatgtgccaaggaagcatgtttggaagacacaggttcttccaaacatgaagcaaacaagagaatactgt

SEQ ID NO: 11718 - DNA, 201 bp, Homo sapiens
tcatagtggaggcactgaaagaccagcagaggcataaggttcgggaagaggttgttaccgtgggcaactctggtatgtaaacacgtactatttagacacargctcccctctgctgtacaccagagatgggcttttctgttgactgtacctttgttgccattgtctttttatctttgggatttaatgcaacacatcaacatg

SEQ ID NO: 11719 - DNA, 201 bp, Homo sapiens
cttcaaaacaaatgaaatcaatttaattcagatttccataattgctcatgctcctccttaaccttctggaataataaaatttcccaataccattgcccccygccacccacacccccctagttcccgaaaatatatgtgcttctttttgttacaaaaagtttaaattgcctgaggctctgggaaaattctatcactatggca

SEQ ID NO: 11720 - DNA, 201 bp, Homo sapiens
tgttttgtttttttttttgagacagagtctcactctgtcacccaggcttggagtgcagtggcgccatctcaactcactgcaacctccgtctcctgggctcragcgattctcgtgcctcagcctccccaagtagctgggactacagacatgcgccaccaagcccagctattttttagatttttagtagagacagggttttac

SEQ ID NO: 11721 - DNA, 201 bp, Homo sapiens
tgggtctggagtgcagtggtgtgatcacagctccctgcagctttgatctctcgatcttctgggctccagtcatcccccaggactcatgtcagactcctgartagctgggacgagaggtgcctgtcaccatatctggttattattatcattattattaagagtgtctcactatattgcccaggctggacttgaactcctggg

SEQ ID NO: 11722 - DNA, 201 bp, Homo sapiens
atgctttgtttgcatagatttttttaaaataagcttttccaaatcataaagagataagatcttaggtaacatgaagagactcccttacttattcctaaatmatctatattccaagggcattttcttatttggaacagttgacctcactgataaagctgtctcaccactataataacaatgtccaaaatctaggctttctgc

SEQ ID NO: 11723 - DNA, 201 bp, Homo sapiens
gacattgcttcatttcaagggttgtatgccaatacaactattaattacacataagattatggtgctaatttgatttttgaaattttctgtgaaaacaaatkgataaagacttttggaaccaggtctatttaagagtattagagacacagaaaaacctcaaatctcttttaatcttcagtgttgaatgagatcagaggtgaa

SEQ ID NO: 11724 - DNA, 201 bp, Homo sapiens
gaagcatttgtctaaattccttgttcacatatatttgaaaattatttataaaatgctaaaatgtataaagatagttgttaacaatattcaaacagcatgaygtactatagcaataacaggaaattttagatacccattacttttgccaaaaccacatggaagtctcaacaaacctatggagaaaaatcttaaacaaaaata

SEQ ID NO: 11725 - DNA, 201 bp, Homo sapiens
actgaattgttggaagggtagatggaggctgcgaaagtgttttgcaaaggataaaacattagcacgaagctgctgcttattgttatcttattttctctatyctttcctgcagggaattacatttcaaaaaaacatgggaaaactttatttgatgtgttgttctaaatgagtgtgaacaagttcacaaaagccagtttaggg

SEQ ID NO: 11726 - DNA, 201 bp, Homo sapiens
caccattgtgatcacatggacgcctgctccaagaattggttttaaggtaaactgcagatgttcctaatctctgtgatacagccctgaagctgtccttgtgkttcccatgtagtggaaacagggtgctcaggagtcaggagacctgggttttgtcacctgcttctgtccatacatctttgactacattgtcagggcctaaca

SEQ ID NO: 11727 - DNA, 201 bp, Homo sapiens
ccattattgtggaataattcagcgtaaagctttttttttttctttttttgagacggagtctcattctgtcacccaggctggagtgcaatggcatgatctcrgctcactgcaacttctatctccagggttcaagcgattcttgtgtctcagcctcccaagaagctgggactacaggcatgagccaccatgacagttaatttt

SEQ ID NO: 11728 - DNA, 201 bp, Homo sapiens
gtttaacttttatatagcatcttttattgcaaccaaaaatagctgaccattattgtggaataattcagcgtaaagctttttttttttctttttttgagacrgagtctcattctgtcacccaggctggagtgcaatggcatgatctcggctcactgcaacttctatctccagggttcaagcgattcttgtgtctcagcctcc

SEQ ID NO: 11729 - DNA, 201 bp, Homo sapiens
atattcctgttaagaagcaaaaagcatagattaaggcttttaaaaagtgctgattaaaaaataaagtcacttaaaatgtaaacaaaatgcctattaagcgmaaactggttagctttcatggcataatttaaagcccttatccagtattttctccctggttgcaggcaccctgtcaattcttgacaaacttttcagacattc

SEQ ID NO: 11730 - DNA, 201 bp, Homo sapiens
cagtccctgtatacgtctggtttgtaacaagagattctttatcaagcaaaacagtatgtaatgacatttctctggaaccttccattacaagccaccttaaygcagtttggaagatacctcccccacctgggggaatttccagctaaagtatataaaagagtccccaaatcatttcccaataaaagtacactgtgcagtttc

SEQ ID NO: 11731 - DNA, 201 bp, Homo sapiens
ctaccatgtgacccacagtccctgtatacgtctggtttgtaacaagagattctttatcaagcaaaacagtatgtaatgacatttctctggaaccttccatyacaagccaccttaatgcagtttggaagatacctcccccacctgggggaatttccagctaaagtatataaaagagtccccaaatcatttcccaataaaagt

SEQ ID NO: 11732 - DNA, 201 bp, Homo sapiens; identical to SEQ ID NO: 1756

SEQ ID NO: 11733 - DNA, 201 bp, Homo sapiens
atttaaatcagtgatactaaaaatgtgctccatagactggctgctggcccgttaattgtttgctgctagtctgcaacaagaaaaacggttgtgccagaacrtaaatcacaaagcacactgcttagtacagctgagaatttttctgaagccagattttcttgatgaaggaagcagtgtgttaatttgcacacattgccaagc

SEQ ID NO: 11734 - DNA, 201 bp, Homo sapiens
agcctgcatctgagtacaccgtatccctcgtggccataaagggcaaccaagagagccccaaagccactggagtctttaccacacgtaagctgaaaattaartgccttttcttaactatatttacattctctattcttcatgctttaaaacaaaacaaaacaaaacaaaaaaaacattaaaaaattagtacataatttaaat

SEQ ID NO: 11735 - DNA, 201 bp, Homo sapiens
cactggagtctttaccacacgtaagctgaaaattaagtgccttttcttaactatatttacattctctattcttcatgctttaaaacaaaacaaaacaaaamaaaaaaaacattaaaaaattagtacataatttaaatcagtgatactaaaaatgtgctccatagactggctgctggcccgttaattgtttgctgctagtct

SEQ ID NO: 11736 - DNA, 201 bp, Homo sapiens
gccactggagtctttaccacacgtaagctgaaaattaagtgccttttcttaactatatttacattctctattcttcatgctttaaaacaaaacaaaacaamacaaaaaaaacattaaaaaattagtacataatttaaatcagtgatactaaaaatgtgctccatagactggctgctggcccgttaattgtttgctgctagt

SEQ ID NO: 11737 - DNA, 201 bp, Homo sapiens
cttcctttctctctctcttttcttcctttcctttcctttccttccttccttcctttctttctttctttctttctttctttctttctttctttctttctttyctttctttctctctcactctctctctctttctttcttatttttggtgctaaaacccaaaacaaatcttttatttaaaaataagattttttttttttttgg

SEQ ID NO: 11738 - DNA, 201 bp, Homo sapiens
agagagccccaaagccactggagtctttaccacacgtaagctgaaaattaagtgccttttcttaactatatttacattctctattcttcatgctttaaaamaaaacaaaacaaaacaaaaaaaacattaaaaaattagtacataatttaaatcagtgatactaaaaatgtgctccatagactggctgctggcccgttaatt

SEQ ID NO: 11739 - DNA, 201 bp, Homo sapiens
tccagcctgggcaacacagcaagactctgtgtaaaaataataataataatcactgattagctattagcacattaccttctagtcgcttttccctatgaatrtataattcttaaaatatccttcttataagctgtagagtcatttgagggactagtttgctctgattagttaccttttcttttcatttcaaagatcttccaa

SEQ ID NO: 11740 - DNA, 201 bp, Homo sapiens
gggaagctgaggctggtggatcacttgaggccaggagttcgagatcagcctggccaacatggtgaacctccatctctaataaaaatgcaaaaaaaatagcygggtgtggtggtgtgcacctgtaatcccagctactcgggaggccgaggcagaagaattgcttgaaccggaaaggtagaggatgcagtgagctgaaattgt

SEQ ID NO: 11741 - DNA, 201 bp, Homo sapiens
ttcattggcgcactgaagtgtgtgccatcgtaagcactgagttcagtgaatttgaattcttataaagtgaacacaccacaagaccagcacccagatcaagraaaagaatatctctctaccctcaccccatcatcttccgccaataatcactaccctgactcttactgcagagagctatttttaaaaatttggcattcgatt

SEQ ID NO: 11742 - DNA, 201 bp, Homo sapiens
cctggaacttctaccagtgccactctgacaggcctcaccagaggtgccacctacaacatcatagtggaggcactgaaagaccagcagaggcataaggttcrggaagaggttgttaccgtgggcaactctggtatgtaaacacgtactatttagacacaggctcccctctgctgtacaccagagatgggcttttctgttgac

SEQ ID NO: 11743 - DNA, 201 bp, Homo sapiens
aagagaaaactgttttgtcaagtgatgagaaattccaaaaaaatcctctaacccagacaggattctaaatttggggaaatccatggcactctttcaatttrgagtgtgggtcacaaagattcctcaagaggtttttttacactatttgtaggaaactgatatttgctgggtgttttgctttgttttggtttggttttaaat

SEQ ID NO: 11744 - DNA, 201 bp, Homo sapiens
ggctttatgccctactgaatgaattatgcttcactgggctattgattcccgtgtaagggtgaaaaagaattattaggaaagatcctctttaaagaggaatrgtaagaaacaataaaacttaggtgatatttaaggaaacaagtctgattaaaagaaattttggagtatcctggcttatacacaagaccataaagcaagaca

SEQ ID NO: 11745 - DNA, 201 bp, Homo sapiens
cgtagagtctagaatgcttcagcacctggcacactgcttaacaaatggtgaatgaaaaaaaaaaaagaaaagtcattctttttcttctttcaccctatgtycataatctggccatttgcagaacttgatgtccagtgatcgaaatcaacagcatcagtgcatccaatatcttctagtctctcatcttcttattacatcatt

SEQ ID NO: 11746 - DNA, 201 bp, Homo sapiens
aaagatagtgttttaagaaaagatagttttctgttctgcaagcataaattttctagctatttcattattatcttaaatggagttaacactactttgaaatkgatgctacttcccttattttccttttattttaaacaaaagaaccaaaaccatactttaaattttgttgataacagtgatatacatcaaggtgtagaaata

SEQ ID NO: 11747 - DNA, 201 bp, Homo sapiens
acaggctcccctctgctgtacaccagagatgggcttttctgttgactgtacctttgttgccattgtctttttatctttgggatttaatgcaacacatcaayatgaaataaatgagcaactttatattaaattaatctctcccccacctcctgccatatcctgttgtcttcacaaaatgcatacgtaattgacagactctca

SEQ ID NO: 11748 - DNA, 201 bp, Homo sapiens
tctcaccttttctcctttcttggttctcttcctataaatcccatagtttcagaccttttaaattaggagagctctctggggaatgtgcttaaggtggagarcgattctatactaggcaggtagaaaggaatattcctcagctgtcttcaaatgattcattaaggaaaagcagggtacagtgataggaccatgagatttgga

SEQ ID NO: 11749 - DNA, 201 bp, Homo sapiens
tcacatccccagggaagatgtagactatcacctgtacccacacggtccgggactcaatccaaatgcctctacaggacaagaagctctctctcagacaaccrtctcatgggccccattccaggacacttctgagtacatcatttcatgtcatcctgttggcactgatgaagaacccttacaggtaattaattgttctcttca

SEQ ID NO: 11750 - DNA, 201 bp, Homo sapiens
ttcccagaaatttaccaagcattttacaaggagctcttttatatttgaaaagagaaaactgttttgtcaagtgatgagaaattccaaaaaaatcctctaayccagacaggattctaaatttggggaaatccatggcactctttcaatttggagtgtgggtcacaaagattcctcaagaggtttttttacactatttgtagg

SEQ ID NO: 11751 - DNA, 201 bp, Homo sapiens
ttgctctgaatttgaaactttaagttgacaatcttcgtgcttgttagcagcaggatcattaatatctcgtctcaatggcccagcccacacatatggatgaycactagcaagtgtaatgatctcaatatttatttctcattcagttgggtttccttgtatttgccacattagtgtttaccctgttcctaatggcaaaatatt

SEQ ID NO: 11752 - DNA, 201 bp, Homo sapiens
ttccagctgagttgctctgaatttgaaactttaagttgacaatcttcgtgcttgttagcagcaggatcattaatatctcgtctcaatggcccagcccacayatatggatgaccactagcaagtgtaatgatctcaatatttatttctcattcagttgggtttccttgtatttgccacattagtgtttaccctgttcctaat

SEQ ID NO: 11753 - DNA, 201 bp, Homo sapiens
gccaaaggagataatctacacattactagttatatatttcttgaaatggatgaatttgatatataccaaggaaacgttttaaaataccaaaactttacatrgatgagccaagcaggcactaatctctagctatgctcctgtgcagatgtcagcccaccaagaagggctcgtgtgacagatgctactgagaccaccatcacc

SEQ ID NO: 11754 - DNA, 201 bp, Homo sapiens
catagaagtcttaactttgcttcaaaagcataaggtagaattgaaagatttagaatggagtcatttcttttacctaatagctgatctcagattcctccttsgtcaagatataatttatttaaaagaaaaaaaaatgacactttggacacatttctatatggaatgtcctggaccgaaacatgaaatagtgtgtgcttgtca

SEQ ID NO: 11755 - DNA, 201 bp, Homo sapiens
gttaaaagaatctttttctgtaaaacacaggcctgtagtagcacttcctgactgtttgccccactttctttctttcttagcgcctgatgccccacctgacmcgactgtggaccaagttgatgacacctcaattgttgttcgctggagcagaccccaggctcccatcacaggtcagctaagcctccccctctttggctgcta

SEQ ID NO: 11756 - DNA, 201 bp, Homo sapiens
ggaccaagttgatgacacctcaattgttgttcgctggagcagaccccaggctcccatcacaggtcagctaagcctccccctctttggctgctatgttaatsttaatgacatcagcagggagggcgcagattctgactgcggacctgcatatcactttaaatctccaatataatttatgggagaggggtttgtgtgtgtgtg

SEQ ID NO: 11757 - DNA, 201 bp, Homo sapiens
aggttactataagacacaatttttatttctagtaatttaaacattgactgacatcataaagatagtgttttaagaaaagatagttttctgttctgcaagcrtaaattttctagctatttcattattatcttaaatggagttaacactactttgaaattgatgctacttcccttattttccttttattttaaacaaaagaac

SEQ ID NO: 11758 - DNA, 201 bp, Homo sapiens
acaagctatgggaacaacttggccaaaggtagtgttagccaagcctcattcctccatttcctcatctgtaatatgggaagattgtagctgattacctttartgttccatcctaaatactgaacacccagatgcaccttttctaggaacttggaagattctgcttttcccaaccctcagacactgtcagtgctggggaaggt

SEQ ID NO: 11759 - DNA, 201 bp, Homo sapiens
gtcaaagcaagcgtgagtactgaccgcgggctgaaacaggctgcctcagggatgggaccctaaagccgaccaaagttggggctgaagttttgtgcgcgcgygtgtgtgcgagtgtgtgcgcgctttactgagagaaaccagctgtgcacacaaaaggaccgagttttgagcacgctggttctgagggcctgggatgataag

SEQ ID NO: 11760 - DNA, 201 bp, Homo sapiens
acttgttgaggaagttgggattggaatgagcctcagcagatgggcaaggtttgaataggaagagaagagacatttcaggagaaagaaacaacatagagagmcagatgtaggtataagatatggtaataagccaaaatgtattaagagttataaatgcatgaaatcatcatcaaagcttgcttagtgattaactgcttatat

SEQ ID NO: 11761 - DNA, 201 bp, Homo sapiens
atctcaaaaaaaaaaaaaaaaaaaaagaataccctggaaaagttagccaaaaaatgtctattcaggcgtcagatatgatagtaagataattagtttgcgaygcggactttatatgcaggatatttgggtgtttatggaggaaaagtgaagtcgattttaccttcaagaggccaacagccagctggagaggaagtgcctgct

SEQ ID NO: 11762 - DNA, 201 bp, Homo sapiens
ggagatgtacatgcacaaaaattttcacggcaacattgtccaaactagcaacaaactgaaagccacctatgtgtgcattagcagtagaaatggcaataaaycatggactagtcacacagtggaatcctacgcagcaaggagaattagcagtctacagccaaaccaacagcatgggtgagatgcttccagaaatactgagat

SEQ ID NO: 11763 - DNA, 201 bp, Homo sapiens
ccagatccaagaaaggagccctcagaagaggaggggagtcagaggcaaggaaggggctgaggcagccagcccagctgagtggaccccaggagaggtatcamggggtggtgtggggtggggaggggccagtgtcagaaagtggatggggagcggcctgactctgcttttgtcctgtggccttctggccaaaggcagggaaag

SEQ ID NO: 11764 - DNA, 201 bp, Homo sapiens
aatatgtccaaggggatggaagagtgggaggcaaggggtgatcagatcatttataatacactcaacctggtggaatagtattagaagcattagtaattacrttttagagacatggagaaaagctcatgattttaaactaactgaaaaaagcatgaaaaattgcatctggatgctgttgaggaattattgctaattttttga

SEQ ID NO: 11765 - DNA, 201 bp, Homo sapiens
actactatatgagtttccctttgaaagcgcattatttcactgaggaaatagaaccagaaaagaacttccatggcctaccccaaccacatcttcccatcttyctgcagctgtgccagtgcactctgcagtccctcctcgtatcatggaagaatcgtccctgcgcttatctaaagccaaacctgccacctgaacgatgcatcc

SEQ ID NO: 11766 - DNA, 201 bp, Homo sapiens; identical to SEQ ID NO: 1928

SEQ ID NO: 11767 - DNA, 201 bp, Homo sapiens; identical to SEQ ID NO: 1929

SEQ ID NO: 11768 - DNA, 201 bp, Homo sapiens
ctgaggcaggagaatcgcttgaaccccaggggacagaggttgcagtgagctgagatcgcaccactgcactccagcctgggtgacacagcgagactccattwaaaaaaaaaaaaatgcctagagccaaatgctcacagagccatttactgcatggctttgggcaagtcaaaggagtccgcctctcctgtcagaagagtctgt

SEQ ID NO: 11769 - DNA, 201 bp, Homo sapiens; identical to SEQ ID NO: 1930

SEQ ID NO: 11770 - DNA, 201 bp, Homo sapiens; identical to SEQ ID NO: 1932

SEQ ID NO: 11771 - DNA, 201 bp, Homo sapiens
ccctctgtgcctttgtcttcaaagcccacccactattcactgccacctccatcttggtcaacctggaagactttccccatccttaaaacatcagctcaaayggcagattttttttttttttttgtgatatcctcttgatcaccctcccccagtttttaaggagacagatatagaggttcaatccttgggcttcccatgact

SEQ ID NO: 11772 - DNA, 201 bp, Homo sapiens
gtgctgtctttaataagctcccagtgcctgggactgcactttgaggagaagagctgtgtgtgccccagtgtggtccagtgagtactctgggctccctctcrtgggcagggaagctgagggccccatgagctctcccagcttcctgaaggctccccattaatgagagctgactgtgctgtgctttgctgactgcagggcctg

SEQ ID NO: 11773 - DNA, 201 bp, Homo sapiens; identical to SEQ ID NO: 1925

SEQ ID NO: 11774 - DNA, 201 bp, Homo sapiens; identical to SEQ ID NO: 1926

SEQ ID NO: 11775 - DNA, 201 bp, Homo sapiens
cagatccaagaaaggagccctcagaagaggaggggagtcagaggcaaggaaggggctgaggcagccagcccagctgagtggaccccaggagaggtatcaargggtggtgtggggtggggaggggccagtgtcagaaagtggatggggagcggcctgactctgcttttgtcctgtggccttctggccaaaggcagggaaagg

SEQ ID NO: 11776 - DNA, 201 bp, Homo sapiens
ttgaggcagaaaaaaattgagccaaaaaaaaggaaaattgaaccatgtgaaagcaggcaagaaagcttgcattgctcagggcatcccaggcccagagggcrctttggagggagctgggtttcctgagaggaggcagggtgggtgacggacctgtgctggagagccttgaggaccactgtgggttgggaatgggggcagtgg

SEQ ID NO: 11777 - DNA, 201 bp, Homo sapiens
tgcttttgtcctgtggccttctggccaaaggcagggaaaggtggccaaacactgagaccaagaacaaagaaagaaaactgctggtggacttcttccaccaygagcaggccaccaagcccgcagcactgcactgcagcccccagctctgtcctggggttgggggaggtgaggaggggcaaggtggggagcacacagagcacc

SEQ ID NO: 11778 - DNA, 201 bp, Homo sapiens
ttttgtatagccaagtagatacaacctgttacatacatgttatcaaggcaaacaataactgttcctcaagtaagaggtcttgccagcaccgtttgccatayatggttcactctaaatttacctggtaattagggtaaccacttgtgttagctaactggctctacccagaggaaaatcaaatttatctttaagacaaggggt

SEQ ID NO: 11779 - DNA, 201 bp, Homo sapiens
ggagtcagaggcaaggaaggggctgaggcagccagcccagctgagtggaccccaggagaggtatcaaggggtggtgtggggtggggaggggccagtgtcaraaagtggatggggagcggcctgactctgcttttgtcctgtggccttctggccaaaggcagggaaaggtggccaaacactgagaccaagaacaaagaaaga

SEQ ID NO: 11780 - DNA, 201 bp, Homo sapiens
attcctagcagcacagcccaggcattccgagaagttgggctctctggcatcactcactctgcccagaagagccaggggaaagttggggcttctagctgaamcttgatcccacctgccctcttgaggggctcagaatctgctggctgcttcacaggtgggattctcacggcacgctggccacagctgatgcttcgaccccct

SEQ ID NO: 11781 - DNA, 201 bp, Homo sapiens; identical to SEQ ID NO: 1931

SEQ ID NO: 11782 - DNA, 201 bp, Homo sapiens
aaaattgcatctggatgctgttgaggaattattgctaattttttgagatgagaaattgtattaaagtctttttcaaaaaagagtccttaacttttagagaygcacacaagtgtttatgggtgaaattaaataattcagtagagacattaagtgggaaatagaggaaatattgaccatgggttgctaatagttgaagccagg

SEQ ID NO: 11783 - DNA, 201 bp, Homo sapiens
aaagaaccacaagtctgacttctatggtgatcacttccttgcttttccctatagtttgactgaatctaaatatcatccctaaacaatatagcttagctttrcctatttttgatcttcatatttggattcatactttttggtttggctcaagactaaacttttaaaatgcatccacgttgtaggagatgtacatgcacaaaa

SEQ ID NO: 11784 - DNA, 201 bp, Homo sapiens
gtttcctgagaggaggcagggtgggtgacggacctgtgctggagagccttgaggaccactgtgggttgggaatgggggcagtggattggggttcaaaaccsctgggaatgagaaatgggctcaggaaggctagggtggattctttcatcttcctctttgcttggctttattttcacaaaggaaggcagggcaggaaatagt

SEQ ID NO: 11785 - DNA, 201 bp, Homo sapiens
tataggaatagatagtcactgaatttacttgcataggggatggggtataaaatgtttccttatagctccttaacatggaattcagcacccctctccccatmagccttagctctctctgaatcccaagggatatgtgttataaaaatagctgccatcataaatgagaaaaccatcaggacctggtaaaacttggcttcccaa

SEQ ID NO: 11786 - DNA, 201 bp, Homo sapiens
cccttttgtatagccaagtagatacaacctgttacatacatgttatcaaggcaaacaataactgttcctcaagtaagaggtcttgccagcaccgtttgccrtacatggttcactctaaatttacctggtaattagggtaaccacttgtgttagctaactggctctacccagaggaaaatcaaatttatctttaagacaagg

SEQ ID NO: 11787 - DNA, 201 bp, Homo sapiens
ttctcttaaggggcctgggtctactattttcagttctacttcgagagaagtggcctgcaatatcctgcagatttcccctccagggagaaaagcattgtgcrgtgcaaggagcacaggctttgtggaaagaggcatctggggttgagatcctggctcttttgcttccttgaacaagttaaccaaatctctgggcctctgctg

SEQ ID NO: 11788 - DNA, 201 bp, Homo sapiens
gaacatgtattaagtgcttgctgtatgtgacacactgtgccaggtgctccccttaaaacagttctgtgggcaggcatgagaatgaatcccgatcttacagrcaaggaatgttaggctcagaggtttcaagctcacccatcactcagccagagaggacagatgcaggattcaatctcgggagtgcccgagtccacagaagtt

SEQ ID NO: 11789 - DNA, 201 bp, Homo sapiens
tctagatgggctcattgctataggaatagatagtcactgaatttacttgcataggggatggggtataaaatgtttccttatagctccttaacatggaattmagcacccctctccccatcagccttagctctctctgaatcccaagggatatgtgttataaaaatagctgccatcataaatgagaaaaccatcaggacctgg

SEQ ID NO: 11790 - DNA, 201 bp, Homo sapiens; identical to SEQ ID NO: 1927

SEQ ID NO: 11791 - DNA, 201 bp, Homo sapiens
cccgctgtcctcggaacaccacagcgactagaggtaagggagcaccggatgtggctgggatgtgggcagcaaggggccagaggggccttgaaggggtcacrgaccatttaatgaaggtgtattgaaggccaccatgggccaggccctagttagggatggatcagaattatatagcatatgccaggggtcaggcaggtaatg

SEQ ID NO: 11792 - DNA, 201 bp, Homo sapiens
agcccagcagactaacggagccccatcctccatcttgaatcagtcagcccctctatgactgcagagtcctgaatgatggcaacaccttctcttcacttagsgttgtaggatgaccaacagtcctgatttgcctgggactgaggggttcccaatagatgggactttcagggctaaaaccaggaaagtcctgggcagcccaaa

SEQ ID NO: 11793 - DNA, 201 bp, Homo sapiens
caggaggccctatcttaggctcagctcccaaaccttgaacatcttggaggatccacaaataggaggtacactcagctcaggctcagtcttccttaaaaagygccttgctaaagctatcaagttcactggaatacttctgcgaaggacacagcttcagcgatgtcagattttttatgtaaatggtgccttcacatgctctgg

SEQ ID NO: 11794 - DNA, 201 bp, Homo sapiens
aaaaaaaaaagaaaagaaaaaaaaattaatttttgaaatacttgaggtagaaaacttgaggcagaaaaaaattgagccaaaaaaaaggaaaattgaaccaygtgaaagcaggcaagaaagcttgcattgctcagggcatcccaggcccagagggcgctttggagggagctgggtttcctgagaggaggcagggtgggtgac

SEQ ID NO: 11795 - DNA, 201 bp, Homo sapiens
aaaccaattagacctctggcaggcctttgaccaccctgagggccacccccaaggcacggccacactcgcatctgctgccaggaggccctatcttaggctcmgctcccaaaccttgaacatcttggaggatccacaaataggaggtacactcagctcaggctcagtcttccttaaaaagcgccttgctaaagctatcaagtt

SEQ ID NO: 11796 - DNA, 201 bp, Homo sapiens
gacgcccagaggagccgtgtgaaagggctgcctcccagccggctctggagtgaatgagcagcaagtcctggctgcgaaaagaaggggagtgcagcctgcaraagtgtcttcttttttcaattcctgctcagaaggaaacaggagataagaatagtggggaagtccaaaccaaagtgaactatagggctggtaatcgtaggg

SEQ ID NO: 11797 - DNA, 201 bp, Homo sapiens
atgcattttcctgtagcgagatcccttctccgtcttccaccacccactgctttggctcccctcttgctgttccctgcctgcatctgggcaggaagttccamtcctgacttgaccctttttcagctgtgtggcctaggactcattgctcttttctccccatttcatcatctgaaaatggaaaaaataatacctgactagaaa

SEQ ID NO: 11798 - DNA, 201 bp, Homo sapiens
aactggtgggtagacaatgccatgctgttctagatgggctcattgctataggaatagatagtcactgaatttacttgcataggggatggggtataaaatgkttccttatagctccttaacatggaattcagcacccctctccccatcagccttagctctctctgaatcccaagggatatgtgttataaaaatagctgccat

SEQ ID NO: 11799 - DNA, 201 bp, Homo sapiens
ccactccacaaaaaaaaaaaaaaaagaaaagaaaaaaaaattaatttttgaaatacttgaggtagaaaacttgaggcagaaaaaaattgagccaaaaaaaaggaaaattgaaccatgtgaaagcaggcaagaaagcttgcattgctcagggcatcccaggcccagagggcgctttggagggagctgggtttcctgagagga

SEQ ID NO: 11800 - DNA, 201 bp, Homo sapiens
tgagctttgctgtaagttgtggtaaggagggaggcagtgacaaccaggaggcctgttttgagggtttctgagggacccatctgtggtatcacgaggagacscccagaggagccgtgtgaaagggctgcctcccagccggctctggagtgaatgagcagcaagtcctggctgcgaaaagaaggggagtgcagcctgcagaag

SEQ ID NO: 11801 - DNA, 201 bp, Homo sapiens
gggtacatagcgtgtgtatatgtttgtaggttacatgaaatgctttgatacaggcatgtaacgtgtaataatcacatcagaggaaatggggtatgcatcamctcaagcatttatcctttgtgttacacacaatccaatcatactcttttagttatttgtaaaggtaaattaaattttttttactatagtgcccctgttgtg

SEQ ID NO: 11802 - DNA, 201 bp, Homo sapiens
agatgggctcattgctataggaatagatagtcactgaatttacttgcataggggatggggtataaaatgtttccttatagctccttaacatggaattcagmacccctctccccatcagccttagctctctctgaatcccaagggatatgtgttataaaaatagctgccatcataaatgagaaaaccatcaggacctggtaa

SEQ ID NO: 11803 - DNA, 201 bp, Homo sapiens
ctcattgctataggaatagatagtcactgaatttacttgcataggggatggggtataaaatgtttccttatagctccttaacatggaattcagcacccctytccccatcagccttagctctctctgaatcccaagggatatgtgttataaaaatagctgccatcataaatgagaaaaccatcaggacctggtaaaacttgg

SEQ ID NO: 11804 - DNA, 201 bp, Homo sapiens
gagagggagagtcttggccagatccaagaaaggagccctcagaagaggaggggagtcagaggcaaggaaggggctgaggcagccagcccagctgagtggascccaggagaggtatcaaggggtggtgtggggtggggaggggccagtgtcagaaagtggatggggagcggcctgactctgcttttgtcctgtggccttctg

SEQ ID NO: 11805 - DNA, 201 bp, Homo sapiens
agctgaaccttgatcccacctgccctcttgaggggctcagaatctgctggctgcttcacaggtgggattctcacggcacgctggccacagctgatgcttcraccccctcatcttgtttggccaaagtgcagctttttagcttgtgagtaaggaagaaaagctgtatcatatgtctttaaacatcttcctagaccacctttg

SEQ ID NO: 11806 - DNA, 201 bp, Homo sapiens; identical to SEQ ID NO: 1933

SEQ ID NO: 11807 - DNA, 201 bp, Homo sapiens
tctacccagaggaaaatcaaatttatctttaagacaaggggtaattttgcagcactgagcaaggctcttcagttaggctcataccttcccacagaaactargagatagaagcactatctcccttaggtttgtttacatttcaaagagatgacgcccaggtccttgggaaagactagcttagctcataaagctgacaaaaag

SEQ ID NO: 11808 - DNA, 201 bp, Homo sapiens
ttttttttttttttttttttggtggtggttggagggaagggttgggtgtgcatttggcctgtgtgaaaaactggtgggtagacaatgccatgctgttctaratgggctcattgctataggaatagatagtcactgaatttacttgcataggggatggggtataaaatgtttccttatagctccttaacatggaattcagca

SEQ ID NO: 11809 - DNA, 201 bp, Homo sapiens
cccagacaagggctactgggactgtatttattgaaaatagaaatatatagtgattaccttgaagggcaattagatgttgttagttgttgtttttttttttycccctcttccataccaaagggaaggcatagcagtgggttgattcctctagaaccttggtggtctaacattttagaaaactttcttctttttactgtacag

SEQ ID NO: 11810 - DNA, 201 bp, Homo sapiens
ctcaacttgtttccttatagtttaaatgaagataataactctacaaatgtaaggtgactaactcaactcaatttgcccagaactttttaagtcttaagacwggaaggcctgtgtcctaggcagccctttagtcccaggcaaactggaacagttagtcatactaaggttgttataaagtgagataatgtatttaaaatgctt

SEQ ID NO: 11811 - DNA, 201 bp, Homo sapiens
tccattgtaatctcacttcctgagcttcctcttctactccctagtatccttggctttgtccatgggtcctaatttcaatccttatctttaggcattgaccytatccaacttggccaggaaggagtacaccgttggagaaacagtgaacctgatgtctgtggatgcccagaagctcatggatgtgaccaacttcatgcacat

SEQ ID NO: 11812 - DNA, 201 bp, Homo sapiens
tcagcttcctgaagaggaagttcacttttgatagactagctggcatctctaggcctgaccgcaagatccaggggacttgtccctctcaccgccccatgccrcttttcctcctttgtaccatacccccagctctagtttcaccttcgtgtactgtacgatggtctggctcccagagcaacttttcaggatgcacagcaagaa

SEQ ID NO: 11813 - DNA, 201 bp, Homo sapiens
gcagactgatgagaaggcctgaatgacaggagtgtggtgacttgcatttatcccctaagtgtctggcttcagagagctcagaccatgggaaagagaaggcytccctgtcctggagggtgtaaagaaaagctggcagatttggcaggtaaagaagcaacaggatctttttagatacaatttattgcataaatagcaaaagca

SEQ ID NO: 11814 - DNA, 201 bp, Homo sapiens
gttccagggactgcagggtattctgccaacacttacctcacctgccatttaagcttcggctatctggcctatgtggaagtgtgcagggtccccctgatgcyatagccagttcctctttagaggctcccaggagtggcttagttaggatgctgggtgggcatcagggcatagacttagttaaataagagaaagccaggggcc

SEQ ID NO: 11815 - DNA, 201 bp, Homo sapiens
tacatgtgggcattatataatagtgctgtcttcattagaagttaataaggcctgtggagcacagtggctgacacctgtaatcccagcactttgggaggccraagtgggtggatcacctgaggtcaggagtttgagaccagcctggccaacatggtgaaaccccatctctactaaaaatacaaaaaaaattagccaggcatg

SEQ ID NO: 11816 - DNA, 201 bp, Homo sapiens
tctccttgtggttggcattctaggtgattccttatcaaaagccattagggagttctactaatattgaggtggggactttgcaggtgaagttctccatctamctggagtacctacaagcaataggattgttttcgatattcttcatcatccttgcgtttgtgatgaattctgtggcttttattggatccaacctctggctca

SEQ ID NO: 11817 - DNA, 201 bp, Homo sapiens
tataaaagcccagcctctttcctgagaatcttctctctgattcattgctagtcactcactcctcccctcagcagctttgccatttagtcatatgttgacayacccaggagcccacaggccactgtctgaagctgaagtgagagcatcaatgggtgcaccatttatggcaaatgtcaccctaactgctgcccacccttcact

SEQ ID NO: 11818 - DNA, 201 bp, Homo sapiens
gtggaatgagagacttggaaaagaaaaagacacagagacaaagtatagagaaagaaataaggggacccggggaaccagcgtttagcatatggaggatcccgccagcctctgagttcccttagtatttattgatcattcgtgggtgtttctcgaagagggggatgtgtcagggtcacaagacaattgtggggagagggtcac

SEQ ID NO: 11819 - DNA, 201 bp, Homo sapiens
accaggtccccaatctactctcacttcagcgagaccgtatcaggtttgccagttatccgtgcctttgagcaccagcagcgatttctgaaacacaatgaggwgaggattgacaccaaccagaaatgtgtcttttcctggatcacctccaacaggtgaggcttcccctgggtatttacccatgtgtgtactttggggttctat

SEQ ID NO: 11820 - DNA, 201 bp, Homo sapiens
cttgtctccttgccaggcaccctgggtgactgataagaggcctccgccagattggcccagcaaaggcaagatccagtttaacaactaccaagtgcggtacygacctgagctggatctggtcctcagagggatcacttgtgacattggtagcatggagaaggtaggtggagtgaaggaaggcctggatgggaggccttgtga

SEQ ID NO: 11821 - DNA, 201 bp, Homo sapiens
ctgaggcgtctggactctgtcaccaggtccccaatctactctcacttcagcgagaccgtatcaggtttgccagttatccgtgcctttgagcaccagcagckatttctgaaacacaatgaggtgaggattgacaccaaccagaaatgtgtcttttcctggatcacctccaacaggtgaggcttcccctgggtatttacccat

SEQ ID NO: 11822 - DNA, 201 bp, Homo sapiens
ttttaggaatacatggtgtttctaagtcaaattgaggcattgcctaagagtgcggcccgatcaagtcaaaccctctgagaatgttctgtgaacgccaaggytgctggttaagatgaggacgtgatcagtgacacgcactctctggttctgttgccccacaggtggcttgcaattcgcctggagctggttgggaacctgact

SEQ ID NO: 11823 - DNA, 201 bp, Homo sapiens
gttgttgctgtttgttgtggttgttcttcctatatgtttgtttcatttcctgaactaattctgttaagtctgtattctttgtcattgtcatgtgtgaccaytgaagtctgtttggttggcttagtggtcagctagtgattagacagatactcccttaattgctttgaaacaataagtgtctcagcctttgctgagaggttc

SEQ ID NO: 11824 - DNA, 201 bp, Homo sapiens
cttataaatgcctagacttgagatgctgctttctaagacttttatttctttcttccttgtttcagggtaatggtcctagacaacgggaagattatagagtrcggcagccctgaagaactgctacaaatccctggacccttttactttatggctaaggaagctggcattgagaatgtgaacagcacaaaattctagcagaag

SEQ ID NO: 11825 - DNA, 201 bp, Homo sapiens
accattttctcttccagtggaatattaattcatctctcctttatcctgatatttcttaataacaagatgtactaataactatgtatggagtatttatggartaaagtattccatgctgtatgtacatctgggatcccttgctgaaaccagcaagatcagaggaggcttctctctccttgttcataggactgacagggatct

SEQ ID NO: 11826 - DNA, 201 bp, Homo sapiens
gcctgggtgacatggtgaaaccctgtctctactaaaaatacaaaaattagcggggcatggtggtgcatgcctgtagtcccagctacctggaggctgaggtmggagaatctcttgagcccggaaagtcaaggcggcagtcagccaagattgcaccactgcactccatcctgggtgacaaagtgagaccatgactcaaaaaaa

SEQ ID NO: 11827 - DNA, 201 bp, Homo sapiens
attattctaattgcttttatggaggagtagatatctggaggttcctattctaccatccccactgatgcccacactgtgtcttatattttattttattttttccgggtatgtcttttaagtgatttaaattaatataagtttgttaaattatttgaatttcaagatgagcattttcttttctgttttgagagagtctcactc

SEQ ID NO: 11828 - DNA, 201 bp, Homo sapiens
cattattctaattgcttttatggaggagtagatatctggaggttcctattctaccatccccactgatgcccacactgtgtcttatattttattttattttttccgggtatgtcttttaagtgatttaaattaatataagtttgttaaattatttgaatttcaagatgagcattttcttttctgttttgagagagtctcact

SEQ ID NO: 11829 - DNA, 201 bp, Homo sapiens
tggtaaatcaatatctaattcctgaactgctcagtatccagtgaactagatttggaagcaaactacccagagattcaaactctgctttctgggttctgtgtctctttgaggaaacatagaaattgaaactctatgcctgggccaaactggtgacttatcctgctcatctgatgtctgacacacaatcaaaggacactcttt

SEQ ID NO: 11830 - DNA, 201 bp, Homo sapiens
tcattattctaattgcttttatggaggagtagatatctggaggttcctattctaccatccccactgatgcccacactgtgtcttatattttattttatttwttccgggtatgtcttttaagtgatttaaattaatataagtttgttaaattatttgaatttcaagatgagcattttcttttctgttttgagagagtctcac

SEQ ID NO: 11831 - DNA, 201 bp, Homo sapiens
atggtaaatcaatatctaattcctgaactgctcagtatccagtgaactagatttggaagcaaactacccagagattcaaactctgctttctgggttctgtgtctctttgaggaaacatagaaattgaaactctatgcctgggccaaactggtgacttatcctgctcatctgatgtctgacacacaatcaaaggacactctt

SEQ ID NO: 11832 - DNA, 201 bp, Homo sapiens
cttactaagtttcagctcttcaaaaacacaaatgctcctgggattgttgcaagcctttggttaatttcagagctctgaaaaagttgactttgaccatttttaatcattattctaattgcttttatggaggagtagatatctggaggttcctattctaccatccccactgatgcccacactgtgtcttatattttattttat

SEQ ID NO: 11833 - DNA, 201 bp, Homo sapiens
cacttttccttactcccttgtagagtccagcacagtgctgggtacaaagtcggcactggattgtccttgtggtttgagtggttgagttggtttctgtgccyatgatgattttcagtcttctggtttttctgtagatcacacaaaccctgaactggctggtgaggatgacatcagaaatagagaccaacattgtggctgttg

SEQ ID NO: 11834 - DNA, 201 bp, Homo sapiens
aattgcttgaaccagggaggcagaagttgcagtgagctgagattgcgccactgcactccagcctaggagatggagcaagactccatctcaaaaaaaaaaaagatttttaatgactgtattgtatttattatatagatctagcataatttattttgaaacctctaaataaagaccctgcatatttaggatgttttcatcctc

SEQ ID NO: 11835 - DNA, 201 bp, Homo sapiens
ccaggctggtctcaaactcctggcctcaagtgatccatctgcctcagtctcccaaagtgctgggattatatgggtaagccactgggactggctaattatgmttttttttttaacggaggaaaatgttttcatggcatcttcatcagtactctgaacttttccagagagctaaatttagggaaaattatagttatttttgaa

SEQ ID NO: 11836 - DNA, 201 bp, Homo sapiens
gggcttttaatggtgaagaggatattgagtcctgagagtggaataactacaagcacgtgaatacatatcagatcctcagtcatcctgatgcacagttattyaaatttaagctccatttgtttcttcccctctccagccaccccgtccttcaaccctgcgtttctggaggtgcagctgtaacatgatctgatcctttttcat

SEQ ID NO: 11837 - DNA, 201 bp, Homo sapiens
cgagtcctgggtggactgttcggctgagttgccaccttataaaacttacttctcatcttgtctccttgccaggcaccctgggtgactgataagaggcctcygccagattggcccagcaaaggcaagatccagtttaacaactaccaagtgcggtaccgacctgagctggatctggtcctcagagggatcacttgtgacatt

SEQ ID NO: 11838 - DNA, 201 bp, Homo sapiens
gatggagggaaagggtcagggcacttcctctgccctggggaggtgtggggacacagtatcagagggaaggatagcagccagggatcacacagacttaccgyagctgtcggggccttctgctcagctcctccctgcctcctagccagctgaccagggcccctttcctataaggtccacagtatgcagagaggaagtcaggaa

SEQ ID NO: 11839 - DNA, 201 bp, Homo sapiens
tcgtgggtgtttctcgaagagggggatgtgtcagggtcacaagacaattgtggggagagggtcacaagacaattgtggggagagggtcagcagacaaacaygtgaacaaagttctttgcatcatagacaaggtaaaggattaagtgctgtgcttttagatatgcatacacataaacatctcaatgctttacaaagcagtat

SEQ ID NO: 11840 - DNA, 201 bp, Homo sapiens
ctttggtcagttggctttctaccacctcttagctttcattctctgtaactagcttgtatgctgtttgtagctaagattcagggtattggaaagttcttgcrgctgctggaggctgcggtgtttctgtctctgaaatccatcattaattacacacagctgggccggagagaacatgattctggtcttctgtttcttctcctg

SEQ ID NO: 11841 - DNA, 201 bp, Homo sapiens
cttcctctgccctggggaggtgtggggacacagtatcagagggaaggatagcagccagggatcacacagacttaccgcagctgtcggggccttctgctcarctcctccctgcctcctagccagctgaccagggcccctttcctataaggtccacagtatgcagagaggaagtcaggaaggaaacaagggggcggccaggcc

SEQ ID NO: 11842 - DNA, 201 bp, Homo sapiens
catggttaccgtaagaaaattgggcagttttcccatactaatggtaaacatttttttctgattagcctggatctgagtttctggattctgttataaaccayttctcctttgaagaatcctgtctttaatgtacaaagaacagtttgcaaaacatccccgtaagccctttttctggtgaacactgagagaacatttctgagc

SEQ ID NO: 11843 - DNA, 201 bp, Homo sapiens
cctgtgaaggggtgggttgcccctccacacctgtgggtgtttctcgtaaggtggaatgagagacttggaaaagaaaaagacacagagacaaagtatagagraagaaataaggggacccggggaaccagcgtttagcatatggaggatcccgccagcctctgagttcccttagtatttattgatcattcgtgggtgtttctc

SEQ ID NO: 11844 - DNA, 201 bp, Homo sapiens
aggcagacctgccactttgttttgagcaaactgttctggtgtggattcccttgggcttcctatggctcctggccccctggcagcttctccacgtgtataartccaggaccaagagatcctctaccaccaaactctatcttgctaagcaggtaaagttaacaccactgtttctgaactctaattccttggtgcacagtagag

SEQ ID NO: 11845 - DNA, 201 bp, Homo sapiens
tcacaagaagacacgtttttggagggtgggttggccagaaagtgactacatttgtcattaaatggtgaatttgtatccatgtgcacaaataggaaaatacrgatagttaaagggtaaggctggatatggatatggagttgaatttaaattgtgtgaaagcagtgggatgtgctgcagggtggttttctgtcttcacaatgc

SEQ ID NO: 11846 - DNA, 201 bp, Homo sapiens
tctcactctgtagcccaggctggagtgtagtggcatgatctcggctcactgcaacctccgccttccaggttctagcagttctcctgccttagcctcccgascagctgggattacaggttcctgccaccatgcccgtctaatttgtgtacttttagtagagatggggtttcgccatattggccaggctggtcttgaactcct

SEQ ID NO: 11847 - DNA, 201 bp, Homo sapiens
tgcaggaccccatcctgttctctggaagcctgaggatgaatctcgaccctttcaacaactactcagatgaggagatttggaaggccttggagctggctcayctcaagtcttttgtggccagcctgcaacttgggttatcccacgaagtgacagaggctggtggcaacctgaggtaatgttccatagcctgctacccctgca

SEQ ID NO: 11848 - DNA, 201 bp, Homo sapiens
tggaaatggctaagtcatccttccttcctctctatctataaaagcccagcctctttcctgagaatcttctctctgattcattgctagtcactcactcctcycctcagcagctttgccatttagtcatatgttgacatacccaggagcccacaggccactgtctgaagctgaagtgagagcatcaatgggtgcaccatttat

SEQ ID NO: 11849 - DNA, 201 bp, Homo sapiens
ctttcaacaactactcagatgaggagatttggaaggccttggagctggctcacctcaagtcttttgtggccagcctgcaacttgggttatcccacgaagtkacagaggctggtggcaacctgaggtaatgttccatagcctgctacccctgcaggcaatgagaggatgtgagggggccactcctcgtgttcctcgtgttag

SEQ ID NO: 11850 - DNA, 201 bp, Homo sapiens
ctcattcagacgaccatccaaaacgagttcgcccactgcacagtgatcaccatcgcccacaggctgcacaccatcatggacagtgacaagtgagtgtaggrggacagggcttgacacggatggcttaacccttgctcaacagtaacagtgtcagccgggaaacacctgatggcagaaggtttaaccaccaccacattactg

SEQ ID NO: 11851 - DNA, 201 bp, Homo sapiens
agcctgatgtatactgtggagtctgtgctcttgattccttcttaaacccagagggactaaagaagactgaggttcaaaccctggctccatcttttacccayggacgtattccttactcttcctaagtagacatgaatgccatctagaaaactggacataaatattgaccttagggcttaagaaggcaatttcatatgtttc

SEQ ID NO: 11852 - DNA, 201 bp, Homo sapiens
tctaattgcttttatggaggagtagatatctggaggttcctattctaccatccccactgatgcccacactgtgtcttatattttattttattttttccggrtatgtcttttaagtgatttaaattaatataagtttgttaaattatttgaatttcaagatgagcattttcttttctgttttgagagagtctcactctgttg

SEQ ID NO: 11853 - DNA, 201 bp, Homo sapiens
ccactgctgcggtggatctagagacagacaacctcattcagacgaccatccaaaacgagttcgcccactgcacagtgatcaccatcgcccacaggctgcayaccatcatggacagtgacaagtgagtgtagggggacagggcttgacacggatggcttaacccttgctcaacagtaacagtgtcagccgggaaacacctga

SEQ ID NO: 11854 - DNA, 201 bp, Homo sapiens
ttctacagattgtcttatctatcttcttcctatggagagagttgggaccctcagtcttagcaggtgttggggtgatggtgcttgtaatcccaattaatgcdatactgtccaccaagagtaagaccattcaggtaaagaaaaagtcacccagaagaatataagctttctttaaagtgtaaaccctttttcttactctactct

SEQ ID NO: 11855 - DNA, 201 bp, Homo sapiens
gagctggaaagtcatccctcacaaactgcctcttcagaatcttagaggctgccggtggtcagattatcattgatggagtagatattgcttccattgggctycacgacctccgagagaagctgaccatcatcccccaggtgagctctagaacttactcgggcacatgccgtggggagcagcttgttttacaggaaacatatg

SEQ ID NO: 11856 - DNA, 201 bp, Homo sapiens
gctgccggtggtcagattatcattgatggagtagatattgcttccattgggctccacgacctccgagagaagctgaccatcatcccccaggtgagctctasaacttactcgggcacatgccgtggggagcagcttgttttacaggaaacatatgcagcttcttcttgatgtctgttcagtcagcactgtcaattccacggt

SEQ ID NO: 11857 - DNA, 201 bp, Homo sapiens
agttttggtctgtctggtgtttgctcagttcgatagtcttttctccagcctcttcaaaagcgtgacaccttcttctcatgcagctgtactattctttcctctaccctcctctgatccctctaccttgaaatcacgattatgggtttgggaggccgaggcaggtgaatcactggagcccaggagttcaagatcagcctaggc

SEQ ID NO: 11858 - DNA, 201 bp, Homo sapiens
agataaggactgccgcgaggcctctccgttccccgcagcggctcctcaggagaacctttcctcctccgcccactgcagcccagttcctctgggggtagttytggtctgtctggtgtttgctcagttcgatagtcttttctccagcctcttcaaaagcgtgacaccttcttctcatgcagctgtactattctttcctctacc

SEQ ID NO: 11859 - DNA, 201 bp, Homo sapiens
tgagaagcactgcctagagtgttgtgattaactaggctgcaagctaaaatcacccaggaagctttaaagctcccaacgcctaaactgtagcccagaccaastgaatcggggacccaggtgattttagtgtgtagccccagggaacaagccctggtagagaacatcgtcagtttactttccctccacaacagatctagcaac

SEQ ID NO: 11860 - DNA, 201 bp, Homo sapiens
ggatatggagttgaatttaaattgtgtgaaagcagtgggatgtgctgcagggtggttttctgtcttcacaatgcatgtatgcaacaatccttcccctttgrtctccagaattcctcattcctggacagtccggaggcagacctgccactttgttttgagcaaactgttctggtgtggattcccttgggcttcctatggctc

SEQ ID NO: 11861 - DNA, 201 bp, Homo sapiens
tttgacacaacacccacaggccggattgtgaacaggtttgccggcgtaagtatctcaagaactgtcaggtggtgtgtttatatactgaggatctttctgayagggaggaattattatgtccccctagacaacactgttcagttccagttcttttgtcactcaacatgcaagtgtttcttgagtacctgctgtgagctccca

SEQ ID NO: 11862 - DNA, 201 bp, Homo sapiens
gcagcataggccagaggcagctgctgtgcctgggcagggctctgcttcggaaatccaagatcctggtcctggatgaggccactgctgcggtggatctagaracagacaacctcattcagacgaccatccaaaacgagttcgcccactgcacagtgatcaccatcgcccacaggctgcacaccatcatggacagtgacaagt

SEQ ID NO: 11863 - DNA, 201 bp, Homo sapiens
ttgagggatgaacatctctgacccttcaagtagctcagcatctagtgaagaagacaaccaaagaagtgaaggattataatagaatatagtaaaaccagtarcagcagtgtgtagaaaggtggtctgggagtacaaaggaaaaaaaggcactagcccagcctgcgtgataaaggtgggaaatgtcagaaaaggtgaaactta

SEQ ID NO: 11864 - DNA, 201 bp, Homo sapiens
acttagtcctggttattcttataaatgcctagacttgagatgctgctttctaagacttttatttctttcttccttgtttcagggtaatggtcctagacaaygggaagattatagagtgcggcagccctgaagaactgctacaaatccctggacccttttactttatggctaaggaagctggcattgagaatgtgaacagca

SEQ ID NO: 11865 - DNA, 201 bp, Homo sapiens
cagaactctggagccaggctgcctggcttgaacaagaatcagagtcaaagccaagatgcccttgtcctggtaactttcccttgagtgtctgtgtgagcgcrctgcatgtttcaggcaagggtacatcagcatcatggcgattctgtccttacatttttatagcacttcatacttctcagtgcacttcatattattaatggt

SEQ ID NO: 11866 - DNA, 201 bp, Homo sapiens
ggaaacatatgcagcttcttcttgatgtctgttcagtcagcactgtcaattccacggtctactcgggatacttgagctagttccctaggatggacacgtcrtttccagaactttgaaatgtttggtaatatgcatttgtggctgcctgtatctgaccactaggtggcagcaacacaacagaagtcaagtacagcagacgat

SEQ ID NO: 11867 - DNA, 201 bp, Homo sapiens
tgagggatgaacatctctgacccttcaagtagctcagcatctagtgaagaagacaaccaaagaagtgaaggattataatagaatatagtaaaaccagtaayagcagtgtgtagaaaggtggtctgggagtacaaaggaaaaaaaggcactagcccagcctgcgtgataaaggtgggaaatgtcagaaaaggtgaaacttaa

SEQ ID NO: 11868 - DNA, 201 bp, Homo sapiens
gctgaccatcatcccccaggtgagctctagaacttactcgggcacatgccgtggggagcagcttgttttacaggaaacatatgcagcttcttcttgatgtmtgttcagtcagcactgtcaattccacggtctactcgggatacttgagctagttccctaggatggacacgtcatttccagaactttgaaatgtttggtaat

SEQ ID NO: 11869 - DNA, 201 bp, Homo sapiens
cgtgataaaggtgggaaatgtcagaaaaggtgaaacttaagtcatagaagcaagccagggagatggcaagggttgggggatggcagtagagcagggtgagraggattattctgcagaggaaggaacataaataaaagcactgtcacagcctgggacaggaaatacaagagatagtaggataaccctttgcttggcctctgc

SEQ ID NO: 11870 - DNA, 201 bp, Homo sapiens; identical to SEQ ID NO: 1969

SEQ ID NO: 11871 - DNA, 201 bp, Homo sapiens
agagagctgcagaaagccaggcgggcactccagagacggcaggagaagagctcccagcagaactctggagccaggctgcctggcttgaacaagaatcagartcaaagccaagatgcccttgtcctggtaactttcccttgagtgtctgtgtgagcgcgctgcatgtttcaggcaagggtacatcagcatcatggcgattct

SEQ ID NO: 11872 - DNA, 201 bp, Homo sapiens
ttagtagagatgggatttcaccatgttggtcaggctggtcttgaactcccgatctcaggtgatccacccgcctcggccttgcaaagtgctgggattacagrtgtgaccaccacgccaggcctaaatgaagaaattatggaaatgaaattggttattggggcaagcaatgcagcctattgcaaatgaacacaatgaaatgat

SEQ ID NO: 11873 - DNA, 201 bp, Homo sapiens
ccatgtaatagaatgcatggggaaatgagctatgtgcatgtcttcggttagatactagtgcaggataaacccctggagagatgagctgaaagcaaaggttytcagccccttcccctgataactgcatttgccatgctgctttcctactatggggccatgaatatccagctgtgatcccatgaagacatttgtgtgtgcaga

SEQ ID NO: 11874 - DNA, 201 bp, Homo sapiens
aggaacaaggcaaaaacaacatgcaactccttcgagagtgcatctttagaatttctccatattttacatgggcccataatgggtccctaaagtttcctttsctctaactcaaaggacctaatttcttcaaacttagaataggaaatggtttaggggatgtcgggtcttgcaacataccgaggagatctacagcacaagctc

SEQ ID NO: 11875 - DNA, 201 bp, Homo sapiens
tcaaatatttaggagaagggccagggaatctactttcagcaaatgttccaggtgacacatttagtacctaatttgggaaatgttaatctagtccaatcccmttagtaagaaaggaggggtccttagtccaaaggaagtgaccttccaagataacatagaccagcagtgtcagggttgggacttgaaccaagccaggtctcc

SEQ ID NO: 11876 - DNA, 201 bp, Homo sapiens
ttcagtatattaacacatatgtgcaaccatcaccacagtcaattttagaacatttcattatctttaaccccgtctcctccttccccttatccttagcaacygctaaatctcttttctgtctttatagatttccctgttctagacatttcatatgaatggaattatataatatggttcttttttgattggcttctttcactt

SEQ ID NO: 11877 - DNA, 201 bp, Homo sapiens
aatgatcatggcatactttgaacattattctatcacttgaactgtatgtatccattctttccagaaatatttattgtgttatctgaatcactgcataccgyttttcctatccatcaccggaaaccattctgttctaagagccttataaagaatgatatcctcttaacagtggtctttttcccttctcaggtattcgttggt

SEQ ID NO: 11878 - DNA, 201 bp, Homo sapiens
ttttgctgttggttagattgaataaggacccaaaaaatgtccatgcatgatatttaattgatagtgattttaatctactacagtctctctctctctgtctstgtgtgtgtgtgtgtgtgtgtgtgtgtgtgtgtgtgtgtgtcttggtcattccaaaaaaactaggttatttgtcctatttcctgtatttcctgtaaattg

SEQ ID NO: 11879 - DNA, 201 bp, Homo sapiens
tgtcatgatctgcatggccactcctgtcttcaccatcatcgtcattcctcttggcattatttatgtatctgttcaggtaggtttggaaatggctaagtcayccttccttcctctctatctataaaagcccagcctctttcctgagaatcttctctctgattcattgctagtcactcactcctcccctcagcagctttgcca

SEQ ID NO: 11880 - DNA, 201 bp, Homo sapiens
gtcattccaaaaaaactaggttatttgtcctatttcctgtatttcctgtaaattgatagttagatctaaaggtttgattgatttatatttgatttgggggygggagtacaaggttgctttcaagtggtgctgtgtgcttcccaaactgcagcgatggtaacttgagcgggcccaggtgctgtcagcctgatccatccctta

SEQ ID NO: 11881 - DNA, 201 bp, Homo sapiens
tttaggaatacatggtgtttctaagtcaaattgaggcattgcctaagagtgcggcccgatcaagtcaaaccctctgagaatgttctgtgaacgccaaggtygctggttaagatgaggacgtgatcagtgacacgcactctctggttctgttgccccacaggtggcttgcaattcgcctggagctggttgggaacctgactg

SEQ ID NO: 11882 - DNA, 201 bp, Homo sapiens
tccccaccagaatgctgttttaggagcacagcactaggtctaggaaatcaacatttaatttattatatctaatgtgagatggtataaggcaagattttttwaaaaaattaattgcttaatcttatattagaaaatcaagctacagacaccttgcacctaattaattagaacctgccttccgaccttactactgcaatgtct

SEQ ID NO: 11883 - DNA, 201 bp, Homo sapiens
gttttggtctgtctggtgtttgctcagttcgatagtcttttctccagcctcttcaaaagcgtgacaccttcttctcatgcagctgtactattctttcctctaccctcctctgatccctctaccttgaaatcacgattatgggtttgggaggccgaggcaggtgaatcactggagcccaggagttcaagatcagcctaggca

SEQ ID NO: 11884 - DNA, 201 bp, Homo sapiens
gctcaaccacaaaccagcttcctgcctcaggaatccatctcaggccagtcctatccaccatctcccagtcctgaggaactccgaggtccttttctggcatragccccaacagcccccttgtcctttcacttgcaggaccccatcctgttctctggaagcctgaggatgaatctcgaccctttcaacaactactcagatgag

SEQ ID NO: 11885 - DNA, 201 bp, Homo sapiens
caggagatggggatagtcccattcttctgtccctctatcccagaacctggaggtaggttctgatagaagtggtggagatagcctctgacccagcctggggktctcagcctgtggttcgctcttgttccagcatcattctgaaaggctacaagcgtcctctgacactcgaggatgtctgggaagttgatgaagagatgaaaa

SEQ ID NO: 11886 - DNA, 201 bp, Homo sapiens
ccaggtatggtggtttacaactgtaatcctagcactttgggaagccaaggcaggaagatcacttgagcccagaagtttgaggctgcagtcagctatggctstgtcactgaactccagcctgggcagagaaagaccatgtctctaaacatatatataatttattttccatccatattctcaaactcctggctaagagccctg

SEQ ID NO: 11887 - DNA, 201 bp, Homo sapiens
tgctcctgaaatcattcctactgaagctagtgaatgacatcttcacgtttgtgagtcctcagctgctgaagtgagtctccaggcctcagatggtcctttcmgggcctcctctgccaccctcctttttgccactgtgtatgcaagcaggagcttttcttaaattcccattttttaaaaatgctcgtaattttcttccacctt

SEQ ID NO: 11888 - DNA, 201 bp, Homo sapiens
gggaccaaaaaagatgttccaaaatcctggttgatgaaggctctgttcaaaactttctacatggtgctcctgaaatcattcctactgaagctagtgaatgrcatcttcacgtttgtgagtcctcagctgctgaagtgagtctccaggcctcagatggtcctttcagggcctcctctgccaccctcctttttgccactgtgt

SEQ ID NO: 11889 - DNA, 201 bp, Homo sapiens
tatgtactttagcctctctcttttccatgtctgtctcctcatagggggccgggtaattgttaggggctgtttcttgttaaactgctaagggctgagccagrtccaagtggcgggtagcatacccctggagagtaactgacttcatctctccatcgcagccttccacgggaggttcaggttaatcttgacaagacttcacaa

SEQ ID NO: 11890 - DNA, 201 bp, Homo sapiens
ctttacggagaacatcagaatggtagataattcctgttccactttctttgatgaaacaagtaaagaagaaacaacacaatcatattaatagaagagtcttygttccagacgcagtccaggaatcatgctggagaagttctgcaactctactttttgggtgagaaattacatttatcttcatattgactcttctcagactca

SEQ ID NO: 11891 - DNA, 201 bp, Homo sapiens
tactagctagtcgcaaaattgccttctctaaagagaaacaggtaaaaaccttccaatttaatccgtgtgaggaaggagaattgttgttgcatactttgctrgtagaaggaagagaagatccgtgactgagtcttgctgagacatgttgatgttgaaatgataatgataagttctagaactggcaactaatgatatggacta

SEQ ID NO: 11892 - DNA, 201 bp, Homo sapiens
ggaagccacagtccgagagtgagttgccttctttccatcctaatgttctttagcattctcactgcctggcctattctcagaaaattccatgtaatagaatrcatggggaaatgagctatgtgcatgtcttcggttagatactagtgcaggataaacccctggagagatgagctgaaagcaaaggttttcagccccttcccc

SEQ ID NO: 11893 - DNA, 201 bp, Homo sapiens
tttcaaaggctttggacaattctggtcacttttgttacctacagtgtaaagatagtgtagtctagctggctgtgcatgaggagagaggcatccttggaggmcttatgggtataactaacttggcttttctctggcagattgctgatctcctttgcaagtgaccgtgacacatatttgtggattggatatctctgtgcaatc

SEQ ID NO: 11894 - DNA, 201 bp, Homo sapiens
agctggctgtgcatgaggagagaggcatccttggaggccttatgggtataactaacttggcttttctctggcagattgctgatctcctttgcaagtgaccrtgacacatatttgtggattggatatctctgtgcaatcctcttattcactgcggctctcattcagtctttctgccttcagtgttatttccaactgtgcttc

SEQ ID NO: 11895 - DNA, 201 bp, Homo sapiens
tgttgcatactttgctagtagaaggaagagaagatccgtgactgagtcttgctgagacatgttgatgttgaaatgataatgataagttctagaactggcamctaatgatatggactagaagttgagtctagggatgcaactttgggcatcatgagcattgaaataatttttgaacaactagagttgggtaatattgttttt

SEQ ID NO: 11896 - DNA, 201 bp, Homo sapiens
tgactaagcattctccctgcatggcgcctgcatgtttgaatatctgccagtgagttcagttagtgctagaaacttgaataattttttatatcccagggaaytattctgtcctttaaactggggaacagtccttcttcatcctataatttggcaaatgcagtggtgaggtttactcagaatagctggtacaaaattcactta

SEQ ID NO: 11897 - DNA, 201 bp, Homo sapiens
tcttttcactatttttttttctatctctccttattatcattattactaccattttaaatggagtctcactctgttgcccaggctggagtgcagtggcactrtctcggctcactgcaacctccacctcctgggttcaagcaattcttatgcctcaacccctcccgagtagctgggattacaggagcacgccaccatgtccag

SEQ ID NO: 11898 - DNA, 201 bp, Homo sapiens
tagggcgggatttcgccatgttggccagactggtctcgaactcctgacctcaagtgatccctcctgccttggcctcccaaagtgctgcgattacaagcctsagccacctgcacagcctctgtcagtccttatctttcaacaggtttttagaaaggcaaactagattccattgttctactagcatacctaacaatgactcag

SEQ ID NO: 11899 - DNA, 201 bp, Homo sapiens
ctcacgcctgtaatcccaacactttgggaggccgaggtgggtggatcacttgaggtcaagagtttgagaccagcttggccaacacagtgaaaccccatctytactaaaaatacaaaaacattcggctgggcatggtggctcacgcttgtaatcccagcactttgggaggccgaggtgggtggatcacgaggtcaggagttc

SEQ ID NO: 11900 - DNA, 201 bp, Homo sapiens
cctggctctacaaaaaatacaaaaaaattagctgggtgtagtggtgtgcacctatagttccagctacttgggaggttgaggtaggaggatggcttgagccygggaggtcgaggctgcagtgagccatgatcacgccactgcactctagccttggtgacagagcaagaccttgtctcataaaacaaaaacaaaaaaaaatgc

SEQ ID NO: 11901 - DNA, 201 bp, Homo sapiens
tcatttgtacctaagcagccaaactcgtactgataccaccatgcagccaaggttactgaaacctctttgattagacttcagtcatatcccacccccaaatmgacccaataggtacaatgaaaaccagtatatcaaggcagaatacagagctgtaaaacaagaaaaatcctatgagggagggagggaaaaaggaagaattcc

SEQ ID NO: 11902 - DNA, 201 bp, Homo sapiens
caaaaaaaattagccaggcatggtgatgagtgtctgtaatcccagctactggggaggctgaggcaggagaatcacttgaacccaggaggcagaggttgtartgagccaagatcgtgccattgcactccagcctgggcaacagagcaagattccatctcaaaaaaaaaaaaaaagaagttaataaggcccaatgtgttcctg

SEQ ID NO: 11903 - DNA, 201 bp, Homo sapiens
ggatctatgcagctctttccctaacctctactgtgtctccctagtccatgatggcagtgaagaagaagacgatgactatgggctgatatccagtgtggaasagatccccgaagatgcagcctccataaccatgagaagagagaacagctttcgtcgaacacttagccgcaggttggctatctattcagctggcagccctcg

SEQ ID NO: 11904 - DNA, 201 bp, Homo sapiens
tggaggtgcagctgtaacatgatctgatcctttttcatctagggcaccactgcctatgtcccacagcagtcctggattcagaatggcaccataaaggacarcatcctttttggaacagagtttaatgaaaagaggtaccagcaagtactggaggcctgtgctctcctcccagacttggaaatgctgcctggaggagatttg

SEQ ID NO: 11905 - DNA, 201 bp, Homo sapiens
atggagtaaagtattccatgctgtatgtacatctgggatcccttgctgaaaccagcaagatcagaggaggcttctctctccttgttcataggactgacagrgatctatgcagctctttccctaacctctactgtgtctccctagtccatgatggcagtgaagaagaagacgatgactatgggctgatatccagtgtggaag

SEQ ID NO: 11906 - DNA, 201 bp, Homo sapiens
gtttcctgctagtctttcactagagcagtggtttgtgatgctggcagcacattagaatcacctgagaaatttgaagtttgtaaaacccactgaggctgggrgcctacttcaaaccattgaaattggactctgggagtgaggcccagacatgtgtatttttttaagttccctagatgattctaatatgccaccaaggtgaaa

SEQ ID NO: 11907 - DNA, 201 bp, Homo sapiens
tcagagcctgggtggcaatgaaaaaccatctcatgacagcctctttggaagagagggaagtaggtgagaaacatccttgtagaagtgcctcgaaatcttcycaagttctcaagttccagggactgcagggtattctgccaacacttacctcacctgccatttaagcttcggctatctggcctatgtggaagtgtgcagggt

SEQ ID NO: 11908 - DNA, 201 bp, Homo sapiens
cgccagattggcccagcaaaggcaagatccagtttaacaactaccaagtgcggtaccgacctgagctggatctggtcctcagagggatcacttgtgacatyggtagcatggagaaggtaggtggagtgaaggaaggcctggatgggaggccttgtgatcaaacaacaattggacagagtggagagcagctgggccctaagc

SEQ ID NO: 11909 - DNA, 201 bp, Homo sapiens
gatttgtgaagcactgaaatacttagtggtttgctgtattacatcatagctttccccagcagtttccaagacagcttccaaaaactggcaggagaatttcrctggagctgcatgcaggactaccaagattcctccccacagttatgaaaccgatttttccgggactggttgttctagtcttctgggtgccaagtctgactt

SEQ ID NO: 11910 - DNA, 201 bp, Homo sapiens
accgatttttccgggactggttgttctagtcttctgggtgccaagtctgacttttctgggaatggttgatccacactggaaggtttccagatgtgttcccyaggcattcctggtggtaggaagagtagaggcctgggtattctgtagatgctgagccctgagtcatattgttgcttattctttggtcagttggctttctac

SEQ ID NO: 11911 - DNA, 201 bp, Homo sapiens
atgctgccatacacagctttgtatatacttgtgtatacaagtgtgtctataggataaattcccaaaaatgaaatgactgagttaaggatatgtgaactcaraatttttatacacagtgcaaactgccctcaaagaggctttccttggtctcatcaactttgtatcacattttttgatgtttgctaattggttaggcaaaaa

SEQ ID NO: 11912 - DNA, 201 bp, Homo sapiens
tgttccccaggcattcctggtggtaggaagagtagaggcctgggtattctgtagatgctgagccctgagtcatattgttgcttattctttggtcagttggytttctaccacctcttagctttcattctctgtaactagcttgtatgctgtttgtagctaagattcagggtattggaaagttcttgcagctgctggaggctg

SEQ ID NO: 11913 - DNA, 201 bp, Homo sapiens
acattttttgatgtttgctaattggttaggcaaaaatgttatgtttcaaattatatatactttcaaattgtattctcatattaatgaggttaagcacatgktcatatgtttaaaagccttttgtgtttttttaaatccatttaatttatatactcatttttttacattgagttattagggtatttttaaaaattactttgt

SEQ ID NO: 11914 - DNA, 201 bp, Homo sapiens
ctcatgttattgaaaaggagcggggaggggcgggtgcagtggctcacgtctgtaatcccagcactttgggaggctgaggtgggtggatcacctgaggtcasaagttcaagatcagtctgggcaacatggtgaaaccccatctctactaaaaatacaaaaattagccgggcataatggttcacacctgtaatcccatctcct

SEQ ID NO: 11915 - DNA, 201 bp, Homo sapiens
aaaaggaaaagaaaaagaaagaaaaggaaaggtggaggaaaattaaagagctggactgtaaaaatggctaaggctttaagatttaagtatctaggtagaakatcttagagaaatatgtaaaatttctccaaatgtaaaagtatcaaaaagccaggatgaagtcagtcccctccacattactgggagacaaccagctcaatc

SEQ ID NO: 11916 - DNA, 201 bp, Homo sapiens
gggggtggccgatactgaagttcggctggcggccagtattgataagctactggcggttgggtcttattttctttaacctgcgtttgaggttgtagtgttaygggcacctgacctgctggaagaggacttggccctcgtggcttagactctgatggccccactaattctggaccttttccttctaattttaacgtttcagga

SEQ ID NO: 11917 - DNA, 201 bp, Homo sapiens
ttctaacgttactgggaattgccacgcctcagtatctccttcctttcttgatttatcaataatttcatgtaattcactaccctgtctactaggtggtgccrtaggattaagtctcctagtgggcggctgagggtatggcgccctgccctgtggtgctgggggcattcctggatatccatactgactttctgggggtggccg

SEQ ID NO: 11918 - DNA, 201 bp, Homo sapiens
ctaagtcatccttccttcctctctatctataaaagcccagcctctttcctgagaatcttctctctgattcattgctagtcactcactcctcccctcagcakctttgccatttagtcatatgttgacatacccaggagcccacaggccactgtctgaagctgaagtgagagcatcaatgggtgcaccatttatggcaaatgt

SEQ ID NO: 11919 - DNA, 201 bp, Homo sapiens
cctccattaccctcttcaatatcctgcgctttcccctgagcatgcttcccatgatgatctcctccatgctccaggtaggtcggcattctcactgctaactscctgtctctggttaaaagccttggagtccagaatgactggctatcacatcccatgtctaacttttgctggtaaactttcaagagagagatctgtttggtc

SEQ ID NO: 11920 - DNA, 201 bp, Homo sapiens
gcagtgggccatatacctctgtggggattttttgtgggggctcccctggaagcagagagactgcttgtatagtacataaatctactgctgcactgccgctygtggcgggggacaattgttgtatcgtggtaactggcttattccctgaaacacttgggacagtgggtttgttgtccctgaaaaccctgaggaacaaatggc

SEQ ID NO: 11921 - DNA, 201 bp, Homo sapiens
tgaatcaaccacaccagtatgaatttgaactccttttagatttagacttgatcttcccaagattagtcctacagtcctctcaggcagtgggccatataccyctgtggggattttttgtgggggctcccctggaagcagagagactgcttgtatagtacataaatctactgctgcactgccgctcgtggcgggggacaattg

SEQ ID NO: 11922 - DNA, 201 bp, Homo sapiens
tcctctcctgggctcagttttctcatctgtaacatggggaggctggatgatccttaaggcgccttcaactctgatatatggtgttcctgaaacttagcacwatgctgcttggtcccttttaggaataaattgctcatgaccttgccctttccaggtatctgtggtcacattttctgtttatgtcctggtggatagcaacaa

SEQ ID NO: 11923 - DNA, 201 bp, Homo sapiens
tgggaggtggtgtaggtctatagtggaaggaacactgatataggatccaggagacctgagctctggtcctagtaatccattaattgactttgtgaccttgragaagatatttcctcctctcctgggctcagttttctcatctgtaacatggggaggctggatgatccttaaggcgccttcaactctgatatatggtgttcc

SEQ ID NO: 11924 - DNA, 201 bp, Homo sapiens
atctctaggtatatttgtgttcatagcacatttctggagtgcctttggtttcgtccatgcatcaaatatcttgcacaagcaactgctgaacaatatccttygagcacctatgagattttttgacacaacacccacaggccggattgtgaacaggtttgccggcgtaagtatctcaagaactgtcaggtggtgtgtttatat

SEQ ID NO: 11925 - DNA, 201 bp, Homo sapiens
gaaacacctgatggcagaaggtttaaccaccaccacattactgatgaagaaactgagacttagagatgtcaagtaatctggccaaaattttacatcacgcraatgaaaacgaacaaggttaagggaactattcatatcttgagggcaaaataggaaactgtgtgttgtaacaattaactgggtatggggaggtggaagctc

SEQ ID NO: 11926 - DNA, 201 bp, Homo sapiens
atcaaaagccattagggagttctactaatattgaggtggggactttgcaggtgaagttctccatctacctggagtacctacaagcaataggattgttttcratattcttcatcatccttgcgtttgtgatgaattctgtggcttttattggatccaacctctggctcagtgcttggaccagtgactctaaaatcttcaata

SEQ ID NO: 11927 - DNA, 201 bp, Homo sapiens
ttcccctttggtctccagaattcctcattcctggacagtccggaggcagacctgccactttgttttgagcaaactgttctggtgtggattcccttgggctwcctatggctcctggccccctggcagcttctccacgtgtataaatccaggaccaagagatcctctaccaccaaactctatcttgctaagcaggtaaagtta

SEQ ID NO: 11928 - DNA, 201 bp, Homo sapiens
ggggctgagtgtggtggcttatgcttgtaatcgcagcagtttgggaggccgaggcaggcagatcacctgagatcaggagcttgagaccagcctggccaacrtggtaaaatcctgtctctactaaaaatacaaaaattagccaggtgtggtggcgcacacttgtaatcccagctactcgggaggctgaggcaggagaatcac

SEQ ID NO: 11929 - DNA, 201 bp, Homo sapiens
ggtggcatgtgcctgtaatcccagctccttgggaggctgagacagaagaattgcttgaacctgggaggcagaggttgctgtgagccaagatcgcaccattrcactccagtctgggcgacaagagcaaaattccatcaaaagaaagagagagagagagagaagaaagaaagaaagaaggaaagaaagaaagaaagaaagaaa

SEQ ID NO: 11930 - DNA, 201 bp, Homo sapiens
ctgggagacaaccagctcaatcccacaaaaggtctgcttctttctttgtaatgattccttgagatgctgttatttgaatgtaccataatttatgtgtcctrtatgacatgaatttcattggtttctaatattttgcatcatgagcaatgctgccatacacagctttgtatatacttgtgtatacaagtgtgtctataggat

SEQ ID NO: 11931 - DNA, 201 bp, Homo sapiens
atctctcgtcgacttgtgctcaatgaccacgctcgagcgtaccttcaccctagagaaaagcctccacgttgggcaccagatgaaggggtgggttgcccctycacacctgcctggaatggagggtgaagttcccaaggaaagaacagtgtctaatgctagagttctctgagttattgctcagtcaaccacatcaccatggtt

SEQ ID NO: 11932 - DNA, 201 bp, Homo sapiens
ggcatctgtgtgctctctacctggccagattagtcacgacagtctcctccctcagccctcctttcttcccatgttctctgacatccttctcccctcagtcytcggttagtggcagtattcttcagaacatcatgtgaatttctctccagctcctggttttgctgatccaatacagcagacaatggtgtgtacagaaaaact

SEQ ID NO: 11933 - DNA, 201 bp, Homo sapiens
tactgatactaccttagtgatggatacatggcgtgtaatgtactgttctctttcctttggggtacttttgaaattttccagaatgaaacgtggttttgaamaaaataataccttagcatttctagattttgcaccttggtacaaattagcataagcaggcaatttgttgattcattcacttgaaaatatttattgagcaca

SEQ ID NO: 11934 - DNA, 201 bp, Homo sapiens
gatagtgatgagagtagtaaaatactgacttttactttcacctaccaattgtcagtgtaattaattcattcatatatctatgccagaaaatctgattatcrttctactagtggctttagggtctccaaataaacacatgttgataagctgactttaacatcatatctagtttctagcacaacattatatcattaaaaaatc

SEQ ID NO: 11935 - DNA, 201 bp, Homo sapiens
aggtattgggggttagggcttcaacatagcttttgggggtggggatacaattcaacccataacatctcacagcaaccatgaaaagaacaagcatgaaaagwacagaaaggacctctcagcatcatgcccaggcccttcactctcaggactgcccctcaggcccccacgcagatgggtctctctttttacatgggactctta

SEQ ID NO: 11936 - DNA, 201 bp, Homo sapiens
ctctcagcatcatgcccaggcccttcactctcaggactgcccctcaggcccccacgcagatgggtctctctttttacatgggactcttaccagcttagttkcctggttttctaatctaaaatagattacaagtatcagttaggagcgggagagtggaacagtgaaggcagctagaagggcagaagcaactaggccagggag

SEQ ID NO: 11937 - DNA, 201 bp, Homo sapiens
tgtaaaggacatatcatatttattcatacacatgctggaattattggtgcagacatttaaatacattttctttgagaaagtccttttttttttttttttttgatggagtttccctcttgttgcccaggctggagtgcaatggtgcaatctcagctcacaacaacctctgcctcctgggttcaagcaattctcctgcctcag

SEQ ID NO: 11938 - DNA, 201 bp, Homo sapiens
tcaaaagaaagagagagagagagagaagaaagaaagaaagaaggaaagaaagaaagaaagaaagaaagaaagaaagaaagaaagaaagaaagaaagaaagrtagagagatttctaaatgctagatttcagttagatgctattacaaataacaatataatttaggccaggtatggtggtttacaactgtaatcctagcactt

SEQ ID NO: 11939 - DNA, 201 bp, Homo sapiens
ctccagcctgggtgacagagcgaaactccgtctcaaaaaaaaaaaaaaaaagaaaaaggaaaagaaaaagaaagaaaaggaaaggtggaggaaaattaaagagctggactgtaaaaatggctaaggctttaagatttaagtatctaggtagaatatcttagagaaatatgtaaaatttctccaaatgtaaaagtatcaaaa

SEQ ID NO: 11940 - DNA, 201 bp, Homo sapiens
tgagatagcaccactacactccagcctgggtgacagagcgaaactccgtctcaaaaaaaaaaaaaaaaagaaaaaggaaaagaaaaagaaagaaaaggaaaggtggaggaaaattaaagagctggactgtaaaaatggctaaggctttaagatttaagtatctaggtagaatatcttagagaaatatgtaaaatttctcca

SEQ ID NO: 11941 - DNA, 201 bp, Homo sapiens
cagtgagatagcaccactacactccagcctgggtgacagagcgaaactccgtctcaaaaaaaaaaaaaaaaagaaaaaggaaaagaaaaagaaagaaaagraaaggtggaggaaaattaaagagctggactgtaaaaatggctaaggctttaagatttaagtatctaggtagaatatcttagagaaatatgtaaaatttct

SEQ ID NO: 11942 - DNA, 201 bp, Homo sapiens
aatcacttgaacctgggaggcggaggttgcagtgagatagcaccactacactccagcctgggtgacagagcgaaactccgtctcaaaaaaaaaaaaaaaaagaaaaaggaaaagaaaaagaaagaaaaggaaaggtggaggaaaattaaagagctggactgtaaaaatggctaaggctttaagatttaagtatctaggtag

SEQ ID NO: 11943 - DNA, 201 bp, Homo sapiens
cttctactccctagtatccttggctttgtccatgggtcctaatttcaatccttatctttaggcattgaccctatccaacttggccaggaaggagtacaccrttggagaaacagtgaacctgatgtctgtggatgcccagaagctcatggatgtgaccaacttcatgcacatgctgtggtcaagtgttctacagattgtctt

SEQ ID NO: 11944 - DNA, 201 bp, Homo sapiens
gaatacatatcagatcctcagtcatcctgatgcacagttattcaaatttaagctccatttgtttcttcccctctccagccaccccgtccttcaaccctgcrtttctggaggtgcagctgtaacatgatctgatcctttttcatctagggcaccactgcctatgtcccacagcagtcctggattcagaatggcaccataaag

SEQ ID NO: 11945 - DNA, 201 bp, Homo sapiens
tcgctgtctcttcggagctgttgggtacacctgcagacatgtgataagtgaatctactgatgggactgacagtaggtacttctaccaaccaattttggackgcaggcattaaacatcctggtgctctccctaggcaaataggaggataacgatacccaatggaaatatttatcatcatcccttcttcctcaggtttggcag

SEQ ID NO: 11946 - DNA, 201 bp, Homo sapiens
tatttccacttgatctttttctttttcttcctgggcttttcctgtgagggttaacaccatggacactccaagctcttcctttgtttctttgttgtggggayggggaaagatcggggttgtgtcagtttcccctggtcatctgccctgaaatgcgctttgatgccagctgagtgactgtgacatctgcttgcaagaagaccc

SEQ ID NO: 11947 - DNA, 201 bp, Homo sapiens
aaaactcggaatgtgaatagcctgaaggaagacgaagaactagtgaaaggacaaaaactaattaagaaggaattcatagaaactggaaaggtgaacaccayacagaaaagtagcatttgaggtgttataaggtttagaacccaaaatttttaacgttcagtgaaaattgaacgcatacttacaggagcaatatgtcctctg

SEQ ID NO: 11948 - DNA, 201 bp, Homo sapiens
tggtcttctgtttcttctcctggatcttatcttcattcttcactgtgctcttctctgcagaaatgtgtagttttactctgggactagtggaagaattagasctttcctgaataaatagatccacggaggaaggaagatgagagagcctctgagtgggacacctcctcatatgtcatttgcaaggatggataactttcatca

SEQ ID NO: 11949 - DNA, 201 bp, Homo sapiens
tacaagtaaaatgttgagaacagcttgggagtaggctgggaaggctgtctccaaacttttgagttttcattgggactctctcagtacttgaggctggcgtrtgcatcagattgtcttccaagagtatttccagatctaagactctctaattttattggcaaagcatatcttttagttggaggcccaaatggtaatttttaa

SEQ ID NO: 11950 - DNA, 201 bp, Homo sapiens
ggctctgcccagagacttatttttaaagtgaacactgaatgatgaagcatttatgtgcttgggagaccacgatgaagaaggtatgcaatttcttctctctygtagctttctgtcttgtggggaaatagagacatagttatttcaggtggtcaatgttataatacaattggattgacaggcccggggagcacagagaggagc

SEQ ID NO: 11951 - DNA, 201 bp, Homo sapiens
atgggccatttgttttaggagggtggtcttttaagcctgaatctctgggaaatttgggtttagttctgaaatagaatcagtttctaccttttctaataaawcctgggctctgcccagagacttatttttaaagtgaacactgaatgatgaagcatttatgtgcttgggagaccacgatgaagaaggtatgcaatttcttct

SEQ ID NO: 11952 - DNA, 201 bp, Homo sapiens
tcctgtaaagagtaggggatcgtcacttgcttgtcaggtccataatgtcatctttcctgtttctgattttttttctctaagtgtcattctaaaaggcctcyccccaggctccaactttccagaaggagaccacaagatccagtacacagtctatgacagagctgagaataagggcacttgcaaatttcgagttaaagtaag

SEQ ID NO: 11953 - DNA, 201 bp, Homo sapiens
gaagagcatgcatccaattagacttcccaggcttggtctcttttttctccatgcttccagaacacttgttcatacctttattttaacaattatattttagyttcataacccttacaaagttggagccatggattttagtctctgaataatgatgtattaaagaagcagaattcaacaaccaaaaggtaatttcagaataac

SEQ ID NO: 11954 - DNA, 201 bp, Homo sapiens
gtcgggtattcacaccctagatataaaggtgaatgctttgcttatgtgctaatgaggacctgctggtgccaggagaactttcctttatgccttgtgaaacrgattgtaataaagtgaccagacaacacatttaagttctaattatctatcaaggaaaaaaaaatatatatatatactcccttttttaaaaaaggaaataaa

SEQ ID NO: 11955 - DNA, 201 bp, Homo sapiens
accaggtgcgacattcgctgccagaagggctacgagctgcatggctcttccctactgatctgccagtcaaacaaacgatggtctgacaaggtcatctgcaracgtgagtaggccagctctgtgttgggtcctcagggatgaccagagccaaagttcttttgctctgagattgaggattttcactgaatattgatgagaaaa

SEQ ID NO: 11956 - DNA, 201 bp, Homo sapiens
gtagctgatggcttccatctgacttttgtctttttcttggtttgctattgaggcaactacaggctggcagagatgtggcatactcctgctgattttagttygggggcctgagcaaagttattgacactatagggacagtccagtagagaacatctatgtgtctttcagccccaatgtagcttctttgtcattgactctggt

SEQ ID NO: 11957 - DNA, 201 bp, Homo sapiens
gctggtgccaggagaactttcctttatgccttgtgaaacagattgtaataaagtgaccagacaacacatttaagttctaattatctatcaaggaaaaaaawatatatatatatactcccttttttaaaaaaggaaataaagcaaaatgcattggaaatctctgaaatgctgtctttcagcatcccaatggtcattttattc

SEQ ID NO: 11958 - DNA, 201 bp, Homo sapiens
ggacggcatattggagatgggagtttaattttccaggatgtttgctgggtgccttctgattagatgctggacctcaggttgctagccaagtgtattaggcygtttagctacagaatgtggcatatgcagattcattgaaagttcatagaagtgagtaaatcagcatccctgggaatatcaaaggctcattttccaatggtt

SEQ ID NO: 11959 - DNA, 201 bp, Homo sapiens
ttcttaaacaaaaaaggtaaaaaaggaatgtattgctacatgtaacaacagggatgaatctcatacataatgttcagtgaaataaaccagacacaaaagartacatatggcaattccatttctacaaagttcaacaacaatgtgcaaaactagtccatggtgttacaagtcagaatagcagttgtctttatggggtagcca

SEQ ID NO: 11960 - DNA, 201 bp, Homo sapiens
gctgcctttgacccatcccatgtttgatttgtaccactttccacccaaaaagattctgccacattcctaccaaggtaaaaaaaaaaaaaaaaaaaaaaaargaaagaaagaaagaaagaaaaaactcagagggccaggatggaagaaaaataagatgattcatgagttctctttagtcggctgatgaatggagaaggctgg

SEQ ID NO: 11961 - DNA, 201 bp, Homo sapiens
gaaaacatggggcactaattgaaggtccaaaatttggaatgtagccagcctgggacagtaagagtaaggggacacattttctgaaagtgtcatttcatatktatctcctcttttgtttctgctacttgtagataccccgtggtgctcccccatcaaggtgaagtatggggatgtgtactgcagggcccctcaaggaggata

SEQ ID NO: 11962 - DNA, 201 bp, Homo sapiens
tctagactaagtacctaggagttgaattgctggataatatgcatacatatctttgactttgttcaataatgccaaattatttactaaggaagttataccartctaaacttctagcaccaatgtgtatttccattgctcaacatccttgttaacacttgatcttgttatatttttagagttcttccaaactaatgggtcaga

SEQ ID NO: 11963 - DNA, 201 bp, Homo sapiens
gggctccttgctgccctggcatttctcctatgaccccttccaccatttcctatccaagctactgctctatcgctcccttgtgagggagaaggttctagtgycaagctctgagacaagtgcttcttgtgagttcccttatttactccttctgttatttgcatgtcacaggtgaaacaaagtctcagaaaggttacatccact

SEQ ID NO: 11964 - DNA, 201 bp, Homo sapiens
aggccgaggcaggcagatcacctgaagtcaggagttcaagaacagcctggtcaacatggtgaaactccatctctactaaaaatacaaaaattagctgggcrtggtggcacgtgcctgtaatcctagctacttgggaggctgaggcaggagaattgcttgaaccgaggaagtggatgttgcagtgagccaagatcgcgccac

SEQ ID NO: 11965 - DNA, 201 bp, Homo sapiens
atcatttcttaatcccccatccctaggcaaccactaatctattttctgcctctatagatttgcctacaattgaccttccataaaaatggaattacacagtatttatcattttgtgtttggcttctttcacttagtatagtgctttcaaggttcaactgtggcaggatactagccagagtcagccaatggtgcctggccacc

SEQ ID NO: 11966 - DNA, 201 bp, Homo sapiens
gcatgtctcaaaatagtgggatttctgacattttcccaagacccctctctcatacctggtaaacagccacctcacccacctacatgtaaggctttcctcartggtgacaatgataattccacgtgttcattattagcaaatattctcatcattcccagaactgtagggagatggggaattatatgtatattgaaaaacaga

SEQ ID NO: 11967 - DNA, 201 bp, Homo sapiens
ctagtctctgttggtcattttttgttttttctttctagcatcttctggcatgtctgtgtccttctcaaagtgtggccccaagtgataaatatttgaggtgrtagatatgtaaattaccccaatttaatcattatgcattgtatgcatatatcaaaatatcactctgtattccataaatatgtacaattataacatgtccaa

SEQ ID NO: 11968 - DNA, 201 bp, Homo sapiens
agcatcacttctgttacattctattagtcaaagaaaatcacaaggcaggcccatatttgggatggtggtggtagtggatggagtctacctcttatatgcaygtgcagggtgggaggaattgtcggtggccactgtgcaggcaatccactacagagctggtttgggacggcatattggagatgggagtttaattttccagga

SEQ ID NO: 11969 - DNA, 201 bp, Homo sapiens
tcataatgatagagaaggccaggcctacacaataaagaattggctcccttagaatgcccatagcgcccacattgaaaaacactgttttaaaagtttgcagrctgttctattgggcaggtgttcagaacatggggtaggcctttgaaatagtcttgcctggatctttactctgtctttgtttaaatggagttgaagcctcaa

SEQ ID NO: 11970 - DNA, 201 bp, Homo sapiens
ctaaacacttctggtgtcccattttacagatgagcaaactgaggctcaggaaagaaaagtggcttcccaaatcaggatggcactggaacttaatcccaggkctttttcagttgcatcctaccagagaggatggccatgagcagttgaggaaactcagtgtctgcttgctgtttcatgggatataacatctatgccctgaac

SEQ ID NO: 11971 - DNA, 201 bp, Homo sapiens
cctggaactgatcagctcttaaagacacagggacttcttatcttcataccagaaatcaatgacactggggttagcggggaggcagcaccttgggagatgastgagagtgagaccagtgggttagtcaggaaaacacacagcccctcacattaagcccctcaagctccatgaattggggatgtcaggaagactgaactgtta

SEQ ID NO: 11972 - DNA, 201 bp, Homo sapiens
aaatctactgaaagctaacatctttttcccctagaaaaagcatgctagtaccaaaaggcatgtatcaaaagcatgtaccaaaaaacatgttcaattacaargggttcatgggccctccaaagccctttcattaattctgtagtaggccatgatcctcaggttaagaatccctactgcaaagtaaattttattttcccattg

SEQ ID NO: 11973 - DNA, 201 bp, Homo sapiens
tctctctaaggggccttttgtaagactgaaggtactttaaggcactaccttgatttaacaaaggattttacagccgtaattttgccttcatctttaaatcrtgtttttctggcaatgccttggatttgatctttgttcagaagctattcaaatgtccttcatactgtaccacagctgctctgtaatccattggcagatcat

SEQ ID NO: 11974 - DNA, 201 bp, Homo sapiens
gctcctgccactccggcaagactcctggggctgagaattcctggaactgatcagctcttaaagacacagggacttcttatcttcataccagaaatcaatgmcactggggttagcggggaggcagcaccttgggagatgagtgagagtgagaccagtgggttagtcaggaaaacacacagcccctcacattaagcccctcaa

SEQ ID NO: 11975 - DNA, 201 bp, Homo sapiens
tgaggcacgagaatctcttggacccaggagatggaggctgcagtaagccgggatcataccactacactccctcctgggcaacagagcgagaccctgtctcaaaaaaaaaaaaaaaatctatcaagaatatgcagtaaagttttcattcatttgtgtatcagtttatatgcatacagttgcatgtaacaaacagtgctactc

SEQ ID NO: 11976 - DNA, 201 bp, Homo sapiens
cttccaatgattcttctacatgatgaaatttaggaagtactggtctgatgaatgagttcagcccttggccaagacagagtggcttgcctgtttataactgmcacacaatggttcacttcccctcctctcccttttcctgttggctttgccttcatcactgaatcctctgaccttcctttcctaagtccccagcattcctga

SEQ ID NO: 11977 - DNA, 201 bp, Homo sapiens
acatttctctgaagcttagggaaacctgggagaaatgaaggtaaatttagagatgctttctctctgaatctagttcctcttacagtggaggaagaatttgaaaaaaaaaaaaaatggttaacaaagtttcactgcggcattttgccctggaaatttgtcctaattcctgggatgaggacatggcccttgtttgttgtgatg

SEQ ID NO: 11978 - DNA, 201 bp, Homo sapiens
tgtgcatacggctcagacgaaatccaaattaaccaattattgaatccctaccgctatgtatgacatcagttgcccttgaaagaattatctaaaaaataaamataaaaaatcttatgtatctagttaagggaaatactaaaaagaacaagcatttattgaacatatatgctaggtactgtgctagatgcttgatatgcaatt

SEQ ID NO: 11979 - DNA, 201 bp, Homo sapiens
tcccagtgatccaagattgttcgcaaacacggttaaattagggccacagggtgagaattaagccaaggtttggcaggcccattgtggagtggtgaggaagyggtggagcggctacatcctccacctcctgagattctgcccacaaagtggcaattccttataggaactctgacagacatgttggtactgactcagtgttag

SEQ ID NO: 11980 - DNA, 201 bp, Homo sapiens
ataaataaatgaataaataaaatcagctaggcatggtggtgcatgcctgtagtcccagctacttgggaggctgaggtgggaggatcacatgagtctgggargtcaaggctgcagtgagccgatattgtgccactgcactccagcctgggtgacagagtgagagcctgtctcgaaaaaaaagttcagcttcttagataaata

SEQ ID NO: 11981 - DNA, 201 bp, Homo sapiens
gaacctgtgaggctgaggttgcagtgagccaagattgcaccactgtgctccagcctgggtgacagagtgagacgccatctcaaaaaaattaaaaaaaaaawctcatgtaccccataaatatatatacctaccatatactcacaaaaattaaaaataaaaaaaatgtaaaagaaggggtggtgagaagaagggaaggaggaa

SEQ ID NO: 11982 - DNA, 201 bp, Homo sapiens
aagtggaaggtttctgacccatgtggccatttctgattacagccatgaacgtcaatgtgggtgtcagaacggcagctgcacttctggatcagttttatgaraaaaggagactcctcattgtgtccacacccacagcccgaaacctcctttaccggctccagctaggaatgctgcaggtgagtcctcgaggcagggccaagg

SEQ ID NO: 11983 - DNA, 201 bp, Homo sapiens
cttgaacagctggaattagttgtcatttatttgcttaaagggaagacctattataaaaccgccttgtcccatgtcctgtttgcctgtgttgtttgctctgwggcctttgtgccccacattgctttgtcccttctgcaccaaggaggcagacttcagagattctgagccattccaaagccagcctggccactgcccattctc

SEQ ID NO: 11984 - DNA, 201 bp, Homo sapiens
ttgggactgcctcccaaataaactgtttacacttgaatccttatctcagggtttacttcttacacaaatggttctgtgtgtcatcataggctctgttgagycagaacaagtggaaggtttctgacccatgtggccatttctgattacagccatgaacgtcaatgtgggtgtcagaacggcagctgcacttctggatcagtt

SEQ ID NO: 11985 - DNA, 201 bp, Homo sapiens
ttccaaaattgttttggctataaatttcatataaattttaggatcagtttgtttatatctgcaaaaccttgctagtattctgatggcaattatgtcacacstactgatcagtttgggggagaattgatatccttaatatttgaatctttcaatccatgaatatggtacatctctccatttatttagatattagttgatttc

SEQ ID NO: 11986 - DNA, 201 bp, Homo sapiens
cagcatcacctgggagcttgatagacatgccaattctcagggcccctcccagacctactgtgtcagaatctacacttttaacaaaatctccaggtgattcmtaagcactctaaagtttgagggtcacttttctgggaaatgtgtccttctcagctatgtaaattttgtagctactaaatgaggcaaccaacatcttgggtg

SEQ ID NO: 11987 - DNA, 201 bp, Homo sapiens
ggctctggttgatccaccaggacccttgggagtcatggtttgacttagtctcctcttttctttgtctgccacaggctgttgctgcgaatcccactctactycttcagtatggtgctagtggataagcatggcatggacaaagagcgctatgtctccctggtgatgcctgtggccctgttcaacctgattgacacttttccc

SEQ ID NO: 11988 - DNA, 201 bp, Homo sapiens
agaagttcatggccatccctctttatctgagtggatgaacatagtccctagatccctgctgcagctcatctcatctgccatccatcttgcccctgcctatmctctaatttccttttcatgtcctctaaggaagaagctcaaggtaggaacctagggccagcctttggtgacattatgaatcagcaaaatttgctctagttt

SEQ ID NO: 11989 - DNA, 201 bp, Homo sapiens
cagctggtttacccaatgacccataggaatgggatcattgcattattgctgggctgcattgcattattcagttgatgcaaacatcagtagggctaagaatraatgtatccatgcattgttgcaaatgatgttaaattgtgctaaattcttcctgggttgacaaatacacattcttttgcaaactttcagaggctagtttca

SEQ ID NO: 11990 - DNA, 201 bp, Homo sapiens; identical to SEQ ID NO: 2000

SEQ ID NO: 11991 - DNA, 201 bp, Homo sapiens
agtttgtttatatctgcaaaaccttgctagtattctgatggcaattatgtcacacctactgatcagtttgggggagaattgatatccttaatatttgaatytttcaatccatgaatatggtacatctctccatttatttagatattagttgatttctttcacaaacattttttagttttcagtatacagatcccatacatg

SEQ ID NO: 11992 - DNA, 201 bp, Homo sapiens
tagaagacgatgaagtcgggtattcacaccctagatataaaggtgaatgctttgcttatgtgctaatgaggacctgctggtgccaggagaactttcctttwtgccttgtgaaacagattgtaataaagtgaccagacaacacatttaagttctaattatctatcaaggaaaaaaaaatatatatatatactccctttttta

SEQ ID NO: 11993 - DNA, 201 bp, Homo sapiens
ttttcctaaagcaaattttattatctggatcatctgaactcatagagtaaacttgacaacagtttacttttctgaaaaagattgactgtatggcttttccwggtggttattaagatgaatacatatacatatgtttatgaaagattttctaaatcacaaatcatacaggattgttagaggaattttaaaaaacacacagaa

SEQ ID NO: 11994 - DNA, 201 bp, Homo sapiens
aagaactccatctctacatattcccagcaatccactccccagcacgtataaaaagcctaaacaagaaccttctgtccagactcaggtaagtatgtccacaratatttctactggtgaaacatttctctgaagcttagggaaacctgggagaaatgaaggtaaatttagagatgctttctctctgaatctagttcctcttac

SEQ ID NO: 11995 - DNA, 201 bp, Homo sapiens
cctctgctgctgctgctgctgctgcgcgtcccgcccagccgcagcttcccaggtaggatcggaggcgtggctgcctcctcagctgggcaccaaagaccccsggagtcgccgttgggacccttcgctcgggatagagggaggtgccgggggcgccctttgtttgcgcagaactcctctttcgcagcccgagggtggggatga

SEQ ID NO: 11996 - DNA, 201 bp, Homo sapiens
ctcagggcccctcccagacctactgtgtcagaatctacacttttaacaaaatctccaggtgattcctaagcactctaaagtttgagggtcacttttctggraaatgtgtccttctcagctatgtaaattttgtagctactaaatgaggcaaccaacatcttgggtgtgtggggaaggctgactagaaactgtaaggatcaa

SEQ ID NO: 11997 - DNA, 201 bp, Homo sapiens
tggcatatgcagattcattgaaagttcatagaagtgagtaaatcagcatccctgggaatatcaaaggctcattttccaatggttattgatactatcaaagrcaaagactttattaaacaaaaatgaactcaaaatagatcatagacctaaatataaagcctataaatatgaaacttcttgatgacaacatgggagaaaatc

SEQ ID NO: 11998 - DNA, 201 bp, Homo sapiens
accatttcttgtagttggatatttaagttaattcctatcttagaatgtggtagatgaagaagatagaagaaaaaaaggctgagattttccatgtggcagastagctggaagatggttatttgctgaaatgggaaacactgggggatgcacaaatttggtgataagaaaaggaatctggttttgagcaggttgagtgtgagt

SEQ ID NO: 11999 - DNA, 201 bp, Homo sapiens
ttcaccaataagtctaattgacatgctgtccaggcctagccacagaacaattgtctttgccaaacctgtccaggatatgcctggctggaagcaatcaattrgttgcctgcccacatttttccccagggaatttctttgactcagagggtgacagccattttttcttagaaaagtggttctcaacgtgtgatccatggaccg

SEQ ID NO: 12000 - DNA, 201 bp, Homo sapiens
gaatcctctctaggtattttatgcaaaaaatgatttaatgcaggaaataaggtactcacaaaattggaagggctggagcaatggaagtcaagaagtctgcmttaaaggtcaaatggcaccatgacttcagtccagatgccagaaactcctcctatcactcaggctaggaaactgttgctgccgtgattatcaccactgcca

SEQ ID NO: 12001 - DNA, 201 bp, Homo sapiens
cccatagctgactgtcctagaagaatattattcaataatttttccatccctgagcttaggtggccagctgaagcctgtgaatccatctacaaccagggtgrataggagccccctaatttgggccaccaggagaacatgtttttagtgttctagtaccattggtatgaaagaaaatgtttttaaggattattttatgcctga

SEQ ID NO: 12002 - DNA, 201 bp, Homo sapiens
caggactagtcttacaggatcccatagctgactgtcctagaagaatattattcaataatttttccatccctgagcttaggtggccagctgaagcctgtgartccatctacaaccagggtgaataggagccccctaatttgggccaccaggagaacatgtttttagtgttctagtaccattggtatgaaagaaaatgttttt

SEQ ID NO: 12003 - DNA, 201 bp, Homo sapiens
taattgggggccatcttagaagctgcatatcagagtctaccctctggcacccagtgattatttcccaccaacatgcaaaatatactcactccccccccccytttttttttttttagaaaaatagcatctattcacagctaagcagctcactgagcctgctttctgacagtataattgtaggggatcaaagacctctcctta

SEQ ID NO: 12004 - DNA, 201 bp, Homo sapiens
atgttattaggataaccaaggaatcacagagaacttgcctttaggtctccactgtcccagacagaaagaacagagaaagttctagcacccacccccgcccygcaggcccaaattgccagtgactgcttggactatattctctaatgattttcctcacagaaaattccctcgtcttcccaacagtgaggcaattcaggtccc

SEQ ID NO: 12005 - DNA, 201 bp, Homo sapiens
gcaatcagaattgaaaagtaagttgatgttatcagggattgggttttatttacctttgactcttcagggtctagcacaatgtctggcccagccccagcacrtagtaggtttttagatttttgcagctctgactgctgttgaaaaaacctgtgtgataaacacaaaacatcaagccatcagatgactctatttgtctacaag

SEQ ID NO: 12006 - DNA, 201 bp, Homo sapiens
tgccagcctgcaagctgctcccaacttttagccaccatgttcctgcttgccaccacctccactgactcctaacctgccctccggctctgctcagaccacaratgagctgaagctgattggagctgcttgataaacactcctcttgagcctccttttggcatggctcaatggggtctcttgggaagtgtgctccgctgaggt

SEQ ID NO: 12007 - DNA, 201 bp, Homo sapiens
acttgtgggtgttatgtgtgtgtgtagctggggagatcttcttataaccttacttatgttattgttggcaggcttttggtccctcaacacatgggccactycacagggcgccctcatgacttggcagctaacttgacccggaatgagtgatccaagagagagagtgtgagacagtattcaagatggacaccacagtctttt

SEQ ID NO: 12008 - DNA, 201 bp, Homo sapiens
tagaaggatagaggatgcccatctttctagcagtgtgcttgggagatgtagggatggctgcgggaaattctctgcacgcacctaaataaatgaatgaatakaacaaatttgtaaattaataaacaggaacatttgtgttttgagctgactcttaagttttaagctgctttgtaggaactgattcagggtaaagtggaaagg

SEQ ID NO: 12009 - DNA, 201 bp, Homo sapiens
ccacctttatatagtacagcttgctaccagggcccagccacagaatcatgagttcgccagtttgggcattcactaccacctgtcttttgggacctatccctggctttcctggctccctctgccagcctgcaagctgctcccaacttttagccaccatgttcctgcttgccaccacctccactgactcctaacctgccctcc

SEQ ID NO: 12010 - DNA, 201 bp, Homo sapiens
aagctggagtttgcatttattatttttgttggccaccttgatctgtgcctttcccaagtggttgaatggtttccttagtaaacgcaaatatgtgtgctacrtcaattcccctttcagagaacacaactgaaattagtaattgaaagtgaagagagaatttgaacagaagaaggtttagttttgccaggctataacatagta

SEQ ID NO: 12011 - DNA, 201 bp, Homo sapiens
cttttggtctctctaattctagctcattttactttctcactttagataatggtcttttaagtccattgactttagtactgttttttatcacatcactcccytactcaaaaacttagggcagcaggtccctgttctcactcaagtaaaaagttctcagttgtttttagggggctacacagtttgcttctagcctaattttcc

SEQ ID NO: 12012 - DNA, 201 bp, Homo sapiens
gaacctagtagatatatacattctcagaccacaccccagagctactgaatcacaagctgggtatgtgggaagtgggcctagccatctgtattttagcagaycctccaaatgattcttatgtacactcaagtgtgagaaccactggtgtggacgtttccaaatggttttctccgaacatctcactagcctagtgtttcacat

SEQ ID NO: 12013 - DNA, 201 bp, Homo sapiens
gggggccatcttagaagctgcatatcagagtctaccctctggcacccagtgattatttcccaccaacatgcaaaatatactcactcccccccccctttttyttttttttagaaaaatagcatctattcacagctaagcagctcactgagcctgctttctgacagtataattgtaggggatcaaagacctctccttattcct

SEQ ID NO: 12014 - DNA, 201 bp, Homo sapiens
ttcttttttcttttaatcatctgcttcgaaggagactaagctgaaactgctgctcagctcccaagatggtgccacccaaattgcatgtgcttttctgcctstgcggctgcctggctgtggtttatccttttgactggcaatacataaatcctgttgcccatatgaaatcatcaggtaagaggtgtatttgttcaaggtctt

SEQ ID NO: 12015 - DNA, 201 bp, Homo sapiens
agcctaacaaaaggaacctttgaattgctattgattctttatcacgagtacaaaataattcaaatcagaaatggaaccacagataagccagaaaagatgtraacaacaaaatgtatttctatcaaaattatgacaatctgattttataatgaggaatcatgtcaagtactttttctattcttcaaatactcatttctctag

SEQ ID NO: 12016 - DNA, 201 bp, Homo sapiens
gcacctacaaatgtgagagatgacccgtctctctagccagtggaaccaggaaaagagctttctgtcatctgaagaatagtaataggagattgtttttgttmtctctttatctgcttcgctcttacgggcaaacagaactgtgtggtggagcagaggctgagagaaaaatactgtctggctaggtgaccagaaaaaggggcc

SEQ ID NO: 12017 - DNA, 201 bp, Homo sapiens
caagcttgatgggtgactccttacgatagcatttgcaaaagagctttcataattcagtaccttaaattttgccctactacataagcaggaaaatgaatgcrttaggagaggttttatatcttatatctacatttgcataggaaatagaataatatctcacaggtccattcatcctataacgcatcaggaagttaagtcatc

SEQ ID NO: 12018 - DNA, 201 bp, Homo sapiens
gacttcacttttgcaactggcaaaataattggacacatgctcaaattaaagggagacatagattcaaatgcagctattgatcttagcaacaaagcttcatyagcattcttacaaaagcatttaggtaagaaactatttttttcatgacctaaaccagatgaatctcaggacaaagctgtctatcttaatacagctttagta

SEQ ID NO: 12019 - DNA, 201 bp, Homo sapiens; identical to SEQ ID NO: 2011

SEQ ID NO: 12020 - DNA, 201 bp, Homo sapiens; identical to SEQ ID NO: 2010

SEQ ID NO: 12021 - DNA, 201 bp, Homo sapiens
cctgctattaaaatctccccctactcccataagttttccctcattattcttgtttacccaaggggttaacacttttcactgaaaaatttatctttatatawttttttgtgacataatgattgtgataataatattgtcatcttaacagtattgccagacttctccagtgggcaggacattttttaattaggtttttccccc

SEQ ID NO: 12022 - DNA, 201 bp, Homo sapiens
gatttggactaagctatacctatgtgcaaagctggggcctgtgtcattatggtagcaagtaatagtcactaatcagatttccagtttataactgaccaacsatttttcccaaatacagcttctacctaaactttaaaataagtgttataactttttactttgtcatttccttcttctaataattatattaggtacggcaaa

SEQ ID NO: 12023 - DNA, 201 bp, Homo sapiens
cttgaacccgggaggcagagtttgcagtgagccgagattgtgccattgcactccagcctgggcaacaagagcaaaactccatctcaaaaaaaaaaaaaaaacttacagttcagctctttggttggtgggtatctagtagcagtctttttaatgaatctactattcatccataaaaaagtagatataaatcagatgggtctg

SEQ ID NO: 12024 - DNA, 201 bp, Homo sapiens
ctccagcctgggctacagagcgagactctgtctcaaaacaaacaaaaaaagaatgcatatatattggtttaaagtattagaaacagtttattaaataagaytaaaataataggtgattctttataatttcttactaaatgaatacacagaaaatatggctatgcaggttaaaaggtttgtaggaatgggctagagatatcc

SEQ ID NO: 12025 - DNA, 201 bp, Homo sapiens
gaacaattttggcttccaggaataaatgacaatttttttattcaagaaagaaatagcagagtttggaatgtcatgcaggcccttgtctggaggagttgggkttcctcaataattggctgtgggtctattgatcagtcctagacctgtctggtcaagtagttttttccctactatcagctcattgggattagcctcacagca

SEQ ID NO: 12026 - DNA, 201 bp, Homo sapiens
gagaataggatgattcccaggtttctggcttgtggtgcaggagatgaggagttcttgagttgcaggctgtgtggttggaaagtgagaagggagagttgaargatgatcatttagtttcattttggaaactagtttcattttgacattcttatgggaaggacatcaggtagagatgctcaaggagaagttataggcacaaat

SEQ ID NO: 12027 - DNA, 201 bp, Homo sapiens
ctcaaaacctgcttccatgaggtgaaaaagaagcaggtgtcttgttcaacaggcatactcctggttaatagtggaaagtcatgtgagataacaatttcagktcttgggatccaaaaggaaacaatctttcctacctgataatagagagaagtagggacaagtaggtgctagggagttccagatgagaatggatgtgatcac

SEQ ID NO: 12028 - DNA, 201 bp, Homo sapiens
tccgttgaatgtagggtggttggtgagaaagaggtaggagaataggatgattcccaggtttctggcttgtggtgcaggagatgaggagttcttgagttgcmggctgtgtggttggaaagtgagaagggagagttgaaggatgatcatttagtttcattttggaaactagtttcattttgacattcttatgggaaggacatc

SEQ ID NO: 12029 - DNA, 201 bp, Homo sapiens
aaaatctgttagcaagtcattatttgcgaagagataactcaatttacctttttctgttatgtttggatttttgaaatcatgtattaactttataatataaytaaatataatactgaaataagatcaaataaaatcaaccaaaattataaataatcttaaagagttgcacatatataccttttttttctgatcaaaagaaag

SEQ ID NO: 12030 - DNA, 201 bp, Homo sapiens
ataagtgtcttcttggggggcaaaaatgccttagttgagagacactgctgtagagtgatgttctagctgcattctccagccttcatcctattgtaaaatayccaaagaagattttatcttcttcagcaatcatttggtgtggtaatgggtcagttttgaggtatttaagccactttctttgactttagttgaaactgaatt

SEQ ID NO: 12031 - DNA, 201 bp, Homo sapiens
ctggaatatgtttgagacacaacttctctaaaagtgcattaatttctttcttaacagggcaccttcttgcgtttatattatccatcccaagataatgatcrccttgacaccctttggatcccaaataaagaatatttttggggtcttagcaaatttcttggaacacactggcttatgggcaacattttgaggttactcttt

SEQ ID NO: 12032 - DNA, 201 bp, Homo sapiens
aaaccactttattattctgatacaggtaagttttctcaagaagtatacccatgaccttaacctaaccatcatgtagccatttatgcatacaacactcaacmgatccagttactcttactcttactattgtgagtaatatagttgggggactgagtctgagagtaagatcaggaacttacagtatagcagcaggctgcccat

SEQ ID NO: 12033 - DNA, 201 bp, Homo sapiens
cagcatccctgactgctactcactagatgccagtagcagccccctcctggttgtggcaaccaaaaatatctccagacattaataagtgtcttcttgggggscaaaaatgccttagttgagagacactgctgtagagtgatgttctagctgcattctccagccttcatcctattgtaaaatatccaaagaagattttatctt

SEQ ID NO: 12034 - DNA, 201 bp, Homo sapiens
ttgctaaacaccctgcaatgcacaggacagcccccacagccaagacttatcagcccctagtgtcagcagtgctgagcttaagaattcctactttagggtcmgggtctaggttcagatcctggtttagctacttcctatccttgtgaacttgggcacgttatttaacctctttgtcttcattatctcaactgtatgtcaaag

SEQ ID NO: 12035 - DNA, 201 bp, Homo sapiens
gtaagaacttaactgaagtcaccaaactagtaagtagcagattcaagattcaaaccttggcagccagaaactggagctaaatttctaaaccactttattaytctgatacaggtaagttttctcaagaagtatacccatgaccttaacctaaccatcatgtagccatttatgcatacaacactcaacagatccagttactct

SEQ ID NO: 12036 - DNA, 201 bp, Homo sapiens
atattattttcagtaaacctaatttattatacataaaagtatctttctctgttcggagaactggaaactcttaactaagagttaccaataaaaacaagtcrtcacaaaatgcagggaaattattgctaaaataatagctggcttaatttcaaaagttgaatatggtcagataaaaattcaaaaatagaataattaaagctg

SEQ ID NO: 12037 - DNA, 201 bp, Homo sapiens
cctcataggccaagggaaacatttggattttactctttacaatgagagaagccaaaagagagtttgaagcagagatgtgacataattgatttactttataragagatgactctgggtgctatgtggagaatggattacaggggaaggagaggggacagaagaaggccagaagcgagtttactgatggggggtggtagcagt

SEQ ID NO: 12038 - DNA, 201 bp, Homo sapiens
ttcctgatacccaagaagatggctatttcctggaaaggaaggtggatattggattatttacactctgattcctcttaagcctaattttttttcaagattcrtgataataagcctgactgacgtctcaagatgttgagaaatttccataaaataaaagcattgaagagaaagtactgagtgaagggaaattgaagagaaaca

SEQ ID NO: 12039 - DNA, 201 bp, Homo sapiens
agagaaatttctgtcaccaaaaacgaaaagttcgggcttttattcatgcctgtggttcttgggattactgcagtggtgatgaggaaggagaggtgcgtatrgctcataaatggcagcttgccacctttaaaaggcacacggattcagatttgggatgtgttaacaaatcaggcttgcacaaattacttttgatccaaatga

SEQ ID NO: 12040 - DNA, 201 bp, Homo sapiens
gggagggtgctgggtgcgctcgagcaggctagcgtcgggagccgccgctgctagtgagaggccggggccacacacgctcctccccggtacctcctccagcwtcaccaggggaggagagggtcggggccacaaggccgcgctaggcggacccaggacacagcccgcgcgcagcccacccgcccgccgcctgccagagctgct

SEQ ID NO: 12041 - DNA, 201 bp, Homo sapiens
gcaagccctgcacaggcacaccatgcctgcctaggggtggggttgcagtagcaccaggctgcttaccacagaagaagaagcaggtgtccctaccttaaggwcctcctccttgggacttcacatctccctgttacaccagaagcatggctcagtagatactcttttaatggaagaagagccttttgtaattcaaaatagacc

SEQ ID NO: 12042 - DNA, 201 bp, Homo sapiens
accagaagctgctgctggccatgtggtgatgtctcaatgtctttcttcattgaactgggcccttcatacccaaggctggcaccatagtctgtgactgcctactgtacagccagcaagactgaaggagttgcagcattaggagtgttgtgaatctggttcagccactcattttacagttgagaaatcccttctgaggtgtgg

SEQ ID NO: 12043 - DNA, 201 bp, Homo sapiens
accgcgcccgccccggagttttcttatctgtagatctcctacagggacaatctctctctccgtctctctctctctctctctctctctctctctctctctcwcacacacacacacacacaccactacacacctctcactctgcctcctctctctctctccctccgctctctctctcacacacccttctccctctctccctct

SEQ ID NO: 12044 - DNA, 201 bp, Homo sapiens
acagcagcagaaatatagtcactatataattaaatgatggaaatagccaaaatttatgaattatttactatgtgctagacatacctatggatattattatratgatgacagatggttgttatatttgttatattttgttggctatttttatagctgaccatactgttataaagttagaaaactagtgaccaaaaacttaat

SEQ ID NO: 12045 - DNA, 201 bp, Homo sapiens
agctgggactgctggcgtgccgtatcacgctcggctaatttttttgaatttttagtagagacggggtttcgctgtgttcgccacaatggtctcgatctccygacctcgtgattcgcccgcctccgcctcccaaaatgctgggattacaggcatgagccaccgcgcccgccccggagttttcttatctgtagatctcctaca

SEQ ID NO: 12046 - DNA, 201 bp, Homo sapiens
gcctttcttgatttgtcagcttatttaaggcctcttcattgcatacttcttttttcttttaatcatctgcttcgaaggagactaagctgaaactgctgctyagctcccaagatggtgccacccaaattgcatgtgcttttctgcctctgcggctgcctggctgtggtttatccttttgactggcaatacataaatcctgtt

SEQ ID NO: 12047 - DNA, 201 bp, Homo sapiens
tcttccaaaccttttcccgaaaggaagcaaccctaagagctcagagctggggggagaatcaggacaggcagggaacacatggagttttcttttcttttttytctctctctctctctttctttcgttccttctttctttcttttgaggcggagtctcattttgtcgccaggctggagtgcagaggcgcgatctcgactcact

SEQ ID NO: 12048 - DNA, 201 bp, Homo sapiens
tttaggggttcagtccaccagaattttgctgacttcacttttgcaactggcaaaataattggacacatgctcaaattaaagggagacatagattcaaatgyagctattgatcttagcaacaaagcttcattagcattcttacaaaagcatttaggtaagaaactatttttttcatgacctaaaccagatgaatctcaggac

SEQ ID NO: 12049 - DNA, 201 bp, Homo sapiens
catataaagaaaatgattatataaaattccaggtctgctactttacaaagttaatcatatccctttcccacattgaagtatgatacctctttattccaatsagataacccataataaactggtatggtgcgtgtccaccaatcctagcattattaggatgtcctcaatgttggctagtatgtaaccagtttaatttcatca

SEQ ID NO: 12050 - DNA, 201 bp, Homo sapiens
tcttgtcctacagttctttattgttttttgtcatttaattttctgctatattgcaaggtacaatatgataaagggctgcaaccagccccctccccaatgcrcacacacagacacacaaagcagtacaggtaaagtattgcagcaatgaagaatgcattatcttggactagatatgaaattgccaaaagttagtcagttttg

SEQ ID NO: 12051 - DNA, 201 bp, Homo sapiens
aggaagggaaggagcatgcataaataataattttgcttgtattatagagatagatctgcatctgcaacttactatttcaaggaccaatctgctgcagaaayaggggacaagtcttggctctaccttagaaccctgaaacaagaggaggagacacatatacgaaatgagcaggtacattgcagtgaaaggagaggtggttgg

SEQ ID NO: 12052 - DNA, 201 bp, Homo sapiens
catcaaactctccagatccaaaacaaaggagtcaaagctaatgcctttcttgtcatacatgaagagactctactctcattcccatcacctacccccatcgmtaagacaatctgatgtgtattcttcacttactgtctacattctgctaatatagacttttccttccttatctgtttgactagacactactgttggactgat

SEQ ID NO: 12053 - DNA, 201 bp, Homo sapiens
tagtagagacggggtttcgctgtgttcgccacaatggtctcgatctcctgacctcgtgattcgcccgcctccgcctcccaaaatgctgggattacaggcakgagccaccgcgcccgccccggagttttcttatctgtagatctcctacagggacaatctctctctccgtctctctctctctctctctctctctctctctct

SEQ ID NO: 12054 - DNA, 201 bp, Homo sapiens
tgtgtcatgttttgtactaagaacttgacctacattctcacctcatctttacaactgtactgtgggctggtcaagtgcttttatgtcattttacgaatgtrgatcagagaggggagcaactaggccagaggattatagcttgtaagaggtacacctgaaatctgaaatagaaccatgtccctccaattcacagggtttgtt

SEQ ID NO: 12055 - DNA, 201 bp, Homo sapiens
ctcacaagcggaggcttgtgttgggtgaaaccctcccatgcctccagaactgagcctccaattctagaggtagtgtctccaacagcagctgtggccctggrgctccttagcgagttgtgtgagccagaggtctccctgcagcaagccctgcacaggcacaccatgcctgcctaggggtggggttgcagtagcaccaggctg

SEQ ID NO: 12056 - DNA, 201 bp, Homo sapiens
atgcagtctgtagcatgatagctgagtggcacattttcataacaacaaccaccctcttcactttcttccaccactttctcacctgtcacccctcttctacytcaagggattgtaaaactcagaaaataagagagatggcttttagctgggaagaagttgggtagcacttgcaataaagaattctcttcagcactgtaaatg

SEQ ID NO: 12057 - DNA, 201 bp, Homo sapiens
cattcctgaagttagatctaagtatttactcacatttaatctactataaggaggtatgatgcttcttcaagtttggaagtcacccttgcctttactttccrgtttaatggattgagcttattttgaatatagtaaaataaaaattaatagcccacctgtattcaatttttaccatgtaccaagcactgtgttaccttcttt

SEQ ID NO: 12058 - DNA, 201 bp, Homo sapiens
agaaaatggacaacctgcaaaattacctttctaacagtataaagggaaattggaacataatgatttgattttcaccctattttgtatgttttctagtttartagtagaacccatggaaaactggctacagttgatgttgaattgggaccctcagcagagaggaggacctgttgaccttactttgaagcagccaagatgttt

SEQ ID NO: 12059 - DNA, 201 bp, Homo sapiens
agggtttcgctatgttgtccaggctggtctcgcactcctgacctcaggtgatctgcccgcctccacctcccaaagtgggattacaggcgtgagccattgcrtccagccctgatgcttatttgaaaaagaaaattatattcttagagctgattttttaaaaagtttatttagcaagctgtctcagtttgcttctctgtggtc

SEQ ID NO: 12060 - DNA, 201 bp, Homo sapiens
ggataattgcttgaattcaggaggtggaagttgtagtgagctgagagatcatgccactgcacatcagcctgcgtgacacagcaagactctgtctcaaaagaaaaaaaaaaaaaatagaactgtaagattcaacaatgtcatttcttggtatatatccaaaggattttaaagcaggcttgtgaagagatatttgcactccca

SEQ ID NO: 12061 - DNA, 201 bp, Homo sapiens
gggtagcttggccatagctatctgcatttatgtgtccttttgtatgcattactttggagataagtcattaaatctgatgctgattgtggttcatttcctcmgctgggttttgggaatatggtgtacagtcttggggcatgtgaaagtgtctgacactgatttaatctctccagcaagttgttgggctgtaagcagaagatt

SEQ ID NO: 12062 - DNA, 201 bp, Homo sapiens
tgggagagatgggagtttttatttctgtaaccagttacaggtagaaggcctggaaattaccgccagaccaactcaaaattacaaagtttttccgtagtttrtttatcttctaagctatatgtctatgtgtaagtttgcattcatctaaagacataagtgattaacttcttttaatctgtagctgaggtctgagtcttgaag

SEQ ID NO: 12063 - DNA, 201 bp, Homo sapiens
acttctcagaaggaagacttaaacatgaggtgccacatgatgatgttttggttaacaacaaattgtgtatactatggtagtcccataagattatactactrtatttttactatgtattttctatgtttacatgcacaaatacttaccattgtgttacagttgcctacagtattcagtacagtcacttgctgaacaggtatg

SEQ ID NO: 12064 - DNA, 201 bp, Homo sapiens
aggatcgcttgagccctggagatagaggttgcggtgagctgagatcatgccactgcactccagcctgggtgacagagtgagactctacctcaaaaaaaaawtttttttgttgttttttcctttatccacccatctgcacactggtataaatatatatatttttaagaaaaaagtcatctgtattcatttcctaagggttcc

SEQ ID NO: 12065 - DNA, 201 bp, Homo sapiens
tgaagtagcaggatcgcttgaggcccaggaggtcgaggctgcagtgagccaagattacactactgcacttcagcctgggttgacagagcaagactttcttaaaaaaaaaaaaaaaaaaaacccagagcagaaatgaaaaacctgtgaattagcagtgacaaatagtgaacagtaatattaattttttgttgataatttagt

SEQ ID NO: 12066 - DNA, 201 bp, Homo sapiens; identical to SEQ ID NO: 2025

SEQ ID NO: 12067 - DNA, 201 bp, Homo sapiens; identical to SEQ ID NO: 2027

SEQ ID NO: 12068 - DNA, 201 bp, Homo sapiens
aaggactgacttctaccatctatatcgtggtatatagcaaattttctgttgctgctgtcacaataaaagtaagaattagaaacacaactagacatacaaaccagtgattatgtggtttagaacagtgtttagtttccatagaggcaggctcctgggctactgttaacatggaggatcaaaatttttatacacagcctttct

SEQ ID NO: 12069 - DNA, 201 bp, Homo sapiens
agaactgccatttaactgtttgacatatgtcctaagaaggctcttaggataatgaagtaaatgggttatttgcagaatggatttggactcatccgtcagarttgtcagtaactaacatatgtggagttttgagtagtttttgatggaaaaaagtttgtcccctgtcatttcatgaatttgaaagtaatttatgaaatggta

SEQ ID NO: 12070 - DNA, 201 bp, Homo sapiens
atactgtcatgttcatgcagggaaaaaggcagaaagaaatatggcatctccttaaaattgcctgtgtaagtaattattaatgaattatttaatgtgacatkgagttgctattattccttgcaaaggggatttttatcagcatgaggtgggccctcttgaagacatgtatattttgcattgggatgacatccatgttccttg

SEQ ID NO: 12071 - DNA, 201 bp, Homo sapiens
taataaatttttgagatctattttataactttgtatttctaagattagacttttttcagtgttttaaatcagttttgcaagaactcagattccaagccctrtattttattaattcctactcttttgctaaaagctgaatgactatccatttctgttattttctcagcttaagatgtgccgtatccaaagccagtggctctt

SEQ ID NO: 12072 - DNA, 201 bp, Homo sapiens
tccagtaatcagagttgaaggaagtaaaatttaatactttacttacttttttgcctttattaaaggcatttaagttttttagcggatgttaatgtttacaratgtcaccacaatacaggtaatttccaatttgaagtgtagttgcttgcaaaagtatatctgacagacattttcaatgtattttctagaaggaacacatta

SEQ ID NO: 12073 - DNA, 201 bp, Homo sapiens
atcatctgcagccatttacctggtaagaaatggatgagaacttgggcatgcttaatgggaatggaaattttttcatttgtctttttttttctttctttaaktgtttaattgcctttgaaatatacaattaaatataattaaatggcaagaaatcttaatttgtgagaatcactttgtcaactgaggtagcttttgatttta

SEQ ID NO: 12074 - DNA, 201 bp, Homo sapiens
acttgagcatcagagtagatttgtacaaaatgtgaggtgaatttttcttttaactcaatgatttctgttacttcaaagtatattttaaactttatttaggrtctgggattcgatatttgcatgaaaacaaaattatacatcgagatctaaaacctgaaaacatagttcttcaggatgttggtggaaaggtaggtgaaacct

SEQ ID NO: 12075 - DNA, 201 bp, Homo sapiens; identical to SEQ ID NO: 2030

SEQ ID NO: 12076 - DNA, 201 bp, Homo sapiens; identical to SEQ ID NO: 2031

SEQ ID NO: 12077 - DNA, 201 bp, Homo sapiens
catgagatttgtcagccttttccagtttcaaatgctttttgcctctttttacttttatgagccttatcatgaaatttacatgccctcagtatggatttggwaattttattcccttgtattttattatgacttattttctcatttgaatattcttttagagtatagtaattaatgtgtggtcactattgcagcccagcaatt

SEQ ID NO: 12078 - DNA, 201 bp, Homo sapiens
tatcatgaaatttacatgccctcagtatggatttggtaattttattcccttgtattttattatgacttattttctcatttgaatattcttttagagtatartaattaatgtgtggtcactattgcagcccagcaatttgcagaacagatttttagatttctttctttttttagctgctcaacaaaccagaaaattgttgtg

SEQ ID NO: 12079 - DNA, 201 bp, Homo sapiens
tgaatattttgattcatgatgtgcctcttctagcaatggaatactgttctggaggagatctccgaaaggtagtgtggatgttttgagatgagagagagtamatcacaaactttagcaatgtttgaatcatgttaaatataataaactagaataagaatcggaaaaactatggtctgcttcctgttttgtaaataaagtttt

SEQ ID NO: 12080 - DNA, 201 bp, Homo sapiens
gagagtaaatcacaaactttagcaatgtttgaatcatgttaaatataataaactagaataagaatcggaaaaactatggtctgcttcctgttttgtaaatmaagttttattggaacacagccacattcatttctttacacattgtctatggctgctttcttatggctgcagaagtgagtagttttaacagagactatgtga

SEQ ID NO: 12081 - DNA, 201 bp, Homo sapiens
agtatattttagttaaggaagtttgcctcagtttctccagagttgtaaaggagcaggagagtagttgtctgtttcaagttgcattatccagtagaactttytgtgatgatgtagaaaccttctatatttctgttggccacatgaggttattgactacttgacatgtagctagtttggctagagaacgaattttgaataaat

SEQ ID NO: 12082 - DNA, 201 bp, Homo sapiens
aagatgttatttgcatttttcaccatgttgacattttcattgatggtgcaacataaaatggctttcaccttagtatgaatcaaggcactagcgccaaactrtgctagtagccgttatattttttaccaccatgcagtcacagtttttaaaaaatgacagtttcacttacaaatgtccttgataaagcagtaaaaatattat

SEQ ID NO: 12083 - DNA, 201 bp, Homo sapiens
tagtcaatgaagaaagggtccaaggacaggttactaatggtgtgtaaaggtgggaatagttttgtactgaaatactctggttgtgcatataagtagtaacrgaaatgtaagtcttaggaatatgataagaaattgtgtgaatcaacagagatgcttgcctgtaatcttttgatgtttttttcttttccttcagacacagag

SEQ ID NO: 12084 - DNA, 201 bp, Homo sapiens
aaaggatgcatgctggcagcttttgtgacttcttttcttggtccctgggtggggatggatgaattaatcactttttgttttattatggtaaagtatacatmacacaacatttatcactttatttttaagtgtacagttaggtggcattaagtacattgacgttgttgtacagccataaccctatctccagaatattccgac

SEQ ID NO: 12085 - DNA, 201 bp, Homo sapiens
gaaacaagaactgccatttaactgtttgacatatgtcctaagaaggctcttaggataatgaagtaaatgggttatttgcagaatggatttggactcatccrtcagagttgtcagtaactaacatatgtggagttttgagtagtttttgatggaaaaaagtttgtcccctgtcatttcatgaatttgaaagtaatttatgaa

SEQ ID NO: 12086 - DNA, 201 bp, Homo sapiens
cagcccggtcaacatggcaaaaccccatctctactaaaaatacaaaaattagccaggtgtggtggcgggtgcctgtaatcccagctacttgggaggccgarggaggagaattgcttgaacccgggaggcggaggttgcggtaagctgagatcataccactgcactccagcctgggcgactccgtctctaaataaataaata

SEQ ID NO: 12087 - DNA, 201 bp, Homo sapiens
taataatcttttcctgttgcttatttatttatttattttgagacagggtctcactctgtcacctaggctggagtgcagtggcatgtttttggctcactgcmacctgcgcctcccaggttcaagcgattctcttgcctcagcctcccgagtagttgggactaaaggtgtgcaccaccatgcccagctaatttttgtattttt

SEQ ID NO: 12088 - DNA, 201 bp, Homo sapiens
gtttgttatttttaaatgaattaagacacgagtatttttaaatttctgtttaattcctgaaaaaccctttggggttctcaagaattttctagtgtaaaggkgtcctgagaccaaaaagtttgagaactgcttatctagactattctcagaagcttggctgctcaggaaagaagagaggtgggtgagtagctaaaagttgat

SEQ ID NO: 12089 - DNA, 201 bp, Homo sapiens
gagtcatactaccagcatttctgttttcttttataaaacaaatcctttttaggaaacaaatacttgtttcctaaaaacatatacttgtcctgagcaaactmtgtgtatctcagagtaaacaatcaatagtgtccagttgggtgaatgaatttactctccagaactggttttattaatattattgatattttatttctattt

SEQ ID NO: 12090 - DNA, 201 bp, Homo sapiens
gggcatgtatcaggttcttagtaaattatttattgatatgaatgagagctatagatagttctattatgcagtgtacccagaaacaactctcatcaatagtstttacatttgtattgattgtttgtagtatacaggtttctaaaattgaaatgagaaattataatcatgtaatgttggagtacatggcgagatagctcactt

SEQ ID NO: 12091 - DNA, 201 bp, Homo sapiens
aaaaaaggaagcaacaaaacagttactgaaatatttcccttttgaaaaaatagcttagcaagtctgattgtatgcatattttccaactgtttattatgaayatctttagatatgtagaagagttgaaagaagtgtactgaacctaccactaaaaataatgatgaaacagtagcatttaattattatttttttttgcctcct

SEQ ID NO: 12092 - DNA, 201 bp, Homo sapiens
caaatttatcttttgaatatcttaacaattttgagcttgccaggttctcaatttagaaaggcttgcatagttttctttcacttattgaataaagtccagascctttcattggtactcaaaacctatcttggtttcatatcaacttacactcctggacttatctcttactaatgccctgagaggccatcattttaggtacat

SEQ ID NO: 12093 - DNA, 201 bp, Homo sapiens
tgtgtaaaagtagatgtccattataggattttctattgctataagtggcagctgtcatagtgtgaaatctgcctaaattgggaaggcatggaaagtctcargtagtataattgtattgcaaatccgtatcagttttgaagatttccctactccccttttaaacataaagatttatattaaagaaaagtctcttaataagag

SEQ ID NO: 12094 - DNA, 201 bp, Homo sapiens
ctttaggtgagagtgataaaacggttcttacttgatttggggcccttaagcaggttgctgctctgggattaggttgtcttataaaaaggtaactcaccacscataacaatgctttttcctgtttaaagagagacctagttcttctatcagatgatttcttaaggcagcatgaagtagccagacacaaaaagagttaagatc

SEQ ID NO: 12095 - DNA, 201 bp, Homo sapiens
cttacaaaagagacctgaatgagatccctcatcccttctgcatgtgaggacagagcaagaagatggtcatctaggaaccagaaagcaggccctcaaatctrccttgttcttggacttcccagcctccagaactataagaaataaatttctgttgtttttatggcacttagtctatggtattttgttatagtagtccaaatg

SEQ ID NO: 12096 - DNA, 201 bp, Homo sapiens
acatctcgcatttgtttcatacttgtcataggaatcatagcatagtttctgctctgaagggcatctgtgagcctcttgttatagggcacggggaaagagtmcacattatggagtttatagtttacagactttaattcagtttgcagcaccactatttacctatctgtgaacctgagcaaatgtctctctatctcaaggaca

SEQ ID NO: 12097 - DNA, 201 bp, Homo sapiens
ggttactataaactactgatttgttaaaacttgaggaaattaccataaaatgtctactgaatcaatttttcctgcatttagtcttaatgtcaattctgtayatttcctctttcattaagaaaaatagcagtggccaggcatggtggctcacgcctgtaatcctagcactttgggaggccaaggcaggtggattgcttgagc

SEQ ID NO: 12098 - DNA, 201 bp, Homo sapiens
tatatatgagagagagttctgaaaagacctgttataaaatcagtttcaggcacttttcccttgtatgctgttgtgtgtttgaaggtcagttttaaagcatkggtgtaatagtctcatggtttatctttttaaaaagcattgcctcaagagagctgtggataaatatatttaattagtaaagctaaaaagttttgttgtctt

SEQ ID NO: 12099 - DNA, 201 bp, Homo sapiens
gctgcggccgggcgcgggcgggccctgggagatgcgggagcggctgggcaccggcggcttcgggaacgtctgtctgtaccagcatcgggtgaggcggggcrtgagagggagcggcggtgggttggagcggcggtgggtttgagcgtctgtggaacacagggctgacagtgtgggatagatggttggtgggaccttgggcag

SEQ ID NO: 12100 - DNA, 201 bp, Homo sapiens
ttcttcaactaaaatggtataagatgagtggatatatttggttttagtcaatgaagaaagggtccaaggacaggttactaatggtgtgtaaaggtgggaayagttttgtactgaaatactctggttgtgcatataagtagtaacggaaatgtaagtcttaggaatatgataagaaattgtgtgaatcaacagagatgcttg

SEQ ID NO: 12101 - DNA, 201 bp, Homo sapiens
ggctggagtgcaatggcacaatcttggctcactgcaacccccacctcccgggtacaagcgattctcctgtctcagtctcccgagtagctgggattataggygcacaccaccacgcccagctaatttttgcatttttagtagagacagggtttcaccgtgttggccaggctgctcttgaactcctgacctcaagggatctgc

SEQ ID NO: 12102 - DNA, 201 bp, Homo sapiens
tttatatcttttatcttaacccaatttttaatttaaatggagatgtttattaattaaaattagtttcagagtttcagggatttttgaggaattttttgttyggaggctgatatgttacagaagaaaggttatatccactgactgatgtcttttatagatcactcctacagtgacagcacagagatggtgaaaatcattgtg

SEQ ID NO: 12103 - DNA, 201 bp, Homo sapiens
ttactcaatacaatgctctgtgaaatacttgttggcaatatgaacttgctttaaaatgggttcattattcaaataaaatattgtttcaagttgtagattaytgaagtcattaaattaccttcacttatcagagcgtgttttctcttttatagggaacagcgtgccattgatctatataagcagttaaaacacagaccttca

SEQ ID NO: 12104 - DNA, 201 bp, Homo sapiens
taagtcttcttagatataatgctaacttaacaaaaatgaagaacactttgatctcagcatcacaacaactgaaagctaaattggagttttttcacaaaagyattcagcttgacttggagagatacagcgagcagatgacgtatgggatatgtaagtgtctgtgtaatgtatttgaaaggagcatctggtttcttgaagcca

SEQ ID NO: 12105 - DNA, 201 bp, Homo sapiens
agggctgacagtgtgggatagatggttggtgggaccttgggcagtatttgggggccagtgggcttgtgtgtgtgtattagagagaaagatactatgcctgygtgtccaaagttgtatttgaggtactgggcatagatagagctgttgcggggaacttgggtatgactgtcaggctgtgaccaggtgtttagtgagtgtgac

SEQ ID NO: 12106 - DNA, 201 bp, Homo sapiens
atggaataagaggataaaaaggttgaagatgttaacaaatagtgatttaagtgatagaagttgtagctagagtaaaatattaaaatctaagatttcaaatrgagcaagtccaattctttttctttaatcaatatttctgggccaggcgtcgtggcacatgcctgtaatcccagccactttggaggctgaggcaggagaatt

SEQ ID NO: 12107 - DNA, 201 bp, Homo sapiens
attttttccccttatcctgtacatttgtccacggtcctaagttattacactccttaatgtcagtacttaccctgaggatgtgggtggggatacccatggtrtcctggggtgggaaatccaagttctttatctttttgtgtccctattcaaggtagtggggaccagggggcagtcaaaatcatagagccaagatacaagtaa

SEQ ID NO: 12108 - DNA, 201 bp, Homo sapiens
gttggccttttttggtttttaataaaagcatttatttcataggagtgttaagaattttccaagtataactaagttacaaactatttccctactcattatayctctggtccaaggtattgactcttaaatgccctaaaacttgaaattttttctgaattaaagttctggattaaaaacttcagatattttctcgaattatag

SEQ ID NO: 12109 - DNA, 201 bp, Homo sapiens
aggaatctattttttatctccacaagtttgccttttctgaacattccatataaatggaattatgtaatatatagtcttgtgtctgactttttttacttgcyttgtatttttgaagcccgtgcatgttgtagcatgtatcagtacttcattcgttttgattaccgattagttttttcactgtatatatctttttgcatttgt

SEQ ID NO: 12110 - DNA, 201 bp, Homo sapiens
tgttctttgggttttggtgattgttcactttagcccatacaaaagtttgggtcttttttcctcaacaaaagtttggactctgttatctgtaagagatatgstaatacacattgattttgttcatttgcatttcaaagtaggaaatctggtgcataagtatttagaaaacctaggattttcaaagatccttgaacaggattt

SEQ ID NO: 12111 - DNA, 201 bp, Homo sapiens
tatgattagtagaaatggacttttggtgttgtgttctgtatctcatacttgaagtttctatatggagttatatgagaactctgaaaaatggatttatatartttggaaggtgaaaaggtagatattaaatctccatgagatcattcaagagaagatttactttcttgaggatagggctctcacaggagaatgaaacttcac

SEQ ID NO: 12112 - DNA, 201 bp, Homo sapiens
gtcctggccagtgaagccatccttaatgttcctgataagtctgactggaggcagtgtcagatcagcaaggaagacgaggagaccctggctcgccgcttccrgaaagactttgagccctatgactttactctggatgactaaaacaaagggaagaactttttatgaactccacaggaagtagtaaagctttttttttttttt

SEQ ID NO: 12113 - DNA, 201 bp, Homo sapiens; identical to SEQ ID NO: 2034

SEQ ID NO: 12114 - DNA, 201 bp, Homo sapiens
gttgtgtagttacgatgatccatataaacttgagcatcagagtagatttgtacaaaatgtgaggtgaatttttcttttaactcaatgatttctgttacttyaaagtatattttaaactttatttagggtctgggattcgatatttgcatgaaaacaaaattatacatcgagatctaaaacctgaaaacatagttcttcagg

SEQ ID NO: 12115 - DNA, 201 bp, Homo sapiens
tgtatgtaggagcacgaatgtgtgagaagagggctgaaggggactgcctttgggaatgtgtgcgtccgtgtgtgtgtgtgtgtgtgtgtgtgtgtgtgtgygcgcgcgcgcgcgcgcttggaggccatatgatatcagtggggactggagtagacaaggaaggcttcatgatgggtccagagttaagcctttggaagcatg

SEQ ID NO: 12116 - DNA, 201 bp, Homo sapiens
gagcccaggaggtcaaggctacagtgagctgagatcataccactgtactccagcctgggtgacaagagcaagaccctgtctgaaaaaaaaggaaagcatcttgatgccactaaactgtacacttaaaaatggttaaggtggtaaattttatgctatgtgtgttttaccacaatcaaaaaactatttcatttcagttaacaa

SEQ ID NO: 12117 - DNA, 201 bp, Homo sapiens
tcgccatgtgggcctcttcatggggaagcttgaatgttttcatgacatggaagctagctttccccagaaagatcttttcctcagaaagagtgagtgatctragagagagagagagagagagagagtgaacgagcgagcaagatgaaaaccgacgtatcttttatgatctttacttggaagtgagactccatccttttccac

SEQ ID NO: 12118 - DNA, 201 bp, Homo sapiens
tttccatttcagacctcaccacactgaactgtagttttgtgtttagtttttttgtcccttctgctaaacagtggttccatcagagaaggaacagcacctgctttttttttctttttcttttttttcatttttcatacttaacccagctcctagacttcacctgtcttgttcaagtctgtttttccatcatagtatctagca

SEQ ID NO: 12119 - DNA, 201 bp, Homo sapiens
ttagtgaaaatagttgttggcctcttggaggtgttggaaccttggtgatgcctcttctcttaggaacctttcacgtatgcttggcaccaaatatctctgctttttttttttttaatccaaagacttcaggacattcctgaagttagatctaagtatttactcacatttaatctactataaggaggtatgatgcttcttcaa

SEQ ID NO: 12120 - DNA, 201 bp, Homo sapiens
cttaacctttacctcatacaagaccagcttgtcactgctccttatgcctcaaacccgttatctacctttgtgctttgacagatgctatccttctgcctggdtatccatttctgtgtatcttctcacctacactggcatatctttaagagcttttctttaaatggtctctgccacaaaatttgtcatttaaaggctatattc

SEQ ID NO: 12121 - DNA, 201 bp, Homo sapiens
tctgctggaaagagtactggatggggaatcagaggcttgaattctagattgagtaatttactgaccgttacctcaggcaaatctgcgtttcccatttcctycttctgcaaaatggggttgaaacctaactttcctactcagtgagtatattgtgacagtgtatttaagaggatgtttgtgaaaatgctttgaaaactataa

SEQ ID NO: 12122 - DNA, 201 bp, Homo sapiens
atcagaggcttgaattctagattgagtaatttactgaccgttacctcaggcaaatctgcgtttcccatttcctccttctgcaaaatggggttgaaacctarctttcctactcagtgagtatattgtgacagtgtatttaagaggatgtttgtgaaaatgctttgaaaactataaactattatgtacttgcaagatattatc

SEQ ID NO: 12123 - DNA, 201 bp, Homo sapiens
tctgtgccctaatgtgcattatacttaaatgcatgttaaaaaaagatatacttttacactttaaaatttgtagacacatagcaacacatgcaaattaatayacatgtgaaattgtatttcatatactattttcacatttaaaaaataacattatctcctcttatactgcttttattttactgaaatgtattcagtttagtc

SEQ ID NO: 12124 - DNA, 201 bp, Homo sapiens
acatgtatgtatagcacttagcatgtctgaggaaatgcagtatgactggagtgtagagtttcaggagagagaaaacctaaatataggagagagagaaaacstaaatataggtttttttgtttgtttttaataaaaacatgttaatgggcaataggtttgttatttttaaatgaattaagacacgagtatttttaaatttct

SEQ ID NO: 12125 - DNA, 201 bp, Homo sapiens
ctttgatctcagcatcacaacaactgaaagctaaattggagttttttcacaaaagcattcagcttgacttggagagatacagcgagcagatgacgtatggratatgtaagtgtctgtgtaatgtatttgaaaggagcatctggtttcttgaagccatctgttattttgccttcttaactcagccagttgttttacttacct

SEQ ID NO: 12126 - DNA, 201 bp, Homo sapiens
tgcagggaggtcctggccagtgaagccatccttaatgttcctgataagtctgactggaggcagtgtcagatcagcaaggaagacgaggagaccctggctcrccgcttccggaaagactttgagccctatgactttactctggatgactaaaacaaagggaagaactttttatgaactccacaggaagtagtaaagcttttt

SEQ ID NO: 12127 - DNA, 201 bp, Homo sapiens
aaaaaaaaattctgactcccagttttctggctaatgaatcagataccacagatacacagtgatagcatttgtttaggttatattttttaaaactttgaggyagccctgtcaacataccatgaagctcagaaataaactgctacccaggtagcttctttgagtgtcaccttgagtgacaaactgtaacaagattgtgtctgt

SEQ ID NO: 12128 - DNA, 201 bp, Homo sapiens
cttctcacatgactgctgtgaggattaaatgggaaaattataagcagagagtagcaaatattattattattgcatttaggcttaattattgtccaaagaawataccagcatgatgcataagcaactttcaactcctttagccattttctgaaatataacaattaatgatttttttttaaaatcgaggtcacattttaaact

SEQ ID NO: 12129 - DNA, 201 bp, Homo sapiens
tacagatcattcttccagttatcacagcaatcttatatttaggtattattttgcaaatgaggaagttgaagcttatagaatcacatagctggtggttggtraagtgtggatttgaaataaatactttctgactctaatatctgtgcttaattccattttgattctcaaacttggttatgtggcagaatcaccaggaaagct

SEQ ID NO: 12130 - DNA, 201 bp, Homo sapiens
cggataaacatgaaattccaagcaacctagttcaagggcctccttcctttaggtaatgaaagtttgatgaattgtcctactgtttctaaatatgtggttartcatccaagaaaaattgttcccttggccagaggctgcatttgtgtctagggcttgggttagtatgggttaaagatagccaagactattgttctcaagcac

SEQ ID NO: 12131 - DNA, 201 bp, Homo sapiens
gcaaaatacagcttccaattatacagctgcgtaaagtgtgggctgaagcagtgcactatgtgtctggactaaaagaagactatagcaggctctttcagggrcaaagggcagcaatgtaagtggattctgttgtttataagcacaatgcaatgtgcatcatatactcaagaattaatcttgccggttttcactaatcaatat

SEQ ID NO: 12132 - DNA, 201 bp, Homo sapiens
gttttattatggtaaagtatacataacacaacatttatcactttatttttaagtgtacagttaggtggcattaagtacattgacgttgttgtacagccatmaccctatctccagaatattccgacttttttgttgttgttgtacatctataaacttcccatagaatattctttgtgaaaaggtagaatttcacagagttga

SEQ ID NO: 12133 - DNA, 201 bp, Homo sapiens
ttataggtaatctttatatcttttatcttaacccaatttttaatttaaatggagatgtttattaattaaaattagtttcagagtttcagggatttttgagraattttttgtttggaggctgatatgttacagaagaaaggttatatccactgactgatgtcttttatagatcactcctacagtgacagcacagagatggtg

SEQ ID NO: 12134 - DNA, 201 bp, Homo sapiens
tctaacagtataaagggaaattggaacataatgatttgattttcaccctattttgtatgttttctagtttagtagtagaacccatggaaaactggctacasttgatgttgaattgggaccctcagcagagaggaggacctgttgaccttactttgaagcagccaagatgttttgtattaatggatcacattttgaatttga

SEQ ID NO: 12135 - DNA, 201 bp, Homo sapiens
gacaagagcaagaccctgtctgaaaaaaaaggaaagcatcttgatgccactaaactgtacacttaaaaatggttaaggtggtaaattttatgctatgtgtrttttaccacaatcaaaaaactatttcatttcagttaacaaaagtcagctagggccgggcgtggtggctcacacctataatcccagcactttgggaggcca

SEQ ID NO: 12136 - DNA, 201 bp, Homo sapiens
gctagctttccccagaaagatcttttcctcagaaagagtgagtgatctgagagagagagagagagagagagagtgaacgagcgagcaagatgaaaaccgaygtatcttttatgatctttacttggaagtgagactccatccttttccaccacattctgtttgttacagtgagtcactaagtacagcctacattcaagggga

SEQ ID NO: 12137 - DNA, 201 bp, Homo sapiens
gaggtagcccagtgacttctgtcatcttccactcgactccacaggcagccccgcgcccaccatccactggtccaagctgcgttccccactgccctggcagyaccggctggaaggtgacacactcatcataccccgggtagcccagcaggactcgggccagtacatctgcaatgccactagccctgctgggcacgctgaggc

SEQ ID NO: 12138 - DNA, 201 bp, Homo sapiens
gtaaggcccttcccgtctctgtatggcaagagcgctggacccaggagtttccaaggcctttgttactttctgctatctgcgactccatgagctagacacamccaggccggagggattggggaagtgggcccaggggcacaggctggcagcaccaagacacgagaaggaccaggtcaatcctctctcaccctcccccatgca

SEQ ID NO: 12139 - DNA, 201 bp, Homo sapiens
gtctggacgccccacattcatggtgtggccctgagtaaggcccttcccgtctctgtatggcaagagcgctggacccaggagtttccaaggcctttgttacyttctgctatctgcgactccatgagctagacacacccaggccggagggattggggaagtgggcccaggggcacaggctggcagcaccaagacacgagaagg

SEQ ID NO: 12140 - DNA, 201 bp, Homo sapiens
ctgggcctcagtttcctccactgtaaagtgagtgggttggacctctaggattctgtgaatgaagcttccaccagccctaccagctgagaccctgagcttcygagagaactcttgggtaccggcacagttgggcttggggacattccttgtcctggggactttgccctgataactgtcccctcgctgctctgacagacccat

SEQ ID NO: 12141 - DNA, 201 bp, Homo sapiens
agctgaatcctttcctgggcctcagtttcctccactgtaaagtgagtgggttggacctctaggattctgtgaatgaagcttccaccagccctaccagctgrgaccctgagcttccgagagaactcttgggtaccggcacagttgggcttggggacattccttgtcctggggactttgccctgataactgtcccctcgctgc

SEQ ID NO: 12142 - DNA, 201 bp, Homo sapiens
attccaggtcaggcaaggttagacctgcagttgctttctgtacccaaacctcatgcaaacaccagcctgcttggggaccccaggggataaaatacgtttgsgggacgagttcaccagcctgcaaatcaggagacctgggtttttctcttggctctgcagctgaatcctttcctgggcctcagtttcctccactgtaaagtg

SEQ ID NO: 12143 - DNA, 201 bp, Homo sapiens
ccactagaaacagggagctcactactcctgagtctgccccatcgatctttacacaatcttggcttggtagagcacagactgtttcctctagcacatacccrttagacccgagttctgctccttccttctagacctctgcacattgacaataggtaatcaggcctttatttatcctgtacttccaagtccaaaacacattag

SEQ ID NO: 12144 - DNA, 201 bp, Homo sapiens
atggaatcaggaagttgagagcgggctgggcacagcagggccaccaccagccccacagcaccttggtgcaaaatagaaaaggacatctctggctgggcgcrgtggctcatgtctataatcccagcactttgggaggccgaggcaggtggatcacttgaggtcaggagttcaaagccagcccggccaacatggcgaaacgaa

SEQ ID NO: 12145 - DNA, 201 bp, Homo sapiens
ccccatctctattaaaaatataaaaattagccgggcatagtggcaggcgcctgtaatcccagctactcgggaagctgaggcaggagaatcgcttgaacccrggaggcggaggctgcagtgagccaagatcacgccattgcactccagcctgggcaacagagcgagactcagtctcaaaaaaaaaaaaaaaagtacctcaca

SEQ ID NO: 12146 - DNA, 201 bp, Homo sapiens
ttcatctatgaaatggagcagtactgcccacctgcttggtcatggtgtggtttttttattattttattttattttattttattttattttattttattttwtttttttgagagagagtctcgctctgtcacccaggctggagtgcagtggcgcgtgatctcggctcactgcaagctccgccttccgggttcacaccattct

SEQ ID NO: 12147 - DNA, 201 bp, Homo sapiens
tgaacccacagcgaaacagccgcctgacaggagaattcactgtggaacccgtgcccgagggtgcccagctctcttttggcaactttgcccaactcggccaygagtccttctactggcagctgccggagacataccagggagacaaggtgggccccagccaagcaccagggtcagccgtgactcagacatgagttcacctct

SEQ ID NO: 12148 - DNA, 201 bp, Homo sapiens
cggtgttgccacctgctgcctgttactgtccatctgagcactgagcccagcgaccctcatccccgcctcagtaccctcacatgcccccattatttctctcrcagtcctgatctcaacaggaccccattccgcaccttaacaccctcccgtgccccatcccccaccaaggcaccccggtgctcaggctgacgccccctcctt

SEQ ID NO: 12149 - DNA, 201 bp, Homo sapiens
ggctgcctgccctgcttctgtatgggcatcacccagcagtgcgccagctctgcctacacacgccacctggtgagagcctgtgctgcccagccccaggcggwgttgccacctgctgcctgttactgtccatctgagcactgagcccagcgaccctcatccccgcctcagtaccctcacatgcccccattatttctctcgcag

SEQ ID NO: 12150 - DNA, 201 bp, Homo sapiens
accagagacagggagccaattcagaaacacagattactccggcccaaagcacagcatagagatgcctcccagaggtgaacagtgtggactgggagagggcygtgggtgggaggacagactgagcagaagtggggaaggaggggcgccggcctgtgatgttccagggtcacccctgggaggacactggagggaggggttctg

SEQ ID NO: 12151 - DNA, 201 bp, Homo sapiens
acatagggctggcagggcagggatgccctggggtctgaaatgtagacacatgtgatctagagatgatgtcatgcccaggggtggggagtacggggagaccrtgttgctagcatcccccagtgatggccgaggaacccaactggggtccccatagagggacaggatcacccagggcccttcctcaccatggccaccctctgc

SEQ ID NO: 12152 - DNA, 201 bp, Homo sapiens
ccacccctgctgagcccagccctctgcccctttggccccaggccttaggagcccggtcatctccatcgacccgcccagcagcaccgtgcagcagggccagratgccagcttcaagtgcctcatccatgacggggcagcccccatcagcctcgagtggaagacccggaaccaggagctggagggtgagccaggctggtgggc

SEQ ID NO: 12153 - DNA, 201 bp, Homo sapiens
gccagcggcccaggccctgagcaagaagcctccttcacagtcaccgtcccgcccagtgaggggtcttcctaccgtgagtatggcagatgccatgggcaagrggggaagggagggccctgaagctaagcccacccctgctgagcccagccctctgcccctttggccccaggccttaggagcccggtcatctccatcgacccg

SEQ ID NO: 12154 - DNA, 201 bp, Homo sapiens
cgaagcctctgtcatccctggtgagtgactcccagtgacatggaaagctggaggaggcagagaggcctccggggtggtgagatccaagggacccctcttgmtgacagggcagaaggcccacaccggagctggctgcagggccctgcccaggccgactccacctgtcagagtaaccaccgccttcccgtcacactttgcttt

SEQ ID NO: 12155 - DNA, 201 bp, Homo sapiens
ggatctgaactgcgtggtgcccgggcaggcccacgcccaggtcacgtggcacaagcgtgggggcagcctccctgcccggcaccaggtatggcagccccccrggaccaccttgctggaggggctggatgggactgttccagccccctcccaacccaccccatttgcacacagacccacggctcgctgctgcggctgcaccag

SEQ ID NO: 12156 - DNA, 201 bp, Homo sapiens
gggcaggcccacgcccaggtcacgtggcacaagcgtgggggcagcctccctgcccggcaccaggtatggcagccccccgggaccaccttgctggaggggcyggatgggactgttccagccccctcccaacccaccccatttgcacacagacccacggctcgctgctgcggctgcaccaggtgaccccggccgactcaggcg

SEQ ID NO: 12157 - DNA, 201 bp, Homo sapiens
actctggccccagcctcagatgccagcccaccgccggtcaagattgagtcctcatcgccttctgtgacagaagggcaaacactcgacctcaactgtgtggkggcagggtcagcccatgcccaggtcacctggtacaggcgagggggtagcctgcctccccacacccaggtatgtgggccctgagcctatggcaggggaccc

SEQ ID NO: 12158 - DNA, 201 bp, Homo sapiens
gtgaatctctttggaggagaatctgtaacccacatgtttttatgaggatgcacgtattttctttttcttttctttttcttttttttttcaagacagtctcrctccgtcacccaggctggagtgcagtggcgccatctgggctcactgcaagctccacctcctgggttcacgccattctcctgcctcagcctcccgagtagc

SEQ ID NO: 12159 - DNA, 201 bp, Homo sapiens
aactcctgagctcaagcaacccacccgcctcggcctcccagagtgctgggattacaggcgtgagccaccacacctggcctttttactttttttttttttttgagacagggtctcagtctcgttctgcctcctgggttcaagtgaatctcatgcctcagcctcccgagtagctgggactacagacatgagccactgtgcctg

SEQ ID NO: 12160 - DNA, 201 bp, Homo sapiens
cattttgggaggctgaggcaggacaatcgcttgagtccaggagtttgagaccagcctgagcaacatagggagaccccatctctatttaaaaaaaaaaaaaaaagtgcctgagcaacatagggcgaccccatctctatttaaaaaaaaaaaggtgaaaaaaaaaataaaaaatttttaaaaatcactgtgctgtacacacct

SEQ ID NO: 12161 - DNA, 201 bp, Homo sapiens
aggcgaacacctgaggtcaggagttcgagaccagcctggccaacatggtgaaaccctgtctctactaaaataacaaaaattagctgggcgtggtggcgggygcctgtaatctcagctacttaggagactgaggctgtagaattgcttgaacctgggaggcggaggttgcagtgagcctagatcatgccacttcactccagc

SEQ ID NO: 12162 - DNA, 201 bp, Homo sapiens
gaaccctctgtgtgcatgtgggcggcctggagttaacccttgggtgccagcctggagagggggggcatgcatctttcttcctaattagtgtgggcctttctgactaccatgtccgtgggtagaggaccctgcccatggctctagctccaggactttgggaggtcttagctcgcctgctccctccatttcatcagaaccgca

SEQ ID NO: 12163 - DNA, 201 bp, Homo sapiens
tgtgacccccaaggcagcgtcagcagccagtgtgatgctgctggtcagtgccagtgcaaggtcagtccgaatccctgtccctgcggggcctgctctgcccygctgcccagaccctgcggggaaatcaggcagcatctggtggaagccgagacctgggcatggggggcagggcatgggggacagggcaggggctgcccgggg

SEQ ID NO: 12164 - DNA, 201 bp, Homo sapiens
agagtgagtaggattggggaggtcattggggtcgggttacccagagtccctagggcggagctaggacagaagcctttactcccctttggctttgcctgtcygagcctgtttcttcatctgtaaaatggggataggagaaggccccaccacctccgagggctgtcgtgagagtgttgagtactcacatcagaaatcagagct

SEQ ID NO: 12165 - DNA, 201 bp, Homo sapiens
gctaagctgggagcattgcttgagcgcatgaattctaggctgtggtgagccgtgatcacacctgtgaatacaaccaagaccctttgtctaaaaaaaaaaaagaagtggacacgtgagtgagtaaatgcataagacctgacaagtgagtgtgtttgtgagtgaatgcatgaaaaagtgaatgaggagtgaatgaatgctgga

SEQ ID NO: 12166 - DNA, 201 bp, Homo sapiens
gtcattggggtcgggttacccagagtccctagggcggagctaggacagaagcctttactcccctttggctttgcctgtccgagcctgtttcttcatctgtmaaatggggataggagaaggccccaccacctccgagggctgtcgtgagagtgttgagtactcacatcagaaatcagagctcccgctcagtggtgagcagag

SEQ ID NO: 12167 - DNA, 201 bp, Homo sapiens
gctgctccaggcctcaatggaacgggaagggaaagaagccatgtcccaaatggcctctggtcctagtatctgggccccaggggaagggctgagggcatcarggtggcatctcagctcactgacctctcccctgtgccccagccccaggtggagccccacccatccgcatcgagccctcctcctcccgagtggcagaagggc

SEQ ID NO: 12168 - DNA, 201 bp, Homo sapiens
agggcggagctaggacagaagcctttactcccctttggctttgcctgtccgagcctgtttcttcatctgtaaaatggggataggagaaggccccaccaccyccgagggctgtcgtgagagtgttgagtactcacatcagaaatcagagctcccgctcagtggtgagcagagtggagggaagaggggtgctgggtggcgggt

SEQ ID NO: 12169 - DNA, 201 bp, Homo sapiens
tgtgccaccacgcctggctaatttttgtatgtttagtagaaacagggtttcaccatgttggccaggctggtctcaagctcctgatctcaagtgatgcgcckgcctcagcctcccaaagtgctgggattacaggcgtgagccaccacgcccagcccaattgcaaagcattctatcagttgttttcaactccctgatgtctta

SEQ ID NO: 12170 - DNA, 201 bp, Homo sapiens
ggaagagagatcaaagttttctcgaaatcaaatttccactagaactttcccacctttctggattgctgcccctcaagatgggtgtatcaggcaggcccagrctgcagccctcagcctcccccttgccacccacaggtgtgaatgtgacaatgcctgcgcagcccggcacgccacccctctcctccacgcagctgcagatcg

SEQ ID NO: 12171 - DNA, 201 bp, Homo sapiens
caggcccatgcccaggtcacgtggtacaagcgcgggggcagcctccccgcccggcaccaggtacaggggccaggatggggaggattccaggtcaggcaagrttagacctgcagttgctttctgtacccaaacctcatgcaaacaccagcctgcttggggaccccaggggataaaatacgtttgcgggacgagttcaccagc

SEQ ID NO: 12172 - DNA, 201 bp, Homo sapiens
tgagggttaagtgagttagtgcatgtaatgtgcttagagcgtgcctggcatgccagaagtgctttataagtgttaactattattatcatttttttttttttgagagggagtctcgctctgtcacccaggctggagtgcagtggcgcgatctcaactcactgcaacttccgccttccaggttcaagcgattctcctgtctca

SEQ ID NO: 12173 - DNA, 201 bp, Homo sapiens
ggcagcctccccgcccggcaccaggtacaggggccaggatggggaggattccaggtcaggcaaggttagacctgcagttgctttctgtacccaaacctcaygcaaacaccagcctgcttggggaccccaggggataaaatacgtttgcgggacgagttcaccagcctgcaaatcaggagacctgggtttttctcttggctc

SEQ ID NO: 12174 - DNA, 201 bp, Homo sapiens
tgttactttctgctatctgcgactccatgagctagacacacccaggccggagggattggggaagtgggcccaggggcacaggctggcagcaccaagacacragaaggaccaggtcaatcctctctcaccctcccccatgcaacctcacagacaacgtccacatcagtcccaatggctccatcatcaccatcgtgggcaccc

SEQ ID NO: 12175 - DNA, 201 bp, Homo sapiens
cccttcttaggttatatcagccactctcaagccaccgcgcccccaggatcaactggagctggtcttcactgccaccaccttcagcccctgccttgatcccyggagcctggcctctctcacccaccccctgtgcccacagctccaggactggcccagcccatctacatcgaggcctcctcttcacacgtgactgaagggcag

SEQ ID NO: 12176 - DNA, 201 bp, Homo sapiens
atctgtgcatggcagtcccagggtgtgggtaccagaggcctgggcatctgaaggctcccagctcaccctccccgctctcaccccaccttggccaggtccayggcccactgctgaggctgaaccaggtgtccccggctgactctggcgagtactcgtgccaagtgaccggaagctcaggcaccctggaggcatctgtcctgg

SEQ ID NO: 12177 - DNA, 201 bp, Homo sapiens
gtctgcggctcccccaggtctcaccagctgattctggagaatatgtgtgccgtgtggagaatggatcgggccccaaggaggcctccattactgtgtctgtrctccacggcacccattctggccccagctacaccccaggtgaggagccaggtgtggctgggccggggctgagccctaggagctcccaaggaagatgcctgt

SEQ ID NO: 12178 - DNA, 201 bp, Homo sapiens
gccatcccacaccactggccctgggccatttccacaccgtgaccctgctgcgcagcctcacccagggctccctgattgtgggtgacctggccccggtcaaygggacctcccaggtgagacccaaccccatactgctacttccagccctcatcccgcccttgcccagcctctgttgccattcctgacttccccacctcccca

SEQ ID NO: 12179 - DNA, 201 bp, Homo sapiens
aatgggcctccagcttgtggttagaggctggggagggaagaagccatattcggctggccatgtggaggcagaagggtgtggccctagtcccagaaaggccrcctgtcggccgtccccactagggcctggtcacagcccagagccttctgccccagggctacaggttacagcccaagagttcaggcctctgagcagccgctc

SEQ ID NO: 12180 - DNA, 201 bp, Homo sapiens
ggggcaggacgccccctaccatgggcagagaggcaggtattgagctctgtggagacagaacttgaagccaggggaggggagaacccaccagccagggctcrggcttccatctcggactgaactccgctgggggcaggcgagtgccccaggagtgggaggaaacctgggtgcagaaatgaggaagctgtgtttgtggggccc

SEQ ID NO: 12181 - DNA, 201 bp, Homo sapiens
atgacgcctcatacatgtgctctttcttttcttttcttttctttttttttttttttttttgagatggagtctcgctcccatcgcgtaggctggattgcagwggcgcgatctcggctcactgcaacctccacctcccggtttcaaacaattctccttcctcagcctcctgagtagctgggattacagctgtgtgccaccacg

SEQ ID NO: 12182 - DNA, 201 bp, Homo sapiens
ttactattcagatggcaatgacgcctcatacatgtgctctttcttttcttttcttttctttttttttttttttttttgagatggagtctcgctcccatcgygtaggctggattgcagaggcgcgatctcggctcactgcaacctccacctcccggtttcaaacaattctccttcctcagcctcctgagtagctgggattac

SEQ ID NO: 12183 - DNA, 201 bp, Homo sapiens
gcctaagtgcttgttaagtgggaattactattcagatggcaatgacgcctcatacatgtgctctttcttttcttttcttttctttttttttttttttttttgagatggagtctcgctcccatcgcgtaggctggattgcagaggcgcgatctcggctcactgcaacctccacctcccggtttcaaacaattctccttcctc

SEQ ID NO: 12184 - DNA, 201 bp, Homo sapiens
ggatgggcaagctgagtaactttgtgcaagtcatttcacatccctgagcctctgtttcctcatgtgaaggatgaaggtatcacctacctctcaaggtccttaggggagttaaatgaggtggtgtcgaatggaaagcagaacagtgcgtgaaacactccataaatagaagcagcaattatttcaatcaagtcgctgtatttc

SEQ ID NO: 12185 - DNA, 201 bp, Homo sapiens
aatcccagcactttgggaggctgaggtgggtggatcacttgaggtcaggagttcaagaccagcctggccaacatggtgaaaccccatctctactaaaaatrcaaaaattagccaggcgtggtggcgggcgcctataatcccagctactcaggaggctgaggcaggagaatcacttgaacctgggaagcagggttgcagtga

SEQ ID NO: 12186 - DNA, 201 bp, Homo sapiens
acatggtgaaaccccatttctactaaaaatacaaaaattagccaggcgtggtggcgtacgcctgtaatcccagctactcaggaggctgaggcaggaaaatygcttgaacccgggaggtggaggttacagtaggccaagaccgtgcccctgcactccagcctgggcaacagagcaagactcagtctcagaaaaaaaaaacaa

SEQ ID NO: 12187 - DNA, 201 bp, Homo sapiens
aatctagccaggcgtggtggcttgcacctgtagtcccagctacttgagaggctgaggcaggaggatctgttgagcctaggaggttgaggctgcagtgagcyatgatcacaccattgcactccagcctggacaacagagtgagaccccatccctaaaaacaaaacaaaacttagttacttcccaaagttgtcccccagtata

SEQ ID NO: 12188 - DNA, 201 bp, Homo sapiens
gccgctgtggcggtcgcagtgacaccaggtgagagtgtaagccaggccgaggcccagccaggttcctagagaagttaaggttggagaggaggccgggtgcrggggctcacgcctgtaaccccagcactttgggaggccaagacgggaggattgcttgaggcaaagagttcgagaccagcttgggcaacgtagcaagaccct

SEQ ID NO: 12189 - DNA, 201 bp, Homo sapiens
ggagggaggattgcttgtggccaggagttcaagaccagcctgggtaacacagagagaccccatctctacaaataattaaaaacaaaaaatctagccaggcrtggtggcttgcacctgtagtcccagctacttgagaggctgaggcaggaggatctgttgagcctaggaggttgaggctgcagtgagctatgatcacaccat

SEQ ID NO: 12190 - DNA, 201 bp, Homo sapiens
aatgacttgtataaaacttagttacctggccaggcatggtggcttatgcctgtaatccaagtactttgggaggctggggagggaggattgcttgtggccakgagttcaagaccagcctgggtaacacagagagaccccatctctacaaataattaaaaacaaaaaatctagccaggcgtggtggcttgcacctgtagtccc

SEQ ID NO: 12191 - DNA, 201 bp, Homo sapiens
gaatggatcgggccccaaggaggcctccattactgtgtctgtgctccacggcacccattctggccccagctacaccccaggtgaggagccaggtgtggctrggccggggctgagccctaggagctcccaaggaagatgcctgtggcttcttcagtgggaccaggacaggggggcattccaggcaggctttgacccttcagc

SEQ ID NO: 12192 - DNA, 201 bp, Homo sapiens
cgggcatcctgacagttaaataggagggggaggctggagaggcagcgaccacatcaggtggtatcctgtatgtcctgtcccgcaagaagcctgatgcttgwtagtgcaagattaaggataatcttcaggctcttctctgtggtcctgggtggtgtgtctgggcgcgtgtccatgttcctgctgtgagcttgtccagcttct

SEQ ID NO: 12193 - DNA, 201 bp, Homo sapiens
ggtagcctgcctccccacacccaggtatgtgggccctgagcctatggcaggggacccagggtgcaggggctgtggcggaggcggggcctgtacgctgggcsggggaggcggcacactgccccacacgttccaccagcagaagccaggcctcatctccctccctcccagtttctagcatgggatggctcggagcagagccag

SEQ ID NO: 12194 - DNA, 201 bp, Homo sapiens
ctaatattggccctgcacctgcctctcccttttatgccctatctgtccccctggccagccgttgtccagctgcctctggggcagctgacccatctcacccrcggcaggcccggtcagagcgcacagacatcgcgacactgctcatcccagccatcacgactgctgacgccggcttctacctctgcgtggccaccagccctg

SEQ ID NO: 12195 - DNA, 201 bp, Homo sapiens
acgagttggcccgtggcatgctggagccagtgcagcggccggacgtggtcctcgtgggtgccgggtaccgcctcctctcccgaggccacacacccacccamcctggtgctctgaaccagcgccaggtccagttctctgaggtgggtggcgcctgagcccttagggctgggagcaaagggggatttaggctgggtaggcact

SEQ ID NO: 12196 - DNA, 201 bp, Homo sapiens
tctcgcccatctcggtttccctgtgcctagctcagtgcctggcacacagtaagtctcaggtaggcagagtgagggaggagctggaagactataggcacctyataggcacgaggtgtcaagtgtgcccacagctgcccgtgctgatccaccctgttgtgccaggtggactcctatggcggctccctgcgttacaacgtgcgc

SEQ ID NO: 12197 - DNA, 201 bp, Homo sapiens
gacagaagcctttactcccctttggctttgcctgtccgagcctgtttcttcatctgtaaaatggggataggagaaggccccaccacctccgagggctgtcrtgagagtgttgagtactcacatcagaaatcagagctcccgctcagtggtgagcagagtggagggaagaggggtgctgggtggcgggtttggggctccagc

SEQ ID NO: 12198 - DNA, 201 bp, Homo sapiens
tttcttcatctgtaaaatggggataggagaaggccccaccacctccgagggctgtcgtgagagtgttgagtactcacatcagaaatcagagctcccgctcwgtggtgagcagagtggagggaagaggggtgctgggtggcgggtttggggctccagccatggctttcttccacctcaggagacagccaggtgccagggccc

SEQ ID NO: 12199 - DNA, 201 bp, Homo sapiens
gggctcagtgcctggtgagtagctctcagggagggcagggctggggacccagggtgggaggccccccactcttgcaacggcaggatcaggaggccaagccrcagactgcacctgccttgagaccaggagccccatctcatctcacctcctagccggctattgaccctttgccctctgtccccagcacttggggtcaccccc

SEQ ID NO: 12200 - DNA, 201 bp, Homo sapiens
ctgggtggcgggtttggggctccagccatggctttcttccacctcaggagacagccaggtgccagggcccataggctgcaactgtgacccccaaggcagcrtcagcagccagtgtgatgctgctggtcagtgccagtgcaaggtcagtccgaatccctgtccctgcggggcctgctctgccccgctgcccagaccctgcgg

SEQ ID NO: 12201 - DNA, 201 bp, Homo sapiens
gttccgcacctcaattaaagccaagcgtggtggtgcgcgcctgtagtcctagctactcaggaggctgaggcaggaggatcaccggagcccaggagtttgargctgcagtgagctaggatcatgccactgcactccagcctgggcgacagagcaaaaccctgcctctaaaacaagacaaacaaacaaaaacccttaattatt

SEQ ID NO: 12202 - DNA, 201 bp, Homo sapiens
accgccccggccagagacaaccatcatgcgacagccaccagtcacccacgctcctcagcccctgcttcccggttccgtcaggcccctgccctgtgggcccmaggaggccgcatgccgcaatgggcactgcatccccagagactacctctgcgacggacaggaggactgcgaggacggcagcgatgagctagactgtggtgc

SEQ ID NO: 12203 - DNA, 201 bp, Homo sapiens
ctgtgggagcccaggggagcggtctctaccccagccagggcagatcaggaagatcaggagacaatggctgagccaagtcctgaggaatgagtaggaactgrccgaggaaggctggcagagcctttcccagtcacacgcaggtaatccctgtgccaggccaactccctctgggagccaccccttcttgtccagccttcctct

SEQ ID NO: 12204 - DNA, 201 bp, Homo sapiens
atgtactttgggaggccaaagtgagaggattgcttgagcccaggagtttgagaccagcctgggcaacatagcaagaccccatctctatcaaaagtcaaaamattagctgggcatggtggcatgcacctgtaatcccagctactcaggaggctgcagtgggaggatagcttgagccttagagtttgaggctgcagtgagctg

SEQ ID NO: 12205 - DNA, 201 bp, Homo sapiens
ttttcaccatgttggccagcctggtcttgaactcctgacctcaagtgatctgccggcctcggcctcccaaagtgctgggattacaggcgtgagccactgcrcccagcccgggggctggttcttgaaatagaggtggcctcaccttctgccccagtgctcaggcaccagctgcagggtgggagatgggaggtgttcacccag

SEQ ID NO: 12206 - DNA, 201 bp, Homo sapiens
gctgcggctgcaccatgtgtccccggccgactcgggtgaatacgtgtgccgggtgatgggcagctctggccccctggaggcctcagtcctggtcaccatcraagcctctggctcaagtgctgtccacgtccccggtgagggtccctgcagtgggacgggaaggccgggggagggaggaagggacagagaccagggggcaga

SEQ ID NO: 12207 - DNA, 201 bp, Homo sapiens
tgtcagtgccggggagccccgctcctctgctcgttggacccggatcagcagcacccctgccaagttggagcagcggacatatgggctcatggacagccacrcggtgctgcaggtgaagccggggctgcctctctgggtctgaggcccagtccatggcccagccttgagcgggtgcttggaggagatagtagtggatgggca

SEQ ID NO: 12208 - DNA, 201 bp, Homo sapiens
cgcagcccggcacgccacccctctcctccacgcagctgcagatcgacccatccctgcacgagttccagctagtcgacctgtcccgccgcttcctcgtccaygactccttctgggctctgcctgaacagttcctgggcaacaaggtgaggggcctgggctgccaccctgggtggggaaagaattcctgtgggctctgctcct

SEQ ID NO: 12209 - DNA, 201 bp, Homo sapiens
caggactctgtctgcagggggcggtgggcccagagtccaagtgagcccagagaggacccaggtccacgcaggccgcaccgtcaggctgtactgcagggctkcaggcgtgcctagcgccaccatcacctggaggaaggaagggggcagcctcccaccacaggtgaggagatgggcccacccaggaggaggaggcccacaggc

SEQ ID NO: 12210 - DNA, 201 bp, Homo sapiens
aaggaagggggcagcctcccaccacaggtgaggagatgggcccacccaggaggaggaggcccacaggctctgcagagagtcccagccaccttccctccccsttcacgccccaccccacctcctcctctgtggctcccttcacctccaagatggtggtctcctgcccctgcatcccagcagggagcccctgccgtcctcttg

SEQ ID NO: 12211 - DNA, 201 bp, Homo sapiens
actctgagcaggcttggtgggtgctgaccccacgtctactcgtcagggggccccggcggccagctccctgcgaaggcacaaatccacggcggcatcctgcrcctgccagctgtcgagcccacggatcaggcccagtacttgtgccgagcccacagcagcgctgggcagcaggtggccagggctgtgctccacgtgcatggt

SEQ ID NO: 12212 - DNA, 201 bp, Homo sapiens; identical to SEQ ID NO: 2040

SEQ ID NO: 12213 - DNA, 201 bp, Homo sapiens
aaacccctgcttctttctgaaactcctgggttcctacctgccccaattcactggctgtgcggtccagggcgcgtccctgctcttctctgcccagtttcccygtaacatgggcgagtcaggctcttcttttcttccagtgcatgaggccattgaattcaatatggggccctcagcccagccctggggttctgcttcccttca

SEQ ID NO: 12214 - DNA, 201 bp, Homo sapiens
cagagccagcactcctattcacgctgggtcttgtcacgcccagggtctctggcatcagcatggacgtggctgtgcccgaggaaaccggccaggaccccgcrctggaagtggaacagtgctcctgcccacccgggtaccgtgggccgtcctgccaggtgagtcctgggccccacgccagcccagccagccccctccatggtg

SEQ ID NO: 12215 - DNA, 201 bp, Homo sapiens
accaggaagtttgtggaaaggggcctgacccagttccactgcagggagggccgcagaggttccatccaagtcgacggtgaggagctggtcagcggccggtscccaggtcccaacgtggcagtcaacgccaagggcagcgtctacatcggtaagtctggggctccttctcagggcaggggcaggaacggcactcccttaggg

SEQ ID NO: 12216 - DNA, 201 bp, Homo sapiens
tgaacgcccggggcatggtgtttggcattcctgacggtgtccttgagctcgtcccacaacgaggtactgccggagggcaggtgtcaccgggtgtgggggcrgagccgggctgcccaccacagccggctgcagcccccgcccatgccgcccagcaggcccctgccctgacggccacttctacctggagcacagcgccgcctg

SEQ ID NO: 12217 - DNA, 201 bp, Homo sapiens
tacaggcgtgagccactgcacccagcccgggggctggttcttgaaatagaggtggcctcaccttctgccccagtgctcaggcaccagctgcagggtgggaratgggaggtgttcacccagacctgcccttggtctcgaagaacgaagcggggtggggtcaggctgaagggcctgtgcccttcccaggccctagtagaaagg

SEQ ID NO: 12218 - DNA, 201 bp, Homo sapiens
aggaagatcacgaggtcaggagtttgagaccagcctgaccaacataatgaaaccccatctctactgaaaatccacaaattagccgggcgtggtggtgcgcrcctgtaatcccagctactcgggaggctgaggcaggagaatcgcctgaacccaggaggcggaggttgcagtgagccgagatcgtgccgttgcactccagcc

SEQ ID NO: 12219 - DNA, 201 bp, Homo sapiens; identical to SEQ ID NO: 2049

SEQ ID NO: 12220 - DNA, 201 bp, Homo sapiens
ggctccatctaagcggtgcagtacagcacagccacttacagactgtgtgacccttttgtgcctcactttccctgtctgtaaaacggagagtcttaacaatrtctcccatacaggctggtctggggccaggctccctagaaagaagcctgagacggggattggggtgcatgtgattcacaaggagagggacgcaggaggggg

SEQ ID NO: 12221 - DNA, 201 bp, Homo sapiens
tacaatgagtgtgtggccctggagtatcgctgtgaccggcggcccgactgcagggacatgtctgatgagctcaattgtggtgaggggatgtccggggccaygagtggtttgggtgccaggggagggccagggtcctacacctgggtcttggagcccatcaaggactatgagggtttggtgcaggcagaggatgggggcata

SEQ ID NO: 12222 - DNA, 201 bp, Homo sapiens
gaatggtgtgaaccccggagacggagtttgcagtgagccgagatcgcaccactgcactcgagcctgggtgacagagcgagaatctgtctcaaaaaaaaaaatggacgtttgctgaatgaatttctctggagaatagagaccttacctctctcatcacccaacctgctaacactcccttacactcccctttctcagttcacc

SEQ ID NO: 12223 - DNA, 201 bp, Homo sapiens
aggggaggggcaggactctgagcaggcttggtgggtgctgaccccacgtctactcgtcagggggccccggcggccagctccctgcgaaggcacaaatccayggcggcatcctgcgcctgccagctgtcgagcccacggatcaggcccagtacttgtgccgagcccacagcagcgctgggcagcaggtggccagggctgtgc

SEQ ID NO: 12224 - DNA, 201 bp, Homo sapiens
catccatccgccacagctcacagtgcagcccgggcaactggcggagttccgctgcagcgccacagggagccccacgcccaccctcgagtggacaggtgagrccgtgatgggaatgacattcaaggcctgactctcctgggtgtgggaggggaggggcaggactctgagcaggcttggtgggtgctgaccccacgtctactc

SEQ ID NO: 12225 - DNA, 201 bp, Homo sapiens
atcaaggtacccatggccctaggctcctcagccccaagagccatcccagtgggaggggaggcaggggcctgtccctgccctagtgggatgctgtccttgtrcatggggctggatgtgagaaagagtgtatctgcaccaacaagctcttgtctcctccccaccaggctccgagctccacttccccagcgtccagccctcgga

SEQ ID NO: 12226 - DNA, 201 bp, Homo sapiens
tttgggaggccaaggcaggaagatcacgaggtcaggagtttgagaccagcctgaccaacataatgaaaccccatctctactgaaaatccacaaattagcckggcgtggtggtgcgcgcctgtaatcccagctactcgggaggctgaggcaggagaatcgcctgaacccaggaggcggaggttgcagtgagccgagatcgtg

SEQ ID NO: 12227 - DNA, 201 bp, Homo sapiens
atactctgccagtcagaggtgaacctgtctttgctactccagaacagggtctggtggaaaggtggtgatgatggtggtggcgatggtgtgatggtgttgtsgggggcaggggctcaggggtgggctctgggacagcctgcccaaatgtgttcttgagcagcacgggcatccggtggcacccacgctctggggttggggttg

SEQ ID NO: 12228 - DNA, 201 bp, Homo sapiens
gataactgtcccctcgctgctctgacagacccatggctcccagctgcggctccacctcgtctcccctgccgactcaggcgagtatgtgtgtcgtgcagccrgcggcccaggccctgagcaagaagcctccttcacagtcaccgtcccgcccagtgaggggtcttcctaccgtgagtatggcagatgccatgggcaaggggg

SEQ ID NO: 12229 - DNA, 201 bp, Homo sapiens
cgtgaccctgctgcgcagcctcacccagggctccctgattgtgggtgacctggccccggtcaatgggacctcccaggtgagacccaaccccatactgctamttccagccctcatcccgcccttgcccagcctctgttgccattcctgacttccccacctccccagggcaagttccagggcctggatctgaacgaggaactc

SEQ ID NO: 12230 - DNA, 201 bp, Homo sapiens
gcagcggcccgatgggcagccagccacacgggagcacctgctgatggcactggcaggcatcgacaccctcctgatccgagcatcctacgcccagcagcccrctgagagcaggtgtctggagccagggcaggaggaccagcatgggcttggggaggggctccatctaagcggtgcagtacagcacagccacttacagactgt

SEQ ID NO: 12231 - DNA, 201 bp, Homo sapiens
gggcccgaattcaggcctccgcaagctcctgtctaaccctggtcccaggtgacctcctatggaggagagctgcgcttcacagtgacccagaggtcccagcygggctccacacccctgcacgggcagccgttggtggtgctgcaaggtaacaacatcatcctagagcaccatgtggcccaggagcccagccccggccagccc

SEQ ID NO: 12232 - DNA, 201 bp, Homo sapiens
actgtgtgtggggtctgttttagagatgggggaggccactgccgcatgtcccatgccccacgtgtgctgtggatgtgtctagtgtgtgctgcttgccctckttgtgcctgccagaaaccgagctgcctgacacagggccctggagcccactccagccacacagcacctacagcttcccgcacctgcctcctgccgcctctg

SEQ ID NO: 12233 - DNA, 201 bp, Homo sapiens
ggaccaagcgccagtcccaggccacggcccccatcccagccctttctcctcctcccagttgcatggggcctctgaggagcctggtcacttcagcctgaccmacgccgcaagcacccacaccaccaacgagggcatcttctcccccacgcccggggaactgggattctcctccttccacagactcttatctggaccctactt

SEQ ID NO: 12234 - DNA, 201 bp, Homo sapiens
gctgtggcctgcatgtgtgtggtgtggtggttgcatgcgtgtggcatgtcaactgtgtgtggggtctgttttagagatgggggaggccactgccgcatgtsccatgccccacgtgtgctgtggatgtgtctagtgtgtgctgcttgccctcgttgtgcctgccagaaaccgagctgcctgacacagggccctggagcccac

SEQ ID NO: 12235 - DNA, 201 bp, Homo sapiens
ctggagtatcgctgtgaccggcggcccgactgcagggacatgtctgatgagctcaattgtggtgaggggatgtccggggccacgagtggtttgggtgccargggagggccagggtcctacacctgggtcttggagcccatcaaggactatgagggtttggtgcaggcagaggatgggggcataggaagggtgatgacagag

SEQ ID NO: 12236 - DNA, 201 bp, Homo sapiens
cagggttgcaggttataggaacaggggtctcctgagggctccctctgactcacccccattctggccagacccacggctccctgctgagactctaccaagcrtcccccgccgactcgggcgagtacgtgtgccgagtgttgggcagctccgtgcctctagaggcctctgtcctggtcaccattgagcctgcgggctcagtgc

SEQ ID NO: 12237 - DNA, 201 bp, Homo sapiens
ccgtgatgggaatgacattcaaggcctgactctcctgggtgtgggaggggaggggcaggactctgagcaggcttggtgggtgctgaccccacgtctactcrtcagggggccccggcggccagctccctgcgaaggcacaaatccacggcggcatcctgcgcctgccagctgtcgagcccacggatcaggcccagtacttgt

SEQ ID NO: 12238 - DNA, 201 bp, Homo sapiens
gcacctgctctgtggatgcgcggcttccgctcctgcatggctgtgacttctctgtccctgtctgtgtctctctcaagctccatctccctgaggaagaacaytggtcaccagccactagagaggcctagcagggcccagcccttgtcccgggccacttccagcctctggccactccatagagggcctgtcagtgggagcaca

SEQ ID NO: 12239 - DNA, 201 bp, Homo sapiens
gatcctccttcgattttccagtttatttccgagccctggtgaatttcactcgctccatcgagtacagccctcagctggaggatgcaggctccagagagttycgagaggtgtccgaggctgtggtagacacggtgaggtgaagggggtttgggaagctcgcgggtgtggcggggcaggaccgaggatggggtgaaggcctct

SEQ ID NO: 12240 - DNA, 201 bp, Homo sapiens
ggctggtcttgaactcctgacctgaggtgatccacccgccttggcctcccaaagtgctgggattacaggcgtgagccaccgcgcccagccacatgtgctcyttcagtggctcccctgggtcttgggttcttatctggactgagggtggattcggccagagctccaggcagcctctcccatgggctgtccttcagctccaac

SEQ ID NO: 12241 - DNA, 201 bp, Homo sapiens
catacatcgatgcctcccgcaggtcagccccagctccgggtcggggggggtttggctggggacagtgcaacaggccagagaatattctgggcagggaggcrggagacttggattcagatctctacctgatcactaagttatcccatgctcctggacctctctaggcctctgtttccttttctgtataatgggccccctgac

SEQ ID NO: 12242 - DNA, 201 bp, Homo sapiens
ggcttctttggggacgccatgaaggccacggccacttcctgccggccctgcccttgcccatacatcgatgcctcccgcaggtcagccccagctccgggtcrgggggggtttggctggggacagtgcaacaggccagagaatattctgggcagggaggcgggagacttggattcagatctctacctgatcactaagttatcc

SEQ ID NO: 12243 - DNA, 201 bp, Homo sapiens
accagctcttcatggagccgtgcccaggtacctctgcaaggtgggcgggcaggaccgccaagccctgggccggatggaccaagcgccagtcccaggccacrgcccccatcccagccctttctcctcctcccagttgcatggggcctctgaggagcctggtcacttcagcctgaccaacgccgcaagcacccacaccaccaa

SEQ ID NO: 12244 - DNA, 201 bp, Homo sapiens; identical to SEQ ID NO: 2258

SEQ ID NO: 12245 - DNA, 201 bp, Homo sapiens
cagccacatgtgctctttcagtggctcccctgggtcttgggttcttatctggactgagggtggattcggccagagctccaggcagcctctcccatgggctstccttcagctccaactctgtgcctgcagaacaatgtggtggggcgcttgtgcaatgaatgtgctgacggctctttccacctgagtacccgaaaccccgat

SEQ ID NO: 12246 - DNA, 201 bp, Homo sapiens
gtgccaggtggactcctatggcggctccctgcgttacaacgtgcgctacgagttggcccgtggcatgctggagccagtgcagcggccggacgtggtcctcrtgggtgccgggtaccgcctcctctcccgaggccacacacccacccaacctggtgctctgaaccagcgccaggtccagttctctgaggtgggtggcgcctg

SEQ ID NO: 12247 - DNA, 201 bp, Homo sapiens
gcaggaagggggctcctgggtggggtcatggaagtgctgatggcggccccctctctcccctagctgtgcccccggatacgagggcaaccccatccagcccrgcgggaagtgcaggcccgtcagtgagtatggctgccaccatcccctgacacccacctcccaacccaacctgggctgcacaccaggcaccctccctccctg

SEQ ID NO: 12248 - DNA, 201 bp, Homo sapiens
ctgtgcttgtgttggacacagtaattctcatgataggtcatgtgtgttgagctctcactatgtgctaggcagcatcctttacaaatcacaaatcacaactrtgtgagacaggtcctgctactgccccatttcataaataaggcaagaggggcttggtaacttacccaaagccccgcagctgggaggtgggaatgccgggat

SEQ ID NO: 12249 - DNA, 201 bp, Homo sapiens
cccactgtatactaggtgcccagaacagtgcctgacacccagtaggtactcaacaaatacttgttgttgctgattacatctcttttttgcttatagacgamctgggcagtggggacctgggcagcggggacttccagatgggtaagttgctgcaggcctcctgcaggtctccctcctgtcccccagggaagccccagagcc

SEQ ID NO: 12250 - DNA, 201 bp, Homo sapiens
ccatctgagcactgagcccagcgaccctcatccccgcctcagtaccctcacatgcccccattatttctctcgcagtcctgatctcaacaggaccccattcygcaccttaacaccctcccgtgccccatcccccaccaaggcaccccggtgctcaggctgacgccccctcctttttcccctgccagatctccacccactttg

SEQ ID NO: 12251 - DNA, 201 bp, Homo sapiens
gacacacatcctagcctgcggttcaccttcagccccctggccccctgccccagccaggccagagtcttcccacaaaacccctgcttctttctgaaactccygggttcctacctgccccaattcactggctgtgcggtccagggcgcgtccctgctcttctctgcccagtttccccgtaacatgggcgagtcaggctcttct

SEQ ID NO: 12252 - DNA, 201 bp, Homo sapiens
catgtcccatgccccacgtgtgctgtggatgtgtctagtgtgtgctgcttgccctcgttgtgcctgccagaaaccgagctgcctgacacagggccctggakcccactccagccacacagcacctacagcttcccgcacctgcctcctgccgcctctgactccagtctgcttcctttccacctgcagtgccccagttcccaa

SEQ ID NO: 12253 - DNA, 201 bp, Homo sapiens
tatttacaaaccatgttaagttatctgaaagaaaagtacagcctgctctgaggtaatacgagaagtcccatcctcttggaagcctccctggctctccaggstgggccagtgccctcctctgcacccgcacagccctgatatgcttcctgcactctcattttcatgtagaatttccatgttgggttcccaactagtaagtcc

SEQ ID NO: 12254 - DNA, 201 bp, Homo sapiens
tttgtatttgttagtagagatggggtttcaccgtgtcagccagttggccttgaactcctgacctcaggtgatccacccgcctcggcctcccagagtgctgrgattacaggcatgagtcactgtgcccagcccattttgctttttataaacaccacggagatgagtgtccttgtaatgaaatctttgtgcccttccatgatt

SEQ ID NO: 12255 - DNA, 201 bp, Homo sapiens
catcctcacgtttgggccacactctccgggggttaaaacccagttcatgcccttgagggggcccaccagagacagggagccaattcagaaacacagattaytccggcccaaagcacagcatagagatgcctcccagaggtgaacagtgtggactgggagagggccgtgggtgggaggacagactgagcagaagtggggaag

SEQ ID NO: 12256 - DNA, 201 bp, Homo sapiens; identical to SEQ ID NO: 2036

SEQ ID NO: 12257 - DNA, 201 bp, Homo sapiens
aaatgaacaaagaggtaggcttgatgcagtttggtattgagatgaatgtctgccctggtggcagaggagagaaagcaaagtcctgtgggacagagctgggkagcctcagctgtccacgtgaaggtcctctgcagcagaagtaaggactccccagtcatgagcaacacagtgcccaagtccagtgggcttgtctgcaacaaa

SEQ ID NO: 12258 - DNA, 201 bp, Homo sapiens
gtgtttgataaatgctggttagctgagtgaacacacaaatgaacaaagaggtaggcttgatgcagtttggtattgagatgaatgtctgccctggtggcagrggagagaaagcaaagtcctgtgggacagagctggggagcctcagctgtccacgtgaaggtcctctgcagcagaagtaaggactccccagtcatgagcaac

SEQ ID NO: 12259 - DNA, 201 bp, Homo sapiens
cctgctgccctgtcctgcaattctcagacctatctctgtctcctgtcctggcatttccctgcgccccacagggggaggcgtactttgcgcggatgcgccgrgctcaccaggtaggcccaggacgtgcgtggtgtgaagttggtgtggtggggcgtggtgccttctcgggtgctcccagccctgcgtggggagatgcgcagt

SEQ ID NO: 12260 - DNA, 201 bp, Homo sapiens
ccttgtcccgggccacttccagcctctggccactccatagagggcctgtcagtgggagcacagaccgtcgagcccctcaggggaccacactgtgccaggcrttctggtagagaagggtgggcggggcattgctggcgcccagagatgccagccccactggtggtgcctttgacatgggtcttgtccatgtgagcaagatag

SEQ ID NO: 12261 - DNA, 201 bp, Homo sapiens
ctcagacacttgcttcctggacacggatggccaagccacatgtgacgcctgtgccccaggctacactggccgccgctgtgagaggtgagggagagccttgkgggctgcaggaagggggctcctgggtggggtcatggaagtgctgatggcggccccctctctcccctagctgtgcccccggatacgagggcaaccccatcc

SEQ ID NO: 12262 - DNA, 201 bp, Homo sapiens
tggcttctttggggacgccatgaaggccacggccacttcctgccggccctgcccttgcccatacatcgatgcctcccgcaggtcagccccagctccgggtyggggggggtttggctggggacagtgcaacaggccagagaatattctgggcagggaggcgggagacttggattcagatctctacctgatcactaagttatc

SEQ ID NO: 12263 - DNA, 201 bp, Homo sapiens
ggccctacctgggcacctgctctggttgcagttgcaatggccatgccagctcctgtgaccctgtgtatggccactgcctggtgagtagtgccagcagacayttgaacactaaaataggagaagggacaatgtgtgagattccctgtgttcatgagctcagcacaagcctccagaatgactgtcatgactgccagatgaact

SEQ ID NO: 12264 - DNA, 201 bp, Homo sapiens
tggaggacttcgtgtccctggcgatggtgggcggccacctggagttccgctatgagttggggtcaggtaagcacccagcaccaaatgcggggctctgcacrccaagccttgtgcccccctcggctcttcaagccccagggaggcatgggaggataaatgcagggatcagggcaagtcccctcttcctgtgcatttcgtctc

SEQ ID NO: 12265 - DNA, 201 bp, Homo sapiens
agagcgggcctgtggaggacttcgtgtccctggcgatggtgggcggccacctggagttccgctatgagttggggtcaggtaagcacccagcaccaaatgcrgggctctgcacaccaagccttgtgcccccctcggctcttcaagccccagggaggcatgggaggataaatgcagggatcagggcaagtcccctcttcctgt

SEQ ID NO: 12266 - DNA, 201 bp, Homo sapiens
tggacgtggagttcaagccactcgcccctgacggggtcctgctgttcagcggggggaagagcgggcctgtggaggacttcgtgtccctggcgatggtgggyggccacctggagttccgctatgagttggggtcaggtaagcacccagcaccaaatgcggggctctgcacaccaagccttgtgcccccctcggctcttcaag

SEQ ID NO: 12267 - DNA, 201 bp, Homo sapiens
ggaggactccaggcgtgcctggcacagagccagcactcctattcacgctgggtcttgtcacgcccagggtctctggcatcagcatggacgtggctgtgccygaggaaaccggccaggaccccgcgctggaagtggaacagtgctcctgcccacccgggtaccgtgggccgtcctgccaggtgagtcctgggccccacgcca

SEQ ID NO: 12268 - DNA, 201 bp, Homo sapiens
gacgtggctgtgcccgaggaaaccggccaggaccccgcgctggaagtggaacagtgctcctgcccacccgggtaccgtgggccgtcctgccaggtgagtcmtgggccccacgccagcccagccagccccctccatggtgcttcccgctccttctccatgagccctccacacctccccagccctggccatccagtgccccta

SEQ ID NO: 12269 - DNA, 201 bp, Homo sapiens
gagagggacgcaggaggggggaggggccatgcagggatatggtttcaggtcaagtctagccccagcctcagcccacagggagctctggagagtcattcgcsggagagtgatcgttctttcaggcccgtgggctcttgtagcctgtatcagcctgtcattggggaccccaggggaacgaggtggtataacctctccaggtga

SEQ ID NO: 12270 - DNA, 201 bp, Homo sapiens
aatgtctcccatacaggctggtctggggccaggctccctagaaagaagcctgagacggggattggggtgcatgtgattcacaaggagagggacgcaggagrggggaggggccatgcagggatatggtttcaggtcaagtctagccccagcctcagcccacagggagctctggagagtcattcgccggagagtgatcgttct

SEQ ID NO: 12271 - DNA, 201 bp, Homo sapiens
aacggagagtcttaacaatgtctcccatacaggctggtctggggccaggctccctagaaagaagcctgagacggggattggggtgcatgtgattcacaagkagagggacgcaggaggggggaggggccatgcagggatatggtttcaggtcaagtctagccccagcctcagcccacagggagctctggagagtcattcgcc

SEQ ID NO: 12272 - DNA, 201 bp, Homo sapiens
tctgtaaaacggagagtcttaacaatgtctcccatacaggctggtctggggccaggctccctagaaagaagcctgagacggggattggggtgcatgtgatycacaaggagagggacgcaggaggggggaggggccatgcagggatatggtttcaggtcaagtctagccccagcctcagcccacagggagctctggagagtc

SEQ ID NO: 12273 - DNA, 201 bp, Homo sapiens
ctccgtcctctccatagatccttggccagtgggtggtaacccagtcagaggctggtggacctggcccaccggccttccgtaccaggacaggtggcctggcrttgggaaggagcactggttagggagtcaggtgaccacagttcaagtcccagtcattctttatgcagcctttgtatctgcattgtacctttgcttttgcca

SEQ ID NO: 12274 - DNA, 201 bp, Homo sapiens
ctgtgacgagcgtggcagcatggggacctccggggaggcctgccgctgtaaggtacgcgtgccatctgccacccacccaggggccttgggcccagcaccayagctgggaggaggaagaaggaagctccgtcctctccatagatccttggccagtgggtggtaacccagtcagaggctggtggacctggcccaccggccttc

SEQ ID NO: 12275 - DNA, 201 bp, Homo sapiens
aacagctgtttgccacggtcctcgcagcctctggagatctggacagggccccagcagcactgtgacagggctgtcgggaggactaataagaccctgccagyggaggactccaggcgtgcctggcacagagccagcactcctattcacgctgggtcttgtcacgcccagggtctctggcatcagcatggacgtggctgtgcc

SEQ ID NO: 12276 - DNA, 201 bp, Homo sapiens
aggtccagttctctgaggtgggtggcgcctgagcccttagggctgggagcaaagggggatttaggctgggtaggcactgatgtgtgacccctgccaccttyacccatacccaggagcactgggtccatgagtctggccggccggtgcagcgcgcggagctgctgcaggtgctgcagagcctggaggccgtgctcatccaga

SEQ ID NO: 12277 - DNA, 201 bp, Homo sapiens
aggctactttaagcaccatcttacagataaggaaactgaggcccttgcccaggcttacaacacacctggacttggtctcctgttcctcagccctgtgtagmtctcctgcctgcagggttgttccagccctgaaagtctgtgggtctcttagcaagaaagaccctgagaagtctggctgcaaagaatccccttgtcctttct

SEQ ID NO: 12278 - DNA, 201 bp, Homo sapiens
caaatatgtcttcatggcactgggagtttagtgtggggagaaacaaaacacatgaatagaatttatgtctaaaggagatagatgctagtgagaaaaattaygcatgttggtgggggcagggctgccgcttttcttttcttttctttttttttttttttttttgagacggagtctcgctctgtcgcccaggctggagtgcag

SEQ ID NO: 12279 - DNA, 201 bp, Homo sapiens; identical to SEQ ID NO: 2051

SEQ ID NO: 12280 - DNA, 201 bp, Homo sapiens
tgtcaagggaattcccatgtagggtgactgtgtgtgtgtgtgtgtgtgtgtgtgtgtgtgtgtgtgtgtgtacatagaagagggttggactagacgacccrtcataacaacagcaacaataagagctagccattttatatcaatgtgctcattttagcttatacctctaggaggcaggctactttaagcaccatcttacag

SEQ ID NO: 12281 - DNA, 201 bp, Homo sapiens
tcaccatcgtgggcacccggcccagcaaccacggtacctaccgctgcgtggcctccaatgcctacggtgtggcccagagtgtggtgaacctcagtgtgcayggtgaggggacgttgaccctgtggggctctgccctgtttccagccctgattctcagctcagagcctccaagtttaaatcctccttccaccattgactctg

SEQ ID NO: 12282 - DNA, 201 bp, Homo sapiens
ctcgcctcctgggctgctggagcccacaggccctgtcctctcacctcccggcaggcggagcccctgacgtggccacgctgaccgggggcagattctcctcrggcatcacaggctgtgtcaagaacctggtgctgcactcggcccgacccggcgccccgcccccacagcccctggacctgcagcaccgcgcccaggccgggg

SEQ ID NO: 12283 - DNA, 201 bp, Homo sapiens
cactgcagggagggccgcagaggttccatccaagtcgacggtgaggagctggtcagcggccggtccccaggtcccaacgtggcagtcaacgccaagggcarcgtctacatcggtaagtctggggctccttctcagggcaggggcaggaacggcactcccttagggctagagctcgcccagccttcctcgcctcctgggctg

SEQ ID NO: 12284 - DNA, 201 bp, Homo sapiens
tgccgagtgttgggcagctccgtgcctctagaggcctctgtcctggtcaccattgagcctgcgggctcagtgcctggtgagtagctctcagggagggcagrgctggggacccagggtgggaggccccccactcttgcaacggcaggatcaggaggccaagccgcagactgcacctgccttgagaccaggagccccatctca

SEQ ID NO: 12285 - DNA, 201 bp, Homo sapiens
acagttgggcttggggacattccttgtcctggggactttgccctgataactgtcccctcgctgctctgacagacccatggctcccagctgcggctccaccwcgtctcccctgccgactcaggcgagtatgtgtgtcgtgcagccagcggcccaggccctgagcaagaagcctccttcacagtcaccgtcccgcccagtgag

SEQ ID NO: 12286 - DNA, 201 bp, Homo sapiens
atatccggggccttcaaatgccagtgggtagcatcctaactgggtcagtgtagacaggagggtaggtcactgggtaacctggtcctgactgtgacctcccrgagcctggacttggggctctgcctgaaggttttccatttccatgtgtaggtctccacgaggctgcaggatgcctgggagctgggtggggcttgggagagg

SEQ ID NO: 12287 - DNA, 201 bp, Homo sapiens
tgtgatgggcagacctctggcatcaggacccccctccctccagagtcacctccgtgtcttttcactggcctatgtgccccccagaggcctgtgggcccgaygccacctgtgtgaaccggcctgacggtcgaggctacacctgccgctgccacctgggccgctcggggttgcggtgtgaggaaggtgaggggagccaggcct

SEQ ID NO: 12288 - DNA, 201 bp, Homo sapiens
aggccaggagcatcgaggaggccagcgccacccctcagagctgggggcctgtgggaagagaaagtccactcaggcctcggcctgggtcctctgccccgtcyccatcacctagagagggacaggtatgattttggtgggaagagtaggagcaaggtgtaaccttccaaagctgcgtcttgtctcgtggggtccctgcctgct

SEQ ID NO: 12289 - DNA, 201 bp, Homo sapiens
gggtgtgatgggcagacctctggcatcaggacccccctccctccagagtcacctccgtgtcttttcactggcctatgtgccccccagaggcctgtgggccsgacgccacctgtgtgaaccggcctgacggtcgaggctacacctgccgctgccacctgggccgctcggggttgcggtgtgaggaaggtgaggggagccagg

SEQ ID NO: 12290 - DNA, 201 bp, Homo sapiens
cccacccagggatgctgctgtacaatgggcagaagcgagtcccagggagccccaccaacctggccaaccggcagcccgacttcatctccttcggcctcgtkgggggaaggcccgagttccggtgagacccccagcctccccacctacagggggactggacacagggctttggtctggcaagtgctaccctgggctccatta

SEQ ID NO: 12291 - DNA, 201 bp, Homo sapiens
tgagacccccagggtcctagtgtcagctggggaggctgggtggggcactctgaggccatgatgggccctacggatgataaaacgattcccaagccagaggmtctcgaagtcacctggccacatgtctgcccagcctgagccccttattgagtgagggcccccaaagaggacccctgtcatattggagctcctcccagcccc

SEQ ID NO: 12292 - DNA, 201 bp, Homo sapiens; identical to SEQ ID NO: 2065

SEQ ID NO: 12293 - DNA, 201 bp, Homo sapiens
cgaggagatcgtcttccatgacctcaacctcacggcgcacggcatctcccactgccccacctgtcgggaccggccctgccaggtgaccccacaccccacayaccacctggctgccgtggcctccacccctagccatggctggcccctgtggggattatggggggtactgaatgttctcggccttacttctgggggctgctt

SEQ ID NO: 12294 - DNA, 201 bp, Homo sapiens
gggtggtgccctacttcacgcagaccccctactccttcctaccgctgcccaccatcaaggatgcctacaggaagttcgagatcaagatcaccttccggccygactcagccgatggtgagcaggagggttaatttgcggggtgggctggcctgggttgagggacctcgtggagtaactgccatcatggcaggagccctggct

SEQ ID NO: 12295 - DNA, 201 bp, Homo sapiens
ctgccccagccaggccagagtcttcccacaaaacccctgcttctttctgaaactcctgggttcctacctgccccaattcactggctgtgcggtccagggcrcgtccctgctcttctctgcccagtttccccgtaacatgggcgagtcaggctcttcttttcttccagtgcatgaggccattgaattcaatatggggccctc

SEQ ID NO: 12296 - DNA, 201 bp, Homo sapiens; identical to SEQ ID NO: 2071

SEQ ID NO: 12297 - DNA, 201 bp, Homo sapiens
cattctgagagacagaggtgccagtgtacccagattataggagcccaggctttggcatctccttggcctgagggtggcctccagctataccacttactgcygctgtgtctttgggcaagtctcttggcctccctggtcctattttcccaaagatagaggcaggcagatggactcagttctttctggcactgagaggcagaa

SEQ ID NO: 12298 - DNA, 201 bp, Homo sapiens
tggctgggtgacgctgtggttgtgacagtgatgtgccagccataactggcatggggaatgcaggtggagtgaggggtgggggccgggtaatgtgatgagtkgttcgatgacagctggtggccgcatcatgctggctgtgagttggacagtgttgtgcagcaggggctaggcatggcgagggccgctgtgggttatgtgggc

SEQ ID NO: 12299 - DNA, 201 bp, Homo sapiens
tctggtagagaagggtgggcggggcattgctggcgcccagagatgccagccccactggtggtgcctttgacatgggtcttgtccatgtgagcaagatagcrcttctgtgcctctgagcgtggctgggtgacgctgtggttgtgacagtgatgtgccagccataactggcatggggaatgcaggtggagtgaggggtggggg

SEQ ID NO: 12300 - DNA, 201 bp, Homo sapiens
gaggaccaggaagtttgtggaaaggggcctgacccagttccactgcagggagggccgcagaggttccatccaagtcgacggtgaggagctggtcagcggcmggtccccaggtcccaacgtggcagtcaacgccaagggcagcgtctacatcggtaagtctggggctccttctcagggcaggggcaggaacggcactccctt

SEQ ID NO: 12301 - DNA, 201 bp, Homo sapiens
cggagcccaggagtttgaagctgcagtgagctaggatcatgccactgcactccagcctgggcgacagagcaaaaccctgcctctaaaacaagacaaacaarcaaaaacccttaattattgcacccagagatcaagcttgctcttctgcatcatcaggcccaggtctaaagactgctgggggtccagccctcctctctcact

SEQ ID NO: 12302 - DNA, 201 bp, Homo sapiens
cgttcagcgggggaaagaaagagcttgggaaacagggacagacttctgagtctggagtctcgatatcagagggaggggactctgtcgtggggccggggagraccaggaagtttgtggaaaggggcctgacccagttccactgcagggagggccgcagaggttccatccaagtcgacggtgaggagctggtcagcggccggt

SEQ ID NO: 12303 - DNA, 201 bp, Homo sapiens
ttccttctactgtgcctttggtctcctgttttaacctcctgagtctcttttttttctctagaccgaacagccctagttcatccttcacaggtgtggttctyggccctgtctccatctcagttccctgtctctgggaagaccctgactcagtggaactcagaatggaacaaactccatcccctactatggtgtagcccaatt

SEQ ID NO: 12304 - DNA, 201 bp, Homo sapiens
ggaggcgacacatgggtgggaaggcagcgagtgtggacaactcctgcaagagtcttggctctgaagggaggccaggaagtgggtcattgactgcgagagcrtgaggtcaagggggagttttcggaaatgggaaatcctagaatgcactctggaccgaagtgatcgcatgagaaggaggagacgctgatgttgcgagagcag

SEQ ID NO: 12305 - DNA, 201 bp, Homo sapiens
catgggggcacctgccagggcacccgctgcctctgcctccctggcttctctggcccacgctgccaacaaggtacccaggcctggcttctctccacttcatytctgtcttggggccccggagctcgacatagtacccacgggtgtctatgcccaccaactggaccctgcccttctccataggctctggacatggcatagcag

SEQ ID NO: 12306 - DNA, 201 bp, Homo sapiens
cgtgaatgaaatcccaggttcccctccatcaagcctagagtctggtggtggagagaggaccacagcagcttcgattcttgggcggtttgctgtgtgccagktgatgcatctgagtacaagggcctggtgcatgtgagcacaatgtcatgcactcctcgcagcaacccaggtggtacatgcagtcaatatccccattaggaa

SEQ ID NO: 12307 - DNA, 201 bp, Homo sapiens
tcaggaggccaagccgcagactgcacctgccttgagaccaggagccccatctcatctcacctcctagccggctattgaccctttgccctctgtccccagcwcttggggtcacccccacggtccggatcgagtcatcgtcttcgcaagtggccgaggggcagaccctggacctgaactgcctcgttgctggtcaggcccatg

SEQ ID NO: 12308 - DNA, 201 bp, Homo sapiens
gtccctcggtgtccctgtccccacaggtgtcagtgaatggcaaacggctggacctcacctacagtttcctaggcagccagggcatcgggcaatgctatgayagctccccatgtgagcgccagccttgccaacatggtgccacgtgcatgcccgctggcgagtatgagttccagtgcctgtgtcgagatggattcaaaggtg

SEQ ID NO: 12309 - DNA, 201 bp, Homo sapiens
ctggctcagctccagccccctgtgtgtcaagacccgtccctgatagcctcccctccctaggaccccttcccacgtctcctcccccagtttctttccatgtwctgacctgtctctttctgtcttcccccatgcccgtgtgtcctgctctgacccttgtcggcatgtctgtgtgtgtcccctgtcctccctgccctgggccct

SEQ ID NO: 12310 - DNA, 201 bp, Homo sapiens
gtaggcactcaactcctgcgcctccctccccacaccgagaatccatgctaccactcagggcccaatgtgggctcccagctcccctctgctgcattcttctycctgctggtacacctgggtctctgcctcccaggcccctttagtccctcggtgtccctgtccccacaggtgtcagtgaatggcaaacggctggacctcacc

SEQ ID NO: 12311 - DNA, 201 bp, Homo sapiens
acctggtcctgactgtgacctcccagagcctggacttggggctctgcctgaaggttttccatttccatgtgtaggtctccacgaggctgcaggatgcctgsgagctgggtggggcttgggagagggagtgtcaggtgggccccaggcacacatggcacgtcccgtcctggaatggcctatgctaatgtgtccctggagctg

SEQ ID NO: 12312 - DNA, 201 bp, Homo sapiens
tgagagcagcagctacgtgtgcgtctgcccagctggcttcaccgggagccgctgtgagcactcgcaggccctgcactgccatccaggtacgcaccccgacygccagtcgctgtcgccccagggcctgcctcttccctttgctgcctccccatatccaccaccatctcaaccactggggcacttccacaccccccactctca

SEQ ID NO: 12313 - DNA, 201 bp, Homo sapiens
ccaaggccagggccctcagtgctagtgcatttgcagctggatggcagcctgccacctgacagccgcctggagaacaacatgctgatgctgccctcagtccraccccaggacgcaggtacctacgtctgcaccgccactaaccgccagggcaaggtcaaagcctttgcccacctgcaggtgccaggtaagacaccaccccta

SEQ ID NO: 12314 - DNA, 201 bp, Homo sapiens
gtgggcctgaggcacagatgggaggtgggcccctggagccgtgggccaaggccagggccctcagtgctagtgcatttgcagctggatggcagcctgccacytgacagccgcctggagaacaacatgctgatgctgccctcagtccgaccccaggacgcaggtacctacgtctgcaccgccactaaccgccagggcaaggtc

SEQ ID NO: 12315 - DNA, 201 bp, Homo sapiens
accccaagccctgtgacttgcctccaaacttccttacctatactgcccctagtgtgcacttctcaggtccccaaagggctgcacaattttttgcccaggcrtgttgaagaggtctcaggctgtggagtgaaatggatctggccctgaaccctgactctgcccgaccaggagcaaacagccgcttttcccctctgagccata

SEQ ID NO: 12316 - DNA, 201 bp, Homo sapiens
agtaaaacaaggacaacagatgcagggcagacacaaacactgtgtgttctttaaaggcaattcctttttaccccaagccctgtgacttgcctccaaacttycttacctatactgcccctagtgtgcacttctcaggtccccaaagggctgcacaattttttgcccaggcatgttgaagaggtctcaggctgtggagtgaaa

SEQ ID NO: 12317 - DNA, 201 bp, Homo sapiens
ggctgggatgcagagaacaggctggagtggcttcagagaacaggagtgaccggtgaccatcttatccctcagctgccggcagcacccagcccatccgcatygagccctcctcctcgcaagtggcggaagggcagaccctggatctgaactgcgtggtgcccgggcagtcccatgcccaggtcacgtggcacaagcgtgggg

SEQ ID NO: 12318 - DNA, 201 bp, Homo sapiens
ccgccccggccagagacaaccatcatgcgacagccaccagtcacccacgctcctcagcccctgcttcccggttccgtcaggcccctgccctgtgggccccrggaggccgcatgccgcaatgggcactgcatccccagagactacctctgcgacggacaggaggactgcgaggacggcagcgatgagctagactgtggtgcg

SEQ ID NO: 12319 - DNA, 201 bp, Homo sapiens
gactctgagcaggcttggtgggtgctgaccccacgtctactcgtcagggggccccggcggccagctccctgcgaaggcacaaatccacggcggcatcctgygcctgccagctgtcgagcccacggatcaggcccagtacttgtgccgagcccacagcagcgctgggcagcaggtggccagggctgtgctccacgtgcatgg

SEQ ID NO: 12320 - DNA, 201 bp, Homo sapiens
agatgccccattggctattctggcttgtcctgcgagagctgtgatgcccacttcactcgggtgcctggtgggccctacctgggcacctgctctggttgcarttgcaatggccatgccagctcctgtgaccctgtgtatggccactgcctggtgagtagtgccagcagacacttgaacactaaaataggagaagggacaatg

SEQ ID NO: 12321 - DNA, 201 bp, Homo sapiens
tttgtgcaagtcatttcacatccctgagcctctgtttcctcatgtgaaggatgaaggtatcacctacctctcaaggtccttaggggagttaaatgaggtgrtgtcgaatggaaagcagaacagtgcgtgaaacactccataaatagaagcagcaattatttcaatcaagtcgctgtatttcaagtctaaatttattggtga

SEQ ID NO: 12322 - DNA, 201 bp, Homo sapiens
catcaaggtacccatggccctaggctcctcagccccaagagccatcccagtgggaggggaggcaggggcctgtccctgccctagtgggatgctgtccttgygcatggggctggatgtgagaaagagtgtatctgcaccaacaagctcttgtctcctccccaccaggctccgagctccacttccccagcgtccagccctcgg

SEQ ID NO: 12323 - DNA, 201 bp, Homo sapiens
ctatgaaggagatgttattcctcctgtttcagagacgagggaactgaggcccagaaaggaaaatctaaatttgtccagaatcagatgggcagatagtgaawaggcgaggatttcaaacaaactcggtgtctgtgacagtcttgccagaacctgtgatgacagaagcaggagaaactgaggcacagagagactaggaaactg

SEQ ID NO: 12324 - DNA, 201 bp, Homo sapiens
tacaggaagttcgagatcaagatcaccttccggcccgactcagccgatggtgagcaggagggttaatttgcggggtgggctggcctgggttgagggacctygtggagtaactgccatcatggcaggagccctggctgcccctcagtcctgccccaatccctcagccctccctctccagaagcccccagacctctgggcctc

SEQ ID NO: 12325 - DNA, 201 bp, Homo sapiens; identical to SEQ ID NO: 2095

SEQ ID NO: 12326 - DNA, 201 bp, Homo sapiens
tcagagtcctcagacctggtggtactcaggcaagggccagcggaaagatgcgtgggttcagtggctacggctaccccatttctaacatttcaaattctcartagccacgtgtggcttgcagccactgacttggcctgtgcagataaaaagcatttccatcatcacaggaagtttacgaattttgtgagggttaagtgagtt

SEQ ID NO: 12327 - DNA, 201 bp, Homo sapiens
tggggagacaggtgcccacccagcagttactaagctggaggccatggcagtgtgggtgagcagcagagccctgcctgtgtgtcagtggttgtcattcctcygcacagggccccctacagtgtccgtgctccccgagggccccgtgtgggtgaaagtgggaaaggctgtcaccctggagtgtgtcagtgccggggagccccg

SEQ ID NO: 12328 - DNA, 201 bp, Homo sapiens
ctaggaaagggacgagggatgcaggcaacagtgttccctggggagaaggaactttcaggtcagagtcctcagacctggtggtactcaggcaagggccagcrgaaagatgcgtgggttcagtggctacggctaccccatttctaacatttcaaattctcaatagccacgtgtggcttgcagccactgacttggcctgtgcag

SEQ ID NO: 12329 - DNA, 201 bp, Homo sapiens
gtggggagacaggtgcccacccagcagttactaagctggaggccatggcagtgtgggtgagcagcagagccctgcctgtgtgtcagtggttgtcattcctycgcacagggccccctacagtgtccgtgctccccgagggccccgtgtgggtgaaagtgggaaaggctgtcaccctggagtgtgtcagtgccggggagcccc

SEQ ID NO: 12330 - DNA, 201 bp, Homo sapiens
agaccgatagcagcctcaacaggctgagcaggaaggcctgagccagctggtgaccccagcgtccctccactccctctccctctccttccccatccgcacgyccagacccatggctcccacctgcggttgcaccaaatgtctgtggctgactcgggcgagtatgtgtgccgggccaacaacaacatcgatgccctggaggcc

SEQ ID NO: 12331 - DNA, 201 bp, Homo sapiens
tgtcacgtcagtaacggtgcaggctcccgggagacctcgctcatcgtcaccatccagggcagcggttcctcccacggtgagagcagagagggcagggggtmcagacaagtggcgcagagggtggcagagaggtccccggtgccatcactgttatctcactctggctgcgtggtccacacccgtctgtccccagtgcccagc

SEQ ID NO: 12332 - DNA, 201 bp, Homo sapiens
cacagaaagtactctaagctgttaatattttactataatgccattagctattgttgttaccatattttgtagaatttaggataccactgattgcgagatcygctatgattttatgtacctctaagaaaaagcttctatttgtaaggttattcattgtagatgcatcttgattttggagacatcgaaatgtgtgtctagaat

SEQ ID NO: 12333 - DNA, 201 bp, Homo sapiens
agctgtgcccctgctacggagaccctgctgccggccagtgcgtccagtccctgcctgcacctgcccttccctgaaatgtctaccacccgctcccacacccscttcatccagggcccttctgagaggcagtggttaaatcctggccttactgcctgctcagtgtcacttggtgtgagatacacttcactttcagggcctcag

SEQ ID NO: 12334 - DNA, 201 bp, Homo sapiens
cttaggctcacagaaagtactctaagctgttaatattttactataatgccattagctattgttgttaccatattttgtagaatttaggataccactgattkcgagatccgctatgattttatgtacctctaagaaaaagcttctatttgtaaggttattcattgtagatgcatcttgattttggagacatcgaaatgtgtg

SEQ ID NO: 12335 - DNA, 201 bp, Homo sapiens
gggaggtggaggttacagtaggccaagaccgtgcccctgcactccagcctgggcaacagagcaagactcagtctcagaaaaaaaaaacaacccagagatayagcatccagacaagggaggtgttggccctcctctccaccctcatcagactaatcctggagagtgccaaatgaagaagcatggcctgcagagggcaactct

SEQ ID NO: 12336 - DNA, 201 bp, Homo sapiens
gccgaggtctgacccctagacccctcctctccagctgcccgtctggctccaacacatgcctgaagtgctgggttcctctgggaggaagccgggctccctcrccgccggagacgggctggagggcaggaaacctgggttctatttctgaccttggagctgctaatggccctccttgggacctgaggcacatgctgcacagtc

SEQ ID NO: 12337 - DNA, 201 bp, Homo sapiens
tggcgcccagagatgccagccccactggtggtgcctttgacatgggtcttgtccatgtgagcaagatagcgcttctgtgcctctgagcgtggctgggtgaygctgtggttgtgacagtgatgtgccagccataactggcatggggaatgcaggtggagtgaggggtgggggccgggtaatgtgatgagtggttcgatgaca

SEQ ID NO: 12338 - DNA, 201 bp, Homo sapiens
aggccaggctggtctcgaacttctggcctcaagtgatctgtacctgctctccgtatctgtacctctccctccttctctccattctgtgccccactcctgtrgttttctcctccgttcttagtcctttcctaggcagccttgtctgcctctttatcctcacccaggccaggagaggaggatccagcctgcattcattgtccc

SEQ ID NO: 12339 - DNA, 201 bp, Homo sapiens
gagttcacctctgcgccgtctctcagcaggcaggcacctgccacctgcatggccatatcgtggttaggcacgtggcttttgcagtcccatagacattggtytgaaccccagctctgccgcttgccagccagacaccatttgataaacctcaacttcatggtggctgaggggattggagatcgtgcctggcacataataagt

SEQ ID NO: 12340 - DNA, 201 bp, Homo sapiens
tgtgtcccaagggcacacggctaatgtgtggcagaaactaatttgaacctgggtctgattgactccaaagcctagcatgtcctaaccactgggcagtgcakcctcacgtttgggccacactctccgggggttaaaacccagttcatgcccttgagggggcccaccagagacagggagccaattcagaaacacagattactc

SEQ ID NO: 12341 - DNA, 201 bp, Homo sapiens
agtgcatttgcagctggatggcagcctgccacctgacagccgcctggagaacaacatgctgatgctgccctcagtccgaccccaggacgcaggtacctacrtctgcaccgccactaaccgccagggcaaggtcaaagcctttgcccacctgcaggtgccaggtaagacaccacccctaagaattggcagtgccctgcccac

SEQ ID NO: 12342 - DNA, 201 bp, Homo sapiens
gagcaaacgctcaatgttggaaggtgggcctgaggcacagatgggaggtgggcccctggagccgtgggccaaggccagggccctcagtgctagtgcatttrcagctggatggcagcctgccacctgacagccgcctggagaacaacatgctgatgctgccctcagtccgaccccaggacgcaggtacctacgtctgcaccg

SEQ ID NO: 12343 - DNA, 201 bp, Homo sapiens
tccccaggatgtggcacaggcttggccaagagcaaacgctcaatgttggaaggtgggcctgaggcacagatgggaggtgggcccctggagccgtgggccarggccagggccctcagtgctagtgcatttgcagctggatggcagcctgccacctgacagccgcctggagaacaacatgctgatgctgccctcagtccgacc

SEQ ID NO: 12344 - DNA, 201 bp, Homo sapiens
acacctgttactcaaggctcttgacttcctcctgccggagaaaccatcataataaacatgccctccacaatgcggactgtcaaaggggtcgcctccaacakgatgcgcctacatatctgtgcatggcagtcccagggtgtgggtaccagaggcctgggcatctgaaggctcccagctcaccctccccgctctcaccccacc

SEQ ID NO: 12345 - DNA, 201 bp, Homo sapiens
ccctccttccgcccaccccagcaatctgtggcctctggaggcccagcctcaactcacatcctgctcctccagggctgccagcatcacacggagggccctcrgtgtgagcagtgccagccaggatactacggggacgcccagcgggggacaccacaggactgccagctgtgcccctgctacggagaccctgctgccggccag

SEQ ID NO: 12346 - DNA, 201 bp, Homo sapiens
gctcttgacttcctcctgccggagaaaccatcataataaacatgccctccacaatgcggactgtcaaaggggtcgcctccaacaggatgcgcctacatatytgtgcatggcagtcccagggtgtgggtaccagaggcctgggcatctgaaggctcccagctcaccctccccgctctcaccccaccttggccaggtccacgg

SEQ ID NO: 12347 - DNA, 201 bp, Homo sapiens
cccagtcaccatcaggtatgcagctggcaggaaatggtgggagagccgctggatgtgggggccctggctagctttgccaagagggagacctaggagccccygtggggtgcagtacccccctgtgtcagaggttagaccctggccccaggccttcaacagttccagactggcacctgactctgttcctctgtcctgtcccct

SEQ ID NO: 12348 - DNA, 201 bp, Homo sapiens
tacctcacagaattatcttaaagattaaaatatatgcaaaatcctcagagcttaggctcacagaaagtactctaagctgttaatattttactataatgccrttagctattgttgttaccatattttgtagaatttaggataccactgattgcgagatccgctatgattttatgtacctctaagaaaaagcttctatttgta

SEQ ID NO: 12349 - DNA, 201 bp, Homo sapiens
ttaaaaaaataataataataatgcacctcagagtcaccctgccctgtcgtccagggaaaagtgagacagggatgggagggcgtccataaaggctgtgtcaycaagcagattgccaccgtgagcagttgttgcttagtacaaccgaggaagcttttaaagggagccggtgtaaaacacgcacctcaaagtcaccctgccctg

SEQ ID NO: 12350 - DNA, 201 bp, Homo sapiens
aggtacattcagagaagtgagacagggaggttgaggggtgaggataagaagcaatctgctggagccgagggtggagctggagtactgcagggttatcaagygtgatatgcattctcaaactgtgtggagtacatcaccatttgtgtcctatattacttaatcctcatgatacccttcaaagtgggtattacttttacttcc

SEQ ID NO: 12351 - DNA, 201 bp, Homo sapiens
tgagtattcatattgcctctattttgttccaacaatttcaagtacctcttaagaatacacatagcaggctgggcgtggtggctcacacctgtaatcccaayactttgggagactggggcaggcgaacacctgaggtcaggagttcgagaccagcctggccaacatggtgaaaccctgtctctactaaaataacaaaaatta

SEQ ID NO: 12352 - DNA, 201 bp, Homo sapiens
gccttttctctgggcttccttgaccttgtgtctagatgctggcctagtttttggtacttcactcagtcattcaagaagcattaattatttactgtgtgctkcgtcgtgtacaggccgagtgggccctggcctcccagagctccctgtccatcccattatcattcctgtcaccatcagtatcattattattatcatcatgag

SEQ ID NO: 12353 - DNA, 201 bp, Homo sapiens
gcgtggcctccaatgcctacggtgtggcccagagtgtggtgaacctcagtgtgcacggtgaggggacgttgaccctgtggggctctgccctgtttccagcmctgattctcagctcagagcctccaagtttaaatcctccttccaccattgactctgtcttgggcattctccctctctgagcctcagtttccacctcagtgc

SEQ ID NO: 12354 - DNA, 201 bp, Homo sapiens
atcccgggatatccccgcctagctcaggaggaacaagagggcagtgggtacaagggccagagtgccaggtatcagcacttgtgagcagacagtgcagagcrggtggctggctgggcccgtggggaggtgaagcctcacggacgtcctttctgtccctctctgctcccttctgccgctcttcggctcctggtcccccaggtg

SEQ ID NO: 12355 - DNA, 201 bp, Homo sapiens
tccaggcctcaatggaacgggaagggaaagaagccatgtcccaaatggcctctggtcctagtatctgggccccaggggaagggctgagggcatcagggtgscatctcagctcactgacctctcccctgtgccccagccccaggtggagccccacccatccgcatcgagccctcctcctcccgagtggcagaagggcagacc

SEQ ID NO: 12356 - DNA, 201 bp, Homo sapiens
gcccacacctgtaattccagcactttggaaggctgaggcgggaggaccacttgagctcaggagtttgagaccagcctgggcaatgtgacgaaaccccgtcyctacaaaaagtacaaaaaattagctgggcgtgttggtgcatgcctgtagtcccagctatttagggaggctgaggtgggaggatcgctggtacccaggatg

SEQ ID NO: 12357 - DNA, 201 bp, Homo sapiens
tgttcatgacttttagctttcatgcagttattctacaaacagatctgggagaggccgggaaatataaagacaagtgagacacagtttcagtgtcattcacrtgcccgctccgacttcactcatccacactgctggctctgtgcttgtgttggacacagtaattctcatgataggtcatgtgtgttgagctctcactatgtg

SEQ ID NO: 12358 - DNA, 201 bp, Homo sapiens
ctggaagtggccagggaggctggcctcaggctgctgggggtgcaggagacccactgagtcccctgcctgcctccttccatccgtctacccaggcccaggtrgaaggcctcacttgcagccactgccggccccaccacttccacctgagtgccagcaacccagacggctgcctgccctgcttctgtatgggcatcacccagc

SEQ ID NO: 12359 - DNA, 201 bp, Homo sapiens
aacagagcaagactctgtcttaaaaaaataataataataatgcacctcagagtcaccctgccctgtcgtccagggaaaagtgagacagggatgggagggcrtccataaaggctgtgtcaccaagcagattgccaccgtgagcagttgttgcttagtacaaccgaggaagcttttaaagggagccggtgtaaaacacgcacc

SEQ ID NO: 12360 - DNA, 201 bp, Homo sapiens
gcaggtgcgcccctggctactatggcaaccccagccagggccagccatgccagagtgagtaggattggggaggtcattggggtcgggttacccagagtccytagggcggagctaggacagaagcctttactcccctttggctttgcctgtccgagcctgtttcttcatctgtaaaatggggataggagaaggccccaccac

SEQ ID NO: 12361 - DNA, 201 bp, Homo sapiens
gaagggacagagaccagggggcagaactggcagaaggaaacactttctggcactcggcgagaactgccgctctgattccagacttcacctcccgccacccrcacggtcccaggaccaaggagccggctcaggtggagtggttcctgtccctctccacggcttgcgagcataggctttggactatgctcatctgtgcatgag

SEQ ID NO: 12362 - DNA, 201 bp, Homo sapiens
ctgggattacaggcatgagccaccatgcccggccaagtgttaactattagtgttactctggggggtgagattttctatggcagagggtcccaccaaccctrttcccaaatctgacaacggctgtgccgactcactgatctctgttcccccagcccctggcagctccatgcccatcagaattgagtcatcctcctcacacgt

SEQ ID NO: 12363 - DNA, 201 bp, Homo sapiens
ggccacatgactcctcaggcgtcccctcccacctcctcttcctctctccaactcatctctgccctcatctctctcacttcctcactcccctctgcaaggcrtggcccatgccctggtcctcccatcagggttgctgagctgagggcatcaagtccaggcccccagatgcctgaaaagctggatctggccttgaaaccctgg

SEQ ID NO: 12364 - DNA, 201 bp, Homo sapiens
actgacttggcctgtgcagataaaaagcatttccatcatcacaggaagtttacgaattttgtgagggttaagtgagttagtgcatgtaatgtgcttagagygtgcctggcatgccagaagtgctttataagtgttaactattattatcatttttttttttttgagagggagtctcgctctgtcacccaggctggagtgcag

SEQ ID NO: 12365 - DNA, 201 bp, Homo sapiens
ctgcagggagggccgcagaggttccatccaagtcgacggtgaggagctggtcagcggccggtccccaggtcccaacgtggcagtcaacgccaagggcagcrtctacatcggtaagtctggggctccttctcagggcaggggcaggaacggcactcccttagggctagagctcgcccagccttcctcgcctcctgggctgct

SEQ ID NO: 12366 - DNA, 201 bp, Homo sapiens; identical to SEQ ID NO: 2044

SEQ ID NO: 12367 - DNA, 201 bp, Homo sapiens
tctcagtgtccccaggatgtggcacaggcttggccaagagcaaacgctcaatgttggaaggtgggcctgaggcacagatgggaggtgggcccctggagccrtgggccaaggccagggccctcagtgctagtgcatttgcagctggatggcagcctgccacctgacagccgcctggagaacaacatgctgatgctgccctca

SEQ ID NO: 12368 - DNA, 201 bp, Homo sapiens
tctcacctcccggcaggcggagcccctgacgtggccacgctgaccgggggcagattctcctcaggcatcacaggctgtgtcaagaacctggtgctgcactyggcccgacccggcgccccgcccccacagcccctggacctgcagcaccgcgcccaggccggggccaacacacgcccctgcccctcgtaggcacctgcctgc

SEQ ID NO: 12369 - DNA, 201 bp, Homo sapiens
cctttttaccccaagccctgtgacttgcctccaaacttccttacctatactgcccctagtgtgcacttctcaggtccccaaagggctgcacaattttttgmccaggcatgttgaagaggtctcaggctgtggagtgaaatggatctggccctgaaccctgactctgcccgaccaggagcaaacagccgcttttcccctctg

SEQ ID NO: 12370 - DNA, 201 bp, Homo sapiens
gccggcagcccctccggtgagtctgcctaggaaagggacgagggatgcaggcaacagtgttccctggggagaaggaactttcaggtcagagtcctcagacytggtggtactcaggcaagggccagcggaaagatgcgtgggttcagtggctacggctaccccatttctaacatttcaaattctcaatagccacgtgtggct

SEQ ID NO: 12371 - DNA, 201 bp, Homo sapiens
tcaccatccagggcagcggttcctcccacggtgagagcagagagggcagggggtacagacaagtggcgcagagggtggcagagaggtccccggtgccatcrctgttatctcactctggctgcgtggtccacacccgtctgtccccagtgcccagcgtctccccaccgatcaggatcgagtcgtcttcccccacggtggtgg

SEQ ID NO: 12372 - DNA, 201 bp, Homo sapiens
gcgtccctgctcttctctgcccagtttccccgtaacatgggcgagtcaggctcttcttttcttccagtgcatgaggccattgaattcaatatggggccctyagcccagccctggggttctgcttcccttcatccaaaattcatcagaggctttttctctctgcaggtgcgcccctggctactatggcaaccccagccaggg

SEQ ID NO: 12373 - DNA, 201 bp, Homo sapiens
cagagtcttcccacaaaacccctgcttctttctgaaactcctgggttcctacctgccccaattcactggctgtgcggtccagggcgcgtccctgctcttcyctgcccagtttccccgtaacatgggcgagtcaggctcttcttttcttccagtgcatgaggccattgaattcaatatggggccctcagcccagccctgggg

SEQ ID NO: 12374 - DNA, 201 bp, Homo sapiens
gccccagccaggccagagtcttcccacaaaacccctgcttctttctgaaactcctgggttcctacctgccccaattcactggctgtgcggtccagggcgcrtccctgctcttctctgcccagtttccccgtaacatgggcgagtcaggctcttcttttcttccagtgcatgaggccattgaattcaatatggggccctcag

SEQ ID NO: 12375 - DNA, 201 bp, Homo sapiens
gagggtggggggatgcgcacagggggtgtccctggaatcctcaggcagggcccagcgctcccaacccagaggaatcagggatgcctctcgctcttaacctygcacaggccccagaagacagtcagctcccctcctcgggagactcaacctctagcccagaattcaagaccctcagacacacatcctagcctgcggttcacc

SEQ ID NO: 12376 - DNA, 201 bp, Homo sapiens
gtggaacagtgctcctgcccacccgggtaccgtgggccgtcctgccaggtgagtcctgggccccacgccagcccagccagccccctccatggtgcttcccrctccttctccatgagccctccacacctccccagccctggccatccagtgcccctacctgaatgggccgtgttcggaagtccctcccactgccatctttct

SEQ ID NO: 12377 - DNA, 201 bp, Homo sapiens
aagactcagtctcagaaaaaaaaaacaacccagagatacagcatccagacaagggaggtgttggccctcctctccaccctcatcagactaatcctggagartgccaaatgaagaagcatggcctgcagagggcaactctagggggaagagcccttggggtgggaccttatttcttaggaatagtggcgagagctgggattg

SEQ ID NO: 12378 - DNA, 201 bp, Homo sapiens
gaggcaggaggatctgttgagcctaggaggttgaggctgcagtgagctatgatcacaccattgcactccagcctggacaacagagtgagaccccatccctraaaacaaaacaaaacttagttacttcccaaagttgtcccccagtatatttacaatgctaatggccgtggccaccatttggtgagcaggcagttggccctg

SEQ ID NO: 12379 - DNA, 201 bp, Homo sapiens
caactgtttactgagcactgactgcctttatttccagcctccgggtcagtcttcacagcaattcctatgaaggagatgttattcctcctgtttcagagacsagggaactgaggcccagaaaggaaaatctaaatttgtccagaatcagatgggcagatagtgaaaaggcgaggatttcaaacaaactcggtgtctgtgaca

SEQ ID NO: 12380 - DNA, 201 bp, Homo sapiens
tctccagcggctctgtggcctcctacgtcacctctccccagggattccagttccgacgcctgggcacaggtgagcctatcctggtgtctgggatcgcctcytccagactcgtggggtcccctttcagtgtctctgccataggctcccaacttgggcttgcacaccactagaaacagggagctcactactcctgagtctgcc

SEQ ID NO: 12381 - DNA, 201 bp, Homo sapiens
ctgccatacctcctgccatctgcttcctgcagatcgtgggctcccggctgcggatccctcaggtgactccggcagactcgggcgagtacgtgtgtcacgtmagtaacggtgcaggctcccgggagacctcgctcatcgtcaccatccagggcagcggttcctcccacggtgagagcagagagggcagggggtacagacaag

SEQ ID NO: 12382 - DNA, 201 bp, Homo sapiens
tgaggaggcaaggcagggaggcccccagagtccaggggcagcggcagcagtgcccaagatgtggaggagctgcccacacctactgccatacctcctgccayctgcttcctgcagatcgtgggctcccggctgcggatccctcaggtgactccggcagactcgggcgagtacgtgtgtcacgtcagtaacggtgcaggctcc

SEQ ID NO: 12383 - DNA, 201 bp, Homo sapiens
tggatgggtcctagaccagtgctgagaatacagaaataaggctccctgacctcagggagatccacttctgcaccaaatctcactgaaaagctgctccgggycatgtcctgtgcctgacactgaagattccagatggaatgagacagttgcctgctctcaggcagctcgcaggctgtgggagccccagcaggatactgtgtc

SEQ ID NO: 12384 - DNA, 201 bp, Homo sapiens
agggccagcaggtggggagggcaaaagcagggcacaccagcccccaatgggaagaggggggactctcagcacctcactctgtgctcattcagtcattcaamaaacattgagtatccttgctggatgggtcctagaccagtgctgagaatacagaaataaggctccctgacctcagggagatccacttctgcaccaaatctc

SEQ ID NO: 12385 - DNA, 201 bp, Homo sapiens; identical to SEQ ID NO: 2058

SEQ ID NO: 12386 - DNA, 201 bp, Homo sapiens
ccaggctccccacaccatcacctggtataagcgtggaggcagcttacccagccggcaccaggtacagggccagcaggtggggagggcaaaagcagggcacrccagcccccaatgggaagaggggggactctcagcacctcactctgtgctcattcagtcattcaacaaacattgagtatccttgctggatgggtcctagac

SEQ ID NO: 12387 - DNA, 201 bp, Homo sapiens; identical to SEQ ID NO: 2059

SEQ ID NO: 12388 - DNA, 201 bp, Homo sapiens
gacagggacagtgatccagagctgatggccaggccttgggggtcagagtgaggggccaaatgggctcatgctgcctacctcatctcccctgtagcatgtcracaaacactggtccccacttttctctggtgccaagtctcagtcgtccctggcatgggtgaggtgggacgctagacccagtcctgacactggggcggtaga

SEQ ID NO: 12389 - DNA, 201 bp, Homo sapiens
gcgggggcagcctcccggcccggcaccaggtaggaggcaggagctcaggaagcctgaaggaccctgtagctgcagtacaagagcataggcttgaccgggcrcagtggctcacgcctgtaatcccggcactttgggaggccaaggcaggaagatcacgaggtcaggagtttgagaccagcctgaccaacataatgaaacccc

SEQ ID NO: 12390 - DNA, 201 bp, Homo sapiens
ccaccacttagcttgtgacctcggacaagttacttaacctctctgtgctatagtttcagggcctataaaatggtaacaatggtacgtaccagccgggcacrgtggcttacgcctgtaatcccagcactttgggaggccgaggtgggcgaatcgcctgaggtcgggagttcgagaccagcctggccagtatggtgaaacccc

SEQ ID NO: 12391 - DNA, 201 bp, Homo sapiens
tattgggggagggctagaggctcccctgagatcaggaagccctggaccccattgcacagatgtatagtgcagtggttagaaaccagaatctaggactgacyaacctgggtgtgaattctggctccaccacttagcttgtgacctcggacaagttacttaacctctctgtgctatagtttcagggcctataaaatggtaaca

SEQ ID NO: 12392 - DNA, 201 bp, Homo sapiens
caagaatgtgggacggggccatggacagtgggttgcaggatcctggcccctaggctgaggggctggcacttcctagatcggggggacagcggtggggcatytgctggcctccgggaagcccccctcacacctctgcccacggctgcccaggttcgtggctcccgcctgtacatcttccaggcctcacctgccgatgcggga

SEQ ID NO: 12393 - DNA, 201 bp, Homo sapiens
gcagcggttcctcccacggtgagagcagagagggcagggggtacagacaagtggcgcagagggtggcagagaggtccccggtgccatcactgttatctcamtctggctgcgtggtccacacccgtctgtccccagtgcccagcgtctccccaccgatcaggatcgagtcgtcttcccccacggtggtggaagggcagacct

SEQ ID NO: 12394 - DNA, 201 bp, Homo sapiens
gctctctccctgccacctccatcccagcagggtccacgcccaccgtgcaggtcacgcctcagctagagaccaagagcattggggccagcgttgagttccaytgtgctgtgcccagcgaccggggtacccagctccgttggttcaaggaagggggtcagctgcctccgggtcacagcgtgcaggatggggtgctccggtgag

SEQ ID NO: 12395 - DNA, 201 bp, Homo sapiens
caggccctcccggctctctccctgccacctccatcccagcagggtccacgcccaccgtgcaggtcacgcctcagctagagaccaagagcattggggccagygttgagttccactgtgctgtgcccagcgaccggggtacccagctccgttggttcaaggaagggggtcagctgcctccgggtcacagcgtgcaggatgggg

SEQ ID NO: 12396 - DNA, 201 bp, Homo sapiens
gtctcgctgaccctcctctcctgcctgtctccatccccagggagctggatggctgggtttttgtggagctggatgtgggctcggaagggaatgcggatggkgctcagattcaggagatgctgctcagggtcatctccagcggctctgtggcctcctacgtcacctctccccagggattccagttccgacgcctgggcacag

SEQ ID NO: 12397 - DNA, 201 bp, Homo sapiens
gagcctcatggaggagctgagaacacaggtgtctcgctgaccctcctctcctgcctgtctccatccccagggagctggatggctgggtttttgtggagctsgatgtgggctcggaagggaatgcggatggggctcagattcaggagatgctgctcagggtcatctccagcggctctgtggcctcctacgtcacctctcccc

SEQ ID NO: 12398 - DNA, 201 bp, Homo sapiens
caggggctaggccagccactgcccctgcccaggacacagccaggcccaccctgggcccacagatctaaacacagtgggctggaaccctggcgggcgttctyccccatggggtgttgacgggcagagatgggtgcagcagccctgcagggaccaggccctgcattccagaggccacttgtgtccaccccagcacaggccaat

SEQ ID NO: 12399 - DNA, 201 bp, Homo sapiens
tctgtggaatcgggcattcaggcaggcagcagggcatgcagagcacagatcgagcctgacgctaggcttgggagagaaccttgccttaaggtgggtcatcrgctgggaagcaagggttcctagcttagggaggcaaggctaggctcttggagggaggagagtcagcccccaccctggtcagactggcccagcactgggatg

SEQ ID NO: 12400 - DNA, 201 bp, Homo sapiens
accggagctggctgcagggccctgcccaggccgactccacctgtcagagtaaccaccgccttcccgtcacactttgctttggccacatgactcctcaggcrtcccctcccacctcctcttcctctctccaactcatctctgccctcatctctctcacttcctcactcccctctgcaaggcgtggcccatgccctggtcctc

SEQ ID NO: 12401 - DNA, 201 bp, Homo sapiens
cccagggctcacagtgagcagagttaaagcacctgccccagggggcgcaacatgaagcactgtccttggacacatcactttacctctctgagcctcagtgktctcagctgtacagtgggttatataagactgaatgaggtccaggcacggtggctcatgcctgtaatcccagcactttgggaggctgaggcgggcagatca

SEQ ID NO: 12402 - DNA, 201 bp, Homo sapiens
ccacacgggagcacctgctgatggcactggcaggcatcgacaccctcctgatccgagcatcctacgcccagcagcccgctgagagcaggtgtctggagccrgggcaggaggaccagcatgggcttggggaggggctccatctaagcggtgcagtacagcacagccacttacagactgtgtgacccttttgtgcctcacttt

SEQ ID NO: 12403 - DNA, 201 bp, Homo sapiens
gtgagatccaagggacccctcttgctgacagggcagaaggcccacaccggagctggctgcagggccctgcccaggccgactccacctgtcagagtaaccaycgccttcccgtcacactttgctttggccacatgactcctcaggcgtcccctcccacctcctcttcctctctccaactcatctctgccctcatctctctca

SEQ ID NO: 12404 - DNA, 201 bp, Homo sapiens
aggatggggtgctccggtgagtggggccgggggcaggactggacttgggcagcatagcccagggctcacagtgagcagagttaaagcacctgccccagggkgcgcaacatgaagcactgtccttggacacatcactttacctctctgagcctcagtgttctcagctgtacagtgggttatataagactgaatgaggtccag

SEQ ID NO: 12405 - DNA, 201 bp, Homo sapiens
ccaccccatttgcacacagacccacggctcgctgctgcggctgcaccaggtgaccccggccgactcaggcgagtatgtgtgccatgtggtgggcacctccrgccccctagaggcctcagtcctggtcaccatcgaagcctctgtcatccctggtgagtgactcccagtgacatggaaagctggaggaggcagagaggcctc

SEQ ID NO: 12406 - DNA, 201 bp, Homo sapiens
agagaggagggggatatgaccaccctgccccatctgcaggagcctgaagatccagctcaagtgccatcctgccagtggcccccagactgtggggttgggaygcctggcctctgtgtcctagaagggaccctcctgtggtctttgtcttgatttttcttaataaacggtgctatccccgccaggggcctcctgagtctttga

SEQ ID NO: 12407 - DNA, 201 bp, Homo sapiens
acccctagacccctcctctccagctgcccgtctggctccaacacatgcctgaagtgctgggttcctctgggaggaagccgggctccctcaccgccggagaygggctggagggcaggaaacctgggttctatttctgaccttggagctgctaatggccctccttgggacctgaggcacatgctgcacagtcccaggccactg

SEQ ID NO: 12408 - DNA, 201 bp, Homo sapiens
agttgggcttggggacattccttgtcctggggactttgccctgataactgtcccctcgctgctctgacagacccatggctcccagctgcggctccacctcrtctcccctgccgactcaggcgagtatgtgtgtcgtgcagccagcggcccaggccctgagcaagaagcctccttcacagtcaccgtcccgcccagtgaggg

SEQ ID NO: 12409 - DNA, 201 bp, Homo sapiens
cccggcccatccgcatcgagccctcctcctcacacgtggcggaagggcagaccctggatctgaactgcgtggtgcccgggcaggcccacgcccaggtcacrtggcacaagcgtgggggcagcctccctgcccggcaccaggtatggcagccccccgggaccaccttgctggaggggctggatgggactgttccagccccct

SEQ ID NO: 12410 - DNA, 201 bp, Homo sapiens
taggagctcccaaggaagatgcctgtggcttcttcagtgggaccaggacaggggggcattccaggcaggctttgacccttcagcgcctgctcagagagagraggaggttgagtggacgggagggaggttaaggctggtccagcttacctgggctccctatgagtgactgtttcagaatttgtcaggaagcagcagaatgtc

SEQ ID NO: 12411 - DNA, 201 bp, Homo sapiens
gctgacgccggcttctacctctgcgtggccaccagccctgcaggcactgcccaggcccggatccaagtggttgtcctttcaggtacggactctctgggaayggaggggtggggagggcaagccagggctcccctggggcctgctgacccctactctggccccagcctcagatgccagcccaccgccggtcaagattgagtc

SEQ ID NO: 12412 - DNA, 201 bp, Homo sapiens
tgggggccgggagtgtgctcagcccagggcgtgttctcacaggactctgtctgcagggggcggtgggcccagagtccaagtgagcccagagaggacccagrtccacgcaggccgcaccgtcaggctgtactgcagggctgcaggcgtgcctagcgccaccatcacctggaggaaggaagggggcagcctcccaccacaggt

SEQ ID NO: 12413 - DNA, 201 bp, Homo sapiens
agcggagccagagcgtgcgccccggagctgacgtcaccttcatctgcacagccaaaagcaaggtgtgcaggtcagggagtggggatggaggaagtctgtcytctggggtctctgagccccacccatgaccccctttcgccttgccctgcagtccccagcctataccctggtgtggacccgcctgcacaacgggaaactgcc

SEQ ID NO: 12414 - DNA, 201 bp, Homo sapiens
gggctttcagggcagcctccctgctgggaagtcacataagggcagagaaatagcccttggaggtcatgctttgacaagagcggttttcagtggagagaagrgatagaaaccagattggaaggaggcgacacatgggtgggaaggcagcgagtgtggacaactcctgcaagagtcttggctctgaagggaggccaggaagtg

SEQ ID NO: 12415 - DNA, 201 bp, Homo sapiens
tgggtcacggggagggacgacaagacagggacaggaacgggaacagccccagggctgggactgcaggaagtggtgacatccctcctctgggacccctctayccaactgggcccctagcccttcttacaaaccccctatccactctctcctgccccggcctgccccacggagcaggttcgatgcaggctcaggcatggccac

SEQ ID NO: 12416 - DNA, 201 bp, Homo sapiens
cctcactctgtgctcattcagtcattcaacaaacattgagtatccttgctggatgggtcctagaccagtgctgagaatacagaaataaggctccctgacckcagggagatccacttctgcaccaaatctcactgaaaagctgctccgggccatgtcctgtgcctgacactgaagattccagatggaatgagacagttgcct

SEQ ID NO: 12417 - DNA, 201 bp, Homo sapiens
catgggtgaggtgggacgctagacccagtcctgacactggggcggtagataggaagggagaaggtggttttccctggaagagtttccatcgagttccagcwggctgggctgggagtggcaccagggaagggaacaggagcttggcgtgagccgcagtgcccagctctgagcctgcctcctccctcctgaccctcccaggtg

SEQ ID NO: 12418 - DNA, 201 bp, Homo sapiens
cagctctgagcctgcctcctccctcctgaccctcccaggtgcatggctcgaggctacgcctgctccaggtgaccccagctgattcaggggagtacgtgtgycgtgtggtcggcagctcaggtacccaggaagcctcagtccttgtcaccatccagcagcgccttagtggctcccactgtgagtgtctcgggggtcatgcaa

SEQ ID NO: 12419 - DNA, 201 bp, Homo sapiens
gcccggggcatggtgtttggcattcctgacggtgtccttgagctcgtcccacaacgaggtactgccggagggcaggtgtcaccgggtgtgggggcggagcygggctgcccaccacagccggctgcagcccccgcccatgccgcccagcaggcccctgccctgacggccacttctacctggagcacagcgccgcctgcctgc

SEQ ID NO: 12420 - DNA, 201 bp, Homo sapiens
gcctgtaaggcaggatttggggggtggtaactgtaggagcagcccacaaagcccactgcccccgcccacgttgccacccccaacccaggaattctggcgcyggcccgatgggcagccggccacacgcgagcacctcctgatggcactggccgacctggatgagctcctgatccgggccacgttctcctccgtgccgctggc

SEQ ID NO: 12421 - DNA, 201 bp, Homo sapiens
gaactgagaaatgtcctgtttcccaggcaaccatgcaccctggcctcttggtttgggcagggaggggggtgggggagtgtggcacaggtgcaaaaaggccrccagatgctccatccctcacctatatggtccaacactcacaccccaaggtcagcctgtgacctctgggcttgcctctttgcaggtggcggcctacggtgg

SEQ ID NO: 12422 - DNA, 201 bp, Homo sapiens
ctccacccactttgcccctggggacttccaaggctttgccctggtgaacccacagcgaaacagccgcctgacaggagaattcactgtggaacccgtgcccragggtgcccagctctcttttggcaactttgcccaactcggccatgagtccttctactggcagctgccggagacataccagggagacaaggtgggccccag

SEQ ID NO: 12423 - DNA, 201 bp, Homo sapiens
aagggcaggggggctcctgtgccactgcagctggtgccaactggtcctgagcctctgggcctggagagtgaggcaggcaagggtcccagaggaaggcagartagctggaccccacccgagggtccaggatccccactgcctcagctgagctgtggctgctgcaggtgtgacagtgaccaccccctcgctgtcgggtgctgg

SEQ ID NO: 12424 - DNA, 201 bp, Homo sapiens
gatcacccagggcccttcctcaccatggccaccctctgcgggtccctgaggtagcccagtgacttctgtcatcttccactcgactccacaggcagccccgygcccaccatccactggtccaagctgcgttccccactgccctggcagcaccggctggaaggtgacacactcatcataccccgggtagcccagcaggactcg

SEQ ID NO: 12425 - DNA, 201 bp, Homo sapiens
tacggggagaccgtgttgctagcatcccccagtgatggccgaggaacccaactggggtccccatagagggacaggatcacccagggcccttcctcaccatrgccaccctctgcgggtccctgaggtagcccagtgacttctgtcatcttccactcgactccacaggcagccccgcgcccaccatccactggtccaagctgc

SEQ ID NO: 12426 - DNA, 201 bp, Homo sapiens
ccaagccagagctggggctgacatcagcgtccccactgagtccccacataaccagcctccttgctttctcccagatttcatcagctaaaccatcagatgcrggcacttatgtgtgccttgctcagaatgcactaggcacagcacagaagcaggtggaggtgatcgtggacacgggcgccatggccccaggggcccctcagg

SEQ ID NO: 12427 - DNA, 201 bp, Homo sapiens
accagcctgggcaacatggtgaaaccccgtctctactaaaatacaaaaaaaaaaaaaaaattagccaggcacggtggcgcacctgtagtctcagctactcrggaggctgaggcaggagaatcgcttgaacccgggaggtggacgttgcagtgagctgagatcgtgccactgcactccagcctgggaacagagcgagactcc

SEQ ID NO: 12428 - DNA, 201 bp, Homo sapiens
gtggctcacgcctgtaatcctagcaccttgggaggccgaggcaggcagattgcctgagctcaggagtttgagaccagcctgggcaacatggtgaaaccccrtctctactaaaatacaaaaaaaaaaaaaaaattagccaggcacggtggcgcacctgtagtctcagctactcgggaggctgaggcaggagaatcgcttgaa

SEQ ID NO: 12429 - DNA, 201 bp, Homo sapiens
tgccactgcactccaacctgtgcgacagagtaagaccctgtctcaaaaaataaatatataaataagtaaataaatagataccaaggcagggtagaggaaayagggaagaccaagccagagctggggctgacatcagcgtccccactgagtccccacataaccagcctccttgctttctcccagatttcatcagctaaacca

SEQ ID NO: 12430 - DNA, 201 bp, Homo sapiens
gagaggattgcttgagcccaggaggcagaggttgcaatgagccagatggtgccactgcactccaacctgtgcgacagagtaagaccctgtctcaaaaaatraatatataaataagtaaataaatagataccaaggcagggtagaggaaatagggaagaccaagccagagctggggctgacatcagcgtccccactgagtcc

SEQ ID NO: 12431 - DNA, 201 bp, Homo sapiens; identical to SEQ ID NO: 2111

SEQ ID NO: 12432 - DNA, 201 bp, Homo sapiens
acaaggagcaggtgaggagccatctgcttctgccaaatgccaagcggaatctatccacagaggagccagtcctgggtatcagccccacattctctctcctygtggagacgacatctttaccgccccggccagagacaaccatcatgcgacagccaccagtcacccacgctcctcagcccctgcttcccggttccgtcaggc

SEQ ID NO: 12433 - DNA, 201 bp, Homo sapiens
ctcggctcttcaagccccagggaggcatgggaggataaatgcagggatcagggcaagtcccctcttcctgtgcatttcgtctctgtgtcacttgaggccartccctagccctctctgagccatgggctcctcatctggaatacagaaggctgtagggcattccccatctgctcagggccctgtttgtggtggagagggcag

SEQ ID NO: 12434 - DNA, 201 bp, Homo sapiens
gctctgagcctgcctcctccctcctgaccctcccaggtgcatggctcgaggctacgcctgctccaggtgaccccagctgattcaggggagtacgtgtgccrtgtggtcggcagctcaggtacccaggaagcctcagtccttgtcaccatccagcagcgccttagtggctcccactgtgagtgtctcgggggtcatgcaaat

SEQ ID NO: 12435 - DNA, 201 bp, Homo sapiens
tcctgaccctcccaggtgcatggctcgaggctacgcctgctccaggtgaccccagctgattcaggggagtacgtgtgccgtgtggtcggcagctcaggtayccaggaagcctcagtccttgtcaccatccagcagcgccttagtggctcccactgtgagtgtctcgggggtcatgcaaatggtggagggctgggggacccc

SEQ ID NO: 12436 - DNA, 201 bp, Homo sapiens
cactgccctggcagcaccggctggaaggtgacacactcatcataccccgggtagcccagcaggactcgggccagtacatctgcaatgccactagccctgcygggcacgctgaggccaccatcatcctgcacgtggagagtaaggcctcatcccttctttgtctgcaccaaatggagatctgagccccccgactaggctcca

SEQ ID NO: 12437 - DNA, 201 bp, Homo sapiens
tgggaggccccccactcttgcaacggcaggatcaggaggccaagccgcagactgcacctgccttgagaccaggagccccatctcatctcacctcctagccrgctattgaccctttgccctctgtccccagcacttggggtcacccccacggtccggatcgagtcatcgtcttcgcaagtggccgaggggcagaccctggac

SEQ ID NO: 12438 - DNA, 201 bp, Homo sapiens
agaagacaacttcacagattccaccactgtctgctcatgcatttgcagctgcaccacatgtcaggcgttttaccatgtgagggactgttgtgggttaaccmttctgctcccagccagagccagaccctcttctggtgccccaattgccatcccttatcatctacttaaaggtgtcagttcatcaattaataccatttttat

SEQ ID NO: 12439 - DNA, 201 bp, Homo sapiens
cccttgaattgtcacactcacctggcaaaactacacagctggtgggttccacctctgcctatgctgagcctgcccccatgagctgcaggaggctggagagmagcacacagtacgctgactggtctcttaaaatttaggattccaaaccacataggaagtccctaccatggccagcaatcaccctctccctgcatggctcac

SEQ ID NO: 12440 - DNA, 201 bp, Homo sapiens
atgcaacctggtaagcctgagagacagagaccgggatggggacaaagcaggcaccacggccctccctgctgcccactcctcacctgcagcaggaggaggcyacagctggatgttcgagggccttggcccagccctggcttgggcaggacttaagggtgtaaaaaataacctacatgtgatggttcattttcaattctatgt

SEQ ID NO: 12441 - DNA, 201 bp, Homo sapiens
ccgggcggtaggcaggagggagcccgggaggctgggtccccgcggggaggcggagagagcgcgtcagggagacagggagcgggcggggtccctctccagcyctcaaggtgccggttcccggggcccaggctcgcactcccgggtacttggaggccaggggagagggaggactgtggcaggtgaggcaaggagctgtctgag

SEQ ID NO: 12442 - DNA, 201 bp, Homo sapiens
cgtggcaaaagggatattactcatgtaatgaagattaaggaccttaaaatagggagattctgctggactctctgtgtgggcccaatcaaatcacaagagcyattaaaagcagagagcctgccctggttggagtcagattctgcagaggaggaaggcagaggagaagctggagaggggaggtcagaagttccaagcaggagg

SEQ ID NO: 12443 - DNA, 201 bp, Homo sapiens
gggccgggcggtaggcaggagggagcccgggaggctgggtccccgcggggaggcggagagagcgcgtcagggagacagggagcgggcggggtccctctcchgccctcaaggtgccggttcccggggcccaggctcgcactcccgggtacttggaggccaggggagagggaggactgtggcaggtgaggcaaggagctgtct

SEQ ID NO: 12444 - DNA, 201 bp, Homo sapiens
acttgctccagcctgactcattctggttacctgctccaccctgactcattccagtcacctgctccaccctgactcattctgattacctgctccaccctgaytcatcctgattacttgccccagcctgactcattccagttacctgcaccaccctgactcattctgatcacctgtttcactctctttaaattagccaatctg

SEQ ID NO: 12445 - DNA, 201 bp, Homo sapiens
ctcttttcctctcccctcaaacaacctgactgtgggggacatgattctgactgtctcttattttaaacttaccaggcagcgactacactaagaacaaaaamattggctcaggaaaggcaaggtgaggccacagagcacagaacaaagcccaaaaaacagcccactgggtactatgaccctcgggggctggaaaaagtaaca

SEQ ID NO: 12446 - DNA, 201 bp, Homo sapiens
aatataacttttatatgtactggaaaaacaaaaatttgtgtgacttgtttgttgccatggtctgaaaccaaatctgcagtatctctgaggtacgtctgtartttccctttccctcttttgaacttgtttcttgtccttgtctggtcctgcaagctgtatgagtttgccttctctggtaggtctggggacattgtatccctt

SEQ ID NO: 12447 - DNA, 201 bp, Homo sapiens
aaactcaaaactttctgcttgctcttttcctctcccctcaaacaacctgactgtgggggacatgattctgactgtctcttattttaaacttaccaggcagygactacactaagaacaaaaaaattggctcaggaaaggcaaggtgaggccacagagcacagaacaaagcccaaaaaacagcccactgggtactatgaccct

SEQ ID NO: 12448 - DNA, 201 bp, Homo sapiens
ccaaatctgcagtatctctgaggtacgtctgtagtttccctttccctcttttgaacttgtttcttgtccttgtctggtcctgcaagctgtatgagtttgcyttctctggtaggtctggggacattgtatcccttataaccttggttcctggcatatgacactggtaccaagctctgttggactagtgaggctccctacaca

SEQ ID NO: 12449 - DNA, 201 bp, Homo sapiens
tgcctctgtctttgcagaaactcaaaactttctgcttgctcttttcctctcccctcaaacaacctgactgtgggggacatgattctgactgtctcttattbtaaacttaccaggcagcgactacactaagaacaaaaaaattggctcaggaaaggcaaggtgaggccacagagcacagaacaaagcccaaaaaacagccca

SEQ ID NO: 12450 - DNA, 201 bp, Homo sapiens
accaagctctgttggactagtgaggctccctacacacctcctgaactagagcaaaagctctgtgcacacaccgtgcatgtgtgagcctgtgaggagacggkgccttcctgcaggctgttctgaaggggtgttctgttgtgactggaggaaatagccatgggcccctgggcagaagtggctcagaatggaatggatggcccc

SEQ ID NO: 12451 - DNA, 201 bp, Homo sapiens
gttgatttattaaggttaccaagaaagaaagaaccaatagcataggtacatagatgatagatagataatagatagatagatgatagatgatagatagatgwtagatgatgatagatagatagatagatagatagatagatagatagacagacagatagatagataggtgatttattgggctaattggctcacacaattatg

SEQ ID NO: 12452 - DNA, 201 bp, Homo sapiens
tgatttattaaggttaccaagaaagaaagaaccaatagcataggtacatagatgatagatagataatagatagatagatgatagatgatagatagatgttagatgatgatagatagatagatagatagatagatagatagatagacagacagatagatagataggtgatttattgggctaattggctcacacaattatgga

SEQ ID NO: 12453 - DNA, 201 bp, Homo sapiens
aaagagcagagagcttctcctgaggtcacacagcacgtaagcggtggaacaatggcaggcacatgactctctaggcccctagtccagttttctgggttctrtgagaattgtagcccttggtttctgttacatgtggttctcttttgagccagagaaggaggacgcacagtgagaagaaagtgccagagccccaagtcctgg

SEQ ID NO: 12454 - DNA, 201 bp, Homo sapiens
agataggtgatttattgggctaattggctcacacaattatggaggctgagaagtcccatgatagactgtctggaagctggagaactagaaaagccagtagygtggctcagtccaaagtcaaagccctgaggacccagaatacagaacaggaggataaaggggctcactggtgcaaaagtcagagtccaaagatcatcgaac

SEQ ID NO: 12455 - DNA, 201 bp, Homo sapiens
tccccaccagtccacccactcacatcccttccagaaaaactctcacagacactggtttaatacttacaatttgagtagtctataatttatttttttgagaytgggcttgctggctggagtgcagtgttgttcatggctcactgcagcctgaatcttccaggcttaagcaaccctcccacctcagacacccaagtagctggg

SEQ ID NO: 12456 - DNA, 201 bp, Homo sapiens
tgaatcttccaggcttaagcaaccctcccacctcagacacccaagtagctgggactacaggcatgtgccaccaagcccggctaattcttttgaattttttstagagacagggtttctctatgttgcctaggctggtcacaaactcaggggctcaagcaatctgccagcctgagcctcccaaagtgctggaagtacaggcat

SEQ ID NO: 12457 - DNA, 201 bp, Homo sapiens
agtgtaaccccatctatattaaaaacacaaaattagccaggcgtggtagtgcacatctgtaatcccagctactcgaggggctgaggcagaagactcacttkcatccgagatgcagaggttgcagtgagccgagatcatgccactgcactccagcccctgggggacagagtgagactccatcttaaaaaaaaccccaaaact

SEQ ID NO: 12458 - DNA, 201 bp, Homo sapiens
tgggcaatgaagtcaacactgagaatatcatcaatttatggaatactgattatctcttttatagatatataaattataattatgtatatatatattatattataatatatataattaccatcacacctgagagagtgagatggattcttttcttccacagatgaaaatctgagtccctgagaacctagggttttggtatgg

SEQ ID NO: 12459 - DNA, 201 bp, Homo sapiens
gggcaatgaagtcaacactgagaatatcatcaatttatggaatactgattatctcttttatagatatataaattataattatgtatatatatattatattataatatatataattaccatcacacctgagagagtgagatggattcttttcttccacagatgaaaatctgagtccctgagaacctagggttttggtatggg

SEQ ID NO: 12460 - DNA, 201 bp, Homo sapiens
ggcaatgaagtcaacactgagaatatcatcaatttatggaatactgattatctcttttatagatatataaattataattatgtatatatatattatattataatatatataattaccatcacacctgagagagtgagatggattcttttcttccacagatgaaaatctgagtccctgagaacctagggttttggtatgggt

SEQ ID NO: 12461 - DNA, 201 bp, Homo sapiens
gcaatgaagtcaacactgagaatatcatcaatttatggaatactgattatctcttttatagatatataaattataattatgtatatatatattatattataatatatataattaccatcacacctgagagagtgagatggattcttttcttccacagatgaaaatctgagtccctgagaacctagggttttggtatgggtt

SEQ ID NO: 12462 - DNA, 201 bp, Homo sapiens
ccctctgtcccctccccagctccccctacaccgtaagaagctcccaggtaagcggctccagggccgggcggtaggcaggagggagcccgggaggctgggthcccgcggggaggcggagagagcgcgtcagggagacagggagcgggcggggtccctctccagccctcaaggtgccggttcccggggcccaggctcgcactc

SEQ ID NO: 12463 - DNA, 201 bp, Homo sapiens
cagactctcactgtcccctgcactgcctctgtctttgcagaaactcaaaactttctgcttgctcttttcctctcccctcaaacaacctgactgtgggggahatgattctgactgtctcttattttaaacttaccaggcagcgactacactaagaacaaaaaaattggctcaggaaaggcaaggtgaggccacagagcacag

SEQ ID NO: 12464 - DNA, 201 bp, Homo sapiens
ttgaacccaggaggcagagattgcagtgagccaagatcgtgccattgcactccagagtgggcaacaagagcaaaattccatctcaaaaagaaaaagatagygggcattgaagtaaagttttatgggtgaacaatggccaagtgtttaggggaatgcaggtgtgtcccctccaaggtaacagacaaactgtttcatcttgca

SEQ ID NO: 12465 - DNA, 201 bp, Homo sapiens
ctaactgtgcaattaggttcaaggatgagtcaccaccacctcactggccagacacacggaagtggagaaatggcagaaagactcgggtttcctggacaccycagactctcactgtcccctgcactgcctctgtctttgcagaaactcaaaactttctgcttgctcttttcctctcccctcaaacaacctgactgtggggga

SEQ ID NO: 12466 - DNA, 201 bp, Homo sapiens
cgagaaaacctttcctgcctacagggaaccagaactgacaatccctctataggagacaccgcaggtgagagcaggagcaaccacagacctgcactgcccgygctgtggttgcctcctggacggggccctcttgctgcagggcaggggatgaaccgtcccatctgcccaggcctgagtggccaactaactgtgcaattaggt

SEQ ID NO: 12467 - DNA, 201 bp, Homo sapiens
cactgccacaggcactgtctcccacatggaccctctgagaaacgaagccccaaatttgacttcctgttctattcaacatcctttacaacatcagtattggvggaaatcctattaagattatccagctgaaattatgttgatggacaccaatacttaaagcaggaattttgagaaactaacatgtaattttcatgccttttt

SEQ ID NO: 12468 - DNA, 201 bp, Homo sapiens
attgccactgccacaggcactgtctcccacatggaccctctgagaaacgaagccccaaatttgacttcctgttctattcaacatcctttacaacatcagtdttgggggaaatcctattaagattatccagctgaaattatgttgatggacaccaatacttaaagcaggaattttgagaaactaacatgtaattttcatgcc

SEQ ID NO: 12469 - DNA, 201 bp, Homo sapiens
tctgccctccaccagcagctcactgttcctcccctcccagctctgagcagacagctcctaactagagatcctatcaggaagccctggggctcacaggcccbgcatggaaatatgtggctgccatggagtctgcacctgacctgatgctggggacccccttgctcaaggaggcccagcctgccctccccataacctgcattt

SEQ ID NO: 12470 - DNA, 201 bp, Homo sapiens
cccaaccaggtgttgacccaggccttgcaggctcacgcgctctggaaaaaagagagaaaccaataaatgctcccctgggtgcagagtgctgctttttattycctgaggagttctccctcctcagtcactcccaaatcagatttaccctttctctgacggaagatgacgtccccacttttttctccctcccatggcactttt

SEQ ID NO: 12471 - DNA, 201 bp, Homo sapiens
agctctgtgcacacaccgtgcatgtgtgagcctgtgaggagacggtgccttcctgcaggctgttctgaaggggtgttctgttgtgactggaggaaatagcmatgggcccctgggcagaagtggctcagaatggaatggatggccccagttttgatcatctgggaacaggaagattctcagataaaaacccatgttttagaa

SEQ ID NO: 12472 - DNA, 201 bp, Homo sapiens
aggggccaactgacagtgcaattaggttcaaggatgagaaatcaccaccccctgccagatacacagaagtggggaaatggcagaaagactcgggtttcccrgacactccaggctctcagtgtctcctgcactgtctctgtctttgcagaaacacaaaacttgctgcttgctcttttcccctcccttcaaacaacctgactg

SEQ ID NO: 12473 - DNA, 201 bp, Homo sapiens
tggatgtcctggctcctcgcagaagccatagacaaacttgaaactgttattcaggacacaatgaaagtgacatgggggtacgggagggtggggtggaaagygggcaccacagcaaccaggcaacctcatgtgtcttgtggaaggcactgaaagtactgtgggggtcacatcaccatgagagagctgaaggatgtggggtgg

SEQ ID NO: 12474 - DNA, 201 bp, Homo sapiens
aagaacccagaattttgcaaaattttcagagagagggattcccctcttgtctcttagtgctagggttatgcatgactcgtgcttgaattacagtgtgtacwcagctgaaagtcttaattattagaatataagaggcccaaactactgctgttacagatatgtaaaactacacagtataagtttaaacaacccacaaccaat

SEQ ID NO: 12475 - DNA, 201 bp, Homo sapiens
caatgaagtcaacactgagaatatcatcaatttatggaatactgattatctcttttatagatatataaattataattatgtatatatatattatattataatatatataattaccatcacacctgagagagtgagatggattcttttcttccacagatgaaaatctgagtccctgagaacctagggttttggtatgggttc

SEQ ID NO: 12476 - DNA, 201 bp, Homo sapiens
acaatctaaatgatacactaataacaaaccttcatgaaaatgacatttcaaccatctgaatttctgctttaagttataaactccaaaatgaactaactccyaataatttacagtagggagctctaagccacaaataaaggtgtcaggacagacctgagacctggagtgagcacatccctcagggtcatgagtcaatcctgt

SEQ ID NO: 12477 - DNA, 201 bp, Homo sapiens
tcatcactctctagttccagagtgtttttatcacctcagggggaactctgcacccattaagcagtcaccctccatttccacctgccagcagaccctgtcgycacaaatccacttctttctctatcgacttgcctcttatgaatatttcacaaaaatgggctcataagttacgtagcctcctgtgactggcttccttcactt

SEQ ID NO: 12478 - DNA, 201 bp, Homo sapiens
tgtaggaaaaaactatatgttgtttctccattcattggtcgatggacattttcttttaaatcaaataggaaaaacaagagaggaattacaaatatatatakgtgtgtgtgtatatatatatgtcttgtagggttgagacaatctcagtcagctttttttaacctgtgaatgtcgtgatttctccatcatttctgaaggaga

SEQ ID NO: 12479 - DNA, 201 bp, Homo sapiens
tgtcgtgatttctccatcatttctgaaggagagttttgcagacatacaattcttggttgatagtccttttactttctcagctttaaatttgtcatcccaaygcctcctgaaccccatggtttctgatgaaaatttgtatgttaatcttattgaggatccattgtacctgaaaagttccttctctgttattgctttcaagat

SEQ ID NO: 12480 - DNA, 201 bp, Homo sapiens
tgttctctatttgagttaagatagttcttctgatttcctttagttttttgcccatagtttcctttagctctgtgaacatatttaagcagtcaattcaaagttgtttgtccagtaagtatgttcaatggcctttctcaggaacagtttctgtcaattcctcttttttcttgagaatgggtcttactgtctagtttaattgca

SEQ ID NO: 12481 - DNA, 201 bp, Homo sapiens
gctatacagattcccagggatatggaagcttttcaaaacccatattcccatctcactcacccagtttctcctccaggcttttctgtatgtctattaccttyctcatgtaatatatttttgccccaagggggcagctgctggttcagtggcacttaaatggttttagcagatgccctctgcctctgtgacctaagagagttc

SEQ ID NO: 12482 - DNA, 201 bp, Homo sapiens
aacagctctccgagggaatttttttttttttttttttgatggagttttgctcttgttgcccagggtggagtgcaatggcatgatcccggctaactgcaacmtctgcctcccgggttcaagcgattctccttcctcacctcccgagtagctgggactacaggcgcgagccaccacacccagctaattttgtatatttagtag

SEQ ID NO: 12483 - DNA, 201 bp, Homo sapiens
gatggagttttgctcttgttgcccagggtggagtgcaatggcatgatcccggctaactgcaacctctgcctcccgggttcaagcgattctccttcctcacytcccgagtagctgggactacaggcgcgagccaccacacccagctaattttgtatatttagtagagactgggattctccatgttgatcagtctggtctcga

SEQ ID NO: 12484 - DNA, 201 bp, Homo sapiens
tcattctggttacctgctccaccctgactcattccagtcacctgctccaccctgactcattctgattacctgctccaccctgactcatcctgattacttgycccagcctgactcattccagttacctgcaccaccctgactcattctgatcacctgtttcactctctttaaattagccaatctgaattagtttagcctgtg

SEQ ID NO: 12485 - DNA, 201 bp, Homo sapiens
cattccagtcacctgctccaccctgactcattctgattacctgctccaccctgactcatcctgattacttgccccagcctgactcattccagttacctgcwccaccctgactcattctgatcacctgtttcactctctttaaattagccaatctgaattagtttagcctgtgcggtctaaccctagccaataggggaataa

SEQ ID NO: 12486 - DNA, 201 bp, Homo sapiens
aatgcaggagagcatgacagagatgacaggacctcaaggtgccaggaaagctggtgctgggccaggaccaaggagccatcagcaggacactcactcataawgctcacctataataatacaattactgcatatgtaatatatcaaaatataataaaataacaaaataacaaaaataatatggcacagctgcaaataccccat

SEQ ID NO: 12487 - DNA, 201 bp, Homo sapiens
gccccacagggtcagcccctgaacactggctgcaaatgtccccccatcccttcccagccctttcggtgttgctgtgaatctgtccctcactgagaactggyggggagatgtgggggaggaggggaggtttctttatgctgtgtcaaagcatggagacagacctctccttctctcctgaacctcacactatcccttcccaga

SEQ ID NO: 12488 - DNA, 201 bp, Homo sapiens
tacaaacatgaaataatatgtctataaacacatctctagatagatagcttatgaatgaattccctaccccagctcccttactggttgccctgtgaacacavggagtcagggaacaggacccagctagggtccctcatccttctcttgcatccaggcaggtcctgcatccactctggctgcacagaaggctcccatccctgc

SEQ ID NO: 12489 - DNA, 201 bp, Homo sapiens
ggtttggatgggtgcgtttgtttctcataatctagttgcctatatggggatctctgtgcttgtgtgaagtgagtgagactctgcctgaaaggagaaacacrtaccaattgattcatgtggcccattctatctggatgtcctggctcctcgcagaagccatagacaaacttgaaactgttattcaggacacaatgaaagtga

SEQ ID NO: 12490 - DNA, 201 bp, Homo sapiens
gttaggcaaaagattcttacataaaatacaaaaaacatgatctacagatgaaaaaaaagtgagagacaaattgggcttagttaaaatttaaaacttaagtrctccaaaagacaatattgagaaaatgagaagacaagccgtagattgagagaaaatatttcacaatttatcacaaattacatctgtgatgaagaacatgta

SEQ ID NO: 12491 - DNA, 201 bp, Homo sapiens
ctctgcacacctctattctgtctccccgacctccccagccacagaaatcttcccagtgcaccccctggatttctcagtccacatcagcaaaacctcctcakcctctctcaggatgttcctgcatctcgcagctccagcagcaacctgggtctccctgaggacatgaccccctccgaagtcctcccacatgggggagtttcc

SEQ ID NO: 12492 - DNA, 201 bp, Homo sapiens
gatacaataggaaagaaggtcgcctacaagtcgtggtggagctgggcttgcacgcagacaatcctgccccagggccatgctcacatctctgcactatccaraatgtgagggtgggtggagagtccagctcagggagagtgattggagagacagaataataagaagagtgggcagactggatcactctgatggttctggggc

SEQ ID NO: 12493 - DNA, 201 bp, Homo sapiens
gtagctcctggttcactgtcaccctctccagcattgctgtctccttgactcttggtgacttcaacatacgcagatgtggtgggctgagtaatggtccccadagatgtccagtcttaatcgttggaacctgtgaacaggttgcattgcgtggcaaaagggatattactcatgtaatgaagattaaggaccttaaaataggga

SEQ ID NO: 12494 - DNA, 201 bp, Homo sapiens
atcacctgtttcactctctttaaattagccaatctgaattagtttagcctgtgcggtctaaccctagccaataggggaataacacagcagcaggggccacrtgcatcagggataagaaccccttccccttccttgtccaggggtgtgctcaccattgctccatctgtgagggcacacccttgtatagaagtaattgccttg

SEQ ID NO: 12495 - DNA, 201 bp, Homo sapiens
agcctgtgcggtctaaccctagccaataggggaataacacagcagcaggggccacgtgcatcagggataagaaccccttccccttccttgtccaggggtgygctcaccattgctccatctgtgagggcacacccttgtatagaagtaattgccttgctgagaagaaaaaaagaaaattttatatttgagtgctatttcttt

SEQ ID NO: 12496 - DNA, 201 bp, Homo sapiens
tcttcttctccctgtggagtagaaagtttcttgagacccctcagcctgaggctgcctctgcccaccctttgcacttggggattgccactgccacagccacygtctcccacatggaccgtcctggagagggagctccacatttgagttcctgtttcatttgatataggttacaacattagtattggtggaaatccttttaag

SEQ ID NO: 12497 - DNA, 201 bp, Homo sapiens
gcaaagggagtcacccccacactacatccctagtctggagagtaagggctatcattgtgctgaagcccaaagggaatcatctaaaacttccctcatcccarccaagccagaagcaatattgcgccccaggtgggacttcaggagggtactgcaggtattgtaggggtggcactgccattagagagctgaaggatggggggt

SEQ ID NO: 12498 - DNA, 201 bp, Homo sapiens
gatttcttgtctcactgagagttccaagccccaggtagaagtgccctgcctggttactgggaagcaccatccacactcatgggcctacccagcctgggccstgtgtgccagcacttactcttttgtaaagcacctgttacaatgagggacagatttatcaccttgatgactgtggtgatgggacctgatcccagcagtcac

SEQ ID NO: 12499 - DNA, 201 bp, Homo sapiens
aaaaccaacagcgataatatcatacactgtcatggtgctatgtgttaatctgtgtccttagcactttcaaaatatgaattcatttaattgtcactatacawctatggggtgtgcctgctaattttccgttttcaggtgatacaataggaaagaaggtcgcctacaagtcgtggtggagctgggcttgcacgcagacaatcc

SEQ ID NO: 12500 - DNA, 201 bp, Homo sapiens
aaaaaaaaaaccaacagcgataatatcatacactgtcatggtgctatgtgttaatctgtgtccttagcactttcaaaatatgaattcatttaattgtcackatacaactatggggtgtgcctgctaattttccgttttcaggtgatacaataggaaagaaggtcgcctacaagtcgtggtggagctgggcttgcacgcaga

SEQ ID NO: 12501 - DNA, 201 bp, Homo sapiens
gtgggcccaatcaaatcacaagagccattaaaagcagagagcctgccctggttggagtcagattctgcagaggaggaaggcagaggagaagctggagaggrgaggtcagaagttccaagcaggaggattgaatgtgccttaggcaccgtgtgtgagtatctgagagaaggctctaggagctaagggtggctcttaacaagg

SEQ ID NO: 12502 - DNA, 201 bp, Homo sapiens
ctcctctcctccatgatcttctcctgtctgcctgaatctcatgcccttgttatcccctaggcctcatcatggctaagaaccccagcccttccatactctcwatctcacacttcccactctctgaccatctttccactcatccccttgcaaggtggccacaggctctgaggacacagatactatcattttatcatatgctgt

SEQ ID NO: 12503 - DNA, 201 bp, Homo sapiens
gggcagttggtcgaggacccacatctgctttccttgtttttcctgatcccgccctgagtctgcagtcacacatttctggaaacttctcgagggtccaagaytaggaggttcctctaggacctcatggccctgccacctttctggcctctcacaggacattttcttcccacagattgaaaaggagggagctactctcaggct

SEQ ID NO: 12504 - DNA, 201 bp, Homo sapiens
ggacccagacccgtcagggcagaaggtttgagtaatgctgggtaatctcccaaggccctgctcctgtgctctgacatcctcagtagcattggtgctgaggycctgcttccaatgggctgttcccaaccagtgacagatcacaccagtgacacgaaagcaggacattcctgggagaccagggactcctctgatggccaactg

SEQ ID NO: 12505 - DNA, 201 bp, Homo sapiens
taaggactttcattgtgctgaaagccaaagggaaacctctgacactgcccccatcctggccaaatcaaaaatcatagtgtgtcccagggtgggtcttgtgkaagatacttcaagtattgtggggatcacatcaccattacagagctgaaggatgtgggatggtgttggggctgtctattgtctctacgtaatccagcaacc

SEQ ID NO: 12506 - DNA, 201 bp, Homo sapiens
tcactggctcactagctgtcacttcaccaacaatcattccatttaataaaagggagatccccccatgggccagcatttcccaggtggaggcctcttgcagvcataatcttccaacagagaatttccctgggaacctagaaagaagagaagaggctcaagcaaaaaggatgaaagaaatagcaacaacggcggggcatggtg

SEQ ID NO: 12507 - DNA, 201 bp, Homo sapiens
catgatcttctcctgtctgcctgaatctcatgcccttgttatcccctaggcctcatcatggctaagaaccccagcccttccatactctctatctcacactwcccactctctgaccatctttccactcatccccttgcaaggtggccacaggctctgaggacacagatactatcattttatcatatgctgtgatgtaatatc

SEQ ID NO: 12508 - DNA, 201 bp, Homo sapiens
ttcctcagtattctaaagacactctaatcactcaagagattctaaggtttttaggagaaaccagggacaaaactaaatgtttttgtgataactcatattayccccttttctttgaccacatatttttcatacgaaaaggattataacagtaaagaagcattggcatattatccaagtctcattcggtcattcaaaattagg

SEQ ID NO: 12509 - DNA, 201 bp, Homo sapiens
caaggtggccacaggctctgaggacacagatactatcattttatcatatgctgtgatgtaatatcagtggaccactcattgcatatgtgcttgctttccaygcttggagtctaccctgtagtacatcaattccaacaatcgttccaccctcctgggattcccaatccagtgatcctgccatctactcactgtccctcaccc

SEQ ID NO: 12510 - DNA, 201 bp, Homo sapiens
attctcaaggtatccaggatccactcagccaagagtcctttcctcagtattctaaagacactctaatcactcaagagattctaaggtttttaggagaaacsagggacaaaactaaatgtttttgtgataactcatattacccccttttctttgaccacatatttttcatacgaaaaggattataacagtaaagaagcattg

SEQ ID NO: 12511 - DNA, 201 bp, Homo sapiens
attccaaaccacataggaagtccctaccatggccagcaatcaccctctccctgcatggctcaccctcagcctcctcctggcctgggtgactcttacacacyttttctttgtgctcacacatccaacctgccttccccattcttacttcagctgatgaccttgcttcccacttcactgagaaaactgaacacattagaagac

SEQ ID NO: 12512 - DNA, 201 bp, Homo sapiens
tggctcaccctcagcctcctcctggcctgggtgactcttacacactttttctttgtgctcacacatccaacctgccttccccattcttacttcagctgatdaccttgcttcccacttcactgagaaaactgaacacattagaagacaacttcacagattccaccactgtctgctcatgcatttgcagctgcaccacatgtc

SEQ ID NO: 12513 - DNA, 201 bp, Homo sapiens
tcccagccagagccagaccctcttctggtgccccaattgccatcccttatcatctacttaaaggtgtcagttcatcaattaataccatttttatctttatygtcaacctttttcctctctccccactggatcattgtggcagtcatgagaatgcacatcccagcccctcatctagaagaagcagaattgatgatggcccca

SEQ ID NO: 12514 - DNA, 201 bp, Homo sapiens
cagggctccctgccacccttactgaacttcccttagcctgcacagggtctaggatgcttccagctgaccttcctgcactctctacatcactgaggctcagmgttgctttgtggtccagtggctttcccagcattttctgtctcatgaatttctctcacaagtatttcccctaataaatccttacatgtttactactgtatt

SEQ ID NO: 12515 - DNA, 201 bp, Homo sapiens
tgcacagggtctaggatgcttccagctgaccttcctgcactctctacatcactgaggctcagagttgctttgtggtccagtggctttcccagcattttctdtctcatgaatttctctcacaagtatttcccctaataaatccttacatgtttactactgtattggggtccgcttctcaggggaccctaactaacacaagtg

SEQ ID NO: 12516 - DNA, 201 bp, Homo sapiens
tctctcacaagtatttcccctaataaatccttacatgtttactactgtattggggtccgcttctcaggggaccctaactaacacaagtggcatgaagggtsatccatgaaaacaggcaaaaatgggaatttgaaataagcttcccactgcctggcaggccaagaggatgccacccgggttggtggcagacacagaaagtcc

SEQ ID NO: 12517 - DNA, 201 bp, Homo sapiens
catgctgttctcgtgatactgagggaattctcatgagatctgatggttttataaggggcttttccctgcttcattctgcacttctctctcctgtcatcatrtgaagaaggatgtgtttgcttccacttctgtcatgactgtaagtttcctggggcaggctcctcagccatgcagaactgtgagtcaattaaacctctttcc

SEQ ID NO: 12518 - DNA, 201 bp, Homo sapiens; identical to SEQ ID NO: 2304

SEQ ID NO: 12519 - DNA, 201 bp, Homo sapiens
agaatcctgagccaaatgaaccttgtttatataaattagtcagtctcagacatttctttatagcaacacaaaacggaataagacaaccctctcatcatagstatgtgtctgtggcagccagcccccattctcaaggtatccaggatccactcagccaagagtcctttcctcagtattctaaagacactctaatcactcaag

SEQ ID NO: 12520 - DNA, 201 bp, Homo sapiens
ggatgtgtctttattaaaatggaggtaatcctaggtatgtggtcttttttacatgaaccgtactgtcactggctcactagctgtcacttcaccaacaatcdttccatttaataaaagggagatccccccatgggccagcatttcccaggtggaggcctcttgcaggcataatcttccaacagagaatttccctgggaacct

SEQ ID NO: 12521 - DNA, 201 bp, Homo sapiens; identical to SEQ ID NO: 2306

SEQ ID NO: 12522 - DNA, 201 bp, Homo sapiens
ctaaatgctcaaacatttccagacatcagaatcctgagccaaatgaaccttgtttatataaattagtcagtctcagacatttctttatagcaacacaaaayggaataagacaaccctctcatcataggtatgtgtctgtggcagccagcccccattctcaaggtatccaggatccactcagccaagagtcctttcctcagt

SEQ ID NO: 12523 - DNA, 201 bp, Homo sapiens
gtagtagccatttaagcactgtaataatatctatctatatcccatgagtataatatatataaataaatgataacaagaaaataatctttatgtgtaatacdtgactatgactctgacagacaaacctgagagcatagtacgacacttatcaccttcactcatgagccagatagtgtgaaatgagaagcagagatttgaaat

SEQ ID NO: 12524 - DNA, 201 bp, Homo sapiens; identical to SEQ ID NO: 2309

SEQ ID NO: 12525 - DNA, 201 bp, Homo sapiens
ctggttcctggccaagcaaatcttcactgctttgctagcccatctataaattcaaccagacttttcaaatatgtattttcctcccatttttccagttgtastcaatgggagaagtggtccaaatgacctaatcagcaattgctggaaaccaaagtaacagtatacaattctatgtgttaatatcatataccaagagagaaa

SEQ ID NO: 12526 - DNA, 201 bp, Homo sapiens
ttcattgcaagcatccttaacaagaactacttacattggaacaaaaccacacagaattgtaaggagccatgtgacagagaggaccacgaggccatgaaaayggctttggctacaaataggtcatttgatccttggctcactggcatctctgtagattttcatgtatacaatcttcaatctgatgtgcaaggtaattccatc

SEQ ID NO: 12527 - DNA, 201 bp, Homo sapiens
ttcaatccctatcaaaataccaatatcattattcacagaaatagaaaaaatcgtgaaattcatatggaatcgtaaaatatcccaaatagccaaagcaatcmtgagcaagaagaacaaagctagaggcatcacacttactgaattcaggatacaatataaagttatagtaaccaaatcagcatggtgctagcataaaaacag

SEQ ID NO: 12528 - DNA, 201 bp, Homo sapiens
tgtttataaattacccagtctcaggtatttctttataaaagtgtgagaatgaactaattcagaaaatcggtaccaggagttgggtattactataaaaattsttgaaaatgtggaaacagctttggaactgggtaacaggcagaggttggaagagtttggagagttcagaagacaagaaaatgggggaaaatttgcaacttc

SEQ ID NO: 12529 - DNA, 201 bp, Homo sapiens
cttcttcacgacagcaggggctggagccaccttcttctccttggccttctttccttttggcatcttggatggtgggaggagaaagaaagaaacctattttstttataaattacccagtctcaggtatttctttataaaagtgtgagaatgaactaattcagaaaatcggtaccaggagttgggtattactataaaaattct

SEQ ID NO: 12530 - DNA, 201 bp, Homo sapiens
ttctcaggggaccctaactaacacaagtggcatgaagggtgatccatgaaaacaggcaaaaatgggaatttgaaataagcttcccactgcctggcaggccwagaggatgccacccgggttggtggcagacacagaaagtccatggcacaaggtgcagctgagcagctgggggtctcaccagtgctgagctgagaagttgcc

SEQ ID NO: 12531 - DNA, 201 bp, Homo sapiens
tgaaatgggcatgttgtctctgagtggaagtgaggggacactactgggcagagctccatcgaagggtggctggtgtcctctataccatttatctacacatvttggggtttttctagcatgaaatgtcccagaggcagccaaacccgaagcttggctcctccaaggaatgagtgtgagtatcatagccctggccaatgagca

SEQ ID NO: 12532 - DNA, 201 bp, Homo sapiens
cattattcacagaaatagaaaaaatcgtgaaattcatatggaatcgtaaaatatcccaaatagccaaagcaatcatgagcaagaagaacaaagctagaggyatcacacttactgaattcaggatacaatataaagttatagtaaccaaatcagcatggtgctagcataaaaacagacacatagactaatggaatacaaaag

SEQ ID NO: 12533 - DNA, 201 bp, Homo sapiens
gcatcgatgctgtgtaaaaagataatgagaatctgcggattgttgacagctatgactggctacatttgacaccctcggcagtgtctcatggacaggtcttyatctcctgtagcaaaagggcagatagcaaggaatgttagctctacatcactatgagggccacagtgctccagagatgtttgacactcagccaaggcaggc

SEQ ID NO: 12534 - DNA, 201 bp, Homo sapiens
agatgtttgacactcagccaaggcaggcctgttacaggaaagtcagggctttggtggggaaacctgagattctgcaaactggaacaggattatgcgatgcdtgccctccaggatcttctgggcatgcagaggaggctcacccttctctagtaatggttcccactttcactgctggaagatgctacacaatcctcaccccta

SEQ ID NO: 12535 - DNA, 201 bp, Homo sapiens
gatcttctgggcatgcagaggaggctcacccttctctagtaatggttcccactttcactgctggaagatgctacacaatcctcacccctatgatgccgcgvgaatcccactcaggaggtttgcaggaactagccagcacgtccccataggagcccagggactacttctgggattggaatttgagggtgtttgatcaaggaa

SEQ ID NO: 12536 - DNA, 201 bp, Homo sapiens
agaaatagaaaaaatcgtgaaattcatatggaatcgtaaaatatcccaaatagccaaagcaatcatgagcaagaagaacaaagctagaggcatcacacttmctgaattcaggatacaatataaagttatagtaaccaaatcagcatggtgctagcataaaaacagacacatagactaatggaatacaaaagagaactcaca

SEQ ID NO: 12537 - DNA, 201 bp, Homo sapiens
aggaaccagaatttcaggctggatgaatataatcctttggcttgaagacactttctcagggcatggatttatcaaacactccaggactttgataagtggartaaacccactgctggggtgtatccacatagtctagaaaaaaacatgcccaactctcaacaaggtagacatgtcttagttgccctggaacatgtagaggat

SEQ ID NO: 12538 - DNA, 201 bp, Homo sapiens
gctggatgaatataatcctttggcttgaagacactttctcagggcatggatttatcaaacactccaggactttgataagtggagtaaacccactgctgggrtgtatccacatagtctagaaaaaaacatgcccaactctcaacaaggtagacatgtcttagttgccctggaacatgtagaggatggaataacaagctgagg

SEQ ID NO: 12539 - DNA, 201 bp, Homo sapiens
gagtaaacccactgctggggtgtatccacatagtctagaaaaaaacatgcccaactctcaacaaggtagacatgtcttagttgccctggaacatgtagagratggaataacaagctgaggggagtgggcttggtgaaggcctaccaaaaccatgctctacaagagggcccagaggacacaccttccaccagagcctcagga

SEQ ID NO: 12540 - DNA, 201 bp, Homo sapiens
cccagtcttgccttccctttgataatgcagtaagggaccccattttatgacacaggacaggcaagaagacaaccagcttgatgggatctacatcatgtgcwatcaccaccagctgagctttcttgttctccaccaaggtggtgatggtgttaactcctgctcgaaggacaggtggactcttagtggggaatgtcccctttg

SEQ ID NO: 12541 - DNA, 201 bp, Homo sapiens
tttggtgctattcttgtgataattctcataagatctggtgtttaaaaatctgtgtcacctccctgctctctctccctcctgctccaggcatgtaagtaatrtctgcttccccttagccttccagcataatcgaaagttccctgaggccctctcataagatgagcagatgccagaatcatactttctgtatagcctgcagaa

SEQ ID NO: 12542 - DNA, 201 bp, Homo sapiens
ctgaatgtgtctatgtctacagtaacaggtaagaaatgggagaccagcccatcctcatgtccaccatgacccctgatattgtttggatctgtgtccccacmcaaatctcatgttcaattgtaatccctaattttggaggtggtgtctggtggcaggtgatcggctcatgaggatggatccttcatgaacggtttagaacca

SEQ ID NO: 12543 - DNA, 201 bp, Homo sapiens
gttttttctaagattgccttgtgagggactgagatgcaagatttgttcatgcctcctctttgtgacattaagggcctctggcttctctttctgccaaagcvtctgaatgtgtctatgtctacagtaacaggtaagaaatgggagaccagcccatcctcatgtccaccatgacccctgatattgtttggatctgtgtcccca

SEQ ID NO: 12544 - DNA, 201 bp, Homo sapiens
tgactgacctggattagtttatgactatgttttttctaagattgccttgtgagggactgagatgcaagatttgttcatgcctcctctttgtgacattaagdgcctctggcttctctttctgccaaagcgtctgaatgtgtctatgtctacagtaacaggtaagaaatgggagaccagcccatcctcatgtccaccatgacc

SEQ ID NO: 12545 - DNA, 201 bp, Homo sapiens
ccggtgttctcttacttatgttggccatgtcctcatgaatttagtgaaatgggcatgttgtctctgagtggaagtgaggggacactactgggcagagctcmatcgaagggtggctggtgtcctctataccatttatctacacatgttggggtttttctagcatgaaatgtcccagaggcagccaaacccgaagcttggctc

SEQ ID NO: 12546 - DNA, 201 bp, Homo sapiens
tgtccaaggtacctcccggtgttctcttacttatgttggccatgtcctcatgaatttagtgaaatgggcatgttgtctctgagtggaagtgaggggacacyactgggcagagctccatcgaagggtggctggtgtcctctataccatttatctacacatgttggggtttttctagcatgaaatgtcccagaggcagccaaa

SEQ ID NO: 12547 - DNA, 201 bp, Homo sapiens
aaatcgtgaaattcatatggaatcgtaaaatatcccaaatagccaaagcaatcatgagcaagaagaacaaagctagaggcatcacacttactgaattcagkatacaatataaagttatagtaaccaaatcagcatggtgctagcataaaaacagacacatagactaatggaatacaaaagagaactcacaataaatccatg

SEQ ID NO: 12548 - DNA, 201 bp, Homo sapiens
tcaacaaggtagacatgtcttagttgccctggaacatgtagaggatggaataacaagctgaggggagtgggcttggtgaaggcctaccaaaaccatgctcyacaagagggcccagaggacacaccttccaccagagcctcaggaacttgatggtgagagggacctgcatcactaagaagtgtcagggtattgtcctttgta

SEQ ID NO: 12549 - DNA, 201 bp, Homo sapiens
tgccctggaacatgtagaggatggaataacaagctgaggggagtgggcttggtgaaggcctaccaaaaccatgctctacaagagggcccagaggacacacmttccaccagagcctcaggaacttgatggtgagagggacctgcatcactaagaagtgtcagggtattgtcctttgtaggctgggggtgatggtagtaaaga

SEQ ID NO: 12550 - DNA, 201 bp, Homo sapiens
gcctaccaaaaccatgctctacaagagggcccagaggacacaccttccaccagagcctcaggaacttgatggtgagagggacctgcatcactaagaagtgwcagggtattgtcctttgtaggctgggggtgatggtagtaaagatagtcccagagtttcatttctaatatcactggggagagtgtggccctgaagagacaa

SEQ ID NO: 12551 - DNA, 201 bp, Homo sapiens
ctaccaaaaccatgctctacaagagggcccagaggacacaccttccaccagagcctcaggaacttgatggtgagagggacctgcatcactaagaagtgtcrgggtattgtcctttgtaggctgggggtgatggtagtaaagatagtcccagagtttcatttctaatatcactggggagagtgtggccctgaagagacaaag

SEQ ID NO: 12552 - DNA, 201 bp, Homo sapiens
ggtgagagggacctgcatcactaagaagtgtcagggtattgtcctttgtaggctgggggtgatggtagtaaagatagtcccagagtttcatttctaatatyactggggagagtgtggccctgaagagacaaagaccaagtggtggcagtgacttgcaaaagccagagggcacggttactatggcaacctcggaggagaagc

SEQ ID NO: 12553 - DNA, 201 bp, Homo sapiens
gccaaagcaatcatgagcaagaagaacaaagctagaggcatcacacttactgaattcaggatacaatataaagttatagtaaccaaatcagcatggtgctmgcataaaaacagacacatagactaatggaatacaaaagagaactcacaataaatccatgcattgatagccaactcatttttggtaaaggaactgagaata

SEQ ID NO: 12554 - DNA, 201 bp, Homo sapiens
tttctaatatcactggggagagtgtggccctgaagagacaaagaccaagtggtggcagtgacttgcaaaagccagagggcacggttactatggcaacctcdgaggagaagccaagaggactcaagctgcagggaatgtggggaagtataatagagggtggtgtcccagggttaggacaggcagctggttgatatctatgat

SEQ ID NO: 12555 - DNA, 201 bp, Homo sapiens
caagtggtggcagtgacttgcaaaagccagagggcacggttactatggcaacctcggaggagaagccaagaggactcaagctgcagggaatgtggggaagkataatagagggtggtgtcccagggttaggacaggcagctggttgatatctatgataagaaagcaagaattgagaagcaggagggtgaaggtgtttgactc

SEQ ID NO: 12556 - DNA, 201 bp, Homo sapiens
atggccacatgcgtgctggtggagtgtcccatgacagatgcaaaatgcctgaattttctgactcttcccgtcagacccccccaagacacatatgacccacyaccccatctctgaccatgaggccaccctgaggtgctgggccctgggcttctaccctgcggagatcacactgacctggcagcgggatggggaggaccagac

SEQ ID NO: 12557 - DNA, 201 bp, Homo sapiens
acactcaatgtgcctgggggtctgagtccagctcttctgagtccctcagcctccactcaggtcaggaccagaagtcgctgttccctcctcagggactagarttttccacggaataggagattatcccaggtgcctgtgtccaggctgttgtctgggttctgtgctcccttccccaccccaggcgtcctgtccattctcaag

SEQ ID NO: 12558 - DNA, 201 bp, Homo sapiens
tcagggcccctcacgttcacctcctttcttagagctgtcttcccagcccatcatccccgttgtgggcatcattgctggcctggttcttctagttgctgtawtcactgtagctgtggtcgctgctgtgatgtggaggaataagatcccaggtaggaaaggggtgagctctgagtttccttcttccattggtggatttcaagc

SEQ ID NO: 12559 - DNA, 201 bp, Homo sapiens
agtggtgtcttctggagagaagcagaggtacacatgccatgtgcagcacgaggggttgcctgagcccctcacactaagatggggtaaggagacgaatgagvggtcatgtctcttctcaggcaaagcagaagtccttctggagcctttaagcagggtcagggctgaggcctgggggtcagggcccctcacgttcacctcctt

SEQ ID NO: 12560 - DNA, 201 bp, Homo sapiens
ttgtggagaccagacttgcagggtacagaaccttccagaagtgggcagctgcagtggtgtcttctggagagaagcagaggtacacatgccatgtgcagcaygaggggttgcctgagcccctcacactaagatggggtaaggagacgaatgaggggtcatgtctcttctcaggcaaagcagaagtccttctggagcctttaa

SEQ ID NO: 12561 - DNA, 201 bp, Homo sapiens
tacattgtctgggaaagtgaaacttaggagctttgtgattcctgttgtaatgcttttagacacatttatatgtcaagggaccaaagtcacatttttggccvattagattcctgatcattaggagttaccaagattctgctacccactgtagttaataaacaaaaagcaaactggtctctattctatctcatgcactcaggc

SEQ ID NO: 12562 - DNA, 201 bp, Homo sapiens
ctgctacccactgtagttaataaacaaaaagcaaactggtctctattctatctcatgcactcaggcacaacttttccagatttaaaaaacaaacaaacaayaacaacaaaaaaccctgtctctacacctccattcccagggcaagctcactctctggcaacaagctccctggagtgatttttcttctagaagagtccacgg

SEQ ID NO: 12563 - DNA, 201 bp, Homo sapiens
gctctctggttgagatgaagggaaaagacacagagacgcaaaagctgtgactgcatggaactctgtccaaggtacctcccggtgttctcttacttatgttvgccatgtcctcatgaatttagtgaaatgggcatgttgtctctgagtggaagtgaggggacactactgggcagagctccatcgaagggtggctggtgtcct

SEQ ID NO: 12564 - DNA, 201 bp, Homo sapiens
ttgaagttttttgttcttcggcctcggcaaatgctctctggttgagatgaagggaaaagacacagagacgcaaaagctgtgactgcatggaactctgtccmaggtacctcccggtgttctcttacttatgttggccatgtcctcatgaatttagtgaaatgggcatgttgtctctgagtggaagtgaggggacactactgg

SEQ ID NO: 12565 - DNA, 201 bp, Homo sapiens
agcaagaagaacaaagctagaggcatcacacttactgaattcaggatacaatataaagttatagtaaccaaatcagcatggtgctagcataaaaacagacvcatagactaatggaatacaaaagagaactcacaataaatccatgcattgatagccaactcatttttggtaaaggaactgagaatatacaatggagaaaga

SEQ ID NO: 12566 - DNA, 201 bp, Homo sapiens
ttcattattcctggaccacatggctccagcctcctgatcacaatggatcagtggtcttagattccgctccaatatttgaagttttttgttcttcggcctcvgcaaatgctctctggttgagatgaagggaaaagacacagagacgcaaaagctgtgactgcatggaactctgtccaaggtacctcccggtgttctcttact

SEQ ID NO: 12567 - DNA, 201 bp, Homo sapiens
aacaaccggcagccccaggacccctggcagggctgtctcattactgagtgtgcatccagctccacggttcctgttctgcacaaagcctcctccccatcctkctctctggacactgagcacccagaacaaccggcagccccaggacccctggcaaggctgtctcattactgagtgtgcattcagctccacgtcgctggagac

SEQ ID NO: 12568 - DNA, 201 bp, Homo sapiens
tcctcaatgcctagacctcagccaagatgcagattcagatctcagtgacagaggaagagtccatatctctaggcggaatactctgcaaccccgtggaagtvtatgctgggacaattccctcagtccttcggcaaaggaccatatagccatttactcaggagattgtacactggggaaaggaaacaggcagaactgggggga

SEQ ID NO: 12569 - DNA, 201 bp, Homo sapiens
ccctggaatactgatgagtggttccctttgacactggcagcagccttgggccccgtgacttttcctctcaggccttgttctctgcttcacactcaatgtgyctgggggtctgagtccagctcttctgagtccctcagcctccactcaggtcaggaccagaagtcgctgttccctcctcagggactagaattttccacggaa

SEQ ID NO: 12570 - DNA, 201 bp, Homo sapiens
agtgactctgagggtccgccgtgctctctgacacaattaagggatgaaatctctgaggaaatgaagggaagacaatccctggaatactgatgagtggttcyctttgacactggcagcagccttgggccccgtgacttttcctctcaggccttgttctctgcttcacactcaatgtgcctgggggtctgagtccagctcttc

SEQ ID NO: 12571 - DNA, 201 bp, Homo sapiens
atcaaggtctatatgctctgggacctctccaggttctcatcagaaatgaaaaaaaaaaaaaaaaaaagccatgtccagctcctgggtcctccctgatagchgtgagaggcagctcctaatgggagagagccttggggtgaccaaggcctcacagacttcattattcctggaccacatggctccagcctcctgatcacaatg

SEQ ID NO: 12572 - DNA, 201 bp, Homo sapiens
tttccagatttaaaaaacaaacaaacaataacaacaaaaaaccctgtctctacacctccattcccagggcaagctcactctctggcaacaagctccctggvgtgatttttcttctagaagagtccacggggacaggtaaggagtaggaggcagggagtccagttctgggacggggattccgtgatgcaaagtgaagagaga

SEQ ID NO: 12573 - DNA, 201 bp, Homo sapiens
caagctccagtactcacagtgcaaacacaggagatactgagcctgatgctctgatggaagctctgagttgagattttattttatacttaggtgcctctgavtcattagagttttttgcctgactccactctggccccatttcaatcaaggtctatatgctctgggacctctccaggttctcatcagaaatgaaaaaaaaaa

SEQ ID NO: 12574 - DNA, 201 bp, Homo sapiens
ctggcacagtgttacttgcaccttggtctttaatgcattctgtggggctgtctaaaacctaattgcctctctaagataaaaaggttaaaaaaggccgggcrcggtggctcacgcctgtaatcccagcactttgggaggccgaggcgcgtggatcacaaggtcaggagatcgagaccatcctagctaacatggtgaaacccc

SEQ ID NO: 12575 - DNA, 201 bp, Homo sapiens
aatacagtgttttatagatttttaatgcatttatccgcaaagcctggcacagtgttacttgcaccttggtctttaatgcattctgtggggctgtctaaaasctaattgcctctctaagataaaaaggttaaaaaaggccgggcgcggtggctcacgcctgtaatcccagcactttgggaggccgaggcgcgtggatcacaa

SEQ ID NO: 12576 - DNA, 201 bp, Homo sapiens
tccagcttctattaccagtcactaagctgaaagcaggaaagtttatcttctgcacttggtccatcagaactaagatggcagaaagccccactatctaccayggaaaagacaagggtccctcttaccttgaaccatgacccagctttctaactacatatgtttttctgcacatgtagctatttttcttctcatcaagctcca

SEQ ID NO: 12577 - DNA, 201 bp, Homo sapiens
ttatttttagaaaaattagccaggagtggtggcacaagcctgtggtgccagctacttgggaggctgagggaggagcattgatcacatgagccaaggaggtmgaggcttcagtgagtcatgagcgtgccactgcactttagccagggtaacagagtgacgccctgtctgtaaataaataaaaaataaaaaaattaataataa

SEQ ID NO: 12578 - DNA, 201 bp, Homo sapiens
gtatatgctgggacaattccctcagtccttcggcaaaggaccatatagccatttactcaggagattgtacactggggaaaggaaacaggcagaactggggdgattattgacactgggtgtgaactgacattgatgctcagatgcccacagcactatcatgtctctcatcacagtggggcttatggagctcagggagtaaac

SEQ ID NO: 12579 - DNA, 201 bp, Homo sapiens
ttatggagctcagggagtaaacctggacacattatggcccacaatggaactactggatccatagacccagccctggttatcttcctataccctgagtgcayaattgacactgatgcactgctaagtggagttacccccaccctgggtccctagtctgtggagtaaggactttcattgtgctgaaagccaaagggaaacctc

SEQ ID NO: 12580 - DNA, 201 bp, Homo sapiens
gagagagaggctgccactgattctcttaactccagcttctattaccagtcactaagctgaaagcaggaaagtttatcttctgcacttggtccatcagaacyaagatggcagaaagccccactatctaccacggaaaagacaagggtccctcttaccttgaaccatgacccagctttctaactacatatgtttttctgcaca

SEQ ID NO: 12581 - DNA, 201 bp, Homo sapiens
cagttttctgggttctatgagaattgtagcccttggtttctgttacatgtggttctcttttgagccagagaaggaggacgcacagtgagaagaaagtgccdgagccccaagtcctggcttagatttactgggctggggcatggagagagaggctgccactgattctcttaactccagcttctattaccagtcactaagctg

SEQ ID NO: 12582 - DNA, 201 bp, Homo sapiens
aagcaccgccccagatggtggtggagggagatcctaggaaggtgactctgtcccacaggtagaagcctccagtccagatgggagcagccagaagggcccargagggacatttccaagaaagtaaaattaatagaaagttcaaagtctctaatttcttaacagagtcacagaaatggaacagatatcaaagttaaattaatg

SEQ ID NO: 12583 - DNA, 201 bp, Homo sapiens
cagggtctcacacccatctagaggatgtctgtctgcgacgtggggtcggacgggcgcctactccgcgggtatcaccagcttgcttacgatggcaaggatthcatcgtcctgaacgaggacctgtgctccttgacagccgcagacacggcggctcagatcacccagctcaagtgggaggcggcccggggggcggaggttcat

SEQ ID NO: 12584 - DNA, 201 bp, Homo sapiens
atggtgtcatggcgccccgaaccctgcttctgctgctctcgggggccctggtcctgacccagacctgggcaggtgagtgcggggtcgggagggaaacggcstctgtggggagtagctaggggcctgcccggcgggggcgcaggaacccggttgcggtgccgggaggagggtcgggagagtctcagccccctccttgctccc

SEQ ID NO: 12585 - DNA, 201 bp, Homo sapiens
tgcggggtcgggagggaaacggcctctgtggggagtagctaggggcctgcccggcgggggcgcaggaacccggttgcggtgccgggaggagggtcgggagvgtctcagccccctccttgctcccaggcttccactccttgaggtatttccacaccaccatgtcccggcccggccgcgcggatccccgcttcctctccgtgg

SEQ ID NO: 12586 - DNA, 201 bp, Homo sapiens
cagaaggtgaagataaaccttacaaagcttccagagtggccactcggccaggtgcagtggctcacgcctgtaatcccagcactttggaaggctgaggtggvtggatcacctgaggttgggagttggagactagcctgaccaacacggagaaaccccgtctctactaaaaatacaaaattatccaggcatggtggcccatgc

SEQ ID NO: 12587 - DNA, 201 bp, Homo sapiens
gaggctgagggaggagcattgatcacatgagccaaggaggtcgaggcttcagtgagtcatgagcgtgccactgcactttagccagggtaacagagtgacgmcctgtctgtaaataaataaaaaataaaaaaattaataataaagggagtgcatgagcactggcgaagggcactttggctgcattaagcacttgcaattctg

SEQ ID NO: 12588 - DNA, 201 bp, Homo sapiens
gtaaaaatacaacagaccagagtcacagatacacagtctgggaaagtaaaacttcactttgtgagtctaattgcaatgcgtttagacatatttatatatartggggccaaaaatcatctcttttacaaattagattcgtgaccattcaggggctaccaagattgtgctacccactgtagcacaatcggagacccacgccga

SEQ ID NO: 12589 - DNA, 201 bp, Homo sapiens
ctgagaatatacaatggagaaagaacaaaagcaacaatggagaataaatggagctgggaaaatgctaccagatgcagaagaataccactagaaccgtctcycaccatatacagaaatcaactcaaaatggattaaagatttaaatgtaagtcccaaaactataaaactactagaagaatgcttacaggaaacactccagac

SEQ ID NO: 12590 - DNA, 201 bp, Homo sapiens
catcactgggggtcacacttgcatctcggcctgttgcctttcccagggtaacctgactccctcacaatatcgtctgacaggtatgtcccctaataaaatgytgtaactttaatcccatgatggcacttgctttttggaggatttggactacaaaatcattttcatctgcacaccagtgtcctcttattccaatttgtaaaa

SEQ ID NO: 12591 - DNA, 201 bp, Homo sapiens; identical to SEQ ID NO: 2377

SEQ ID NO: 12592 - DNA, 201 bp, Homo sapiens; identical to SEQ ID NO: 2378

SEQ ID NO: 12593 - DNA, 201 bp, Homo sapiens
ctctagtgtagatgctgctgtgaagggatttagcagatataactaagggcctcaattagttgactttaggctgggtttatcctgctttgactgtcctaatwaggtgagtccttgaaaggtctgtgttctttctgagcatagagatttgcagtgtgagagggattcagcatgaggggtttcctctaccgtgggctttgaaaa

SEQ ID NO: 12594 - DNA, 201 bp, Homo sapiens
cgcagatcactacccctctacatcccccacggaccgcccgggtctccccgagtctctgggtccgagatccacgccgaggcagcggaacctggagacccttbacccgggagaggcccaggagccgttacccggtttcattttcagccaaaatccccgcaggttggtcctggcgagggcggggctcggtgggcggggctggcc

SEQ ID NO: 12595 - DNA, 201 bp, Homo sapiens
ccacctgcacctcccaggggctgccagccacacagagtcatggacaggtctctacagacacaacttagtgccagcttggatgaaaccctctgaggaatggstgccatctttcaggatgtggtgcatgtattgaatcaaagatgtctctatagtgctgtgtttacagaaggaagaatacgtgggtccaaaaaccaagaagta

SEQ ID NO: 12596 - DNA, 201 bp, Homo sapiens
tatgttgctttggcccacactctaggtgacataggaggaggccagcttcaagtagggcccacacagaaaaggaccctgcagcagatccaggccatggtgcragcagccaccatctctcagaccccctggtgctggtgatgccattggtagggaaagatgcaggatggagctgaaccaagcaccagtgggaaagtcacagtg

SEQ ID NO: 12597 - DNA, 201 bp, Homo sapiens
agtgaaaggcctgggattctggagtaaggtcatgtcattcacagcagagacatatgccacctattagaagcaacttttagtgtcccttgtcctgattagayagaatgcttgaccacgggacaccaagcaactatgtggttcgagtgcctgtgtgacccacagagtcatagattagacaggcccaacagcatccatcatgag

SEQ ID NO: 12598 - DNA, 201 bp, Homo sapiens
ctgggattctggagtaaggtcatgtcattcacagcagagacatatgccacctattagaagcaacttttagtgtcccttgtcctgattagatagaatgcttvaccacgggacaccaagcaactatgtggttcgagtgcctgtgtgacccacagagtcatagattagacaggcccaacagcatccatcatgaggtgaaaatgg

SEQ ID NO: 12599 - DNA, 201 bp, Homo sapiens
ttctggagtaaggtcatgtcattcacagcagagacatatgccacctattagaagcaacttttagtgtcccttgtcctgattagatagaatgcttgaccacdggacaccaagcaactatgtggttcgagtgcctgtgtgacccacagagtcatagattagacaggcccaacagcatccatcatgaggtgaaaatggtccacc

SEQ ID NO: 12600 - DNA, 201 bp, Homo sapiens
tcacacttgcatctcggcctgttgcctttcccagggtaacctgactccctcacaatatcgtctgacaggtatgtcccctaataaaatgttgtaactttaaycccatgatggcacttgctttttggaggatttggactacaaaatcattttcatctgcacaccagtgtcctcttattccaatttgtaaaatccttttgttta

SEQ ID NO: 12601 - DNA, 201 bp, Homo sapiens
gatggagtctccttttgggggatgtgaatgggcagcagcccagggtagtttacaggttctgtgttttacaacagtgctggctaaagtccaaacaacatatcatccattcccttttaaaatggaacttttaaaataaatgtgtaatacttgatgttgatgatgtgttctgaaaacattgagttgaaagaattgacttaaatt

SEQ ID NO: 12602 - DNA, 201 bp, Homo sapiens
tagatagaatgcttgaccacgggacaccaagcaactatgtggttcgagtgcctgtgtgacccacagagtcatagattagacaggcccaacagcatccatcrtgaggtgaaaatggtccacctgggttgagcttgaatcccatgtttacacccagagaaaatacccaagtctgaagtggcactgaacaaccaaacagacaaa

SEQ ID NO: 12603 - DNA, 201 bp, Homo sapiens
aataaatgtgtaatacttgatgttgatgatgtgttctgaaaacattgagttgaaagaattgacttaaattcctaattccttaaacagattttttcaaagtaaaatatgcttggtttttataaaaatgaaagagaaaagaataccaaagttcattgcaagcatccttaacaagaactacttacattggaacaaaaccacaca

SEQ ID NO: 12604 - DNA, 201 bp, Homo sapiens
ccacgaggccatgaaaatggctttggctacaaataggtcatttgatccttggctcactggcatctctgtagattttcatgtatacaatcttcaatctgatgtgcaaggtaattccatcttgcaaaggatttgatgttacattctaccacacataccactgaattaaacttttacagaattggaaatgcacatcattgatca

SEQ ID NO: 12605 - DNA, 201 bp, Homo sapiens
cgaggccatgaaaatggctttggctacaaataggtcatttgatccttggctcactggcatctctgtagattttcatgtatacaatcttcaatctgatgtgcaaggtaattccatcttgcaaaggatttgatgttacattctaccacacataccactgaattaaacttttacagaattggaaatgcacatcattgatcaaaa

SEQ ID NO: 12606 - DNA, 201 bp, Homo sapiens
gttacattctaccacacataccactgaattaaacttttacagaattggaaatgcacatcattgatcaaaataaatgaaacaagaaaagagtagaaaggaayaaccagtgacggaatagcaatatgaatagaaaacacaataggactgcgaaaacaaagaaacaaacaaaaccacttcagaagcacctgatggcatgctatt

SEQ ID NO: 12607 - DNA, 201 bp, Homo sapiens
caagaattgaggagcaggagactgagggtgtttgatcaaatacaaagtcatgatcccagtctcaattcctagacttcagccaagcttcagattcagaatcyacagtggggcttaaggaggccaggaaataaacctggacacattatggcccactgtgggaccactgggttcataaacccagtcctggttatctccccattc

SEQ ID NO: 12608 - DNA, 201 bp, Homo sapiens
tgtcccagcgtcagaacagatgggcagccagcgagggcactgcttcatatctatgatgggaatgcaagaattgaggagcaggagactgagggtgtttgatyaaatacaaagtcatgatcccagtctcaattcctagacttcagccaagcttcagattcagaatctacagtggggcttaaggaggccaggaaataaacctgg

SEQ ID NO: 12609 - DNA, 201 bp, Homo sapiens
gtgtcccagcgtcagaacagatgggcagccagcgagggcactgcttcatatctatgatgggaatgcaagaattgaggagcaggagactgagggtgtttgaycaaatacaaagtcatgatcccagtctcaattcctagacttcagccaagcttcagattcagaatctacagtggggcttaaggaggccaggaaataaacctg

SEQ ID NO: 12610 - DNA, 201 bp, Homo sapiens
aagcagcagaattcttaggtttaaatacattgttttatggattttaatacatccatctacagagcctagcagggtgtccttggcagttggcctttaatacytcatgtgggtctgcctaaaaactaattttttaatgttaatcaggtttaaaaattactaagtgttcctataaaatatacacaacacttagcagtggatact

SEQ ID NO: 12611 - DNA, 201 bp, Homo sapiens
gaaagacgatgaacaagtagtaagctaaagaggcttcttttgcaggggattgcaggtattatatgtttttctcctacttttaagatacattttcctaaaadgttttgtctaggagtaaatgtcatcactttgctttttttcctcccaattgaatcacttgttcctccctgcatttcagtaatgttgctagcatggaggtgt

SEQ ID NO: 12612 - DNA, 201 bp, Homo sapiens
gaacaaccaaacagacaaatggaagttagccagccttcaccatgggtcagccctggtttggtaggatgagttcatgaatggagcaaccacagtggcaggcmtgaggctacgtatggggccaacagcactgactcccccctaccaaggcagatccagctgccgacacctctgaatgtccaactcattagcaattgaggccca

SEQ ID NO: 12613 - DNA, 201 bp, Homo sapiens
aacaaccggcagccccaggacccctggcagggctgtctcattactgagtgtgcatccagctccacggttcctgttctgcacaaagcctcctccccatcctyctctctggacactgagcacccagaacaaccggcagccccaggacccctggcaaggctgtctcattactgagtgtgcattcagctccacgtcgctggagac

SEQ ID NO: 12614 - DNA, 201 bp, Homo sapiens
tccagaggctgccagccacaaggaatgctggacaggtcttctacaggcaaaactcagtgccagcctggaggaagcactctgagaggtgggtgccatctttyaggacacggtgcattgtttgaatcagagatgtctctagagtgctgtgttctcaataggaagaacatgtgtgtccagggatcaaaagatggaagcaggttt

SEQ ID NO: 12615 - DNA, 201 bp, Homo sapiens
tacaagaaagttgacccacgctggtgtcccctgaagaaatcacaggcacagaggagggacaggtggatttcagggctgtgcttgatctgggaaaggaagaktgcagaccgccaggtggcgccgctgcactgcttctgcgcccaggaggtgcctgctggggctgagattgaaggtggggagaaggatgtcacagctcatcgc

SEQ ID NO: 12616 - DNA, 201 bp, Homo sapiens
ctgagaggtgggtgccatcttttaggacacggtgcattgtttgaatcagagatgtctctagagtgctgtgttctcaataggaagaacatgtgtgtccaggratcaaaagatggaagcaggtttggctccacgtccaatcccttagattcacccaatggggtattttgcacgttttatcttccaacactgggctgtgcaggg

SEQ ID NO: 12617 - DNA, 201 bp, Homo sapiens
acagaaatcaactcaaaatggattaaagatttaaatgtaagtcccaaaactataaaactactagaagaatgcttacaggaaacactccagacatgggtctvggcaaagactttatggctaagacctcaaaagcacaggcaacaaaaataaaatagacaagtgggactatattaaactaaatagcttcagcacagcaaatga

SEQ ID NO: 12618 - DNA, 201 bp, Homo sapiens
atgtctctagagtgctgtgttctcaataggaagaacatgtgtgtccagggatcaaaagatggaagcaggtttggctccacgtccaatcccttagattcacycaatggggtattttgcacgttttatcttccaacactgggctgtgcagggtacgaggtcctggtttccaaggagggtacccttaaaaggagacaaaagaca

SEQ ID NO: 12619 - DNA, 201 bp, Homo sapiens
accctttctccgagggaagatgatgtctgcacttttttctccctcccatggcacttttcccagcccctgccagtcccctcccgtgactccatcaacatcarcccctgccctgtgcccaccagccaccatgcaaggaggaaaagagccccaggaccaaaggacaagacctgggaaaaacccagtgccctcccctcctctcaa

SEQ ID NO: 12620 - DNA, 201 bp, Homo sapiens
aacctggaaggcagaagttgcagtgagctgagatcctgccatcgcactccagcctgggtgacagagccatactccatctcaaaacaaacaaacaaacaacyacaaaaaacaagccacagccaattttaaggagccatgtgagaggaccaggatgccatgaaaaacagccttggctacaaataggtcatttgatccttggct

SEQ ID NO: 12621 - DNA, 201 bp, Homo sapiens
gtgcactacagaaggtgaagattaaccttacagagcttcaagagtggccactgcagtgaagtgttatgggtccagtggttaggggcatgcagggctgtccyctccaaagtaaaagacaaacttgcatcttgcatcctcaacagaaggaaggaagcacactatttggtgagcttctctgggtcctggcaacaccacattcca

SEQ ID NO: 12622 - DNA, 201 bp, Homo sapiens
agagatctggacaaatcagacatctcacagaatactaaatctcttcatttcattggcaatatcacatagattgggatggatgagtaagaggaggaaagtaygctgaattctttggcaaaacgtgtgcactacagaaggtgaagattaaccttacagagcttcaagagtggccactgcagtgaagtgttatgggtccagtgg

SEQ ID NO: 12623 - DNA, 201 bp, Homo sapiens
ggacctgagacctggagtgagtgcacccacctccctcaggatcaggagtgaatgctttaggaaccctcctttgcagtgacctgcaaaagatagagggcacrgttactgtgagaacccagagtagcagccaaaggggctcaaccttcatggagttttgggaaaggttagtaaaaggtggtgtcccagcgtcagaacagatgg

SEQ ID NO: 12624 - DNA, 201 bp, Homo sapiens
acgtctgtagtttccctttccctcttttgaacttgtttcttgtccttgtctggtcctgcaagctgtatgagtttgccttctctggtaggtctggggacatkgtatcccttataaccttggttcctggcatatgacactggtaccaagctctgttggactagtgaggctccctacacacctcctgaactagagcaaaagctc

SEQ ID NO: 12625 - DNA, 201 bp, Homo sapiens
atcttccaacactgggctgtgcagggtacgaggtcctggtttccaaggagggtacccttaaaaggagacaaaagacagcccactgaactacacattatggytgtcacgagagaagttttgatagtttgtgcccagagaccacctggtgaaaagaggattctcctcctctccaggcccaggtaatagatcctcatcttcagg

SEQ ID NO: 12626 - DNA, 201 bp, Homo sapiens
tggccagctctgacagcaggaggactccccaaagagaggctctggccctggctccatgtccttccaggactgggctgggtcacacgcacagtccttctctycctcagtccccagtcccacctcacctgtagagacacctgcacacaaaggcaggccctaaacactgtggttctgccctccacctgcagctcagtgctcctc

SEQ ID NO: 12627 - DNA, 201 bp, Homo sapiens
ttcttgttttttctattgcaagaccaaaattttagaaaaccaagagaaagatttcagccaaagggttgtactgtctattactctcttttattttttagaayatccattgtcaaagacgatccagactgttacaagaggaattgtgttcctacgccaccaaaatccacatgttgaagccctatgttgagaaggcagaagaag

SEQ ID NO: 12628 - DNA, 201 bp, Homo sapiens
gtgacgtcgcgttctcccgggcggggccggaggcggtacagatgagggacacattcatggctaacgggaccgctcttctcgttctgcgttctgcttgcggycggtagtctctcctccccgcccatgggcggtggttggaggcaggggtgcggaatccggccgacctcgctgtcctcgccctctaccttgtggcgtcggtgg

SEQ ID NO: 12629 - DNA, 201 bp, Homo sapiens
ctcaccttccgggaagaactaaactttggttctctttcttgttttttctattgcaagaccaaaattttagaaaaccaagagaaagatttcagccaaagggwtgtactgtctattactctcttttattttttagaacatccattgtcaaagacgatccagactgttacaagaggaattgtgttcctacgccaccaaaatcca

SEQ ID NO: 12630 - DNA, 201 bp, Homo sapiens
cctcattgtaagtgtgagcagaatcatccagcaattcagcctgagacagcttgatttccaaggacccagacccgtcagggcagaaggtttgagtaatgctsggtaatctcccaaggccctgctcctgtgctctgacatcctcagtagcattggtgctgaggtcctgcttccaatgggctgttcccaaccagtgacagatca

SEQ ID NO: 12631 - DNA, 201 bp, Homo sapiens
ggaaacagggaccttaatcctacaattgccagaaaccgaattctgccaacaaactctacacaagcttgggggagaaccccaatcttaagatgaggatacarctttgcgaaactctgaacaaagagtctatcacattaggcctggatttctgatgaaggaaatgtagacaaataaatgggtgctgttttcagccactaagtt

SEQ ID NO: 12632 - DNA, 201 bp, Homo sapiens
atcatccagcaattcagcctgagacagcttgatttccaaggacccagacccgtcagggcagaaggtttgagtaatgctgggtaatctcccaaggccctgcwcctgtgctctgacatcctcagtagcattggtgctgaggtcctgcttccaatgggctgttcccaaccagtgacagatcacaccagtgacacgaaagcagga

SEQ ID NO: 12633 - DNA, 201 bp, Homo sapiens
ctggacaaatcagacatctcacagaatactaaatctcttcatttcattggcaatatcacatagattgggatggatgagtaagaggaggaaagtacgctgarttctttggcaaaacgtgtgcactacagaaggtgaagattaaccttacagagcttcaagagtggccactgcagtgaagtgttatgggtccagtggttaggg

SEQ ID NO: 12634 - DNA, 201 bp, Homo sapiens
gtgtttgatcaaatacaaagtcatgatcccagtctcaattcctagacttcagccaagcttcagattcagaatctacagtggggcttaaggaggccaggaartaaacctggacacattatggcccactgtgggaccactgggttcataaacccagtcctggttatctccccattctccacatgcataattggccttgatgca

SEQ ID NO: 12635 - DNA, 201 bp, Homo sapiens
ggctcccactggcattggagcccacactaaggaaccaggctgctgtcttcaagatcactactgacttgaacagggaggaatgggccaagggtaagatatgktgccacaaagctctgctcctgagttccagttgatttttctggacttgctaggttgcaataaacctttgatgatttttcagggttccaatgcagttgattc

SEQ ID NO: 12636 - DNA, 201 bp, Homo sapiens
aaccgaattctgccaacaaactctacacaagcttgggggagaaccccaatcttaagatgaggatacagctttgcgaaactctgaacaaagagtctatcacrttaggcctggatttctgatgaaggaaatgtagacaaataaatgggtgctgttttcagccactaagtttgtggtaattggttatgtactgccaggaaataa

SEQ ID NO: 12637 - DNA, 201 bp, Homo sapiens
aacacaattatatttcattcattcattcaacaaaaattaacttagtgcctactatgtggcagatatacttttatattctgtagatacaactttgatcaaarcaacccaaagcccctgtgcttgtgccttccattctagaggcttcttgagagtaagatggagccattagaggcttttaagtgaagaaatgaaacaatctga

SEQ ID NO: 12638 - DNA, 201 bp, Homo sapiens
ttgatcaaaacaacccaaagcccctgtgcttgtgccttccattctagaggcttcttgagagtaagatggagccattagaggcttttaagtgaagaaatgamacaatctgactcacattagcaggattgctgacctttgtggggagaacagtcatgggcagcaggcaagggacagagctagggacacaattcagtagtgaca

SEQ ID NO: 12639 - DNA, 201 bp, Homo sapiens
atggagccattagaggcttttaagtgaagaaatgaaacaatctgactcacattagcaggattgctgacctttgtggggagaacagtcatgggcagcaggcragggacagagctagggacacaattcagtagtgacagagtagtagagactaaggggagaggagggcctgaaggatgacagggacagagagaagggctggag

SEQ ID NO: 12640 - DNA, 201 bp, Homo sapiens
aagcccataaagcatcagaagaagttgctctcctgaaagagactcttctgctcagttaaaaagacagaaacagaatcactggagtgagtaggactttggabaactgcacagcaccatgtcttagtgtctgggattacacagacttagggaggaggcctcaccttccgggaagaactaaactttggttctctttcttgtttt

SEQ ID NO: 12641 - DNA, 201 bp, Homo sapiens
gactgatacacacattctatgcatgtatcaaaatgtcacatgtatcccataaatatgtacaaatattatgtaccaattttaaaaaatttaaaaaataaacmacacaatatggggcatttaaaaaggtacaaaaattatgagcatgataaaaatttggcaaatattttcctttttattaagatctttttcattccataagtt

SEQ ID NO: 12642 - DNA, 201 bp, Homo sapiens
aggacattcctgggagaccagggactcctctgatggccaactgtagctcaaggactcctccatggccttgcttaactctccttagattgcctgtggtctayggcacatccagtaaaccttgtctccttctgtccatcactggggatcacctttgcatcttgttgcctttcccagggtaacctacctcccttgccatatcac

SEQ ID NO: 12643 - DNA, 201 bp, Homo sapiens
ggtagagagagtagaatgacagttcccagaaactgggaagaatgtaggggtgggaaaatatagagatgcaggttaatggatgcaaatgtccaattatatavagaaaataagttctaatgtttgatagcacagcagactgactaaagttaacaaaaatgtatatttcaaaatagctataagagtggatttggctgggcgtgg

SEQ ID NO: 12644 - DNA, 201 bp, Homo sapiens
accacagtggcaggcatgaggctacgtatggggccaacagcactgactcccccctaccaaggcagatccagctgccgacacctctgaatgtccaactcatyagcaattgaggcccatgatgtgccccagtggggcactatttctttaggtgactaactagccactaagtaacaagttgactacatttagctacttccatcc

SEQ ID NO: 12645 - DNA, 201 bp, Homo sapiens
tggggatcacctttgcatcttgttgcctttcccagggtaacctacctcccttgccatatcacctgacaggtgtgtcccctaataaaatgctataactttavtcccatgatggaacttgctttttggagcatttggactataaaatcattttcatctgcccactagtgatctcttacttattccaatgtgtaaaatcttttt

SEQ ID NO: 12646 - DNA, 201 bp, Homo sapiens
aatgctataactttaatcccatgatggaacttgctttttggagcatttggactataaaatcattttcatctgcccactagtgatctcttacttattccaabgtgtaaaatctttttgtttattcaacttctacctgcattggctccattttgctggtatttgtattatgcttttgagttcctcaatgtttattgtttaatc

SEQ ID NO: 12647 - DNA, 201 bp, Homo sapiens
ttcatctgcccactagtgatctcttacttattccaatgtgtaaaatctttttgtttattcaacttctacctgcattggctccattttgctggtatttgtaktatgcttttgagttcctcaatgtttattgtttaatcactaaatttgggggtagtttgttacacagcaatggataactaatgaagccctcttacatttcca

SEQ ID NO: 12648 - DNA, 201 bp, Homo sapiens
tacactgtctgggaaagtgaaacttaagagctttgtgagtcctgttgtaatgcttttagatgcatttatataccaacaggccaaagtcacattttttacckattagattcctgatcattcaggggttaccaaggttatgctacccactatagttaataaacaaaaagcaaactggtctctattctatctcatgcactcagg

SEQ ID NO: 12649 - DNA, 201 bp, Homo sapiens
tgccattcctgattgattatttggaaatgaaagagaaaagaaaatgccaaagttcatcacaagcatcctttgcgataactactcgtagtaaaacaaagccdcagctggccgggcacggtggctcacttctgtgatcctagcactttgggaagtcgaggcctgtggatcacgagatcaggagttcgagaccagcctgaccaa

SEQ ID NO: 12650 - DNA, 201 bp, Homo sapiens
attctatctcatgcactcaggcacaacttttccagatttaagggggaaaaaaaaccctgtctttacacctacaatcccagggcgagctcactctctggcamcaagctccctggggtgatttttcttctagaagagtacaggaggacaggcaaggagtgggaggcagggagtccagttcagggacagggattccgggatgaa

SEQ ID NO: 12651 - DNA, 201 bp, Homo sapiens
catcatataatcccaccatctgcctcctgatcataccccctggggacattcttggctatgtgtccaggagacatgtacaccaatgtttatggcaaaaactrgaaacaatcacatatacatcaatgggaattaacaaaattgtcgtataataataaaaagtaaaacttcagcagcaacagtgaatgaacagcaccctcccac

SEQ ID NO: 12652 - DNA, 201 bp, Homo sapiens
ttgaggtcatggataccctaaatatcttgactgatacacacattctatgcatgtatcaaaatgtcacatgtatcccataaatatgtacaaatattatgtaycaattttaaaaaatttaaaaaataaacaacacaatatggggcatttaaaaaggtacaaaaattatgagcatgataaaaatttggcaaatattttcctttt

SEQ ID NO: 12653 - DNA, 201 bp, Homo sapiens
ctttgtattgagatgtcctggactcgcacacacaaactcagagctatgaaataaagatactgtaaaaatacaacagaccagagtcacagatacacagtctrggaaagtaaaacttcactttgtgagtctaattgcaatgcgtttagacatatttatatataatggggccaaaaatcatctcttttacaaattagattcgtg

SEQ ID NO: 12654 - DNA, 201 bp, Homo sapiens
tataatggggccaaaaatcatctcttttacaaattagattcgtgaccattcaggggctaccaagattgtgctacccactgtagcacaatcggagacccacsccgaggctgcgggactcgtggagaccctcgacacaagaaccccaggtgcctatacccgattccattttcagttcaggcccaaatccccgggggattgatc

SEQ ID NO: 12655 - DNA, 201 bp, Homo sapiens
aaaaatcatctcttttacaaattagattcgtgaccattcaggggctaccaagattgtgctacccactgtagcacaatcggagacccacgccgaggctgcgrgactcgtggagaccctcgacacaagaaccccaggtgcctatacccgattccattttcagttcaggcccaaatccccgggggattgatcggggcagaggag

SEQ ID NO: 12656 - DNA, 201 bp, Homo sapiens
gacccggaccggagcctcttcgcgcggggatgaacataccctacgatggcgccagttacctcgtcctaaaccaggaactgctctcttggaccgcagcggahaaggcggctcagatgttttggaggaggaacatgcagagctgctcaaaacctacctgccgggaaggtgggcggagtggctcagcaaaggccttaagaatga

SEQ ID NO: 12657 - DNA, 201 bp, Homo sapiens
ttcgcgcggggatgaacataccctacgatggcgccagttacctcgtcctaaaccaggaactgctctcttggaccgcagcggaaaaggcggctcagatgttytggaggaggaacatgcagagctgctcaaaacctacctgccgggaaggtgggcggagtggctcagcaaaggccttaagaatgagaaggagaggctgcaatg

SEQ ID NO: 12658 - DNA, 201 bp, Homo sapiens
gctctgcctcctgggttcatgccattctcctgattcagcttcccaagtagctgggactacaggcacctgccaccacgcccagctaatttttttgtattttyagtagagacggggtttcaccatgttagccaggaaagtctctatctcctgacctcatgatctgcctgcctcagcctcccaaagtgctgggattgcaggcat

SEQ ID NO: 12659 - DNA, 201 bp, Homo sapiens
cagcttcccaagtagctgggactacaggcacctgccaccacgcccagctaatttttttgtatttttagtagagacggggtttcaccatgttagccaggaargtctctatctcctgacctcatgatctgcctgcctcagcctcccaaagtgctgggattgcaggcatgagccaccacacctggcctcttccttccctttctc

SEQ ID NO: 12660 - DNA, 201 bp, Homo sapiens
ccaagtagctgggactacaggcacctgccaccacgcccagctaatttttttgtatttttagtagagacggggtttcaccatgttagccaggaaagtctctrtctcctgacctcatgatctgcctgcctcagcctcccaaagtgctgggattgcaggcatgagccaccacacctggcctcttccttccctttctccttcctt

SEQ ID NO: 12661 - DNA, 201 bp, Homo sapiens
aaaatgtatatttcaaaatagctataagagtggatttggctgggcgtggtggctcatgcctgtgatcccagcactttgggaggccgaggagggtggatcaygaggtcaggagatcgagaccatcctggctaacatggtgaaaccccgtctctactaaaaatacaaaaaaaaaaaaaaaaattagccgggcgtggtggtggg

SEQ ID NO: 12662 - DNA, 201 bp, Homo sapiens
gctcaaaacctacctgccgggaaggtgggcggagtggctcagcaaaggccttaagaatgagaaggagaggctgcaatgcgcaggtaccagaggccacgggkcgcctccctgatctcctgcagatatccctgagccaccttccaaaagaaggggaggaaaatgggaccaacgctaaaatatccctctccctcttgtcctgag

SEQ ID NO: 12663 - DNA, 201 bp, Homo sapiens
caggaaagtctctatctcctgacctcatgatctgcctgcctcagcctcccaaagtgctgggattgcaggcatgagccaccacacctggcctcttccttccstttctccttccttctaaccctccctccctctctttcttctctatttccattcaacctatcaccttccctccttcttgctccctttccttccccttcccct

SEQ ID NO: 12664 - DNA, 201 bp, Homo sapiens
aactgtggaaaatcagggctatctacacgtgtttctgttattttctatgtatactacatacagccaataatattaaaatgtcacaaattgacaaacctggrtggcagcttcacaaagatttcttataattctctattttttcttctagctagaactaccttataataaaatttgtgaagtgaatccacagaaattgagcaa

SEQ ID NO: 12665 - DNA, 201 bp, Homo sapiens
gtctctatctcctgacctcatgatctgcctgcctcagcctcccaaagtgctgggattgcaggcatgagccaccacacctggcctcttccttccctttctcyttccttctaaccctccctccctctctttcttctctatttccattcaacctatcaccttccctccttcttgctccctttccttccccttccccttccttct

SEQ ID NO: 12666 - DNA, 201 bp, Homo sapiens
agccacaattactttggaaatcatattatcattatctagtatggttaaagtccatacaatgtatcatgcaaccaacccattcctaatcatccactctgggrgctttggggctttcttgcctatgtgcacaggagacatgcacactaatatttatggcaaaaactggaatcggccacatgtacatcaataggaaaccggtga

SEQ ID NO: 12667 - DNA, 201 bp, Homo sapiens
ctgggggctttggggctttcttgcctatgtgcacaggagacatgcacactaatatttatggcaaaaactggaatcggccacatgtacatcaataggaaacyggtgaaattgtggtaaaacgatatgtaagccttcagcgtaaaaatgaatgaatgacagcctcccacaccacagataactcctacacataatgtgtatcat

SEQ ID NO: 12668 - DNA, 201 bp, Homo sapiens; identical to SEQ ID NO: 2368

SEQ ID NO: 12669 - DNA, 201 bp, Homo sapiens
tcccttcctccattttttcctttttattatgaaaatttcctaacatataaaataaccctatgtgattgtgctataagtaagcattttctgaatctgtatgycaaaagtacaatgccacggtatatgagaaacaagtaaacaacagaaagttattgacagaatctaaataaaaatgcctgctataattctgcagccaagaca

SEQ ID NO: 12670 - DNA, 201 bp, Homo sapiens
cacagaatctattttacttgtgtgtgtagtatctctttgagttaacagatatttgttctattaagctactaaattttgaggtagtttgtgacacagcactwgataactattaaggctttcttaagtttccattattccatggatattatctacatatcttttaatcccttgcattttaataacattagctatacttgctgt

SEQ ID NO: 12671 - DNA, 201 bp, Homo sapiens; identical to SEQ ID NO: 2289

SEQ ID NO: 12672 - DNA, 201 bp, Homo sapiens
atagagaaaataagttctaatgtttgatagcacagcagactgactaaagttaacaaaaatgtatatttcaaaatagctataagagtggatttggctgggcrtggtggctcatgcctgtgatcccagcactttgggaggccgaggagggtggatcatgaggtcaggagatcgagaccatcctggctaacatggtgaaacccc

SEQ ID NO: 12673 - DNA, 201 bp, Homo sapiens
atgaggccaccctgaggtgctgggccctgggcttctaccctgcggagatcacactgacctggcagcgggatggggaggaccagacccacacacggagctcrtggagaccaggcctgcaggggatggaaccttccagaagtgggcggctgtggtggtgccttctggagaggagcagagatacacctgccatgtgcagcatga

SEQ ID NO: 12674 - DNA, 201 bp, Homo sapiens
gctcagcaaaggccttaagaatgagaaggagaggctgcaatgcgcaggtaccagaggccacgggtcgcctccctgatctcctgcagatatccctgagccaycttccaaaagaaggggaggaaaatgggaccaacgctaaaatatccctctccctcttgtcctgaggcagaagagtcctcctgggtttctaaatcctatacc

SEQ ID NO: 12675 - DNA, 201 bp, Homo sapiens
ggagatcacactgacctggcagcgggatggggaggaccagacccacacacggagctcgtggagaccaggcctgcaggggatggaaccttccagaagtgggyggctgtggtggtgccttctggagaggagcagagatacacctgccatgtgcagcatgagggtctgccagagcccctcaccctgagatggggtaaggaggga

SEQ ID NO: 12676 - DNA, 201 bp, Homo sapiens
ggcctgcaggggatggaaccttccagaagtgggcggctgtggtggtgccttctggagaggagcagagatacacctgccatgtgcagcatgagggtctgccmgagcccctcaccctgagatggggtaaggagggagatgggggtgtcatgtcccttagggaaagccggagcctctctggagagctttagcagggtcagggtc

SEQ ID NO: 12677 - DNA, 201 bp, Homo sapiens
ggagcagagatacacctgccatgtgcagcatgagggtctgccagagcccctcaccctgagatggggtaaggagggagatgggggtgtcatgtcccttaggraaagccggagcctctctggagagctttagcagggtcagggtccctcaccttccccccttttcccagagccatcttcccagcccaccatccccatcgtggg

SEQ ID NO: 12678 - DNA, 201 bp, Homo sapiens
agatacacctgccatgtgcagcatgagggtctgccagagcccctcaccctgagatggggtaaggagggagatgggggtgtcatgtcccttagggaaagccrgagcctctctggagagctttagcagggtcagggtccctcaccttccccccttttcccagagccatcttcccagcccaccatccccatcgtgggcatcgtt

SEQ ID NO: 12679 - DNA, 201 bp, Homo sapiens
gagagtgactgagggcccgccctgcactctgggacaattaacggatgaagtctctgcgggaaaggaggggaagacaatccctggaatactgatacgcggtmccctttgaccccccagcagccttgggcaccaggaattttcctctcaggccttgttctctgcctcatactcaatgtgtgtgggggtctgattccagctctt

SEQ ID NO: 12680 - DNA, 201 bp, Homo sapiens
ttaggtgaaataagccaagcaaggaaagacaaataccacatgttgtcactaatatgtgcgagccaaaaaggttaatcttagggaggtagagagagtagaawgacagttcccagaaactgggaagaatgtaggggtgggaaaatatagagatgcaggttaatggatgcaaatgtccaattatatagagaaaataagttctaa

SEQ ID NO: 12681 - DNA, 201 bp, Homo sapiens
tttacccacatatttattaacagcaaaccggtcattagtgttgtttctataggtattaaattaactaaaagtatcccttataggaagcaaagggatgggcygaattaaaggaataggttgggctagttaactgcagcaggaacacacccttaagacacagatcgctcatgctattgtttgtggcttaagaatgcctttaag

SEQ ID NO: 12682 - DNA, 201 bp, Homo sapiens
tataggtattaaattaactaaaagtatcccttataggaagcaaagggatgggccgaattaaaggaataggttgggctagttaactgcagcaggaacacacycttaagacacagatcgctcatgctattgtttgtggcttaagaatgcctttaagcggttttccgccctgggcaggccaggtgttcctttccctcattcttg

SEQ ID NO: 12683 - DNA, 201 bp, Homo sapiens
acacagatcgctcatgctattgtttgtggcttaagaatgcctttaagcggttttccgccctgggcaggccaggtgttcctttccctcattcttgtaaaccygcaaccttccagcttggacattagggccattatgaacatgttacggtgctgcagagattttgtttatggccagtcttggggccagtttatggccagattt

SEQ ID NO: 12684 - DNA, 201 bp, Homo sapiens
ataaaaaacccacaactaaaatcatgcttgctgaagaaagactgaatgcttttctcctaagatggagatcaatgcaaggatgtccaatccaacacttctayttaacattgtactggagattgcagctggtgcaataaggcaaataattaaaagttaaaggcatccagataaaaaggaaaacataaaactctattcacagat

SEQ ID NO: 12685 - DNA, 201 bp, Homo sapiens
gactagcctgggaaacatagtgagaccttgtctctaagaaaaaaaataaaacacataaattgggagaattaatattgttaaatattaattttaaaaatgadacacataaatttcatgcacataaattgggagaatattgttaaaatgttcatactacccaaagcaatttacagattcaattcaatccctatcaaaatacca

SEQ ID NO: 12686 - DNA, 201 bp, Homo sapiens
catgtcccttagggaaagccggagcctctctggagagctttagcagggtcagggtccctcaccttccccccttttcccagagccatcttcccagcccaccrtccccatcgtgggcatcgttgctggcctggttctacttgtagctgtggtcactggagctgtggtcgctgctgtaatgtggaggaagaagagctcaggtaa

SEQ ID NO: 12687 - DNA, 201 bp, Homo sapiens
tttgggatgatgagacaggagaattgtttgagcctgggagttcaagactagcctgggaaacatagtgagaccttgtctctaagaaaaaaaataaaacacayaaattgggagaattaatattgttaaatattaattttaaaaatgagacacataaatttcatgcacataaattgggagaatattgttaaaatgttcatacta

SEQ ID NO: 12688 - DNA, 201 bp, Homo sapiens
ccggagcctctctggagagctttagcagggtcagggtccctcaccttccccccttttcccagagccatcttcccagcccaccatccccatcgtgggcatcrttgctggcctggttctacttgtagctgtggtcactggagctgtggtcgctgctgtaatgtggaggaagaagagctcaggtaaggaaggggtgaggagtgt

SEQ ID NO: 12689 - DNA, 201 bp, Homo sapiens
cccccttttcccagagccatcttcccagcccaccatccccatcgtgggcatcgttgctggcctggttctacttgtagctgtggtcactggagctgtggtcrctgctgtaatgtggaggaagaagagctcaggtaaggaaggggtgaggagtgtggtctgagatttcttgtctcactgagagttccaagccccaggtagaag

SEQ ID NO: 12690 - DNA, 201 bp, Homo sapiens
ctgctgtaatgtggaggaagaagagctcaggtaaggaaggggtgaggagtgtggtctgagatttcttgtctcactgagagttccaagccccaggtagaagkgccctgcctggttactgggaagcaccatccacactcatgggcctacccagcctgggccctgtgtgccagcacttactcttttgtaaagcacctgttacaa

SEQ ID NO: 12691 - DNA, 201 bp, Homo sapiens
gccctgcctggttactgggaagcaccatccacactcatgggcctacccagcctgggccctgtgtgccagcacttactcttttgtaaagcacctgttacaaygagggacagatttatcaccttgatgactgtggtgatgggacctgatcccagcagtcacaagtcacaggggaaggtccccgaggacagacctcagaagggc

SEQ ID NO: 12692 - DNA, 201 bp, Homo sapiens
atgaacatgttacggtgctgcagagattttgtttatggccagtcttggggccagtttatggccagattttgggggacttgctcccaacggtctccttctakggggtgactgggtagcagcccagggtagctttacaggcttgtgttttacaccagtgctgggcaccctcgtagatacttgattataattccttaaacagag

SEQ ID NO: 12693 - DNA, 201 bp, Homo sapiens
ccagtcttggggccagtttatggccagattttgggggacttgctcccaacggtctccttctagggggtgactgggtagcagcccagggtagctttacaggyttgtgttttacaccagtgctgggcaccctcgtagatacttgattataattccttaaacagagttttccaaattaaaatatacctgttttttatagaaatg

SEQ ID NO: 12694 - DNA, 201 bp, Homo sapiens
ttatggccagattttgggggacttgctcccaacggtctccttctagggggtgactgggtagcagcccagggtagctttacaggcttgtgttttacaccagygctgggcaccctcgtagatacttgattataattccttaaacagagttttccaaattaaaatatacctgttttttatagaaatgaaaaagaaaagaatttc

SEQ ID NO: 12695 - DNA, 201 bp, Homo sapiens
ttgggggacttgctcccaacggtctccttctagggggtgactgggtagcagcccagggtagctttacaggcttgtgttttacaccagtgctgggcaccctsgtagatacttgattataattccttaaacagagttttccaaattaaaatatacctgttttttatagaaatgaaaaagaaaagaatttcaaagttcattgca

SEQ ID NO: 12696 - DNA, 201 bp, Homo sapiens
cattggctacaaataggtcatttgatccttggctccctggcatctctctagattttcaatgatacaatgttcaatctgctgtgcaagataatttcatcttscaaagatttgatgttacattttaccacacattaaactgaaataaacttttacagattggaaatgcacatcattgatcaaaataaatgaaacatgaaaaga

SEQ ID NO: 12697 - DNA, 201 bp, Homo sapiens
atttgatgttacattttaccacacattaaactgaaataaacttttacagattggaaatgcacatcattgatcaaaataaatgaaacatgaaaagagtaggraggaatacccagtgatggaatagcaaatatgaatggaaaacagaataggactgctaaaaagaaaaaaaaattcagaagcatgtaatagcagcgctattta

SEQ ID NO: 12698 - DNA, 201 bp, Homo sapiens
gcagaggttgcaatgagctgagattgcaccattgcactccagctggggcatcagagagagactctgtctcaaaaaaaaaaaaaaaaaaaaaaaaaaaagtraaaataaaagaaactgcatagaataagataaaatatttgccaatcacatatctgataaagaattaatatccagactacatacagaactacaacttaacaa

SEQ ID NO: 12699 - DNA, 201 bp, Homo sapiens
gtgcatatacacatggaatattaatcagccttaaaagtgaagaatatttggattggatggaaccttgaaaacacgctaaataaaataagccaaaaaaaagrcaaatatgatatttcacttatatgaggcacctagaataagcaaattcacaaaaacagaaagtagaatacaggttaccaggggctgaaggcaggaacaatg

SEQ ID NO: 12700 - DNA, 201 bp, Homo sapiens
aaccaccatcaattgtaaatgtgcttaatgccaatgaattgtacactgaaaaaaattgttagaaggtaaatcgtatagtatgtgtgttttaccacaatttwaaaaatatatatcaacaccaaatccaatcacttctcactcctctgccacctccaccccagaaccatcctcactaggatagaaaaccggaagggccttcca

SEQ ID NO: 12701 - DNA, 201 bp, Homo sapiens
ataaaataaaaacaaaagcttcagttaacatgcaagtttatgcctaatgacaactttgtttaacaatgataaaaggctaaccaaaatataaaaacacttaracataaaacagcatgtataaatgtgtatgtgacatcaaccctgaatacaaacttgaaagaatatgtctataaacaactctggatagatagcccatgaatg

SEQ ID NO: 12702 - DNA, 201 bp, Homo sapiens
acttctgtcatgactgtaagtttcctggggcaggctcctcagccatgcagaactgtgagtcaattaaacctctttcctttataaattacccagtctcaggyatttcttcatagcagtgtgagaatggactaatataacttctaacttatagaataatgctgacataatggtttgtaactctgggtgtagaacctaaaactc

SEQ ID NO: 12703 - DNA, 201 bp, Homo sapiens
catccctgccttggtctgtttcataggtgctcccctaactctctgccaccactgccttacctgggtggagctgaggccgccctgaccaagaagagcaccasccatctatgtgccccaaaaccagaaagtcaaaagaaaccttgcaacagggtcaggaactatcccacctccccacctccgaatcagtctgaactgatggcg

SEQ ID NO: 12704 - DNA, 201 bp, Homo sapiens
tgccaaagtgtcatccattactgggacagatatgaatttgttcatgaatattttttctatagtgtgagacagctgccttgtgtgggactgagaggcaagakttgttcacaccttccctttgtgacttgaagaaccctgactttctgcaaaggcacctgaatgtgtctgtgttcctgtaggcataatgtgtggaggagggga

SEQ ID NO: 12705 - DNA, 201 bp, Homo sapiens
tgttgaagccctatgttgagaaggcagaagaagtggccatctacaagcaaaggaaagaggcctcagaagagatcaaccctgcagcaccttgaccttgcacytgtggcctctggaactgtgagacaacacatatttattatttaagtcacccagcctttggtactttgttatggcagccctagcaaattaaaacaggaatat

SEQ ID NO: 12706 - DNA, 201 bp, Homo sapiens
tgtgactgatccatgtttcatgtgaatcctcagccccagtgaagccctcagatgatgcagcccttggctgacaattggactgcaaccttgtgagaggcccsgagcaagaagcactcagggaaacctctcctggactcctgaccattggaaactgtggcagatgaggaatatttgttgttttaagctaagttttacataatt

SEQ ID NO: 12707 - DNA, 201 bp, Homo sapiens
atcattgatcaaaataaatgaaacatgaaaagagtagggaggaatacccagtgatggaatagcaaatatgaatggaaaacagaataggactgctaaaaagaaaaaaaaattcagaagcatgtaatagcagcgctatttagaatcatagtggtgtccaaatcacttctatcacatctcattcaataccacaacaaaagatgt

SEQ ID NO: 12708 - DNA, 201 bp, Homo sapiens
cttgcggccggtagtctctcctccccgcccatgggcggtggttggaggcaggggtgcggaatccggccgacctcgctgtcctcgccctctaccttgtggcrtcggtggggttggggagatgagttctccgacgcagcaggcacccctgctcatctcctatggctgttgccttttgggcagcccctcttcgcggcggtgggg

SEQ ID NO: 12709 - DNA, 201 bp, Homo sapiens
gagtagggaggaatacccagtgatggaatagcaaatatgaatggaaaacagaataggactgctaaaaagaaaaaaaaattcagaagcatgtaatagcagcrctatttagaatcatagtggtgtccaaatcacttctatcacatctcattcaataccacaacaaaagatgttaagtttattatagaatgcccatcaaatagc

SEQ ID NO: 12710 - DNA, 201 bp, Homo sapiens
ataccaacttaggaaaagagcacatgaatttattgaaaatatattagcatgtgcttactatgaaaaagagatgcagaaaactgtgagacaaaaagagagayccttgctaccccagctattatccatgaaccagcagaaccagcatctcatgaaactggacagaaaggctcacaggcccagccttgacaggttgatcagtct

SEQ ID NO: 12711 - DNA, 201 bp, Homo sapiens
gggacttggatgtcacctacggtggtccctgcatacaaatctcattgtggtatcaagagactaattttcagacctgtccagctcttgccctcctcccaggrctctttcctggattgtagttttcatcttgtctccaatctttttaaaggaagcagattctgaaatttgcagagaggaggggtcccatagtttctcatcata

SEQ ID NO: 12712 - DNA, 201 bp, Homo sapiens
aatagcagcgctatttagaatcatagtggtgtccaaatcacttctatcacatctcattcaataccacaacaaaagatgttaagtttattatagaatgcccrtcaaatagccagtttttgaaaaaaacttgtttctcaattagaactaaccatttcgggctacagcatcaagccaaaattattggcatcatgctaataattt

SEQ ID NO: 12713 - DNA, 201 bp, Homo sapiens
taccacaacaaaagatgttaagtttattatagaatgcccatcaaatagccagtttttgaaaaaaacttgtttctcaattagaactaaccatttcgggctayagcatcaagccaaaattattggcatcatgctaataatttttactaaagtaaaataaagttgactgaagtatgagattcacatttttgtaaatgaaaagca

SEQ ID NO: 12714 - DNA, 201 bp, Homo sapiens
agttttttattcatctaaagaaggcaacagaagaaaaatagttgagcaagaaagataatattagaaggcagtaaatgaaaatggacagacttaaacccaaygaggtcaacaatgacattaaacgtaatggactcagacactccaattacaagacaaatagtgcagagggataaaaataaataagtaaataaataaataacc

SEQ ID NO: 12715 - DNA, 201 bp, Homo sapiens
accaaatccaatcacttctcactcctctgccacctccaccccagaaccatcctcactaggatagaaaaccggaagggccttccagctgggctgcctgctgwctctcatgcccactgtccatcacccacacaacagagagagcgtgcctttccaatgggaattagggcatatcctatgaacgctccagctccttcccttctt

SEQ ID NO: 12716 - DNA, 201 bp, Homo sapiens
aaaaccggaagggccttccagctgggctgcctgctgactctcatgcccactgtccatcacccacacaacagagagagcgtgcctttccaatgggaattagrgcatatcctatgaacgctccagctccttcccttcttaggcacaaggaaaccccagtttcccaccatttcctatgcactccttatcacagggtcccctctg

SEQ ID NO: 12717 - DNA, 201 bp, Homo sapiens
gatcttatcaacactaaaaactgttgttctgtgagagacctatgaagagcataaaaagacaagctacagaatgagagaagatatttgcaggcaacatattmtgtaaagactgtattcagaatatatgaagaaattttaaacaacaataaaaatgaaatccaaatacaaaacaggcaatgagcaagacatgaacagacattt

SEQ ID NO: 12718 - DNA, 201 bp, Homo sapiens
tcaaaaatttcttggcaatccattgtataggcatgcattttttaaaatagagattaccctttttgaatgcaatgctttttaaccagctccctactgatagrcatttggattatttctttcagagaacaatttgacatcatgtagcatcatatgggaagggtgcagtgaccccactcctacatgcatatcctaggggagctc

SEQ ID NO: 12719 - DNA, 201 bp, Homo sapiens
agaacaatttgacatcatgtagcatcatatgggaagggtgcagtgaccccactcctacatgcatatcctaggggagctcacatattcttggaaccagaaarcaatgtcccagcatgttcattgcagcagtgtctttaataaagactatgtagaggtcaatgaagtggggaagagataaattgtagcatattcctcccatgg

SEQ ID NO: 12720 - DNA, 201 bp, Homo sapiens
ctctcctgtcatcatgtgaagaaggatgtgtttgcttccacttctgtcatgactgtaagtttcctggggcaggctcctcagccatgcagaactgtgagtcwattaaacctctttcctttataaattacccagtctcaggtatttcttcatagcagtgtgagaatggactaatataacttctaacttatagaataatgctga

SEQ ID NO: 12721 - DNA, 201 bp, Homo sapiens
ttcattaaaaagtagacaaagaacttgaacagacacttctaaagaagacatacatgtggccaacaaaaatatgaaaaaaagctcaacatcgctgatcattrgagaaatgcaaatcaaaaccacaaatgagataccacctcatgtcagtcagaatggcaattattaaaaagtcaagaaacaacagatgctggcgaggttgca

SEQ ID NO: 12722 - DNA, 201 bp, Homo sapiens
aagaaataactgccaatgtacaaaaatcatgattcagtcatacaatggaatattatcagcaatgaaaatgaaagaactactgatacgtgcaccaacatggrttgatcacataggtattacaacaagcgcaaaaagccagatacaagggaggccatatgggatgagtagatttgtatgaagttttaaaacaggaagaactgt

SEQ ID NO: 12723 - DNA, 201 bp, Homo sapiens
ttctaaagaagacatacatgtggccaacaaaaatatgaaaaaaagctcaacatcgctgatcattagagaaatgcaaatcaaaaccacaaatgagataccayctcatgtcagtcagaatggcaattattaaaaagtcaagaaacaacagatgctggcgaggttgcagagaaataggaatgcttttacactgttggtggaaaa

SEQ ID NO: 12724 - DNA, 201 bp, Homo sapiens
tcatacgtggttggaaaattgtacccataagcctagggttatctttcctgaagagaaaaatatggttgtgtgctgcagtgtgcaggagggttggtgtgggrggaggtagggagggagggaggacacacaagcactcctggtgagaaaagcactggcggcatcgatgtccacatgagatgatgttgttctttagctgccaca

SEQ ID NO: 12725 - DNA, 201 bp, Homo sapiens
tgattcctcagagatttagaatcagaaataccatttgatccagcaatcgcattacagggtatatacccaaaggaatacaaatcattctattataaagatayatgcatgtttacattcatggcagcactattcacaatagcaaacacatggaatcaacccaaatgcccatcaatgatgaactggataaagaaaatgtggtac

SEQ ID NO: 12726 - DNA, 201 bp, Homo sapiens
tgcacctgtggcctctggaactgtgagacaacacatatttattatttaagtcacccagcctttggtactttgttatggcagccctagcaaattaaaacagvaatattaccttttctaccttgtcctatgtatgaacatgagatttttttaggagtatgaattacctgagatttcaaaagatagagtgaggcaattgaaaat

SEQ ID NO: 12727 - DNA, 201 bp, Homo sapiens
gtggttggaaaattgtacccataagcctagggttatctttcctgaagagaaaaatatggttgtgtgctgcagtgtgcaggagggttggtgtgggaggaggkagggagggagggaggacacacaagcactcctggtgagaaaagcactggcggcatcgatgtccacatgagatgatgttgttctttagctgccacaaaacag

SEQ ID NO: 12728 - DNA, 201 bp, Homo sapiens
caaacacatggaatcaacccaaatgcccatcaatgatgaactggataaagaaaatgtggtacatatacaccatggaatattatgcagccataaaaaggaakgagatcaagtcctttgcagggatatggatgaagctggaagccattatcctcagcaaactcacacaggaacggaaaaccaaacaccacatgttctcattta

SEQ ID NO: 12729 - DNA, 201 bp, Homo sapiens
ttctgtgttcccacccaaatctcatcttgaattgttatgcgaattgtaatcgctacctattgggggagggaccacatgggaggtgattggataatgggggyggtgcccccatgctgttctcgtgatactgagggaattctcatgagatctgatggttttataaggggcttttccctgcttcattctgcacttctctctcct

SEQ ID NO: 12730 - DNA, 201 bp, Homo sapiens
catgagatctgatggttttataaggggcttttccctgcttcattctgcacttctctctcctgtcatcatgtgaagaaggatgtgtttgcttccacttctgycatgactgtaagtttcctggggcaggctcctcagccatgcagaactgtgagtcaattaaacctctttcctttataaattacccagtctcaggtatttctt

SEQ ID NO: 12731 - DNA, 201 bp, Homo sapiens
ttctctctcctgtcatcatgtgaagaaggatgtgtttgcttccacttctgtcatgactgtaagtttcctggggcaggctcctcagccatgcagaactgtgrgtcaattaaacctctttcctttataaattacccagtctcaggtatttcttcatagcagtgtgagaatggactaatataacttctaacttatagaataatg

SEQ ID NO: 12732 - DNA, 201 bp, Homo sapiens
gtgtttgcttccacttctgtcatgactgtaagtttcctggggcaggctcctcagccatgcagaactgtgagtcaattaaacctctttcctttataaattasccagtctcaggtatttcttcatagcagtgtgagaatggactaatataacttctaacttatagaataatgctgacataatggtttgtaactctgggtgtag

SEQ ID NO: 12733 - DNA, 201 bp, Homo sapiens
aatatggttgtgtgctgcagtgtgcaggagggttggtgtgggaggaggtagggagggagggaggacacacaagcactcctggtgagaaaagcactggcggyatcgatgtccacatgagatgatgttgttctttagctgccacaaaacagcatttgccctgaggctaccttaacaaagatattggctttagaatagagaagt

SEQ ID NO: 12734 - DNA, 201 bp, Homo sapiens
tttgccttctctggtaggtctggggacattgtatcccttataaccttggttcctggcatatgacactggtaccaagctctgttggactagtgaggctcccyacacacctcctgaactagagcaaaagctctgtgcacacaccgtgcatgtgtgagcctgtgaggagacggtgccttcctgcaggctgttctgaaggggtgt

SEQ ID NO: 12735 - DNA, 201 bp, Homo sapiens
gaaccttgtttatataaattagtcagtctcagacatttctttatagcaacacaaaacggaataagacaaccctctcatcataggtatgtgtctgtggcagycagcccccattctcaaggtatccaggatccactcagccaagagtcctttcctcagtattctaaagacactctaatcactcaagagattctaaggttttta

SEQ ID NO: 12736 - DNA, 201 bp, Homo sapiens
gcatggaactctgtccaaggtacctcccggtgttctcttacttatgttggccatgtcctcatgaatttagtgaaatgggcatgttgtctctgagtggaagkgaggggacactactgggcagagctccatcgaagggtggctggtgtcctctataccatttatctacacatgttggggtttttctagcatgaaatgtcccag

SEQ ID NO: 12737 - DNA, 201 bp, Homo sapiens
gtaatcctaggtatgtggtcttttttacatgaaccgtactgtcactggctcactagctgtcacttcaccaacaatcattccatttaataaaagggagatcsccccatgggccagcatttcccaggtggaggcctcttgcaggcataatcttccaacagagaatttccctgggaacctagaaagaagagaagaggctcaagc

SEQ ID NO: 12738 - DNA, 201 bp, Homo sapiens
gtgtgacccacagagtcatagattagacaggcccaacagcatccatcatgaggtgaaaatggtccacctgggttgagcttgaatcccatgtttacacccasagaaaatacccaagtctgaagtggcactgaacaaccaaacagacaaatggaagttagccagccttcaccatgggtcagccctggtttggtaggatgagtt

SEQ ID NO: 12739 - DNA, 201 bp, Homo sapiens
aacatactggatatccaataggatattaaatcagctcatatcattgacaacttcctgttgacctggctggatgagcagcaggtagaaagtgcactgtagtscttggcaaaacacgggcactccagaaggtgaagataaaccttacaaagcttccagagtggccactcggccaggtgcagtggctcacgcctgtaatcccag

SEQ ID NO: 12740 - DNA, 201 bp, Homo sapiens
gtgtgtcccagggtgggtcttgtgtaagatacttcaagtattgtggggatcacatcaccattacagagctgaaggatgtgggatggtgttggggctgtctrttgtctctacgtaatccagcaacctgtccctgaagaagcctgatgaagcctaaagaatgaactagattactccaggtctggccaagtaggagttataatt

SEQ ID NO: 12741 - DNA, 201 bp, Homo sapiens
ccaaagggaaacctctgacactgcccccatcctggccaaatcaaaaatcatagtgtgtcccagggtgggtcttgtgtaagatacttcaagtattgtggggrtcacatcaccattacagagctgaaggatgtgggatggtgttggggctgtctattgtctctacgtaatccagcaacctgtccctgaagaagcctgatgaag

SEQ ID NO: 12742 - DNA, 201 bp, Homo sapiens
tagggagtgctatggcacatgcagtgatagaatgccctgcataataaggacagggttggaagaaacctacaaagacagtggctttggctagttacttctcrgctgcatcgatgctgtgtaaaaagataatgagaatctgcggattgttgacagctatgactggctacatttgacaccctcggcagtgtctcatggacaggt

SEQ ID NO: 12743 - DNA, 201 bp, Homo sapiens
aaaggtggtgtcccagcgtcagaacagatgggcagccagcgagggcactgcttcatatctatgatgggaatgcaagaattgaggagcaggagactgagggygtttgatcaaatacaaagtcatgatcccagtctcaattcctagacttcagccaagcttcagattcagaatctacagtggggcttaaggaggccaggaaat

SEQ ID NO: 12744 - DNA, 201 bp, Homo sapiens
gttgccttggttagggagtgctatggcacatgcagtgatagaatgccctgcataataaggacagggttggaagaaacctacaaagacagtggctttggctrgttacttctcagctgcatcgatgctgtgtaaaaagataatgagaatctgcggattgttgacagctatgactggctacatttgacaccctcggcagtgtct

SEQ ID NO: 12745 - DNA, 201 bp, Homo sapiens
ttacttcagctgatgaccttgcttcccacttcactgagaaaactgaacacattagaagacaacttcacagattccaccactgtctgctcatgcatttgcarctgcaccacatgtcaggcgttttaccatgtgagggactgttgtgggttaacccttctgctcccagccagagccagaccctcttctggtgccccaattgcc

SEQ ID NO: 12746 - DNA, 201 bp, Homo sapiens
cactgtgggaccactgggttcataaacccagtcctggttatctccccattctccacatgcataattggccttgatgcactggcaaagggagtcacccccayactacatccctagtctggagagtaagggctatcattgtgctgaagcccaaagggaatcatctaaaacttccctcatcccagccaagccagaagcaatatt

SEQ ID NO: 12747 - DNA, 201 bp, Homo sapiens
gacctccccagccacagaaatcttcccagtgcaccccctggatttctcagtccacatcagcaaaacctcctcagcctctctcaggatgttcctgcatctcrcagctccagcagcaacctgggtctccctgaggacatgaccccctccgaagtcctcccacatgggggagtttccccagggacttgtacccctgggttcaga

SEQ ID NO: 12748 - DNA, 201 bp, Homo sapiens
tatcgtctgacaggtatgtcccctaataaaatgttgtaactttaatcccatgatggcacttgctttttggaggatttggactacaaaatcattttcatctrcacaccagtgtcctcttattccaatttgtaaaatccttttgtttattcaacttcttctacttgcgttggctccattttgctggtatttgtattatgtttt

SEQ ID NO: 12749 - DNA, 201 bp, Homo sapiens
tcctggttatctccccattctccacatgcataattggccttgatgcactggcaaagggagtcacccccacactacatccctagtctggagagtaagggctwtcattgtgctgaagcccaaagggaatcatctaaaacttccctcatcccagccaagccagaagcaatattgcgccccaggtgggacttcaggagggtactg

SEQ ID NO: 12750 - DNA, 201 bp, Homo sapiens
tcccagtgcaccccctggatttctcagtccacatcagcaaaacctcctcagcctctctcaggatgttcctgcatctcgcagctccagcagcaacctgggtytccctgaggacatgaccccctccgaagtcctcccacatgggggagtttccccagggacttgtacccctgggttcagaggtgaggtggggtccttgctcct

SEQ ID NO: 12751 - DNA, 201 bp, Homo sapiens
ctacatccctagtctggagagtaagggctatcattgtgctgaagcccaaagggaatcatctaaaacttccctcatcccagccaagccagaagcaatattgygccccaggtgggacttcaggagggtactgcaggtattgtaggggtggcactgccattagagagctgaaggatggggggtggtgttgggattgcctattat

SEQ ID NO: 12752 - DNA, 201 bp, Homo sapiens
ccaagtggctgtgtgacccacaaagtcataaattgcacaggcccaacagcattcatcaacaggtgaaaatggtccacctgggttgagcttgaatcccatgytgacacccacagaaaacacccaagtgtgatgtggcactgaacaaccaaacagacaaatggcagttagccagccttcaccatgggtcagcccaggcctggt

SEQ ID NO: 12753 - DNA, 201 bp, Homo sapiens
tatttcccattttctcacaaagaatattaaagacgtatactcaaggatcaaactttaatccacataaattttttactgctccatcaaagacactcttaaaygggactgcagtttggagccactgcctggttctgctgaggtgctgggtgtgctaccgaccttggcatttgcagcactaatggaaaagtcaacacaatgaaa

SEQ ID NO: 12754 - DNA, 201 bp, Homo sapiens
ggtacagccactctggaaatgagtattgcagttttcttcaaaccgaacatgcaatttaccttatgactagcaattgccctcctaggcacttatttcaaacragggaatactttatgttcacgaaaatcctgtgcacaaatactcttgcagctttattcatgatacccccaaacaggaattaatacaactgtctttccgtag

SEQ ID NO: 12755 - DNA, 201 bp, Homo sapiens
actcttggtgacttcaacatacgcagatgtggtgggctgagtaatggtccccaaagatgtccagtcttaatcgttggaacctgtgaacaggttgcattgcrtggcaaaagggatattactcatgtaatgaagattaaggaccttaaaatagggagattctgctggactctctgtgtgggcccaatcaaatcacaagagcca

SEQ ID NO: 12756 - DNA, 201 bp, Homo sapiens
tggtgtagggtgcctgacccagacaaggaggccttcctaggggtcagtgcttctgaagcacctttaaatgaggacaaatacctcatgttcatgattagccracttgtgcccactcagtggaaaaagaacccagaattttgcaaaattttcagagagagggattcccctcttgtctcttagtgctagggttatgcatgactc

SEQ ID NO: 12757 - DNA, 201 bp, Homo sapiens
gaaatacaaaataaaggtagcaacagatgctggcaaggacgcagaggaactgggacactcttatattgctggtagggatgtattttaaaatggtacagccrctctggaaatgagtattgcagttttcttcaaaccgaacatgcaatttaccttatgactagcaattgccctcctaggcacttatttcaaacaagggaatac

SEQ ID NO: 12758 - DNA, 201 bp, Homo sapiens
gagcttggcaatgcaaaccacatacttgagacccaggacactgtctccccagtgatggcggatctcatcgtatctgtcattgtaattggtcctgagaactyccaccagcttagccaaagcacctttgtcttccgagttaacctgtgtgaaggtgacagtggtgcaggtcttcctatggactagatgtcccagtcttgcctt

SEQ ID NO: 12759 - DNA, 201 bp, Homo sapiens
atgtggttctcttttgagccagagaaggaggacgcacagtgagaagaaagtgccagagccccaagtcctggcttagatttactgggctggggcatggagasagaggctgccactgattctcttaactccagcttctattaccagtcactaagctgaaagcaggaaagtttatcttctgcacttggtccatcagaactaaga

SEQ ID NO: 12760 - DNA, 201 bp, Homo sapiens
attttatgacacaggacaggcaagaagacaaccagcttgatgggatctacatcatgtgcaatcaccaccagctgagctttcttgttctccaccaaggtggygatggtgttaactcctgctcgaaggacaggtggactcttagtggggaatgtcccctttgccagcagctttcttcttggcccgggccaacagcctctgctt

SEQ ID NO: 12761 - DNA, 201 bp, Homo sapiens
aagagtgaaagagaacaagtgatggatgtggtgacgtcgcgttctcccgggcggggccggaggcggtacagatgagggacacattcatggctaacgggacsgctcttctcgttctgcgttctgcttgcggccggtagtctctcctccccgcccatgggcggtggttggaggcaggggtgcggaatccggccgacctcgctg

SEQ ID NO: 12762 - DNA, 201 bp, Homo sapiens
tgttctccaccaaggtggtgatggtgttaactcctgctcgaaggacaggtggactcttagtggggaatgtcccctttgccagcagctttcttcttggcccvggccaacagcctctgcttcttctcttggtttgtctctggtctgtattgtgggccagcttaagcagcagagtagctgtttggctgtctggtgcctgggtga

SEQ ID NO: 12763 - DNA, 201 bp, Homo sapiens
aactggttaatctcaggaggcactttcagccacttatagaggatggttctctgctgctgcaacctgatatagcagggccatttcacaaagtgggtgaggtstcttttgggctggatatcctgtccagtgccaaaattcttaggccttttctcaaacaagggatttaccactttcttggcctcctgcttcttcacgacagca

SEQ ID NO: 12764 - DNA, 201 bp, Homo sapiens
ttatagaggatggttctctgctgctgcaacctgatatagcagggccatttcacaaagtgggtgaggtctcttttgggctggatatcctgtccagtgccaadattcttaggccttttctcaaacaagggatttaccactttcttggcctcctgcttcttcacgacagcaggggctggagccaccttcttctccttggccttc

SEQ ID NO: 12765 - DNA, 201 bp, Homo sapiens
tcccaggttcaagcaattctactgtctcagcctcccgagtagctggtaatacaggcgcccaccaccacacgcagctaatttttgtattttcagtagagacrgggtttcaccatattggccaggatagtctcaaactcctaaactcaggtgatccgcccgcctcggccaccaaaagtgctgggattacaggcatgagccacc

SEQ ID NO: 12766 - DNA, 201 bp, Homo sapiens
gggaggagaaagaaagaaacctattttgtttataaattacccagtctcaggtatttctttataaaagtgtgagaatgaactaattcagaaaatcggtaccdggagttgggtattactataaaaattcttgaaaatgtggaaacagctttggaactgggtaacaggcagaggttggaagagtttggagagttcagaagacaa

SEQ ID NO: 12767 - DNA, 201 bp, Homo sapiens
gtctcaggtatttctttataaaagtgtgagaatgaactaattcagaaaatcggtaccaggagttgggtattactataaaaattcttgaaaatgtggaaacdgctttggaactgggtaacaggcagaggttggaagagtttggagagttcagaagacaagaaaatgggggaaaatttgcaacttcctagagatttgttaagc

SEQ ID NO: 12768 - DNA, 201 bp, Homo sapiens
agaacttggaggcattgttccccctccctagggatctgtagaactttgaacttgagagtgatgtataagggtatctggtggaagaaatttctaagcagcawagcattccagatttggcctgcctgcttgtaatagcctatgcacatatgtgtgagcaaagacatgacctgaaactggaactgatatttaaaggggaaattt

SEQ ID NO: 12769 - DNA, 201 bp, Homo sapiens
taagcattcaatgttcacccatgagagcagctatatggattatgttcaccaaagccacggatatgaggctgaagatggcattgtgagtccattgcttgcascagccagtgtgctcagggttcaagatatagagtcaaaggagattattttagagctttaagttttaatgtctgccatgatgagtttcaaccttgtgaggac

SEQ ID NO: 12770 - DNA, 201 bp, Homo sapiens
caagatatagagtcaaaggagattattttagagctttaagttttaatgtctgccatgatgagtttcaaccttgtgaggacactgcattcatttcttttggyccatttatttcttttggaatggaaatgtataggaaatgtctctaccactgttgtattaatattttagaagtaaataactttttttaattttacaggtgca

SEQ ID NO: 12771 - DNA, 201 bp, Homo sapiens
ccattcaagtggcatttgttgtctgctaggtatttgactgtttttgcatttagaaaacatcgttaaagtaaaaacagaaaaatttctggccttgtcgtgtrtacattctagatgcaagcttgtccaacctgcagctctcgggatgcatgtggcccaggacagctttagaatgtgacgatttttttgcttatctgtagtggc

SEQ ID NO: 12772 - DNA, 201 bp, Homo sapiens
aaaatttaggattccaaaccacataggaagtccctaccatggccagcaatcaccctctccctgcatggctcaccctcagcctcctcctggcctgggtgacycttacacactttttctttgtgctcacacatccaacctgccttccccattcttacttcagctgatgaccttgcttcccacttcactgagaaaactgaacac

SEQ ID NO: 12773 - DNA, 201 bp, Homo sapiens
caagaattttttttctaaaataaataataaatttaaatttttaaattacaaaccttttaagaaaaagtcatcagagctaagactggacaaagagttcttaracataacaccaaaagtatgatccataaaagttaataaattggatcttatcaacactaaaaactgttgttctgtgagagacctatgaagagcataaaaaga

SEQ ID NO: 12774 - DNA, 201 bp, Homo sapiens
gctgaggtgggaggatcccttgagcccaggagttcaaggccagcctaggcaagaattttttttctaaaataaataataaatttaaatttttaaattacaarccttttaagaaaaagtcatcagagctaagactggacaaagagttcttagacataacaccaaaagtatgatccataaaagttaataaattggatcttatca

SEQ ID NO: 12775 - DNA, 201 bp, Homo sapiens
ggtggttggaggcaggggtgcggaatccggccgacctcgctgtcctcgccctctaccttgtggcgtcggtggggttggggagatgagttctccgacgcagyaggcacccctgctcatctcctatggctgttgccttttgggcagcccctcttcgcggcggtggggctgtcccgccggcctgtcacgttgcccttccctggg

SEQ ID NO: 12776 - DNA, 201 bp, Homo sapiens
ataataagtcacagattattgtgctttctcagataattaaagaaataataagagaatttgtaactagaacacttactgagaagaccacaataatgcaaagbtttttattcatctaaagaaggcaacagaagaaaaatagttgagcaagaaagataatattagaaggcagtaaatgaaaatggacagacttaaacccaatga

SEQ ID NO: 12777 - DNA, 201 bp, Homo sapiens
tgggcagattgcttgaccccaggcgttccagacaagtctgggaaacatgataaatccctttctctacaaaaaatacagaaattagccaggcatggtggcgygaacctctagtcccagctactcaagaggcctagaagggaggaattgcttaagcctggcaggtagaggctgaagtgagttgtgtttgtgccactgcatttc

SEQ ID NO: 12778 - DNA, 201 bp, Homo sapiens
ctggttggagtcagattctgcagaggaggaaggcagaggagaagctggagaggggaggtcagaagttccaagcaggaggattgaatgtgccttaggcaccrtgtgtgagtatctgagagaaggctctaggagctaagggtggctcttaacaaggaagtggaaacctcttttctatctgcaaggaagtgaattcaggcaaga

SEQ ID NO: 12779 - DNA, 201 bp, Homo sapiens
ttatccaagtctcattcggtcattcaaaattaggccagtttatcatcctcttgtatgaatatgtctcccagaatgacatcactcagctttgcagacaccaytcaatcttatcaggttccaaaaacaagaatggtctcagggacatacagcttcacccttttaggcatccagtatagttgacctaagagacaacatctcttg

SEQ ID NO: 12780 - DNA, 201 bp, Homo sapiens
ctttgcacttggggattgccactgccacagccactgtctcccacatggaccgtcctggagagggagctccacatttgagttcctgtttcatttgatatagrttacaacattagtattggtggaaatccttttaagacccagctgaaactacgaacatctttattggacatcagcatttaaagcaggaattttgagaaatta

SEQ ID NO: 12781 - DNA, 201 bp, Homo sapiens
ctcattcggtcattcaaaattaggccagtttatcatcctcttgtatgaatatgtctcccagaatgacatcactcagctttgcagacaccattcaatcttawcaggttccaaaaacaagaatggtctcagggacatacagcttcacccttttaggcatccagtatagttgacctaagagacaacatctcttgctcacaccac

SEQ ID NO: 12782 - DNA, 201 bp, Homo sapiens
atcctcttgtatgaatatgtctcccagaatgacatcactcagctttgcagacaccattcaatcttatcaggttccaaaaacaagaatggtctcagggacayacagcttcacccttttaggcatccagtatagttgacctaagagacaacatctcttgctcacaccacttttgaggagataagctaatattgaattttcctc

SEQ ID NO: 12783 - DNA, 201 bp, Homo sapiens
cagccactattcctccttctgtccctttatatcagtcttttccagttctagaagtgacattaggtttggctgctgtgctggcctagactgcatgcagcaayagtattctaccatgtcttctcttaatctactcttgatcatagacagtaggttacataggttaggaactagtgcaggctatctgaccaccagtctacgtag

SEQ ID NO: 12784 - DNA, 201 bp, Homo sapiens
tgagatggagtctcactctgtcgcccaggctggagtgcagtagtatgatctcggctcatgcaacctctgcctcccaggttcaagcaattctactgtctcarcctcccgagtagctggtaatacaggcgcccaccaccacacgcagctaatttttgtattttcagtagagacggggtttcaccatattggccaggatagtct

SEQ ID NO: 12785 - DNA, 201 bp, Homo sapiens
gagtctcactctgtcgcccaggctggagtgcagtagtatgatctcggctcatgcaacctctgcctcccaggttcaagcaattctactgtctcagcctcccragtagctggtaatacaggcgcccaccaccacacgcagctaatttttgtattttcagtagagacggggtttcaccatattggccaggatagtctcaaactc

SEQ ID NO: 12786 - DNA, 201 bp, Homo sapiens
ccaccaaaagtgctgggattacaggcatgagccaccgcgcctggtcagccatttcaatattctatcaaagtttcccctgaatagtacatttccctgtgcaytgttggctttttaaggctgtaaagtgtgttttcttgtgtaaagaaatgtgactcaacagtccaaattggtgtaatctccatttttctggttcttgtatag

SEQ ID NO: 12787 - DNA, 201 bp, Homo sapiens
tgataaagggcatctataaaaaacccacaactaaaatcatgcttgctgaagaaagactgaatgcttttctcctaagatggagatcaatgcaaggatgtccmatccaacacttctacttaacattgtactggagattgcagctggtgcaataaggcaaataattaaaagttaaaggcatccagataaaaaggaaaacataaa

SEQ ID NO: 12788 - DNA, 201 bp, Homo sapiens
caatgtaagaagatgagcaactcaactaaaaatgagcaaaacatgctcaactgacttttacaaaagcacaaaagcaattcaatgaaggaaggagagctttyccatcaaatggtgatggaacaactggacaaccacagtggaaaaaaaataacctgagccaaaacctcatgcttcatacaaaaataactcaaaatgagtcac

SEQ ID NO: 12789 - DNA, 201 bp, Homo sapiens
agcacaaaagcaattcaatgaaggaaggagagctttcccatcaaatggtgatggaacaactggacaaccacagtggaaaaaaaataacctgagccaaaacytcatgcttcatacaaaaataactcaaaatgagtcacaagctttcatgtaaagcacagagttaaaatggcaaacattgagccaggtgtggtatcacaggcc

SEQ ID NO: 12790 - DNA, 201 bp, Homo sapiens
tccctttccagacctgtctgtgttgctctgaatctgtccttccctgagaactggcggggagatatcagggaggaggggagatttctttgtgctatgtcaaygcatctagacagagctctcattctcccttgaacctcaactctatccgttcccagacacttgaaataaaacacagaccagaaatgtctatttaaaagctaa

SEQ ID NO: 12791 - DNA, 201 bp, Homo sapiens
gcttgaccccaggcgttccagacaagtctgggaaacatgataaatccctttctctacaaaaaatacagaaattagccaggcatggtggcgcgaacctctartcccagctactcaagaggcctagaagggaggaattgcttaagcctggcaggtagaggctgaagtgagttgtgtttgtgccactgcatttcagtccaggtg

SEQ ID NO: 12792 - DNA, 201 bp, Homo sapiens
acagacaaatggaagttagccagccttcaccatgggtcagccctggtttggtaggatgagttcatgaatggagcaaccacagtggcaggcatgaggctacrtatggggccaacagcactgactcccccctaccaaggcagatccagctgccgacacctctgaatgtccaactcattagcaattgaggcccatgatgtgccc

SEQ ID NO: 12793 - DNA, 201 bp, Homo sapiens
ttttcttctagctagaactaccttataataaaatttgtgaagtgaatccacagaaattgagcaaaataaaaaggagtcgttgagtgtgaggaaagctacaragaagtaaagacaggtggagacatgacaatactgagcatgttagtgaccttcacagtaactgacttcctggaggagtgtgagcttaagccagaatgaagt

SEQ ID NO: 12794 - DNA, 201 bp, Homo sapiens
aaatcaatttcatatcatctaataaagttaaacaagctagtcctctacagctaccatttccactcctaggtatatactcaagagaaatgaagattttgtcrataatccctgcataaaaatgttcatagtttctttatttataatagtaaaaaacaagaaataactgccaatgtacaaaaatcatgattcagtcatacaatg

SEQ ID NO: 12795 - DNA, 201 bp, Homo sapiens
attcacattcatgtgggatcctcaaaacattgatttatcatttgtctcagggctattgtaactcccctgacctctatagtatagtcttaagactatactaracatactggatatccaataggatattaaatcagctcatatcattgacaacttcctgttgacctggctggatgagcagcaggtagaaagtgcactgtagtg

SEQ ID NO: 12796 - DNA, 201 bp, Homo sapiens
ctgagaaaactgaacacattagaagacaacttcacagattccaccactgtctgctcatgcatttgcagctgcaccacatgtcaggcgttttaccatgtgasggactgttgtgggttaacccttctgctcccagccagagccagaccctcttctggtgccccaattgccatcccttatcatctacttaaaggtgtcagttca

SEQ ID NO: 12797 - DNA, 201 bp, Homo sapiens
agagctttcccatcaaatggtgatggaacaactggacaaccacagtggaaaaaaaataacctgagccaaaacctcatgcttcatacaaaaataactcaaartgagtcacaagctttcatgtaaagcacagagttaaaatggcaaacattgagccaggtgtggtatcacaggcctgtactctcagctactcaggaagctgag

SEQ ID NO: 12798 - DNA, 201 bp, Homo sapiens
gagaagctggagaggggaggtcagaagttccaagcaggaggattgaatgtgccttaggcaccgtgtgtgagtatctgagagaaggctctaggagctaaggrtggctcttaacaaggaagtggaaacctcttttctatctgcaaggaagtgaattcaggcaagaacctgaatgagcttggaagtggattcttccccagagtc

SEQ ID NO: 12799 - DNA, 201 bp, Homo sapiens
aggcaacatattctgtaaagactgtattcagaatatatgaagaaattttaaacaacaataaaaatgaaatccaaatacaaaacaggcaatgagcaagacaygaacagacatttcactgaagaggataaatactgggctaataagcagatgaataggtgctcaacatcattatccagtaggaaaatacaaattaaaaccaca

SEQ ID NO: 12800 - DNA, 201 bp, Homo sapiens
tgttcttctcaatcctgagtcttgtagctcctggttcactgtcaccctctccagcattgctgtctccttgactcttggtgacttcaacatacgcagatgtsgtgggctgagtaatggtccccaaagatgtccagtcttaatcgttggaacctgtgaacaggttgcattgcgtggcaaaagggatattactcatgtaatgaa

SEQ ID NO: 12801 - DNA, 201 bp, Homo sapiens
atagcttgcctcagggctactttaactcctcaaccttctataaatatcaccttaagagatctggacaaatcagacatctcacagaatactaaatctcttcdtttcattggcaatatcacatagattgggatggatgagtaagaggaggaaagtacgctgaattctttggcaaaacgtgtgcactacagaaggtgaagatta

SEQ ID NO: 12802 - DNA, 201 bp, Homo sapiens
attctgtaaagactgtattcagaatatatgaagaaattttaaacaacaataaaaatgaaatccaaatacaaaacaggcaatgagcaagacatgaacagacatttcactgaagaggataaatactgggctaataagcagatgaataggtgctcaacatcattatccagtaggaaaatacaaattaaaaccacagtgatgaga

SEQ ID NO: 12803 - DNA, 201 bp, Homo sapiens
gtcctgattagatagaatgcttgaccacgggacaccaagcaactatgtggttcgagtgcctgtgtgacccacagagtcatagattagacaggcccaacagyatccatcatgaggtgaaaatggtccacctgggttgagcttgaatcccatgtttacacccagagaaaatacccaagtctgaagtggcactgaacaaccaaa

SEQ ID NO: 12804 - DNA, 201 bp, Homo sapiens
ttgtctggtcctgcaagctgtatgagtttgccttctctggtaggtctggggacattgtatcccttataaccttggttcctggcatatgacactggtaccargctctgttggactagtgaggctccctacacacctcctgaactagagcaaaagctctgtgcacacaccgtgcatgtgtgagcctgtgaggagacggtgcct

SEQ ID NO: 12805 - DNA, 201 bp, Homo sapiens
ctcatggccacctctcatactttgctcttgttttttccccagggccgatgagggcgtcgtatctggtttccagtggggtctaaagacgccatcacagtgastggagattgggcttcataaagtgggagatctccaggatccttcctggaatccaagattcccagagaagccggatcccgcgtcccggaacccaactcctgc

SEQ ID NO: 12806 - DNA, 201 bp, Homo sapiens
aaatcagacatctcacagaatactaaatctcttcatttcattggcaatatcacatagattgggatggatgagtaagaggaggaaagtacgctgaattcttyggcaaaacgtgtgcactacagaaggtgaagattaaccttacagagcttcaagagtggccactgcagtgaagtgttatgggtccagtggttaggggcatgc

SEQ ID NO: 12807 - DNA, 201 bp, Homo sapiens
gcaacagatgctggcaaggacgcagaggaactgggacactcttatattgctggtagggatgtattttaaaatggtacagccactctggaaatgagtattgyagttttcttcaaaccgaacatgcaatttaccttatgactagcaattgccctcctaggcacttatttcaaacaagggaatactttatgttcacgaaaatcc

SEQ ID NO: 12808 - DNA, 201 bp, Homo sapiens
cctatgtttctgtttgtctggtgatgttccagtcttgctccagtcttaacattttaaaaagtataattttacttaaatttcattttataggaagtcatatrtattcatttctgttaggtttctcagtgaaagcctcctcaaaacaactgtgaagtaaagacatgtaaataaattcatggtgctcccatgtattcgtgctca

SEQ ID NO: 12809 - DNA, 201 bp, Homo sapiens
gcctcttcctggttcctggccaagcaaatcttcactgctttgctagcccatctataaattcaaccagacttttcaaatatgtattttcctcccatttttcyagttgtactcaatgggagaagtggtccaaatgacctaatcagcaattgctggaaaccaaagtaacagtatacaattctatgtgttaatatcatataccaa

SEQ ID NO: 12810 - DNA, 201 bp, Homo sapiens
atactcaaggatcaaactttaatccacataaattttttactgctccatcaaagacactcttaaatgggactgcagtttggagccactgcctggttctgctkaggtgctgggtgtgctaccgaccttggcatttgcagcactaatggaaaagtcaacacaatgaaacaggcagatggcatcttggtattactgtgaaaacaa

SEQ ID NO: 12811 - DNA, 201 bp, Homo sapiens
actttaatccacataaattttttactgctccatcaaagacactcttaaatgggactgcagtttggagccactgcctggttctgctgaggtgctgggtgtgytaccgaccttggcatttgcagcactaatggaaaagtcaacacaatgaaacaggcagatggcatcttggtattactgtgaaaacaagcctgcctccaggac

SEQ ID NO: 12812 - DNA, 201 bp, Homo sapiens
ctctttatatacataaaaggagagtgtgaaatgatggaccatggagacccagaagggtaagggggttggcagttggtgtataatagaggggtttcttgatkggtacaatgtgcttgtctccagtgctggatgctctgaaggccctgactttaccacaaccaatatagcaatgtagcaaaattgcacttgtgcctcatgaat

SEQ ID NO: 12813 - DNA, 201 bp, Homo sapiens
tatgaatttaagaaataaaaaataaaataacataacatgtctctttatagatacaggtagacatgtttgtatagcatgtgtgtgaatgtgtgtgtgtgcckgtgtgtgtgtccgcctgtgtgtgtgtgtccgtgtagagaggcagcacaaattaagagattaagattttgtgactgagctattccaaagtaacttaaacat

SEQ ID NO: 12814 - DNA, 201 bp, Homo sapiens
agctttgagtgcggactagacaggaaaggacactgcagcagatccaggcggtggtgtaccaggtcatcaactctcagtcccctggtgctgggggtgacagygtggggaaagatgctagatggagctgaaccaagcagctgagatcaagtgagctgagatcccgcccctacactccagcctgagcaacaagagtgaaactcc

SEQ ID NO: 12815 - DNA, 201 bp, Homo sapiens
gcttcttttgcaggggattgcaggtattatatgtttttctcctacttttaagatacattttcctaaaaagttttgtctaggagtaaatgtcatcactttgytttttttcctcccaattgaatcacttgttcctccctgcatttcagtaatgttgctagcatggaggtgtttgtccatgattcacagatgattcaaagagca

SEQ ID NO: 12816 - DNA, 201 bp, Homo sapiens
aggctgccctgaccaagaacagcaccacccatctgtgtccccaagaccaggaagttaggaggaaccacacaacaaggtcaggaactatcccacctccccartcagtctgaactgatggcgggagatgctgatgcttgctttactcatcctcaatcccagctcacttattcttcattaattcaatccaatctccccagcagt

SEQ ID NO: 12817 - DNA, 201 bp, Homo sapiens
ctgagcaacaagagtgaaactccatctcaaaaagaaaaaaaaattaaaaggataagcaccctcccacatcagagataactccccaacacataatatacatdcggtgtgagttctctgtatggggaagttaaaaaaatacaggtcaaactgtgatttgggtattattgtaaaaatcttcagtgacaatgccaaggaatagca

SEQ ID NO: 12818 - DNA, 201 bp, Homo sapiens
ttatatgtttttctcctacttttaagatacattttcctaaaaagttttgtctaggagtaaatgtcatcactttgctttttttcctcccaattgaatcactkgttcctccctgcatttcagtaatgttgctagcatggaggtgtttgtccatgattcacagatgattcaaagagcagagagcttctcctgaggtcacacagc

SEQ ID NO: 12819 - DNA, 201 bp, Homo sapiens
gagcaacaagagtgaaactccatctcaaaaagaaaaaaaaattaaaaggataagcaccctcccacatcagagataactccccaacacataatatacatgcdgtgtgagttctctgtatggggaagttaaaaaaatacaggtcaaactgtgatttgggtattattgtaaaaatcttcagtgacaatgccaaggaatagcaaa

SEQ ID NO: 12820 - DNA, 201 bp, Homo sapiens
ggaatataaatcattctattataaaggtatatgcatgtgtatgttcattgcagcactattcacaatagcaaagacatggaatcaacccaaatgcccacaartgaggaactggataaagaaaatatggtacatatacaccacggaatattatgcaaccataaaaaggaatgagatcaagtcctttgcagagatacgaatgaa

SEQ ID NO: 12821 - DNA, 201 bp, Homo sapiens
atgaaaatatgctcagcttcactagtccaggtgttggtgaggatgtggagaaaatggaatgcttgtgcactgctgctgagagtgaacaacagtgcagccaycatggaaacaggatgacgctttctcaagaaggtaaacatagaatttccatatgaagcaacaattccacttttgggtgtataccccccaaaaattgaaagc

SEQ ID NO: 12822 - DNA, 201 bp, Homo sapiens
taaaacacagaccagaaatgtctatttaaaagctaaatatctatagtataaaatatgaagacagagtagaatggggtaatgcaggagagtgtgacagggcraggggacctcaacgtgccaggaaagttggtccttggctcccctggaggagccgtcaccaggacactcactcataaagctcacctgtgataatacaactac

SEQ ID NO: 12823 - DNA, 201 bp, Homo sapiens
ggccgggcagaggcgccccccacctcctggacgaggtggctggccgggcgggggctgccccccacctccctcctggacggggcggctgccgggcagagacrctcctcacttcccagacggggtggctgctgggcggaggggctcctcacctctcagacggggcggccggggagagacgctccttacctcccagacggggtg

SEQ ID NO: 12824 - DNA, 201 bp, Homo sapiens
gctccctagaaaggcagaaacagagaagagaggactctccctagaaaggcagagaagactcgtttttctcaggaagtcctgcgcaaatatttactctttcmattatgtgcaattgtaacttcgaataaaataaaaacaaaagcttcagttaacatgcaagtttatgcctaatgacaactttgtttaacaatgataaaaggc

SEQ ID NO: 12825 - DNA, 201 bp, Homo sapiens
ttcaattatgtgcaattgtaacttcgaataaaataaaaacaaaagcttcagttaacatgcaagtttatgcctaatgacaactttgtttaacaatgataaarggctaaccaaaatataaaaacacttaaacataaaacagcatgtataaatgtgtatgtgacatcaaccctgaatacaaacttgaaagaatatgtctataaa

SEQ ID NO: 12826 - DNA, 201 bp, Homo sapiens
ccatttccactcctaggtatatactcaagagaaatgaagattttgtcgataatccctgcataaaaatgttcatagtttctttatttataatagtaaaaaayaagaaataactgccaatgtacaaaaatcatgattcagtcatacaatggaatattatcagcaatgaaaatgaaagaactactgatacgtgcaccaacatgg

SEQ ID NO: 12827 - DNA, 201 bp, Homo sapiens
atatactcaagagaaatgaagattttgtcgataatccctgcataaaaatgttcatagtttctttatttataatagtaaaaaacaagaaataactgccaatktacaaaaatcatgattcagtcatacaatggaatattatcagcaatgaaaatgaaagaactactgatacgtgcaccaacatgggttgatcacataggtatt

SEQ ID NO: 12828 - DNA, 201 bp, Homo sapiens
agattttgtcgataatccctgcataaaaatgttcatagtttctttatttataatagtaaaaaacaagaaataactgccaatgtacaaaaatcatgattcartcatacaatggaatattatcagcaatgaaaatgaaagaactactgatacgtgcaccaacatgggttgatcacataggtattacaacaagcgcaaaaagcc

SEQ ID NO: 12829 - DNA, 201 bp, Homo sapiens
tctactcactgtccctcaccctgggtgtcctgtcctccctcctcacccattttgaattctatggtaaataatttccatccctcccttccctctcccttgarttgtcacactcacctggcaaaactacacagctggtgggttccacctctgcctatgctgagcctgcccccatgagctgcaggaggctggagagcagcacac

SEQ ID NO: 12830 - DNA, 201 bp, Homo sapiens
cctttgcacttggggattgccactgccacagccactgtctcccacatggaccgtcctggagagggagctccacatttgagttcctgtttcatttgatatasgttacaacattagtattggtggaaatccttttaagacccagctgaaactacgaacatctttattggacatcagcatttaaagcaggaattttgagaaatt

SEQ ID NO: 12831 - DNA, 201 bp, Homo sapiens
aagaaataaatgctcgtagtttccccatgtcatagatgaggaaaatgaggcacaaagagagaacatgctggtgaggcctaggcaaggagttgaatccagaycgcctggctgcagagtctagttgccctcagtggagccagcgaacccaggagctgacaccagagactgagatctcagctgtgcactgccctggtggtctcc

SEQ ID NO: 12832 - DNA, 201 bp, Homo sapiens
tttttattccctgaggagttctccctcctcagtcactcccaaatcagatttaccctttctctgacggaagatgacgtccccacttttttctccctcccatsgcacttttccagcccctgccagtcccctcccgtgactccatcaacatcagcacctgccctgtgtccaccatccattgtgcagtgagtgaaaggacccagg

SEQ ID NO: 12833 - DNA, 201 bp, Homo sapiens
ccccacttttttctccctcccatggcacttttccagcccctgccagtcccctcccgtgactccatcaacatcagcacctgccctgtgtccaccatccattktgcagtgagtgaaaggacccaggactaaggaacaagacccaagaggaaactcagtgccctttcctcctcctctcaagcctgaccagccctgacacagtga

SEQ ID NO: 12834 - DNA, 201 bp, Homo sapiens
ccagtcccctcccgtgactccatcaacatcagcacctgccctgtgtccaccatccattgtgcagtgagtgaaaggacccaggactaaggaacaagacccavgaggaaactcagtgccctttcctcctcctctcaagcctgaccagccctgacacagtgagaggcctccccaaagagaggccctggccctgtctccatgtcc

SEQ ID NO: 12835 - DNA, 201 bp, Homo sapiens
cttccaggtctgggccaagtcacacacagtccttctcttcctgagaccccaggccctcttcacctgcagaggcacctgcataccagggcaggccctgcacrctgtgggttctgccctccaccagcagctcactgttcctcccctcccagctctgagcagacagctcctaactagagatcctatcaggaagccctggggctc

SEQ ID NO: 12836 - DNA, 201 bp, Homo sapiens
gcacctgcataccagggcaggccctgcacactgtgggttctgccctccaccagcagctcactgttcctcccctcccagctctgagcagacagctcctaacwagagatcctatcaggaagccctggggctcacaggccctgcatggaaatatgtggctgccatggagtctgcacctgacctgatgctggggacccccttgct

SEQ ID NO: 12837 - DNA, 201 bp, Homo sapiens
cataccagggcaggccctgcacactgtgggttctgccctccaccagcagctcactgttcctcccctcccagctctgagcagacagctcctaactagagatmctatcaggaagccctggggctcacaggccctgcatggaaatatgtggctgccatggagtctgcacctgacctgatgctggggacccccttgctcaaggag

SEQ ID NO: 12838 - DNA, 201 bp, Homo sapiens
taccagggcaggccctgcacactgtgggttctgccctccaccagcagctcactgttcctcccctcccagctctgagcagacagctcctaactagagatccyatcaggaagccctggggctcacaggccctgcatggaaatatgtggctgccatggagtctgcacctgacctgatgctggggacccccttgctcaaggaggc

SEQ ID NO: 12839 - DNA, 201 bp, Homo sapiens
gagctgcaaagtggacagaggatggccatgtgcactcaggactctccctgttacaaggggacctcaaaggggctgtacacatgggggccctcattctgggyctcgtgggtctttttcttgatgtcctcctgatggctggagaaacaggggagggggatgcagagaggaagggactagaggcaccacctctccttggattcc

SEQ ID NO: 12840 - DNA, 201 bp, Homo sapiens
ttccaagtggctgtgtgacccacaaagtcataaattgcacaggcccaacagcattcatcaacaggtgaaaatggtccacctgggttgagcttgaatcccaygttgacacccacagaaaacacccaagtgtgatgtggcactgaacaaccaaacagacaaatggcagttagccagccttcaccatgggtcagcccaggcctg

SEQ ID NO: 12841 - DNA, 201 bp, Homo sapiens
tctaccacatctaattaaaaaccacagtgaaagatgttaaactgatcacaggatgcccactgaatagccagttactgaaaaatcttgttcctagattgaakttaaccatttccacctaccacatcaaaccaaatcattgtcatgatgctaagccagttgtacagacaaagatgtgagactcacatttttctaattgcaaag

SEQ ID NO: 12842 - DNA, 201 bp, Homo sapiens
tctcctgagtgtggcttggacttaatgaggcacttctgatatggcctggttctgtgttcccacccaaatctcatcttgaattgttatgcgaattgtaatcsctacctattgggggagggaccacatgggaggtgattggataatgggggcggtgcccccatgctgttctcgtgatactgagggaattctcatgagatctga

SEQ ID NO: 12843 - DNA, 201 bp, Homo sapiens
gaggagtttttgcttttctgtggcggacctgagacctggagtgagtgcacccacctccctcaggatcaggagtgaatgctttaggaaccctcctttgcagygacctgcaaaagatagagggcacggttactgtgagaacccagagtagcagccaaaggggctcaaccttcatggagttttgggaaaggttagtaaaaggtg

SEQ ID NO: 12844 - DNA, 201 bp, Homo sapiens
tagggttatctttcctgaagagaaaaatatggttgtgtgctgcagtgtgcaggagggttggtgtgggaggaggtagggagggagggaggacacacaagcastcctggtgagaaaagcactggcggcatcgatgtccacatgagatgatgttgttctttagctgccacaaaacagcatttgccctgaggctaccttaacaaa

SEQ ID NO: 12845 - DNA, 201 bp, Homo sapiens
ataaaataactaagaatcaatttaccccaggaagtaaaacaaaaactataaggcactgatgaaggaaattgaagagtacacaaaactggaagagccaggcvcagtggcacatacctgtaatcctggcactttgggatgatgagacaggagaattgtttgagcctgggagttcaagactagcctgggaaacatagtgagacc

SEQ ID NO: 12846 - DNA, 201 bp, Homo sapiens
ctgctcagctgggtcatctttgctccttcattctccttggcccttcagtagaaccttgtcccaccaccacctgtgatcacagggacttggatgtcacctasggtggtccctgcatacaaatctcattgtggtatcaagagactaattttcagacctgtccagctcttgccctcctcccagggctctttcctggattgtagt

SEQ ID NO: 12847 - DNA, 201 bp, Homo sapiens
gactttatgtggtcactgctcagctgggtcatctttgctccttcattctccttggcccttcagtagaaccttgtcccaccaccacctgtgatcacagggasttggatgtcacctacggtggtccctgcatacaaatctcattgtggtatcaagagactaattttcagacctgtccagctcttgccctcctcccagggctct

SEQ ID NO: 12848 - DNA, 201 bp, Homo sapiens
aagtggctgtgtgacccacaaagtcataaattgcacaggcccaacagcattcatcaacaggtgaaaatggtccacctgggttgagcttgaatcccatgttkacacccacagaaaacacccaagtgtgatgtggcactgaacaaccaaacagacaaatggcagttagccagccttcaccatgggtcagcccaggcctggtag

SEQ ID NO: 12849 - DNA, 201 bp, Homo sapiens
tctgagtaaacatttactttttcaaattcttgccatgagaggttgatgacttaattaaaggagaagattcctaaaatttgagagacaaaataaatggaacmcatgagaaccttccagagtccatgtgtttcttgtgctgatttgttgcaggggaggagaatagatggggctgtgcctagtgggtgctcaggccagtatgga

SEQ ID NO: 12850 - DNA, 201 bp, Homo sapiens
aattcttcctctagccacatctactgtgggatctgaccaggtcctgtttttattctactccaggcggcaacagtgcccagggctctgatgtgtctctcacrgcgtgaaaggtgagaccttggggggcctgatgtgtggggggtgttgggggggaacagtggacacagctgtgctatggggttctttgaatttgatgttttg

SEQ ID NO: 12851 - DNA, 201 bp, Homo sapiens
ttttcccaataaaaaaaaaaaaaaaaaggaaaacaaaaaacagtttctacacctccattcccagagcaagctcactctctgtcaccaaactccgtgggtgdcttttcttctagaagagtccaggtggacagggagtccagttcagggacggagattcctggatgaaaagtgaagggagagggacagggcccatgccgaggg

SEQ ID NO: 12852 - DNA, 201 bp, Homo sapiens
gaaactcagagctatggaatgatggcaaatttaaaatatgacaagcgggagtcacaggtacactgcaaaagtgaaacttagaagctttgtgagtcctgttstaacgcttttgggcacatttatacatcatggggccaaagtcacattttttaccgattagattcctgatcattcaggggttaccaaggttctgctatccaa

SEQ ID NO: 12853 - DNA, 201 bp, Homo sapiens
ggagttcaagactagcctgggaaacatagtgagaccttgtctctaagaaaaaaaataaaacacataaattgggagaattaatattgttaaatattaatttwaaaaatgagacacataaatttcatgcacataaattgggagaatattgttaaaatgttcatactacccaaagcaatttacagattcaattcaatccctatc

SEQ ID NO: 12854 - DNA, 201 bp, Homo sapiens
gacccctacccttcataatcaggaaaccccagagcactttttatcccctccagaatataacacttcagctctgcatcatcacatgagggctccaactctgyagggcaggtgtactctcacagcttcaggccctgaacatttgcttcagatgtccccccatccctttccagacctgtctgtgttgctctgaatctgtccttc

SEQ ID NO: 12855 - DNA, 201 bp, Homo sapiens
tcaaaggggctgtacacatgggggccctcattctgggcctcgtgggtctttttcttgatgtcctcctgatggctggagaaacaggggagggggatgcagaraggaagggactagaggcaccacctctccttggattcctctccagtttctagccctccctagatcacatctgcctttactatttgctccctctgagatagt

SEQ ID NO: 12856 - DNA, 201 bp, Homo sapiens
gaggaagggactagaggcaccacctctccttggattcctctccagtttctagccctccctagatcacatctgcctttactatttgctccctctgagatagygatcatccaggccctcagcaatcagcacgcaattcccaactcacccacctggatgcaacctggtaagcctgagagacagagaccgggatggggacaaagc

SEQ ID NO: 12857 - DNA, 201 bp, Homo sapiens
cctagatcacatctgcctttactatttgctccctctgagatagtgatcatccaggccctcagcaatcagcacgcaattcccaactcacccacctggatgcracctggtaagcctgagagacagagaccgggatggggacaaagcaggcaccacggccctccctgctgcccactcctcacctgcagcaggaggaggccacag

SEQ ID NO: 12858 - DNA, 201 bp, Homo sapiens
tacttcttgctttccctttcatgcactggccaggcacctatcggttggggccccctcaacgaccccttccccacctcaccaaaaaatgtagtttaggctarcttgcaacatagataattgtaccctttcttatcaactaagtgcagccattagggacataagtcaaatgtttaaagagtcctgagacaatcacaatgcatt

SEQ ID NO: 12859 - DNA, 201 bp, Homo sapiens
ggacataagtcaaatgtttaaagagtcctgagacaatcacaatgcattatgggctgcaacaaaatgcagcaaaaaaaaaaaaaaccctaaggaacatactwgaagtcttaaactaccaataggtgacatccgggaagatcgtaagtccttggtactcagctaatgagcaactgggggagggagttgcgcactagggaataa

SEQ ID NO: 12860 - DNA, 201 bp, Homo sapiens
ctaaggaacatacttgaagtcttaaactaccaataggtgacatccgggaagatcgtaagtccttggtactcagctaatgagcaactgggggagggagttgmgcactagggaataaattgttgaaactctccctggtgtgcctgcattccagacacccaatattgcaaaaccgtcactaacactctcacttttgctgttctc

SEQ ID NO: 12861 - DNA, 201 bp, Homo sapiens
tgagcaactgggggagggagttgcgcactagggaataaattgttgaaactctccctggtgtgcctgcattccagacacccaatattgcaaaaccgtcactracactctcacttttgctgttctctgggtctcagagtccattctttgggtttggatgggtgcgtttgtttctcataatctagttgcctatatggggatctc

SEQ ID NO: 12862 - DNA, 201 bp, Homo sapiens
ggtcacatcaccatgagagagctgaaggatgtggggtggtgttggggctgtctatcgtctctacgtaatccagcaaactgtccctgagggagcctgatgakgcctaaagaatgaatgagattactctaggtatggccaagtaggagttataattgcagcttttatgttgtctggatatcactggtagagcagattaataaa

SEQ ID NO: 12863 - DNA, 201 bp, Homo sapiens
aagactacactagacatactggatatcctataggatattaaatcagctcatttcattgacaatttcatgtttactggggtggatgagcagcaggtagaaastgcactggagtccttggcaaaacaagcacactccagaaggtgaaggtaaaccttacagagcttcaagagtggccactgaagtgaagttttatgggtgaac

SEQ ID NO: 12864 - DNA, 201 bp, Homo sapiens
gatgacaccacattccacatttaggtgtgttgctttggcccacactctaggtgacataggaggaggccaccttcatgtggggcccacacaggaaaggaccytgcagcagatccaggccatggtacaagcagccagcatccctcagaccccttggggctggtggtgccagtggtggggaaagatgcaggatggagctgaacc

SEQ ID NO: 12865 - DNA, 201 bp, Homo sapiens
catggaatattatgcagccataaaaaggaatgagatcaagtcctttgcagggatatggatgaagctggaagccattatcctcagcaaactcacacaggaayggaaaaccaaacaccacatgttctcatttataattgggaactgagtaatgagaacacatggacacagggagaggaacaacacacactggggcctattggg

SEQ ID NO: 12866 - DNA, 201 bp, Homo sapiens
acggtgacttttaacacaattccttcaactcagtgttttcagaacacatcatcaacatcaagtattacacatttattgtaaaagtttaagtagccacaatyactttggaaatcatattatcattatctagtatggttaaagtccatacaatgtatcatgcaaccaacccattcctaatcatccactctgggggctttgggg

SEQ ID NO: 12867 - DNA, 201 bp, Homo sapiens
ggcctgggattctggagtaaggtcatgtcattcacagcagagacatatgccacctattagaagcaacttttagtgtcccttgtcctgattagatagaatgyttgaccacgggacaccaagcaactatgtggttcgagtgcctgtgtgacccacagagtcatagattagacaggcccaacagcatccatcatgaggtgaaaa

SEQ ID NO: 12868 - DNA, 201 bp, Homo sapiens
ggagacaatgtccacagtttatttcttgagtcctggatgaacctgacaggacatagctgaggggaagcctggcccagtctgcaggctttggccatcagtgyagagggaggaggtcctcatctctccactggagcagttacaaccagagcctcctctctgcgtgggagtgaggctcggtccttcccctgaacacggtgacag

SEQ ID NO: 12869 - DNA, 201 bp, Homo sapiens
ttctcatctccaatatctgggctctgtaggggaggaggtcctggtttcccaaagggggcaccctggcaaggagacatttaaatgagagtccatggaaatayacattatggctgcccccagggatgtttgaatagtatgtgtccagatacaagcaggtgagaagaggaggaggcagggctgctatcacacaaggagggcagg

SEQ ID NO: 12870 - DNA, 201 bp, Homo sapiens
caaaatgcaccttgtgtgccattcctgattgattatttggaaatgaaagagaaaagaaaatgccaaagttcatcacaagcatcctttgcgataactactcrtagtaaaacaaagccgcagctggccgggcacggtggctcacttctgtgatcctagcactttgggaagtcgaggcctgtggatcacgagatcaggagttcg

SEQ ID NO: 12871 - DNA, 201 bp, Homo sapiens
catgactgtaagtttcctggggcaggctcctcagccatgcagaactgtgagtcaattaaacctctttcctttataaattacccagtctcaggtatttcttyatagcagtgtgagaatggactaatataacttctaacttatagaataatgctgacataatggtttgtaactctgggtgtagaacctaaaactcactgcggc

SEQ ID NO: 12872 - DNA, 201 bp, Homo sapiens
tgtggcttggacttaatgaggcacttctgatatggcctggttctgtgttcccacccaaatctcatcttgaattgttatgcgaattgtaatcgctacctatwgggggagggaccacatgggaggtgattggataatgggggcggtgcccccatgctgttctcgtgatactgagggaattctcatgagatctgatggttttat

SEQ ID NO: 12873 - DNA, 201 bp, Homo sapiens
atctcacagaatactaaatctcttcatttcattggcaatatcacatagattgggatggatgagtaagaggaggaaagtacgctgaattctttggcaaaacrtgtgcactacagaaggtgaagattaaccttacagagcttcaagagtggccactgcagtgaagtgttatgggtccagtggttaggggcatgcagggctgtc

SEQ ID NO: 12874 - DNA, 201 bp, Homo sapiens
tgaactacacattatggttgtcacgagagaagttttgatagtttgtgcccagagaccacctggtgaaaagaggattctcctcctctccaggcccaggtaayagatcctcatcttcaggagaaggcatggctactttcacacaatgagggcggaagtgtgtgtggaaaccagagatccacctgggggccttctggtttccct

SEQ ID NO: 12875 - DNA, 201 bp, Homo sapiens
gggtactgcaggtattgtaggggtggcactgccattagagagctgaaggatggggggtggtgttgggattgcctattatctccatataattcagcagtctrtccctgaagaagcctgataaagaatgaatggaattactccagacttgaccaagtaggagtcctgattgcagctgccatgctggctggatatcactgcttg

SEQ ID NO: 12876 - DNA, 201 bp, Homo sapiens
gtcatgtcccttagggaaagccggagcctctctggagagctttagcagggtcagggtccctcaccttccccccttttcccagagccatcttcccagcccamcatccccatcgtgggcatcgttgctggcctggttctacttgtagctgtggtcactggagctgtggtcgctgctgtaatgtggaggaagaagagctcaggt

SEQ ID NO: 12877 - DNA, 201 bp, Homo sapiens
tggttctgtgttcccacccaaatctcatcttgaattgttatgcgaattgtaatcgctacctattgggggagggaccacatgggaggtgattggataatggrggcggtgcccccatgctgttctcgtgatactgagggaattctcatgagatctgatggttttataaggggcttttccctgcttcattctgcacttctctct

SEQ ID NO: 12878 - DNA, 201 bp, Homo sapiens
gaaaagttccccacagcactaagacccaaccacctcactgtcctcacctccatggacagagcccaggtgaaagccacccctgctcctcctcccgcatctcycacaggctcagcaccatcgtcggcctggagtgcacctggactgagctcatcatgctctgtccctgtttgtgtcagtcacactgggtcccccacatactct

SEQ ID NO: 12879 - DNA, 201 bp, Homo sapiens
agcagccagcatccctcagaccccttggggctggtggtgccagtggtggggaaagatgcaggatggagctgaaccaagcaccagtgggagagtcacaatgragggcctgggattctggagtaagatcatgtcatccacagcagagacatatgccccctgttagaagcaacatttagtgttacttgtcctgatttgatagaa

SEQ ID NO: 12880 - DNA, 201 bp, Homo sapiens
attctggagtaagatcatgtcatccacagcagagacatatgccccctgttagaagcaacatttagtgttacttgtcctgatttgatagaatgcttgaccawgagacaccaaacaacaatgtggttccaagtggctgtgtgacccacaaagtcataaattgcacaggcccaacagcattcatcaacaggtgaaaatggtcca

SEQ ID NO: 12881 - DNA, 201 bp, Homo sapiens
tctggagtaagatcatgtcatccacagcagagacatatgccccctgttagaagcaacatttagtgttacttgtcctgatttgatagaatgcttgaccaagrgacaccaaacaacaatgtggttccaagtggctgtgtgacccacaaagtcataaattgcacaggcccaacagcattcatcaacaggtgaaaatggtccacc

SEQ ID NO: 12882 - DNA, 201 bp, Homo sapiens
caaatggcagttagccagccttcaccatgggtcagcccaggcctggtaggatgggtgcatgaatggagcaaccacagtggcaggcatgaggctatgtatgrggccagcagcactgactctcccagccctaccaaggtagatccagctactgccactcctgaatgtcaactcgtcagcatttggagcccatgatgtgcccta

SEQ ID NO: 12883 - DNA, 201 bp, Homo sapiens
agccagccttcaccatgggtcagcccaggcctggtaggatgggtgcatgaatggagcaaccacagtggcaggcatgaggctatgtatggggccagcagcastgactctcccagccctaccaaggtagatccagctactgccactcctgaatgtcaactcgtcagcatttggagcccatgatgtgccctagtggggcactat

SEQ ID NO: 12884 - DNA, 201 bp, Homo sapiens
agcactgactctcccagccctaccaaggtagatccagctactgccactcctgaatgtcaactcgtcagcatttggagcccatgatgtgccctagtggggcrctatttctttcggcgaccagccactaagtaacaagtgactacatttagctacttccatcctggaagggccagaggttcatcttcacagaaataggctcat

SEQ ID NO: 12885 - DNA, 201 bp, Homo sapiens
tcccagccctaccaaggtagatccagctactgccactcctgaatgtcaactcgtcagcatttggagcccatgatgtgccctagtggggcactatttctttmggcgaccagccactaagtaacaagtgactacatttagctacttccatcctggaagggccagaggttcatcttcacagaaataggctcatattccatgggt

SEQ ID NO: 12886 - DNA, 201 bp, Homo sapiens
ggcactatttctttcggcgaccagccactaagtaacaagtgactacatttagctacttccatcctggaagggccagaggttcatcttcacagaaataggcycatattccatgggtgggttttcctgtcttgctctgacactcagccagcaccactctccgggtgctgttgacattcctgatctgcaggctaggcggtgctc

SEQ ID NO: 12887 - DNA, 201 bp, Homo sapiens
accactctccgggtgctgttgacattcctgatctgcaggctaggcggtgctcctagcccattctctgcctgaaggacccatttggcctggaaagttttaawgtttccatggctgtgggttccactaatcctatcaccatctgcaccacccaggagctaccagccacaaggaatgctggacaggtcttctataggcacaact

SEQ ID NO: 12888 - DNA, 201 bp, Homo sapiens
ctatcaccatctgcaccacccaggagctaccagccacaaggaatgctggacaggtcttctataggcacaactcagtgccagcctggaggaagcactctgaragtgccatctttcagaacatggtatattgtttgaatcagagatgtctctatggtgctgtgttctcaatggaagaacatgtgggtccagaaatcaaaaggt

SEQ ID NO: 12889 - DNA, 201 bp, Homo sapiens
ggcgaggggacctcaacgtgccaggaaagttggtccttggctcccctggaggagccgtcaccaggacactcactcataaagctcacctgtgataatacaaytacatgacattaatgtattaaaatataataaaatcataacaaaataacaaaaataatatggcacagctgcaaacacctcatatatactaacacttttcat

SEQ ID NO: 12890 - DNA, 201 bp, Homo sapiens
cataataaggacagggttggaagaaacctacaaagacagtggctttggctagttacttctcagctgcatcgatgctgtgtaaaaagataatgagaatctgyggattgttgacagctatgactggctacatttgacaccctcggcagtgtctcatggacaggtctttatctcctgtagcaaaagggcagatagcaaggaatg

SEQ ID NO: 12891 - DNA, 201 bp, Homo sapiens
aaagtagggcagaaactaaggcaggacattcctcttctgaaggctgactgaagctccagggctccctgccacccttactgaacttcccttagcctgcacasggtctaggatgcttccagctgaccttcctgcactctctacatcactgaggctcagagttgctttgtggtccagtggctttcccagcattttctgtctcat

SEQ ID NO: 12892 - DNA, 201 bp, Homo sapiens
ataataaaatcataacaaaataacaaaaataatatggcacagctgcaaacacctcatatatactaacacttttcatccacccaaccacaagaaataaatgytgttacattccctatttcatagatgagaaagctgagccagcaagagaaaaagtgctggtgagacctgggcagggcgttcaatccaggccgcctggctgca

SEQ ID NO: 12893 - DNA, 201 bp, Homo sapiens
tatcgtcaacctttttcctctctccccactggatcattgtggcagtcatgagaatgcacatcccagcccctcatctagaagaagcagaattgatgatggcyccagctcttgaagtctgaaatctattgccacatttgctctgagactatgcccacccctggctttttccagccaatgattgaggaaagtagggcagaaact

SEQ ID NO: 12894 - DNA, 201 bp, Homo sapiens
tacagtagggagctctaagccacaaataaaggtgtcaggacagacctgagacctggagtgagcacatccctcagggtcatgagtcaatcctgtaagacccytcctccctcagacactccatccagtcatcaggaggtcaagaaaagttccccacagcactaagacccaaccacctcactgtcctcacctccatggacagag

SEQ ID NO: 12895 - DNA, 201 bp, Homo sapiens
aaacaacccacaaccaattaacagtgaagataaattaacaacctttgtaaatttaaaacaagattggcaaccctttagaaaaaaaatgagacttttgcaaracaatctaaatgatacactaataacaaaccttcatgaaaatgacatttcaaccatctgaatttctgctttaagttataaactccaaaatgaactaactcc

SEQ ID NO: 12896 - DNA, 201 bp, Homo sapiens
taagtttaaacaacccacaaccaattaacagtgaagataaattaacaacctttgtaaatttaaaacaagattggcaaccctttagaaaaaaaatgagactkttgcaaaacaatctaaatgatacactaataacaaaccttcatgaaaatgacatttcaaccatctgaatttctgctttaagttataaactccaaaatgaac

SEQ ID NO: 12897 - DNA, 201 bp, Homo sapiens
aattattagaatataagaggcccaaactactgctgttacagatatgtaaaactacacagtataagtttaaacaacccacaaccaattaacagtgaagatarattaacaacctttgtaaatttaaaacaagattggcaaccctttagaaaaaaaatgagacttttgcaaaacaatctaaatgatacactaataacaaacctt

SEQ ID NO: 12898 - DNA, 201 bp, Homo sapiens
tgggaacctgactcccagcagtcacaggtcaggggaaggtccctgctgaggacagacctcaggaggacaactggtccagcctcaacacatcctcttccctygggttttctgatcctgacctgggtctgtagtcacagttctggaaacttctctaggatctcatgccctgcctcctccctggcctctcacagtttgttttct

SEQ ID NO: 12899 - DNA, 201 bp, Homo sapiens
gctaccagccacaaggaatgctggacaggtcttctataggcacaactcagtgccagcctggaggaagcactctgagagtgccatctttcagaacatggtayattgtttgaatcagagatgtctctatggtgctgtgttctcaatggaagaacatgtgggtccagaaatcaaaaggtggaagcaggtatggctccatgtcca

SEQ ID NO: 12900 - DNA, 201 bp, Homo sapiens
cctggaggaagcactctgagagtgccatctttcagaacatggtatattgtttgaatcagagatgtctctatggtgctgtgttctcaatggaagaacatgtrggtccagaaatcaaaaggtggaagcaggtatggctccatgtccaatctcttagattcacccactaaggtattttgccttttttatctcccaacaatgggc

SEQ ID NO: 12901 - DNA, 201 bp, Homo sapiens
cctggaatactgatgagtggttccctttgacactggcagcagccttgggccccgtgacttttcctctcaggccttgttctctgcttcacactcaatgtgcstgggggtctgagtccagctcttctgagtccctcagcctccactcaggtcaggaccagaagtcgctgttccctcctcagggactagaattttccacggaat

SEQ ID NO: 12902 - DNA, 201 bp, Homo sapiens
agatgtctctatggtgctgtgttctcaatggaagaacatgtgggtccagaaatcaaaaggtggaagcaggtatggctccatgtccaatctcttagattcayccactaaggtattttgccttttttatctcccaacaatgggctgtgcgggttaggaggtcctggtttccaaaggagggtacccttaaaagtagacaaaaga

SEQ ID NO: 12903 - DNA, 201 bp, Homo sapiens
atggaagaacatgtgggtccagaaatcaaaaggtggaagcaggtatggctccatgtccaatctcttagattcacccactaaggtattttgccttttttatstcccaacaatgggctgtgcgggttaggaggtcctggtttccaaaggagggtacccttaaaagtagacaaaagagagcccattgaactacacattacttta

SEQ ID NO: 12904 - DNA, 201 bp, Homo sapiens
gtttggagagcatgttcccagagaccacatcgtgagaagaggagtgtccttctctccaggcccaggtaataggccctcatccccaggaggaggcatggctrctttcacacaatgagggcagaagtgtgtgtggaaaccagacatccacctgggaaccttctgggtccccttgccccattgtaagtgtgagcagaatcatcc

SEQ ID NO: 12905 - DNA, 201 bp, Homo sapiens
ttcacacaatgagggcagaagtgtgtgtggaaaccagacatccacctgggaaccttctgggtccccttgccccattgtaagtgtgagcagaatcatccagmaatttagcctgagaggatttgatttccaagaacccagacccatctgggcagcaggtttgagtcacactcctgggtaatctcccaaggccctgctcctgtg

SEQ ID NO: 12906 - DNA, 201 bp, Homo sapiens
tgagggcagaagtgtgtgtggaaaccagacatccacctgggaaccttctgggtccccttgccccattgtaagtgtgagcagaatcatccagcaatttagcytgagaggatttgatttccaagaacccagacccatctgggcagcaggtttgagtcacactcctgggtaatctcccaaggccctgctcctgtgctctgacat

SEQ ID NO: 12907 - DNA, 201 bp, Homo sapiens
gtatggaggccctgcttcccatgggctgttcccagtcagtgatggctcacaccagtgacactaaggcaggacattcctgggagacaggggactcctctgayggccaatggtggctccgggtctcctccatggccttgctcaactctccttagattgcctgtggtctaggaaacatccagtaaaccttctctccttctgtcc

SEQ ID NO: 12908 - DNA, 201 bp, Homo sapiens
ggctgttcccagtcagtgatggctcacaccagtgacactaaggcaggacattcctgggagacaggggactcctctgatggccaatggtggctccgggtctyctccatggccttgctcaactctccttagattgcctgtggtctaggaaacatccagtaaaccttctctccttctgtccatcactgggggtcacacttgcat

SEQ ID NO: 12909 - DNA, 201 bp, Homo sapiens
agtttgttatgcggcaatggataactaatgaagccctcttacatttccattattctatacaggttacgtacatctgctttatttccttccattttcataayactggccatacgtagggtttctagtttctcaacgtgtattcttttctttattttagtttcttttcttttttgttccttccctttctccttccttctgtcc

SEQ ID NO: 12910 - DNA, 201 bp, Homo sapiens
ttgtgctgaagcccaaagggaatcatctaaaacttccctcatcccagccaagccagaagcaatattgcgccccaggtgggacttcaggagggtactgcagrtattgtaggggtggcactgccattagagagctgaaggatggggggtggtgttgggattgcctattatctccatataattcagcagtctgtccctgaagaa

SEQ ID NO: 12911 - DNA, 201 bp, Homo sapiens
ctggagaggagcagagatacacctgccatgtgcagcatgagggtctgccagagcccctcaccctgagatggggtaaggagggagatgggggtgtcatgtcycttagggaaagccggagcctctctggagagctttagcagggtcagggtccctcaccttccccccttttcccagagccatcttcccagcccaccatcccca

SEQ ID NO: 12912 - DNA, 201 bp, Homo sapiens
ccgtcggctacgtggacgatacgcagttcgtgcggttcgacagcgacgccgcgagccagaggatggagccgcgggcgccgtggatggagcgggaggggccrgagtattgggaccggaacacacagatctgcaaggcccaggcacagactgaacgagagaacctgcggatcgcgctccgctactacaaccagagcgagggcg

SEQ ID NO: 12913 - DNA, 201 bp, Homo sapiens
cctgacctcatggccacctctcatactttgctcttgttttttccccagggccgatgagggcgtcgtatctggtttccagtggggtctaaagacgccatcasagtgagtggagattgggcttcataaagtgggagatctccaggatccttcctggaatccaagattcccagagaagccggatcccgcgtcccggaacccaac

SEQ ID NO: 12914 - DNA, 201 bp, Homo sapiens
aaaattatgtcaccatcaaggaaagtatccaaagtctctggcttaaacctgggcgtctccagctctgggacaggtggctgggcagggaagacaaactaagscaagggcccagctcggaagagtttcctttcctgagaattctgcaggagtttccctgacctcatggccacctctcatactttgctcttgttttttccccag

SEQ ID NO: 12915 - DNA, 201 bp, Homo sapiens
aagaagagtgggcagactggatcactctgatggttctggggcttctcttccaggagagaagaagacaaaaattatgtcaccatcaaggaaagtatccaaadtctctggcttaaacctgggcgtctccagctctgggacaggtggctgggcagggaagacaaactaagccaagggcccagctcggaagagtttcctttcctg

SEQ ID NO: 12916 - DNA, 201 bp, Homo sapiens
ctccagcatgggcaacgagagcaaaactccatctaaaaaaaaaaaaaaaaaaaaccaacagcgataatatcatacactgtcatggtgctatgtgttaatcygtgtccttagcactttcaaaatatgaattcatttaattgtcactatacaactatggggtgtgcctgctaattttccgttttcaggtgatacaataggaaa

SEQ ID NO: 12917 - DNA, 201 bp, Homo sapiens
ccctttgcacttggggattgccactgccacagccactgtctcccacatggaccgtcctggagagggagctccacatttgagttcctgtttcatttgatatrggttacaacattagtattggtggaaatccttttaagacccagctgaaactacgaacatctttattggacatcagcatttaaagcaggaattttgagaaat

SEQ ID NO: 12918 - DNA, 201 bp, Homo sapiens
cccttaagacacagatcgctcatgctattgtttgtggcttaagaatgcctttaagcggttttccgccctgggcaggccaggtgttcctttccctcattctygtaaacccgcaaccttccagcttggacattagggccattatgaacatgttacggtgctgcagagattttgtttatggccagtcttggggccagtttatgg

SEQ ID NO: 12919 - DNA, 201 bp, Homo sapiens
atcacttgaacccaggaggcagagattgcagtgagccaagatcgtgccattgcactccagagtgggcaacaagagcaaaattccatctcaaaaagaaaaaratagtgggcattgaagtaaagttttatgggtgaacaatggccaagtgtttaggggaatgcaggtgtgtcccctccaaggtaacagacaaactgtttcatc

SEQ ID NO: 12920 - DNA, 201 bp, Homo sapiens
ctcaacagaaagaaatgataaatgcttgaggtcatggataccctaaatatcttgactgatacacacattctatgcatgtatcaaaatgtcacatgtatccyataaatatgtacaaatattatgtaccaattttaaaaaatttaaaaaataaacaacacaatatggggcatttaaaaaggtacaaaaattatgagcatgata

SEQ ID NO: 12921 - DNA, 201 bp, Homo sapiens
aacaacggcggggcatggtggctcacacctgtaatcccagcactttgggaggccgaagagggtggatcacctgaggtcaggagttcaagaccagactgccyaacatggggaaactccgtttctactaaaaatacaaaaaattagctgggcgtagtagcgggcgcctgtaatctcagctactctggaggctgaggcaggaga

SEQ ID NO: 12922 - DNA, 201 bp, Homo sapiens
gctaagtacttccaggaaactcattcaaatggtaaacatcattaagcacctaccttattctgggtactgtgctctatggagttgagcctcagataaaagamtcaaacttccttggacttcatagaagtcaaaggtgggggtgggaagataaataaagaaattatagcacagcatgttatgtattttacatgacttttttct

SEQ ID NO: 12923 - DNA, 201 bp, Homo sapiens
tttgttatgcggcaatggataactaatgaagccctcttacatttccattattctatacaggttacgtacatctgctttatttccttccattttcataacaytggccatacgtagggtttctagtttctcaacgtgtattcttttctttattttagtttcttttcttttttgttccttccctttctccttccttctgtccct

SEQ ID NO: 12924 - DNA, 201 bp, Homo sapiens
ctcccatccctgccttggtctgtttcataggtgctcccctaactctctgccaccactgccttacctgggtggagctgaggccgccctgaccaagaagagcrccacccatctatgtgccccaaaaccagaaagtcaaaagaaaccttgcaacagggtcaggaactatcccacctccccacctccgaatcagtctgaactgat

SEQ ID NO: 12925 - DNA, 201 bp, Homo sapiens
aaaagtacaatgccacggtatatgagaaacaagtaaacaacagaaagttattgacagaatctaaataaaaatgcctgctataattctgcagccaagacagyggctttcaactcaattccttcaactcagtgttttcagaacacatcatcaacatcaagtattacgcacttatttcaaaagtttaagccaggcgtggtggtt

SEQ ID NO: 12926 - DNA, 201 bp, Homo sapiens
acttttttctccctcccatggcacttttcccagcccctgccagtcccctcccgtgactccatcaacatcagcccctgccctgtgcccaccagccaccatgmaaggaggaaaagagccccaggaccaaaggacaagacctgggaaaaacccagtgccctcccctcctctcaagcctggccagctctgacagcaggaggactc

SEQ ID NO: 12927 - DNA, 201 bp, Homo sapiens
acaagtaaacaacagaaagttattgacagaatctaaataaaaatgcctgctataattctgcagccaagacagcggctttcaactcaattccttcaactcartgttttcagaacacatcatcaacatcaagtattacgcacttatttcaaaagtttaagccaggcgtggtggttcacgcctgtaatcccagcactttgggag

SEQ ID NO: 12928 - DNA, 201 bp, Homo sapiens
aataaaaatgcctgctataattctgcagccaagacagcggctttcaactcaattccttcaactcagtgttttcagaacacatcatcaacatcaagtattaygcacttatttcaaaagtttaagccaggcgtggtggttcacgcctgtaatcccagcactttgggaggctgaggtgggtggaccacctgaggtcaggagttc

SEQ ID NO: 12929 - DNA, 201 bp, Homo sapiens
gaaacttaggagctttgtgattcctgttgtaatgcttttagacacatttatatgtcaagggaccaaagtcacatttttggccgattagattcctgatcatyaggagttaccaagattctgctacccactgtagttaataaacaaaaagcaaactggtctctattctatctcatgcactcaggcacaacttttccagattta

SEQ ID NO: 12930 - DNA, 201 bp, Homo sapiens
ataaaaatgcctgctataattctgcagccaagacagcggctttcaactcaattccttcaactcagtgttttcagaacacatcatcaacatcaagtattacrcacttatttcaaaagtttaagccaggcgtggtggttcacgcctgtaatcccagcactttgggaggctgaggtgggtggaccacctgaggtcaggagttca

SEQ ID NO: 12931 - DNA, 201 bp, Homo sapiens
tttcccaataaaaaaaaaaaaaaaaaggaaaacaaaaaacagtttctacacctccattcccagagcaagctcactctctgtcaccaaactccgtgggtgasttttcttctagaagagtccaggtggacagggagtccagttcagggacggagattcctggatgaaaagtgaagggagagggacagggcccatgccgagggt

SEQ ID NO: 12932 - DNA, 201 bp, Homo sapiens
tctgcagccaagacagcggctttcaactcaattccttcaactcagtgttttcagaacacatcatcaacatcaagtattacgcacttatttcaaaagtttargccaggcgtggtggttcacgcctgtaatcccagcactttgggaggctgaggtgggtggaccacctgaggtcaggagttcaagaccagtctggctaacatg

SEQ ID NO: 12933 - DNA, 201 bp, Homo sapiens
tattatctagtatggttaaaggccatacaacatatcatccaatcatcccactcctaatcatacactctgcgggctttcttgcctatgtgcccaggagacakgcacactaatgtttatggcaagaactggaatcagctacatatatatcaatagaaaactagtgcaattatggtataaccataaaatgtaaaccttcagcag

SEQ ID NO: 12934 - DNA, 201 bp, Homo sapiens
accttcagcagtaaaaacgaatgaatgacagcctcccacaccacagataactcctatatgtaatgtgcatcatgggaaaataaatgcagtaggaatttgckgtactggaagcttaaaaaccatcaaaactaactaatatttggattggggatatatctatacttattacacaaatccttaaagaaactctataatttcttt

SEQ ID NO: 12935 - DNA, 201 bp, Homo sapiens
accaacccattcctaatcatccactctgggggctttggggctttcttgcctatgtgcacaggagacatgcacactaatatttatggcaaaaactggaatcrgccacatgtacatcaataggaaaccggtgaaattgtggtaaaacgatatgtaagccttcagcgtaaaaatgaatgaatgacagcctcccacaccacagat

SEQ ID NO: 12936 - DNA, 201 bp, Homo sapiens
tcaggatggagtctccttttgggggatgtgaatgggcagcagcccagggtagtttacaggttctgtgttttacaacagtgctggctaaagtccaaacaacatatcatccattcccttttaaaatggaacttttaaaataaatgtgtaatacttgatgttgatgatgtgttctgaaaacattgagttgaaagaattgactta

SEQ ID NO: 12937 - DNA, 201 bp, Homo sapiens
ctatatgtcaaaagcataatgtcttttatatgagaaacaagtaaacaacaggaagttattaacagaataaaaatgcttgctataattctaccaccaagacrgtgacttttaacacaattccttcaactcagtgttttcagaacacatcatcaacatcaagtattacacatttattgtaaaagtttaagtagccacaattac

SEQ ID NO: 12938 - DNA, 201 bp, Homo sapiens
caggatggagtctccttttgggggatgtgaatgggcagcagcccagggtagtttacaggttctgtgttttacaacagtgctggctaaagtccaaacaacatatcatccattcccttttaaaatggaacttttaaaataaatgtgtaatacttgatgttgatgatgtgttctgaaaacattgagttgaaagaattgacttaa

SEQ ID NO: 12939 - DNA, 201 bp, Homo sapiens
gagcagagactgaaatcccagctgtgcactgccctggtgttctgtctgagtcaggtgttgatctgggccttgcaggctcatgtgctctggagaaaagagaraaaatagtaagtgctcccctgggtgcacagtgctgctttttactccctgacgacttctccctcctcagtcagtcccaaatcagattcaccctttctccga

SEQ ID NO: 12940 - DNA, 201 bp, Homo sapiens
agtaactgacttcctggaggagtgtgagcttaagccagaatgaagtgatagaccgtgaaagacggatgaaggagtaggagcttctggaggcaaacatggtrtgtggttggctggattgggatatgtggagggactctgaacattctgctttaggtccagcactagagaaagaggactcatctttatttagcaccttccaca

SEQ ID NO: 12941 - DNA, 201 bp, Homo sapiens
ctgagcatgttagtgaccttcacagtaactgacttcctggaggagtgtgagcttaagccagaatgaagtgatagaccgtgaaagacggatgaaggagtagsagcttctggaggcaaacatggtatgtggttggctggattgggatatgtggagggactctgaacattctgctttaggtccagcactagagaaagaggactc

SEQ ID NO: 12942 - DNA, 201 bp, Homo sapiens
tctggagtcaacaaatctgccttcctctgccttccacagtgctaggatggcaggcgtgagccaccatacctggcgtaaattaattataagatattaaacaygtaacttagttttaaaaggtaaggagaatttccatggctgaagaggatgtattttatgaccattcacaatgatcactttacttgaacttcaatttccaac

SEQ ID NO: 12943 - DNA, 201 bp, Homo sapiens
ctcgcccccaggctcccactccatgaggtatttcagcgccgccgtgtcccggcccggccgcggggagccccgcttcatcgccatgggctacgtggacgacwcgcagttcgtgcggttcgacagcgactcggcgtgtccgaggatggagccgcgggcgccgtgggtggagcaggaggggccggagtattgggaagaggagac

SEQ ID NO: 12944 - DNA, 201 bp, Homo sapiens
aagcggttttccgccctgggcaggccaggtgttcctttccctcattcttgtaaacccgcaaccttccagcttggacattagggccattatgaacatgttayggtgctgcagagattttgtttatggccagtcttggggccagtttatggccagattttgggggacttgctcccaacggtctccttctagggggtgactggg

SEQ ID NO: 12945 - DNA, 201 bp, Homo sapiens
gcagataaatgggtgttgtttcgccaggcatggtagtgcacgaatgaattgatgaattgatatgcacactagttacataaaataaaaattttctgaacttyttccgtgttttgcactttataattatctgtaatgcaatttaatacactcatatttcattcattcagtcgacaaaaattaatttagtccctacgataaacc

SEQ ID NO: 12946 - DNA, 201 bp, Homo sapiens
catcgtcatcattattatttttgagacatggtctcgctctgtcacccaggctggagtgcagtggcatgatcaccatgcactgcagtgtcgacctcctgggktcaagggacccactgatctcagcctcctgagtagctgggactaccatcatgaactactatgcctggctaattttctaattttttgtatagatgggggttt

SEQ ID NO: 12947 - DNA, 201 bp, Homo sapiens
aattgcatttgctttaaatgtatcatcgtcatcattattatttttgagacatggtctcgctctgtcacccaggctggagtgcagtggcatgatcaccatgyactgcagtgtcgacctcctgggttcaagggacccactgatctcagcctcctgagtagctgggactaccatcatgaactactatgcctggctaattttcta

SEQ ID NO: 12948 - DNA, 201 bp, Homo sapiens
ttaggggaatgcaggtgtgtcccctccaaggtaacagacaaactgtttcatcttgcatcctcaccagaaagaaggaagcacactgcctgatgagcctcttycagttctgacaacaccactttccacatctaggtatgttgctttggcccacactctaggtgacataggaggaggccagcttcaagtagggcccacacagaa

SEQ ID NO: 12949 - DNA, 201 bp, Homo sapiens
accacacataccactgaattaaacttttacagaattggaaatgcacatcattgatcaaaataaatgaaacaagaaaagagtagaaaggaataaccagtgayggaatagcaatatgaatagaaaacacaataggactgcgaaaacaaagaaacaaacaaaaccacttcagaagcacctgatggcatgctatttagaatcata

SEQ ID NO: 12950 - DNA, 201 bp, Homo sapiens
cctgatggcatgctatttagaatcatagtggtgtccaaatcacttctatcacatatcattcaatatcacaacaaaagatgttaagtgtattatagaatgcygatcgaatagccagttattgaaaaaactagtttctcaattcgagctaacaatttcgtgatactgcatcaaaccgaagttattggcatgctagatgtgttg

SEQ ID NO: 12951 - DNA, 201 bp, Homo sapiens
gaatcatagtggtgtccaaatcacttctatcacatatcattcaatatcacaacaaaagatgttaagtgtattatagaatgctgatcgaatagccagttatygaaaaaactagtttctcaattcgagctaacaatttcgtgatactgcatcaaaccgaagttattggcatgctagatgtgttgactgaagtatgagattcac

SEQ ID NO: 12952 - DNA, 201 bp, Homo sapiens
gcaccatccagaggctgccagccacaaggaatgctggacaggtcttctacaggcaaaactcagtgccagcctggaggaagcactctgagaggtgggtgccrtcttttaggacacggtgcattgtttgaatcagagatgtctctagagtgctgtgttctcaataggaagaacatgtgtgtccagggatcaaaagatggaagc

SEQ ID NO: 12953 - DNA, 201 bp, Homo sapiens
tttttggaagacgatatttcaataagaaaactggcactaggggcatacttcccctaaatttgagacattttagacaaaacaaagacttattttcaaggcaytatttttatagcactaaagtcttggaactatttgatctagttattctatgttctcaactgtgttaactcattgaagagaacattgctgttattaaagata

SEQ ID NO: 12954 - DNA, 201 bp, Homo sapiens
ctgccagccacaaggaatgctggacaggtcttctacaggcaaaactcagtgccagcctggaggaagcactctgagaggtgggtgccatcttttaggacacsgtgcattgtttgaatcagagatgtctctagagtgctgtgttctcaataggaagaacatgtgtgtccagggatcaaaagatggaagcaggtttggctccac

SEQ ID NO: 12955 - DNA, 201 bp, Homo sapiens
aagaacaaagctggaggcatgaggctacctgacttaaaactatactacaaggctacagtaactgaaacagcaaggtactggtacaaaaacaggcacatagrccaatggaacagaatagagaactcagaaataagaccacacatctaaaaccctgtgatcttcaatgagcccgacaaaaataagcaatgggcaaaggattcc

SEQ ID NO: 12956 - DNA, 201 bp, Homo sapiens
ctggaggcatgaggctacctgacttaaaactatactacaaggctacagtaactgaaacagcaaggtactggtacaaaaacaggcacatagaccaatggaayagaatagagaactcagaaataagaccacacatctaaaaccctgtgatcttcaatgagcccgacaaaaataagcaatgggcaaaggattccctatttaaca

SEQ ID NO: 12957 - DNA, 201 bp, Homo sapiens
caaggtactggtacaaaaacaggcacatagaccaatggaacagaatagagaactcagaaataagaccacacatctaaaaccctgtgatcttcaatgagccygacaaaaataagcaatgggcaaaggattccctatttaacaaatggtgctgggagaactggctagcaatctgcagaaaattgaaactggactccttcctta

SEQ ID NO: 12958 - DNA, 201 bp, Homo sapiens
aaggaatataaatcattctattataaaggtatatgcatgtgtatgttcattgcagcactattcacaatagcaaagacatggaatcaacccaaatgcccacmaatgaggaactggataaagaaaatatggtacatatacaccacggaatattatgcaaccataaaaaggaatgagatcaagtcctttgcagagatacgaatg

SEQ ID NO: 12959 - DNA, 201 bp, Homo sapiens
gtccaggctggtgtctgggttctgtgctcccttccccaccccaggtatctggttcattcttaggatggtcacatccaggtgctgctggagtgtcccatgasagatgcaaagtgcttgagttttctgactcttcctttcagacccccccaagacacacgtgacccaccaccctgtctttgactatgaggccaccctgaggtg

SEQ ID NO: 12960 - DNA, 201 bp, Homo sapiens
ggtatatgcatgtgtatgttcattgcagcactattcacaatagcaaagacatggaatcaacccaaatgcccacaaatgaggaactggataaagaaaatatrgtacatatacaccacggaatattatgcaaccataaaaaggaatgagatcaagtcctttgcagagatacgaatgaagctggaagccattatcctcagcaaa

SEQ ID NO: 12961 - DNA, 201 bp, Homo sapiens
gcatttgggtcaaagacagaaagtcattttgagggttgggcctggctgatcttggacaatgttctgaaagagggctttctacttgcagaagaacaaaggtktgctctgggtaggagatgatgtcctgagaagaaaagacagataggcagattctcaagcaaactcaggagtttactatacaaaagattttggaataccttc

SEQ ID NO: 12962 - DNA, 201 bp, Homo sapiens
tccctctcttaagtgtggcttggacttaatgatgcacttctgatatggcctgtctctgtgttcccacccaaatctcattttgaattgtcatgcgaattctdatccccacatattggcggagggacttcatgggaggtgatcgaatcatggggatgattcccccaagctgtggaagtcagcggttgaacctatttttcctaa

SEQ ID NO: 12963 - DNA, 201 bp, Homo sapiens
aggtttgctctgggtaggagatgatgtcctgagaagaaaagacagataggcagattctcaagcaaactcaggagtttactatacaaaagattttggaataycttcctcagcctctttttcattgtggtaaaatacacataaacacaaaggataccaccgtaaccatttaaagtgcacaatgcagtgacaattcgtatgttc

SEQ ID NO: 12964 - DNA, 201 bp, Homo sapiens
ccccaggctcccactccatgaggtatttcagcgccgccgtgtcccggcccggccgcggggagccccgcttcatcgccatgggctacgtggacgacacgcarttcgtgcggttcgacagcgactcggcgtgtccgaggatggagccgcgggcgccgtgggtggagcaggaggggccggagtattgggaagaggagacacgga

SEQ ID NO: 12965 - DNA, 201 bp, Homo sapiens
atgacctgcacttgggccaagcttgctccagcctggtccactcatccctggaagcacagcttctccccagggctgctgcttggggaggctgaaaggccttyctctcctgttcctagcagggattcctagcagggattccacccaagccactgccctcacagcccataggggatcttcttctccctgtggagtagaaagttt

SEQ ID NO: 12966 - DNA, 201 bp, Homo sapiens
ttgtattaggagatgtcctggactcacacagaaactcagggctatggaatgaaggtaaatttaaaatactacaagcgggagtcacagatacattgtctggraaagtgaaacttaggagctttgtgattcctgttgtaatgcttttagacacatttatatgtcaagggaccaaagtcacatttttggccgattagattcctg

SEQ ID NO: 12967 - DNA, 201 bp, Homo sapiens
atgaaaagttctagagatctgttgcataacaatgtgctacagttcatattatagtactctatacttaaaaattgttacgataccaaattttatataatatrgattttggcgcaatgaaaaaaataattagctctgataccaacttaggaaaagagcacatgaatttattgaaaatatattagcatgtgcttactatgaaaa

SEQ ID NO: 12968 - DNA, 201 bp, Homo sapiens
aaggaaattccaatactgcgcaattcgttatatgcggcgtctaaactcttagaacctgaaagtagaatggcggctgccagtggttaggctggggggattcwtgaggagattttcagcgtagagtttcagttttgcaagatgaaaagttctagagatctgttgcataacaatgtgctacagttcatattatagtactctata

SEQ ID NO: 12969 - DNA, 201 bp, Homo sapiens
ttggacttaatgatgcacttctgatatggcctgtctctgtgttcccacccaaatctcattttgaattgtcatgcgaattctaatccccacatattggcgghgggacttcatgggaggtgatcgaatcatggggatgattcccccaagctgtggaagtcagcggttgaacctatttttcctaatgctcccctcagcactgcc

SEQ ID NO: 12970 - DNA, 201 bp, Homo sapiens
tatggctgcataatattccatggtgtatatgtaccatataaggggattttccccacttcactctgcatttttctctcctgccaccatgtgaagaatgacaygtttgcttccccttctgccatgattgtaagtttcctggggcagcctcctcagccatgcacaactgtgagtcaactaaacctcttgcctttataaattacc

SEQ ID NO: 12971 - DNA, 201 bp, Homo sapiens
tgcatttttctctcctgccaccatgtgaagaatgacatgtttgcttccccttctgccatgattgtaagtttcctggggcagcctcctcagccatgcacaaytgtgagtcaactaaacctcttgcctttataaattacccagtctcaggtatttctttatagcagtgtgagaacagactaatacaacttctaactgatagag

SEQ ID NO: 12972 - DNA, 201 bp, Homo sapiens
atttttctctcctgccaccatgtgaagaatgacatgtttgcttccccttctgccatgattgtaagtttcctggggcagcctcctcagccatgcacaactgygagtcaactaaacctcttgcctttataaattacccagtctcaggtatttctttatagcagtgtgagaacagactaatacaacttctaactgatagagtaa

SEQ ID NO: 12973 - DNA, 201 bp, Homo sapiens
gtcaactaaacctcttgcctttataaattacccagtctcaggtatttctttatagcagtgtgagaacagactaatacaacttctaactgatagagtaatgytgacataacagtttgtgactctgggtgtagaatgtgaaactcactatggcttccaccttctctctctctgtctctgggatcatgagctcttggggaccca

SEQ ID NO: 12974 - DNA, 201 bp, Homo sapiens
ccctgcaggaaggtccatgtggctaagaactgaggccccctgggaccagacagcaaggaactaggcttttccaacagccatgtgactaagccatgtttcaygtgaatccctagccccagtgaagccctcagacgatgcagccctaggctgacaactggactgcaaccttgtgagaggccctgagccagaagcactcaggaa

SEQ ID NO: 12975 - DNA, 201 bp, Homo sapiens
cctgcaggaaggtccatgtggctaagaactgaggccccctgggaccagacagcaaggaactaggcttttccaacagccatgtgactaagccatgtttcacrtgaatccctagccccagtgaagccctcagacgatgcagccctaggctgacaactggactgcaaccttgtgagaggccctgagccagaagcactcaggaaa

SEQ ID NO: 12976 - DNA, 201 bp, Homo sapiens
aaggtccatgtggctaagaactgaggccccctgggaccagacagcaaggaactaggcttttccaacagccatgtgactaagccatgtttcacgtgaatccytagccccagtgaagccctcagacgatgcagccctaggctgacaactggactgcaaccttgtgagaggccctgagccagaagcactcaggaaaaccgctcc

SEQ ID NO: 12977 - DNA, 201 bp, Homo sapiens
aggtccatgtggctaagaactgaggccccctgggaccagacagcaaggaactaggcttttccaacagccatgtgactaagccatgtttcacgtgaatcccyagccccagtgaagccctcagacgatgcagccctaggctgacaactggactgcaaccttgtgagaggccctgagccagaagcactcaggaaaaccgctcct

SEQ ID NO: 12978 - DNA, 201 bp, Homo sapiens
ctggactgcaaccttgtgagaggccctgagccagaagcactcaggaaaaccgctcctggattcctgaccattagaaactgtgggagatgatgaatatttgytgttttgagctgctaagttttacataatttgttacacaatagtaaataactaatacattttcacaagagaggatgtattattacacgttaatttgcattt

SEQ ID NO: 12979 - DNA, 201 bp, Homo sapiens
cgatacgcagttcgtgcggttcgacagcgacgccgcgagccagaggatggagccgcgggcgccgtggatggagcgggaggggccggagtattgggaccggracacacagatctgcaaggcccaggcacagactgaacgagagaacctgcggatcgcgctccgctactacaaccagagcgagggcggtgagtgaccccggcc

SEQ ID NO: 12980 - DNA, 201 bp, Homo sapiens
atacgcagttcgtgcggttcgacagcgacgccgcgagccagaggatggagccgcgggcgccgtggatggagcgggaggggccggagtattgggaccggaasacacagatctgcaaggcccaggcacagactgaacgagagaacctgcggatcgcgctccgctactacaaccagagcgagggcggtgagtgaccccggcccg

SEQ ID NO: 12981 - DNA, 201 bp, Homo sapiens
atatagtaaaaaatagtaaaattactctagtaaatttttcatttcagttattgcacttttcagctccaaaatttctatttggtttctttttaaactttctrtctttttattgatgttctctatttgagttaagatagttcttctgatttcctttagttttttgcccatagtttcctttagctctgtgaacatatttaagca

SEQ ID NO: 12982 - DNA, 201 bp, Homo sapiens
tcatatatattcatttctgttaggtttctcagtgaaagcctcctcaaaacaactgtgaagtaaagacatgtaaataaattcatggtgctcccatgtattcrtgctcattgcatcttacaaatgtgtcagccccactgcaacagatggtgcatcaacaaatggtgctggaaacctggatatccacatgcaaaagaatgatgc

SEQ ID NO: 12983 - DNA, 201 bp, Homo sapiens
cacattcaacatctttcaattattttctttactttgtctaagcagagaatttaaacttgtttctgaagcagaaaaccagggactggttatttgagctatcrccccactctgtggctctcttatgcaataagcataagagattgtgggccaacagaatttgtagcaagataaacataaacccttcatttcagcctatgtttc

SEQ ID NO: 12984 - DNA, 201 bp, Homo sapiens
attggtggaaatccttttaagacccagctgaaactacgaacatctttattggacatcagcatttaaagcaggaattttgagaaattagcacataactttcwcacccctttcctggccagtgccccagtaacctacaaggcaaccgttcccgcccacggggaaccagaactgacaatccctcttcaggagacaccacaggtg

SEQ ID NO: 12985 - DNA, 201 bp, Homo sapiens
tgtttgtggcttaagaatgcctttaagcggttttccgccctgggcaggccaggtgttcctttccctcattcttgtaaacccgcaaccttccagcttggacrttagggccattatgaacatgttacggtgctgcagagattttgtttatggccagtcttggggccagtttatggccagattttgggggacttgctcccaacg

SEQ ID NO: 12986 - DNA, 201 bp, Homo sapiens
gagcagaagggtggagctgctgtcagtggagatggggagactctggcaggagcatacagaggagagggcattgcaggcatccagtggaggtgacatctacraggaatgaaggtgaggggcccagatgcctctgcagctacagattcatcatccaatcactatcctacttccaccacccctgtgtctcagagccagagcatt

SEQ ID NO: 12987 - DNA, 201 bp, Homo sapiens
cagaaaaggggctgggatgtctccgtctctgtctcaaatttgtggtgcactgagctataacttacttctgtattaaaattagaatctgagtataaatttastttttcaaattatttccaagagagattgatgggttaattaaaggagaagattcctgaaatttgagagacaaaataaatggaagacatgagaactttccac

SEQ ID NO: 12988 - DNA, 201 bp, Homo sapiens; identical to SEQ ID NO: 2282

SEQ ID NO: 12989 - DNA, 201 bp, Homo sapiens; identical to SEQ ID NO: 2284

SEQ ID NO: 12990 - DNA, 201 bp, Homo sapiens
ccctcatgctgagatggagtaaggagggagatggaggcatcatgtctgttagggaaagcaggagcctctctgaagacctttaacagggtcggtggtgaggsctgggggtcagagaccctcaccttcacctcctttcccagagcagtcttccctgcccaccatccccatcatgggtatcgttgctggcctggttgtccttgc

SEQ ID NO: 12991 - DNA, 201 bp, Homo sapiens
gttctgtgctcccttccccaccccaggtatctggttcattcttaggatggtcacatccaggtgctgctggagtgtcccatgagagatgcaaagtgcttgarttttctgactcttcctttcagacccccccaagacacacgtgacccaccaccctgtctttgactatgaggccaccctgaggtgctgggccctgggcttcta

SEQ ID NO: 12992 - DNA, 201 bp, Homo sapiens
ggacatcagcatttaaagcaggaattttgagaaattagcacataactttcacacccctttcctggccagtgccccagtaacctacaaggcaaccgttcccrcccacggggaaccagaactgacaatccctcttcaggagacaccacaggtgagagcaggagcgaccacagacctgcactgcccctgctgtgggtgcctcct

SEQ ID NO: 12993 - DNA, 201 bp, Homo sapiens
acttttcccctcaggccttgttctctgcctcacactcaatgtgtgtgggggtctgactccagctcctctgagtcccttggcctccactcaggtcagaaccrgaggtccctgctcccccgctcagagactagaactttccaaggaataggagattatcccaggtgcccgtgtccaggctggtgtctgggttctgtgctccct

SEQ ID NO: 12994 - DNA, 201 bp, Homo sapiens
ggaagactgatcaggggttccctttgaccccacagcagccttggcaccaggacttttcccctcaggccttgttctctgcctcacactcaatgtgtgtgggrgtctgactccagctcctctgagtcccttggcctccactcaggtcagaaccagaggtccctgctcccccgctcagagactagaactttccaaggaatagga

SEQ ID NO: 12995 - DNA, 201 bp, Homo sapiens
agatcctgtaccagagagtgattctgagggcccgtcctgctctctgggacaattaagggatgaagtctctgagggagtggaggggaagacaatccctggargactgatcaggggttccctttgaccccacagcagccttggcaccaggacttttcccctcaggccttgttctctgcctcacactcaatgtgtgtgggggtc

SEQ ID NO: 12996 - DNA, 201 bp, Homo sapiens
gcagcgcgcgggtaccaggggcagtggggcgcctccctgatctcctgtagacctctcagcctggcctagcacaaggagaggaggaaaatgggaccaacacyagaatatcgccctccctctggtcctgagggagaggaatcctcctgggtttccagatcctgtaccagagagtgattctgagggcccgtcctgctctctggg

SEQ ID NO: 12997 - DNA, 201 bp, Homo sapiens; identical to SEQ ID NO: 2285

SEQ ID NO: 12998 - DNA, 201 bp, Homo sapiens
aggagggaaacggcccctgcgcggaggagggaggggccggcccggcgggggcgcaggactcggcagccgcgccgggaggagggtcgggcgggtctcaaccyctcctcgcccccaggctcccactccatgaggtatttcagcgccgccgtgtcccggcccggccgcggggagccccgcttcatcgccatgggctacgtggac

SEQ ID NO: 12999 - DNA, 201 bp, Homo sapiens
cctgctgctctcgggggccctgaccctgaccgagacctgggcgggtgagtgcggggtcaggagggaaacggcccctgcgcggaggagggaggggccggccyggcgggggcgcaggactcggcagccgcgccgggaggagggtcgggcgggtctcaacccctcctcgcccccaggctcccactccatgaggtatttcagcgc

SEQ ID NO: 13000 - DNA, 201 bp, Homo sapiens
tcttcctgctgctctcgggggccctgaccctgaccgagacctgggcgggtgagtgcggggtcaggagggaaacggcccctgcgcggaggagggaggggccsgcccggcgggggcgcaggactcggcagccgcgccgggaggagggtcgggcgggtctcaacccctcctcgcccccaggctcccactccatgaggtatttca

SEQ ID NO: 13001 - DNA, 201 bp, Homo sapiens
ggggccctggccctgacccagacctgggcgcgtgagtgcagggtctgcagggaaatggtcgggaggagcgaggggcccgcccggcgggggcgcaggacccrgggagccgcgcagggaggagggtcgggcgggtctcagctcctcctcgctcccaggctcccactccatgaggtatttctacaccaccatgtcccggcccgg

SEQ ID NO: 13002 - DNA, 201 bp, Homo sapiens
cgcacccaccgggactcagattctccccagacgccgaggatggtgctcatggcgccccgaaccctcctcctgctgctctcaggggccctggccctgacccwgacctgggcgcgtgagtgcagggtctgcagggaaatggtcgggaggagcgaggggcccgcccggcgggggcgcaggacccagggagccgcgcagggagga

SEQ ID NO: 13003 - DNA, 201 bp, Homo sapiens
caaggaactataagcagataaatgggtgttgtttcgccaggcatggtagtgcacgaatgaattgatgaattgatatgcacactagttacataaaataaaawttttctgaactttttccgtgttttgcactttataattatctgtaatgcaatttaatacactcatatttcattcattcagtcgacaaaaattaatttagtc

SEQ ID NO: 13004 - DNA, 201 bp, Homo sapiens
tgctgaggtcctgcttccaatgggctgttcccaaccagtgacagatcacaccagtgacacgaaagcaggacattcctgggagaccagggactcctctgatrgccaactgtagctcaaggactcctccatggccttgcttaactctccttagattgcctgtggtctacggcacatccagtaaaccttgtctccttctgtcca

SEQ ID NO: 13005 - DNA, 201 bp, Homo sapiens
cacctgggggccttctggtttcccttacctcattgtaagtgtgagcagaatcatccagcaattcagcctgagacagcttgatttccaaggacccagacccrtcagggcagaaggtttgagtaatgctgggtaatctcccaaggccctgctcctgtgctctgacatcctcagtagcattggtgctgaggtcctgcttccaat

SEQ ID NO: 13006 - DNA, 201 bp, Homo sapiens
aaggcatggctactttcacacaatgagggcggaagtgtgtgtggaaaccagagatccacctgggggccttctggtttcccttacctcattgtaagtgtgarcagaatcatccagcaattcagcctgagacagcttgatttccaaggacccagacccgtcagggcagaaggtttgagtaatgctgggtaatctcccaaggcc

SEQ ID NO: 13007 - DNA, 201 bp, Homo sapiens
atttctttaggtgactaactagccactaagtaacaagttgactacatttagctacttccatcctggaagggccagaggttcatcttcacagggataggctyctattccatgggtgttttcatgtcctgctctcagaaactcagccagcacctctccgggtgctgttgacattcctgatctgcaggctaggcggtgctccta

SEQ ID NO: 13008 - DNA, 201 bp, Homo sapiens
tctgaaatctattgccacatttgctctgagactatgcccacccctggctttttccagccaatgattgaggaaagtagggcagaaactaaggcaggacattyctcttctgaaggctgactgaagctccagggctccctgccacccttactgaacttcccttagcctgcacagggtctaggatgcttccagctgaccttcctg

SEQ ID NO: 13009 - DNA, 201 bp, Homo sapiens
taatctcagctactctggaggctgaggcaggagaatcgcttgaactcaggaggtggaggttgcagtgagccgagatggtgccactgcactccagcatgggyaacgagagcaaaactccatctaaaaaaaaaaaaaaaaaaaaccaacagcgataatatcatacactgtcatggtgctatgtgttaatctgtgtccttagca

SEQ ID NO: 13010 - DNA, 201 bp, Homo sapiens
gctggtggtgccagtggtggggaaagatgcaggatggagctgaaccaagcaccagtgggagagtcacaatggagggcctgggattctggagtaagatcatrtcatccacagcagagacatatgccccctgttagaagcaacatttagtgttacttgtcctgatttgatagaatgcttgaccaagagacaccaaacaacaat

SEQ ID NO: 13011 - DNA, 201 bp, Homo sapiens
ttaatcgttggaacctgtgaacaggttgcattgcgtggcaaaagggatattactcatgtaatgaagattaaggaccttaaaatagggagattctgctggamtctctgtgtgggcccaatcaaatcacaagagccattaaaagcagagagcctgccctggttggagtcagattctgcagaggaggaaggcagaggagaagct

SEQ ID NO: 13012 - DNA, 201 bp, Homo sapiens
ggagagtcacaatggagggcctgggattctggagtaagatcatgtcatccacagcagagacatatgccccctgttagaagcaacatttagtgttacttgtmctgatttgatagaatgcttgaccaagagacaccaaacaacaatgtggttccaagtggctgtgtgacccacaaagtcataaattgcacaggcccaacagca

SEQ ID NO: 13013 - DNA, 201 bp, Homo sapiens
ccctcctctcaagcctggccagctctgacagcaggaggactccccaaagagaggctctggccctggctccatgtccttccaggactgggctgggtcacackcacagtccttctcttcctcagtccccagtcccacctcacctgtagagacacctgcacacaaaggcaggccctaaacactgtggttctgccctccacctgc

SEQ ID NO: 13014 - DNA, 201 bp, Homo sapiens
tctatggaaaggaatgcagaccttcccgtatgttgatcttagccccatgagactgggtggacttgcaatccacacgactgtgccatgatacataggtgctktttaaagccatttggtttgtggtaatttttatggcagcaatagacacccacacagcagagaagatgccctcgcttcctggcctctcagatcctggaactc

SEQ ID NO: 13015 - DNA, 201 bp, Homo sapiens
ggagagtccagctcagggagagtgattggagagacagaataataagaagagtgggcagactggatcactctgatggttctggggcttctcttccaggagagaagaagacaaaaattatgtcaccatcaaggaaagtatccaaagtctctggcttaaacctgggcgtctccagctctgggacaggtggctgggcagggaaga

SEQ ID NO: 13016 - DNA, 201 bp, Homo sapiens
gagagtccagctcagggagagtgattggagagacagaataataagaagagtgggcagactggatcactctgatggttctggggcttctcttccaggagagaagaagacaaaaattatgtcaccatcaaggaaagtatccaaagtctctggcttaaacctgggcgtctccagctctgggacaggtggctgggcagggaagac

SEQ ID NO: 13017 - DNA, 201 bp, Homo sapiens
tctccaggatccttcctggaatccaagattcccagagaagccggatcccgcgtcccggaacccaactcctgctgctctatgagccctgaccttggggagamctgggctagtgaggagaggatcaagatgaactgggctggggaggcaggaggtaaagggcggcctggagagctcagcagctcctcccacggctcttctgcc

SEQ ID NO: 13018 - DNA, 201 bp, Homo sapiens
ttcttaggatggtcacatccaggtgctgctggagtgtcccatgagagatgcaaagtgcttgagttttctgactcttcctttcagacccccccaagacacaygtgacccaccaccctgtctttgactatgaggccaccctgaggtgctgggccctgggcttctaccctgcggagatcatactgacctggcagcgggatgggg

SEQ ID NO: 13019 - DNA, 201 bp, Homo sapiens
tcactctgatggttctggggcttctcttccaggagagaagaagacaaaaattatgtcaccatcaaggaaagtatccaaagtctctggcttaaacctgggcrtctccagctctgggacaggtggctgggcagggaagacaaactaagccaagggcccagctcggaagagtttcctttcctgagaattctgcaggagtttccc

SEQ ID NO: 13020 - DNA, 201 bp, Homo sapiens
tggggagacctgggctagtgaggagaggatcaagatgaactgggctggggaggcaggaggtaaagggcggcctggagagctcagcagctcctcccacggckcttctgccccggtctggggtctgcagactcctcaggtcatatctccaagtacgccgccccacgccaccctcccgtggtccctgtccctctgtcccctccc

SEQ ID NO: 13021 - DNA, 201 bp, Homo sapiens
agtgaggagaggatcaagatgaactgggctggggaggcaggaggtaaagggcggcctggagagctcagcagctcctcccacggctcttctgccccggtctvgggtctgcagactcctcaggtcatatctccaagtacgccgccccacgccaccctcccgtggtccctgtccctctgtcccctccccagctccccctacacc

SEQ ID NO: 13022 - DNA, 201 bp, Homo sapiens
caggagacaccacaggtgagagcaggagcgaccacagacctgcactgcccctgctgtgggtgcctcctggacagggccctcttgctgcagggcaggggatkaaccatcccatctgcccaggcctgaggggccaactgacagtgcaattaggttcaaggatgagaaatcaccaccccctgccagatacacagaagtggggaa

SEQ ID NO: 13023 - DNA, 201 bp, Homo sapiens
tgctctcaacctggccccagacaggatcccaaacaactcctgttcctaatgtgaaaaatgtttctgccgctttaggcagaacttgctttagagcactggcrcagacttccgcaggtcttgtgtctgaatttcttggcactgtgtcttttctcacttattcttctgcaaggaaggaattatatcactggttggatgagacaa

SEQ ID NO: 13024 - DNA, 201 bp, Homo sapiens
tgtgtcttttctcacttattcttctgcaaggaaggaattatatcactggttggatgagacaattggctcagatgggttcattgagcactcacccactgggmaagtgtctgtcggggccagctctgggccagatgtgcccaaggctctatagctagttggtggaaaggcctggagggttcatattcaagtccacctgacttg

SEQ ID NO: 13025 - DNA, 201 bp, Homo sapiens
ttctcacttattcttctgcaaggaaggaattatatcactggttggatgagacaattggctcagatgggttcattgagcactcacccactgggcaagtgtcygtcggggccagctctgggccagatgtgcccaaggctctatagctagttggtggaaaggcctggagggttcatattcaagtccacctgacttgaaaactca

SEQ ID NO: 13026 - DNA, 201 bp, Homo sapiens
ctggttggatgagacaattggctcagatgggttcattgagcactcacccactgggcaagtgtctgtcggggccagctctgggccagatgtgcccaaggctytatagctagttggtggaaaggcctggagggttcatattcaagtccacctgacttgaaaactcatattgaccttacttaagtactgattccccctttataa

SEQ ID NO: 13027 - DNA, 201 bp, Homo sapiens
tcgggggccctggtcctgacccagacctgggcaggtgagtgcggggtcgggagggaaacggcctctgtggggagtagctaggggcctgcccggcgggggckcaggaacccggttgcggtgccgggaggagggtcgggagagtctcagccccctccttgctcccaggcttccactccttgaggtatttccacaccaccatgt

SEQ ID NO: 13028 - DNA, 201 bp, Homo sapiens
ctatattaaactaaatagcttcagcacagcaaatgaaacaatcaacagaatgaagaggcaacctgttgaatagagaaaatatttgctatgtattcatccavcaaggaactaacatctagaatatacaaggaacttaaaaaactcagcagtaaaaacacaaataatccaattaaaaaatggacaaagtgtctgaatagatgt

SEQ ID NO: 13029 - DNA, 201 bp, Homo sapiens
ggccaggtgcagtggctcacgcctgtaatcccagcactttggaaggctgaggtggatggatcacctgaggttgggagttggagactagcctgaccaacacrgagaaaccccgtctctactaaaaatacaaaattatccaggcatggtggcccatgctggtaatcccagctacttgggaggctgaggcaggagaatcacttg

SEQ ID NO: 13030 - DNA, 201 bp, Homo sapiens
aggcaacctgttgaatagagaaaatatttgctatgtattcatccagcaaggaactaacatctagaatatacaaggaacttaaaaaactcagcagtaaaaayacaaataatccaattaaaaaatggacaaagtgtctgaatagatgtttctcaaaaggagacatacaaatggtcaacaggtatacgaaaaacactcaacctt

SEQ ID NO: 13031 - DNA, 201 bp, Homo sapiens
tttgctatgtattcatccagcaaggaactaacatctagaatatacaaggaacttaaaaaactcagcagtaaaaacacaaataatccaattaaaaaatggayaaagtgtctgaatagatgtttctcaaaaggagacatacaaatggtcaacaggtatacgaaaaacactcaaccttattaaatatcaggaaaatgcaaatca

SEQ ID NO: 13032 - DNA, 201 bp, Homo sapiens
tcccaggttcaagcaattctcctacctcagcctcctgagtagctggaattataggcatccaccacgacacccaggtaatttttgtatttttagtagagacrgggtttcaccatattgtccaggttggtctcaaactcctgacctcaggtgatccaccaacttcggccttccaaagtgctgggattacagacatgagccacc

SEQ ID NO: 13033 - DNA, 201 bp, Homo sapiens
gcatccaccacgacacccaggtaatttttgtatttttagtagagacggggtttcaccatattgtccaggttggtctcaaactcctgacctcaggtgatccrccaacttcggccttccaaagtgctgggattacagacatgagccaccattcccggcccacaaatctttaaagtgtcatttttcaaaatgcaccttgtgtgc

SEQ ID NO: 13034 - DNA, 201 bp, Homo sapiens
tttttgatcttcaacttgtatgttctatttaaacatgaaaggaagatccaggctatgctaggctgattctatgatgacaccccaataaccacccttggttwctcaggttaccccagttactcagttgacactaaagcaggtgctgctgtgaagaggttttgcagatatatttaaagtccccagtcagttgactttaagatg

SEQ ID NO: 13035 - DNA, 201 bp, Homo sapiens
tcaccatattgtccaggttggtctcaaactcctgacctcaggtgatccaccaacttcggccttccaaagtgctgggattacagacatgagccaccattccyggcccacaaatctttaaagtgtcatttttcaaaatgcaccttgtgtgccattcctgactgattatttggaaatgaaagagaaaagaaaataccaaagttc

SEQ ID NO: 13036 - DNA, 201 bp, Homo sapiens
gtgctgggattacagacatgagccaccattcccggcccacaaatctttaaagtgtcatttttcaaaatgcaccttgtgtgccattcctgactgattatttggaaatgaaagagaaaagaaaataccaaagttcatctcaaggatccttagcaataactacacacgttaaaacaaagccacagccaattgtaaagagtcatg

SEQ ID NO: 13037 - DNA, 201 bp, Homo sapiens
ttgcaaagattcttaacaagaactacttacattggaagaaaaccacagagaattgtaaggagccatgtgacagagaggaccaggatgccatgaaaatggcmttggctacaaataggtcatttgatccttggctccctggcatctctctagattttcaatgatacaatgttcaatctgctgtgcaagataatttcatcttcc

SEQ ID NO: 13038 - DNA, 201 bp, Homo sapiens
ttagattcacccaatggggtattttgcacgttttatcttccaacactgggctgtgcagggtacgaggtcctggtttccaaggagggtacccttaaaaggakacaaaagacagcccactgaactacacattatggttgtcacgagagaagttttgatagtttgtgcccagagaccacctggtgaaaagaggattctcctcct

SEQ ID NO: 13039 - DNA, 201 bp, Homo sapiens
gggataggctcctattccatgggtgttttcatgtcctgctctcagaaactcagccagcacctctccgggtgctgttgacattcctgatctgcaggctaggmggtgctcctagcccattatctgcctgaaggacccacttggctgggaaagtttcagtgtttccatggctgtgggttccactaatcctatcaccatctgcac

SEQ ID NO: 13040 - DNA, 201 bp, Homo sapiens
gtaagatacttcaagtattgtggggatcacatcaccattacagagctgaaggatgtgggatggtgttggggctgtctattgtctctacgtaatccagcaayctgtccctgaagaagcctgatgaagcctaaagaatgaactagattactccaggtctggccaagtaggagttataattgcagcttttgtgctgtctggata

SEQ ID NO: 13041 - DNA, 201 bp, Homo sapiens
atctttccactcatccccttgcaaggtggccacaggctctgaggacacagatactatcattttatcatatgctgtgatgtaatatcagtggaccactcatygcatatgtgcttgctttccacgcttggagtctaccctgtagtacatcaattccaacaatcgttccaccctcctgggattcccaatccagtgatcctgcca

SEQ ID NO: 13042 - DNA, 201 bp, Homo sapiens
tcaacatacgcagatgtggtgggctgagtaatggtccccaaagatgtccagtcttaatcgttggaacctgtgaacaggttgcattgcgtggcaaaagggayattactcatgtaatgaagattaaggaccttaaaatagggagattctgctggactctctgtgtgggcccaatcaaatcacaagagccattaaaagcagaga

SEQ ID NO: 13043 - DNA, 201 bp, Homo sapiens
gggcgaggctcggtgggcggggctgaccgagggggtggggccaggttctcacaccctccagtggatgattggctgcgacctggggtccgacggacgcctcmtccgcgggtatgaacagtatgcctacgatggcaaggattacctcgccctgaacgaggacctgcgctcctggaccgcagcggacactgcggctcagatctc

SEQ ID NO: 13044 - DNA, 201 bp, Homo sapiens
aggtcaatgaagtggggaagagataaattgtagcatattcctcccatggaatactatctagcaatgaaaacaaatgaactatttgtgtgaacattgatccmtctcatagaccatgttaacggaaaaagcaagcaaatgcataacaaaatcagcaagaaacaatttataaaaagtctaaaagtaaagccaggcaagggggcc

SEQ ID NO: 13045 - DNA, 201 bp, Homo sapiens
cactgtcttgctctctattttccctcattcttccaacttataactgtataaattttcaaatgtgcaaagaagctgaaagaacggtgcagtaaaattcaagytaccactctgccgtatttggttaatatctctttatatacataaaaggagagtgtgaaatgatggaccatggagacccagaagggtaagggggttggcagt

SEQ ID NO: 13046 - DNA, 201 bp, Homo sapiens
ccctgcttctgctgctctcgggggccctggtcctgacccagacctgggcaggtgagtgcggggtcgggagggaaacggcctctgtggggagtagctagggkcctgcccggcgggggcgcaggaacccggttgcggtgccgggaggagggtcgggagagtctcagccccctccttgctcccaggcttccactccttgaggta

SEQ ID NO: 13047 - DNA, 201 bp, Homo sapiens
ctagcctattcctattcagcactgtcttgctctctattttccctcattcttccaacttataactgtataaattttcaaatgtgcaaagaagctgaaagaayggtgcagtaaaattcaagttaccactctgccgtatttggttaatatctctttatatacataaaaggagagtgtgaaatgatggaccatggagacccagaa

SEQ ID NO: 13048 - DNA, 201 bp, Homo sapiens
ggtgctgggtgtgctaccgaccttggcatttgcagcactaatggaaaagtcaacacaatgaaacaggcagatggcatcttggtattactgtgaaaacaagyctgcctccaggactctctgaaggctgctcaggggacacactttcaaaatggcaaagatcaattatggttcctagtgggacacaacccctagcctattcct

SEQ ID NO: 13049 - DNA, 201 bp, Homo sapiens; identical to SEQ ID NO: 2376

SEQ ID NO: 13050 - DNA, 201 bp, Homo sapiens
ggcctgggggtcagggcccctcacgttcacctcctttcttagagctgtcttcccagcccatcatccccgttgtgggcatcattgctggcctggttcttcthgttgctgtaatcactgtagctgtggtcgctgctgtgatgtggaggaataagatcccaggtaggaaaggggtgagctctgagtttccttcttccattggtg

SEQ ID NO: 13051 - DNA, 201 bp, Homo sapiens
atggtgaaacctcgtctttactaaaaatacaaaaattagctgggcgtgttggtgcgtgtctgtaatccaagctactcagaaggctgatgcaggagaatcgyttgaacctggaaggcagaagttgcagtgagctgagatcctgccatcgcactccagcctgggtgacagagccatactccatctcaaaacaaacaaacaaac

SEQ ID NO: 13052 - DNA, 201 bp, Homo sapiens
tataaatatcaccttaagagatctggacaaatcagacatctcacagaatactaaatctcttcatttcattggcaatatcacatagattgggatggatgagyaagaggaggaaagtacgctgaattctttggcaaaacgtgtgcactacagaaggtgaagattaaccttacagagcttcaagagtggccactgcagtgaagt

SEQ ID NO: 13053 - DNA, 201 bp, Homo sapiens
ctcttccaaaagccatgtgagagattcttgtgtcttgtgaatccctggccccatttgagccctcaggtgattcagccctggaagacaactagactgcaacrttgtgagaggccctgagccagaagcattcagagaaacttctcctggattcctgaccatggataactgtgggagatgataaatatttgttgatttgagctg

SEQ ID NO: 13054 - DNA, 201 bp, Homo sapiens
ctagtgggtgctcaggccagtatggactttatgtggtcactgctcagctgggtcatctttgctccttcattctccttggcccttcagtagaaccttgtccyaccaccacctgtgatcacagggacttggatgtcacctacggtggtccctgcatacaaatctcattgtggtatcaagagactaattttcagacctgtccag

SEQ ID NO: 13055 - DNA, 201 bp, Homo sapiens
gccccgaaggcggtgtatggattggggaggccccgccttggggattcgccacctccgcagtttctcttcttctcacaacctgcgacgggtcctttttcctkgatactcaggaagcgggcacagttctcattcccactaggtgtcgggtttctagagaagccaatcggtgccgccgcggtcccggttctaaagtccccacgc

SEQ ID NO: 13056 - DNA, 201 bp, Homo sapiens
tctcaggccccgaaggcggtgtatggattggggaggccccgccttggggattcgccacctccgcagtttctcttcttctcacaacctgcgacgggtccttyttcctggatactcaggaagcgggcacagttctcattcccactaggtgtcgggtttctagagaagccaatcggtgccgccgcggtcccggttctaaagtcc

SEQ ID NO: 13057 - DNA, 201 bp, Homo sapiens
caagtagggcccacacagaaaaggaccctgcagcagatccaggccatggtgcgagcagccaccatctctcagaccccctggtgctggtgatgccattggtrgggaaagatgcaggatggagctgaaccaagcaccagtgggaaagtcacagtgaaaggcctgggattctggagtaaggtcatgtcattcacagcagagaca

SEQ ID NO: 13058 - DNA, 201 bp, Homo sapiens
ctgatgagcctcttccagttctgacaacaccactttccacatctaggtatgttgctttggcccacactctaggtgacataggaggaggccagcttcaagtrgggcccacacagaaaaggaccctgcagcagatccaggccatggtgcgagcagccaccatctctcagaccccctggtgctggtgatgccattggtagggaa

SEQ ID NO: 13059 - DNA, 201 bp, Homo sapiens
ggagcccatgggggagctcagccaccccaaaattcctcctttagtcacatcacctgtgggctctgaccagattttgtttttgttccaccccaaacaggaasagtacccagggctctgatgtgtctctcacggcttgtaaaagtgacaccttagagggcctgaagtgaaagaggagttgggcagaggggacacaactaagct

SEQ ID NO: 13060 - DNA, 201 bp, Homo sapiens
aaattcctcctttagtcacatcacctgtgggctctgaccagattttgtttttgttccaccccaaacaggaacagtacccagggctctgatgtgtctctcahggcttgtaaaagtgacaccttagagggcctgaagtgaaagaggagttgggcagaggggacacaactaagctctggagattctttgatttggaatttttca

SEQ ID NO: 13061 - DNA, 201 bp, Homo sapiens
gaccatgttaacggaaaaagcaagcaaatgcataacaaaatcagcaagaaacaatttataaaaagtctaaaagtaaagccaggcaagggggcctatacccrtaatcctagcatcttgggaggccaaggtgggcagattgcttgaccccaggcgttccagacaagtctgggaaacatgataaatccctttctctacaaaaaa

SEQ ID NO: 13062 - DNA, 201 bp, Homo sapiens
gaacagtacccagggctctgatgtgtctctcacggcttgtaaaagtgacaccttagagggcctgaagtgaaagaggagttgggcagaggggacacaactargctctggagattctttgatttggaatttttcaaggtgtggtgggctgttcagtgtcacaacttactgtgactgacctggattagtttatgactatgtttt

SEQ ID NO: 13063 - DNA, 201 bp, Homo sapiens
ctgacctctatagtatagtcttaagactatactaaacatactggatatccaataggatattaaatcagctcatatcattgacaacttcctgttgacctggstggatgagcagcaggtagaaagtgcactgtagtgcttggcaaaacacgggcactccagaaggtgaagataaaccttacaaagcttccagagtggccactc

SEQ ID NO: 13064 - DNA, 201 bp, Homo sapiens
tggttagggagtgctatggcacatgcagtgatagaatgccctgcataataaggacagggttggaagaaacctacaaagacagtggctttggctagttactkctcagctgcatcgatgctgtgtaaaaagataatgagaatctgcggattgttgacagctatgactggctacatttgacaccctcggcagtgtctcatggac

SEQ ID NO: 13065 - DNA, 201 bp, Homo sapiens
attttgaattctatggtaaataatttccatccctcccttccctctcccttgaattgtcacactcacctggcaaaactacacagctggtgggttccacctckgcctatgctgagcctgcccccatgagctgcaggaggctggagagcagcacacagtacgctgactggtctcttaaaatttaggattccaaaccacatagga

SEQ ID NO: 13066 - DNA, 201 bp, Homo sapiens
gtacatagttctttcatacataatgctattgtatacttaataggctacagtagagtgtgaatataacttttatatgtactggaaaaacaaaaatttgtgtracttgtttgttgccatggtctgaaaccaaatctgcagtatctctgaggtacgtctgtagtttccctttccctcttttgaacttgtttcttgtccttgtct

SEQ ID NO: 13067 - DNA, 201 bp, Homo sapiens
tcaactaagtgcagccattagggacataagtcaaatgtttaaagagtcctgagacaatcacaatgcattatgggctgcaacaaaatgcagcaaaaaaaaamaaaaccctaaggaacatacttgaagtcttaaactaccaataggtgacatccgggaagatcgtaagtccttggtactcagctaatgagcaactgggggagg

SEQ ID NO: 13068 - DNA, 201 bp, Homo sapiens
cactggttggatgagacaattggctcagatgggttcattgagcactcacccactgggcaagtgtctgtcggggccagctctgggccagatgtgcccaaggmtctatagctagttggtggaaaggcctggagggttcatattcaagtccacctgacttgaaaactcatattgaccttacttaagtactgattccccctttat

SEQ ID NO: 13069 - DNA, 201 bp, Homo sapiens
gacaccacattccacatttaggtgtgttgctttggcccacactctaggtgacataggaggaggccaccttcatgtggggcccacacaggaaaggaccctgyagcagatccaggccatggtacaagcagccagcatccctcagaccccttggggctggtggtgccagtggtggggaaagatgcaggatggagctgaaccaag

SEQ ID NO: 13070 - DNA, 201 bp, Homo sapiens
agaaagaagagaagaggctcaagcaaaaaggatgaaagaaatagcaacaacggcggggcatggtggctcacacctgtaatcccagcactttgggaggccgragagggtggatcacctgaggtcaggagttcaagaccagactgcccaacatggggaaactccgtttctactaaaaatacaaaaaattagctgggcgtagta

SEQ ID NO: 13071 - DNA, 201 bp, Homo sapiens
cctcagccttctgagtagctaggacgagaagcctgtgccgccacacctggctataatgtctcattttctcatttgctgtggtgtgaacaaggaaacaataycataccatgtatttgacttgcagcaggtacacaacaaatgtcaggtgaatgaagaaataaaaccacttagtaatccaagccatatccacatttacatttt

SEQ ID NO: 13072 - DNA, 201 bp, Homo sapiens
tcagggaaaaatgcaaagtaaaaccacagtgagaaaccactaagcaaccattagaatggctaaaattaaaatgattaataactataaatgctagcaaggawgtggaacaatctgtactctcctccattgcctataggaatataaaacatccattttgaaaatcaatttcatatcatctaataaagttaaacaagctagtcc

SEQ ID NO: 13073 - DNA, 201 bp, Homo sapiens
caacagcattcatcaacaggtgaaaatggtccacctgggttgagcttgaatcccatgttgacacccacagaaaacacccaagtgtgatgtggcactgaacwaccaaacagacaaatggcagttagccagccttcaccatgggtcagcccaggcctggtaggatgggtgcatgaatggagcaaccacagtggcaggcatgag

SEQ ID NO: 13074 - DNA, 201 bp, Homo sapiens
ctgcccagcctagcgggctctcccttaatcaactgtagcgaaaactgtctccttctcacgttcctggaaggtgctttttgacacaagaaagaggatgtgaytgctagggtcatcatgtcattgtttattgtgttgccagtaaagtgaaatcaaaatacacaataaataataaaataacccatgataagccaatgtttataa

SEQ ID NO: 13075 - DNA, 201 bp, Homo sapiens
accaaacaacaatgtggttccaagtggctgtgtgacccacaaagtcataaattgcacaggcccaacagcattcatcaacaggtgaaaatggtccacctggrttgagcttgaatcccatgttgacacccacagaaaacacccaagtgtgatgtggcactgaacaaccaaacagacaaatggcagttagccagccttcaccat

SEQ ID NO: 13076 - DNA, 201 bp, Homo sapiens
gtatccaggatccactcagccaagagtcctttcctcagtattctaaagacactctaatcactcaagagattctaaggtttttaggagaaaccagggacaaractaaatgtttttgtgataactcatattacccccttttctttgaccacatatttttcatacgaaaaggattataacagtaaagaagcattggcatattat

SEQ ID NO: 13077 - DNA, 201 bp, Homo sapiens
ttctagaagtgacattaggtttggctgctgtgctggcctagactgcatgcagcaatagtattctaccatgtcttctcttaatctactcttgatcatagacrgtaggttacataggttaggaactagtgcaggctatctgaccaccagtctacgtagctctacttacagttaatcccgactttgccagatgaaatgaaggca

SEQ ID NO: 13078 - DNA, 201 bp, Homo sapiens
aatatatacatagaaaacaaaagaatggaagtcagcatcactgcagaagatagctccagggatgaccattcacactgcagtccaggaagtttcaataataygatagcagtggttctttggaggggaagcctgggtgatatttctttcttctctgcatttttttttctttaaaattcaaccaggtgttgatgtgtgcatttt

SEQ ID NO: 13079 - DNA, 201 bp, Homo sapiens
cacaaggaaaccccagtttcccaccatttcctatgcactccttatcacagggtcccctctggccactttggcctcatcccattactctcagcctagctcaytcttctccactcacaccagtttcttgtctactccaccctgtctccaccacctgcccctgctgtgactcccacatgcatgtgctgcccagtgatccacatg

SEQ ID NO: 13080 - DNA, 201 bp, Homo sapiens
ggccactttggcctcatcccattactctcagcctagctcattcttctccactcacaccagtttcttgtctactccaccctgtctccaccacctgcccctgytgtgactcccacatgcatgtgctgcccagtgatccacatggctcactcctcacaccattaaggtccctgcttaaatgtcccatggtcaagtgttcagaaa

SEQ ID NO: 13081 - DNA, 201 bp, Homo sapiens
tccaccctgtctccaccacctgcccctgctgtgactcccacatgcatgtgctgcccagtgatccacatggctcactcctcacaccattaaggtccctgctyaaatgtcccatggtcaagtgttcagaaatgtcttgtccagtgacctcttctgaaatctatcccctgccattcccaccaccgccaccaatcttctaaccca

SEQ ID NO: 13082 - DNA, 201 bp, Homo sapiens
ccagtgacctcttctgaaatctatcccctgccattcccaccaccgccaccaatcttctaacccaagcatatttttcttaatggcaattatcagtgatactrtgacaggttttatttgtttattgtctgttgatttattaaggttaccaagaaagaaagaaccaatagcataggtacatagatgatagatagataatagata

SEQ ID NO: 13083 - DNA, 201 bp, Homo sapiens
cttgtgtaaagaaatgtgactcaacagtccaaattggtgtaatctccatttttctggttcttgtatagcctttgaagcattgacatctacccctggttgawcatagcccaatccagagtcagtgacttccctgtcaagatccattggcagctcctttggggttgctggcattagtctggcttgccagctatgaatgatcaa

SEQ ID NO: 13084 - DNA, 201 bp, Homo sapiens
ttgaccaaaagtcaaaacagacagtatgagaaatgagataaattaccaaaattgtgaacacaagagagagtatcactaatgaccctttagaagttaaaaawcattataagttaatactctgaaaaacctgaagccaatcagttagaccacttagataaaatggacagatttatacaaagatagaaattgctgaaactgact

SEQ ID NO: 13085 - DNA, 201 bp, Homo sapiens
gttaatactctgaaaaacctgaagccaatcagttagaccacttagataaaatggacagatttatacaaagatagaaattgctgaaactgactcaaaaataratagaaaatctgaagagaactgtacactaagacagtaattttaaaaccttctcacaaagaaatgccaaagcccagatatcttcactggtgaattctatca

SEQ ID NO: 13086 - DNA, 201 bp, Homo sapiens
ttgctccatctgtgagggcacacccttgtatagaagtaattgccttgctgagaagaaaaaaagaaaattttatatttgagtgctatttctttgtggcatcragactttatttacaataatacatttccttaatattttaagataacctctttctggaatgcctctttccatttactcacttctcttcttctaggaatttaa

SEQ ID NO: 13087 - DNA, 201 bp, Homo sapiens
ttctgtcatgactgtaagtttcctggggcaggctcctcagccatgcagaactgtgagtcaattaaacctctttcctttataaattacccagtctcaggtayttcttcatagcagtgtgagaatggactaatataacttctaacttatagaataatgctgacataatggtttgtaactctgggtgtagaacctaaaactcac

SEQ ID NO: 13088 - DNA, 201 bp, Homo sapiens
ctctattcacagataacatgaccttgtctgtagaattcacaagcagataaaagcctgctagcactaaaaaatgaatccagaagctcccataggatataaamtcaaattaaaaattattaacatatttctctatacaagcaattaaaatctaaactttcctatcacagtagttacaaaaagagagaaataggaataaattta

SEQ ID NO: 13089 - DNA, 201 bp, Homo sapiens
gactgtaagtttcctggggcaggctcctcagccatgcagaactgtgagtcaattaaacctctttcctttataaattacccagtctcaggtatttcttcatrgcagtgtgagaatggactaatataacttctaacttatagaataatgctgacataatggtttgtaactctgggtgtagaacctaaaactcactgcggcttc

SEQ ID NO: 13090 - DNA, 201 bp, Homo sapiens
ttacaaaaagagagaaataggaataaatttaggaagacagcagagtttgttgaaaactacaaaacattactgagagaaattaaaggtctaaattcatggakagatgcggttggaaagctcaataatattgttaagatgacaattctccaccaagagatctataggttctgtacaatctctatcaaaaccccagcaggcatt

SEQ ID NO: 13091 - DNA, 201 bp, Homo sapiens
gtaaataaataacacattttcacaagagaggatgtattattacacattaaattgcatttgctttaaatgtatcatcgtcatcattattatttttgagacayggtctcgctctgtcacccaggctggagtgcagtggcatgatcaccatgcactgcagtgtcgacctcctgggttcaagggacccactgatctcagcctcct

SEQ ID NO: 13092 - DNA, 201 bp, Homo sapiens
taaataaataacacattttcacaagagaggatgtattattacacattaaattgcatttgctttaaatgtatcatcgtcatcattattatttttgagacatdgtctcgctctgtcacccaggctggagtgcagtggcatgatcaccatgcactgcagtgtcgacctcctgggttcaagggacccactgatctcagcctcctg

SEQ ID NO: 13093 - DNA, 201 bp, Homo sapiens
ggaaacagcttcctgcaggcctgcctggatgtgagccacaccaatggagtctccacaacagcaggaagagcaactgagaaccctggaagcttcacacttgyaatgttccatgtccagcggcattcagttgatggatgggccaagataagaatacagctccttccttcaattgggggtggcagaggggtgaatcagtcagct

SEQ ID NO: 13094 - DNA, 201 bp, Homo sapiens
taattttttgtatagatgggggttttgcccaggctgatcttgaacttctggagtcaacaaatctgccttcctctgccttccacagtgctaggatggcaggygtgagccaccatacctggcgtaaattaattataagatattaaacatgtaacttagttttaaaaggtaaggagaatttccatggctgaagaggatgtattt

SEQ ID NO: 13095 - DNA, 201 bp, Homo sapiens
ccttctgtccagcacttggggtcacacttgcatcgtggtctgccgccttttccagggatttctggctcacttcccatattcccttacgggtgtgtcccctyataagatgtcgcagactttaagctcatcttggcatctgctccttgaaggacttggactaaaaattatttccatctgcatatcaataactcttattccaac

SEQ ID NO: 13096 - DNA, 201 bp, Homo sapiens
catgcaaaaatactttaaatatgtgctatcagaagtagctactaaaacattaattccactgaaatgagggaggctgtaaaaaagaaaaacattgcataccygtattcacagcaacattactcaccatagccaagacaaggaagcaaacaaagcacccatcaacacatgaatagatgaagaacatgtggtctatgtaggcaa

SEQ ID NO: 13097 - DNA, 201 bp, Homo sapiens
ctgggagacacgggactcctctgatggccaactgtagctggaaggctcctccacggccttgctcaactctccttagattgcctgtgctctaggatgcgtcdaacaaactttctctccttctgtccagcacttggggtcacacttgcatcgtggtctgccgccttttccagggatttctggctcacttcccatattccctta

SEQ ID NO: 13098 - DNA, 201 bp, Homo sapiens
tccaataggatattaaatcagctcatatcattgacaacttcctgttgacctggctggatgagcagcaggtagaaagtgcactgtagtgcttggcaaaacamgggcactccagaaggtgaagataaaccttacaaagcttccagagtggccactcggccaggtgcagtggctcacgcctgtaatcccagcactttggaaggc

SEQ ID NO: 13099 - DNA, 201 bp, Homo sapiens
agcagagtttgttgaaaactacaaaacattactgagagaaattaaaggtctaaattcatggagagatgcggttggaaagctcaataatattgttaagatgrcaattctccaccaagagatctataggttctgtacaatctctatcaaaaccccagcaggcattttatggaaaattgacaatttaatcctaaaaatgtatgt

SEQ ID NO: 13100 - DNA, 201 bp, Homo sapiens
actgagagaaattaaaggtctaaattcatggagagatgcggttggaaagctcaataatattgttaagatgacaattctccaccaagagatctataggttcwgtacaatctctatcaaaaccccagcaggcattttatggaaaattgacaatttaatcctaaaaatgtatgtgaaaatgcagaggatgcagaaaagccaacg

SEQ ID NO: 13101 - DNA, 201 bp, Homo sapiens
aattgatcttcaatgaagttgcataggtaatatgatgtgacacttatcgccatataaaatataagctcaaacaaattagagacctaaacagctaaaatttrtaagttaaaaccataaaatttctaaaagaaaatataggagaaaatttttgtgacattgagtagttaggcaaaagattcttacataaaatacaaaaaacat

SEQ ID NO: 13102 - DNA, 201 bp, Homo sapiens
gccttcatttcctacttgtgcagatattgaaagttagcaagaggtgtgaacacagggcattctcaggtgctttgtgagtctgtgcgacatactggtcatgvaggaggctatacagattcccagggatatggaagcttttcaaaacccatattcccatctcactcacccagtttctcctccaggcttttctgtatgtctatt

SEQ ID NO: 13103 - DNA, 201 bp, Homo sapiens
agcagtcaattcaaagttgtttgtccagtaagtatgttcaatggcctttctcaggaacagtttctgtcaattcctcttttttcttgagaatgggtcttacygtctagtttaattgcatacctcatttttattttgaatactaacatgtggtgactttgaaaatcatgttttctaaactatttttgtatagactgtattctt

SEQ ID NO: 13104 - DNA, 201 bp, Homo sapiens
aatagtaaatttactctagtaaaatatagtaaaaaatagtaaaattactctagtaaatttttcatttcagttattgcacttttcagctccaaaatttctayttggtttctttttaaactttctatctttttattgatgttctctatttgagttaagatagttcttctgatttcctttagttttttgcccatagtttccttt

SEQ ID NO: 13105 - DNA, 201 bp, Homo sapiens
acaagagaggaattacaaatatatatatgtgtgtgtgtatatatatatgtcttgtagggttgagacaatctcagtcagctttttttaacctgtgaatgtcdtgatttctccatcatttctgaaggagagttttgcagacatacaattcttggttgatagtccttttactttctcagctttaaatttgtcatcccaacgcct

SEQ ID NO: 13106 - DNA, 201 bp, Homo sapiens
gactgggttcttcctgagcatagagactcacagtgtgagagggactcagcatgaggggtttcctccagcatgggctttgaaaatgaaagggctgtgggccrggtgcggtgcctcacgcctgtaatcccagcactttgggaggctgaggcgggcggatcatgaggtcaggagatcgagaccatcctggctaacatggtgaaa

SEQ ID NO: 13107 - DNA, 201 bp, Homo sapiens
gctttgaaaatgaaagggctgtgggccgggtgcggtgcctcacgcctgtaatcccagcactttgggaggctgaggcgggcggatcatgaggtcaggagatygagaccatcctggctaacatggtgaaaccctgtctctactaagaatacaaaaaaaaaaaaaaaaattagccaagcgtagtggcgggtgcctgtagtccca

SEQ ID NO: 13108 - DNA, 201 bp, Homo sapiens
cgggcggatcatgaggtcaggagatcgagaccatcctggctaacatggtgaaaccctgtctctactaagaatacaaaaaaaaaaaaaaaaattagccaagygtagtggcgggtgcctgtagtcccagctgcttgggaggctgagacaggagaatggcgtgaacctgggagccatagctggcagtgagccgagatccggcca

SEQ ID NO: 13109 - DNA, 201 bp, Homo sapiens
tcatgaggtcaggagatcgagaccatcctggctaacatggtgaaaccctgtctctactaagaatacaaaaaaaaaaaaaaaaattagccaagcgtagtggygggtgcctgtagtcccagctgcttgggaggctgagacaggagaatggcgtgaacctgggagccatagctggcagtgagccgagatccggccactgcaccc

SEQ ID NO: 13110 - DNA, 201 bp, Homo sapiens
ctggctccatgtccttccaggactgggctgggtcacacgcacagtccttctcttcctcagtccccagtcccacctcacctgtagagacacctgcacacaarggcaggccctaaacactgtggttctgccctccacctgcagctcagtgctcctccacttccagccctgagcaggcagctcctaactgggaagcccattaag

SEQ ID NO: 13111 - DNA, 201 bp, Homo sapiens
cactgtggttctgccctccacctgcagctcagtgctcctccacttccagccctgagcaggcagctcctaactgggaagcccattaagaatcccatcagcayggcaggcccagcatggaaacatgtagctgctatggggtctgcagctgacctgaccctgggaacccccttgctcaaggaggccctgcctaccctgaccccc

SEQ ID NO: 13112 - DNA, 201 bp, Homo sapiens
ctaagaatacaaaaaaaaaaaaaaaaattagccaagcgtagtggcgggtgcctgtagtcccagctgcttgggaggctgagacaggagaatggcgtgaaccygggagccatagctggcagtgagccgagatccggccactgcacccaagcctgggctacagagcaagactccatctccaaaaaataaataaataaaataaaa

SEQ ID NO: 13113 - DNA, 201 bp, Homo sapiens; identical to SEQ ID NO: 2365

SEQ ID NO: 13114 - DNA, 201 bp, Homo sapiens
gctgctatggggtctgcagctgacctgaccctgggaacccccttgctcaaggaggccctgcctaccctgacccccaggcccatgacctgcacttgggccawgcttgctccagcctggtccactcatccctggaagcacagcttctccccagggctgctgcttggggaggctgaaaggcctttctctcctgttcctagcagg

SEQ ID NO: 13115 - DNA, 201 bp, Homo sapiens
tttggagagttcagaagacaagaaaatgggggaaaatttgcaacttcctagagatttgttaagctgttgtgaccaaaatgctgatagtgatatggacaatdgagtccaggctgataaggtctcacatggagatgaggaacttattgggacctagaggaaaggtcacttttgttatgcattggcaaagaacttggaggcatt

SEQ ID NO: 13116 - DNA, 201 bp, Homo sapiens
gcaacttcctagagatttgttaagctgttgtgaccaaaatgctgatagtgatatggacaatagagtccaggctgataaggtctcacatggagatgaggaayttattgggacctagaggaaaggtcacttttgttatgcattggcaaagaacttggaggcattgttccccctccctagggatctgtagaactttgaacttga

SEQ ID NO: 13117 - DNA, 201 bp, Homo sapiens
gagtcaatgaattgttgccctattagtttccaaaagagctagttgttaaaagagtctcgcaccttcctactccctctgttcctctcttaccacgtgacttytgcacataccagctcccctttgccttctgccatgagtggaagcagcctgaggccctcgctaaatgctcaaacatttccagacatcagaatcctgagccaa

SEQ ID NO: 13118 - DNA, 201 bp, Homo sapiens
cgagtctccgggtctgggatccaccccgaggccgcgggacccgcccagaccctctacctgggagaaccccaaggcgcctttaccaaaatccccgcgggtgkgtccgggcgagggcgaggctcggtgggcggggctgaccgagggggtggggccaggttctcacaccctccagtggatgattggctgcgacctggggtccga

SEQ ID NO: 13119 - DNA, 201 bp, Homo sapiens
tgtctttccgtaggtgagtgagatctgctggttgaaatcataactgagtcacacaagtgccctttctcaaggctaccatcctgcttctctgtgcagtaagkgtcttatgcatatttcccattttctcacaaagaatattaaagacgtatactcaaggatcaaactttaatccacataaattttttactgctccatcaaaga

SEQ ID NO: 13120 - DNA, 201 bp, Homo sapiens
ctttccgtaggtgagtgagatctgctggttgaaatcataactgagtcacacaagtgccctttctcaaggctaccatcctgcttctctgtgcagtaagggtyttatgcatatttcccattttctcacaaagaatattaaagacgtatactcaaggatcaaactttaatccacataaattttttactgctccatcaaagacac

SEQ ID NO: 13121 - DNA, 201 bp, Homo sapiens
aggctaccatcctgcttctctgtgcagtaagggtcttatgcatatttcccattttctcacaaagaatattaaagacgtatactcaaggatcaaactttaayccacataaattttttactgctccatcaaagacactcttaaatgggactgcagtttggagccactgcctggttctgctgaggtgctgggtgtgctaccgac

SEQ ID NO: 13122 - DNA, 201 bp, Homo sapiens
cgatggacattttcttttaaatcaaataggaaaaacaagagaggaattacaaatatatatatgtgtgtgtgtatatatatatgtcttgtagggttgagachatctcagtcagctttttttaacctgtgaatgtcgtgatttctccatcatttctgaaggagagttttgcagacatacaattcttggttgatagtcctttta

SEQ ID NO: 13123 - DNA, 201 bp, Homo sapiens
tattcctattcagcactgtcttgctctctattttccctcattcttccaacttataactgtataaattttcaaatgtgcaaagaagctgaaagaacggtgcrgtaaaattcaagttaccactctgccgtatttggttaatatctctttatatacataaaaggagagtgtgaaatgatggaccatggagacccagaagggtaa

SEQ ID NO: 13124 - DNA, 201 bp, Homo sapiens
atgaatatttcacaaaaatgggctcataagttacgtagcctcctgtgactggcttccttcacttgtcttgttttcaagattcagcaatgttttagcatatrccagtgctttattcattttatgaccaaataatattctattgtaggaaaaaactatatgttgtttctccattcattggtcgatggacattttcttttaaat

SEQ ID NO: 13125 - DNA, 201 bp, Homo sapiens
ccatttccacctgccagcagaccctgtcgccacaaatccacttctttctctatcgacttgcctcttatgaatatttcacaaaaatgggctcataagttacktagcctcctgtgactggcttccttcacttgtcttgttttcaagattcagcaatgttttagcatatgccagtgctttattcattttatgaccaaataatat

SEQ ID NO: 13126 - DNA, 201 bp, Homo sapiens
tttgaagttattattcctccaaatagccattcttctttttctctctcctttctttgaggattcccaaaatgcatatgcttggtgttgtctcacagttttcwtaagttctgttcatttttcttcataatttttttttatttctgcacctcaaactggataatttcaattgtcttacctttaagcttgccgattcttcattct

SEQ ID NO: 13127 - DNA, 201 bp, Homo sapiens
gcttgtctccagtgctggatgctctgaaggccctgactttaccacaaccaatatagcaatgtagcaaaattgcacttgtgcctcatgaatatatatgaatytaagaaataaaaaataaaataacataacatgtctctttatagatacaggtagacatgtttgtatagcatgtgtgtgaatgtgtgtgtgtgcctgtgtgtg

SEQ ID NO: 13128 - DNA, 201 bp, Homo sapiens
tgactttaccacaaccaatatagcaatgtagcaaaattgcacttgtgcctcatgaatatatatgaatttaagaaataaaaaataaaataacataacatgtytctttatagatacaggtagacatgtttgtatagcatgtgtgtgaatgtgtgtgtgtgcctgtgtgtgtgtccgcctgtgtgtgtgtgtccgtgtagagag

SEQ ID NO: 13129 - DNA, 201 bp, Homo sapiens
ctgcttgggaggctgagacaggagaatggcgtgaacctgggagccatagctggcagtgagccgagatccggccactgcacccaagcctgggctacagagcragactccatctccaaaaaataaataaataaaataaaaaatgaaggggctgtgtaggaaagaatgctggtgaggaccaggaatcgagcacagccctccctg

SEQ ID NO: 13130 - DNA, 201 bp, Homo sapiens
aataaaaaataaaataacataacatgtctctttatagatacaggtagacatgtttgtatagcatgtgtgtgaatgtgtgtgtgtgcctgtgtgtgtgtccdcctgtgtgtgtgtgtccgtgtagagaggcagcacaaattaagagattaagattttgtgactgagctattccaaagtaacttaaacataaaacacacatgg

SEQ ID NO: 13131 - DNA, 201 bp, Homo sapiens
ttggaataccttcctcagcctctttttcattgtggtaaaatacacataaacacaaaggataccaccgtaaccatttaaagtgcacaatgcagtgacaattygtatgttcacaatgttatgtaaccatcatcactctctagttccagagtgtttttatcacctcagggggaactctgcacccattaagcagtcaccctccat

SEQ ID NO: 13132 - DNA, 201 bp, Homo sapiens
tgagacaggagaatggcgtgaacctgggagccatagctggcagtgagccgagatccggccactgcacccaagcctgggctacagagcaagactccatctcmaaaaaataaataaataaaataaaaaatgaaggggctgtgtaggaaagaatgctggtgaggaccaggaatcgagcacagccctccctgttctctacattga

SEQ ID NO: 13133 - DNA, 201 bp, Homo sapiens
taacataacatgtctctttatagatacaggtagacatgtttgtatagcatgtgtgtgaatgtgtgtgtgtgcctgtgtgtgtgtccgcctgtgtgtgtgtktccgtgtagagaggcagcacaaattaagagattaagattttgtgactgagctattccaaagtaacttaaacataaaacacacatggataaatgtgtctgt

SEQ ID NO: 13134 - DNA, 201 bp, Homo sapiens
acctgggagccatagctggcagtgagccgagatccggccactgcacccaagcctgggctacagagcaagactccatctccaaaaaataaataaataaaatwaaaaatgaaggggctgtgtaggaaagaatgctggtgaggaccaggaatcgagcacagccctccctgttctctacattgacagccagcaaggaacagggac

SEQ ID NO: 13135 - DNA, 201 bp, Homo sapiens
gatccggccactgcacccaagcctgggctacagagcaagactccatctccaaaaaataaataaataaaataaaaaatgaaggggctgtgtaggaaagaatrctggtgaggaccaggaatcgagcacagccctccctgttctctacattgacagccagcaaggaacagggacctcagtcttacaactgccagaaactgcatt

SEQ ID NO: 13136 - DNA, 201 bp, Homo sapiens
gcctgggctacagagcaagactccatctccaaaaaataaataaataaaataaaaaatgaaggggctgtgtaggaaagaatgctggtgaggaccaggaatcragcacagccctccctgttctctacattgacagccagcaaggaacagggacctcagtcttacaactgccagaaactgcattctgccacctctgtataagcc

SEQ ID NO: 13137 - DNA, 201 bp, Homo sapiens
aaataaaataaaaaatgaaggggctgtgtaggaaagaatgctggtgaggaccaggaatcgagcacagccctccctgttctctacattgacagccagcaagraacagggacctcagtcttacaactgccagaaactgcattctgccacctctgtataagcctgaaggaggattcaaaatgaaaacacagcttttggaagccc

SEQ ID NO: 13138 - DNA, 201 bp, Homo sapiens
cctccctgttctctacattgacagccagcaaggaacagggacctcagtcttacaactgccagaaactgcattctgccacctctgtataagcctgaaggagbattcaaaatgaaaacacagcttttggaagcccagaagagagattccatccacaattttgcccagatttctgatcaaggaactataagcagataaatgggt

SEQ ID NO: 13139 - DNA, 201 bp, Homo sapiens
acagcttttggaagcccagaagagagattccatccacaattttgcccagatttctgatcaaggaactataagcagataaatgggtgttgtttcgccaggcrtggtagtgcacgaatgaattgatgaattgatatgcacactagttacataaaataaaaattttctgaactttttccgtgttttgcactttataattatctg

SEQ ID NO: 13140 - DNA, 201 bp, Homo sapiens
ccactcatgggtatttatataaaggaaaagaaatcaatatatcaaaagactacctgcacccccaggtttattgaagcactattcacagtagcgaagttatbaaatcaatgggtgaattcatcaatgggtgaatgaataaatggtggtatatatatacacaatggaatgcaattcagccataaaaaagaatgaaatcctgtc

SEQ ID NO: 13141 - DNA, 201 bp, Homo sapiens
tcccaaagggggcaccctggcaaggagacatttaaatgagagtccatggaaatacacattatggctgcccccagggatgtttgaatagtatgtgtccagayacaagcaggtgagaagaggaggaggcagggctgctatcacacaaggagggcaggagatgtgtgtgtggaaataagagatccacttggagaccttatggtt

SEQ ID NO: 13142 - DNA, 201 bp, Homo sapiens
accactaagcaaccattagaatggctaaaattaaaatgattaataactataaatgctagcaaggatgtggaacaatctgtactctcctccattgcctatargaatataaaacatccattttgaaaatcaatttcatatcatctaataaagttaaacaagctagtcctctacagctaccatttccactcctaggtatatact

SEQ ID NO: 13143 - DNA, 201 bp, Homo sapiens
acatgctcaactgacttttacaaaagcacaaaagcaattcaatgaaggaaggagagctttcccatcaaatggtgatggaacaactggacaaccacagtggaaaaaaaataacctgagccaaaacctcatgcttcatacaaaaataactcaaaatgagtcacaagctttcatgtaaagcacagagttaaaatggcaaacatt

SEQ ID NO: 13144 - DNA, 201 bp, Homo sapiens; identical to SEQ ID NO: 2375

SEQ ID NO: 13145 - DNA, 201 bp, Homo sapiens
tggctgcaaatgtccccccatcccttcccagccctttcggtgttgctgtgaatctgtccctcactgagaactggtggggagatgtgggggaggaggggagvtttctttatgctgtgtcaaagcatggagacagacctctccttctctcctgaacctcacactatcccttcccagacacttgaaataaaacgcagaccagaa

SEQ ID NO: 13146 - DNA, 201 bp, Homo sapiens
gaattaggaaacagcttcctgcaggcctgcctggatgtgagccacaccaatggagtctccacaacagcaggaagagcaactgagaaccctggaagcttcayacttgtaatgttccatgtccagcggcattcagttgatggatgggccaagataagaatacagctccttccttcaattgggggtggcagaggggtgaatcag

SEQ ID NO: 13147 - DNA, 201 bp, Homo sapiens
atttctttcttctctgcatttttttttctttaaaattcaaccaggtgttgatgtgtgcattttaaattcttctgtaatcaaatacattttcatatttctartgtagaaacatgtatttttaacattcaaaataaaacatttgaagtaaaataacaatgaaaagtggctgaacactgtggtgggcacctgtagtcccagcta

SEQ ID NO: 13148 - DNA, 201 bp, Homo sapiens
gtgtgtcatcactgaagtctctattctgtaagcttagtggtcaactcatgatttgatagatatttcctgaaacatcttcagccaaaaagaaataagaaaaraaaattcaatctttttatctgggctctctgtgtgttttggggcatgccctcaacactctgctgggcagtttacaatactgctttggccttcatttcctac

SEQ ID NO: 13149 - DNA, 201 bp, Homo sapiens
cactggctgcaaatgtccccccatcccttcccagccctttcggtgttgctgtgaatctgtccctcactgagaactggtggggagatgtgggggaggagggdaggtttctttatgctgtgtcaaagcatggagacagacctctccttctctcctgaacctcacactatcccttcccagacacttgaaataaaacgcagacca

SEQ ID NO: 13150 - DNA, 201 bp, Homo sapiens
acctttgatgatttttcagggttccaatgcagttgattctttatcaacccaatcagaatatctggtggtaggtccaggaattcttgctttaacagctctcygagggaatttttttttttttttttttgatggagttttgctcttgttgcccagggtggagtgcaatggcatgatcccggctaactgcaacctctgcctccc

SEQ ID NO: 13151 - DNA, 201 bp, Homo sapiens
tggttctttggaggggaagcctgggtgatatttctttcttctctgcatttttttttctttaaaattcaaccaggtgttgatgtgtgcattttaaattcttstgtaatcaaatacattttcatatttctaatgtagaaacatgtatttttaacattcaaaataaaacatttgaagtaaaataacaatgaaaagtggctgaac

SEQ ID NO: 13152 - DNA, 201 bp, Homo sapiens
ctctatgttgcctaggctggtcacaaactcaggggctcaagcaatctgccagcctgagcctcccaaagtgctggaagtacaggcatgagccaccatgtccrtcctgagtgttctatgaatttttaaaatcacaaccatagaagaatcttcatgtacaaacatgcttgtcaaaatattctttaccaaaagacaagatgaaag

SEQ ID NO: 13153 - DNA, 201 bp, Homo sapiens
aaggaactataagcagataaatgggtgttgtttcgccaggcatggtagtgcacgaatgaattgatgaattgatatgcacactagttacataaaataaaaaytttctgaactttttccgtgttttgcactttataattatctgtaatgcaatttaatacactcatatttcattcattcagtcgacaaaaattaatttagtcc

SEQ ID NO: 13154 - DNA, 201 bp, Homo sapiens
ttcgccaggcatggtagtgcacgaatgaattgatgaattgatatgcacactagttacataaaataaaaattttctgaactttttccgtgttttgcactttvtaattatctgtaatgcaatttaatacactcatatttcattcattcagtcgacaaaaattaatttagtccctacgataaaccagatatcccctcatatgct

SEQ ID NO: 13155 - DNA, 201 bp, Homo sapiens
ccagatatcccctcatatgctcacgtgcctgacactccagaagtttctcaagaccgaggtggagacactggagtgttttaagtggagagatgacacactcygactcccaggagcaggaccactgtgaaaagaacagtcacgtaacaggtcatgggacagtgctagtgtcacaactcacaagtgacagtgtggtggggacta

SEQ ID NO: 13156 - DNA, 201 bp, Homo sapiens
cagaagtttctcaagaccgaggtggagacactggagtgttttaagtggagagatgacacactccgactcccaggagcaggaccactgtgaaaagaacagtyacgtaacaggtcatgggacagtgctagtgtcacaactcacaagtgacagtgtggtggggactaaggggacaggagggcctgaaggatgaaaaggacggag

SEQ ID NO: 13157 - DNA, 201 bp, Homo sapiens
tgatgttttacaagcacattgtctctgtgcagaggtggcccttggagttcctatgccactatgttctctgatgtcactcctcagccacctttgaattgtgyttatgcatcagaattcctgatctgctaagtacttccaggaaactcattcaaatggtaaacatcattaagcacctaccttattctgggtactgtgctctat

SEQ ID NO: 13158 - DNA, 201 bp, Homo sapiens
tgttttaagtggagagatgacacactccgactcccaggagcaggaccactgtgaaaagaacagtcacgtaacaggtcatgggacagtgctagtgtcacaaytcacaagtgacagtgtggtggggactaaggggacaggagggcctgaaggatgaaaaggacggagagaagggctggagaagcaggaggtgaagaaaaggag

SEQ ID NO: 13159 - DNA, 201 bp, Homo sapiens
tatgccactatgttctctgatgtcactcctcagccacctttgaattgtgcttatgcatcagaattcctgatctgctaagtacttccaggaaactcattcawatggtaaacatcattaagcacctaccttattctgggtactgtgctctatggagttgagcctcagataaaagaatcaaacttccttggacttcatagaagt

SEQ ID NO: 13160 - DNA, 201 bp, Homo sapiens
gcaggaccactgtgaaaagaacagtcacgtaacaggtcatgggacagtgctagtgtcacaactcacaagtgacagtgtggtggggactaaggggacaggasggcctgaaggatgaaaaggacggagagaagggctggagaagcaggaggtgaagaaaaggagcagaggaaagaattcgaaagcagcagaattcttaggttt

SEQ ID NO: 13161 - DNA, 201 bp, Homo sapiens
aaagaacagtcacgtaacaggtcatgggacagtgctagtgtcacaactcacaagtgacagtgtggtggggactaaggggacaggagggcctgaaggatgaraaggacggagagaagggctggagaagcaggaggtgaagaaaaggagcagaggaaagaattcgaaagcagcagaattcttaggtttaaatacattgtttta

SEQ ID NO: 13162 - DNA, 201 bp, Homo sapiens
acgtaacaggtcatgggacagtgctagtgtcacaactcacaagtgacagtgtggtggggactaaggggacaggagggcctgaaggatgaaaaggacggagrgaagggctggagaagcaggaggtgaagaaaaggagcagaggaaagaattcgaaagcagcagaattcttaggtttaaatacattgttttatggattttaat

SEQ ID NO: 13163 - DNA, 201 bp, Homo sapiens
ttggcattcctgagccactggctcagaatttcagtacattatctgcccgcgggacacacctcagaggaaaggggatgaagcgtggtccatgaccatggcaycccctggtcttatcaccacctgcacctcccaggggctgccagccacacagagtcatggacaggtctctacagacacaacttagtgccagcttggatgaaa

SEQ ID NO: 13164 - DNA, 201 bp, Homo sapiens
aagaattcgaaagcagcagaattcttaggtttaaatacattgttttatggattttaatacatccatctacagagcctagcagggtgtccttggcagttggyctttaatacctcatgtgggtctgcctaaaaactaattttttaatgttaatcaggtttaaaaattactaagtgttcctataaaatatacacaacacttagc

SEQ ID NO: 13165 - DNA, 201 bp, Homo sapiens
acccaggacgtggagctcgtggagaccaggcctgcaggggatggaaccttccagaagtgggcagctgtggtggtgccttctggagaggagcagagatacaygtgccatgtgcagcatgaggggctgccggagcccctcatgctgagatggagtaaggagggagatggaggcatcatgtctgttagggaaagcaggagcctc

SEQ ID NO: 13166 - DNA, 201 bp, Homo sapiens
cccaggacgtggagctcgtggagaccaggcctgcaggggatggaaccttccagaagtgggcagctgtggtggtgccttctggagaggagcagagatacacrtgccatgtgcagcatgaggggctgccggagcccctcatgctgagatggagtaaggagggagatggaggcatcatgtctgttagggaaagcaggagcctct

SEQ ID NO: 13167 - DNA, 201 bp, Homo sapiens
actgtgctctatggagttgagcctcagataaaagaatcaaacttccttggacttcatagaagtcaaaggtgggggtgggaagataaataaagaaattatarcacagcatgttatgtattttacatgacttttttctttgaaagctacattattaatattttatgacagtactgagttacatataccaaagattacaaatta

SEQ ID NO: 13168 - DNA, 201 bp, Homo sapiens
cgaagccccaaatttgacttcctgttctattcaacatcctttacaacatcagtattgggggaaatcctattaagattatccagctgaaattatgttgatgbacaccaatacttaaagcaggaattttgagaaactaacatgtaattttcatgcctttttctggccaatgtcccagtgacctacgagaaaacctttcctgcc

SEQ ID NO: 13169 - DNA, 201 bp, Homo sapiens
aaatcctattaagattatccagctgaaattatgttgatggacaccaatacttaaagcaggaattttgagaaactaacatgtaattttcatgcctttttctvgccaatgtcccagtgacctacgagaaaacctttcctgcctacagggaaccagaactgacaatccctctataggagacaccgcaggtgagagcaggagcaa

SEQ ID NO: 13170 - DNA, 201 bp, Homo sapiens
ggcctgcaggggatggaaccttccagaagtgggcagctgtggtggtgccttctggagaggagcagagatacacgtgccatgtgcagcatgaggggctgccrgagcccctcatgctgagatggagtaaggagggagatggaggcatcatgtctgttagggaaagcaggagcctctctgaagacctttaacagggtcggtggt

SEQ ID NO: 13171 - DNA, 201 bp, Homo sapiens
tgttgatggacaccaatacttaaagcaggaattttgagaaactaacatgtaattttcatgcctttttctggccaatgtcccagtgacctacgagaaaaccwttcctgcctacagggaaccagaactgacaatccctctataggagacaccgcaggtgagagcaggagcaaccacagacctgcactgcccgtgctgtggttg

SEQ ID NO: 13172 - DNA, 201 bp, Homo sapiens
acttttgctgttctctgggtctcagagtccattctttgggtttggatgggtgcgtttgtttctcataatctagttgcctatatggggatctctgtgcttgygtgaagtgagtgagactctgcctgaaaggagaaacacgtaccaattgattcatgtggcccattctatctggatgtcctggctcctcgcagaagccataga

SEQ ID NO: 13173 - DNA, 201 bp, Homo sapiens
gcagcagaattcttaggtttaaatacattgttttatggattttaatacatccatctacagagcctagcagggtgtccttggcagttggcctttaatacctyatgtgggtctgcctaaaaactaattttttaatgttaatcaggtttaaaaattactaagtgttcctataaaatatacacaacacttagcagtggatacttc

SEQ ID NO: 13174 - DNA, 201 bp, Homo sapiens
tggcagttggcctttaatacctcatgtgggtctgcctaaaaactaattttttaatgttaatcaggtttaaaaattactaagtgttcctataaaatatacayaacacttagcagtggatacttcctaaaaacaggcagtgcatgagcactagtgaggggcattgtgactacattgaacagttgcaactttgaggtgaataaa

SEQ ID NO: 13175 - DNA, 201 bp, Homo sapiens
cctttaatacctcatgtgggtctgcctaaaaactaattttttaatgttaatcaggtttaaaaattactaagtgttcctataaaatatacacaacacttagmagtggatacttcctaaaaacaggcagtgcatgagcactagtgaggggcattgtgactacattgaacagttgcaactttgaggtgaataaagcctgtactg

SEQ ID NO: 13176 - DNA, 201 bp, Homo sapiens
acgggaagagtgaaagagaacaagtgatggatgtggtgacgtcgcgttctcccgggcggggccggaggcggtacagatgagggacacattcatggctaacrggaccgctcttctcgttctgcgttctgcttgcggccggtagtctctcctccccgcccatgggcggtggttggaggcaggggtgcggaatccggccgacct

SEQ ID NO: 13177 - DNA, 201 bp, Homo sapiens
ttaatacctcatgtgggtctgcctaaaaactaattttttaatgttaatcaggtttaaaaattactaagtgttcctataaaatatacacaacacttagcagyggatacttcctaaaaacaggcagtgcatgagcactagtgaggggcattgtgactacattgaacagttgcaactttgaggtgaataaagcctgtactgact

SEQ ID NO: 13178 - DNA, 201 bp, Homo sapiens
ggggttggggagatgagttctccgacgcagcaggcacccctgctcatctcctatggctgttgccttttgggcagcccctcttcgcggcggtggggctgtcscgccggcctgtcacgttgcccttccctgggcttgtgaggattggctccgcttggacctttgcggtgctcccggagccctccaggttgtccctccggtgcc

SEQ ID NO: 13179 - DNA, 201 bp, Homo sapiens
aaaatacaaaaagaaagagaacaagtaatcttaactattgattccaccatcgtgcagtgcaatagtcaatggctgcaactgaaaaatcaagcaatgttaayaaagaaatggtgctttggtgcttagatatgtgaaagtaaagtcaaaagaatcagctgaaacttgaaagtggttgctccctagaaaggcagaaacagagaa

SEQ ID NO: 13180 - DNA, 201 bp, Homo sapiens
ggtttaaaaattactaagtgttcctataaaatatacacaacacttagcagtggatacttcctaaaaacaggcagtgcatgagcactagtgaggggcattgygactacattgaacagttgcaactttgaggtgaataaagcctgtactgactcctggttgcaacgtacctggttgcaaagtacacagtgtgctactttgtat

SEQ ID NO: 13181 - DNA, 201 bp, Homo sapiens
aattactaagtgttcctataaaatatacacaacacttagcagtggatacttcctaaaaacaggcagtgcatgagcactagtgaggggcattgtgactacaytgaacagttgcaactttgaggtgaataaagcctgtactgactcctggttgcaacgtacctggttgcaaagtacacagtgtgctactttgtattgaggaga

SEQ ID NO: 13182 - DNA, 201 bp, Homo sapiens
taaagcctgtactgactcctggttgcaacgtacctggttgcaaagtacacagtgtgctactttgtattgaggagatatcctggactcacacagaaactcaragctatggaatgatggcaaatttaaaatatgacaagcgggagtcacaggtacactgcaaaagtgaaacttagaagctttgtgagtcctgttgtaacgctt

SEQ ID NO: 13183 - DNA, 201 bp, Homo sapiens
caggtacactgcaaaagtgaaacttagaagctttgtgagtcctgttgtaacgcttttgggcacatttatacatcatggggccaaagtcacattttttacckattagattcctgatcattcaggggttaccaaggttctgctatccaatgtatttaataaacaaataaataaataaactggtctctattctgtctcatgcac

SEQ ID NO: 13184 - DNA, 201 bp, Homo sapiens
aatcgtatagtatgtgtgttttaccacaattttaaaaatatatatcaacaccaaatccaatcacttctcactcctctgccacctccaccccagaaccatcmtcactaggatagaaaaccggaagggccttccagctgggctgcctgctgactctcatgcccactgtccatcacccacacaacagagagagcgtgcctttcc

SEQ ID NO: 13185 - DNA, 201 bp, Homo sapiens
agcacactccagaaggtgaaggtaaaccttacagagcttcaagagtggccactgaagtgaagttttatgggtgaacaagtgccaagtgtttaggggaatgyaggtgtgtcccctccaaggtaaaagacaaactgtttcatcttgcatcctcaccagaaggaaggaagcacactgcctgatgagcctctttgagttctgatg

SEQ ID NO: 13186 - DNA, 201 bp, Homo sapiens
gattcctgatcattcaggggttaccaaggttctgctatccaatgtatttaataaacaaataaataaataaactggtctctattctgtctcatgcactcagdcacaacttttcccaataaaaaaaaaaaaaaaaaggaaaacaaaaaacagtttctacacctccattcccagagcaagctcactctctgtcaccaaactccg

SEQ ID NO: 13187 - DNA, 201 bp, Homo sapiens
ttttctgtttttgttttgtttttgttttttgaaggaaaatttatattattttaattatttttacatacagaaaactcaacagcatacatttcacccaattyagtggcatgttctttaccctttgcctttttgagcttggcaatgcaaaccacatacttgagacccaggacactgtctccccagtgatggcggatctcatcg

SEQ ID NO: 13188 - DNA, 201 bp, Homo sapiens
gggttaccaaggttctgctatccaatgtatttaataaacaaataaataaataaactggtctctattctgtctcatgcactcaggcacaacttttcccaataaaaaaaaaaaaaaaaaggaaaacaaaaaacagtttctacacctccattcccagagcaagctcactctctgtcaccaaactccgtgggtgacttttcttct

SEQ ID NO: 13189 - DNA, 201 bp, Homo sapiens
ggttaccaaggttctgctatccaatgtatttaataaacaaataaataaataaactggtctctattctgtctcatgcactcaggcacaacttttcccaataaaaaaaaaaaaaaaaaggaaaacaaaaaacagtttctacacctccattcccagagcaagctcactctctgtcaccaaactccgtgggtgacttttcttcta

SEQ ID NO: 13190 - DNA, 201 bp, Homo sapiens
tgttaacaaagaaatggtgctttggtgcttagatatgtgaaagtaaagtcaaaagaatcagctgaaacttgaaagtggttgctccctagaaaggcagaaayagagaagagaggactctccctagaaaggcagagaagactcgtttttctcaggaagtcctgcgcaaatatttactctttcaattatgtgcaattgtaactt

SEQ ID NO: 13191 - DNA, 201 bp, Homo sapiens
aagacccagctgaaactacgaacatctttattggacatcagcatttaaagcaggaattttgagaaattagcacataactttcacacccctttcctggccartgccccagtaacctacaaggcaaccgttcccgcccacggggaaccagaactgacaatccctcttcaggagacaccacaggtgagagcaggagcgaccaca

SEQ ID NO: 13192 - DNA, 201 bp, Homo sapiens
actggtctctattctgtctcatgcactcaggcacaacttttcccaataaaaaaaaaaaaaaaaaggaaaacaaaaaacagtttctacacctccattcccadagcaagctcactctctgtcaccaaactccgtgggtgacttttcttctagaagagtccaggtggacagggagtccagttcagggacggagattcctggatg

SEQ ID NO: 13193 - DNA, 201 bp, Homo sapiens
tggagagtccagctcagggagagtgattggagagacagaataataagaagagtgggcagactggatcactctgatggttctggggcttctcttccaggagagaagaagacaaaaattatgtcaccatcaaggaaagtatccaaagtctctggcttaaacctgggcgtctccagctctgggacaggtggctgggcagggaag

SEQ ID NO: 13194 - DNA, 201 bp, Homo sapiens
gcggtgtatggattggggaggccccgccttggggattcgccacctccgcagtttctcttcttctcacaacctgcgacgggtcctttttcctggatactcasgaagcgggcacagttctcattcccactaggtgtcgggtttctagagaagccaatcggtgccgccgcggtcccggttctaaagtccccacgcacccaccgg

SEQ ID NO: 13195 - DNA, 201 bp, Homo sapiens; identical to SEQ ID NO: 2369

SEQ ID NO: 13196 - DNA, 201 bp, Homo sapiens
cccacgcacccaccgggactcagattctccccagacgccgaggatggtgctcatggcgccccgaaccctcctcctgctgctctcaggggccctggccctgrcccagacctgggcgcgtgagtgcagggtctgcagggaaatggtcgggaggagcgaggggcccgcccggcgggggcgcaggacccagggagccgcgcaggg

SEQ ID NO: 13197 - DNA, 201 bp, Homo sapiens
taaattaacaacctttgtaaatttaaaacaagattggcaaccctttagaaaaaaaatgagacttttgcaaaacaatctaaatgatacactaataacaaacsttcatgaaaatgacatttcaaccatctgaatttctgctttaagttataaactccaaaatgaactaactcccaataatttacagtagggagctctaagcca

SEQ ID NO: 13198 - DNA, 201 bp, Homo sapiens
tgaactaactcccaataatttacagtagggagctctaagccacaaataaaggtgtcaggacagacctgagacctggagtgagcacatccctcagggtcatragtcaatcctgtaagacccttcctccctcagacactccatccagtcatcaggaggtcaagaaaagttccccacagcactaagacccaaccacctcactgt

SEQ ID NO: 13199 - DNA, 201 bp, Homo sapiens
aagaaaagttccccacagcactaagacccaaccacctcactgtcctcacctccatggacagagcccaggtgaaagccacccctgctcctcctcccgcatcycccacaggctcagcaccatcgtcggcctggagtgcacctggactgagctcatcatgctctgtccctgtttgtgtcagtcacactgggtcccccacatact

SEQ ID NO: 13200 - DNA, 201 bp, Homo sapiens
tgcaccacatgtcaggcgttttaccatgtgagggactgttgtgggttaacccttctgctcccagccagagccagaccctcttctggtgccccaattgccaycccttatcatctacttaaaggtgtcagttcatcaattaataccatttttatctttatcgtcaacctttttcctctctccccactggatcattgtggcagt

SEQ ID NO: 13201 - DNA, 201 bp, Homo sapiens
aaatgctcgtagtttccccatgtcatagatgaggaaaatgaggcacaaagagagaacatgctggtgaggcctaggcaaggagttgaatccagatcgcctgrctgcagagtctagttgccctcagtggagccagcgaacccaggagctgacaccagagactgagatctcagctgtgcactgccctggtggtctcctgtccca

SEQ ID NO: 13202 - DNA, 201 bp, Homo sapiens
cacagggtcccctctggccactttggcctcatcccattactctcagcctagctcattcttctccactcacaccagtttcttgtctactccaccctgtctcyaccacctgcccctgctgtgactcccacatgcatgtgctgcccagtgatccacatggctcactcctcacaccattaaggtccctgcttaaatgtcccatgg

SEQ ID NO: 13203 - DNA, 201 bp, Homo sapiens
acaccattaaggtccctgcttaaatgtcccatggtcaagtgttcagaaatgtcttgtccagtgacctcttctgaaatctatcccctgccattcccaccacygccaccaatcttctaacccaagcatatttttcttaatggcaattatcagtgatactatgacaggttttatttgtttattgtctgttgatttattaaggtt

SEQ ID NO: 13204 - DNA, 201 bp, Homo sapiens
ctgtgtcgggtccttcttcctggatactcaccgggcggccccagttctcactcccattaggtgacaggtttttagagaagccaatcagcgtcgccgcggtyctggttctaaagtcctcgctcacccacccggactcattctccccagacgccaaggatggtggtcatggcgccccgaaccctcttcctgctgctctcgggg

SEQ ID NO: 13205 - DNA, 201 bp, Homo sapiens
cactggtgcaaaagtcagagtccaaagatcatcgaacctggagttttgatgtccaaggcaggagaagaagggtgtcccagccccagttccagagagagagwcagagacagagagagacagagagacagagacagagagaaattttacttctatctacctttctgttctatctgggccactaggtgattggactgtggctgc

SEQ ID NO: 13206 - DNA, 201 bp, Homo sapiens
gattacaggcatgagtcaccatgcccagcccaatgtaagccatttcttatcatccttcacggagtcacccaacaggaaaaggtagacaaccacaacacttygagaacatggtccactcggctcccactggcattggagcccacactaaggaaccaggctgctgtcttcaagatcactactgacttgaacagggaggaatgg

SEQ ID NO: 13207 - DNA, 201 bp, Homo sapiens
gacagagagacagagacagagagaaattttacttctatctacctttctgttctatctgggccactaggtgattggactgtggctgcccacagtgagagagsatcttccccaccagtccacccactcacatcccttccagaaaaactctcacagacactggtttaatacttacaatttgagtagtctataatttattttttt

SEQ ID NO: 13208 - DNA, 201 bp, Homo sapiens
ttatctcccaacaatgggctgtgcgggttaggaggtcctggtttccaaaggagggtacccttaaaagtagacaaaagagagcccattgaactacacattaytttagtcaccagagaagtttggagagcatgttcccagagaccacatcgtgagaagaggagtgtccttctctccaggcccaggtaataggccctcatcccc

SEQ ID NO: 13209 - DNA, 201 bp, Homo sapiens
caaattgctgagattacaggcatgagccaccactcctggcccacaaatctttaaagtggtatttttcaaaatgcaccttgtgtgccattcctgattgattdtttggaaatgaaagagaaaagaaaatgccaaagttcatcacaagcatcctttgcgataactactcgtagtaaaacaaagccgcagctggccgggcacggt

SEQ ID NO: 13210 - DNA, 201 bp, Homo sapiens
ctcctcgctcccaggctcccactccatgaggtatttctacaccaccatgtcccggcccggccgcggggagccccgcttcatctccgtcggctacgtggackatacgcagttcgtgcggttcgacagcgacgccgcgagccagaggatggagccgcgggcgccgtggatggagcgggaggggccggagtattgggaccggaa

SEQ ID NO: 13211 - DNA, 201 bp, Homo sapiens
tgaaagaggagttgggcagaggggacacaactaagctctggagattctttgatttggaatttttcaaggtgtggtgggctgttcagtgtcacaacttactrtgactgacctggattagtttatgactatgttttttctaagattgccttgtgagggactgagatgcaagatttgttcatgcctcctctttgtgacattaag

SEQ ID NO: 13212 - DNA, 201 bp, Homo sapiens
tatttctacaccaccatgtcccggcccggccgcggggagccccgcttcatctccgtcggctacgtggacgatacgcagttcgtgcggttcgacagcgacgmcgcgagccagaggatggagccgcgggcgccgtggatggagcgggaggggccggagtattgggaccggaacacacagatctgcaaggcccaggcacagact

SEQ ID NO: 13213 - DNA, 201 bp, Homo sapiens
aaccttgcaacagggtcaggaactatcccacctccccacctccgaatcagtctgaactgatggcgggagatgctgatgcttgctttactcatcctcattcmctgtgcatttatttttcactaattcagtccacatctcctagaagcagactgacccctacccttcataatcaggaaaccccagagcactttttatcccctc

SEQ ID NO: 13214 - DNA, 201 bp, Homo sapiens
ccaccactcctggcccacaaatctttaaagtggtatttttcaaaatgcaccttgtgtgccattcctgattgattatttggaaatgaaagagaaaagaaaaygccaaagttcatcacaagcatcctttgcgataactactcgtagtaaaacaaagccgcagctggccgggcacggtggctcacttctgtgatcctagcactt

SEQ ID NO: 13215 - DNA, 201 bp, Homo sapiens
ataaataaataaataaataaataaataaataaataagtttaagttggcacaatcactttggaaatcatattattattatctagtatggttaaaggccatayaacatatcatccaatcatcccactcctaatcatacactctgcgggctttcttgcctatgtgcccaggagacatgcacactaatgtttatggcaagaactg

SEQ ID NO: 13216 - DNA, 201 bp, Homo sapiens
acaccaccatgtcccggcccggccgcggggagccccgcttcatctccgtcggctacgtggacgatacgcagttcgtgcggttcgacagcgacgccgcgagycagaggatggagccgcgggcgccgtggatggagcgggaggggccggagtattgggaccggaacacacagatctgcaaggcccaggcacagactgaacgag

SEQ ID NO: 13217 - DNA, 201 bp, Homo sapiens
cacaagcatcctttgcgataactactcgtagtaaaacaaagccgcagctggccgggcacggtggctcacttctgtgatcctagcactttgggaagtcgagrcctgtggatcacgagatcaggagttcgagaccagcctgaccaacatggtgaaacctcgtctttactaaaaatacaaaaattagctgggcgtgttggtgcg

SEQ ID NO: 13218 - DNA, 201 bp, Homo sapiens
gggaaatcatcctgaccatctctcactccaaactcatcaggtagtgcttattctttcaaaggtattttgtgactgtgcaagcaaatataaatgtatatgtrtatgttctttctccctttgcacacaaattttagcaaactatatatgcttttctgtaccttgctgttttcccttaccattgtatcatggagaccatcccat

SEQ ID NO: 13219 - DNA, 201 bp, Homo sapiens
aaaacaaagccgcagctggccgggcacggtggctcacttctgtgatcctagcactttgggaagtcgaggcctgtggatcacgagatcaggagttcgagacsagcctgaccaacatggtgaaacctcgtctttactaaaaatacaaaaattagctgggcgtgttggtgcgtgtctgtaatccaagctactcagaaggctgat

SEQ ID NO: 13220 - DNA, 201 bp, Homo sapiens
gacatttctttatagcaacacaaaacggaataagacaaccctctcatcataggtatgtgtctgtggcagccagcccccattctcaaggtatccaggatccwctcagccaagagtcctttcctcagtattctaaagacactctaatcactcaagagattctaaggtttttaggagaaaccagggacaaaactaaatgttttt

SEQ ID NO: 13221 - DNA, 201 bp, Homo sapiens
acagcgacgccgcgagccagaggatggagccgcgggcgccgtggatggagcgggaggggccggagtattgggaccggaacacacagatctgcaaggcccargcacagactgaacgagagaacctgcggatcgcgctccgctactacaaccagagcgagggcggtgagtgaccccggcccggggcgcaggtcacgacccctc

SEQ ID NO: 13222 - DNA, 201 bp, Homo sapiens
gacgccgcgagccagaggatggagccgcgggcgccgtggatggagcgggaggggccggagtattgggaccggaacacacagatctgcaaggcccaggcacrgactgaacgagagaacctgcggatcgcgctccgctactacaaccagagcgagggcggtgagtgaccccggcccggggcgcaggtcacgacccctccccat

SEQ ID NO: 13223 - DNA, 201 bp, Homo sapiens
actggtacaaaaacaggcacatagaccaatggaacagaacagagaactcagaaataagaccacacatctaaataaaggaataataatcacaagactcaggdtggagtctccttttgggggatgtgaatgggcagcagcccagggtagtttacaggttctgtgttttacaacagtgctggctaaagtccaaacaacatatca

SEQ ID NO: 13224 - DNA, 201 bp, Homo sapiens
aagcactcagggaaacctctcctggactcctgaccattggaaactgtggcagatgaggaatatttgttgttttaagctaagttttacataatttgttatgyaatagtaaataaataacacattttcacaagagaggatgtattattacacattaaattgcatttgctttaaatgtatcatcgtcatcattattatttttga

SEQ ID NO: 13225 - DNA, 201 bp, Homo sapiens
agtttacaggttctgtgttttacaacagtgctggctaaagtccaaacaacatatcatccattcccttttaaaatggaacttttaaaataaatgtgtaatayttgatgttgatgatgtgttctgaaaacattgagttgaaagaattgacttaaattcctaattccttaaacagattttttcaaagtaaaatatgcttggttt

SEQ ID NO: 13226 - DNA, 201 bp, Homo sapiens
attcctaattccttaaacagattttttcaaagtaaaatatgcttggtttttataaaaatgaaagagaaaagaataccaaagttcattgcaagcatccttavcaagaactacttacattggaacaaaaccacacagaattgtaaggagccatgtgacagagaggaccacgaggccatgaaaatggctttggctacaaatagg

SEQ ID NO: 13227 - DNA, 201 bp, Homo sapiens
gaaagtcaaaagaaaccttgcaacagggtcaggaactatcccacctccccacctccgaatcagtctgaactgatggcgggagatgctgatgcttgctttaytcatcctcattccctgtgcatttatttttcactaattcagtccacatctcctagaagcagactgacccctacccttcataatcaggaaaccccagagcac

SEQ ID NO: 13228 - DNA, 201 bp, Homo sapiens
tccatgccccacggacgccccgggtactcccgagtctccgggtctgggatccaccccgaggccgcgggacccgcccagaccctctacctgggagaaccccmaggcgcctttaccaaaatccccgcgggtgggtccgggcgagggcgaggctcggtgggcggggctgaccgagggggtggggccaggttctcacaccctcca

SEQ ID NO: 13229 - DNA, 201 bp, Homo sapiens
tctttgatactcctcctttccagaagtgcagcttcattccctccctgttcgtgtggcctggacttaatgactcacttctaactgatagagtaatgctgacwtaatagtttgtgattctgggtgtagaacataagactcactgaagtttctactttggttctttctttctctggaatcatgagccctgggggaagctggctg

SEQ ID NO: 13230 - DNA, 201 bp, Homo sapiens
aattgcacaggcccaacagcattcatcaacaggtgaaaatggtccacctgggttgagcttgaatcccatgttgacacccacagaaaacacccaagtgtgawgtggcactgaacaaccaaacagacaaatggcagttagccagccttcaccatgggtcagcccaggcctggtaggatgggtgcatgaatggagcaaccacag

SEQ ID NO: 13231 - DNA, 201 bp, Homo sapiens
accctgaaacaataatgttaattttgcttttaacatgtttataaattctttgatactcctcctttccagaagtgcagcttcattccctccctgttcgtgtrgcctggacttaatgactcacttctaactgatagagtaatgctgacataatagtttgtgattctgggtgtagaacataagactcactgaagtttctacttt

SEQ ID NO: 13232 - DNA, 201 bp, Homo sapiens
tagcatggaggtgtttgtccatgattcacagatgattcaaagagcagagagcttctcctgaggtcacacagcacgtaagcggtggaacaatggcaggcacdtgactctctaggcccctagtccagttttctgggttctatgagaattgtagcccttggtttctgttacatgtggttctcttttgagccagagaaggaggac

SEQ ID NO: 13233 - DNA, 201 bp, Homo sapiens
taggagatgatgtcctgagaagaaaagacagataggcagattctcaagcaaactcaggagtttactatacaaaagattttggaataccttcctcagcctckttttcattgtggtaaaatacacataaacacaaaggataccaccgtaaccatttaaagtgcacaatgcagtgacaattcgtatgttcacaatgttatgtaa

SEQ ID NO: 13234 - DNA, 201 bp, Homo sapiens
attttttcttctagctagaactaccttataataaaatttgtgaagtgaatccacagaaattgagcaaaataaaaaggagtcgttgagtgtgaggaaagctrcagagaagtaaagacaggtggagacatgacaatactgagcatgttagtgaccttcacagtaactgacttcctggaggagtgtgagcttaagccagaatga

SEQ ID NO: 13235 - DNA, 201 bp, Homo sapiens
ttgttcatggctcactgcagcctgaatcttccaggcttaagcaaccctcccacctcagacacccaagtagctgggactacaggcatgtgccaccaagcccrgctaattcttttgaattttttgtagagacagggtttctctatgttgcctaggctggtcacaaactcaggggctcaagcaatctgccagcctgagcctccc

SEQ ID NO: 13236 - DNA, 201 bp, Homo sapiens
acagatctgcaaggcccaggcacagactgaacgagagaacctgcggatcgcgctccgctactacaaccagagcgagggcggtgagtgaccccggcccgggrcgcaggtcacgacccctccccatcccccacggagggccgggtcgcctcgagtctctgggtccgagatcctccccgaaaccgcgggaccccgagacccttg

SEQ ID NO: 13237 - DNA, 201 bp, Homo sapiens
agagcttctcctgaggtcacacagcacgtaagcggtggaacaatggcaggcacatgactctctaggcccctagtccagttttctgggttctatgagaattvtagcccttggtttctgttacatgtggttctcttttgagccagagaaggaggacgcacagtgagaagaaagtgccagagccccaagtcctggcttagattt

SEQ ID NO: 13238 - DNA, 201 bp, Homo sapiens
cccgaaaccgcgggaccccgagacccttgacctgggagaggcccaggcgcctttacccggtttcattttcagtttaggccaaaatccccgcgggttggtcsgggcagggcggggctcgggggaccgggctgaccgcgggggcggggccaggttctcacaccatgcaggtgatgtatggctgcgacgtggggcccgacgggc

SEQ ID NO: 13239 - DNA, 201 bp, Homo sapiens
accaggatgccatgaaaaacagccttggctacaaataggtcatttgatccttggctagttggcaactctctacattttctgatacacagtgttcaatctgdtaggtaaggcaatagtatcttgcaaagaatttgagaatttgatatgttgctcacattttaccacacatacaagtgaattaaacttttacagaatagaaaa

SEQ ID NO: 13240 - DNA, 201 bp, Homo sapiens
acccggtttcattttcagtttaggccaaaatccccgcgggttggtcggggcagggcggggctcgggggaccgggctgaccgcgggggcggggccaggttcycacaccatgcaggtgatgtatggctgcgacgtggggcccgacgggcgcttcctccgcgggtatgaacagcacgcctacgacggcaaggattacatcgctc

SEQ ID NO: 13241 - DNA, 201 bp, Homo sapiens
cggggctcgggggaccgggctgaccgcgggggcggggccaggttctcacaccatgcaggtgatgtatggctgcgacgtggggcccgacgggcgcttcctcygcgggtatgaacagcacgcctacgacggcaaggattacatcgctctgaacgaggacctgcgctcctggaccgcggcggacatggcagctcagatcaccaa

SEQ ID NO: 13242 - DNA, 201 bp, Homo sapiens
gggggcggggccaggttctcacaccatgcaggtgatgtatggctgcgacgtggggcccgacgggcgcttcctccgcgggtatgaacagcacgcctacgacrgcaaggattacatcgctctgaacgaggacctgcgctcctggaccgcggcggacatggcagctcagatcaccaagcgcaagtgggaggcggcccgtcgggc

SEQ ID NO: 13243 - DNA, 201 bp, Homo sapiens
ttttacataatttgttatgcaatagtaaataaataacacattttcacaagagaggatgtattattacacattaaattgcatttgctttaaatgtatcatcvtcatcattattatttttgagacatggtctcgctctgtcacccaggctggagtgcagtggcatgatcaccatgcactgcagtgtcgacctcctgggttcaa

SEQ ID NO: 13244 - DNA, 201 bp, Homo sapiens
cgacggcaaggattacatcgctctgaacgaggacctgcgctcctggaccgcggcggacatggcagctcagatcaccaagcgcaagtgggaggcggcccgtsgggcggagcagctgagagcctacctggagggcgagttcgtggagtggctccgcagatacctggagaacgggaaggagacgctgcagcgcgcgggtaccag

SEQ ID NO: 13245 - DNA, 201 bp, Homo sapiens
tcagcctcctgagtagctgggactaccatcatgaactactatgcctggctaattttctaattttttgtatagatgggggttttgcccaggctgatcttgahcttctggagtcaacaaatctgccttcctctgccttccacagtgctaggatggcaggcgtgagccaccatacctggcgtaaattaattataagatattaaa

SEQ ID NO: 13246 - DNA, 201 bp, Homo sapiens
gacggcaaggattacatcgctctgaacgaggacctgcgctcctggaccgcggcggacatggcagctcagatcaccaagcgcaagtgggaggcggcccgtcdggcggagcagctgagagcctacctggagggcgagttcgtggagtggctccgcagatacctggagaacgggaaggagacgctgcagcgcgcgggtaccagg

SEQ ID NO: 13247 - DNA, 201 bp, Homo sapiens
tcacttcccagacggggtggccgggcagaggcgccccccacctcctggacgaggtggctggccgggcgggggctgccccccacctccctcctggacggggyggctgccgggcagagacactcctcacttcccagacggggtggctgctgggcggaggggctcctcacctctcagacggggcggccggggagagacgctcct

SEQ ID NO: 13248 - DNA, 201 bp, Homo sapiens
cccccacctccctcctggacggggcggctgccgggcagagacactcctcacttcccagacggggtggctgctgggcggaggggctcctcacctctcagacrgggcggccggggagagacgctccttacctcccagacggggtggctgctgggcggaggggctcctcacatcccagacagggcggcggggcagaggcgctcc

SEQ ID NO: 13249 - DNA, 201 bp, Homo sapiens
atatacgtaagtcctttagtacagctctctttcagaggtgcagcttaattccctctcttaagtgtggcttggacttaatgatgcacttctgatatggcctvtctctgtgttcccacccaaatctcattttgaattgtcatgcgaattctaatccccacatattggcggagggacttcatgggaggtgatcgaatcatgggg

SEQ ID NO: 13250 - DNA, 201 bp, Homo sapiens
agtgcctcaattttcttactcttcccttcagaatcccagaatacatgtgtgatccactaccccatctcggaccatgaggccgccctgaggtgctgggtccygggcttctaccatgtggaaatcacagtgacccaactgtgggatggggaggaccaaatttaggacgcagagcttgtggggaccagacctgcagggtataga

SEQ ID NO: 13251 - DNA, 201 bp, Homo sapiens
tagtgcttattctttcaaaggtattttgtgactgtgcaagcaaatataaatgtatatgtatatgttctttctccctttgcacacaaattttagcaaactayatatgcttttctgtaccttgctgttttcccttaccattgtatcatggagaccatcccatgaagaaatatcaagaactacactatgtctttcttttttttg

SEQ ID NO: 13252 - DNA, 201 bp, Homo sapiens
ataaatgtatatgtatatgttctttctccctttgcacacaaattttagcaaactatatatgcttttctgtaccttgctgttttcccttaccattgtatcayggagaccatcccatgaagaaatatcaagaactacactatgtctttcttttttttgttcaaaaatttcttggcaatccattgtataggcatgcatttttta

SEQ ID NO: 13253 - DNA, 201 bp, Homo sapiens
aattaaacttttacagaatagaaaaaaagcattgttgagcaaaataaattaaatgaaaagacataaatgaataactagtgatgaaatagcaataagaatgdaaaacacgaaagagctgcttttaaagcaacattagaagcacaaaataacagtgtttttcagaatcatactggagtccaaatcacttctaccacatctaat

SEQ ID NO: 13254 - DNA, 201 bp, Homo sapiens
acgaaagagctgcttttaaagcaacattagaagcacaaaataacagtgtttttcagaatcatactggagtccaaatcacttctaccacatctaattaaaavccacagtgaaagatgttaaactgatcacaggatgcccactgaatagccagttactgaaaaatcttgttcctagattgaatttaaccatttccacctacca

SEQ ID NO: 13255 - DNA, 201 bp, Homo sapiens
gtgagactccatcttaaaaaaaaccccaaaacttatgaatgcaactttctacaatgaaagcatatataaaaatatatacatagaaaacaaaagaatggaartcagcatcactgcagaagatagctccagggatgaccattcacactgcagtccaggaagtttcaataatatgatagcagtggttctttggaggggaagcct

SEQ ID NO: 13256 - DNA, 201 bp, Homo sapiens
tttttttttttgccttcaagcatctgtttaacaaagcacatcttgcaccgcccttaatccatttaaccctgagtggacacagcacatgtttcagagagcasggggttgcgggtaaggttatagattaacagcatcccaaggcagaagaatttttcttagtacagaacaaaatggagtctcctatgtctgcttctttctaca

SEQ ID NO: 13257 - DNA, 201 bp, Homo sapiens
ttcaataatatgatagcagtggttctttggaggggaagcctgggtgatatttctttcttctctgcatttttttttctttaaaattcaaccaggtgttgatrtgtgcattttaaattcttctgtaatcaaatacattttcatatttctaatgtagaaacatgtatttttaacattcaaaataaaacatttgaagtaaaataa

SEQ ID NO: 13258 - DNA, 201 bp, Homo sapiens
tttgaagtaaaataacaatgaaaagtggctgaacactgtggtgggcacctgtagtcccagctactcaggaggctgagataggagaatggctcgagctcacraatttgaggctatggtcacacctgtgaatagtcactgctctccagcctggagaacatagtgagacctcatatttaaaataataataataaaaagaagttc

SEQ ID NO: 13259 - DNA, 201 bp, Homo sapiens
tacatcgctctgaacgaggacctgcgctcctggaccgcggcggacatggcagctcagatcaccaagcgcaagtgggaggcggcccgtcgggcggagcagckgagagcctacctggagggcgagttcgtggagtggctccgcagatacctggagaacgggaaggagacgctgcagcgcgcgggtaccaggggccacagggcg

SEQ ID NO: 13260 - DNA, 201 bp, Homo sapiens
cctagaagcagactgacccctacccttcataatcaggaaaccccagagcactttttatcccctccagaatataacacttcagctctgcatcatcacatgarggctccaactctgtagggcaggtgtactctcacagcttcaggccctgaacatttgcttcagatgtccccccatccctttccagacctgtctgtgttgctc

SEQ ID NO: 13261 - DNA, 201 bp, Homo sapiens
gctctgaacgaggacctgcgctcctggaccgcggcggacatggcagctcagatcaccaagcgcaagtgggaggcggcccgtcgggcggagcagctgagagyctacctggagggcgagttcgtggagtggctccgcagatacctggagaacgggaaggagacgctgcagcgcgcgggtaccaggggccacagggcgcctccc

SEQ ID NO: 13262 - DNA, 201 bp, Homo sapiens
ctggagggcgagttcgtggagtggctccgcagatacctggagaacgggaaggagacgctgcagcgcgcgggtaccaggggccacagggcgcctcccggatsgcctgtagatctccggggctggcctcccacaagaaagggagacaaatgggaccaacactataatatcgccctccctctggtcctgagggagaagaatcct

SEQ ID NO: 13263 - DNA, 201 bp, Homo sapiens
tccttacctcccagacggggtggctgctgggcggaggggctcctcacatcccagacagggcggcggggcagaggcgctccccacatctcagatgatgggcrgccgggcagagacgctcctcacttcctagaccggatggcggccgggcagaggctgcgatcttggcactttgggaggccaaggcaggcagctgggaggcag

SEQ ID NO: 13264 - DNA, 201 bp, Homo sapiens
accttctctctctctgtctctgggatcatgagctcttggggacccagctgctgtgccataagcagccctgcaggaaggtccatgtggctaagaactgaggycccctgggaccagacagcaaggaactaggcttttccaacagccatgtgactaagccatgtttcacgtgaatccctagccccagtgaagccctcagacgat

SEQ ID NO: 13265 - DNA, 201 bp, Homo sapiens
acaatttataaaaagtctaaaagtaaagccaggcaagggggcctatacccataatcctagcatcttgggaggccaaggtgggcagattgcttgaccccagrcgttccagacaagtctgggaaacatgataaatccctttctctacaaaaaatacagaaattagccaggcatggtggcgcgaacctctagtcccagctactc

SEQ ID NO: 13266 - DNA, 201 bp, Homo sapiens
ataatcctagcatcttgggaggccaaggtgggcagattgcttgaccccaggcgttccagacaagtctgggaaacatgataaatccctttctctacaaaaawtacagaaattagccaggcatggtggcgcgaacctctagtcccagctactcaagaggcctagaagggaggaattgcttaagcctggcaggtagaggctgaa

SEQ ID NO: 13267 - DNA, 201 bp, Homo sapiens
tagattggagtaaacaatttctgcctaccctagccaaacaaattattgtcatgatgctaagctagtgtatagacagaggtgtgagattcacatttttctarctgcaaagcaccctgattaggcaaatatttttgtagatgcttgagtaagaaaattggcattttgggcattcttaaaccgaattagaaacttctgaagaga

SEQ ID NO: 13268 - DNA, 201 bp, Homo sapiens
cgcttgaacctggaaggcagaagttgcagtgagctgagatcctgccatcgcactccagcctgggtgacagagccatactccatctcaaaacaaacaaacaracaaccacaaaaaacaagccacagccaattttaaggagccatgtgagaggaccaggatgccatgaaaaacagccttggctacaaataggtcatttgatcc

SEQ ID NO: 13269 - DNA, 201 bp, Homo sapiens
tcccagctactcaggaggctgagataggagaatggctcgagctcacgaatttgaggctatggtcacacctgtgaatagtcactgctctccagcctggagawcatagtgagacctcatatttaaaataataataataaaaagaagttcagatctccttccaatctcaacctaaaacaaatttctcatttgaagtccatatgg

SEQ ID NO: 13270 - DNA, 201 bp, Homo sapiens
agatcactcccagttaggagctggagaccagcctggccaacacagtgaaaccccgtctccaccaaaaaaatacgaaaaccagtcaggcatggtggtgcgckcctgcaatcccaggcactctgcagactctaaattattcaacgcctcagacactaactttccaaggaataggagattatcccaggtgcctgtggccaggag

SEQ ID NO: 13271 - DNA, 201 bp, Homo sapiens
tactgatggctcctccagagagtaaaaaaaatattgttcctctacaatccatgactcatccttctgttacagtgttcacctgggcaatgaagtcaacactragaatatcatcaatttatggaatactgattatctcttttatagatatataaattataattatgtatatatatattatattataatatatataattaccat

SEQ ID NO: 13272 - DNA, 201 bp, Homo sapiens
tgttcacctgggcaatgaagtcaacactgagaatatcatcaatttatggaatactgattatctcttttatagatatataaattataattatgtatatatayattatattataatatatataattaccatcacacctgagagagtgagatggattcttttcttccacagatgaaaatctgagtccctgagaacctagggttt

SEQ ID NO: 13273 - DNA, 201 bp, Homo sapiens
caaatgggaccaacactataatatcgccctccctctggtcctgagggagaagaatcctcctgggtttccagagagtgactctgagggtccgccgtgctctytgacacaattaagggatgaaatctctgaggaaatgaagggaagacaatccctggaatactgatgagtggttccctttgacactggcagcagccttgggcc

SEQ ID NO: 13274 - DNA, 201 bp, Homo sapiens
gcctcagacactaactttccaaggaataggagattatcccaggtgcctgtggccaggaggtgtctgggttctgtgctcccttccccaccccagatgtcctdtccattctcaggatggtcacatgggtgctgctggagtgtcccatgaggaatgcaaagtgcctcaattttcttactcttcccttcagaatcccagaataca

SEQ ID NO: 13275 - DNA, 201 bp, Homo sapiens
cagctctgcatcatcacatgagggctccaactctgtagggcaggtgtactctcacagcttcaggccctgaacatttgcttcagatgtccccccatcccttyccagacctgtctgtgttgctctgaatctgtccttccctgagaactggcggggagatatcagggaggaggggagatttctttgtgctatgtcaatgcatct

SEQ ID NO: 13276 - DNA, 201 bp, Homo sapiens
tgagggtccgccgtgctctctgacacaattaagggatgaaatctctgaggaaatgaagggaagacaatccctggaatactgatgagtggttccctttgacrctggcagcagccttgggccccgtgacttttcctctcaggccttgttctctgcttcacactcaatgtgcctgggggtctgagtccagctcttctgagtccc

SEQ ID NO: 13277 - DNA, 201 bp, Homo sapiens
ctatccattctcaggatggtcacatgggtgctgctggagtgtcccatgaggaatgcaaagtgcctcaattttcttactcttcccttcagaatcccagaatvcatgtgtgatccactaccccatctcggaccatgaggccgccctgaggtgctgggtcccgggcttctaccatgtggaaatcacagtgacccaactgtggga

SEQ ID NO: 13278 - DNA, 201 bp, Homo sapiens
ggtgctgctggagtgtcccatgaggaatgcaaagtgcctcaattttcttactcttcccttcagaatcccagaatacatgtgtgatccactaccccatctcdgaccatgaggccgccctgaggtgctgggtcccgggcttctaccatgtggaaatcacagtgacccaactgtgggatggggaggaccaaatttaggacgcag

SEQ ID NO: 13279 - DNA, 201 bp, Homo sapiens
tgtagagatgggggtttctccatgttgcccaggctgatcttcaacatctggagtcaacaaatctgccttcctctgccttccacggtgctagaatcacaggygtgagccaccacacctggcctaaattaattataagacattacacatgtaacttagttttaaaaggtaaggagaatgtccatggctgaagaggatgcattt

SEQ ID NO: 13280 - DNA, 201 bp, Homo sapiens
tccccaccccaggcgtcctgtccattctcaagatggccacatgcgtgctggtggagtgtcccatgacagatgcaaaatgcctgaattttctgactcttccygtcagacccccccaagacacatatgacccaccaccccatctctgaccatgaggccaccctgaggtgctgggccctgggcttctaccctgcggagatcaca

SEQ ID NO: 13281 - DNA, 201 bp, Homo sapiens
cctgaattttctgactcttcccgtcagacccccccaagacacatatgacccaccaccccatctctgaccatgaggccaccctgaggtgctgggccctgggyttctaccctgcggagatcacactgacctggcagcgggatggggaggaccagacccacacacggagctcgtggagaccaggcctgcaggggatggaacctt

SEQ ID NO: 13282 - DNA, 201 bp, Homo sapiens
caggagaatcgcttgaacctggaaggcagaagttgcagtgagctgagatcctgccatcgcactccagcctgggtgacagagccatactccatctcaaaacraacaaacaaacaaccacaaaaaacaagccacagccaattttaaggagccatgtgagaggaccaggatgccatgaaaaacagccttggctacaaataggtc

SEQ ID NO: 13283 - DNA, 201 bp, Homo sapiens
acggtggctcacttctgtgatcctagcactttgggaagtcgaggcctgtggatcacgagatcaggagttcgagaccagcctgaccaacatggtgaaacctygtctttactaaaaatacaaaaattagctgggcgtgttggtgcgtgtctgtaatccaagctactcagaaggctgatgcaggagaatcgcttgaacctggaa

SEQ ID NO: 13284 - DNA, 201 bp, Homo sapiens
tcccagagcaagctcactctctgtcaccaaactccgtgggtgacttttcttctagaagagtccaggtggacagggagtccagttcagggacggagattcckggatgaaaagtgaagggagagggacagggcccatgccgagggtttcttcctggtttctcagacagctcctgggccaagactcagggaaacactgagacag

SEQ ID NO: 13285 - DNA, 201 bp, Homo sapiens
gagcgcttggcacaggaggagcggggtcagggcgaagtcccagggccccaggcgtggctctcagggtctcaggccccgaaggcggtgtatggattggggakgccccgccttggggattcgccacctccgcagtttctcttcttctcacaacctgcgacgggtcctttttcctggatactcaggaagcgggcacagttctca

SEQ ID NO: 13286 - DNA, 201 bp, Homo sapiens
tcatttgaccctgggctaattggcaactctctacattgtctggcatacagtgttcaatctgatgtgcaaggcaattgtatcttgcaaagaatttgagaatktgatatgttgctcacattttaccacacatacaagtggattaaacttttacacagtaaaaaaaaaaagcattgttgagcaaaataaattaaatgaaaagac

SEQ ID NO: 13287 - DNA, 201 bp, Homo sapiens
cctgttgacctggctggatgagcagcaggtagaaagtgcactgtagtgcttggcaaaacacgggcactccagaaggtgaagataaaccttacaaagcttcmagagtggccactcggccaggtgcagtggctcacgcctgtaatcccagcactttggaaggctgaggtggatggatcacctgaggttgggagttggagacta

SEQ ID NO: 13288 - DNA, 201 bp, Homo sapiens
ggcagacacagaaagtccatggcacaaggtgcagctgagcagctgggggtctcaccagtgctgagctgagaagttgccttggttagggagtgctatggcasatgcagtgatagaatgccctgcataataaggacagggttggaagaaacctacaaagacagtggctttggctagttacttctcagctgcatcgatgctgtg

SEQ ID NO: 13289 - DNA, 201 bp, Homo sapiens
aaaatcacaaccatagaagaatcttcatgtacaaacatgcttgtcaaaatattctttaccaaaagacaagatgaaagcacatggatctaaaagaaccctgstgacttctccttgtttgagatgggatgcagcttctagaagtgtgtaaattttatgcagactttatgacatggaaaactactttcataataatacattcaa

SEQ ID NO: 13290 - DNA, 201 bp, Homo sapiens
tgttctcttacttatgttggccatgtcctcatgaatttagtgaaatgggcatgttgtctctgagtggaagtgaggggacactactgggcagagctccatcraagggtggctggtgtcctctataccatttatctacacatgttggggtttttctagcatgaaatgtcccagaggcagccaaacccgaagcttggctcctcc

SEQ ID NO: 13291 - DNA, 201 bp, Homo sapiens
agtgacccaactgtgggatggggaggaccaaatttaggacgcagagcttgtggggaccagacctgcagggtatagaaccttccagaagtgggcagctgtgrtgctgtcttctagagacaagtagagatacacatgccatgtgcagcaggaggcactgccagagcccctcacactgagatgggctaaggagatgaatgaggg

SEQ ID NO: 13292 - DNA, 201 bp, Homo sapiens
gagatacacatgccatgtgcagcaggaggcactgccagagcccctcacactgagatgggctaaggagatgaatgaggggccatgtctcttctcagggaaadcaggagcccttctggaggccttcagcagggtcagggctgaggcctgggggtcaggacccctcacgttcccctcctttcttagggccatcttcccagccca

SEQ ID NO: 13293 - DNA, 201 bp, Homo sapiens
tatattatattataatatatataattaccatcacacctgagagagtgagatggattcttttcttccacagatgaaaatctgagtccctgagaacctagggktttggtatgggttcactgaaaatgttggccttgagaattaggaaacagcttcctgcaggcctgcctggatgtgagccacaccaatggagtctccacaaca

SEQ ID NO: 13294 - DNA, 201 bp, Homo sapiens
ccctgagaacctagggttttggtatgggttcactgaaaatgttggccttgagaattaggaaacagcttcctgcaggcctgcctggatgtgagccacaccartggagtctccacaacagcaggaagagcaactgagaaccctggaagcttcacacttgtaatgttccatgtccagcggcattcagttgatggatgggccaag

SEQ ID NO: 13295 - DNA, 201 bp, Homo sapiens
tagggttttggtatgggttcactgaaaatgttggccttgagaattaggaaacagcttcctgcaggcctgcctggatgtgagccacaccaatggagtctccrcaacagcaggaagagcaactgagaaccctggaagcttcacacttgtaatgttccatgtccagcggcattcagttgatggatgggccaagataagaataca

SEQ ID NO: 13296 - DNA, 201 bp, Homo sapiens
tgtctgtgttgctctgaatctgtccttccctgagaactggcggggagatatcagggaggaggggagatttctttgtgctatgtcaatgcatctagacagarctctcattctcccttgaacctcaactctatccgttcccagacacttgaaataaaacacagaccagaaatgtctatttaaaagctaaatatctatagtata

SEQ ID NO: 13297 - DNA, 201 bp, Homo sapiens
gatttttcttctagaagagtccacggggacaggtaaggagtaggaggcagggagtccagttctgggacggggattccgtgatgcaaagtgaagagagaggvacggggcccatttcgagggtttctccctggtttctcagacagctcctgggccaagactcggaaacgttgagacagagcgcttggcacagaagtagcgggg

SEQ ID NO: 13298 - DNA, 201 bp, Homo sapiens
gaagagtccacggggacaggtaaggagtaggaggcagggagtccagttctgggacggggattccgtgatgcaaagtgaagagagaggaacggggcccattycgagggtttctccctggtttctcagacagctcctgggccaagactcggaaacgttgagacagagcgcttggcacagaagtagcggggtcagggcgaagtc

SEQ ID NO: 13299 - DNA, 201 bp, Homo sapiens
acggggattccgtgatgcaaagtgaagagagaggaacggggcccatttcgagggtttctccctggtttctcagacagctcctgggccaagactcggaaackttgagacagagcgcttggcacagaagtagcggggtcagggcgaagtcccagggcctcaggcatggctctcaggatctcaggccccaaaggcggtgtatgg

SEQ ID NO: 13300 - DNA, 201 bp, Homo sapiens
tggtttctcagacagctcctgggccaagactcggaaacgttgagacagagcgcttggcacagaagtagcggggtcagggcgaagtcccagggcctcaggcmtggctctcaggatctcaggccccaaaggcggtgtatggattggggaggcccagcgctggggattccccatctccgcagggtttctcttctccctctccca

SEQ ID NO: 13301 - DNA, 201 bp, Homo sapiens
gaagtagcggggtcagggcgaagtcccagggcctcaggcatggctctcaggatctcaggccccaaaggcggtgtatggattggggaggcccagcgctgggsattccccatctccgcagggtttctcttctccctctcccaacctgtgtcgggtccttcttcctggatactcaccaggctgccccagttctcactcccattg

SEQ ID NO: 13302 - DNA, 201 bp, Homo sapiens
tcagggcgaagtcccagggcctcaggcatggctctcaggatctcaggccccaaaggcggtgtatggattggggaggcccagcgctggggattccccatctycgcagggtttctcttctccctctcccaacctgtgtcgggtccttcttcctggatactcaccaggctgccccagttctcactcccattgagtgtcgggttc

SEQ ID NO: 13303 - DNA, 201 bp, Homo sapiens
cagggcgaagtcccagggcctcaggcatggctctcaggatctcaggccccaaaggcggtgtatggattggggaggcccagcgctggggattccccatctcygcagggtttctcttctccctctcccaacctgtgtcgggtccttcttcctggatactcaccaggctgccccagttctcactcccattgagtgtcgggttcc

SEQ ID NO: 13304 - DNA, 201 bp, Homo sapiens
cgccgcggtcctggttctaaagtcctcgctcacccacccggactcattctccccagacgccaaggatggtggtcatggcgccccgaaccctcttcctgctrctctcgggggccctgaccctgaccgagacctgggcgggtgagtgcggggtcaggagggaaacggcccctgcgcggaggagggaggggccggcccggcggg

SEQ ID NO: 13305 - DNA, 201 bp, Homo sapiens
ccctgaccctgaccgagacctgggcgggtgagtgcggggtcaggagggaaacggcccctgcgcggaggagggaggggccggcccggcgggggcgcaggacycggcagccgcgccgggaggagggtcgggcgggtctcaacccctcctcgcccccaggctcccactccatgaggtatttcagcgccgccgtgtcccggcccg

SEQ ID NO: 13306 - DNA, 201 bp, Homo sapiens
ggtactcccgagtctccgggtctgggatccaccccgaggccgcgggacccgcccagaccctctacctgggagaaccccaaggcgcctttaccaaaatcccygcgggtgggtccgggcgagggcgaggctcggtgggcggggctgaccgagggggtggggccaggttctcacaccctccagtggatgattggctgcgacctg

SEQ ID NO: 13307 - DNA, 201 bp, Homo sapiens
cgcccagaccctctacctgggagaaccccaaggcgcctttaccaaaatccccgcgggtgggtccgggcgagggcgaggctcggtgggcggggctgaccgarggggtggggccaggttctcacaccctccagtggatgattggctgcgacctggggtccgacggacgcctcctccgcgggtatgaacagtatgcctacgatg

SEQ ID NO: 13308 - DNA, 201 bp, Homo sapiens
ccaggaagtttcaataatatgatagcagtggttctttggaggggaagcctgggtgatatttctttcttctctgcatttttttttctttaaaattcaaccasgtgttgatgtgtgcattttaaattcttctgtaatcaaatacattttcatatttctaatgtagaaacatgtatttttaacattcaaaataaaacatttgaa

SEQ ID NO: 13309 - DNA, 201 bp, Homo sapiens
agaaccccaaggcgcctttaccaaaatccccgcgggtgggtccgggcgagggcgaggctcggtgggcggggctgaccgagggggtggggccaggttctcayaccctccagtggatgattggctgcgacctggggtccgacggacgcctcctccgcgggtatgaacagtatgcctacgatggcaaggattacctcgccctga

SEQ ID NO: 13310 - DNA, 201 bp, Homo sapiens
atcaaagagagatttgtcagctgcaaatttctagtttgacattggttttctctcagatctttgatgattatgttgcttctggctgctgtggctgacagggratagtcagttacattttaaccagttgcttcttagaggatctgtgtttctcctgtggcaaattttaagatatctgtttctctttaacatcttctgttccag

SEQ ID NO: 13311 - DNA, 201 bp, Homo sapiens
gtggaggaggggagaccaacccaccctcatgtccaccatgaccctcttccccacgctgatctgtgttccctccccaatcatctttcctgttccagagaggmggggctgagatgtctccatctttttctcaactttatgtgcactgagctgtaacttcttacttccctcttaaaattagaatctgagtaaacatttactttt

SEQ ID NO: 13312 - DNA, 201 bp, Homo sapiens
agataagaatacagctccttccttcaattgggggtggcagaggggtgaatcagtcagctacacataatgtgtgtggtgtttctacagatatctttaattaytctgctgagaactccacctcaaatgtacaaaaactctgtactcactggtaagcaggatcctttttaggaaagcaaaggactttgctgacttaagcaaaac

SEQ ID NO: 13313 - DNA, 201 bp, Homo sapiens
actttcattgtgctgaaagccaaagggaaacctctgacactgcccccatcctggccaaatcaaaaatcatagtgtgtcccagggtgggtcttgtgtaagayacttcaagtattgtggggatcacatcaccattacagagctgaaggatgtgggatggtgttggggctgtctattgtctctacgtaatccagcaacctgtcc

SEQ ID NO: 13314 - DNA, 201 bp, Homo sapiens
tggcagaggggtgaatcagtcagctacacataatgtgtgtggtgtttctacagatatctttaattactctgctgagaactccacctcaaatgtacaaaaastctgtactcactggtaagcaggatcctttttaggaaagcaaaggactttgctgacttaagcaaaacattttctctccaaatgaattatcctgattggata

SEQ ID NO: 13315 - DNA, 201 bp, Homo sapiens
aggcggtgtatggattggggaggcccagcgctggggattccccatctccgcagggtttctcttctccctctcccaacctgtgtcgggtccttcttcctggmtactcaccaggctgccccagttctcactcccattgagtgtcgggttcctagagaagccaatcaatgtagccgcggtcccggttctaaagttcccacgcac

SEQ ID NO: 13316 - DNA, 201 bp, Homo sapiens
tccatttccacctgccagcagaccctgtcgccacaaatccacttctttctctatcgacttgcctcttatgaatatttcacaaaaatgggctcataagttaygtagcctcctgtgactggcttccttcacttgtcttgttttcaagattcagcaatgttttagcatatgccagtgctttattcattttatgaccaaataata

SEQ ID NO: 13317 - DNA, 201 bp, Homo sapiens
atggattggggaggcccagcgctggggattccccatctccgcagggtttctcttctccctctcccaacctgtgtcgggtccttcttcctggatactcaccmggctgccccagttctcactcccattgagtgtcgggttcctagagaagccaatcaatgtagccgcggtcccggttctaaagttcccacgcacccaccggga

SEQ ID NO: 13318 - DNA, 201 bp, Homo sapiens
agaactggcggggagatatcagggaggaggggagatttctttgtgctatgtcaatgcatctagacagagctctcattctcccttgaacctcaactctatcygttcccagacacttgaaataaaacacagaccagaaatgtctatttaaaagctaaatatctatagtataaaatatgaagacagagtagaatggggtaatgc

SEQ ID NO: 13319 - DNA, 201 bp, Homo sapiens
ccgcagggtttctcttctccctctcccaacctgtgtcgggtccttcttcctggatactcaccaggctgccccagttctcactcccattgagtgtcgggttyctagagaagccaatcaatgtagccgcggtcccggttctaaagttcccacgcacccaccgggactccgattctccccagtcgccgaggatggtgtcatggc

SEQ ID NO: 13320 - DNA, 201 bp, Homo sapiens
ccattgtacctgaaaagttccttctctgttattgctttcaagatggtctgtttgtcattggtgtagactggttgattataacgtctctcagtgtggacttytaaaattcttgctgcttaaaatgtatcaagtttgttggatgagtaaaattatatttttcatcaaatttaggagatttgaagttattattcctccaaatag

SEQ ID NO: 13321 - DNA, 201 bp, Homo sapiens
gttctcactcccattgagtgtcgggttcctagagaagccaatcaatgtagccgcggtcccggttctaaagttcccacgcacccaccgggactccgattctycccagtcgccgaggatggtgtcatggcgccccgaaccctgcttctgctgctctcgggggccctggtcctgacccagacctgggcaggtgagtgcggggtc

SEQ ID NO: 13322 - DNA, 201 bp, Homo sapiens
tttctctctcctttctttgaggattcccaaaatgcatatgcttggtgttgtctcacagttttcttaagttctgttcatttttcttcataatttttttttayttctgcacctcaaactggataatttcaattgtcttacctttaagcttgccgattcttcattctgcatagtgaaagttgcttttgtaaaaaagtaaatagt

SEQ ID NO: 13323 - DNA, 201 bp, Homo sapiens
ttcaagccatgacttacactcagaaaaaataatgttcaccttaattatctccccaaccctgtttttcccagttccggccagtaccctccctcgactccatmaacatcagtacctgccagatgcccagcacccaccatgtgaggagtgaaaatgccccaggactaaaggacaagatgacgttccaccccagccatcccgccc

SEQ ID NO: 13324 - DNA, 201 bp, Homo sapiens
atgtcaatgcatctagacagagctctcattctcccttgaacctcaactctatccgttcccagacacttgaaataaaacacagaccagaaatgtctatttaraagctaaatatctatagtataaaatatgaagacagagtagaatggggtaatgcaggagagtgtgacagggcgaggggacctcaacgtgccaggaaagttg

SEQ ID NO: 13325 - DNA, 201 bp, Homo sapiens
tcctgtgcacaaatactcttgcagctttattcatgatacccccaaacaggaattaatacaactgtctttccgtaggtgagtgagatctgctggttgaaatmataactgagtcacacaagtgccctttctcaaggctaccatcctgcttctctgtgcagtaagggtcttatgcatatttcccattttctcacaaagaatatt

SEQ ID NO: 13326 - DNA, 201 bp, Homo sapiens
ccaccaacttcggccttccaaagtgctgggattacagacatgagccaccattcccggcccacaaatctttaaagtgtcatttttcaaaatgcaccttgtgygccattcctgactgattatttggaaatgaaagagaaaagaaaataccaaagttcatctcaaggatccttagcaataactacacacgttaaaacaaagcca

SEQ ID NO: 13327 - DNA, 201 bp, Homo sapiens
gacaccggccgggggcgcagatcactacccctctacatcccccacggaccgcccgggtctccccgagtctctgggtccgagatccacgccgaggcagcggvacctggagaccctttacccgggagaggcccaggagccgttacccggtttcattttcagccaaaatccccgcaggttggtcctggcgagggcggggctcgg

SEQ ID NO: 13328 - DNA, 201 bp, Homo sapiens
gccgaggcagcggaacctggagaccctttacccgggagaggcccaggagccgttacccggtttcattttcagccaaaatccccgcaggttggtcctggcgdgggcggggctcggtgggcggggctggccgcgggggcggggccagggtctcacacccatctagaggatgtctgtctgcgacgtggggtcggacgggcgcct

SEQ ID NO: 13329 - DNA, 201 bp, Homo sapiens
cagtgttttcagaacacatcatcaacatcaagtattacgcacttatttcaaaagtttaagccaggcgtggtggttcacgcctgtaatcccagcactttggkaggctgaggtgggtggaccacctgaggtcaggagttcaagaccagtctggctaacatggtaaaaccccattgtcgcaatcggttactatgggatataatg

SEQ ID NO: 13330 - DNA, 201 bp, Homo sapiens
cgggcgagggcgaggctcggtgggcggggctgaccgagggggtggggccaggttctcacaccctccagtggatgattggctgcgacctggggtccgacggwcgcctcctccgcgggtatgaacagtatgcctacgatggcaaggattacctcgccctgaacgaggacctgcgctcctggaccgcagcggacactgcggctc

SEQ ID NO: 13331 - DNA, 201 bp, Homo sapiens
cgtggagtggctccacagatacctggagaacgggaaggagatgctgcagcgcgcgggtaccaggggcagtggggcgcctccctgatctcctgtagacctcycagcctggcctagcacaaggagaggaggaaaatgggaccaacactagaatatcgccctccctctggtcctgagggagaggaatcctcctgggtttccaga

SEQ ID NO: 13332 - DNA, 201 bp, Homo sapiens
tgatgaatatttgctgttttgagctgctaagttttacataatttgttacacaatagtaaataactaatacattttcacaagagaggatgtattattacacrttaatttgcatttgctctaaatttatcatcatcatattactatttttgagacagggtcttgctctgtcacccaggctggagtgcagtggcatgatcacca

SEQ ID NO: 13333 - DNA, 201 bp, Homo sapiens
taactaatacattttcacaagagaggatgtattattacacgttaatttgcatttgctctaaatttatcatcatcatattactatttttgagacagggtctygctctgtcacccaggctggagtgcagtggcatgatcaccatgcactgcagtgtcgacctcctgggctcaagggatcctctgatctcagcctcttgagtag

SEQ ID NO: 13334 - DNA, 201 bp, Homo sapiens
cgggtgggtccgggcgagggcgaggctcggtgggcggggctgaccgagggggtggggccaggttctcacaccctccagtggatgattggctgcgacctggkgtccgacggacgcctcctccgcgggtatgaacagtatgcctacgatggcaaggattacctcgccctgaacgaggacctgcgctcctggaccgcagcggac

SEQ ID NO: 13335 - DNA, 201 bp, Homo sapiens
aactaatacattttcacaagagaggatgtattattacacgttaatttgcatttgctctaaatttatcatcatcatattactatttttgagacagggtcttrctctgtcacccaggctggagtgcagtggcatgatcaccatgcactgcagtgtcgacctcctgggctcaagggatcctctgatctcagcctcttgagtagc

SEQ ID NO: 13336 - DNA, 201 bp, Homo sapiens
gaaaataccaaagttcatctcaaggatccttagcaataactacacacgttaaaacaaagccacagccaattgtaaagagtcatgtgacagagaggaccagratctcatgaaaaatagccttggctagaaagaggtcatttgaccctgggctaattggcaactctctacattgtctggcatacagtgttcaatctgatgtgc

SEQ ID NO: 13337 - DNA, 201 bp, Homo sapiens
ctaaatttatcatcatcatattactatttttgagacagggtcttgctctgtcacccaggctggagtgcagtggcatgatcaccatgcactgcagtgtcgayctcctgggctcaagggatcctctgatctcagcctcttgagtagctgggactataggcatgaattaacatgcctggctaattttctaatttttttgtagag

SEQ ID NO: 13338 - DNA, 201 bp, Homo sapiens
ggggtttcaccatgttgcccaggctgatcttgaacttctggagtcaaatctgccttcctctgccttcaacagtgctaggattgcaggcgtgagccaccacmcctggtctaaattaactataagatattaaacatgtaacttagttttaaaaggaaaggagaatttccacggctgaagaggatgtattttattactattcac

SEQ ID NO: 13339 - DNA, 201 bp, Homo sapiens
gtttcctttagctctgtgaacatatttaagcagtcaattcaaagttgtttgtccagtaagtatgttcaatggcctttctcaggaacagtttctgtcaattsctcttttttcttgagaatgggtcttactgtctagtttaattgcatacctcatttttattttgaatactaacatgtggtgactttgaaaatcatgttttct

SEQ ID NO: 13340 - DNA, 201 bp, Homo sapiens
acctggtctaaattaactataagatattaaacatgtaacttagttttaaaaggaaaggagaatttccacggctgaagaggatgtattttattactattcayaatgatcactttacttgaacttcaatttccaactgtgtccaaattaaacacaaaaggaagatccagcccttcctgggctgattctatcatggctcccaac

SEQ ID NO: 13341 - DNA, 201 bp, Homo sapiens
attaaacatgtaacttagttttaaaaggaaaggagaatttccacggctgaagaggatgtattttattactattcacaatgatcactttacttgaacttcartttccaactgtgtccaaattaaacacaaaaggaagatccagcccttcctgggctgattctatcatggctcccaacaaccagctcctggtcattcaccttc

SEQ ID NO: 13342 - DNA, 201 bp, Homo sapiens
tctctactcttagaccctcagccagtatcactattggcattcctgagccactggctcagaatttcagtacattatctgcccgcgggacacacctcagaggkaaggggatgaagcgtggtccatgaccatggcaccccctggtcttatcaccacctgcacctcccaggggctgccagccacacagagtcatggacaggtctc

SEQ ID NO: 13343 - DNA, 201 bp, Homo sapiens
tcagccaaaaagaaataagaaaagaaaattcaatctttttatctgggctctctgtgtgttttggggcatgccctcaacactctgctgggcagtttacaatmctgctttggccttcatttcctacttgtgcagatattgaaagttagcaagaggtgtgaacacagggcattctcaggtgctttgtgagtctgtgcgacatac

SEQ ID NO: 13344 - DNA, 201 bp, Homo sapiens
ctgagtttatcctgcttggactgtcctaataaggagagtccttgaaaggactgggttcttcctgagcatagagattcacagtgtgagagggattcagcatraggggtttcctccactgtgggctttgaaaatgaaggggctgtgtaggaaagaacgctggtgggcaccatgcattaagtgcagccctccctgttctctaca

SEQ ID NO: 13345 - DNA, 201 bp, Homo sapiens
cagccagtatcactattggcattcctgagccactggctcagaatttcagtacattatctgcccgcgggacacacctcagaggaaaggggatgaagcgtggkccatgaccatggcaccccctggtcttatcaccacctgcacctcccaggggctgccagccacacagagtcatggacaggtctctacagacacaacttagtg

SEQ ID NO: 13346 - DNA, 201 bp, Homo sapiens
atgttatgtattttacatgacttttttctttgaaagctacattattaatattttatgacagtactgagttacatataccaaagattacaaattaaaatttmtgctttctttctctcttttgttcttacatatttctctgttcttgtagatattttgaaattgggtattatggagacagtgcaacagtttcatttatatgat

SEQ ID NO: 13347 - DNA, 201 bp, Homo sapiens
gggttcttcctgagcatagagattcacagtgtgagagggattcagcatgaggggtttcctccactgtgggctttgaaaatgaaggggctgtgtaggaaagracgctggtgggcaccatgcattaagtgcagccctccctgttctctacagtgacagccagtgaggaacagggacctcagtcttacaactgccagaaactgc

SEQ ID NO: 13348 - DNA, 201 bp, Homo sapiens
tattggcattcctgagccactggctcagaatttcagtacattatctgcccgcgggacacacctcagaggaaaggggatgaagcgtggtccatgaccatggmaccccctggtcttatcaccacctgcacctcccaggggctgccagccacacagagtcatggacaggtctctacagacacaacttagtgccagcttggatga

SEQ ID NO: 13349 - DNA, 201 bp, Homo sapiens
tcacagtgtgagagggattcagcatgaggggtttcctccactgtgggctttgaaaatgaaggggctgtgtaggaaagaacgctggtgggcaccatgcattragtgcagccctccctgttctctacagtgacagccagtgaggaacagggacctcagtcttacaactgccagaaactgcattctgccacctctgtataagcc

SEQ ID NO: 13350 - DNA, 201 bp, Homo sapiens
cacttctcatctccaatatctgggctctgtaggggaggaggtcctggtttcccaaagggggcaccctggcaaggagacatttaaatgagagtccatggaaytacacattatggctgcccccagggatgtttgaatagtatgtgtccagatacaagcaggtgagaagaggaggaggcagggctgctatcacacaaggagggc

SEQ ID NO: 13351 - DNA, 201 bp, Homo sapiens
tcatctccaatatctgggctctgtaggggaggaggtcctggtttcccaaagggggcaccctggcaaggagacatttaaatgagagtccatggaaatacacyttatggctgcccccagggatgtttgaatagtatgtgtccagatacaagcaggtgagaagaggaggaggcagggctgctatcacacaaggagggcaggaga

SEQ ID NO: 13352 - DNA, 201 bp, Homo sapiens
ctccctgttcgtgtggcctggacttaatgactcacttctaactgatagagtaatgctgacataatagtttgtgattctgggtgtagaacataagactcacygaagtttctactttggttctttctttctctggaatcatgagccctgggggaagctggctgttgtgtcataaggaggcctgtggtccatgtgactaggaag

SEQ ID NO: 13353 - DNA, 201 bp, Homo sapiens
agggggcaccctggcaaggagacatttaaatgagagtccatggaaatacacattatggctgcccccagggatgtttgaatagtatgtgtccagatacaagmaggtgagaagaggaggaggcagggctgctatcacacaaggagggcaggagatgtgtgtgtggaaataagagatccacttggagaccttatggttcccctt

SEQ ID NO: 13354 - DNA, 201 bp, Homo sapiens
ccccttgtcctgttgtaagtgtgagcagaatcatccagcaacccagcctgagagggtttcatattcaagagcccagaaccctcaggaaggaaggattgagygatactcataggtaatgtcccaaggctgtgctcctgtgctctgacatcctcagcaggattggtgcaaagccctgcttcccatgggctgttcccagccagt

SEQ ID NO: 13355 - DNA, 201 bp, Homo sapiens
ctgttgtaagtgtgagcagaatcatccagcaacccagcctgagagggtttcatattcaagagcccagaaccctcaggaaggaaggattgagcgatactcayaggtaatgtcccaaggctgtgctcctgtgctctgacatcctcagcaggattggtgcaaagccctgcttcccatgggctgttcccagccagtgactggtca

SEQ ID NO: 13356 - DNA, 201 bp, Homo sapiens
tcccaaggctgtgctcctgtgctctgacatcctcagcaggattggtgcaaagccctgcttcccatgggctgttcccagccagtgactggtcacagcaggcdttaaggcaagccattcctgggagacacgggactcctctgatggccaactgtagctggaaggctcctccacggccttgctcaactctccttagattgcctg

SEQ ID NO: 13357 - DNA, 201 bp, Homo sapiens
tgcaaagccctgcttcccatgggctgttcccagccagtgactggtcacagcaggcgttaaggcaagccattcctgggagacacgggactcctctgatggcyaactgtagctggaaggctcctccacggccttgctcaactctccttagattgcctgtgctctaggatgcgtcgaacaaactttctctccttctgtccagca

SEQ ID NO: 13358 - DNA, 201 bp, Homo sapiens
gcaggaacacacccttaagacacagatcgctcatgctattgtttgtggcttaagaatgcctttaagcggttttccgccctgggcaggccaggtgttccttkccctcattcttgtaaacccgcaaccttccagcttggacattagggccattatgaacatgttacggtgctgcagagattttgtttatggccagtcttgggg

SEQ ID NO: 13359 - DNA, 201 bp, Homo sapiens
aagcctgaaggaggattcaaaatgaaaacacaggtttaggaagaccggaacagagattccatccacatcatgcccagatttctgattaagaaactataaasaacaaatgagtgttatttggccaggcgtggtagtgcacacctgtatcctaacatttgaggagctgacacaggaggaacacttgcagccaggactttgaga

SEQ ID NO: 13360 - DNA, 201 bp, Homo sapiens
acagtactgagttacatataccaaagattacaaattaaaatttatgctttctttctctcttttgttcttacatatttctctgttcttgtagatattttgarattgggtattatggagacagtgcaacagtttcatttatatgataatgttttgttttacctttattcatcaaagagagatttgtcagctgcaaatttctag

SEQ ID NO: 13361 - DNA, 201 bp, Homo sapiens
gtcttataaaattcatacacagactcaaaagactcctggaatgaactgatgaattgatacgcacactagttacataaaataaaatcttttttaactttttyagtgttttacattttataattttctgtgatgcaatttaatacactcataattcattcattcagccaagaaaaaataatttagtccctacaatgaaccagg

SEQ ID NO: 13362 - DNA, 201 bp, Homo sapiens
ttacaaattaaaatttatgctttctttctctcttttgttcttacatatttctctgttcttgtagatattttgaaattgggtattatggagacagtgcaacrgtttcatttatatgataatgttttgttttacctttattcatcaaagagagatttgtcagctgcaaatttctagtttgacattggttttctctcagatctt

SEQ ID NO: 13363 - DNA, 201 bp, Homo sapiens
gtgttttaggtggagaaatgacacactctgactcatagtagcaggaccactatagagagaacactcatgtagcaggtcatggaacagtgctagagccacarttcaggagtgagagggtggtggggattaaggggagaagagggcctgagggatgagagggacggagggaagggctggaggagcaggaggtgaggaaaagga

SEQ ID NO: 13364 - DNA, 201 bp, Homo sapiens
ttaaggggagaagagggcctgagggatgagagggacggagggaagggctggaggagcaggaggtgaggaaaaggagcagaggaaagaattccaaagcagcrgaactcttaggtttaaacacattgttttatagattttaatacatccatctacagagcctcgctgggtgttctttgcagttggcctttaatatcttatgtg

SEQ ID NO: 13365 - DNA, 201 bp, Homo sapiens
gggaagggctggaggagcaggaggtgaggaaaaggagcagaggaaagaattccaaagcagcagaactcttaggtttaaacacattgttttatagattttawtacatccatctacagagcctcgctgggtgttctttgcagttggcctttaatatcttatgtgggtctgcctagaaactaattgttttttatgttaatcagg

SEQ ID NO: 13366 - DNA, 201 bp, Homo sapiens
ggaaacttagggctacggaatgaaggtaaatttaaaataaaacaagcgggagtcacagatacactgtctgggaaagtgaaacttaagagctttgtgagtcstgttgtaatgcttttagatgcatttatataccaacaggccaaagtcacattttttaccgattagattcctgatcattcaggggttaccaaggttatgcta

SEQ ID NO: 13367 - DNA, 201 bp, Homo sapiens
ataaaacaagcgggagtcacagatacactgtctgggaaagtgaaacttaagagctttgtgagtcctgttgtaatgcttttagatgcatttatataccaacrggccaaagtcacattttttaccgattagattcctgatcattcaggggttaccaaggttatgctacccactatagttaataaacaaaaagcaaactggtct

SEQ ID NO: 13368 - DNA, 201 bp, Homo sapiens
ccatgggctgttcccagccagtgactggtcacagcaggcgttaaggcaagccattcctgggagacacgggactcctctgatggccaactgtagctggaagdctcctccacggccttgctcaactctccttagattgcctgtgctctaggatgcgtcgaacaaactttctctccttctgtccagcacttggggtcacacttg

SEQ ID NO: 13369 - DNA, 201 bp, Homo sapiens
ccctctgcattgttggccgtttgaggctgtaaagtgtgttttcttgtgtaaagaagtgtgactcggcagtccaaattggtgcaacctcttcttttctggtycttgtatagcccttgaagcattgacatctacccctggttgagcatagcccaatccagagtcagtgattttcctgtcaagatccattggcagctcctttgg

SEQ ID NO: 13370 - DNA, 201 bp, Homo sapiens
ctgagacagaacgcttggcacaagagtagcggggtcagggcgaagtcccagggcctcaagcgtggctctcagggtctcaggccccacaggcggtgtatggrttggggaggccccgcgttggggattctctcctccttctcctaacctgtgtcgggtccttcttcctggatactcaccgggcggccccagttctcactccca

SEQ ID NO: 13371 - DNA, 201 bp, Homo sapiens
ttaaaaaacacagtgaaagatgttaaactttcataggatgcccactgaatagccagttattgaaaaatcttgttcctagattggagtaaacaatttctgcytaccctagccaaacaaattattgtcatgatgctaagctagtgtatagacagaggtgtgagattcacatttttctaactgcaaagcaccctgattaggcaa

SEQ ID NO: 13372 - DNA, 201 bp, Homo sapiens
aaggcacaggtaaccctccaccccatctccaactatgaggccacgctgaggtgctgggccctgggcttctaccctctggagatcacactgacccaggagcsggatggggaggaccaaattcaggatgcagagtttgtggagaccagacttgcagggtacagaaccttccagaagtgggcagctgcagtggtgtcttctgga

SEQ ID NO: 13373 - DNA, 201 bp, Homo sapiens
gcaccctgattaggcaaatatttttgtagatgcttgagtaagaaaattggcattttgggcattcttaaaccgaattagaaacttctgaagagaaacaaacrtagttatgattgtaaaggcattattgtatggcaccaaagtcttgggacactttaatttagctactgtattttctcaactctgttgcaacttatcaaagag

SEQ ID NO: 13374 - DNA, 201 bp, Homo sapiens
agccagcccccattctcaaggtatccaggatccactcagccaagagtcctttcctcagtattctaaagacactctaatcactcaagagattctaaggtttwtaggagaaaccagggacaaaactaaatgtttttgtgataactcatattacccccttttctttgaccacatatttttcatacgaaaaggattataacagta

SEQ ID NO: 13375 - DNA, 201 bp, Homo sapiens
gattaggcaaatatttttgtagatgcttgagtaagaaaattggcattttgggcattcttaaaccgaattagaaacttctgaagagaaacaaacgtagttaygattgtaaaggcattattgtatggcaccaaagtcttgggacactttaatttagctactgtattttctcaactctgttgcaacttatcaaagagaatatta

SEQ ID NO: 13376 - DNA, 201 bp, Homo sapiens
gtcctcctgggaccagacaataagaagctaaagcctcttccaaaagccatgtgagagattcttgtgtcttgtgaatccctggccccatttgagccctcagrtgattcagccctggaagacaactagactgcaacgttgtgagaggccctgagccagaagcattcagagaaacttctcctggattcctgaccatggataact

SEQ ID NO: 13377 - DNA, 201 bp, Homo sapiens
ttttgcagatatatttaaagtccccagtcagttgactttaagatgaggattatcctgcttagacggtcctaatcaggtaagctctgaaaaggactgggttyttcctgagaatagagactcacagtgtgagagggattcagcgtgaggggcttcctccactttgggctttgaaaatggagggatcatggggaaagaacactg

SEQ ID NO: 13378 - DNA, 201 bp, Homo sapiens
aatacaactacatgacattaatgtattaaaatataataaaatcataacaaaataacaaaaataatatggcacagctgcaaacacctcatatatactaacamttttcatccacccaaccacaagaaataaatgttgttacattccctatttcatagatgagaaagctgagccagcaagagaaaaagtgctggtgagacctgg

SEQ ID NO: 13379 - DNA, 201 bp, Homo sapiens
aggaattagaagccctccccactgtctactctgatagcccgaaggaaacagggaccttaatcctacaattgccagaaaccgaattctgccaacaaactctrcacaagcttgggggagaaccccaatcttaagatgaggatacagctttgcgaaactctgaacaaagagtctatcacattaggcctggatttctgatgaagg

SEQ ID NO: 13380 - DNA, 201 bp, Homo sapiens
ttttaagtgaagaaatgaaacaatctgactcacattagcaggattgctgacctttgtggggagaacagtcatgggcagcaggcaagggacagagctagggmcacaattcagtagtgacagagtagtagagactaaggggagaggagggcctgaaggatgacagggacagagagaagggctggagaagcaggaggtgaggta

SEQ ID NO: 13381 - DNA, 201 bp, Homo sapiens
acagtcatgggcagcaggcaagggacagagctagggacacaattcagtagtgacagagtagtagagactaaggggagaggagggcctgaaggatgacaggracagagagaagggctggagaagcaggaggtgaggtaaaggaacagagagaaagaattctaaagcaatggaattctcagacttaaatacagtgttttatag

SEQ ID NO: 13382 - DNA, 201 bp, Homo sapiens
ctcgtcctaaaccaggaactgctctcttggaccgcagcggaaaaggcggctcagatgttttggaggaggaacatgcagagctgctcaaaacctacctgccsggaaggtgggcggagtggctcagcaaaggccttaagaatgagaaggagaggctgcaatgcgcaggtaccagaggccacgggtcgcctccctgatctcctg

SEQ ID NO: 13383 - DNA, 201 bp, Homo sapiens
ctcccctgacctctatagtatagtcttaagactatactaaacatactggatatccaataggatattaaatcagctcatatcattgacaacttcctgttgayctggctggatgagcagcaggtagaaagtgcactgtagtgcttggcaaaacacgggcactccagaaggtgaagataaaccttacaaagcttccagagtggc

SEQ ID NO: 13384 - DNA, 201 bp, Homo sapiens
tcagctcatatcattgacaacttcctgttgacctggctggatgagcagcaggtagaaagtgcactgtagtgcttggcaaaacacgggcactccagaaggtraagataaaccttacaaagcttccagagtggccactcggccaggtgcagtggctcacgcctgtaatcccagcactttggaaggctgaggtggatggatcac

SEQ ID NO: 13385 - DNA, 201 bp, Homo sapiens
agtcttccctgcccaccatccccatcatgggtatcgttgctggcctggttgtccttgcagctgtagtcactggagctgcggtcgctgctgtgctgtggagraagaagagctcaggtaaggaaggggtgacaagtggggtctgagttttcttgtcccactgggggtttcaagccccaggtagaagtgtgccctgcctggtta

SEQ ID NO: 13386 - DNA, 201 bp, Homo sapiens
gggaagcaccatccacactcatgggcctacccagcctgggccctgtgtgccagcaccttctcttttgtaaagcacctgtgacaatgaaggacagatttatyaccttgatgattgtagtgatggggacctgatcccagtaatcacaggtcaggggaaggtccctggctaaggacagaccttaggagggcagttggtcgagga

SEQ ID NO: 13387 - DNA, 201 bp, Homo sapiens
cctgggccctgtgtgccagcaccttctcttttgtaaagcacctgtgacaatgaaggacagatttattaccttgatgattgtagtgatggggacctgatccyagtaatcacaggtcaggggaaggtccctggctaaggacagaccttaggagggcagttggtcgaggacccacatctgctttccttgtttttcctgatcccg

SEQ ID NO: 13388 - DNA, 201 bp, Homo sapiens
caaaatccccgcgggtgggtccgggcgagggcgaggctcggtgggcggggctgaccgagggggtggggccaggttctcacaccctccagtggatgattggytgcgacctggggtccgacggacgcctcctccgcgggtatgaacagtatgcctacgatggcaaggattacctcgccctgaacgaggacctgcgctcctgga

SEQ ID NO: 13389 - DNA, 201 bp, Homo sapiens
gcaccttctcttttgtaaagcacctgtgacaatgaaggacagatttattaccttgatgattgtagtgatggggacctgatcccagtaatcacaggtcaggrgaaggtccctggctaaggacagaccttaggagggcagttggtcgaggacccacatctgctttccttgtttttcctgatcccgccctgagtctgcagtcac

SEQ ID NO: 13390 - DNA, 201 bp, Homo sapiens
aagaatcagctgaaacttgaaagtggttgctccctagaaaggcagaaacagagaagagaggactctccctagaaaggcagagaagactcgtttttctcagraagtcctgcgcaaatatttactctttcaattatgtgcaattgtaacttcgaataaaataaaaacaaaagcttcagttaacatgcaagtttatgcctaatg

SEQ ID NO: 13391 - DNA, 201 bp, Homo sapiens
tgaaacttgaaagtggttgctccctagaaaggcagaaacagagaagagaggactctccctagaaaggcagagaagactcgtttttctcaggaagtcctgcrcaaatatttactctttcaattatgtgcaattgtaacttcgaataaaataaaaacaaaagcttcagttaacatgcaagtttatgcctaatgacaactttgt

SEQ ID NO: 13392 - DNA, 201 bp, Homo sapiens
actccagcatctttactggttgtcctgtgagcctaggcagggaggggaccaggacctgactagggtccctaatactcttgcttccaggcaagtcctgcatrcactcctgctgcaccaagggctcccatccctgccttggtctgtttcataggtgctcccctaactctctgccaccactgccttacctgggtggagctgagg

SEQ ID NO: 13393 - DNA, 201 bp, Homo sapiens
gaagaggagacacggaacaccaaggcccacgcacagactgacagaatgaacctgcagaccctgcgcggctactacaaccagagcgaggccagtgagtaacyccggcccagggcgcagatcacgaccccccacctccatgccccacggacgccccgggtactcccgagtctccgggtctgggatccaccccgaggccgcggg

SEQ ID NO: 13394 - DNA, 201 bp, Homo sapiens
cggaacaccaaggcccacgcacagactgacagaatgaacctgcagaccctgcgcggctactacaaccagagcgaggccagtgagtaaccccggcccagggmgcagatcacgaccccccacctccatgccccacggacgccccgggtactcccgagtctccgggtctgggatccaccccgaggccgcgggacccgcccagac

SEQ ID NO: 13395 - DNA, 201 bp, Homo sapiens
cctgcagaccctgcgcggctactacaaccagagcgaggccagtgagtaaccccggcccagggcgcagatcacgaccccccacctccatgccccacggacgscccgggtactcccgagtctccgggtctgggatccaccccgaggccgcgggacccgcccagaccctctacctgggagaaccccaaggcgcctttaccaaaa

SEQ ID NO: 13396 - DNA, 201 bp, Homo sapiens
cagatgttttggaggaggaacatgcagagctgctcaaaacctacctgccgggaaggtgggcggagtggctcagcaaaggccttaagaatgagaaggagagbctgcaatgcgcaggtaccagaggccacgggtcgcctccctgatctcctgcagatatccctgagccaccttccaaaagaaggggaggaaaatgggaccaac

SEQ ID NO: 13397 - DNA, 201 bp, Homo sapiens
aaaacctacctgccgggaaggtgggcggagtggctcagcaaaggccttaagaatgagaaggagaggctgcaatgcgcaggtaccagaggccacgggtcgcytccctgatctcctgcagatatccctgagccaccttccaaaagaaggggaggaaaatgggaccaacgctaaaatatccctctccctcttgtcctgaggcag

SEQ ID NO: 13398 - DNA, 201 bp, Homo sapiens
ccatagaccagtgtcaccaataaacataaatgaaaacatccttaacaaacattggcagacaatagaaagccacgtaaaaaaggattacattccatgaccartgggattcatcccaggaatatatggctggattaacaattagaaatcaattaatggaatgcactgtagtaagggaataaaagacataattatctcaaaaga

SEQ ID NO: 13399 - DNA, 201 bp, Homo sapiens
aatccctggaatactgatacgcggtcccctttgaccccccagcagccttgggcaccaggaattttcctctcaggccttgttctctgcctcatactcaatgygtgtgggggtctgattccagctcttctgagtccctcggcctccactcaggtcaggaccagaaatctctgtttccgcctcagacactagaactttccaagg

SEQ ID NO: 13400 - DNA, 201 bp, Homo sapiens
cggtcccctttgaccccccagcagccttgggcaccaggaattttcctctcaggccttgttctctgcctcatactcaatgtgtgtgggggtctgattccagstcttctgagtccctcggcctccactcaggtcaggaccagaaatctctgtttccgcctcagacactagaactttccaaggaataagagattatcccaggtg

SEQ ID NO: 13401 - DNA, 201 bp, Homo sapiens
ggcctccactcaggtcaggaccagaaatctctgtttccgcctcagacactagaactttccaaggaataagagattatcccaggtgcctgtgtccagaatgytgtctgggttctgtgctcccttccccaccccagatgtcccatccattctcaggatggtcacatgggtgctgtgtctcatgaggaatgcaaagtgcctgaa

SEQ ID NO: 13402 - DNA, 201 bp, Homo sapiens
tggttgtcctgtgagcctaggcagggaggggaccaggacctgactagggtccctaatactcttgcttccaggcaagtcctgcatgcactcctgctgcaccragggctcccatccctgccttggtctgtttcataggtgctcccctaactctctgccaccactgccttacctgggtggagctgaggccgccctgaccaagaa

SEQ ID NO: 13403 - DNA, 201 bp, Homo sapiens
ttccgcctcagacactagaactttccaaggaataagagattatcccaggtgcctgtgtccagaatgttgtctgggttctgtgctcccttccccaccccagdtgtcccatccattctcaggatggtcacatgggtgctgtgtctcatgaggaatgcaaagtgcctgaattttctacctcttgccctcagatcccctgaaggc

SEQ ID NO: 13404 - DNA, 201 bp, Homo sapiens
tcagacactagaactttccaaggaataagagattatcccaggtgcctgtgtccagaatgttgtctgggttctgtgctcccttccccaccccagatgtcccdtccattctcaggatggtcacatgggtgctgtgtctcatgaggaatgcaaagtgcctgaattttctacctcttgccctcagatcccctgaaggcacaggta

SEQ ID NO: 13405 - DNA, 201 bp, Homo sapiens
ttctcaggatggtcacatgggtgctgtgtctcatgaggaatgcaaagtgcctgaattttctacctcttgccctcagatcccctgaaggcacaggtaacccwccaccccatctccaactatgaggccacgctgaggtgctgggccctgggcttctaccctctggagatcacactgacccaggagcgggatggggaggaccaa

SEQ ID NO: 13406 - DNA, 201 bp, Homo sapiens
cttgccctcagatcccctgaaggcacaggtaaccctccaccccatctccaactatgaggccacgctgaggtgctgggccctgggcttctaccctctggagrtcacactgacccaggagcgggatggggaggaccaaattcaggatgcagagtttgtggagaccagacttgcagggtacagaaccttccagaagtgggcagc

SEQ ID NO: 13407 - DNA, 201 bp, Homo sapiens
gcctgagcccctcacactaagatggggtaaggagacgaatgaggggtcatgtctcttctcaggcaaagcagaagtccttctggagcctttaagcagggtcrgggctgaggcctgggggtcagggcccctcacgttcacctcctttcttagagctgtcttcccagcccatcatccccgttgtgggcatcattgctggcctgg

SEQ ID NO: 13408 - DNA, 201 bp, Homo sapiens
ggatggtggtcatggcgccccgaaccctcttcctgctgctctcgggggccctgaccctgaccgagacctgggcgggtgagtgcggggtcaggagggaaacrgcccctgcgcggaggagggaggggccggcccggcgggggcgcaggactcggcagccgcgccgggaggagggtcgggcgggtctcaacccctcctcgcccc

SEQ ID NO: 13409 - DNA, 201 bp, Homo sapiens
tttagagaagccaatcagcgtcgccgcggtcctggttctaaagtcctcgctcacccacccggactcattctccccagacgccaaggatggtggtcatggcrccccgaaccctcttcctgctgctctcgggggccctgaccctgaccgagacctgggcgggtgagtgcggggtcaggagggaaacggcccctgcgcggagga

SEQ ID NO: 13410 - DNA, 201 bp, Homo sapiens
catgcactcaggcacaacttttccagatttaagggggaaaaaaaaccctgtctttacacctacaatcccagggcgagctcactctctggcaacaagctccstggggtgatttttcttctagaagagtacaggaggacaggcaaggagtgggaggcagggagtccagttcagggacagggattccgggatgaaaagtgaagg

SEQ ID NO: 13411 - DNA, 201 bp, Homo sapiens
tgtgagtcctgttgtaatgcttttagatgcatttatataccaacaggccaaagtcacattttttaccgattagattcctgatcattcaggggttaccaagrttatgctacccactatagttaataaacaaaaagcaaactggtctctattctatctcatgcactcaggcacaacttttccagatttaagggggaaaaaaaa

SEQ ID NO: 13412 - DNA, 201 bp, Homo sapiens
cctgaaggcacaggtaaccctccaccccatctccaactatgaggccacgctgaggtgctgggccctgggcttctaccctctggagatcacactgacccagragcgggatggggaggaccaaattcaggatgcagagtttgtggagaccagacttgcagggtacagaaccttccagaagtgggcagctgcagtggtgtcttc

SEQ ID NO: 13413 - DNA, 201 bp, Homo sapiens
gggctacggaatgaaggtaaatttaaaataaaacaagcgggagtcacagatacactgtctgggaaagtgaaacttaagagctttgtgagtcctgttgtaakgcttttagatgcatttatataccaacaggccaaagtcacattttttaccgattagattcctgatcattcaggggttaccaaggttatgctacccactata

SEQ ID NO: 13414 - DNA, 201 bp, Homo sapiens
tcatccccgttgtgggcatcattgctggcctggttcttctagttgctgtaatcactgtagctgtggtcgctgctgtgatgtggaggaataagatcccaggyaggaaaggggtgagctctgagtttccttcttccattggtggatttcaagccccaggtaggagtaggctcatatcttgcctagttgtgaggcaccatctcc

SEQ ID NO: 13415 - DNA, 201 bp, Homo sapiens
gtctgcagtcacacatttctggaaacttctcgagggtccaagactaggaggttcctctaggacctcatggccctgccacctttctggcctctcacaggacrttttcttcccacagattgaaaaggagggagctactctcaggctgcaagtaagtatgaaggaggctgatccctgagatccttgggatcttgtgtttgggag

SEQ ID NO: 13416 - DNA, 201 bp, Homo sapiens
tggtactttgtcttgaggagatgtcctggactcacacggaaacttagggctacggaatgaaggtaaatttaaaataaaacaagcgggagtcacagatacaytgtctgggaaagtgaaacttaagagctttgtgagtcctgttgtaatgcttttagatgcatttatataccaacaggccaaagtcacattttttaccgatta

SEQ ID NO: 13417 - DNA, 201 bp, Homo sapiens
ggtcgctgctgtgatgtggaggaataagatcccaggtaggaaaggggtgagctctgagtttccttcttccattggtggatttcaagccccaggtaggagtwggctcatatcttgcctagttgtgaggcaccatctccacacacatttaccctgttcagaggccctgtctatcaacacttactcttttgtaaagcacctgtg

SEQ ID NO: 13418 - DNA, 201 bp, Homo sapiens
gatgagagggacggagggaagggctggaggagcaggaggtgaggaaaaggagcagaggaaagaattccaaagcagcagaactcttaggtttaaacacattrttttatagattttaatacatccatctacagagcctcgctgggtgttctttgcagttggcctttaatatcttatgtgggtctgcctagaaactaattgttt

SEQ ID NO: 13419 - DNA, 201 bp, Homo sapiens
gtgatatggacaatagagtccaggctgataaggtctcacatggagatgaggaacttattgggacctagaggaaaggtcacttttgttatgcattggcaaakaacttggaggcattgttccccctccctagggatctgtagaactttgaacttgagagtgatgtataagggtatctggtggaagaaatttctaagcagcata

SEQ ID NO: 13420 - DNA, 201 bp, Homo sapiens
tgccctctctcgggagtcaatgaattgttgccctattagtttccaaaagagctagttgttaaaagagtctcgcaccttcctactccctctgttcctctctkaccacgtgacttctgcacataccagctcccctttgccttctgccatgagtggaagcagcctgaggccctcgctaaatgctcaaacatttccagacatcag

SEQ ID NO: 13421 - DNA, 201 bp, Homo sapiens
gttccaagtggctgtgtgacccacaaagtcataaattgcacaggcccaacagcattcatcaacaggtgaaaatggtccacctgggttgagcttgaatcccwtgttgacacccacagaaaacacccaagtgtgatgtggcactgaacaaccaaacagacaaatggcagttagccagccttcaccatgggtcagcccaggcct

SEQ ID NO: 13422 - DNA, 201 bp, Homo sapiens
gaaaatgggaccaacactagaatatcgccctccctctggtcctgagggagaggaatcctcctgggtttccagatcctgtaccagagagtgattctgagggyccgtcctgctctctgggacaattaagggatgaagtctctgagggagtggaggggaagacaatccctggaagactgatcaggggttccctttgaccccaca

SEQ ID NO: 13423 - DNA, 201 bp, Homo sapiens
ggtcggtggtgagggctgggggtcagagaccctcaccttcacctcctttcccagagcagtcttccctgcccaccatccccatcatgggtatcgttgctggyctggttgtccttgcagctgtagtcactggagctgcggtcgctgctgtgctgtggagaaagaagagctcaggtaaggaaggggtgacaagtggggtctgag

SEQ ID NO: 13424 - DNA, 201 bp, Homo sapiens
gctgtgctgtggagaaagaagagctcaggtaaggaaggggtgacaagtggggtctgagttttcttgtcccactgggggtttcaagccccaggtagaagtgygccctgcctggttactgggaagcaccatccacactcatgggcctacccagcctgggccctgtgtgccagcaccttctcttttgtaaagcacctgtgacaa

SEQ ID NO: 13425 - DNA, 201 bp, Homo sapiens
aacaaaataacaaaaataatatggcacagctgcaaacacctcatatatactaacacttttcatccacccaaccacaagaaataaatgttgttacattcccyatttcatagatgagaaagctgagccagcaagagaaaaagtgctggtgagacctgggcagggcgttcaatccaggccgcctggctgcagagtgtaggtgcc

SEQ ID NO: 13426 - DNA, 201 bp, Homo sapiens
tcacaggtcaggggaaggtccctggctaaggacagaccttaggagggcagttggtcgaggacccacatctgctttccttgtttttcctgatcccgccctgrgtctgcagtcacacatttctggaaacttctcgagggtccaagactaggaggttcctctaggacctcatggccctgccacctttctggcctctcacaggac

SEQ ID NO: 13427 - DNA, 201 bp, Homo sapiens; identical to SEQ ID NO: 2312

SEQ ID NO: 13428 - DNA, 201 bp, Homo sapiens; identical to SEQ ID NO: 2313

SEQ ID NO: 13429 - DNA, 201 bp, Homo sapiens
gttcacctcctttcttagagctgtcttcccagcccatcatccccgttgtgggcatcattgctggcctggttcttctagttgctgtaatcactgtagctgtrgtcgctgctgtgatgtggaggaataagatcccaggtaggaaaggggtgagctctgagtttccttcttccattggtggatttcaagccccaggtaggagta

SEQ ID NO: 13430 - DNA, 201 bp, Homo sapiens
tctcaaatttgtggtgcactgagctataacttacttctgtattaaaattagaatctgagtataaatttactttttcaaattatttccaagagagattgatdggttaattaaaggagaagattcctgaaatttgagagacaaaataaatggaagacatgagaactttccacagtacacgtgtttcttgtgctgatttgttgc

SEQ ID NO: 13431 - DNA, 201 bp, Homo sapiens
gtggttcacgcctgtaatcccagcactttgggaggctgaggtgggtggaccacctgaggtcaggagttcaagaccagtctggctaacatggtaaaaccccrttgtcgcaatcggttactatgggatataatgaagggggatgaacacagaaataaagacaaagacaaaaagatctgttctaaaagaaggggtcgggggctt

SEQ ID NO: 13432 - DNA, 201 bp, Homo sapiens
tggatttcaagccccaggtaggagtaggctcatatcttgcctagttgtgaggcaccatctccacacacatttaccctgttcagaggccctgtctatcaacvcttactcttttgtaaagcacctgtgaaaatgaaggacaaatttatcaccttgattgtggtcatgggaacctgactcccagcagtcacaggtcaggggaag

SEQ ID NO: 13433 - DNA, 201 bp, Homo sapiens
aaaatggaatgcttgtgcactgctgctgagagtgaacaacagtgcagccatcatggaaacaggatgacgctttctcaagaaggtaaacatagaatttccayatgaagcaacaattccacttttgggtgtataccccccaaaaattgaaagcaggtatgcacacagataattgtacagtcatgctcatagcagtgctattcc

SEQ ID NO: 13434 - DNA, 201 bp, Homo sapiens
gctcagctgggtcatctttgctgctccattgtccttggcccttcagtagaaccttgtcccaccaggacctgtgatcacatagacttggatatcacctaggrtggtccctacacgtagaagttcctgtgttatcagaagaaaaattttcagacccctacacctcttcccctccttccaggtctctttcaattgtattttcca

SEQ ID NO: 13435 - DNA, 201 bp, Homo sapiens
tcctaattccttaaacagattttttcaaagtaaaatatgcttggtttttataaaaatgaaagagaaaagaataccaaagttcattgcaagcatccttaacragaactacttacattggaacaaaaccacacagaattgtaaggagccatgtgacagagaggaccacgaggccatgaaaatggctttggctacaaataggtc

SEQ ID NO: 13436 - DNA, 201 bp, Homo sapiens
gagtaggctcatatcttgcctagttgtgaggcaccatctccacacacatttaccctgttcagaggccctgtctatcaacacttactcttttgtaaagcacytgtgaaaatgaaggacaaatttatcaccttgattgtggtcatgggaacctgactcccagcagtcacaggtcaggggaaggtccctgctgaggacagacct

SEQ ID NO: 13437 - DNA, 201 bp, Homo sapiens
atctttgctgctccattgtccttggcccttcagtagaaccttgtcccaccaggacctgtgatcacatagacttggatatcacctagggtggtccctacacbtagaagttcctgtgttatcagaagaaaaattttcagacccctacacctcttcccctccttccaggtctctttcaattgtattttccatcttttttttttt

SEQ ID NO: 13438 - DNA, 201 bp, Homo sapiens
aggccctgtctatcaacacttactcttttgtaaagcacctgtgaaaatgaaggacaaatttatcaccttgattgtggtcatgggaacctgactcccagcartcacaggtcaggggaaggtccctgctgaggacagacctcaggaggacaactggtccagcctcaacacatcctcttcccttgggttttctgatcctgacct

SEQ ID NO: 13439 - DNA, 201 bp, Homo sapiens
aggacaaatttatcaccttgattgtggtcatgggaacctgactcccagcagtcacaggtcaggggaaggtccctgctgaggacagacctcaggaggacaaytggtccagcctcaacacatcctcttcccttgggttttctgatcctgacctgggtctgtagtcacagttctggaaacttctctaggatctcatgccctgcc

SEQ ID NO: 13440 - DNA, 201 bp, Homo sapiens
aggacagacctcaggaggacaactggtccagcctcaacacatcctcttcccttgggttttctgatcctgacctgggtctgtagtcacagttctggaaactyctctaggatctcatgccctgcctcctccctggcctctcacagtttgttttctttccacagatggaaaaggaggcagttatgctcaggcttcatgtaagtg

SEQ ID NO: 13441 - DNA, 201 bp, Homo sapiens
acagacctcaggaggacaactggtccagcctcaacacatcctcttcccttgggttttctgatcctgacctgggtctgtagtcacagttctggaaacttctytaggatctcatgccctgcctcctccctggcctctcacagtttgttttctttccacagatggaaaaggaggcagttatgctcaggcttcatgtaagtgtgg

SEQ ID NO: 13442 - DNA, 201 bp, Homo sapiens
gatctcatgccctgcctcctccctggcctctcacagtttgttttctttccacagatggaaaaggaggcagttatgctcaggcttcatgtaagtgtggtagkggtgggaagagtgatccctgagatccttgggatagtgtagacaggagcccatgggggagctcagccaccccaaaattcctcctttagtcacatcacctgt

SEQ ID NO: 13443 - DNA, 201 bp, Homo sapiens
catttcacccaatttagtggcatgttctttaccctttgcctttttgagcttggcaatgcaaaccacatacttgagacccaggacactgtctccccagtgayggcggatctcatcgtatctgtcattgtaattggtcctgagaacttccaccagcttagccaaagcacctttgtcttccgagttaacctgtgtgaaggtgac

SEQ ID NO: 13444 - DNA, 201 bp, Homo sapiens
tagtggcatgttctttaccctttgcctttttgagcttggcaatgcaaaccacatacttgagacccaggacactgtctccccagtgatggcggatctcatcvtatctgtcattgtaattggtcctgagaacttccaccagcttagccaaagcacctttgtcttccgagttaacctgtgtgaaggtgacagtggtgcaggtct

SEQ ID NO: 13445 - DNA, 201 bp, Homo sapiens
gactgaggtaggagggtcccttgagcccaggaatttgaggctgcagtgagccatgatcatgtgactgcacttcatcctggatgacagagggagactctgtmtctaaaaataaatcaatgaatacaataaatgggtgctgtttaaagccaatgtttgtgacaatttgttacccagtcttataaaattcatacacagactcaa

SEQ ID NO: 13446 - DNA, 201 bp, Homo sapiens
gtatcctaacatttgaggagctgacacaggaggaacacttgcagccaggactttgagaccagctaggataatatagtgagacactcgtctctacatttctytttaattagctgggcatggtggcacttgcctgcagtcctagctactctgaagactgaggtaggagggtcccttgagcccaggaatttgaggctgcagtga

SEQ ID NO: 13447 - DNA, 201 bp, Homo sapiens
ggaggattcaaaatgaaaacacaggtttaggaagaccggaacagagattccatccacatcatgcccagatttctgattaagaaactataaacaacaaatgrgtgttatttggccaggcgtggtagtgcacacctgtatcctaacatttgaggagctgacacaggaggaacacttgcagccaggactttgagaccagctagg

SEQ ID NO: 13448 - DNA, 201 bp, Homo sapiens
aaaacttgtttctcaattagaactaaccatttcgggctacagcatcaagccaaaattattggcatcatgctaataatttttactaaagtaaaataaagttkactgaagtatgagattcacatttttgtaaatgaaaagcaatttgattaggcatttttttctgcacagcaaaagaaactatcatcaatcacagtgaacaga

SEQ ID NO: 13449 - DNA, 201 bp, Homo sapiens
gctggctccaaaccaaactcatggatttgtaaagcagagtctaatttagattcatatgtggttggataattggagccataagccttgggttatctttcctsaagagacaaatatggttgtgtgctgcagtgtgcaggaggattggtgtgggaggagggagggagggaggacacaaaagcagccctggtgagaaaagcactg

SEQ ID NO: 13450 - DNA, 201 bp, Homo sapiens
tgactgtttttgcatttagaaaacatcgttaaagtaaaaacagaaaaatttctggccttgtcgtgtatacattctagatgcaagcttgtccaacctgcagmtctcgggatgcatgtggcccaggacagctttagaatgtgacgatttttttgcttatctgtagtggcagatatcatgaaaattatccatgcattttttttc

SEQ ID NO: 13451 - DNA, 201 bp, Homo sapiens
agaaaaatttctggccttgtcgtgtatacattctagatgcaagcttgtccaacctgcagctctcgggatgcatgtggcccaggacagctttagaatgtgaygatttttttgcttatctgtagtggcagatatcatgaaaattatccatgcattttttttcttttttctatttttttctgctcatcagctgtcattagtgta

SEQ ID NO: 13452 - DNA, 201 bp, Homo sapiens
aaagattggacacctctgcaggcagatgatatagtataagcagagtaggaacagaaaatgcttgagttagaaggtggcaagtgctgtgtggcaggtgatcsagagggtgggctgtgggtacagggaggtggctgttgtgctgggtggtcagcatgggccttgttgcaaatgtgaccttggagtaaagatttgagggatgtg

SEQ ID NO: 13453 - DNA, 201 bp, Homo sapiens
gtctgtgttcctggaaggaggaagaggccagaagtgttgaacagagagaaactgaaatgaagtcagaggtgtgcccagagcaggttgccctggagggtgtdggaaggatgttgacctttgctctgaatgacatggggagttagaggacagttttggaaagtgggacatggtaggacttatcctttgaaagcttctctctgg

SEQ ID NO: 13454 - DNA, 201 bp, Homo sapiens
ttggaaagtgggacatggtaggacttatcctttgaaagcttctctctggctgctgtgctgagaacagaattgagaggtgggggactagtgaggcagtgggraaaacggtgggaaaggagtgcagtattccaggatggagacgtcgcttaccttgactggggtgtgagcaggggaaatagtgggaagtgatgggattctgga

SEQ ID NO: 13455 - DNA, 201 bp, Homo sapiens
ttcactagtccaggtgttggtgaggatgtggagaaaatggaatgcttgtgcactgctgctgagagtgaacaacagtgcagccatcatggaaacaggatgaygctttctcaagaaggtaaacatagaatttccatatgaagcaacaattccacttttgggtgtataccccccaaaaattgaaagcaggtatgcacacagata

SEQ ID NO: 13456 - DNA, 201 bp, Homo sapiens
tcacagcacttgctaatggatttatctgtggtgtgagaaagaagaatcaaggacacccacagtattggactgagtgagcagaagggtggagctgctgtcartggagatggggagactctggcaggagcatacagaggagagggcattgcaggcatccagtggaggtgacatctacgaggaatgaaggtgaggggcccagat

SEQ ID NO: 13457 - DNA, 201 bp, Homo sapiens
aaaatgtggtgcatatacacatggaatattaatcagccttaaaagtgaagaatatttggattggatggaaccttgaaaacacgctaaataaaataagccaraaaaaaggcaaatatgatatttcacttatatgaggcacctagaataagcaaattcacaaaaacagaaagtagaatacaggttaccaggggctgaaggcag

SEQ ID NO: 13458 - DNA, 201 bp, Homo sapiens
gctgtctgcacaggtaggtgaaagtcagggaagttatggtctgctgttggttataataagtcacagattattgtgctttctcagataattaaagaaataayaagagaatttgtaactagaacacttactgagaagaccacaataatgcaaagttttttattcatctaaagaaggcaacagaagaaaaatagttgagcaaga

SEQ ID NO: 13459 - DNA, 201 bp, Homo sapiens
tcccctgaagaaatcacaggcacagaggagggacaggtggatttcagggctgtgcttgatctgggaaaggaagagtgcagaccgccaggtggcgccgctgmactgcttctgcgcccaggaggtgcctgctggggctgagattgaaggtggggagaaggatgtcacagctcatcgcacaggttcccggtaaaaatcctcctg

SEQ ID NO: 13460 - DNA, 201 bp, Homo sapiens
agccttctgagtagctaggacgagaagcctgtgccgccacacctggctataatgtctcattttctcatttgctgtggtgtgaacaaggaaacaatatcatrccatgtatttgacttgcagcaggtacacaacaaatgtcaggtgaatgaagaaataaaaccacttagtaatccaagccatatccacatttacattttacag

SEQ ID NO: 13461 - DNA, 201 bp, Homo sapiens
tttttgacacaagaaagaggatgtgattgctagggtcatcatgtcattgtttattgtgttgccagtaaagtgaaatcaaaatacacaataaataataaaayaacccatgataagccaatgtttataatgtactaacaccactgagccagtgtttataatgtactgacacactccaagtgtgggcacagctgcagacatgcc

SEQ ID NO: 13462 - DNA, 201 bp, Homo sapiens
cattttcggttgtcacgtggggattggtgggagggggtgagtggggtgctgctggcaaacctcccacaatgcacaggacagaccacaagggattctctgtytcaaattcttaatagggctgctgttgagaaacccgcccgagaggtaagtgctgtaatgtcctcaccatttcacagattaagaaactgaggcaccaggaag

SEQ ID NO: 13463 - DNA, 201 bp, Homo sapiens
aaataataaaataacccatgataagccaatgtttataatgtactaacaccactgagccagtgtttataatgtactgacacactccaagtgtgggcacagckgcagacatgccttgtctcttgggtcaggacacagggtagagtgaaatggaaagaaatcccagtcactgcagaaaagggcccccatggaagaggcctggca

SEQ ID NO: 13464 - DNA, 201 bp, Homo sapiens
taatgaatgccagggttaacacctaggtgatgggttgataggtacagccaaccaccatggcacacgattacctatgtaacaaacctgcacatcctgcacaygtaccctggaacttaaaattaaattaaattaaattaaattaaaagataagcttaaagcattaaagaaaaataattagataaaagaagtctttgatttaca

SEQ ID NO: 13465 - DNA, 201 bp, Homo sapiens
gagggcagtgatggggggatcattaggaaaaatagctaatgaatgccagggttaacacctaggtgatgggttgataggtacagccaaccaccatggcacaygattacctatgtaacaaacctgcacatcctgcacacgtaccctggaacttaaaattaaattaaattaaattaaattaaaagataagcttaaagcattaaa

SEQ ID NO: 13466 - DNA, 201 bp, Homo sapiens
ccacacataccactgaattaaacttttacagaattggaaatgcacatcattgatcaaaataaatgaaacaagaaaagagtagaaaggaataaccagtgacrgaatagcaatatgaatagaaaacacaataggactgcgaaaacaaagaaacaaacaaaaccacttcagaagcacctgatggcatgctatttagaatcatag

SEQ ID NO: 13467 - DNA, 201 bp, Homo sapiens
ttcataagtttcaacaaaataggaatggaggggaccttcctcaccctgataaagggcatctataaaaaacccacaactaaaatcatgcttgctgaagaaakactgaatgcttttctcctaagatggagatcaatgcaaggatgtccaatccaacacttctacttaacattgtactggagattgcagctggtgcaataaggc

SEQ ID NO: 13468 - DNA, 201 bp, Homo sapiens
atctgatgtgcaaggtaattccatcttgcaaaggatttgatgttacattctaccacacataccactgaattaaacttttacagaattggaaatgcacatcwttgatcaaaataaatgaaacaagaaaagagtagaaaggaataaccagtgacggaatagcaatatgaatagaaaacacaataggactgcgaaaacaaagaa

SEQ ID NO: 13469 - DNA, 201 bp, Homo sapiens
gaataccaaagttcattgcaagcatccttaacaagaactacttacattggaacaaaaccacacagaattgtaaggagccatgtgacagagaggaccacgakgccatgaaaatggctttggctacaaataggtcatttgatccttggctcactggcatctctgtagattttcatgtatacaatcttcaatctgatgtgcaag

SEQ ID NO: 13470 - DNA, 201 bp, Homo sapiens
aagaataccaaagttcattgcaagcatccttaacaagaactacttacattggaacaaaaccacacagaattgtaaggagccatgtgacagagaggaccacsaggccatgaaaatggctttggctacaaataggtcatttgatccttggctcactggcatctctgtagattttcatgtatacaatcttcaatctgatgtgca

SEQ ID NO: 13471 - DNA, 201 bp, Homo sapiens
aaaatggaacttttaaaataaatgtgtaatacttgatgttgatgatgtgttctgaaaacattgagttgaaagaattgacttaaattcctaattccttaaayagattttttcaaagtaaaatatgcttggtttttataaaaatgaaagagaaaagaataccaaagttcattgcaagcatccttaacaagaactacttacatt

SEQ ID NO: 13472 - DNA, 201 bp, Homo sapiens
ggctaaagtccaaacaacatatcatccattcccttttaaaatggaacttttaaaataaatgtgtaatacttgatgttgatgatgtgttctgaaaacattgwgttgaaagaattgacttaaattcctaattccttaaacagattttttcaaagtaaaatatgcttggtttttataaaaatgaaagagaaaagaataccaaag

SEQ ID NO: 13473 - DNA, 201 bp, Homo sapiens
agtaaagtcaaaagaatcagctgaaacttgaaagtggttgctccctagaaaggcagaaacagagaagagaggactctccctagaaaggcagagaagactcrtttttctcaggaagtcctgcgcaaatatttactctttcaattatgtgcaattgtaacttcgaataaaataaaaacaaaagcttcagttaacatgcaagtt

SEQ ID NO: 13474 - DNA, 201 bp, Homo sapiens
attttcggttgtcacgtggggattggtgggagggggtgagtggggtgctgctggcaaacctcccacaatgcacaggacagaccacaagggattctctgtcycaaattcttaatagggctgctgttgagaaacccgcccgagaggtaagtgctgtaatgtcctcaccatttcacagattaagaaactgaggcaccaggaaga

SEQ ID NO: 13475 - DNA, 201 bp, Homo sapiens
ttccctggttaagtcagggacccaggagcccaccacaaacaatcccagctgcgcggtgccttcatggtctgtggcgccccctggtgttgacactgggcctrtggccaaatgaggcttgagggaaaaggaaaacgggtttaggtagcgggatctccttcaggctctccagatttcaagccatgacttacactcagaaaaaat

SEQ ID NO: 13476 - DNA, 201 bp, Homo sapiens
cagcacccaccatgtgaggagtgaaaatgccccaggactaaaggacaagatgacgttccaccccagccatcccgcccctcctagagctctagctctgtgcmtttagtgcttaggcttttaacctggggtccgcgaacccactttcccatgacactgcgtgcagaagtgatgttacatgcacacatgacttcattacaggac

SEQ ID NO: 13477 - DNA, 201 bp, Homo sapiens
taaagaaagggcagagattgagggaggccctaactccaaatcttctaccacttctagggaagtgctgaaaagaagtgcaaggtactcaacccgctctgggratacagcaggaaagcagagtgttcatggatttcgaattccatcaaagaaatacaactttggcaaaatatccaagtcacttttctaagccccaggcagcag

SEQ ID NO: 13478 - DNA, 201 bp, Homo sapiens
aatattaatcagccttaaaagtgaagaatatttggattggatggaaccttgaaaacacgctaaataaaataagccaaaaaaaaggcaaatatgatatttcwcttatatgaggcacctagaataagcaaattcacaaaaacagaaagtagaatacaggttaccaggggctgaaggcaggaacaatgggcagctgtcatttaa

SEQ ID NO: 13479 - DNA, 201 bp, Homo sapiens
gagtgttcatggatttcgaattccatcaaagaaatacaactttggcaaaatatccaagtcacttttctaagccccaggcagcagctcaaaacaaacaacaycaaaaacaaaacaaaatctcggcccaggtgaaatcattgaagacataaaactttgtgagacctgtatttagagcgaaggacaattcaatttagggctgca

SEQ ID NO: 13480 - DNA, 201 bp, Homo sapiens
agccaaaaaaaaggcaaatatgatatttcacttatatgaggcacctagaataagcaaattcacaaaaacagaaagtagaatacaggttaccaggggctgarggcaggaacaatgggcagctgtcatttaatgggtacagtctctgttgggatgatgaaaatgttctgaaaatgcatgttggtgtttgtgtaaccaccatca

SEQ ID NO: 13481 - DNA, 201 bp, Homo sapiens
ataaaactttgtgagacctgtatttagagcgaaggacaattcaatttagggctgcagcagaaaacccctacatcatattgggtttttcctcatcatgaagktctcctggagggaccttctcccttcagcagtgcatagtgaggccatttctgtgtaaaaagatagaatctccttggattcctgatgtttacatttactact

SEQ ID NO: 13482 - DNA, 201 bp, Homo sapiens
caacatctttcaattattttctttactttgtctaagcagagaatttaaacttgtttctgaagcagaaaaccagggactggttatttgagctatcaccccamtctgtggctctcttatgcaataagcataagagattgtgggccaacagaatttgtagcaagataaacataaacccttcatttcagcctatgtttctgtttg

SEQ ID NO: 13483 - DNA, 201 bp, Homo sapiens
cttcatttcagcctatgtttctgtttgtctggtgatgttccagtcttgctccagtcttaacattttaaaaagtataattttacttaaatttcattttatargaagtcatatatattcatttctgttaggtttctcagtgaaagcctcctcaaaacaactgtgaagtaaagacatgtaaataaattcatggtgctcccatgt

SEQ ID NO: 13484 - DNA, 201 bp, Homo sapiens
actgagccagtgtttataatgtactgacacactccaagtgtgggcacagctgcagacatgccttgtctcttgggtcaggacacagggtagagtgaaatggraagaaatcccagtcactgcagaaaagggcccccatggaagaggcctggcagggaggccagctgtcccagggccgccatatttagggatgactcccccttt

SEQ ID NO: 13485 - DNA, 201 bp, Homo sapiens
aagtcagaatgccttaaagaactaatcttaagagttaaacctgtaaaactcttaaaagaaaatactgagggaaagtcttatggtcattagaattggtagtsgtttcttggctggtgaccaaaagtacaagcaataaaaggaaaatgacaaataagacttcatcaaaatgtaaaaacttttttgcatcaaaggacgctatta

SEQ ID NO: 13486 - DNA, 201 bp, Homo sapiens
gaacagaacagagaactcagaaataagaccacacatctaaataaaggaataataatcacaagactcaggatggagtctccttttgggggatgtgaatgggmagcagcccagggtagtttacaggttctgtgttttacaacagtgctggctaaagtccaaacaacatatcatccattcccttttaaaatggaacttttaaaa

SEQ ID NO: 13487 - DNA, 201 bp, Homo sapiens
ttaagtactgattccccctttataatccatgccataaacttcattgtcttattttaagaaattgccacagcagcctttagcaaccaccctcttgaacagcyggcagtcatcaacattgaggcaagaccctgcccagcaaaaagattaaaattagctgaagcctcagacgaccgttagcattttttagcaatagagtaattt

SEQ ID NO: 13488 - DNA, 201 bp, Homo sapiens
cctgcagcaggaggaggccacagctggatgttcgagggccttggcccagccctggcttgggcaggacttaagggtgtaaaaaataacctacatgtgatggytcattttcaattctatgtgccttagtataggtttaagcaggccacatggtcataaagagataaagaaggaaaatgtactaagccaccatcccccctactt

SEQ ID NO: 13489 - DNA, 201 bp, Homo sapiens
agtactgattccccctttataatccatgccataaacttcattgtcttattttaagaaattgccacagcagcctttagcaaccaccctcttgaacagccggyagtcatcaacattgaggcaagaccctgcccagcaaaaagattaaaattagctgaagcctcagacgaccgttagcattttttagcaatagagtaattttaa

SEQ ID NO: 13490 - DNA, 201 bp, Homo sapiens
agaccgggatggggacaaagcaggcaccacggccctccctgctgcccactcctcacctgcagcaggaggaggccacagctggatgttcgagggccttggcycagccctggcttgggcaggacttaagggtgtaaaaaataacctacatgtgatggttcattttcaattctatgtgccttagtataggtttaagcaggccac

SEQ ID NO: 13491 - DNA, 201 bp, Homo sapiens
gccataaacttcattgtcttattttaagaaattgccacagcagcctttagcaaccaccctcttgaacagccggcagtcatcaacattgaggcaagaccctscccagcaaaaagattaaaattagctgaagcctcagacgaccgttagcattttttagcaatagagtaattttaaattaaggtatgtacatagttctttcat

SEQ ID NO: 13492 - DNA, 201 bp, Homo sapiens
cagggtcagggctgaggcctgggggtcaggacccctcacgttcccctcctttcttagggccatcttcccagcccacattcctcatcatgggcatcgttacygtcctggttgttctaggtgctgtggtcactgctgtgatgtggaagaataagaccccaggtaggaaaggggtgagttccaagatttcttcttccattcgtg

SEQ ID NO: 13493 - DNA, 201 bp, Homo sapiens
ccataaacttcattgtcttattttaagaaattgccacagcagcctttagcaaccaccctcttgaacagccggcagtcatcaacattgaggcaagaccctgyccagcaaaaagattaaaattagctgaagcctcagacgaccgttagcattttttagcaatagagtaattttaaattaaggtatgtacatagttctttcata

SEQ ID NO: 13494 - DNA, 201 bp, Homo sapiens
cttcagcagggtcagggctgaggcctgggggtcaggacccctcacgttcccctcctttcttagggccatcttcccagcccacattcctcatcatgggcatygttaccgtcctggttgttctaggtgctgtggtcactgctgtgatgtggaagaataagaccccaggtaggaaaggggtgagttccaagatttcttcttcca

SEQ ID NO: 13495 - DNA, 201 bp, Homo sapiens
ctggaggccttcagcagggtcagggctgaggcctgggggtcaggacccctcacgttcccctcctttcttagggccatcttcccagcccacattcctcatcrtgggcatcgttaccgtcctggttgttctaggtgctgtggtcactgctgtgatgtggaagaataagaccccaggtaggaaaggggtgagttccaagatttc

SEQ ID NO: 13496 - DNA, 201 bp, Homo sapiens
aaattagctgaagcctcagacgaccgttagcattttttagcaatagagtaattttaaattaaggtatgtacatagttctttcatacataatgctattgtayacttaataggctacagtagagtgtgaatataacttttatatgtactggaaaaacaaaaatttgtgtgacttgtttgttgccatggtctgaaaccaaatct

SEQ ID NO: 13497 - DNA, 201 bp, Homo sapiens
cccttctggaggccttcagcagggtcagggctgaggcctgggggtcaggacccctcacgttcccctcctttcttagggccatcttcccagcccacattccycatcatgggcatcgttaccgtcctggttgttctaggtgctgtggtcactgctgtgatgtggaagaataagaccccaggtaggaaaggggtgagttccaag

SEQ ID NO: 13498 - DNA, 201 bp, Homo sapiens
atgccatgtgcagcaggaggcactgccagagcccctcacactgagatgggctaaggagatgaatgaggggccatgtctcttctcagggaaagcaggagccyttctggaggccttcagcagggtcagggctgaggcctgggggtcaggacccctcacgttcccctcctttcttagggccatcttcccagcccacattcctca

SEQ ID NO: 13499 - DNA, 201 bp, Homo sapiens
gctgaagcctcagacgaccgttagcattttttagcaatagagtaattttaaattaaggtatgtacatagttctttcatacataatgctattgtatacttamtaggctacagtagagtgtgaatataacttttatatgtactggaaaaacaaaaatttgtgtgacttgtttgttgccatggtctgaaaccaaatctgcagta

SEQ ID NO: 13500 - DNA, 201 bp, Homo sapiens
tacatagttctttcatacataatgctattgtatacttaataggctacagtagagtgtgaatataacttttatatgtactggaaaaacaaaaatttgtgtgrcttgtttgttgccatggtctgaaaccaaatctgcagtatctctgaggtacgtctgtagtttccctttccctcttttgaacttgtttcttgtccttgtctg

SEQ ID NO: 13501 - DNA, 201 bp, Homo sapiens
ttcatacataatgctattgtatacttaataggctacagtagagtgtgaatataacttttatatgtactggaaaaacaaaaatttgtgtgacttgtttgttrccatggtctgaaaccaaatctgcagtatctctgaggtacgtctgtagtttccctttccctcttttgaacttgtttcttgtccttgtctggtcctgcaagc

SEQ ID NO: 13502 - DNA, 201 bp, Homo sapiens
agagtgtgaatataacttttatatgtactggaaaaacaaaaatttgtgtgacttgtttgttgccatggtctgaaaccaaatctgcagtatctctgaggtaygtctgtagtttccctttccctcttttgaacttgtttcttgtccttgtctggtcctgcaagctgtatgagtttgccttctctggtaggtctggggacattg

SEQ ID NO: 13503 - DNA, 201 bp, Homo sapiens
acctgtaatcccagctactcgggaggctgaggcaggagaatcgcttgaacctgggaggcagaggttgcaatgagctgagattgcaccattgcactccagcyggggcatcagagagagactctgtctcaaaaaaaaaaaaaaaaaaaaaaaaaaaagtgaaaataaaagaaactgcatagaataagataaaatatttgccaa

SEQ ID NO: 13504 - DNA, 201 bp, Homo sapiens
ggaggctgaggcaggagaatcgcttgaacctgggaggcagaggttgcaatgagctgagattgcaccattgcactccagctggggcatcagagagagactcygtctcaaaaaaaaaaaaaaaaaaaaaaaaaaaagtgaaaataaaagaaactgcatagaataagataaaatatttgccaatcacatatctgataaagaatt

SEQ ID NO: 13505 - DNA, 201 bp, Homo sapiens
tccatcttaaaaaaaaccccaaaacttatgaatgcaactttctacaatgaaagcatatataaaaatatatacatagaaaacaaaagaatggaagtcagcaycactgcagaagatagctccagggatgaccattcacactgcagtccaggaagtttcaataatatgatagcagtggttctttggaggggaagcctgggtgat

SEQ ID NO: 13506 - DNA, 201 bp, Homo sapiens
gaacctgggaggcagaggttgcaatgagctgagattgcaccattgcactccagctggggcatcagagagagactctgtctcaaaaaaaaaaaaaaaaaaamaaaaaaaagtgaaaataaaagaaactgcatagaataagataaaatatttgccaatcacatatctgataaagaattaatatccagactacatacagaacta

SEQ ID NO: 13507 - DNA, 201 bp, Homo sapiens
aagcaaaggactttgctgacttaagcaaaacattttctctccaaatgaattatcctgattggataatctcttactcccactgaaattagccccagagttgyatttgagcatttgggtcaaagacagaaagtcattttgagggttgggcctggctgatcttggacaatgttctgaaagagggctttctacttgcagaagaac

SEQ ID NO: 13508 - DNA, 201 bp, Homo sapiens
tgggaggcagaggttgcaatgagctgagattgcaccattgcactccagctggggcatcagagagagactctgtctcaaaaaaaaaaaaaaaaaaaaaaaaraaagtgaaaataaaagaaactgcatagaataagataaaatatttgccaatcacatatctgataaagaattaatatccagactacatacagaactacaact

SEQ ID NO: 13509 - DNA, 201 bp, Homo sapiens
gggatgatgaaaatgttctgaaaatgcatgttggtgtttgtgtaaccaccatcaattgtaaatgtgcttaatgccaatgaattgtacactgaaaaaaattkttagaaggtaaatcgtatagtatgtgtgttttaccacaattttaaaaatatatatcaacaccaaatccaatcacttctcactcctctgccacctccaccc

SEQ ID NO: 13510 - DNA, 201 bp, Homo sapiens
tgaattgtacactgaaaaaaattgttagaaggtaaatcgtatagtatgtgtgttttaccacaattttaaaaatatatatcaacaccaaatccaatcacttytcactcctctgccacctccaccccagaaccatcctcactaggatagaaaaccggaagggccttccagctgggctgcctgctgactctcatgcccactgtc

SEQ ID NO: 13511 - DNA, 201 bp, Homo sapiens
tgacaggttttatttgtttattgtctgttgatttattaaggttaccaagaaagaaagaaccaatagcataggtacatagatgatagatagataatagatagatagatgatagatgatagatagatgttagatgatgatagatagatagatagatagatagatagatagatagacagacagatagatagataggtgatttat

SEQ ID NO: 13512 - DNA, 201 bp, Homo sapiens
tttgtttattgtctgttgatttattaaggttaccaagaaagaaagaaccaatagcataggtacatagatgatagatagataatagatagatagatgatagwtgatagatagatgttagatgatgatagatagatagatagatagatagatagatagatagacagacagatagatagataggtgatttattgggctaattgg

SEQ ID NO: 13513 - DNA, 201 bp, Homo sapiens
ctgttgatttattaaggttaccaagaaagaaagaaccaatagcataggtacatagatgatagatagataatagatagatagatgatagatgatagatagakgttagatgatgatagatagatagatagatagatagatagatagatagacagacagatagatagataggtgatttattgggctaattggctcacacaatta

SEQ ID NO: 13514 - DNA, 201 bp, Homo sapiens
aattttttgtatagatgggggttttgcccaggctgatcttgaacttctggagtcaacaaatctgccttcctctgccttccacagtgctaggatggcaggcrtgagccaccatacctggcgtaaattaattataagatattaaacatgtaacttagttttaaaaggtaaggagaatttccatggctgaagaggatgtatttt

SEQ ID NO: 13515 - DNA, 201 bp, Homo sapiens
caggctggagtgcagtggcatgatcaccatgcactgcagtgtcgacctcctgggttcaagggacccactgatctcagcctcctgagtagctgggactaccrtcatgaactactatgcctggctaattttctaattttttgtatagatgggggttttgcccaggctgatcttgaacttctggagtcaacaaatctgccttcc

SEQ ID NO: 13516 - DNA, 201 bp, Homo sapiens
ggtaggatgagttcatgaatggagcaaccacagtggcaggcatgaggctacgtatggggccaacagcactgactcccccctaccaaggcagatccagctgycgacacctctgaatgtccaactcattagcaattgaggcccatgatgtgccccagtggggcactatttctttaggtgactaactagccactaagtaacaag

SEQ ID NO: 13517 - DNA, 201 bp, Homo sapiens
aatttctttcataattctctctacccaaaggcatcggtcagtccctctccagaccagaagcagttagttctgacaccaacaagtggtgataagaggttgayagcctagcaagggggaagaagccaccaccaaaccaaacacaaaaaatgacactgcacagcagtctggggacatgtccttgaaggacacagccccaaagat

SEQ ID NO: 13518 - DNA, 201 bp, Homo sapiens
gctggggtcaggccaggggcaggggatgaaccagggtccccactccagcatcactcactttgtgaccattccggtttggttctcccgagaggtaaagaacraagacttcaaagacactttcttcactggtcagctcctccccccacatcttcagcagctcctccttgggggacttgctcttcaggtagaagaggtagtagt

SEQ ID NO: 13519 - DNA, 201 bp, Homo sapiens
tccccatccattccctcttcggaatgtttcagctgttctgagaaaacactttgcattcctgccccgcccctgtgatttctctttgggtggcaggcagccgkgagaggctggaggcctggggagatgggggcagggcacaaggctaagctcagcaccttcctccaccctcctcactgtactcaactcctaggcgggcactaa

SEQ ID NO: 13520 - DNA, 201 bp, Homo sapiens
caggggatgaaccagggtccccactccagcatcactcactttgtgaccattccggtttggttctcccgagaggtaaagaacaaagacttcaaagacacttkcttcactggtcagctcctccccccacatcttcagcagctcctccttgggggacttgctcttcaggtagaagaggtagtagtccttcagctccccaaaggc

SEQ ID NO: 13521 - DNA, 201 bp, Homo sapiens
tccccactccagcatcactcactttgtgaccattccggtttggttctcccgagaggtaaagaacaaagacttcaaagacactttcttcactggtcagctcmtccccccacatcttcagcagctcctccttgggggacttgctcttcaggtagaagaggtagtagtccttcagctccccaaaggcaggggaagaggaattgc

SEQ ID NO: 13522 - DNA, 201 bp, Homo sapiens
accaggaagtagttgtcgtggatgtactggatgatggtgcgggacggggactcctcctcatacagctttccccaccgctcaatccacagggcaaaggcctygtcctacacacacatacccccgcacacacgcacacatgcacacacacacagaggcaagattaacagggctctccaagggctctgctcaacaggacatttc

SEQ ID NO: 13523 - DNA, 201 bp, Homo sapiens
cctcaccagcggccgttagggaactcgtcccactcctgggtacggtagatgtaactctttggtctggaggcccagaagatgggacgtacatcttcctctcrgcgcttggggtgggcgctgagagcccagggtaggggacgcctgggtgaggatggggacagagaattgagacaagggattggctagagggagccggaagca

SEQ ID NO: 13524 - DNA, 201 bp, Homo sapiens
agccccctcccagggctgtgctccgggaactgactgagggctaactattatgggcccaccccattgttggaatgtcttcagccacatgggggaatgggtggaagaagaggccgggatgtgtcctgccagctagagcagcgaagaaatcccagcggggccccaggaagtccaagcccatggggttcaggtgctcctctctgg

SEQ ID NO: 13525 - DNA, 201 bp, Homo sapiens
gccccctcccagggctgtgctccgggaactgactgagggctaactattatgggcccaccccattgttggaatgtcttcagccacatgggggaatgggtggaagaagaggccgggatgtgtcctgccagctagagcagcgaagaaatcccagcggggccccaggaagtccaagcccatggggttcaggtgctcctctctggc

SEQ ID NO: 13526 - DNA, 201 bp, Homo sapiens
ccccctcccagggctgtgctccgggaactgactgagggctaactattatgggcccaccccattgttggaatgtcttcagccacatgggggaatgggtggaagaagaggccgggatgtgtcctgccagctagagcagcgaagaaatcccagcggggccccaggaagtccaagcccatggggttcaggtgctcctctctggct

SEQ ID NO: 13527 - DNA, 201 bp, Homo sapiens
gatgggaaagatcccggggacgatggggcaagtgatgcccatgtcggtgcatgccttcacaaagcggaagaatgtgtcagcctcaaagaaaagctgcgtgrtgatgaaatcggctcccgcagacaccttctccttcaagtgcttcaggtcagcctcaaagctccctgcttcggggtggcctttggggtaacctgccaatag

SEQ ID NO: 13528 - DNA, 201 bp, Homo sapiens
ctcagctggagccgctgggcaacagcccaatgggcctggagagagctggcttcccaccgggcctgggatcggacctgcagggctgtgctgggcctgtggcrtcagcggctgctgcagtcacggctggtggagcggtgggcccaggagcggggctggcggctggcacgagatgccctatgccactggcactcctgttggcag

SEQ ID NO: 13529 - DNA, 201 bp, Homo sapiens
tcctcccaggtcaaccacaagcatgcaaacttcttctgccctcccgctcccaagaacaaagatatatttgcaaggaaggtctgcaggccctcaccagcggycgttagggaactcgtcccactcctgggtacggtagatgtaactctttggtctggaggcccagaagatgggacgtacatcttcctctcggcgcttggggtg

SEQ ID NO: 13530 - DNA, 201 bp, Homo sapiens
tagggaactcgtcccactcctgggtacggtagatgtaactctttggtctggaggcccagaagatgggacgtacatcttcctctcggcgcttggggtgggcrctgagagcccagggtaggggacgcctgggtgaggatggggacagagaattgagacaagggattggctagagggagccggaagcaggggagcacccctgag

SEQ ID NO: 13531 - DNA, 201 bp, Homo sapiens
agcttatgggctctcctgggcccctcacctggatgggaaagatcccggggacgatggggcaagtgatgcccatgtcggtgcatgccttcacaaagcggaaraatgtgtcagcctcaaagaaaagctgcgtgatgatgaaatcggctcccgcagacaccttctccttcaagtgcttcaggtcagcctcaaagctccctgctt

SEQ ID NO: 13532 - DNA, 201 bp, Homo sapiens
ctggatgggaaagatcccggggacgatggggcaagtgatgcccatgtcggtgcatgccttcacaaagcggaagaatgtgtcagcctcaaagaaaagctgcrtgatgatgaaatcggctcccgcagacaccttctccttcaagtgcttcaggtcagcctcaaagctccctgcttcggggtggcctttggggtaacctgccaa

SEQ ID NO: 13533 - DNA, 201 bp, Homo sapiens
cccggggacgatggggcaagtgatgcccatgtcggtgcatgccttcacaaagcggaagaatgtgtcagcctcaaagaaaagctgcgtgatgatgaaatcgrctcccgcagacaccttctccttcaagtgcttcaggtcagcctcaaagctccctgcttcggggtggcctttggggtaacctgccaatagggatgacagtca

SEQ ID NO: 13534 - DNA, 201 bp, Homo sapiens
tgggaagtcattgtccaccaggttgaccaggaagtagttgtcgtggatgtactggatgatggtgcgggacggggactcctcctcatacagctttccccacygctcaatccacagggcaaaggcctcgtcctacacacacatacccccgcacacacgcacacatgcacacacacacagaggcaagattaacagggctctcca

SEQ ID NO: 13535 - DNA, 201 bp, Homo sapiens
cgtcagcagtgacatgggtgagtcagagctgggtgtgccctgaaggctgggtccagtgtggccttcagcacacgcttgggacttggtcccaatccctcccsacggttttccaggtgggcggggcaagcttgcccccggctcctttaccttccagaacatgaagctgacgggatccactacggtgggctggatgatctctcg

SEQ ID NO: 13536 - DNA, 201 bp, Homo sapiens
cggttttccaggtgggcggggcaagcttgcccccggctcctttaccttccagaacatgaagctgacgggatccactacggtgggctggatgatctctcgcycagggaagatgccccaagtgacagcattcggctgcagttcaggggcattggtgatgttttcaccctgaggggatgtggggtgggggtaagacctgggcca

SEQ ID NO: 13537 - DNA, 201 bp, Homo sapiens
cacggttttccaggtgggcggggcaagcttgcccccggctcctttaccttccagaacatgaagctgacgggatccactacggtgggctggatgatctctcrcccagggaagatgccccaagtgacagcattcggctgcagttcaggggcattggtgatgttttcaccctgaggggatgtggggtgggggtaagacctgggc

SEQ ID NO: 13538 - DNA, 201 bp, Homo sapiens
aaagtagaaaaataccaaaatttctttcataattctctctacccaaaggcatcggtcagtccctctccagaccagaagcagttagttctgacaccaacaartggtgataagaggttgatagcctagcaagggggaagaagccaccaccaaaccaaacacaaaaaatgacactgcacagcagtctggggacatgtccttgaa

SEQ ID NO: 13539 - DNA, 201 bp, Homo sapiens
aagaggccgggatgtgtcctgccagctagagcagcgaagaaatcccagcggggccccaggaagtccaagcccatggggttcaggtgctcctctctggctaytccttcagacccgcagctgctggacacaggccacagagctggtgcctcccgcgccatcactgcagtgcagcctgggtggacggaggaagccaaggggaac

SEQ ID NO: 13540 - DNA, 201 bp, Homo sapiens
gtgtcctgccagctagagcagcgaagaaatcccagcggggccccaggaagtccaagcccatggggttcaggtgctcctctctggctattccttcagacccrcagctgctggacacaggccacagagctggtgcctcccgcgccatcactgcagtgcagcctgggtggacggaggaagccaaggggaacggcctgggctcag

SEQ ID NO: 13541 - DNA, 201 bp, Homo sapiens
ttggaccctcctctggggatctctgggccactgccctcacctggggtcctcagtccacatccccaggcgcttcagcacctctgtggtagccatctcgcggytgagggtgtagaagtggaggcctggcaccaagccactggccagaagctcctggcacaggctcacggccagctcgatgccatagttgcggatggcagcatc

SEQ ID NO: 13542 - DNA, 201 bp, Homo sapiens
ggtccagtgtggccttcagcacacgcttgggacttggtcccaatccctccccacggttttccaggtgggcggggcaagcttgcccccggctcctttacctwccagaacatgaagctgacgggatccactacggtgggctggatgatctctcgcccagggaagatgccccaagtgacagcattcggctgcagttcaggggca

SEQ ID NO: 13543 - DNA, 201 bp, Homo sapiens
gtattgaccattctccccatccattccctcttcggaatgtttcagctgttctgagaaaacactttgcattcctgccccgcccctgtgatttctctttgggyggcaggcagccgggagaggctggaggcctggggagatgggggcagggcacaaggctaagctcagcaccttcctccaccctcctcactgtactcaactcct

SEQ ID NO: 13544 - DNA, 201 bp, Homo sapiens
tgtgccaccacacccggctaattttttttttttttttgtagaaatgggatctcactatgttgccagggcttgtctcaaactcctgggctcaagcgatctayctgccttggcctcccaaagcattgggcaggcccattacgccatgagccaccacacctgctggtttttgttttttaaatggaattgaaaggaactagcctt

SEQ ID NO: 13545 - DNA, 201 bp, Homo sapiens
ttttttcttattggaaaagtgaaatatgcttattacagaaacctcagaaaatataaagtagaaaaataccaaaatttctttcataattctctctacccaarggcatcggtcagtccctctccagaccagaagcagttagttctgacaccaacaagtggtgataagaggttgatagcctagcaagggggaagaagccaccac

SEQ ID NO: 13546 - DNA, 201 bp, Homo sapiens
ccctcccgctcccaagaacaaagatatatttgcaaggaaggtctgcaggccctcaccagcggccgttagggaactcgtcccactcctgggtacggtagatstaactctttggtctggaggcccagaagatgggacgtacatcttcctctcggcgcttggggtgggcgctgagagcccagggtaggggacgcctgggtgagg

SEQ ID NO: 13547 - DNA, 201 bp, Homo sapiens
aggagaggagctgccagtagcccaagaccctggagcaagccaggccccaagggccccgagagtggacaggaagccgccggagcaccgcggggttgggggcytggggcagagcatggggcccagctgcagctgtgacttgttctcatagaataaaaaacagaactgaacttagccttcccagggaaggaaccatgccccaca

SEQ ID NO: 13548 - DNA, 201 bp, Homo sapiens
gaccctcctctggggatctctgggccactgccctcacctggggtcctcagtccacatccccaggcgcttcagcacctctgtggtagccatctcgcggttgrgggtgtagaagtggaggcctggcaccaagccactggccagaagctcctggcacaggctcacggccagctcgatgccatagttgcggatggcagcatcgtt

SEQ ID NO: 13549 - DNA, 201 bp, Homo sapiens
acgcctggcagccaggagcccaaggagaggagctgccagtagcccaagaccctggagcaagccaggccccaagggccccgagagtggacaggaagccgccrgagcaccgcggggttgggggcttggggcagagcatggggcccagctgcagctgtgacttgttctcatagaataaaaaacagaactgaacttagccttccc

SEQ ID NO: 13550 - DNA, 201 bp, Homo sapiens
tggccacagtggcctggacagagtagctgggtcccaggcctgcccctgtggacgagggaccagggaccaagagcgcactccagccctgagcccagagcctscaaagcccaaagcaaggcccataaacggaggctacggtaagaggagctgtgtgtgcagtttggtgggtccgagggatgggggcaagggctgaggggcttg

SEQ ID NO: 13551 - DNA, 201 bp, Homo sapiens
cagggcacaaggctaagctcagcaccttcctccaccctcctcactgtactcaactcctaggcgggcactaagagcagctgccttcctggacccaccttaamctcttgtgactcaactcccctttccagggtgcagggaacattccctctgccctgccttccagctctggccacagtggcctggacagagtagctgggtccc

SEQ ID NO: 13552 - DNA, 201 bp, Homo sapiens
gcaggcagccgggagaggctggaggcctggggagatgggggcagggcacaaggctaagctcagcaccttcctccaccctcctcactgtactcaactcctargcgggcactaagagcagctgccttcctggacccaccttaacctcttgtgactcaactcccctttccagggtgcagggaacattccctctgccctgccttc

SEQ ID NO: 13553 - DNA, 201 bp, Homo sapiens
agcagttacagcagcaggaagatgggtgggtcctttcccaggtactgccctcttccctgcattccactcagccagccttccagaagtctgtgccacagccrcgcaccgtggagctttccctgcttgccagccccggggccccttcgttttcaggggagggggtcagttccattacagaacacacaggctggatgctggagc

SEQ ID NO: 13554 - DNA, 201 bp, Homo sapiens
ctcactgcagcctcaacctccagggctcaaacgatcctcccacctcagccacctgagtagctgagactacaggcgtgtgccaccacacccggctaattttttttttttttttgtagaaatgggatctcactatgttgccagggcttgtctcaaactcctgggctcaagcgatctacctgccttggcctcccaaagcattgg

SEQ ID NO: 13555 - DNA, 201 bp, Homo sapiens
gggtgccggtcaagagaggggggcaccccgtgcctccctaccacaccttctggaagacatagcccccgctggggccccagcccacgatggggtcggaggayggcttcccgttgatgttgggctgtgagttgatggtgaggatgccctggcggttcacccgcagcagctcctccttcagcaggctggtctcagccgccaggg

SEQ ID NO: 13556 - DNA, 201 bp, Homo sapiens
tcttggaccctcctctggggatctctgggccactgccctcacctggggtcctcagtccacatccccaggcgcttcagcacctctgtggtagccatctcgcrgttgagggtgtagaagtggaggcctggcaccaagccactggccagaagctcctggcacaggctcacggccagctcgatgccatagttgcggatggcagca

SEQ ID NO: 13557 - DNA, 201 bp, Homo sapiens
tcactgcagcctcaacctccagggctcaaacgatcctcccacctcagccacctgagtagctgagactacaggcgtgtgccaccacacccggctaattttttttttttttttgtagaaatgggatctcactatgttgccagggcttgtctcaaactcctgggctcaagcgatctacctgccttggcctcccaaagcattggg

SEQ ID NO: 13558 - DNA, 201 bp, Homo sapiens
caccagcggccgttagggaactcgtcccactcctgggtacggtagatgtaactctttggtctggaggcccagaagatgggacgtacatcttcctctcggcrcttggggtgggcgctgagagcccagggtaggggacgcctgggtgaggatggggacagagaattgagacaagggattggctagagggagccggaagcaggg

SEQ ID NO: 13559 - DNA, 201 bp, Homo sapiens; identical to SEQ ID NO: 2432

SEQ ID NO: 13560 - DNA, 201 bp, Homo sapiens
cagaatggtagggccaagcctagctccagacaccccagagccctggagaagccaagactgagggagaaagcctgagggaggagcgccccagtccccagggrccggcctggtgcagagctgcagctgatgttcccctctgtgcagccccaccctctgcctcgctgagctccctgctgcgagggcctcgggtgcaagggggag

SEQ ID NO: 13561 - DNA, 201 bp, Homo sapiens
catggaggcctggtgggggaggggaggggaggcgtgtgtgtcggccggggccactaggcgctcactgttctctccctccgcgcagccgagccacatcgctsagacaccatggggaaggtgaaggtcggagtcaacgggtgagttcgcgggtggctggggggccctgggctgcgaccgcccccgaaccgcgtctacgagcct

SEQ ID NO: 13562 - DNA, 201 bp, Homo sapiens; identical to SEQ ID NO: 2435

SEQ ID NO: 13563 - DNA, 201 bp, Homo sapiens; identical to SEQ ID NO: 2437

SEQ ID NO: 13564 - DNA, 201 bp, Homo sapiens
cccgcagaggtgtggtggctgtggcatggtgccaagccgggagaagctgagtcatgggtagttggaaaaggacatttccaccgcaaaatggcccctctggyggtggccccttcctgcagcgccggctcacctcacggccccgcccttcccctgccagcctagcgttgacccgaccccaaaggccaggctgtaaatgtcacc

SEQ ID NO: 13565 - DNA, 201 bp, Homo sapiens
tgcaaaggcaggacccgggttcataactgtctgcttctctgctgtaggctcatttgcaggggggagccaaaagggtcatcatctctgccccctctgctgaygcccccatgttcgtcatgggtgtgaaccatgagaagtatgacaacagcctcaagatcatcaggtgaggaaggcagggcccgtggagaagcggccagcctg

SEQ ID NO: 13566 - DNA, 201 bp, Homo sapiens
tcgtggagtccactggcgtcttcaccaccatggagaaggctggggtgagtgcaggagggcccgcgggaggggaagctgactcagccctgcaaaggcaggasccgggttcataactgtctgcttctctgctgtaggctcatttgcaggggggagccaaaagggtcatcatctctgccccctctgctgatgcccccatgttcg

SEQ ID NO: 13567 - DNA, 201 bp, Homo sapiens
cagggtctggcgccctctggtggctggctcagaaaaagggccctgacaactcttttcatcttctaggtatgacaacgaatttggctacagcaacagggtgrtggacctcatggcccacatggcctccaaggagtaagacccctggaccaccagccccagcaagagcacaagaggaagagagagaccctcactgctggggag

SEQ ID NO: 13568 - DNA, 201 bp, Homo sapiens
cctgacaactcttttcatcttctaggtatgacaacgaatttggctacagcaacagggtggtggacctcatggcccacatggcctccaaggagtaagacccytggaccaccagccccagcaagagcacaagaggaagagagagaccctcactgctggggagtccctgccacactcagtcccccaccacactgaatctcccct

SEQ ID NO: 13569 - DNA, 201 bp, Homo sapiens
aggaagagagagaccctcactgctggggagtccctgccacactcagtcccccaccacactgaatctcccctcctcacagttgccatgtagaccccttgaaraggggaggggcctagggagccgcaccttgtcatgtaccatcaataaagtaccctgtgctcaaccagttacttgtcctgtcttattctagggtctggggca

SEQ ID NO: 13570 - DNA, 201 bp, Homo sapiens
gtggtgaagcaggcgtcggagggccccctcaagggcatcctgggctacactgagcaccaggtggtctcctctgacttcaacagcgacacccactcctccayctttgacgctggggctggcattgccctcaacgaccactttgtcaagctcatttcctggtatgtggctggggccagagactggctcttaaaaagtgcaggg

SEQ ID NO: 13571 - DNA, 201 bp, Homo sapiens
gccctctggtggctggctcagaaaaagggccctgacaactcttttcatcttctaggtatgacaacgaatttggctacagcaacagggtggtggacctcatkgcccacatggcctccaaggagtaagacccctggaccaccagccccagcaagagcacaagaggaagagagagaccctcactgctggggagtccctgccaca

SEQ ID NO: 13572 - DNA, 201 bp, Homo sapiens
gggagcaatacttcatgatggtgtggaaaggctcttcctccacccccagctcggggtctgacaggcggctgatgatatctggaaggagattatagattgcrttgccctgtaagacagagagagccatgttaaggagatgaggtgacctacagattccctctgcagccagccctcagtgcctctctgcctctcaccttgtgg

SEQ ID NO: 13573 - DNA, 201 bp, Homo sapiens
ctagcctccgggaccctgctcagcaagtgcggaaaacagcggggctggtgatgacccacctgatcctcaaggacatggtgaaggtgaaggggcaggtcagygagatggcggtgctgctcatcgaccccgagcctcagattgctgccctggccaagaacttcttcaatgagctctcccacaaggtgagaggcagagaggcac

SEQ ID NO: 13574 - DNA, 201 bp, Homo sapiens
tgcttgacaattttgactgttttggagacaaactgtcagatgagtccatcttcagtgcttttttgtcagttgtgggcaagctgcgacgtggggccaagcckgagggcaaggtgagcagcacaggacacttcaatgcctgttgggttctgggctggctaagacatctgccggccctgggcagcatacggctcttgcagtcac

SEQ ID NO: 13575 - DNA, 201 bp, Homo sapiens
ccagggcccggggagcaatacttcatgatggtgtggaaaggctcttcctccacccccagctcggggtctgacaggcggctgatgatatctggaaggagatyatagattgcattgccctgtaagacagagagagccatgttaaggagatgaggtgacctacagattccctctgcagccagccctcagtgcctctctgcctct

SEQ ID NO: 13576 - DNA, 201 bp, Homo sapiens
ctcatcttcccttcctgcagacagctcctctcctacatcaccaaggacaagcagacagagagcctggtggaaaagctgtgtcagcggttccgcacatccckgtatgctgccctccctgagggttctttgtgctgagcggggccctgcaggggagaaaggcccatccctcaccccttcaatgcccccactgtggcatccctg

SEQ ID NO: 13577 - DNA, 201 bp, Homo sapiens
ccctcacagagcgaggcctccgtaagatgcttgacaattttgactgttttggagacaaactgtcagatgagtccatcttcagtgcttttttgtcagttgtrggcaagctgcgacgtggggccaagcctgagggcaaggtgagcagcacaggacacttcaatgcctgttgggttctgggctggctaagacatctgccggccc

SEQ ID NO: 13578 - DNA, 201 bp, Homo sapiens
ccttcagttgcagccatgccttaagccaggccagcctggcagggaagctcaagggagataaaattcaacctcttgggccctcctgggggtaaggagatgcygcattcgccctcttaatggggaggtggcctagggctgctcacatattctggaggagcctcccctcctcatgccttcttgcctcttgtctcttagatttgg

SEQ ID NO: 13579 - DNA, 201 bp, Homo sapiens
aagcttcgggcctgtcataccagaggtttggatggaatcaaggagcttgagattggccaagcaggtagccagagagcgccatcagccaagaaaccatccastggtacgtaaggcagcctgtgcgggcgagaccagactgggccctcccctcctgcagtgatttgtttcttcttcttttttaaatcacgttttcctgccttt

SEQ ID NO: 13580 - DNA, 201 bp, Homo sapiens
atttctcctccgggtgatgcttttcctagattattctctggtaaatcaaagaagtgggtttatggaggtcctcttgtgtcccctccccgcagaggtgtggkggctgtggcatggtgccaagccgggagaagctgagtcatgggtagttggaaaaggacatttccaccgcaaaatggcccctctggtggtggccccttcctg

SEQ ID NO: 13581 - DNA, 201 bp, Homo sapiens
ggggagtccctgccacactcagtcccccaccacactgaatctcccctcctcacagttgccatgtagaccccttgaagaggggaggggcctagggagccgcmccttgtcatgtaccatcaataaagtaccctgtgctcaaccagttacttgtcctgtcttattctagggtctggggcagaggggagggaagctgggcttgtg

SEQ ID NO: 13582 - DNA, 201 bp, Homo sapiens
tagattattctctggtaaatcaaagaagtgggtttatggaggtcctcttgtgtcccctccccgcagaggtgtggtggctgtggcatggtgccaagccgggrgaagctgagtcatgggtagttggaaaaggacatttccaccgcaaaatggcccctctggtggtggccccttcctgcagcgccggctcacctcacggccccg

SEQ ID NO: 13583 - DNA, 201 bp, Homo sapiens
aggtcagcgctcggacctggcggagccccgcacccaggctgtggcgccctgtgcagctccgcccttgcggcgccatctgcccggagcctccttcccctagwccccagaaacaggaggtccctactcccgcccgagatcccgacccggacccctaggtgggggacgctttctttcctttcgcgctctgcggggtcacgtgtc

SEQ ID NO: 13584 - DNA, 201 bp, Homo sapiens
cagagcatgggataattgattcctgctgagggccttttctaccagtgttagggtgtagcccggaggtctcggtccccatgacccgcaattccattcctagyctccgggaccctgctcagcaagtgcggaaaacagcggggctggtgatgacccacctgatcctcaaggacatggtgaaggtgaaggggcaggtcagcgaga

SEQ ID NO: 13585 - DNA, 201 bp, Homo sapiens
acctgccaaatatgatgacatcaagaaggtggtgaagcaggcgtcggagggccccctcaagggcatcctgggctacactgagcaccaggtggtctcctctkacttcaacagcgacacccactcctccacctttgacgctggggctggcattgccctcaacgaccactttgtcaagctcatttcctggtatgtggctggggc

SEQ ID NO: 13586 - DNA, 201 bp, Homo sapiens
ggtgggcccgggcggcctccgcattgcaggggcgggcggaggacgtgatgcggcgcgggctgggcatggaggcctggtgggggaggggaggggaggcgtgkgtgtcggccggggccactaggcgctcactgttctctccctccgcgcagccgagccacatcgctcagacaccatggggaaggtgaaggtcggagtcaacgg

SEQ ID NO: 13587 - DNA, 201 bp, Homo sapiens
ggtggctggggggccctgggctgcgaccgcccccgaaccgcgtctacgagccttgcgggctccgggtctttgcagtcgtatgggggcagggtagctgttcyccgcaaggagagctcaaggtcagcgctcggacctggcggagccccgcacccaggctgtggcgccctgtgcagctccgcccttgcggcgccatctgcccgg

SEQ ID NO: 13588 - DNA, 201 bp, Homo sapiens
tgaagcaggcgtcggagggccccctcaagggcatcctgggctacactgagcaccaggtggtctcctctgacttcaacagcgacacccactcctccaccttygacgctggggctggcattgccctcaacgaccactttgtcaagctcatttcctggtatgtggctggggccagagactggctcttaaaaagtgcagggtctg

SEQ ID NO: 13589 - DNA, 201 bp, Homo sapiens
gccccagcaagagcacaagaggaagagagagaccctcactgctggggagtccctgccacactcagtcccccaccacactgaatctcccctcctcacagttkccatgtagaccccttgaagaggggaggggcctagggagccgcaccttgtcatgtaccatcaataaagtaccctgtgctcaaccagttacttgtcctgtct

SEQ ID NO: 13590 - DNA, 201 bp, Homo sapiens; identical to SEQ ID NO: 2445

SEQ ID NO: 13591 - DNA, 201 bp, Homo sapiens; identical to SEQ ID NO: 2446

SEQ ID NO: 13592 - DNA, 201 bp, Homo sapiens
ggctttcctgtccccacagtgggtgatggggccacttaccagcttccgaagggctccctcatccagcccagctaaggcctcgtccgccatctcgctggccyctagctccgtcggttcctttctggtgagatccccagtgcctgtggcacctgtcaccagctcagagaattctgcaggggacagacatgaatcaggcatgct

SEQ ID NO: 13593 - DNA, 201 bp, Homo sapiens; identical to SEQ ID NO: 2449

SEQ ID NO: 13594 - DNA, 201 bp, Homo sapiens
cggaacgttaaggaaggcaattaattcaaccactatttattgaatacctactatgagccagtaactgtactaggcactgaagatacaatgaaaaatatgayatttatttgaaccacctcttgagttcactcgcccaaacaagactaatttatcatcgtcataaaaaaaagactttaactttgccttgtatgaccacacgcg

SEQ ID NO: 13595 - DNA, 201 bp, Homo sapiens
ttaggaaactgactgactttaattagtatgtgtaataataattacgattaattaagtgaaggttataggataggccttagtggcacccccaactcaaggtrtcaaggcaaggcattggcaggaaggccaatttgtatgaaaatatctgtgtgctgaaggaatttcagaaataagagtcattctccatggcactgaaattag

SEQ ID NO: 13596 - DNA, 201 bp, Homo sapiens; identical to SEQ ID NO: 2450

SEQ ID NO: 13597 - DNA, 201 bp, Homo sapiens; identical to SEQ ID NO: 2451

SEQ ID NO: 13598 - DNA, 201 bp, Homo sapiens
ttgataaataagaaatgagagtgaagaaaacataacacaaatttttaatgcttgatattttaaagactttggcttcaccgatttaaggcatttgcagatawggaaaaatgttatggaaaaggggaggcggttggagattatcgggtcaaacccacactcacagtgacaaaaagtgacagaaagatattacgcaaatggagt

SEQ ID NO: 13599 - DNA, 201 bp, Homo sapiens
accactatttattgaatacctactatgagccagtaactgtactaggcactgaagatacaatgaaaaatatgacatttatttgaaccacctcttgagttcastcgcccaaacaagactaatttatcatcgtcataaaaaaaagactttaactttgccttgtatgaccacacgcgcacacacataggatttgtaatactgatg

SEQ ID NO: 13600 - DNA, 201 bp, Homo sapiens
gggggaagggggaggcggagagggaagagaggggaggcagggggtgtgtgaatgtttctatgagtgcgggccagaggagggctgggaacccggagccgacrctcgagacttccagtatcccacagagcactggggcggcgcacccggccgagcggacctcccttcctaccacagaagccctcccgcccccagcacggccac

SEQ ID NO: 13601 - DNA, 201 bp, Homo sapiens
atgtttttcttcctctctttacttgttttgttttgctttctctcacgcttgggttctcttctttcttccttcagtgctttaagcctgtctcgtactacccrtgagcttagctcagcctgattactggtccttaccttttaagggatttctggttacagctccatctctttctaaggaggggtaaagacctagctgcgtcta

SEQ ID NO: 13602 - DNA, 201 bp, Homo sapiens
ggcctctccaagggggaaacaaggaatggattcatttcttgatgttttaaattgaattttagctctgttggagagtttatacagaattagtaataagtacrtagaaacctagcatatcaaaaaaagatacaaaaacataatgcaaaatattcctaactcagttatgaatattttgagttactgtaaaagctgagtattgat

SEQ ID NO: 13603 - DNA, 201 bp, Homo sapiens
agcatctattgtttcctgactttttaataattgccattctgactggcgtgagatggtatgtcattgtggttttgatttgcatttctcagatgattagtgaygttaagctttttttcatatgtttgttggctatgtaaatgtcttcttttaagaagtgtctgttcatatccttcacccactttttgatggggtggtttgttt

SEQ ID NO: 13604 - DNA, 201 bp, Homo sapiens
cacggacgcatgtcaactctggagcagatatcttcagcgcagcatctgacctgggagtacagccacataccctcattcctaaacggcagattgactactgsagccacacacagtctccgggcaatgtggagacatgtctaatatttagtcaacataactcagggtgccacagtcttcacaactgttgtgagcacttgagga

SEQ ID NO: 13605 - DNA, 201 bp, Homo sapiens
aataccaggttaaataggagtggtgagagagggcatccttgtcttgtgccagttttcaaagggaatgcttccagcttttgcccattcagtatgatattggytgtgggtttgccataaatagctcttattattttgagatatgttccatcaatacctgtttattgagagtttttagcatgaagtggtgttgaattttatcaa

SEQ ID NO: 13606 - DNA, 201 bp, Homo sapiens
ccaaaaggagatgaagaaggtgttcctgctgttgttattgacatgtcaggactgcgggtaaggccaggtcccagttgtgtttggagaatatgatgctattktcatgttggcagttccattaccttgtgtggccctgattctggagttccatgactgggcatttctgcctaaagccctgttaaaacggtaaaactgtgagca

SEQ ID NO: 13607 - DNA, 201 bp, Homo sapiens
acaggcatgcaaacacttgttgaaccaatgcacaaatatattttgctcttcttcatagattcctccggcctcagatgaccaggcaccactagatacagaayactgtgctttccttctccaaggtaaaggaataaatatctgttccccttcatgaagtgttactgttgggcctttatgccatcctgaagccaccaggatgtg

SEQ ID NO: 13608 - DNA, 201 bp, Homo sapiens
acattatttcagttaatctaattttcttcctagtgtttttttatctgctagtttcccaacttacagatatcaaatgaaatgatactatttcatctgtataytgaacactgcagaaataaacattagaattaggacacatcaaaatataaaactaatcagtgtccacagatttgaagagtttcaagtgttcctattttgcca

SEQ ID NO: 13609 - DNA, 201 bp, Homo sapiens
cactagactatactccttgagaacagcgattgtgtcttatttatttctgaatcaccaattcagacaggcatgcaaacacttgttgaaccaatgcacaaatrtattttgctcttcttcatagattcctccggcctcagatgaccaggcaccactagatacagaatactgtgctttccttctccaaggtaaaggaataaatat

SEQ ID NO: 13610 - DNA, 201 bp, Homo sapiens
cagataccccaagacactgtttaaattataagactggttcacttttcatgaataaacatgagagataatgtgtgaaggggaaaaacatttaccaatcatgygtcttcaaaaccttccaagattatgcagctttaatggctgaatgattttgaaagaaaaacttgtaaatggagctgcacctgaactcataataaaaaggca

SEQ ID NO: 13611 - DNA, 201 bp, Homo sapiens
ctcataataaaaaggcatcagattaattgagtctcagagcttccctaacaataagcctgacctgcatatccaagttgtggccggccaaggccaagagggcmtttgcccttagtctcaggctgctccagtttgacagaaagtcaaggcaggccactcctgacagggtacactaataaggacagagggttagggcacttcaag

SEQ ID NO: 13612 - DNA, 201 bp, Homo sapiens
gttcaggtatacactgaatatcctcgaagaaattggtggtggccagaaggtcaatgatgacattattgtcaactgggtgaatgaaacattgagggaagcaragaaaagttcatccatctctagtttcaaggtaaaattctttgtcttctgctagaggccatctgagctctatgcctatctgtattgttttcattatgtgtt

SEQ ID NO: 13613 - DNA, 201 bp, Homo sapiens
ggacgcatgtcaactctggagcagatatcttcagcgcagcatctgacctgggagtacagccacataccctcattcctaaacggcagattgactactgcagycacacacagtctccgggcaatgtggagacatgtctaatatttagtcaacataactcagggtgccacagtcttcacaactgttgtgagcacttgaggatgc

SEQ ID NO: 13614 - DNA, 201 bp, Homo sapiens
tagagaagaagttgggtaggtcaggctaggaatgtaaatctgagaggatcttaaatattaggatattgacaggcagtggagagctactggaagatttagarcaggaaagctacaggatctgcattaagagatgaatctggaattgaggccaagttattctcttaattttcaagggcgaatgaggaaagatccagctctgac

SEQ ID NO: 13615 - DNA, 201 bp, Homo sapiens
acacacagtctccgggcaatgtggagacatgtctaatatttagtcaacataactcagggtgccacagtcttcacaactgttgtgagcacttgaggatgctscatttgaagataggaatttgccctcaagcatctggggtttgggtacagaacagagcttcccctgccaccacctgctaattttataaaatgtgcattcaaa

SEQ ID NO: 13616 - DNA, 201 bp, Homo sapiens
ggtttatttctattgctctatttcacggaggctatttactgtgattttatcttctttaaaatgttttcaggaaaagcgcgtattgataatttagattgtayggcttattggcccaatgggggtagtttaattttagttcctgcggttctgtttttctaaaaaacttctttacagtactttagtggataaattatctagagt

SEQ ID NO: 13617 - DNA, 201 bp, Homo sapiens
atttgctcaatgctttgatcttggagtaagtataacattaatcacattgtcttagtttcaagtacttatttgctgacagacctgagctccttctccatctytcctggcacatgtagatactaaaggcatttattgaattgaaaatttgtcacaagtattttttttctcagcttcttacatacgcatgaaagactttgattg

SEQ ID NO: 13618 - DNA, 201 bp, Homo sapiens
ggcaaagtttaaaattagaagtggatctttattaacctcaggtgcaactttttttccataaaaaccttttataataattcatgagattataatagatgtgwgtgcattcaatatagcttccatcctgaaaatgttttttcagtttttatttatttttaaattgacatataacggtatgtatttatggggtacctagtaatg

SEQ ID NO: 13619 - DNA, 201 bp, Homo sapiens
ccgcctttttcaggggctcagacatcattcgcaaaacccaggctttgggctggtgacttgtcatacttcagggataaagggatacatttctgagcagcaargaagggagactggtggagtggtagcagctggggctttgtatgtttgttttggccacttaggaataaaattcactttggctaaagttttaactcaagcttt

SEQ ID NO: 13620 - DNA, 201 bp, Homo sapiens
ggtctcaggcctgccagccttcaggctagaactacaccactggctctcctgggtctccagcttgctgaatcgtcatgaagatcttgggacttgtcagcctscctaatcacatgaagcaattccttgtaataaatctctttatacatacacatacatgcatacataaatacatacacacacacacacatacacacacatcct

SEQ ID NO: 13621 - DNA, 201 bp, Homo sapiens
gttagtgctgtgtgctcctagggacgctgcttttcgtctgttgtgcttccaagtagataactcttcacttgccttttttccttgtctgtgtcttcaactasagtggacattctacaatggcaaggactgtacccatcttaattcatcttcattccctgcccatgatatattgggatgagggtgggctgcagagtgaagcaa

SEQ ID NO: 13622 - DNA, 201 bp, Homo sapiens
ttgccttttttccttgtctgtgtcttcaactagagtggacattctacaatggcaaggactgtacccatcttaattcatcttcattccctgcccatgatatrttgggatgagggtgggctgcagagtgaagcaaaggtgtttttctcttcatacaaatcccatgagtgcatggagaggaagtggggagagctgaagatgcta

SEQ ID NO: 13623 - DNA, 201 bp, Homo sapiens
taactcaagctttccttagcaatttatctttgatttgatgccaaataaacagcattttagatgaaaacataagcctttctaagaagcgagggggtgaaaarcgggaagtactctggcagccttcatagtaattttggccacagccacgagtataataaatataacttgcttttattccatcaatttgttgattaactggaa

SEQ ID NO: 13624 - DNA, 201 bp, Homo sapiens
gaagttcagtttcctcatctataaaatcaggcaagtgctatctactcgctaggtgtgatgtgggttattttccccttccattttcccatgttgtcgtctakgtagatatggagcatatctactccacccagcgtcaccactgacttactgagcccctaatatttactaggcatcatgccaaacgcttgaaagataattact

SEQ ID NO: 13625 - DNA, 201 bp, Homo sapiens
ctaggcatcatgccaaacgcttgaaagataattactcttttattttcatacatagctaggtaaagttgttattaattatatccttattccagatgaccaarctgaggttcagggagggttaagtgacttgtctggggtcacagaaccagtaactggcagagtcaagattcacacctttcctctctctcattttatgttggc

SEQ ID NO: 13626 - DNA, 201 bp, Homo sapiens
taaagcacatttcatggaccgtgcatctcaaaggttttttaaataaaactttaggttcttaaaatgccaactgacttgtgtttttcccacgcattgcttcraccaaactaagactccagaggttccacttacttctctttttggaccagtcactgacttactttgagactttggggagtgacttcaccctccagggcccct

SEQ ID NO: 13627 - DNA, 201 bp, Homo sapiens
ctcttttactgtggatgttgaaagtaatgctggtgcccctattcagtagcaacagtcatcttgtgagattctgactcttccctgggatcatgccttaatgyctgaatgatagcctctctcgtcccttcaccttccatctagtcttccctcacctctctaaaagctgttgcctgaatcgtcctgaagcttcagtatattgtg

SEQ ID NO: 13628 - DNA, 201 bp, Homo sapiens
cgtttggccttttgtttttaaatacaggaattttcagaacctttgctgggtcaaatgtgcaatgtgaatctttaaggcggagatacattcactacacagtrtttcccaaacttttatgactcaggatttctctgagggacactactgttttcaaaaactgtcagtttgggaaacatagtgctaggctgtgaagacataact

SEQ ID NO: 13629 - DNA, 201 bp, Homo sapiens
tgagaaaaaatgctttataatgacttattcttcattctaatgtcaacatatgaccttaaacagtagatatgatttccttttcaaacctagcattctgcttwtgcctactgccctattgagtatatgttttattcgtaagtacatgaggctaaaagttgtgtatgggagtaagggcgggacatgtaagagtccattgtattc

SEQ ID NO: 13630 - DNA, 201 bp, Homo sapiens
taaatgcatctatatgataagtgcttttataaacaaattattctgtgtcatcatatcatcatcatcatcattatcatcaccatcagcagcagcagcagcarcaacagcatcagtagtcagcccctctgtacacttgactgagtagaagttggttgttaacaattacaggcctctgcatgggtcacaaaacatgatctccac

SEQ ID NO: 13631 - DNA, 201 bp, Homo sapiens
cagtaaaatgatcaacctgtcagtgccagacacaattgatgaaagaacaatcaacaaaaagaagctaacccctttcaccattcaggtatgtcttcccaccrttaccataatacaggatttgtttggcatcaatgagcatcataactgctgagtccgcctttttcaggggctcagacatcattcgcaaaacccaggctttgg

SEQ ID NO: 13632 - DNA, 201 bp, Homo sapiens; identical to SEQ ID NO: 2454

SEQ ID NO: 13633 - DNA, 201 bp, Homo sapiens
gcaggtaagcacttgaaatataaaacacctatgggaatagacaagagaacattgttattattacaaaattgatctcttaaaagcaaaaatgttgtcatatygtgaaatgtggtttgacagacccagcaaaacatccgagccagtagccttggttatttttatggctctgcccaaatgttcttaaacatagcgttgagattc

SEQ ID NO: 13634 - DNA, 201 bp, Homo sapiens; identical to SEQ ID NO: 2455

SEQ ID NO: 13635 - DNA, 201 bp, Homo sapiens
ggcaaaggcgaggagaacacccaggctagagtgagtgagaaggttcatgagagtcaggtgaaatgaggttactcttagccaaactaaaaagatgtaacccrgggcaggcagatggtattggtgcctgacacctgcatgtgactttcactgacttcaaaatagctacagtgaaaagtcagagaagggagggtagatagaagg

SEQ ID NO: 13636 - DNA, 201 bp, Homo sapiens; identical to SEQ ID NO: 2457

SEQ ID NO: 13637 - DNA, 201 bp, Homo sapiens
ccaggccttacctaccctaaccagttgtagaaacaaaataatagctgatttttcgatctttatgagaaattgagatgctattaaatgatttaaataaactwcctgaaaatctgtatgctttcattgactaagaataaatttatattttaagactataattctgagaattctttttgtcaataagcatattttcagaatcta

SEQ ID NO: 13638 - DNA, 201 bp, Homo sapiens; identical to SEQ ID NO: 2460

SEQ ID NO: 13639 - DNA, 201 bp, Homo sapiens
ctaacagttgtatttttcaggttaatgctctaagattcaacaaaaagcatatagctttaattacgttctaccaggtagaggtgctggagatgtttacttgwcttttttaaaaaaatcatgaactagtcccaatattgagacaaaggtcaactaatattaaatgaatatcacccaagcaaggagattcagatttgaagtatg

SEQ ID NO: 13640 - DNA, 201 bp, Homo sapiens
tatagtacattaactatagttacccttttgtacaataggtctctaggagttattcctcctgtctaactgaaattttgtactctatgaccaacatcttcccrtttttcttaccctccccccattgctcaactactccctgcttctataagtcaactttttaagatttcacataaaagtgagattaggcagtatttgtctttc

SEQ ID NO: 13641 - DNA, 201 bp, Homo sapiens
ttaatgtatgtatacattgcggaataattaaactaagctaattaacttacctatcccctcatatacttttttttttcccgtgagaatatttaaaatctccyttagcaattttcaaggatatagtacattaactatagttacccttttgtacaataggtctctaggagttattcctcctgtctaactgaaattttgtactct

SEQ ID NO: 13642 - DNA, 201 bp, Homo sapiens
atttttatgtgtttgacattttatgaaaaaaaattgcaagtcatgaacagccctctttctttcttaagctacctgaaaataataactataattaacttttsttacattgttatcagaaaggaatagtcaaattagcattaaacagatgtaaagtcaaccttcatatggcagctgtgtatataaattctctggaagacctat

SEQ ID NO: 13643 - DNA, 201 bp, Homo sapiens
tccttcattggcttctttatttatgtggcttaaatgtctcatgtcatggaaattgggtaccaagagggagcatcctaagaatgagcattccaaaaagaagraagcagaagtttccagccccagacatcatttctaccaccctctaatggtcaaagcagttaaaaaaccagcccagattctaggggagggaaataagctcta

SEQ ID NO: 13644 - DNA, 201 bp, Homo sapiens
taacctaaaatggccaatttcatagtttcactctctgctgatcaaatttcctgattctttttacctatgtttgttttgtgtcatcttcaacattttcttayatacagtaaatacttgcttaataaaaagtactaagagtgattgaaataaggaagttcggtcatgtgaattcattggagctatgttgactatcctttggcc

SEQ ID NO: 13645 - DNA, 201 bp, Homo sapiens
ggcagagtgcaagagggacttgaaaaataggaagattagtagaaagtttatataaggagcagtaagacattccccaccttatccccacccacatgttgctwtataaaataaaaaaagaaacattcagaaaaaaagagtttttagctattgctatggtttgaatgtcccctccaaaactcatgttgaaatttaattgccaat

SEQ ID NO: 13646 - DNA, 201 bp, Homo sapiens
attgtacaatgactaacaaacagggaaaattacaatctcatttttttagtataaatacattggttgggccaaaacttagctacccttgccaaaactatatrcccaataatgggcctctttgatgacaaagaacacaagggcagttgttaacttttacttagtcactttggattattctcagaaaattctcaagtcaacttc

SEQ ID NO: 13647 - DNA, 201 bp, Homo sapiens
cttatacagtgttgtgcctgttctctggcagccgctgcatggcaactgactccgtgctgtcatgtgtatgtctgagtagccagccagcaaccttgggagaygtctttaaatcgtgtaaattggcaaaggcgaggagaacacccaggctagagtgagtgagaaggttcatgagagtcaggtgaaatgaggttactcttagcc

SEQ ID NO: 13648 - DNA, 201 bp, Homo sapiens
atgattttattctcttttgtggctgcatagtattccatggtgtatatgtaccacattttctctatctagttcattgttgatgggcacctaggttgattccwtatctttgctattatgaatagtgctgcgatgaacacaagcatgcaggtgtctttttggaagaataatttattttcctttgagtatgtacccaatattggg

SEQ ID NO: 13649 - DNA, 201 bp, Homo sapiens
aagccctatttaatggctggcacatacacaacaaggtccactctgctgttgctgtctccacctggttaaaaagtcatatttctcatgagtgtttactacayaagaatcgtgcatttaagaaagtagacagaaaaatatattactgtagaaggagaagtaatgactgataattatataaatggcaccggaagggattttttt

SEQ ID NO: 13650 - DNA, 201 bp, Homo sapiens
tttaagaaagtagacagaaaaatatattactgtagaaggagaagtaatgactgataattatataaatggcaccggaagggatttttttccctgcatgctayatattaaaagatctattaaatttacagctggttctagctggaatttatttcattgaattgtgctgatgtgctaatttggtcatttatctggacaataaat

SEQ ID NO: 13651 - DNA, 201 bp, Homo sapiens
ttactgtagaaggagaagtaatgactgataattatataaatggcaccggaagggatttttttccctgcatgctatatattaaaagatctattaaatttacrgctggttctagctggaatttatttcattgaattgtgctgatgtgctaatttggtcatttatctggacaataaatggcttgtcattttttcctatgagagc

SEQ ID NO: 13652 - DNA, 201 bp, Homo sapiens
ctcccaagtagtttggacttcaggcacctgccaccatgcctggctaattttttgtatttttagtagagacggggttccaccttgttggccaggatggtctygatctcttgacctcatgatccacccgccttggtctcccaaagtgctgggattacaggcgtgagccactgcgcccgttctaaatatttcttttacatttat

SEQ ID NO: 13653 - DNA, 201 bp, Homo sapiens
tcccaagtagtttggacttcaggcacctgccaccatgcctggctaattttttgtatttttagtagagacggggttccaccttgttggccaggatggtcttratctcttgacctcatgatccacccgccttggtctcccaaagtgctgggattacaggcgtgagccactgcgcccgttctaaatatttcttttacatttatt

SEQ ID NO: 13654 - DNA, 201 bp, Homo sapiens
cagccaaacgtagacaagtaatgtttttccagaaattaaattctagtacagcaatcagaaacctgaacagctttattaaagtgtgtccattatttcagtcrattgcttatttataattccatgttggatgtcttcaaacattatcatgcaaaaattctaattaagataattagagcaagcagagagccacagggatttttc

SEQ ID NO: 13655 - DNA, 201 bp, Homo sapiens
ctatcagtttttgtttcaagtatcgtgaaactctgttattaggttcataaacagtttagattgttgtttcattctaatttactcatccctttgtccttatraagtagtcttttttatgcctactaatattcttttctctgaaatctattttttctgacattaatagataatagctactattgcttctataggcttcctatt

SEQ ID NO: 13656 - DNA, 201 bp, Homo sapiens
cctttgtccttataaagtagtcttttttatgcctactaatattcttttctctgaaatctattttttctgacattaatagataatagctactattgcttctrtaggcttcctattgattagtggttagcatggcctatctttttaccatccttttacttcaattgatctgtgtaaataacaattacttttaaagggactttt

SEQ ID NO: 13657 - DNA, 201 bp, Homo sapiens
ggggtttcaccgtgttggacaggctggtctcaaactcctgacctaatgatccgagtgcctcagcctcccaaactgctgggattacaggcatgagccaccaygcccagctccattgttgtttcttatgcttgaggtttgttgaacttatagaatctatgggtttatactttccatcaaatttggaaaacttaactttcatct

SEQ ID NO: 13658 - DNA, 201 bp, Homo sapiens
gcagatcttacacactggtaaattggaaatgggttattgatattcaagggactttatttttagccatgattttcttgctgtgaatattatttttcttaaartaaacataatgtatagtgctcgtacctcctcctttattgatacttatcttttattgggcacagaaaaacaggaataaaaggtagtcctttattattgaaa

SEQ ID NO: 13659 - DNA, 201 bp, Homo sapiens
ccgagtgcctcagcctcccaaactgctgggattacaggcatgagccaccatgcccagctccattgttgtttcttatgcttgaggtttgttgaacttatagratctatgggtttatactttccatcaaatttggaaaacttaactttcatctcttcaaacatatcttccatacccaccagccctggttctgggggattccaa

SEQ ID NO: 13660 - DNA, 201 bp, Homo sapiens
cttacctccctcatgtttttgttcaaatgtcactttctcagaaaggcctttcctggtaacgtcattaagaattttaattccacaccaccctcaaccctgawtgcatacacacacatagacttacattccccttctgcgctttaatttttttctccctaagacttattactatctaatatgtacttagttatcttaaatatc

SEQ ID NO: 13661 - DNA, 201 bp, Homo sapiens
gtctaatattccattaactccatccagtgtacatgttttttaacctggacattatagtttccatgtatagaaattttgagtcatttttatatttcccatakctgtcctttcctttaccttcttgaacatacagaaaataattacagtaacttattttgggatctgtttctactaatttatttttatcttcattatgagtca

SEQ ID NO: 13662 - DNA, 201 bp, Homo sapiens
ccctcactgtctgcccttacctccctcatgtttttgttcaaatgtcactttctcagaaaggcctttcctggtaacgtcattaagaattttaattccacacyaccctcaaccctgaatgcatacacacacatagacttacattccccttctgcgctttaatttttttctccctaagacttattactatctaatatgtactta

SEQ ID NO: 13663 - DNA, 201 bp, Homo sapiens
ctgcagcttggaaactttttccatgctggaaaaatcttaaggctaactttgttttcttcttttcaggggccactgtcctgtgcttcctattgtctgatgtmtgaacaacattgtttcatatgtttttcactgtattataagtgtttaaatgtgggccctgttattccatcatggccagaaacagaagttcctttcatacaa

SEQ ID NO: 13664 - DNA, 201 bp, Homo sapiens
agagaagttctagtctagttgattctcctcactctacagatatggaaaattaagcacagaagggtgactaatcattaattatagtaataaaaatgattaamtattagtactagcacttttagaacgtatgctgtgtgttagtcattatactaagtactctccatgcatttcttcatttatgcctcgcaactaggctatgat

SEQ ID NO: 13665 - DNA, 201 bp, Homo sapiens
atgggccacaaaggaaatcttaaaaaattctaaaggggagcttagtagatattccagtttgactagagaagaagttgggtaggtcaggctaggaatgtaartctgagaggatcttaaatattaggatattgacaggcagtggagagctactggaagatttagagcaggaaagctacaggatctgcattaagagatgaatct

SEQ ID NO: 13666 - DNA, 201 bp, Homo sapiens
tgttggccaggctggtcttgaactgctgacctcaagtgatcctcccgcctcagcctcccaagatgttgggattacatgagtgagccaccacatctggcctyttttgctttttctacgtatcatgctctcaaatatttttcttaccagtttttttcgtgtttttttttcaccttttaacatgagcattgttaaaatgctcac

SEQ ID NO: 13667 - DNA, 201 bp, Homo sapiens
ccctgtatccaataaataaagaacacacattccccttcagtatacttgaaatatttaccaagatgggccacaaaggaaatcttaaaaaattctaaaggggmgcttagtagatattccagtttgactagagaagaagttgggtaggtcaggctaggaatgtaaatctgagaggatcttaaatattaggatattgacaggcag

SEQ ID NO: 13668 - DNA, 201 bp, Homo sapiens
aaacaatatattaatactggacaaagtagactctaatgggcttattttttaaggatacaaagaaatgattcatcaaggtgatgtgccagcatatgactgtytgcacttaactgcataacttctaaataccagaaacaacaatggacaaaatgacaaggagctattgataaatctacctctaaaatgagaacctttttttaa

SEQ ID NO: 13669 - DNA, 201 bp, Homo sapiens
cagggactagagaatccattctctagcccacagcatatcaaggaagctgaccataggctaggcaaacaatatattaatactggacaaagtagactctaatrggcttattttttaaggatacaaagaaatgattcatcaaggtgatgtgccagcatatgactgtttgcacttaactgcataacttctaaataccagaaacaa

SEQ ID NO: 13670 - DNA, 201 bp, Homo sapiens
ctcactgcagccttgacctcctgggcttaagcaatcttcccacctcagccttctgagtagctgggactatagcgcatgccaccacaccaggctaatttttwaaaaagtttttgtggacacggggttttgacatgttgcccaggctggtctcaaactcctgggctagagcgagctgcctaccccagcctcccaaagtgctgg

SEQ ID NO: 13671 - DNA, 201 bp, Homo sapiens
agaaaggccagcttgaacaaagaagagtgggatataaattctttatagagaaagctaggtaataggtgcaaagtgggagtaaggaaaaaagagaagatcaygcctgtagttttgcactgttgagcactcttttgtcatcttaaaaatgcgaactgaacttcccccactgtttctaatgctttataaacagttttaaagttt

SEQ ID NO: 13672 - DNA, 201 bp, Homo sapiens
ttattaattatatccttattccagatgaccaagctgaggttcagggagggttaagtgacttgtctggggtcacagaaccagtaactggcagagtcaagatycacacctttcctctctctcattttatgttggcagtttcttaaaagtataatccatgtctatttaaactgttttgtatcttctaacatgatccactagttg

SEQ ID NO: 13673 - DNA, 201 bp, Homo sapiens
tcttcttttcaggggccactgtcctgtgcttcctattgtctgatgtctgaacaacattgtttcatatgtttttcactgtattataagtgtttaaatgtggkccctgttattccatcatggccagaaacagaagttcctttcatacaaaactttagatatgttttggaactgaatataaacttgactaatgtgagaagtata

SEQ ID NO: 13674 - DNA, 201 bp, Homo sapiens
gtctgaacaacattgtttcatatgtttttcactgtattataagtgtttaaatgtgggccctgttattccatcatggccagaaacagaagttcctttcatasaaaactttagatatgttttggaactgaatataaacttgactaatgtgagaagtatagggtgatattagttaaacaaaaataggttataaaaagatacaca

SEQ ID NO: 13675 - DNA, 201 bp, Homo sapiens
taaacaaaaataggttataaaaagatacacaaatagaaaataaattataagaaaaagaaacaattttggtacaaaatcataagcttgggaagacttttagrtaggaattctgtaagtaataaaataatttacttgtaaatgcttcagtctttccccctatactaatagctctgacaaggcaagaatcttacatcccctcat

SEQ ID NO: 13676 - DNA, 201 bp, Homo sapiens
ataatttacttgtaaatgcttcagtctttccccctatactaatagctctgacaaggcaagaatcttacatcccctcattagatcctatgttagtgtgactyaattcattttcctacctggaaggaagccccagaaactgcatgtcacattacattctgtctggaaagataatggcaaagacaaggttcgtggtgtgcctag

SEQ ID NO: 13677 - DNA, 201 bp, Homo sapiens
cttacatcccctcattagatcctatgttagtgtgactcaattcattttcctacctggaaggaagccccagaaactgcatgtcacattacattctgtctggmaagataatggcaaagacaaggttcgtggtgtgcctaggcactgcagctttagttccaagccactgtctgcagatcctaataatggccggctctggatgta

SEQ ID NO: 13678 - DNA, 201 bp, Homo sapiens
gatgatttcccccctccgcctccaggaagaaagaatgttactgccttaataaaaaatgaaaagagaatgatgctcaaaatctttccaaataaaatgttccytatattaggtgtctctggatgtttcattttgaaagtttgctgacagtgtgctataaatcgttcattcattcattcctccaacacgttcgagtgcctagta

SEQ ID NO: 13679 - DNA, 201 bp, Homo sapiens
acttccctatccccttcagtagcttggaaatcattctcagggtggacagttggcaaacagcatatgcataaacttgcagataaaacccttgaagcaagcargctgccagcacatggcaatgatggctctgaagcaaatgaacaaagaatccgaagcagacaattaggaaactctccccaggtcaaacaggctgtggatggt

SEQ ID NO: 13680 - DNA, 201 bp, Homo sapiens
tatgcataaacttgcagataaaacccttgaagcaagcaggctgccagcacatggcaatgatggctctgaagcaaatgaacaaagaatccgaagcagacaawtaggaaactctccccaggtcaaacaggctgtggatggtgaagtcaggatgggtccttgaaaaacaaaatgcctggtttgttcctctatgccaaataataa

SEQ ID NO: 13681 - DNA, 201 bp, Homo sapiens
tttcccactgctatatgacgtgcattcagtggcatttagaactcagcgtgtgtcaggcactgtgccagtcagagtcaagcttctagatggaaagcccccaytttttaggatctaagctaaatccatctttctaactatgcatctttcatgggctattaacattcttctagcaccaccaaccgacctgggttttaacaggag

SEQ ID NO: 13682 - DNA, 201 bp, Homo sapiens
aaataataaataagtaaaacaagtgttggaaggcaggaaagtaagcaggtactaatcacatccctctagtgcctcacatccaaacctcatcaactctcttrttgaaggaggaactggctaaagctggagctcataattctgtttcattttgacaaagagcttttcagcacagcacattttacaaacactggtaatactgag

SEQ ID NO: 13683 - DNA, 201 bp, Homo sapiens
cttcattctattgtttcctttgcagtacagaaagaaaatagcatcttattgtaattagtatttgattattaatgagtttaaactttttttgtatgtttatkactgagtgtattctgttgtaaatggcttatccagtcccttgtccatttttacatggtagtattttttcttcctccaatgattttttttttaattttaatt

SEQ ID NO: 13684 - DNA, 201 bp, Homo sapiens
agatgagcaattgcttagtgtactatctagaatggaggctctagcctaatttttttttgagacagagttttgctcttgttgcccaggctggagtgcaatgrtgcgatctcagctcaccacaacctccacccgccaggttcaagcaattctcctgcctcagcctcccaccaaatagctgggattacaggcttgtgccaccac

SEQ ID NO: 13685 - DNA, 201 bp, Homo sapiens
agcacctctcccaagtagaagggacagacttttgatggaacagggtgaagcacaggaagtgagtaccctctggggaggccacacagccatagtcagagatragattaagatcttgtcttctgaaactaataaaatgctctttatatgattttatactgttttgggtattttggatatagggtctcactctgtccccaggct

SEQ ID NO: 13686 - DNA, 201 bp, Homo sapiens
ggcttgtgccaccacacccggctaattttctacttttagtagagacagggtttctccatgttggtaaggctggtctcaaactcctgacctcaggtgatccrcccgcctcggcctcccaaagtgctcgaattacaggcatgagccaccgtgcccggcccagcctaattctattctttcttctctttgtgttttttttttttt

SEQ ID NO: 13687 - DNA, 201 bp, Homo sapiens
cccaggtagcagaaaatttcttcatttcctttgccaggttttccaggtgaggtaatccctaaccaaggaaaagaatatagtgtctagctctattcagaagscatggggaagacagtttgtggggctttattcttctccccactgcaattccaagaaagcaactatgcttgtatgagtttgacatattaggctctgctgttt

SEQ ID NO: 13688 - DNA, 201 bp, Homo sapiens
aatgttggcaactctagtttgcagttctcagactgtggcacaaatgctatgctctaggcagtgtcccacattctgtcacaggtctttatactcctctgggyggcacaggagctgtgggagagctcgtgcctgaaggagtcctggtacagtgttgtaaggaggccttgactctcccccacgtgagttgggtctgcgagctgc

SEQ ID NO: 13689 - DNA, 201 bp, Homo sapiens
tctccaaatgttggcaactctagtttgcagttctcagactgtggcacaaatgctatgctctaggcagtgtcccacattctgtcacaggtctttatactccyctgggcggcacaggagctgtgggagagctcgtgcctgaaggagtcctggtacagtgttgtaaggaggccttgactctcccccacgtgagttgggtctgcg

SEQ ID NO: 13690 - DNA, 201 bp, Homo sapiens
cacagggcactaaaatgcttttgagaaagaagtgttttattggtctgaatttacctgtttatattaattatatgtacggggaaatgtcttcttcaccagtmacagtggcttaaatgtacccacttatttcatgtgttttcatgctgttgcctagagaatagttttatattttctcaaatgttaataaagatattttgaaga

SEQ ID NO: 13691 - DNA, 201 bp, Homo sapiens
ttggtatattttatatgtatatatgttattctaacacatctgactcgctttgtctatggaaatgatatatcagtataggatgagtttagacaggacaaacraaattcaatttagattattttatagttcttatatttttgaaaatattatcccctcaattttctttcttcttttgtaaaataacgtgtttttgaaataatg

SEQ ID NO: 13692 - DNA, 201 bp, Homo sapiens
tgacgtgtcgcctctgtcatggtgttgatgaacctgtgtgtgcagtcatagatacatcgtgtgtgtttgcaaaaatgtgcgtgtttctctggagatttgarggggaaagagcactagaaagagctcatctgatagatgcggaaatccgaactcagaaagtaaactaggtagagcttccttccaggtttggttttttctaag

SEQ ID NO: 13693 - DNA, 201 bp, Homo sapiens
ctttaaagttcctggctgaggctggattgtgtagaaataagggcattagggatccaagcgggccataaaagaaacccatttctcactgtcatcgtcctctkttctggttatcatattgtgacgtgtcgcctctgtcatggtgttgatgaacctgtgtgtgcagtcatagatacatcgtgtgtgtttgcaaaaatgtgcgtg

SEQ ID NO: 13694 - DNA, 201 bp, Homo sapiens; identical to SEQ ID NO: 2453

SEQ ID NO: 13695 - DNA, 201 bp, Homo sapiens
agaaaggtttggcaattcttttgctccttgtaacactcggggctcattttctcctgtcttcttagtaagttgttgcagaattgattaagtaaaagaggccvcataatgtactgaaagaaatgtcatactagccccacattccttttatgtgaagcccttttaaaaatgaacacaacccactctttaaaaaaaaaaaaaaga

SEQ ID NO: 13696 - DNA, 201 bp, Homo sapiens
ataaaggaagcgaggaacattagcttttgtttggaatgcctttacatgggtgtatccctgtatcctagatccacacatctaagaagtaaagcacatttcayggaccgtgcatctcaaaggttttttaaataaaactttaggttcttaaaatgccaactgacttgtgtttttcccacgcattgcttcgaccaaactaagact

SEQ ID NO: 13697 - DNA, 201 bp, Homo sapiens
agcgaggtatggagcatcgtacccaacaggcagttttctagcccttgtcctcctccctccctccccattcacctagtttctactgtctatttttaattttwatttttatatttttaattttaatttattttttaatattttttattatttatgtttacttttcatatctgttttttgtgacaaggtctcactctgtcaccc

SEQ ID NO: 13698 - DNA, 201 bp, Homo sapiens
ccctgtatcctagatccacacatctaagaagtaaagcacatttcatggaccgtgcatctcaaaggttttttaaataaaactttaggttcttaaaatgccarctgacttgtgtttttcccacgcattgcttcgaccaaactaagactccagaggttccacttacttctctttttggaccagtcactgacttactttgagact

SEQ ID NO: 13699 - DNA, 201 bp, Homo sapiens
tttgtcagcatatttctaacatttttacttatataaggcaaaaagtattttatactttttctttatcatgtaggctactcagacttttccaacattgagttatttcttgattttttatcttttttaaattgccacaggttggaatcttttccttcattttcctttccttgcattttttccctttggctttttctttttgct

SEQ ID NO: 13700 - DNA, 201 bp, Homo sapiens
ctgctgggctttctcccatgcatttccctttcagaagtgagtagctttagggaatggtggttcttctctgctccagagacagtgtgggttttttttttttyttttttttttttttttgagacagagtctcactctgttgcccaggctggagtgcagtggcactatctcagctcactgcaacctctgcctcccaggctcaag

SEQ ID NO: 13701 - DNA, 201 bp, Homo sapiens
gctatatattaaaagatctattaaatttacagctggttctagctggaatttatttcattgaattgtgctgatgtgctaatttggtcatttatctggacaataaatggcttgtcattttttcctatgagagcaaatgagagatatgtacttaaacttccctatccccttcagtagcttggaaatcattctcagggtggacag

SEQ ID NO: 13702 - DNA, 201 bp, Homo sapiens
gtgatcttacatataacccgctcacaagcaggcaaaacaacagatgttaagtttgtggtgaagtgtctcctatgccacttgttaaagcaattttcttcttytttttttcaatatttctttttttttgagatggagtctcgctctgtcgcccaggctggagtgcggtggcgcaatctcggctcactgcaagctctgcctccc

SEQ ID NO: 13703 - DNA, 201 bp, Homo sapiens
atttttattaatagcagcattttattaaatttcttgactcatgtttcatgcattaactggattcctcctcaaaggacgtgtgcacttgatccacatcatcrtaatgcctgtgccatcttaactacatttttctagcttgaaggtcaggattagggggaggaacaccttccgagttgtattaacagggttggtgaggtggtt

SEQ ID NO: 13704 - DNA, 201 bp, Homo sapiens
agttttccacattatgaatattttttatgaaagtgaggggttctaaggacagatggaaaattctttaattttgaatcctagaattgcagaaccagttgagrcttgagaggtcattcggtcttaccatatttatttcattttttatctttatttttattatttatctggtatttatcataatcaagatgatgacgttaaatc

SEQ ID NO: 13705 - DNA, 201 bp, Homo sapiens
ggacgtgtgcacttgatccacatcatcataatgcctgtgccatcttaactacatttttctagcttgaaggtcaggattagggggaggaacaccttccgagytgtattaacagggttggtgaggtggttcgtcatgatatccatcctgtgtttcaaaatcaagaaaaaatgaaaatctctttccacaagcagtagcagaaga

SEQ ID NO: 13706 - DNA, 201 bp, Homo sapiens
gtggttcgtcatgatatccatcctgtgtttcaaaatcaagaaaaaatgaaaatctctttccacaagcagtagcagaagatattgtcagggcagggctgtcrcaggagtgtccacctgctgtgagctcatcacagataaccgtcacctctgctccatctccagcctactgttcagtctggagagctgagcagagttaggagt

SEQ ID NO: 13707 - DNA, 201 bp, Homo sapiens
tccatcctgtgtttcaaaatcaagaaaaaatgaaaatctctttccacaagcagtagcagaagatattgtcagggcagggctgtcgcaggagtgtccacctsctgtgagctcatcacagataaccgtcacctctgctccatctccagcctactgttcagtctggagagctgagcagagttaggagtggatgctggtcactga

SEQ ID NO: 13708 - DNA, 201 bp, Homo sapiens
atctccagcctactgttcagtctggagagctgagcagagttaggagtggatgctggtcactgatgcaagcagattcttccagaaagagatttggaaaggcrgcaagcagattcttccagaaagagatttggaaaggcagtaaagaaaagcaaagttgaaaggagctctagatattgaatgggctctggctaccaggggctc

SEQ ID NO: 13709 - DNA, 201 bp, Homo sapiens
accaggggctccttgttcatgtcttagggcatcttcgctgacattgtgaagctggctttactgttttcctcattttataggtgaggacatcaaagctcaaktaacttcctaagagtatggctagtaattgtatgtgatggtccacaaatgggaggaaaatgccttttacctgtggggtgaggctgtagagtgtagtgtatc

SEQ ID NO: 13710 - DNA, 201 bp, Homo sapiens
atatatttaggaagaaaaagccacccacttcctttgagctgaatgggagtaactttgggacacgttgatgaaaccctccctgtgtctctgcataggaccckaagattagtacaagtctgcctgttctggacctcatcgatgccatccaaccaggttccattaactatgaccttctgaagacagaaaatctgaatgatgatg

SEQ ID NO: 13711 - DNA, 201 bp, Homo sapiens
tatgtctacttctttctacacagacacagcaacaatctgatttctctatcttttccccacatttcccccttttctgttccacaaaaccgccattgtcatcmtggcccgttctcaatgagctgttgggtacacctcccagacggggtggcggccgggcagaggggctcctcacttctcagaaggggcggcagggcagaggcg

SEQ ID NO: 13712 - DNA, 201 bp, Homo sapiens
caaaagctttctactagaatgactggacaagctcactatattgtagttttaaaaatctcccatggggctatccatagtccatatacttaataactcattgkttttttttttttttttttaattgatcattcttgggtgtttctcgcagagggggatttggcagggtcacaggacaatagtggagggaaggtcagcagataa

SEQ ID NO: 13713 - DNA, 201 bp, Homo sapiens
tgtataccattaggttatggattgttttgttcatgtacacagctcatttactgagtacctcacatgggccagacactaatctgctaggagagatgaatggwaacagggaccacactacagagatctggaccaaagctcagaggaagggctcactgattctccccagcctccagaacaggatgcctgaaaccatgatgattg

SEQ ID NO: 13714 - DNA, 201 bp, Homo sapiens
tgccaagaagcccagcctcaggatctgcaatctcagacagaatcgcttttgcggctggcaaggtagggctaggcagcaggcacaggtgccatttcacagaytacctcgggccagcagctgccctttagacaccaaattaactcaccaaagttgtctttccagcaaagtggtttaatgtgaatttgaagcatttagtagcct

SEQ ID NO: 13715 - DNA, 201 bp, Homo sapiens
caggtgcaactttttttccataaaaaccttttataataattcatgagattataatagatgtgtgtgcattcaatatagcttccatcctgaaaatgttttttcagtttttatttatttttaaattgacatataacggtatgtatttatggggtacctagtaatgtttcaatacatacaatgtctagtgatgagatcagggta

SEQ ID NO: 13716 - DNA, 201 bp, Homo sapiens
gcaaacccacagttctgtggttgcagcattgattcttatttcagcatctgttacatggacagaagggagggtctccctccctctctctctctcgctctctyacacacacacacacacacacacacacaaataaacacacatacacggaaacacacacacacactcactcacacactccttcttgactggataagctaaagt

SEQ ID NO: 13717 - DNA, 201 bp, Homo sapiens
aaaattaacacagtataagaaccctcgtccaaatccaatacagtttattttatttctttctttcattctactttcagtttttattgcatcctctttagttraactttggtcataaaaaagctatgttttcttcggtcccaaaagataacccatcttcattcatctaggtgagacgagagaagagcggacatttaggaactg

SEQ ID NO: 13718 - DNA, 201 bp, Homo sapiens
agaccaggctgtatatattatatatttaggaagaaaaagccacccacttcctttgagctgaatgggagtaactttgggacacgttgatgaaaccctccctktgtctctgcataggacccgaagattagtacaagtctgcctgttctggacctcatcgatgccatccaaccaggttccattaactatgaccttctgaagaca

SEQ ID NO: 13719 - DNA, 201 bp, Homo sapiens
gacaggtgcttttctcagatcagattccgttagtttccttgggctgccacaacgaagtactgcacaaactgggcagcagaagtttcttctctcacagttayaggagctagaggtttgcaatcaagatgttggcaggattggtttcttctgagggagaatctgccccatgccaatctctgcctccatcttcacatggcattc

SEQ ID NO: 13720 - DNA, 201 bp, Homo sapiens; identical to SEQ ID NO: 2459

SEQ ID NO: 13721 - DNA, 201 bp, Homo sapiens
tgaaaaaaaagttaaaatgtccttataaagacaaaatctttttctttcctggctgatgatttgtcattctagtcacttcctgccttgtgaccacacacccrggcttgacaaagctgttctgcagatcagaaagaaggggttcctggtcatacaccagtactaccaaggacagcttttttcctgcaaggtaaatgttcttca

SEQ ID NO: 13722 - DNA, 201 bp, Homo sapiens
ctaagaaaataaagtacttatggtagaattactttggttatccacccagaatttcctaatgtgctaagaaaatcaggataattttgcagctgtttaggtgrgagaatgaagtggggtcctcatttccaacctcaatatatgaatgtggcttcagtagtattcacctttcccgcagatagtttgagtctagtcaaacggcat

SEQ ID NO: 13723 - DNA, 201 bp, Homo sapiens
catatttttctcagaggtaggtgattatagacttttattactgaagctagctaacaagatcttggcactcacagttttaagagagaataaaagagagagagcaagagaaagaagagagagagagagagaagaaaaactttgtaataaatttacaaacatttttatttttataaataagagataccattgcaggttttatat

SEQ ID NO: 13724 - DNA, 201 bp, Homo sapiens
gcatatttttctcagaggtaggtgattatagacttttattactgaagctagctaacaagatcttggcactcacagttttaagagagaataaaagagagagagcaagagaaagaagagagagagagagagaagaaaaactttgtaataaatttacaaacatttttatttttataaataagagataccattgcaggttttata

SEQ ID NO: 13725 - DNA, 201 bp, Homo sapiens
ggactactcaaagacagctggaggagaaagggagagagaaaaatgcttataaagaggtgggcaaaagagcgggaccttgtctcaaaaaaaaaaaaaaaaaagaggaagtggtaggaggtgtctgaatttcactgtgacctgttctgtcaggtgatttttggtggggcggggacatgaaaaaaaagttaaaatgtccttata

SEQ ID NO: 13726 - DNA, 201 bp, Homo sapiens
acttacatgttttttccccactagactatactccttgagaacagcgattgtgtcttatttatttctgaatcaccaattcagacaggcatgcaaacacttgytgaaccaatgcacaaatatattttgctcttcttcatagattcctccggcctcagatgaccaggcaccactagatacagaatactgtgctttccttctcca

SEQ ID NO: 13727 - DNA, 201 bp, Homo sapiens
aatataaaactaatcagtgtccacagatttgaagagtttcaagtgttcctattttgccagatggaagcgcactccttaaaaaagtgttaatgttctacagkgtcttcattttgaggctctcggaagtcacctcctgattagatgttggtttcctagggatatctccctatagctgctgtggccgtggtgttccccagatgg

SEQ ID NO: 13728 - DNA, 201 bp, Homo sapiens
atgttttttccccactagactatactccttgagaacagcgattgtgtcttatttatttctgaatcaccaattcagacaggcatgcaaacacttgttgaacyaatgcacaaatatattttgctcttcttcatagattcctccggcctcagatgaccaggcaccactagatacagaatactgtgctttccttctccaaggtaa

SEQ ID NO: 13729 - DNA, 201 bp, Homo sapiens
aaaaaattaacaatcatacctaattcatagagttgttgtgaggaataaatgaaataatggatgttaggggtctagtccagagcctgacgtaaatattaagmgattagttaacacgtacataggatatactacgtgccaggcactcttctaagttctttacatatatcaattcacttaccccttgcaacaactgtctaaaat

SEQ ID NO: 13730 - DNA, 201 bp, Homo sapiens
cagcatttttataatatcaaatagtaggcagcatccaaatatccatcagctgatgagtaaataaaatgtgatatattcatacagtggaatagcattcttcyataaaaaggagtgaaggtcaggtgcagtggctcatgtctgtaatcccagcactttgggaggccgaggcaagaggatcacctgagcccaggaattcgagac

SEQ ID NO: 13731 - DNA, 201 bp, Homo sapiens
tgtttctgtgactttcctcagcaatatttagaggcctgagagtagcaggtgatctgatatctgggactgaggccagaggcttcagggcaggagagggtggratgaagtctgagagggtggtagggcttagaggaaggcaaaacccaggccaggaacaggtggcagtggaggctcatagagggtgggctgagaaaggtccac

SEQ ID NO: 13732 - DNA, 201 bp, Homo sapiens
tgtgcccagaagggcttcacacttggtttaatgctctgctgtcactgtctaaaaattcctaatttttaaacaaaggactccacatttttattttgcactgrgggccacaaattatgtagttggttctgttcttggttctaggagagtgattcagatttatagacaaggggagtggagagacaggcagggagagtgagcaca

SEQ ID NO: 13733 - DNA, 201 bp, Homo sapiens
gtgtttctgtgactttcctcagcaatatttagaggcctgagagtagcaggtgatctgatatctgggactgaggccagaggcttcagggcaggagagggtgrgatgaagtctgagagggtggtagggcttagaggaaggcaaaacccaggccaggaacaggtggcagtggaggctcatagagggtgggctgagaaaggtcca

SEQ ID NO: 13734 - DNA, 201 bp, Homo sapiens
agaaatgtagaaatgatgatgtaaaaatcatgtaacaaaagttgggagagaaagtaggagaggaaattgtggcagtattacaggtaagttgagttacctaytgttaatagccataggtcaaaagatgataatttaacattataaatcaagttatagactaggtatatttgaacagtataaatgttgacactaaaactgcaa

SEQ ID NO: 13735 - DNA, 201 bp, Homo sapiens
tatgctggcccctctgttcgaaatggccttcatcacttttctccctcctttatctggccagcttctatatatttctcaaggcccagctatacatcattttmgtttttaactgacaaataaaagaatatatatttatggtatacagtgtgatgttttaatgtatgtatacattgcggaataattaaactaagctaattaact

SEQ ID NO: 13736 - DNA, 201 bp, Homo sapiens
actgaccttgggaagaaagaagaatgccgcttccattaagactgaaagagaggaggaagaggtggatattgtggaagtagagaggaagctcataccagackacttggatcatctcagtcaagaaggggcaacagaagaatcttgggccaggacaaagcataggagggtgaagtggaaggttgaggcaagaggagagagttt

SEQ ID NO: 13737 - DNA, 201 bp, Homo sapiens
caaccttcatatggcagctgtgtatataaattctctggaagacctatcgtgcttagagaatgaattttagatatatatttattttattttattttattttwttttttttgagacagggtctcgtactttcgcccaggccggactgcagtggcgctatctcggctcactgcaagctccgccttctgggttcacgccattctc

SEQ ID NO: 13738 - DNA, 201 bp, Homo sapiens
cagaaaacctgatggctacaggtgatctggaccaagatggaaggatcagctttgatgagtttatcaaggtgagtaccatgcagaatacaaggagacacatytgaaacttggaacttgaattctgttttaaaaaatatccagaaagacattccttacctccttgcttcgacattacatattctttcctttgtgattttcttg

SEQ ID NO: 13739 - DNA, 201 bp, Homo sapiens
tttgatgagtttatcaaggtgagtaccatgcagaatacaaggagacacatttgaaacttggaacttgaattctgttttaaaaaatatccagaaagacattycttacctccttgcttcgacattacatattctttcctttgtgattttcttgatcactgcttgagtttctaaagatacattatatttttgcagattttccat

SEQ ID NO: 13740 - DNA, 201 bp, Homo sapiens
gtcatcaagattgggttgtttgctgacattgaactcagcagaaatgaaggtaagagcaagtcccaaaggtcatttatgacacagctttctaataacttacrcgttggggactgtaggaggaagatgtcagaaattctcaagttttgaaaactacacagttatattgattccatggtattcatgtcacagattctatacaca

SEQ ID NO: 13741 - DNA, 201 bp, Homo sapiens
gcttcagtagtattcacctttcccgcagatagtttgagtctagtcaaacggcataactgattttatatctaaacatcacagattctgttgctatcttcttkgattatggtattgctagaatttaaattcaacgttactgggctctgttattcagaagactgctttctttaatttaattgtttctctttcagtaaaatgatc

SEQ ID NO: 13742 - DNA, 201 bp, Homo sapiens
gtttgagtctagtcaaacggcataactgattttatatctaaacatcacagattctgttgctatcttctttgattatggtattgctagaatttaaattcaaygttactgggctctgttattcagaagactgctttctttaatttaattgtttctctttcagtaaaatgatcaacctgtcagtgccagacacaattgatgaaa

SEQ ID NO: 13743 - DNA, 201 bp, Homo sapiens
cttgcacttatatttatcaccttttgtggttacctcataattcgtctaaaagaagacctccctctgctgattaacaggcaccctgccttcatctataaaargtacatagccaaaggacaataggaaagacaagtagaactagttaaatgtcactgaggttcaatcctgataactttgtataggaaagaggtgggatgcaga

SEQ ID NO: 13744 - DNA, 201 bp, Homo sapiens
ctggtgtcctgaaagaatgtaggtgcttcttgaaagctctctgcaacttattaattgggagtgattatgcgatggagaaaacagagtcccatcaccccctsagtcttccctgggaaatcacaagagggctgatagctctctgtgaggtgaaccgtttctagaatccccaccgtctcgtcctgttcttccgcccacccagtt

SEQ ID NO: 13745 - DNA, 201 bp, Homo sapiens
cagcctatttcagactgaggcttaaggcacgggacatttccatgtgctctcagtccttgggatgagccctgggcccaccttccttacatttactatgcctstcgtcactgacctctgttctttgttccacccagtgtgcagatgggcttgcagtaaacgccagcagtgctatcttcgtgaacttggcattgttttgcccag

SEQ ID NO: 13746 - DNA, 201 bp, Homo sapiens
cccctcttaattttagatgtcagtttttaaacttcttctcatttgcatccaatgcgtcctcctagacagttaactctttcctacagttgtagtcatctccrtgctaatgaggctccaatctatatcttctgccctgacctagcactaagctctggatacataccttgcattatccacaggccagctctcctgagcttcttc

SEQ ID NO: 13747 - DNA, 201 bp, Homo sapiens
ttgtttagttagttagaaatcaatgctagcattttcagtctatgtgaccagtagtgctgatgtggatggcctcttgtccacccaaaatacataggaatgcsagataaaatatgtagctgagatgaacagaaaaggaaatccctgatgttgggagaagaaaaagaacttaatgtcagcgaagtgagctggagatgaagtcct

SEQ ID NO: 13748 - DNA, 201 bp, Homo sapiens
gtgcccgccacgacgcccagctaatttttgtatttttagtagagacagggtttcaccatattaggctggtctcgaactcctgacctcaggcgatccactcrccttggcctcccaaagtgctgggattacaggcgtgagccaccgtgcccggccagtcaactactttttaattacaaagggaaaaatagtaactttacagtg

SEQ ID NO: 13749 - DNA, 201 bp, Homo sapiens
taccatcttccccaaagcattcattcttccaaactcctaaacaatatttcagacactctcctttcactacagcccttgtgtagctccttccccagcctcaytcattgtgaaaataggggcaattagaagaatttccccaggtgcacctcccagcacctgcgaccctttactgtgctttctctcctgcccttgtggataagc

SEQ ID NO: 13750 - DNA, 201 bp, Homo sapiens
atcttctggtcctgctggcacctgcattgtgtctcttgacatgatctcttgccagctgcccagggctgcctctttaatagatctgacccagtttgtgccaygtcactcaagtcttccctcttatccctccaccgcctgtcaaactggcttttctcccaccatgcctggagcaatctctctatgacttccagtgacagggaa

SEQ ID NO: 13751 - DNA, 201 bp, Homo sapiens
agttatttcctttgtttgaactggagatcctgggattcctttaaaaaaattactaataaggaaatgtcatgcaacctttatcatggaattaaaaaaaaaaatcaaacacaaggaaaggacaatgtctgtctgttttcaaaagtgccttcatgaatttagtcattcattccagaatcatttattggaaacctactatgcata

SEQ ID NO: 13752 - DNA, 201 bp, Homo sapiens
cagaatctgacaacttttgtctcctctgctaagagtttggtccaagccacatcatctctcacctagattattgcaacagcctcccaatttgtctcactgcwtctgacattgcccttctttggtttaatcatgacacagcagttagaaagatctttttaaaaatgtgtatcagatcttgtaactctgttgatgagaccaccc

SEQ ID NO: 13753 - DNA, 201 bp, Homo sapiens
ataaacattagaattaggacacatcaaaatataaaactaatcagtgtccacagatttgaagagtttcaagtgttcctattttgccagatggaagcgcactycttaaaaaagtgttaatgttctacagggtcttcattttgaggctctcggaagtcacctcctgattagatgttggtttcctagggatatctccctatagct

SEQ ID NO: 13754 - DNA, 201 bp, Homo sapiens
tctttatgttctttcagcattcttaagtcttttgcactctttgtaaatgctgaagttatgtttctaaccctgcagtgacttccatgtttctgtacaaacaytgcaaacttgccacagaccagaagttgtaaattagtgatgtctagatgagtcagttacagattagccaacatgatatttaattgaaaaaatgttgccagt

SEQ ID NO: 13755 - DNA, 201 bp, Homo sapiens
gcagaaataaacattagaattaggacacatcaaaatataaaactaatcagtgtccacagatttgaagagtttcaagtgttcctattttgccagatggaagygcactccttaaaaaagtgttaatgttctacagggtcttcattttgaggctctcggaagtcacctcctgattagatgttggtttcctagggatatctccct

SEQ ID NO: 13756 - DNA, 201 bp, Homo sapiens
ggtcagagaaattttgtgagtcttattgaaatggggcagaattgtatccttggaagcagcagcgtggtgaccaaggacaagaggcaacttttctctgatayattttgctccatcacaattgtgttttactttatgtcttgttcttttcttgtttttaatcttttaagtcccttgactttaataccctcgtggataacatat

SEQ ID NO: 13757 - DNA, 201 bp, Homo sapiens
ggagtctgactcaagctttactatagagtagcatgcctgtgagattctccaaagttaatatggtttcccaagtaaatggttgaacaagtcaacaatttccmaaagaagtttccaaaagatatttgtagtttggactgtgagacgtattttttaagccttcatatatgcatttttctgattctacccttcttttgcagaaag

SEQ ID NO: 13758 - DNA, 201 bp, Homo sapiens; identical to SEQ ID NO: 2490

SEQ ID NO: 13759 - DNA, 201 bp, Homo sapiens
gggagcaaaagaacaaaaactgacagctgtgaaactgacaactatgacaactatggtaagaaagttgacagatgtatatgtgaaggttcctgagggtaaastaaggagttattaatcccaatgcagaagactggagaagctacaaagcatcatgagtaggggtctttccagtgggtaatgggctaaagagcattctaggtg

SEQ ID NO: 13760 - DNA, 201 bp, Homo sapiens
tgtgaaggttcctgagggtaaactaaggagttattaatcccaatgcagaagactggagaagctacaaagcatcatgagtaggggtctttccagtgggtaaygggctaaagagcattctaggtgaagggaaaagtgtgagcaaataaaaagaggtatgaaagaaatacagggaagagtccttagtatcatgacacttgattt

SEQ ID NO: 13761 - DNA, 201 bp, Homo sapiens
taccctcttaaataagcaaccacatgcaatttactcagcctctcagtgcctccatttccttacctacaaaacagggtaaatattcatctttttctcaaagrtggctaaaaagattaaatgaggaagtatgtgtgagagcccttattggagcttggcacatagtaggccatgaaaagcaatttgaatgaatgaggcgtgtgt

SEQ ID NO: 13762 - DNA, 201 bp, Homo sapiens
ttttccttttggccagagtaggtatggctgttcaactctcatttctaatgatcacaaactcctccacatgctcttctgaagaaccttctgaggactcaagmccctcagagacggcccattcttttcctctcttgtttctcgagctgattggatgctggctcctggcctcaggatctccattcaagttattaccaggaaaaa

SEQ ID NO: 13763 - DNA, 201 bp, Homo sapiens
aggataaaggatatttaaatacctcatgggtctctttttccacctccctttcactttagtgtgaatgacattgtggttcttggaccagaacagttctatgmcaccagagaccactattttaccaactccctcctgtcattttttgagatgatcttggatcttcgctggacttatgttcttttctacagcccaagggaggtt

SEQ ID NO: 13764 - DNA, 201 bp, Homo sapiens
ggcacaagcactagaaatcagtggtggatttgacaaagaattatttaatccacatgggatcagtattttcatcgacaaaggtaaaacctgtatgtttaggrataagggggaaatgagggaaatagaaaccatttatctccagcccctcaatatttatgtaacaggaagagagaagatgctattttaccatacagatgtgtt

SEQ ID NO: 13765 - DNA, 201 bp, Homo sapiens
ccacctgactgagccctaccagctcatttaattacctgtcactacttaagccctcccagtgggacatctgccccgtccactctgccccatgcaaggtcttsaggggtgtactaaatgacattctttgtgggtttttctcagcacatttccttactgacatctctccacattacctaaagaatgtcattgaccactccctgg

SEQ ID NO: 13766 - DNA, 201 bp, Homo sapiens
cctcagtatttctttttattgcattcgttgtctaacaacaataatactcattggcaagaaatttatttacactaacaaattaaatttaatcacaggtattkttagattggtcagaaaacaaaagaccactgtgatattttgcttgaatgcctctgaaaaccaaagagtaaggaatgtcatttgaaactttttgaacaatct

SEQ ID NO: 13767 - DNA, 201 bp, Homo sapiens
aaaagggattaaaatatccaggcatgccaaactttgcgccagatgaaccaggaaaaatcttcttgatggatctgaatgaacaaaacccaagggcacaagcrctagaaatcagtggtggatttgacaaagaattatttaatccacatgggatcagtattttcatcgacaaaggtaaaacctgtatgtttagggataaggggg

SEQ ID NO: 13768 - DNA, 201 bp, Homo sapiens
tcagaacaggctccctgctagactgtcagcacttccatggcatgagctgtgtctgctgggtacctggtgctctccaggtgttgcgttccttgcagagctcrtgtaggagctcagtaattgtgtcttgaatgaatgggaccccaggtttctgtgtccttctcccactcccactctcatctcaggtttcatctgccgtggaat

SEQ ID NO: 13769 - DNA, 201 bp, Homo sapiens
gatcctaatagtagaaaggaccactgtccaagttactggaataaactttttgtgatgtttgagtaaagcattcatgtcagaattttcagacatacctatakgaacaaaataggtcaaaaatagtcaactatataagactggtatccttatgttaattcttagccagctatactgtttgccactacatgatataatcgatgt

SEQ ID NO: 13770 - DNA, 201 bp, Homo sapiens
tgtaaggacactgaaaaccactagcattaaagtaggaattgtgcaagacattggagccttgattaggtatcatgcactacagtcaataaaagaaataatargaaaacaaaatgtgcacaagatctgaggtctttcactttgctttcatacccttaatcagtttacatcttatgctttgtggggcaatcaaaccaaatgact

SEQ ID NO: 13771 - DNA, 201 bp, Homo sapiens
aaaccactagcattaaagtaggaattgtgcaagacattggagccttgattaggtatcatgcactacagtcaataaaagaaataataggaaaacaaaatgtkcacaagatctgaggtctttcactttgctttcatacccttaatcagtttacatcttatgctttgtggggcaatcaaaccaaatgacttttacaatttcatc

SEQ ID NO: 13772 - DNA, 201 bp, Homo sapiens
caggtatttctgtaaaacaaaagttaaagaattttatgagaatagaacccaatgtaacagacattcaccacagaatgtcaaggctctgctctcaccagggygagactgagggcaaggccagtttcagcaacagaccaggcctgtctcccatcatgaaaaccccaaaaaggttctccatcaattgtcacattattctttctt

SEQ ID NO: 13773 - DNA, 201 bp, Homo sapiens
tgctttcctgccataaacgcccactgcaggaagcactgtcagcgccaattgtatgactgttcctgtcagcacatctgagagactgtcatgaggggcctcaytcagagaaaattaccttaaagcaacatcaaatgtaacatcgtgtttgacattaaaaatcactggcagggctagtttggtattagctcaagtaaaatggaa

SEQ ID NO: 13774 - DNA, 201 bp, Homo sapiens
tttcttctgatctccctctcctccaccttccttccctctcctcccttttctttctcttttttcctctatgttgatggaacagccaagaaatagcctcaaattgtactttatgcagggctgctctccacaatgtttatgaagtccacgtgctcacgatggctgctaggtgacctggctgcccctcacctctctgcctttacc

SEQ ID NO: 13775 - DNA, 201 bp, Homo sapiens
agtaaagaaatgaagttatgccaagtagcagtagggttgacaggctaagaagcagtaggcacctattcataagactgattttagacttagcagtgggattytaatgatagttgtgcataggctaataagtgtgtgggaaagtctcagaggaaggtatcctgggggcttttgctcccacaggtgccattgttgctgagatgc

SEQ ID NO: 13776 - DNA, 201 bp, Homo sapiens
gctgcacttgaaatatgaatacttcagtaggactttcactaggcaggattatcgagtaggtggcctctgtatttaatacctacgtatcttctcttccactsctttccattctatagcttcccatgtctccaatatatgcttctactccataataggttccatgtgttttcttagctggctatcagaaacttctctccaaga

SEQ ID NO: 13777 - DNA, 201 bp, Homo sapiens
atttgagttttctgccttttcttgcctctcaatttctaaaaaataaagtaatctgaaccttgcactccctagtcttagaggtggtttgtgctagcagctgkaaagcagaagaaaccaaagaaaacgcctttcctgaattgtttttaaaaacctgagccccttcaagggattctgttggagaagggatatgaatatgtggat

SEQ ID NO: 13778 - DNA, 201 bp, Homo sapiens
acttatttttaaggctttagaaagaatattgtttaaaataaccccatactctacgatggtcctgattcttccttagcttgcccctcgctatgtgagactghctacttaatggatttgtcacagaggttttcctggctgagagatatcagagactttgatggtgaagcagcgacaggggaacaaaatgacgggcgaggaagc

SEQ ID NO: 13779 - DNA, 201 bp, Homo sapiens
aaagcaaagtctccttccatactcactgacctccccactctccacgaccccaatcttctgctctcaaagtaactactcttcagtttatgtctagattgtttatatatatacacacacacacacacacacacacacacatatgtggataatatgtaattcccctaattttataccttagaattataccacatgtatattctg

SEQ ID NO: 13780 - DNA, 201 bp, Homo sapiens
ttatttttaaggctttagaaagaatattgtttaaaataaccccatactctacgatggtcctgattcttccttagcttgcccctcgctatgtgagactgactacttaatggatttgtcacagaggttttcctggctgagagatatcagagactttgatggtgaagcagcgacaggggaacaaaatgacgggcgaggaagctt

SEQ ID NO: 13781 - DNA, 201 bp, Homo sapiens
aagcaaagtctccttccatactcactgacctccccactctccacgaccccaatcttctgctctcaaagtaactactcttcagtttatgtctagattgtttatatatatacacacacacacacacacacacacacacatatgtggataatatgtaattcccctaattttataccttagaattataccacatgtatattctgc

SEQ ID NO: 13782 - DNA, 201 bp, Homo sapiens
tgggccttgacactaaattgtcaaaccaaaagagaaacgctgtaatgcattttactcccagatactaaaagttagtgttagggctaagttcctcccatacygataaggacaactatgtcccctccttcagaaacaacttttcagagattaaacccctctgtcactgtaaactcactgagttctttcagaatttggtgtgtt

SEQ ID NO: 13783 - DNA, 201 bp, Homo sapiens
ggatgcacagtgcttagactaaccccagatctttgtggggtatgactaaagccacagggtcaggaccacactcagggcagaagaggaggaagacttctctygatccaagccaagcagcttttcttctctcatattttctctggattaaaacaaggggctgttgtccaagggctttcctgcaactttcccgagagagaactc

SEQ ID NO: 13784 - DNA, 201 bp, Homo sapiens
atgtgtgtatgttttaattgcagtttgaatgatattgttgctgtgggacctgagcacttttatggcacaaatgatcactattttcttgacccctacttacratcctgggagatgtatttgggtttagcgtggtcgtatgttgtctactatagtccaagtgaagttcgagtggtggcagaaggatttgattttgctaatgga

SEQ ID NO: 13785 - DNA, 201 bp, Homo sapiens
cagatttcttagaccaatgattgtctttaaggattgtatcggcaggactaatttcatattaattgtgttccattatagctagcacgaaggctccatcccayatcttgattttaggaatagacagtgaggaatgccagttaataatcctgtaatgttcaataccttcaccttatatattatgtgtgtatgttttaattgcag

SEQ ID NO: 13786 - DNA, 201 bp, Homo sapiens
ggccgaggggggcggatcatgaggtcaggagatcgagaccatcctggccaacatggtgaaaccccatctctactaaaaatataacaattagccgggcatgktggcggcgtgtgcctgtaatcccagctactcggaaggctgaggcaggagaatcacttgaaccagggagtcatcggaggttgcagtgagctgagatcgcgc

SEQ ID NO: 13787 - DNA, 201 bp, Homo sapiens
tgtcattcataaattatgataaagatagttaaccaacacgaagatgattgaagtccacatttaaacatacattttgaatgctgtgccttgacttccagggytgggttttatcttctacagagaaagggtgaatgcctctcgagaagtggagccagtagaacctgaaaactgccaccttattgaggaacttggtatgtatgt

SEQ ID NO: 13788 - DNA, 201 bp, Homo sapiens
ctcggcgccgcgcagtcgccgctgggcaccccgagaccatggggaagctcgtggcgctggtcctgctgggggtcggcctgtccttagtcggggagatgttyctggcgtttaggtgagtggcatcttgacagggcgtcttcgactctctttctctcctcttccaagtgaggtcaggggctgcctggcgcccccttcctagcg

SEQ ID NO: 13789 - DNA, 201 bp, Homo sapiens
ttatgtgttccctattgtacccattaaagcagaaaaatagactcatatatcttacattttcagtaacagagaatcctaatcagaaaggaaaaaaaaaaagycatagcattctatttctgagcattcttgttcatggacatttcattcagtttagaatcacgaaatcttaaggctggaagatcaaccagtctatcatcctgc

SEQ ID NO: 13790 - DNA, 201 bp, Homo sapiens
ctgcaatagagcagagataattttctcccagatcatgccctggggaacttccatcacctcaatcagcaaagaatgactcacttatgtgttccctattgtayccattaaagcagaaaaatagactcatatatcttacattttcagtaacagagaatcctaatcagaaaggaaaaaaaaaaagtcatagcattctatttctga

SEQ ID NO: 13791 - DNA, 201 bp, Homo sapiens
gagattggagagaaattgagttactggatgaaggccaatcaactcactagtggccaagtaggaaccccagctcaggtcatcttctgccccatcaagatgartaaaagttcagagaacagcttttggtggaagagtttattcgtgcatttatttaacaaatatattttggagagagaataaggtcactgagtggagaatgtg

SEQ ID NO: 13792 - DNA, 201 bp, Homo sapiens
ataaaacactcaagaatctccaatctcagtcaacttcctcacatgccctgtgaagatttggcttgtaaggccagtgatggatttaggagaacaatccgacwctatcttctgaaacatttacctccaactgattacgattttctagaatcccaacctatttttatataatttatgtacagcatttgactacctccatatctg

SEQ ID NO: 13793 - DNA, 201 bp, Homo sapiens
tttctctcctcttccaagtgaggtcaggggctgcctggcgcccccttcctagcgggtaggaaagagcagctttggaacctcactcctccatctcacccagyaaaccgccccttgagactcgcttatggggaaagtgagctacttgcgtttccaaagactgccgagccgaattagtcccatttattttttgaaggttatgat

SEQ ID NO: 13794 - DNA, 201 bp, Homo sapiens
tctggtagtcatcttcccactaactggtattcctctcaccatgtctgcctttatttggagctctgcaaatgtttgtggatcgaatattaaccacgttactygatttaaaactctaaacacgttccatcttgggttccctgccattcttaacaagtctttcaaagagaaatagagaacagactgcattttaattcccagtac

SEQ ID NO: 13795 - DNA, 201 bp, Homo sapiens
gtctggttttctgtccttgtgatagtttgctgagaattatagttttcagtttcatccatgtccctgcaaaggacatgaactcatcctcttttatggctgcatagtattccatggtgtatatgtgccacattttcttaatccagtctatcactgatggacatttgggttggttccaagtcattactattgtgaacagtgctg

SEQ ID NO: 13796 - DNA, 201 bp, Homo sapiens
tctggttttctgtccttgtgatagtttgctgagaattatagttttcagtttcatccatgtccctgcaaaggacatgaactcatcctcttttatggctgcatagtattccatggtgtatatgtgccacattttcttaatccagtctatcactgatggacatttgggttggttccaagtcattactattgtgaacagtgctgc

SEQ ID NO: 13797 - DNA, 201 bp, Homo sapiens
tctgttttggtaccagtaccatgctgttttggttactgtagccttgtagtatagtttgaagtcaggtagcaatgatgcctccagctttgttctttttcctkagaattgtcttggctatgcgggcccttatttgattccctatgaactttaaagtagttttttccaattctgtgaagaaaatcattggtagcttgatgggga

SEQ ID NO: 13798 - DNA, 201 bp, Homo sapiens
catgctgttttggttactgtagccttgtagtatagtttgaagtcaggtagcaatgatgcctccagctttgttctttttccttagaattgtcttggctatgygggcccttatttgattccctatgaactttaaagtagttttttccaattctgtgaagaaaatcattggtagcttgatggggatgacactgaatctataaat

SEQ ID NO: 13799 - DNA, 201 bp, Homo sapiens
ggagaccctgaatcaagtgcatctaagacctccttatactgcctccgctgctgtttgattgcacaaaatttatgcaatagcagatctgtggtaacactcarttccccctaggcaccttgttcatgtaacatatggtgaaataaaacactcaagaatctccaatctcagtcaacttcctcacatgccctgtgaagatttggc

SEQ ID NO: 13800 - DNA, 201 bp, Homo sapiens
ttttaaaaatatttttaagtacaaagaaatatagtgtttgatgtgtggatactttttaaaataaaaatgaggtaatattacacaaccccttctataaattkcttctgcattaaacactacatcatggactcctttatatatagcacatttgcagttgctttgccaaggcagttcgggattcagttgtgtgggagcactgta

SEQ ID NO: 13801 - DNA, 201 bp, Homo sapiens
ttgtctattccctaagcacttaaaattgccatattcaaatatttgctaaattaaatatacatttaatgtatactacttcacaggtcatttcaactttcacrtttttaaacaaatttcagaataagccctttaatttaaaattgttgataggtcccaattcccaattcccaagctttgaagacagaatccaccatatttgct

SEQ ID NO: 13802 - DNA, 201 bp, Homo sapiens
ggctcaactctccagctggttccaaccaaccagctttgttatttgaagacaattggtttgagatcatgcttttgtgtgctttgggtgtttctttttctttyttttttttttttttttttttgttcttttagaattattcatctcagttgattaaggctcaggaggctagatcagatgacttagtaccactaaatttcacta

SEQ ID NO: 13803 - DNA, 201 bp, Homo sapiens
ccagtccaggctgcggagtcagattgggcagatgagtaggaggctgcccatctgtcagcaactctaaaacatcaatggaataaactggaaccatgttgccrtttacccggactttccacctaggagtccttacacactgatgaaattgctcctgttcctgccaaagtacacagagccctagagaggatattatgtatctct

SEQ ID NO: 13804 - DNA, 201 bp, Homo sapiens
gaaggagttttgcatttcctcaacatgttaaacatagagttaccacacaatccagcaactctgcaccttggtgtatgctcaagagaattgaaaacctatcyatgcaaaaacccatatacaaatgttcatagcagcattactcctaatacaaaaggtggaaataacccaaatgtctatcaactgatgcattcataaacaaaa

SEQ ID NO: 13805 - DNA, 201 bp, Homo sapiens
gactggtgactctttactctggttatacgttgggacaaactgtggcacttttacaaagcagattactaagaggcactccttgcctcttacgtcagattttyttagacagcgaaaatgatagccagtggcctgatggtaggaatgtactcatttttttctgaatgaataaatgaaagatcaatcacccccaaattcctatca

SEQ ID NO: 13806 - DNA, 201 bp, Homo sapiens
catctattcattcatctctgtatttctagtacctagactggtgactctttactctggttatacgttgggacaaactgtggcacttttacaaagcagattaytaagaggcactccttgcctcttacgtcagattttcttagacagcgaaaatgatagccagtggcctgatggtaggaatgtactcatttttttctgaatgaa

SEQ ID NO: 13807 - DNA, 201 bp, Homo sapiens
ctaagttcacatctatcaatcaggaaaccacagtctcctcacagtccaagccttcatcatctattcattcatctctgtatttctagtacctagactggtgrctctttactctggttatacgttgggacaaactgtggcacttttacaaagcagattactaagaggcactccttgcctcttacgtcagattttcttagacag

SEQ ID NO: 13808 - DNA, 201 bp, Homo sapiens
gagttatggaggattccttcttttctattgattggaatagtttcagaaggaatcgtcccagctcctctttgtacctctggtagaatttgtctgtgaatccrtctggtcctggactttcattggttggtaggctattaattattgcctcaatttcagagcctgttattggtctattcagagattcaactttttcctggttta

SEQ ID NO: 13809 - DNA, 201 bp, Homo sapiens
acacctctcagtgtccttcctcttttaaaatattgtgattgagctttatggtcatttgatactttttttcaagcactagtttttagaagtatatacacttytggccttgtaagagatccacttaccttcattcaatttaaggaaaaagttgtgacttcgaagtaataagattgagcctatatatgtcatctagaaacacca

SEQ ID NO: 13810 - DNA, 201 bp, Homo sapiens
ttctagtttatttgtgtagaggtgtttttagtattctctgatggtagtttgtatttctgtgggatcagtggtgatatcccctttatcattttttattgcayctatttgattcgtctctcatttcttctttattaatcttgctagtggtctatctattttgttgattttttcaaaagagcagctcctgcattcattgatttt

SEQ ID NO: 13811 - DNA, 201 bp, Homo sapiens
acttttggaagtgaccaagttttaaaacaagtctaatattagttgtgataggggtaactttcttggaaattatcccttttttccatgtagacaatactgtrtatctttatgttgtgaatcatccccacatgaagtccactgtggagatatttaaatttgaggaacaacaacgttctctggtatacctgaaaactataaaac

SEQ ID NO: 13812 - DNA, 201 bp, Homo sapiens
atccagtctatcattgttggacatttgggttggttccaagtctttgctattgtgagtagtgccgcaataaacatacgtgtgcatgtgtctttatagcagcrggatttatattcctttgggtatatacccagtaatgggatggctgggtcaaatggtatttctagttctagttctagatccctgaggaatcgccacactgtc

SEQ ID NO: 13813 - DNA, 201 bp, Homo sapiens
tcttttcctaactgaataccctttatttctttctcttgtccaattgccctggccagaatttccaatactatgttgaataggagtggtgagagagggcatcsttgtcttgtgcaggttttcaaatggaatgcttccagtttttgcctattcagtatgatattggctgtggatttgtcataaatagctcttattattttgaga

SEQ ID NO: 13814 - DNA, 201 bp, Homo sapiens
tatgtcctgagtgttattgcctaggttttcttctagggtttttatggttttaggtcttacatttaagtctttaatccatcttgaattaatttttgtataargtgtgaggaagggatccagttttggctttctacatatggctagccagttttcccagcaccatttattaaatagggaatcctttccccatttcttgttttt

SEQ ID NO: 13815 - DNA, 201 bp, Homo sapiens
ctgccaggccttggtatcaggatgatgctggcctcataaaatgagttagggaggattccctctttttctattgattgggatagtttaggaagaatggtacyagctcctccttgtacctctggtagaattcggctgtgaatccatctgatcctggactttttttggttggtaagctattaattattgtctcaatttcagagc

SEQ ID NO: 13816 - DNA, 201 bp, Homo sapiens
gaattgttccctttaccattatgtaatggccttctttgtctcttttgatatttgttagtttaaaatctgttttatcagagactaggattgcaactcctgctttttttttttttgctttttatttgcttggtagatcttcctccatccctttattttgagcctatgtgtgtctttgcacatgagatgggtctcctgaataca

SEQ ID NO: 13817 - DNA, 201 bp, Homo sapiens
aattgttccctttaccattatgtaatggccttctttgtctcttttgatatttgttagtttaaaatctgttttatcagagactaggattgcaactcctgctttttttttttttgctttttatttgcttggtagatcttcctccatccctttattttgagcctatgtgtgtctttgcacatgagatgggtctcctgaatacag

SEQ ID NO: 13818 - DNA, 201 bp, Homo sapiens
gacacgggagggaatttcctggtctgctggttgcaaagactgtgggaaaagcacagtatttgggcaggagcgtaccgttcctccaggtacagactgtcacrgcttcccttggctaggaaagggaaatcccctgaccccttgcacttcctgggtgaggtgacgccctgccccactttggcttgccctccatgggctgcaccc

SEQ ID NO: 13819 - DNA, 201 bp, Homo sapiens
ccttccatgccagtctttgtgttgtcctcggttatgaccatcacccttaacatcttgtacctgccctttggttccttgagggcatgctacaaatattcacyacactttccctagaccagagttttttcaaatggtgggtaacaaagtcaatttagtaaataattaccaacatttaaaaataaataaaacagaattgaacag

SEQ ID NO: 13820 - DNA, 201 bp, Homo sapiens
caaaatatataaacatatagaaggataagtgcatttagtagaaatacttacaataaaaaaatctcttaaaatctatgagccattcaatgtatacacaacgmaagaagtggcaataaggctatgattacagctccaggtcctgactgacctcgccaagttccatacacaatatattttttaatgccatgtgattgcagtgtg

SEQ ID NO: 13821 - DNA, 201 bp, Homo sapiens
tatgagagagaagcctgaattagaataggagctgaccagttctgcctttctccatcttttgtgaacccatatgtttagtgacccttgtgagtcaggcagcrtgagtattcttcccattggttttgagtctaagaaaagtgaatttgactatccttggtgtttttcacaagtcttggcccattcagtgattttatgtccttg

SEQ ID NO: 13822 - DNA, 201 bp, Homo sapiens
gatatgacatgtttgggccacaaattggaacccaaatcaacaagtgctgacttaatgcccccttgcccaccctgggctccctttaactgtgattattctaygttttccaggctagagatcatcttctatgagagagaagcctgaattagaataggagctgaccagttctgcctttctccatcttttgtgaacccatatgtt

SEQ ID NO: 13823 - DNA, 201 bp, Homo sapiens
ataactctgtggccttagaaagccacttaatcttggtcaactataacttagggaaaataacacctcacggaggtgtttgaggattaaacgcgggcatatayggtacctgaactatagtagtaatgattatcctgttgagatatgacatgtttgggccacaaattggaacccaaatcaacaagtgctgacttaatgccccct

SEQ ID NO: 13824 - DNA, 201 bp, Homo sapiens
acaccagggacagcatttcggtaaacaaacaaaaaaatgtgtatttatgagatgttgaaatttttcatatattaatatttgttaaatcaattgcattttgraatggggatatgattttgaaaaagtatatttaccacattttcaatgtgaattctgattgctggaattggatgtctaatattccatttggggcaataaaat

SEQ ID NO: 13825 - DNA, 201 bp, Homo sapiens
gagatatatctcagacattgacccttatctcttaggcccagaacatttggacttaagcctttgacaagatatttcctaataaattgaaaatgaggtagaamaaatatgagttggatgataataacacaggtgggtcaattttcaggtgcatcttccagcttttaagcagtgttctctgtagattttgcctggtcagagagc

SEQ ID NO: 13826 - DNA, 201 bp, Homo sapiens
tccttgatataaaggaaatacctgaatctttatgtataagatctgcaaggaaagagtatagagtgagaagggaggagggatcgataaaaacagaaggaggyataaatccaagagtcaggaagaggagcaggatttctatctgggaactcaacttttgacgttttgataagaaagaagaaggtatactgtagtgtcaaatgc

SEQ ID NO: 13827 - DNA, 201 bp, Homo sapiens
ccttttttctttatcagttgcttagcctcagatgttcctttagagtgacacaaagcagactcagacaagttcacagcaaaggctgtatggtttctgcgcaragttcagagtctagtgaatcagagatatatctcagacattgacccttatctcttaggcccagaacatttggacttaagcctttgacaagatatttcctaa

SEQ ID NO: 13828 - DNA, 201 bp, Homo sapiens
caatgtgtggggagtcaaaaacaaaattacatgaggctgtggaaaaaataagttctgttacacttcatggttttagctttttcagaattggaacaggataragtggaaagaacttagtcttttgctaatggacatgtgattagtatcttttattccttgttctgtggctaagaccaatggactattaagttggttttctcc

SEQ ID NO: 13829 - DNA, 201 bp, Homo sapiens
aacagcagacagcagagaagagagacatggttgtacagaggcacctcctttgggtctttactcaaatgccccattatcagtgagaacttctctgactgctrttcttcagcagagggtattccttatcccctttcttgctttatgtgttttctccataacatatgtgcatatccataacacacacatgcatcacctagagca

SEQ ID NO: 13830 - DNA, 201 bp, Homo sapiens
ttttacatagtagctcaaggcttaagagcaagtgttcagaaggagcagagagagagggcagtagttacaatgtgaggccaaagaagcttccccccagaaarctaaaggtgataagtaaagcatgttggtattggctggcaatattccacaagagatgaaaggacagatattgcagaagagagaaggtataactgggaccaa

SEQ ID NO: 13831 - DNA, 201 bp, Homo sapiens
gacaccaaaaaacttggccctggagcatagcataaacgaaatgcatatggtaagtcataaggagctggcagagtcagggttctggtaagtgtctgtcctaraaatgagccaacagacatccacaaggaagcccatttctttgctgctatgcaaacagcaagagcttcaggcatataaataacaaactgggagtgtgtgttt

SEQ ID NO: 13832 - DNA, 201 bp, Homo sapiens
ctattgtatccatgttatctaattcagtagttacttctctgccataagcatactcaactcatagccacattggacacagatcatcattccccctcttttcsaatactcttctcttttggattcattggttctacttcttaggtagattcttctgctccacctggtgttaaccagggtggcttagccagtggtattcagttg

SEQ ID NO: 13833 - DNA, 201 bp, Homo sapiens
acagtaggcggtctgcaagcctgaggagcaaggagagccagtctgagtctcaaaactgaagaatttggagtctgatgtttgagggcaggaagcatcagcaygggagaaagatgtaggctgggagggtaggccagtctctcctcttcatgtttttctgcctgctttatattcgctggcagctgattagattgtgcccaccca

SEQ ID NO: 13834 - DNA, 201 bp, Homo sapiens
aatgttaaaaatttacatgtacttaaagtataactaacttgaagacagtaatatttaaccgatgtttataattagtagtaaaaattcatattcttgatcamctaaaatgtatccccattttaactcaactatttggaatttgcttatatcttcaatatggctttccaagggtttaattgatttggaagtattaagtatcaa

SEQ ID NO: 13835 - DNA, 201 bp, Homo sapiens
ttttcagcaattttcagaatgtggggtacttggtgctttgttgtttttatctttgagcccttcgatgctgattctataatcacagaaaaattctcattctrtattcctttggcatcaaacaggttttagtttcaggtagcagaaaccactctatctagtttttggggaaagtgatcaaatgcaggaactaatgcttcacaa

SEQ ID NO: 13836 - DNA, 201 bp, Homo sapiens
atcctatgcagtggataaacagcatcaaaagacaccaaaaaacttggccctggagcatagcataaacgaaatgcatatggtaagtcataaggagctggcaragtcagggttctggtaagtgtctgtcctagaaatgagccaacagacatccacaaggaagcccatttctttgctgctatgcaaacagcaagagcttcaggc

SEQ ID NO: 13837 - DNA, 201 bp, Homo sapiens
gaggacttggggcttggaagaataagggtttgcaaatggcaaaggaagaattttccttcctccctaaggattgcttactcaaaaaaaaaaaaaaaaaaaargtgggggggcagtggtagtaggtggggtccttaaaaagccacagagtgagatcctatgcagtggataaacagcatcaaaagacaccaaaaaacttggccc

SEQ ID NO: 13838 - DNA, 201 bp, Homo sapiens
tataggaacaaaataggtcaaaaatagtcaactatataagactggtatccttatgttaattcttagccagctatactgtttgccactacatgatataatcratgtaggaatgggaacaatacaattaaactatacaccccttctctctgctttgaggaaggttagttatagaataccaggaccggaaataatcttataatc

SEQ ID NO: 13839 - DNA, 201 bp, Homo sapiens
ctgtgagccataacaatcttacctcctggtgttaaggacatagcaccatatttctagacattctctgtagctttttcctttatacctgctagttctctctctctctctctctctctctctctctctctctctctctctctcttttttttttttgagacagagtctcactctgtcaccctaggtggagtgcagtggcgtgat

SEQ ID NO: 13840 - DNA, 201 bp, Homo sapiens
aggacatagcaccatatttctagacattctctgtagctttttcctttatacctgctagttctctctctctctctctctctctctctctctctctctctctctctctcttttttttttttgagacagagtctcactctgtcaccctaggtggagtgcagtggcgtgatctcagctcactgcagcctccgcctcttgggttca

SEQ ID NO: 13841 - DNA, 201 bp, Homo sapiens
gacatagcaccatatttctagacattctctgtagctttttcctttatacctgctagttctctctctctctctctctctctctctctctctctctctctctctctcttttttttttttgagacagagtctcactctgtcaccctaggtggagtgcagtggcgtgatctcagctcactgcagcctccgcctcttgggttcaag

SEQ ID NO: 13842 - DNA, 201 bp, Homo sapiens
catagcaccatatttctagacattctctgtagctttttcctttatacctgctagttctctctctctctctctctctctctctctctctctctctctctctctcttttttttttttgagacagagtctcactctgtcaccctaggtggagtgcagtggcgtgatctcagctcactgcagcctccgcctcttgggttcaagca

SEQ ID NO: 13843 - DNA, 201 bp, Homo sapiens
tagcaccatatttctagacattctctgtagctttttcctttatacctgctagttctctctctctctctctctctctctctctctctctctctctctctctcttttttttttttgagacagagtctcactctgtcaccctaggtggagtgcagtggcgtgatctcagctcactgcagcctccgcctcttgggttcaagcaat

SEQ ID NO: 13844 - DNA, 201 bp, Homo sapiens
ttggacttgagcaactggatggtagtgatgccatttattgaagtgtgagtttgggcaggggggattaagagttttcctttggacacattttgaaaagactrttaaacaccccagtgggcatgtcaaccaggtagcctgctgggccctgcccaaattccttatgcactgtttatgagcataagaaaatgattgtttggttta

SEQ ID NO: 13845 - DNA, 201 bp, Homo sapiens
cttcacccactccagttgagccttcagataagatggcaattcacactgacagctcagctgctaactcatgagagaccttgagccagaggtatctagctgtrccatgcctgaattcctgacccacagaaatgatgagataataaatgtttgttgtttttaatggtgagactttagtataatttgttatgcagcatacgataa

SEQ ID NO: 13846 - DNA, 201 bp, Homo sapiens
ttctccaaaagttagtgtaaaatttagcattttttcttccttaagtgtttggaataattcacttatgaagctacctgggactaaagatttctttaaggggrattttaaagtatagattacatttatttaaagaatatagaaatattacaattaaatgtttctgcttgtgtatgctttgataaatttagcaattcattcttt

SEQ ID NO: 13847 - DNA, 201 bp, Homo sapiens
aggtatgagagggattgcaaataggcatgaagaaatttggaggcaaaggatatatttattaccttgatgcctgtgatgttttcatgggtgaatatatatgycaaaacttattgatttatatataatgacatatattgaattataaacacatataattatatttatatattataaatgtgtgcagtttattgtatataaatt

SEQ ID NO: 13848 - DNA, 201 bp, Homo sapiens
atttagtggaataaagtagttcataatatccttttgttacatatttaggatctgcggtaatatcctctttatttctcacatttagaatttgttttctttcycattttctttctgtcagtcttaccacagttttatatctttcattagtcttttcaataatcaacttttgaatgttttgtcctaagtttttattgtagtaaa

SEQ ID NO: 13849 - DNA, 201 bp, Homo sapiens
tattgcagaagagagaaggtataactgggaccaaaagccttgagaaggaaagagacatggagcaaatcattcacagtaacagcagacagcagagaagagasacatggttgtacagaggcacctcctttgggtctttactcaaatgccccattatcagtgagaacttctctgactgctattcttcagcagagggtattcctt

SEQ ID NO: 13850 - DNA, 201 bp, Homo sapiens
gttttaattataatagatttataataaaccttgatttttggtattaaaatcccccaaatttgttcttcctcaaaattttttatggatattcttaactcttygtattttcacttaaatttagagtcagattgccaatttgtacaaaacctttctaggatttgtgttggaattttattgagctccttatagatcaatgcgggg

SEQ ID NO: 13851 - DNA, 201 bp, Homo sapiens
ggcacctattctctgtcttctctctttacagttggaaggagcaaaatgggacttttggctgaaagtgctgagctcctgcggtgggggctgaccgcaagccrcgccttctgtgcacctggtcggcccagctagctgcggacccggcggggaggggcggggcgggccaatcggcgctgccccagcagggctgcggctgcaggc

SEQ ID NO: 13852 - DNA, 201 bp, Homo sapiens
ttcatgaccagtccgggctacatagcaagacccccatctctatgttaaaaaaaaaaaaactttaaaaaaaattactacagctttatatataagatatatgktggcacctgctgtagtcccaggtacatgagaggctgaggtgggaggatcacatgagcctgggaagtagaggctgcagtgagccatgatcacaccactgca

SEQ ID NO: 13853 - DNA, 201 bp, Homo sapiens
ataaatcacatatatgtgcagcttttgcaagtactgtcaagcagttttccaaagtggttgtagcagcatactccttcacgaataatgttggagagttctasttgcttcatttctttgccagcacttaataatattagttttccttctttaacttttaactatttggattgttatgtaagaatatctcattgtggttttatt

SEQ ID NO: 13854 - DNA, 201 bp, Homo sapiens; identical to SEQ ID NO: 2487

SEQ ID NO: 13855 - DNA, 201 bp, Homo sapiens
tacactctatggggcattgtcattagcttcctgatcaaaattcgctcaccttcacatcagattccagccatggaaagaagaaagagaggatgagaaaacaygtcaaatatctttgggcccaatttggaaatggcacaaactacctccactgacattctattgataagagaatagttatacaattatagctaattggaagga

SEQ ID NO: 13856 - DNA, 201 bp, Homo sapiens
agtttattgtttaaatctcttggttgtgctaacgtcgtctgtttctttcaaatgcagcatcagtagcttcgctctgctcaggcagccggctggcacttccytctcacatctgttcatttttcctttgtcctttactcagacattttctatggtgtttatgcactcatatctaataagtcgctcctgtgtatgtgtgtgagt

SEQ ID NO: 13857 - DNA, 201 bp, Homo sapiens
tcaagtgaggtgtgataaagaaatggatccacatcctgcaataatatgaaacaacctgtactttctgttctcttttctggcagaaactggctctgaagacwtggagatactgcctaatggactggctttcattagctctgtgagtgttttctttcacttttctgtgttctagaacgttttctaggactggcagtttaagtc

SEQ ID NO: 13858 - DNA, 201 bp, Homo sapiens
ctcgtggcgctggtcctgctgggggtcggcctgtccttagtcggggagatgttcctggcgtttaggtgagtggcatcttgacagggcgtcttcgactctcyttctctcctcttccaagtgaggtcaggggctgcctggcgcccccttcctagcgggtaggaaagagcagctttggaacctcactcctccatctcacccagc

SEQ ID NO: 13859 - DNA, 201 bp, Homo sapiens
tatcaatgtgttgtcagtgagccattatggtccttttaaattcaataaagggtctatttggtgggacattaggagccagattgattgtcccattgtgataytgaagtcctcctcgagaataagggctgctgtacccactaccttgaggcaatgtggccaccattgtgctgctgggtctaggttctttgaaaagtaacctac

SEQ ID NO: 13860 - DNA, 201 bp, Homo sapiens
tcaagttattttaccactttattccagaaaagttccagccagtttctccacccgaaaattaggggataataatacatattacagcatatatatatatatayacacacacacacacacacatacatatatttatatttatataaaacatataaataaaactaagtatatatatatatataaaaatcaggcatatagcagatg

SEQ ID NO: 13861 - DNA, 201 bp, Homo sapiens
ggataataatacatattacagcatatatatatatatacacacacacacacacacacatacatatatttatatttatataaaacatataaataaaactaagwatatatatatatataaaaatcaggcatatagcagatgtcctgtaaacgttagcttttatagctgtcatatgtgatctcaaaaatatagagtgatacttga

SEQ ID NO: 13862 - DNA, 201 bp, Homo sapiens
caaaacagggtaaatattcatctttttctcaaaggtggctaaaaagattaaatgaggaagtatgtgtgagagcccttattggagcttggcacatagtaggccatgaaaagcaatttgaatgaatgaggcgtgtgtagtagcagaaaatagactgattagagtgaatttggccccaagaagagtttgagaatcgatacggat

SEQ ID NO: 13863 - DNA, 201 bp, Homo sapiens
tgaggaagctattttgagggtgtcaggcataggggtgttgggacccagtgctagtttctggagtttcttccaaatcatctggggctgcctgagttaggaartggtcctttaggaccagttgcccttctggtgtctctgggtctaggttagtatatctcattagggcctcttgtagcctccctaggaaagcagaggaggttt

SEQ ID NO: 13864 - DNA, 201 bp, Homo sapiens
caagtaaatttcttagcctatctgaagccaaataagatttctagggatatttggataattgtcactacttgctatgacaatactgtatcactagttctctaaaaaaaaaaaaaaaaaaaagtttattgtttaaatctcttggttgtgctaacgtcgtctgtttctttcaaatgcagcatcagtagcttcgctctgctcagg

SEQ ID NO: 13865 - DNA, 201 bp, Homo sapiens
aaagctctagtccatcaatttaaaacaaatatactaagtgtaaattttaattaaacttgttaatgaattaatatatttttaatttccatataatcgcattmatcaatttgaataaatgaaagaatgaattattctgaacctattaaagaagagtgatgtatagccccagtttcaagtgaggtgtgataaagaaatggatcc

SEQ ID NO: 13866 - DNA, 201 bp, Homo sapiens
ttgtgatattgaagtcctcctcgagaataagggctgctgtacccactaccttgaggcaatgtggccaccattgtgctgctgggtctaggttctttgaaaartaacctacagcatgtttgactggcccaaaggtttcagttagaactcctagtgctataccttgccttttcagtgatgaaaaactgaaatggtttggttagt

SEQ ID NO: 13867 - DNA, 201 bp, Homo sapiens
aagtaaatttcttagcctatctgaagccaaataagatttctagggatatttggataattgtcactacttgctatgacaatactgtatcactagttctctaaaaaaaaaaaaaaaaaaaagtttattgtttaaatctcttggttgtgctaacgtcgtctgtttctttcaaatgcagcatcagtagcttcgctctgctcaggc

SEQ ID NO: 13868 - DNA, 201 bp, Homo sapiens
tgcactgaggtccctggggacagagctttagtctctacaacttggtgatgggactctgtagcataccctgcatatctagttccatccctgacgaagctackgccatctgaaaaccatattttgtctggattatctatgggctgatcctttaagtcttcccagctggcataaattttgttaagaatctcacagcatgaatat

SEQ ID NO: 13869 - DNA, 201 bp, Homo sapiens
agtaaatttcttagcctatctgaagccaaataagatttctagggatatttggataattgtcactacttgctatgacaatactgtatcactagttctctaaaaaaaaaaaaaaaaaaaagtttattgtttaaatctcttggttgtgctaacgtcgtctgtttctttcaaatgcagcatcagtagcttcgctctgctcaggca

SEQ ID NO: 13870 - DNA, 201 bp, Homo sapiens
tgcttactaacggccctactaacctgttgagttacttaggaaataaaggatggaccattgtcactttgcaatgacctgggtagctcaaaccaggaaatgcrttcctttaggaggaatttagctacctcctgtgccttctcagtctttgtggagcaggcttctacccattttgtgaaggtatctacacagaccaagaggtac

SEQ ID NO: 13871 - DNA, 201 bp, Homo sapiens
gtaaatttcttagcctatctgaagccaaataagatttctagggatatttggataattgtcactacttgctatgacaatactgtatcactagttctctaaaaaaaaaaaaaaaaaaaagtttattgtttaaatctcttggttgtgctaacgtcgtctgtttctttcaaatgcagcatcagtagcttcgctctgctcaggcag

SEQ ID NO: 13872 - DNA, 201 bp, Homo sapiens
tgagcccagatatgtgagcacatttttgccctgacaatgatttctggcttaatttaatttctactgaatttagtgtatttacacacagacacacacagatacacacacacacacacacacacacacacacacacacgacgtaacactattttaagatacatataataggatttttatgttacagtgctataatcacctcct

SEQ ID NO: 13873 - DNA, 201 bp, Homo sapiens
gagcccagatatgtgagcacatttttgccctgacaatgatttctggcttaatttaatttctactgaatttagtgtatttacacacagacacacacagatacacacacacacacacacacacacacacacacacacgacgtaacactattttaagatacatataataggatttttatgttacagtgctataatcacctcctc

SEQ ID NO: 13874 - DNA, 201 bp, Homo sapiens
atcctggctaacacggtgaaaccccgtctctactaaatatacaaaaaattagctgggcgtagtggcaggcgactgtattcccagctactcgggaggctgargcaggagaatggcgggaacccagggggcagagcttgcagtgagccaagatcgcgccattgcactccagccggggtgacagagcgagactccgtctcaaaa

SEQ ID NO: 13875 - DNA, 201 bp, Homo sapiens
aggcaagattcttcccacagagggaggaccaccatccacttgagaactaaataagagcatcttaactccttctgtaagggatgcctgcactaaaaaaattrtgtaagtcatccctgaggaatttggctaatgtcagaaagccagttcactttggtgcatagatatctatgacattagtactttcatcagaagaagaacaat

SEQ ID NO: 13876 - DNA, 201 bp, Homo sapiens
gacttggaagaatttaagccagtcacatttggtgttatagaactaaagaaattttacgtatgagaaaagtaaagtttttgacaggtagggagataaggttcgttaactcttttaggccaccattaacttttcaataactcttgctgttgggaataatggaaaaacataagctcgattattcatattgacccagattgccat

SEQ ID NO: 13877 - DNA, 201 bp, Homo sapiens
atagggtatcagagtgatttaatttgattttaaaaataaggaaatgtgacatttactcatttgtttactgttttgtggtgtagtagtattcatattcactmtacaaataactgtcaaaatatataagcctgcaaataatcaagaggtataattagactagatgattggtagggtctagtctgactcgaattgtatcactca

SEQ ID NO: 13878 - DNA, 201 bp, Homo sapiens
ctcatatctaataagtcgctcctgtgtatgtgtgtgagtgcacctgtgtgtgtgaaatgcctttttacatgcaggccttgtgtatgattttctgaagttamaaatcctttcaacgtacctgtatttttcaagcactacatcacaaagcagatgcccagtccaggctgcggagtcagattgggcagatgagtaggaggctgc

SEQ ID NO: 13879 - DNA, 201 bp, Homo sapiens
cagattgggcagatgagtaggaggctgcccatctgtcagcaactctaaaacatcaatggaataaactggaaccatgttgccatttacccggactttccacytaggagtccttacacactgatgaaattgctcctgttcctgccaaagtacacagagccctagagaggatattatgtatctcttatgtgtacctatccacct

SEQ ID NO: 13880 - DNA, 201 bp, Homo sapiens
gcttaggtttagaacccaccacttaaaatgatttcataaccctaacagacaaacccagtaatgactcagattggattttccatcaacttagtggaataggrtatcagagtgatttaatttgattttaaaaataaggaaatgtgacatttactcatttgtttactgttttgtggtgtagtagtattcatattcactatacaa

SEQ ID NO: 13881 - DNA, 201 bp, Homo sapiens
attcaaagcctgtttaaagcacttcaagaatattaaaaatactaccccattatcttcttttactgtggtttagaaaaggattgcagtggtactttcaaggrgtgtgcatttttatacctcttctccaaaataaaagtgagtgttgtctctcattaccacttgcttaagtgtaaatgtcatttacttcaaaggtatgtctat

SEQ ID NO: 13882 - DNA, 201 bp, Homo sapiens
ttgtttccttggactttaggttcttcccagttaaaggagggatgtggacttaaggatataaggacctcattccaaatttttacataactcttgaaacacaytttcctaacacactacaaaggaagataaatgagcaatacccctgccccttatgaaagtacaaagtatttgaccacttatgctaagttcagttacacaaaa

SEQ ID NO: 13883 - DNA, 201 bp, Homo sapiens
tctggaagtgggaggcaagaggcccacagtaggcatgagctgagacactgctaggctgcccctctgggaagtacatcagacctgtgcagaactggttgaartagcagcagctggaacaaggtaggtgaggctatgaggatctaaagaggagcctgagggtacactggcacaggcattgataagcacttacaagggggcata

SEQ ID NO: 13884 - DNA, 201 bp, Homo sapiens
ggttgtgttctgtgagcctcacccactgggtgttataaccaacctccagatgagccacttctttgtttaattacagctttaaagtagaattttttaaaagyccttgggcacttataaaaattacatttgttaagcattgactatgtgccaggcactatgccagaatacttaatttaacttaattctcacaaagcctttaat

SEQ ID NO: 13885 - DNA, 201 bp, Homo sapiens
aaattgctgatggatcattcgcctcctgagcttcaatttcctcaactaaatctggattctggcatttgtctgacttacctatcatgtagactgtgagggtmaaatgcaagatgtaagaagaaaacttttggaagtgaccaagttttaaaacaagtctaatattagttgtgataggggtaactttcttggaaattatccctt

SEQ ID NO: 13886 - DNA, 201 bp, Homo sapiens
agcacaagtgattgttcactattgtgtctagcaaaagactgaaggtccgtgttggggctgaaatccaacccatgttctgtttgccacgccctgagccttgraacagagctggatcagaccagaaggaagatttcctctgtgagcaagcacctttccttaatttgcatcaaagtgcccagtgtgtttcagaggtcctggtta

SEQ ID NO: 13887 - DNA, 201 bp, Homo sapiens
agcacatagtaatattcaactttatagatggatacaatgaagtttagaggaatgcagtgaagtgtgacttcacttctgcaattagtaaatggctgatccasaactcagacagaggaggtctcacttctaatcctgtgtcttttactaaaatgagattaggactctatttaaataattttaaaactgcaactgttttgcctc

SEQ ID NO: 13888 - DNA, 201 bp, Homo sapiens
tgattaatttaatattgatgaaataaattcaagattgttgttgatatccatctgcttatcatcactcagattttgagccaaattcccactgattgaacggaaaaaaaaaaaaaaaactcaagctgtaaatttagtataaagtcataccatatttgtagtatatttactcacctggcagaaacaaacacatatcctctctgg

SEQ ID NO: 13889 - DNA, 201 bp, Homo sapiens
agcccagatatgtgagcacatttttgccctgacaatgatttctggcttaatttaatttctactgaatttagtgtatttacacacagacacacacagatacmcacacacacacacacacacacacacacacacacgacgtaacactattttaagatacatataataggatttttatgttacagtgctataatcacctcctca

SEQ ID NO: 13890 - DNA, 201 bp, Homo sapiens
acacacacacgacgtaacactattttaagatacatataataggatttttatgttacagtgctataatcacctcctcagatttcttagaccaatgattgtctttaaggattgtatcggcaggactaatttcatattaattgtgttccattatagctagcacgaaggctccatcccatatcttgattttaggaatagacagtg

SEQ ID NO: 13891 - DNA, 201 bp, Homo sapiens
tccaggaagttctgccccagggcctttgcacactttctcccctcaacctggaatgctctttccctagatatccacattattcgttctcttatttcacttargtttttgctctaacatcccctcatcagagagaacatgcctgactcccatgaagataatacttcgttactctctattcttttatcctgttgtatttttcct

SEQ ID NO: 13892 - DNA, 201 bp, Homo sapiens
cacacacacgacgtaacactattttaagatacatataataggatttttatgttacagtgctataatcacctcctcagatttcttagaccaatgattgtctttaaggattgtatcggcaggactaatttcatattaattgtgttccattatagctagcacgaaggctccatcccatatcttgattttaggaatagacagtga

SEQ ID NO: 13893 - DNA, 201 bp, Homo sapiens
gccatcctaatcctatgaagctactgaactataaccctgaggaccctccaggatcagaagtaagttcctatacctctctgagctcacaggcaaagctgcargaacaaatttgttggggtgacttggaagaatttaagccagtcacatttggtgttatagaactaaagaaattttacgtatgagaaaagtaaagtttttgac

SEQ ID NO: 13894 - DNA, 201 bp, Homo sapiens
cattcttgagaatttttttttctcctgtggagttttgagttttcagagactgtcactggttcttccttgagccacttttgtttggaacaggagcaatcacmaatgcttctctctacaaagagatgaaaatattccatctgcctgacatcctaactactagctggaggtgggttgaaattggtttttggagagagggctgac

SEQ ID NO: 13895 - DNA, 201 bp, Homo sapiens
agatggcaaattttatgggaaaaaaggctcagcagagtaaaggggatcaggattactatatgcagcaggatgagcaggtcctactactaaagtcagagatsagagtaggcctcattgagaaagtacaatttgaaaaaaattaaaatgtgtgaatccacatttggtgatttgagaaactgaaattcaaattcaaacccagta

SEQ ID NO: 13896 - DNA, 201 bp, Homo sapiens
aaatgaaccagataagtgactttattcccagctactgttttttcagttgacaacataattctcaattcttggtttttttttttttttttttttttttttgkgacagagtatcgctctgtcgcccaggctggagtgcagtggcgcaatcttggctcactgcaagctccgcctcccgggttcacaccattctcctgcctcagc

SEQ ID NO: 13897 - DNA, 201 bp, Homo sapiens
gcaagctccgcctcccgggttcacaccattctcctgcctcagcctcccaagtagttgggaccacaggcgcatgccaccatgcctggctaattttttgtattttttttttttttttagtagagacagggtttcatcctgttggccaggatggtcttgatctgctgaccttgtgatccacccgcctcggcctcccaaagtgcc

SEQ ID NO: 13898 - DNA, 201 bp, Homo sapiens
actgactcaaatgttaatctcctttggcaacacgctcacagacacccaggatcaatactttgcatccttcaatccaatcaagttgactctcagtattaacyatcatactgagtaacagcttcctccctccacatttactgaaatccccactgctccctaatgtcccacatccaggatgcgctgctcatttgcatttcctgc

SEQ ID NO: 13899 - DNA, 201 bp, Homo sapiens; identical to SEQ ID NO: 2488

SEQ ID NO: 13900 - DNA, 201 bp, Homo sapiens
cactattgaatcagaaccagcgtcatggaacaaactccctgggggattagagatcatgaatctgccccagggagagaaggcaagagatgatatcatgaggyctgcatcaggagcaagccaaatccccaggatagatgcatccttttttcttcagacttggagtgtatgtgtgtgcggctcacaggaagctatatatgcctg

SEQ ID NO: 13901 - DNA, 201 bp, Homo sapiens
gagcttcaaccccaacagtcctggaaaaatacttctgatggacctgaatgaagaagatccaacagtgttggaattggggatcactggaagtaaatttgatrtatcttcatttaaccctcatgggattagcacattcacagatgaaggtaacaatatttactatttattaaaaccaaaaccaaacttaaaacaaaaacagaa

SEQ ID NO: 13902 - DNA, 201 bp, Homo sapiens
atgaaaggaagtacctacttacttgttatgtcattcataaattatgataaagatagttaaccaacacgaagatgattgaagtccacatttaaacatacatkttgaatgctgtgccttgacttccagggttgggttttatcttctacagagaaagggtgaatgcctctcgagaagtggagccagtagaacctgaaaactgcc

SEQ ID NO: 13903 - DNA, 201 bp, Homo sapiens
attcttgcctcctcaaaggaaataatttacctaaggggtataaggtagagtgagagaccaaggcaagtttttgaacaggaatgagagcaggagtgaaaggaagaaagtatacttggaagagggccaagcgggcaacttaagagatccaagtgcctcatccaacccttcacttggggtttttatacattggcctggttctga

SEQ ID NO: 13904 - DNA, 201 bp, Homo sapiens
gccagagtaggtatggctgttcaactctcatttctaatgatcacaaactcctccacatgctcttctgaagaaccttctgaggactcaagcccctcagagayggcccattcttttcctctcttgtttctcgagctgattggatgctggctcctggcctcaggatctccattcaagttattaccaggaaaaaaatcctcttct

SEQ ID NO: 13905 - DNA, 201 bp, Homo sapiens
ggggaaatgagggaaatagaaaccatttatctccagcccctcaatatttatgtaacaggaagagagaagatgctattttaccatacagatgtgtttttttwaaatgataaataggtataaaaccttgtaaacattgcattaaagaaggaacactagtatttttggccctatgtggcctcctcctcttccttctatccactt

SEQ ID NO: 13906 - DNA, 201 bp, Homo sapiens
ctggaggtgggctctttcacctgctcctgcctctcctcattcctccaggtcctgcccgccagtactacaccaagggcaacctggtccggatatgcctcggrgctgtgatcctaataatcctggcggggtttctggcagaggactggcacagccggaggaagcgcctgcggcacaggggcagggctgtgcagaggccgcttc

SEQ ID NO: 13907 - DNA, 201 bp, Homo sapiens
gaatatcagcgtatggggttcagaattgggcattaagatcaggtgggaaggttgagattttaaaaagggtcagagaaagagagattccatctcttccccascccttataactgtcctctcttttgcaatgcatcagataacgaggcagcatctgtgtctggggaggagttgtctcagagccctgtgagagcacaggaggga

SEQ ID NO: 13908 - DNA, 201 bp, Homo sapiens
aaggcagaatatcagcgtatggggttcagaattgggcattaagatcaggtgggaaggttgagattttaaaaagggtcagagaaagagagattccatctctyccccaccccttataactgtcctctcttttgcaatgcatcagataacgaggcagcatctgtgtctggggaggagttgtctcagagccctgtgagagcacag

SEQ ID NO: 13909 - DNA, 201 bp, Homo sapiens
gtgggaaggaagtgggagggcaggaagccctgggctgcaggggcggggccgtaggtgggaaggaagtgggagggcaggaagccctgggctgcaggggcggmgccgtaggtgggaaggaagtgggagggcaggaagccctgggctgcaggggcggggccgtaggtgggaaggaagtgggagggcaggaagccctgggctgca

SEQ ID NO: 13910 - DNA, 201 bp, Homo sapiens
ctggctggacgctaccgctgctcctaccagaacggaagcctctggtccctgcccagcgaccagctggagctcgttgccacgggtaaaggaagggggatcgragcctgggactgcgtggtcctccgttcaggacacaaatacgggggacattgagggcagggattagggtgaggcaaacgaggcactggcctagcgggtggt

SEQ ID NO: 13911 - DNA, 201 bp, Homo sapiens
aagccagcctcctgcctcagcctcccaaagtgctgggattataggcatgaggcaccgtgcccggcccatgcttttcttaaatgctgtggaattgtgcctcmccatgtgtgtgtgtgttcggagtaggcacagtgacagggggcgggaatatggtttcatttcacacttagcctttgtttggttcccagagacttctaggag

SEQ ID NO: 13912 - DNA, 201 bp, Homo sapiens
gccttgagcaatcctcctgcctcagcctcatgagtagcagggactacggtcacgggccaccgtgcttggctcgggattctttttaaaactttgttttggartaatttttagactgacagaaaagttccaaagataatattaatggaaatatttcacccaggatcccctcatgttaacatcttacatttgttacaaccaaaa

SEQ ID NO: 13913 - DNA, 201 bp, Homo sapiens
tgggtgcagcaaaccaccatggcacacgtttacctatgtaacaaacctgcacgtcctgcacatggattctggaactgaaattttaattgaaaaaaaaaaaggtttattaatgcatctcacacgaagagaaataacaaagaccaaataatacccacactctcattatgccaccgagagctgagcataaactagttttttcca

SEQ ID NO: 13914 - DNA, 201 bp, Homo sapiens
atgggtgcagcaaaccaccatggcacacgtttacctatgtaacaaacctgcacgtcctgcacatggattctggaactgaaattttaattgaaaaaaaaaaaggtttattaatgcatctcacacgaagagaaataacaaagaccaaataatacccacactctcattatgccaccgagagctgagcataaactagttttttcc

SEQ ID NO: 13915 - DNA, 201 bp, Homo sapiens
caacacaaacgagtccaccgtgtctaacacaacacgaacgagtccaccgtgtctaacacaacacgaacgagtccaccgtgtctaacacaacacgaaggagyccaccgcgtctaacacgaacgaacccaccgtgtctaacacgaacgaacccaccgtgtctaacacgaacgagtccaccgtgtctaacacgaacgagtccac

SEQ ID NO: 13916 - DNA, 201 bp, Homo sapiens
aatatacagatttttgttttccactcctgtattactttacttagaataatgccttccagctccatccaagttgctgcaaaagactttttttttttttttttaaagacggaatctcgctctctcaccaaggctggagtgcagtggtgtgatctcggcttactgcaaactccacctcccgggtttaagtgattctcctgcctc

SEQ ID NO: 13917 - DNA, 201 bp, Homo sapiens
ttcacaaacatctcagctgaatacggtgtaccagactacggcctgcactttaagaatatcatacgctaggctggaggctgggcgtgtctaacattccctgygtctcagagtgaagcaccaaggcaggagaaacatgctggaaagagccgaggttgataaggatgagatttgcggggttgagggcagagtgagggctattat

SEQ ID NO: 13918 - DNA, 201 bp, Homo sapiens
atcatttagtttttggtagaaaaatctgttttgcccccagggtcacagtgaggggtaggacacaggaatccagaagaaatagaactgaggttgaaaaaggyggacgggagctgcatgcatttccttgttaatagcccagaatgtgccaggtgtgctttacaaatgctgctgcttttttttttttttttttggggggagtct

SEQ ID NO: 13919 - DNA, 201 bp, Homo sapiens
ctgcagggagctgtgatcacgccactgcactccagcctgggtgacagagtgagaccctgtatcaaaaaacaaacaaaaaactaaccatagacacaactatrttatatcaagtaaactccaggctatttgaatttcaccagtctttccactaatatcctatttctgttcccagaccccgtccagggccccacagtgcattta

SEQ ID NO: 13920 - DNA, 201 bp, Homo sapiens
tgtttgttttttgagatggagtctcgctcagtcggtcgctcaggctggaatgcaatggcatgatctcagctcactgcaaactctgcctcccgggtccaagkgattctcctgcctcagcctcccgagtagttgggattacaggcatctgccaccaggtctggctaattattgtatttttagtaggggcggggtttcaccatg

SEQ ID NO: 13921 - DNA, 201 bp, Homo sapiens
ctcctgcctcagcctcccgagcagctgggattacaggtgcacaccaccacgcctggctaatttttgtatttttagtggagacggggtttcaccatactggycaggctgggcttgaactcctgacctcaagtgatctgccctcctcagcctcccaaagtgctgggattacaggcatgaggcactgcacccagctcaaatgct

SEQ ID NO: 13922 - DNA, 201 bp, Homo sapiens
ttgttcaggacccacagcgacagagcacagatttatctcattttctgatttcccaggaacctctgtgacccccagccggttaccaacagaaccaccttccycggtagcaggtaggttctgcagggtccattctggtgcacagcgtatgaggtacacggaccccttctctctctcctctctgcctagacttctcgatttaat

SEQ ID NO: 13923 - DNA, 201 bp, Homo sapiens
ggtgggtggatcacctgaggtcaggagttcaagaccagcctggtcaacatggtgaaaccccatctctacaaaaattagccgggcgtgatggcgggtgcttstaatcccagctacgtgggaggctgaggtgggagaattgcttgaaactgggaggcagaagttgcagtgagctgaggtcaggcattgcactccagcctgggc

SEQ ID NO: 13924 - DNA, 201 bp, Homo sapiens
gactacaggtgtgtgccaccatgcccagctattttttgtatttttagtaaagacggggtttcaccatgttggccaggatggtctcgatctcttgacctcasgtgatccgcccaccttggcctcccaaagtgctgggattacaggcattcagccagtgtcatgcctggcctgacaatgtcttattaatatttgggttcccat

SEQ ID NO: 13925 - DNA, 201 bp, Homo sapiens
tcatgatctgcccgcctcggcctcccaaagtgctgggattacaggcgtgagccaccgcgtcggacttgactaccattcttaaagggggtttctttcaaaaragagcagcatacctcataatgtggttatatacatgcaatggaatattatgcagccttaaaaaagaaggaaattctgacacatactacaacatggatatac

SEQ ID NO: 13926 - DNA, 201 bp, Homo sapiens
tgggattggaggcatgagccaccgcgcccggcatatcccagggagttctgtgatggaagccttccctatcttcagttcggaacctcccaatcaccctcagsatgcagttccaattcctcagcttgctattctgtgagcttagatatccagcccctgttgatccctccaattttgtctgcataccttccacgcattcccatg

SEQ ID NO: 13927 - DNA, 201 bp, Homo sapiens
taacctctgctgcccgggttcaagcgattctcctgcctcagcctcccgagtagctgggattataggtgcatgccaccacacctggctaatttttgtattttagtagagacggggtttcagcatcttgggaaggctggtcttgaactcctgacctcatgatccacctgtctcggcctcccaaagtgctgggattggaggcat

SEQ ID NO: 13928 - DNA, 201 bp, Homo sapiens
tctggctggacgctaccgctgctcctaccagaacggaagcctctggtccctgcccagcgaccagctggagctcgttgccacgggtaaaggaagggggatcrgagcctgggactgcgtggtcctccgttcaggacacaaatacgggggacattgagggcagggattagggtgaggcaaacgaggcactggcctagcgggtgg

SEQ ID NO: 13929 - DNA, 201 bp, Homo sapiens
catccccgaccgccctcttctgtcttggtgagtcctgagggtcagatctgggaaatgctgaaggacaggcatggactgccagacaaaggatttttaagaawtttgcattggtgatgaatttcaggacaaaaaggaacctgtaagagccccttcatttgttgggtggggaaacggggggccagcgagctggcattttgcatg

SEQ ID NO: 13930 - DNA, 201 bp, Homo sapiens
tggccaggcgcagcctgtaatcccagcactttgagaggccaaggagggtggatcacgaggtcaggagatcgagaccatcctggccaacatggtgaaacccygcctctactaaagtacaaaaaaaaaagttggccaggcgtgatggcaggtgcctgtaatcccagctactcgggaggctgagggaggagaatcgcttgaacc

SEQ ID NO: 13931 - DNA, 201 bp, Homo sapiens
tgggttggggtgcagagggagcctggggtggacaaagggtggtggctatgggggcgctggtgacaagttgtcactctctgagctcagagtcaagacatgakctgggttcacccacttcttgctatgtgagctacacaaggttgcttggcctctgcccagtttccttatgtttacagtgggaatgacaactatcccgccttt

SEQ ID NO: 13932 - DNA, 201 bp, Homo sapiens
tattctggatatttcatgtaaatgacctcataaactatgtggctttttctgaccggtttctctcacttaaattacattcctgtgtgtcttttgaagaaatwattaggacagagtaaagcatatgcatgcaaatgtcttatcaccgcgcccagcaggcaggaatgtccataaaagcgagtcctggcatctggtccctttctt

SEQ ID NO: 13933 - DNA, 201 bp, Homo sapiens
gaaaaaggtggacgggagctgcatgcatttccttgttaatagcccagaatgtgccaggtgtgctttacaaatgctgctgcttttttttttttttttttggrgggagtctcactttgtcacccaggctggagtgcagtggagtgatctcagttcactgcaacctccacctcctgggtttaagcgattctcctgcctcagcct

SEQ ID NO: 13934 - DNA, 201 bp, Homo sapiens
ggcatctggtccctttcttctttcctcagggctgtgtctggggcgtgtgccagcgcagagtggtgagtccttccccagaccccttccctcctgcgggatcyaccagcgcgggagcagcggggtccaggcggggtctgcggggaggctgacccagccctgctcctcttccaggaccgctccccaagccctccctccaggctc

SEQ ID NO: 13935 - DNA, 201 bp, Homo sapiens
atggtcacatactgtgtgcgtgcatatgtgtgtgtgcgtgcatgtgcgtgtgtgcgtgcatatgtgtgtgtgcgtgcatatgtgtgtgcatgcgtgcatatgtgtgtgtgtgcatgcgtgcatatgtgtgcgtgtgcttctgactgaatttttgaactttctcttttgaaatggttctagagtcacaggaagtctacaatg

SEQ ID NO: 13936 - DNA, 201 bp, Homo sapiens
gatggtcacatactgtgtgcgtgcatatgtgtgtgtgcgtgcatgtgcgtgtgtgcgtgcatatgtgtgtgtgcgtgcatatgtgtgtgcatgcgtgcatatgtgtgtgtgtgcatgcgtgcatatgtgtgcgtgtgcttctgactgaatttttgaactttctcttttgaaatggttctagagtcacaggaagtctacaat

SEQ ID NO: 13937 - DNA, 201 bp, Homo sapiens
tgataaggatgagatttgcggggttgagggcagagtgagggctattatgcctagtgggcagggacatggaagatggtcacatactgtgtgcgtgcatatgygtgtgtgcgtgcatgtgcgtgtgtgcgtgcatatgtgtgtgtgcgtgcatatgtgtgtgcatgcgtgcatatgtgtgtgtgtgcatgcgtgcatatgtgt

SEQ ID NO: 13938 - DNA, 201 bp, Homo sapiens
ggttgataaggatgagatttgcggggttgagggcagagtgagggctattatgcctagtgggcagggacatggaagatggtcacatactgtgtgcgtgcatrtgtgtgtgtgcgtgcatgtgcgtgtgtgcgtgcatatgtgtgtgtgcgtgcatatgtgtgtgcatgcgtgcatatgtgtgtgtgtgcatgcgtgcatatg

SEQ ID NO: 13939 - DNA, 201 bp, Homo sapiens
gttcccaggtgatgctgatgctatggctccagaatgctgctttgagaaccactgcggtaagttttgtgtgaggcgtgttatcccctccactttcacaaacrtctcagctgaatacggtgtaccagactacggcctgcactttaagaatatcatacgctaggctggaggctgggcgtgtctaacattccctgtgtctcagag

SEQ ID NO: 13940 - DNA, 201 bp, Homo sapiens
ctttcttctttcctcagggctgtgtctggggcgtgtgccagcgcagagtggtgagtccttccccagaccccttccctcctgcgggatccaccagcgcgggrgcagcggggtccaggcggggtctgcggggaggctgacccagccctgctcctcttccaggaccgctccccaagccctccctccaggctctgcccagctccc

SEQ ID NO: 13941 - DNA, 201 bp, Homo sapiens
gccaggctggtcttgaactcttgacctcaggtgatctgcctgcctcggcctctcaaagtgctgggattacaggtgtgagccaccacgcccggctaagcctktttttttcagatggagtcttactgcgtcacccaggctggagtgcagtggtgcgatctcagatcactgcaacctctgcctcctaggttcaagtgattctcc

SEQ ID NO: 13942 - DNA, 201 bp, Homo sapiens
tcaccatgttggccaggctggtcttgaactcttgacctcaggtgatctgcctgcctcggcctctcaaagtgctgggattacaggtgtgagccaccacgccyggctaagcctgtttttttcagatggagtcttactgcgtcacccaggctggagtgcagtggtgcgatctcagatcactgcaacctctgcctcctaggttca

SEQ ID NO: 13943 - DNA, 201 bp, Homo sapiens
aaaggtggacgggagctgcatgcatttccttgttaatagcccagaatgtgccaggtgtgctttacaaatgctgctgcttttttttttttttttttggggggagtctcactttgtcacccaggctggagtgcagtggagtgatctcagttcactgcaacctccacctcctgggtttaagcgattctcctgcctcagcctcct

SEQ ID NO: 13944 - DNA, 201 bp, Homo sapiens
tggacaaattatttaatgccatgtgccttagtttcatttataaaatagggacattaagagtgaggactccataggtctctgaggattcactgaactgatayacatcataagtttggaaggcacccggaagctagcactgtcagccacatttacaacgtaacaattgtatgtggcaatacaagcttacagcacagtataagc

SEQ ID NO: 13945 - DNA, 201 bp, Homo sapiens; identical to SEQ ID NO: 2515

SEQ ID NO: 13946 - DNA, 201 bp, Homo sapiens; identical to SEQ ID NO: 2518
  misc_feature (1)...(201): n = A,T,C or G, or insertion/deletion polymorphism (see Tables 1-2)

SEQ ID NO: 13947 - DNA, 201 bp, Homo sapiens; identical to SEQ ID NO: 2520

SEQ ID NO: 13948 - DNA, 201 bp, Homo sapiens
ttgaatatgggtgacaaaaacaaacaaactaaccaaccaaccaaccaaccaaccaaccaacaaacctgtagagtccgggactctgtttctgagtcactgawtgcattgatcagcggttctcaaacttccatgagcataagaatcacctggaggcttaaagaatagatttctgagcccccagggcttctgcttcagtaggtc

SEQ ID NO: 13949 - DNA, 201 bp, Homo sapiens
cagttactactagcaagctaattaacatacatcacctgacacagttaacttttttgtgtgtgagaatacttataatctaccctcttagcaaatttcagctrtacactgcagtattgttacctagagttggacaaattatttaatgccatgtgccttagtttcatttataaaatagggacattaagagtgaggactccatag

SEQ ID NO: 13950 - DNA, 201 bp, Homo sapiens
caaccgtttgagatatccttttgtcactcagtgcaatgcccctgaggcccatccaagctgctgtatgtatcaatgatgtgttccttttgattgctgagcartatttcatgctatattaggccgattttgtgctgctataaatacctgagactggatcattgataagaaaagaggtttaattggttcatggttctgaaggcc

SEQ ID NO: 13951 - DNA, 201 bp, Homo sapiens
agttgatgttttgatatacgaatccactgtgagacagttactactagcaagctaattaacatacatcacctgacacagttaacttttttgtgtgtgagaayacttataatctaccctcttagcaaatttcagctgtacactgcagtattgttacctagagttggacaaattatttaatgccatgtgccttagtttcattta

SEQ ID NO: 13952 - DNA, 201 bp, Homo sapiens
gaggcccatccaagctgctgtatgtatcaatgatgtgttccttttgattgctgagcagtatttcatgctatattaggccgattttgtgctgctataaatayctgagactggatcattgataagaaaagaggtttaattggttcatggttctgaaggccgtataggaagcagaaggctggcttctgcttttggggaggcctc

SEQ ID NO: 13953 - DNA, 201 bp, Homo sapiens
gggtttttctatgttgctcaggttggtcttgaactcctggactcaagccagcctcctgcctcagcctcccaaagtgctgggattataggcatgaggcaccrtgcccggcccatgcttttcttaaatgctgtggaattgtgcctcaccatgtgtgtgtgtgttcggagtaggcacagtgacagggggcgggaatatggtttc

SEQ ID NO: 13954 - DNA, 201 bp, Homo sapiens
tgccaccacgcctggctaatttttgtatttttttgtagagatagggtttttctatgttgctcaggttggtcttgaactcctggactcaagccagcctcctrcctcagcctcccaaagtgctgggattataggcatgaggcaccgtgcccggcccatgcttttcttaaatgctgtggaattgtgcctcaccatgtgtgtgtg

SEQ ID NO: 13955 - DNA, 201 bp, Homo sapiens
ataaattgcaaaaacatccacaatgaaaaaaaccagaatttcaaataaaggcagaatcagccagtgcctgtgtcaagtcataccagagtctgtgccaaaaygaaaaacaggcaaccctttatctgtgttttaatgcacttaaaaaaattagcgatggggtcttgctacactgcccaggccggagtgcagtggctgttcata

SEQ ID NO: 13956 - DNA, 201 bp, Homo sapiens
aaaaagaaggaaattctgacacatactacaacatggatataccttgaggacattatgctaagtcagtcagtcacaaaaggacaactactgtatgattctastcaaaggaggtatctaatgtcaacactgtagaaacacaaagtacaatggtggttgttaagggccagaaagaggagagagaaggaattagtgtttaatggg

SEQ ID NO: 13957 - DNA, 201 bp, Homo sapiens
aaaaggtggacgggagctgcatgcatttccttgttaatagcccagaatgtgccaggtgtgctttacaaatgctgctgcttttttttttttttttttggggrgagtctcactttgtcacccaggctggagtgcagtggagtgatctcagttcactgcaacctccacctcctgggtttaagcgattctcctgcctcagcctcc

SEQ ID NO: 13958 - DNA, 201 bp, Homo sapiens
tgaaaaaggtggacgggagctgcatgcatttccttgttaatagcccagaatgtgccaggtgtgctttacaaatgctgctgcttttttttttttttttttgkggggagtctcactttgtcacccaggctggagtgcagtggagtgatctcagttcactgcaacctccacctcctgggtttaagcgattctcctgcctcagcc

SEQ ID NO: 13959 - DNA, 201 bp, Homo sapiens
ttgaaaaaggtggacgggagctgcatgcatttccttgttaatagcccagaatgtgccaggtgtgctttacaaatgctgctgcttttttttttttttttttkgggggagtctcactttgtcacccaggctggagtgcagtggagtgatctcagttcactgcaacctccacctcctgggtttaagcgattctcctgcctcagc

SEQ ID NO: 13960 - DNA, 201 bp, Homo sapiens
gttgaaaaaggtggacgggagctgcatgcatttccttgttaatagcccagaatgtgccaggtgtgctttacaaatgctgctgcttttttttttttttttttggggggagtctcactttgtcacccaggctggagtgcagtggagtgatctcagttcactgcaacctccacctcctgggtttaagcgattctcctgcctcag

SEQ ID NO: 13961 - DNA, 201 bp, Homo sapiens
aacagagatagtttgatttcctctcttcctatttgagtatcctttatttctttctcttgcctgattatcctggccagaacttccaatactatgttgaatasgagtggtgaaagagggcatccttgtcttgtgctggttttcaagggaaatgcccatttagtatgaaattggctgtgggttaataaatggtgctgggagaat

SEQ ID NO: 13962 - DNA, 201 bp, Homo sapiens
acatgcaatggaatattatgcagccttaaaaaagaaggaaattctgacacatactacaacatggatataccttgaggacattatgctaagtcagtcagtcacaaaaggacaactactgtatgattctagtcaaaggaggtatctaatgtcaacactgtagaaacacaaagtacaatggtggttgttaagggccagaaagag

SEQ ID NO: 13963 - DNA, 201 bp, Homo sapiens
tacatgcaatggaatattatgcagccttaaaaaagaaggaaattctgacacatactacaacatggatataccttgaggacattatgctaagtcagtcagtcacaaaaggacaactactgtatgattctagtcaaaggaggtatctaatgtcaacactgtagaaacacaaagtacaatggtggttgttaagggccagaaaga

SEQ ID NO: 13964 - DNA, 201 bp, Homo sapiens
atacatgcaatggaatattatgcagccttaaaaaagaaggaaattctgacacatactacaacatggatataccttgaggacattatgctaagtcagtcagtcacaaaaggacaactactgtatgattctagtcaaaggaggtatctaatgtcaacactgtagaaacacaaagtacaatggtggttgttaagggccagaaag

SEQ ID NO: 13965 - DNA, 201 bp, Homo sapiens; identical to SEQ ID NO: 2513

SEQ ID NO: 13966 - DNA, 201 bp, Homo sapiens
tatacatgcaatggaatattatgcagccttaaaaaagaaggaaattctgacacatactacaacatggatataccttgaggacattatgctaagtcagtcagtcacaaaaggacaactactgtatgattctagtcaaaggaggtatctaatgtcaacactgtagaaacacaaagtacaatggtggttgttaagggccagaaa

SEQ ID NO: 13967 - DNA, 201 bp, Homo sapiens; identical to SEQ ID NO: 2514

SEQ ID NO: 13968 - DNA, 201 bp, Homo sapiens
gagggcaggaagccctgggctgcaggggcggggccgtaggtgggaaggaagtgggagggcaggaagccctgggctgcaggggcggggccgtaggtgggaargaagtgggagggcaggaagccctgggctgcaggggcggggccgtaggtgggaaggaagtgggagggcaggaagccctgggctgcaggggcggggccgtag

SEQ ID NO: 13969 - DNA, 201 bp, Homo sapiens; identical to SEQ ID NO: 2516

SEQ ID NO: 13970 - DNA, 201 bp, Homo sapiens
gatggtaccgggctagtttccccatcatcacggtgaccgccgcccacagcggaacctaccgatgctacagcttctccagcagggacccatacctgtggtcrgcccccagcgaccccctggagcttgtggtcacaggtaggggtagtgcagaccaaacctttcttcctcagcctttataggtcctgatggccattccaaggg

SEQ ID NO: 13971 - DNA, 201 bp, Homo sapiens
gaaggaagtgggagggcaggaagccctgggctgcaggggcggggccgtaggtgggaaggaagtgggagggcaggaagccctgggctgcaggggcggggccrtaggtgggaaggaagtgggagggcaggaagccctgggctgcaggggcggggccgtaggtgggaaggaagtgggagggcaggaagccctgggctgcagggg

SEQ ID NO: 13972 - DNA, 201 bp, Homo sapiens; identical to SEQ ID NO: 2519

SEQ ID NO: 13973 - DNA, 201 bp, Homo sapiens; identical to SEQ ID NO: 2521

SEQ ID NO: 13974 - DNA, 201 bp, Homo sapiens
aaaggaagggggatcggagcctgggactgcgtggtcctccgttcaggacacaaatacgggggacattgagggcagggattagggtgaggcaaacgaggcamtggcctagcgggtggtggtgccacgacatttatggatcaatgtgaataatattttgttttttggacacagggtcttgctgcgtcacccagggtggagagc

SEQ ID NO: 13975 - DNA, 201 bp, Homo sapiens; identical to SEQ ID NO: 2522

SEQ ID NO: 13976 - DNA, 201 bp, Homo sapiens; identical to SEQ ID NO: 2524

SEQ ID NO: 13977 - DNA, 201 bp, Homo sapiens
gcatctggtccctttcttctttcctcagggctgtgtctggggcgtgtgccagcgcagagtggtgagtccttccccagaccccttccctcctgcgggatccrccagcgcgggagcagcggggtccaggcggggtctgcggggaggctgacccagccctgctcctcttccaggaccgctccccaagccctccctccaggctct

SEQ ID NO: 13978 - DNA, 201 bp, Homo sapiens
agtcttcacaactggtgagtaaccaggcatttcatgctcagcagaaaggagtgtgaggacggagctctctcttccattatctaagcctgtaggcttttaaycacttcaccgaactgtccgtctcttaccaagaaagtccttggtgtgaggctagagcatgggtgcagagtggagctctggggttcagaaggaggagcattt

SEQ ID NO: 13979 - DNA, 201 bp, Homo sapiens
actcccagccatggtacagcgtcgcatggaaacctacaaagaggctgaggtgggctgtgatgcggcaggaggagggggacagagaagcggccggagcttgsgttggggtgcagagggagcctggggtggacaaagggtggtggctatgggggcgctggtgacaagttgtcactctctgagctcagagtcaagacatgagct

SEQ ID NO: 13980 - DNA, 201 bp, Homo sapiens
cttgaacctgggaggtggaggttgcggtgagccaagatcacaccattgcactctggcctgggcaacaagagcgaaactccgtctcaaaaaaaaaaaaaaaattgtggaattgatatctggactaggtatggatttaatttgtcagtatcccctacagtagtggagtaaatagtctcctgatggatgggtggcaggtcgaat

SEQ ID NO: 13981 - DNA, 201 bp, Homo sapiens
tgtgtgtgttcggagtaggcacagtgacagggggcgggaatatggtttcatttcacacttagcctttgtttggttcccagagacttctaggagtatcaccrccagtccaaaggagtcagactctccagctggtgagtaagtcatcctctccagacccccttccttctcacccgtctcttcaccaaagccaactcctttgtc

SEQ ID NO: 13982 - DNA, 201 bp, Homo sapiens
tttgttttccactcctgtattactttacttagaataatgccttccagctccatccaagttgctgcaaaagactttttttttttttttttaaagacggaatytcgctctctcaccaaggctggagtgcagtggtgtgatctcggcttactgcaaactccacctcccgggtttaagtgattctcctgcctcagcctcccgagt

SEQ ID NO: 13983 - DNA, 201 bp, Homo sapiens
atcccctacagtagtggagtaaatagtctcctgatggatgggtggcaggtcgaatgcatttctgctgcctgatcttcacttgtgctgggcatgtcgaatgmattatttcctgatttcttcagaatttgaccactaaagggacagcatctccaaaaggctaagcaggaagaagatggttgcattactggagatgagagggtt

SEQ ID NO: 13984 - DNA, 201 bp, Homo sapiens; identical to SEQ ID NO: 2525

SEQ ID NO: 13985 - DNA, 201 bp, Homo sapiens
acatccacaatgaaaaaaaccagaatttcaaataaaggcagaatcagccagtgcctgtgtcaagtcataccagagtctgtgccaaaacgaaaaacaggcamccctttatctgtgttttaatgcacttaaaaaaattagcgatggggtcttgctacactgcccaggccggagtgcagtggctgttcataggagcagtcatag

SEQ ID NO: 13986 - DNA, 201 bp, Homo sapiens
gtaaaattctaataaatctttcaggggaataaagtattcaaacagaataatgtgagttttaacgacctactcttcaaattttcaataattttttcaaataygttaattgtttgggaataattaaattttacatcccaggagagtgcctcactcacgccaccctaattcctggccagctgcactgtggtctattccgcgtta

SEQ ID NO: 13987 - DNA, 201 bp, Homo sapiens
ataccagagtctgtgccaaaacgaaaaacaggcaaccctttatctgtgttttaatgcacttaaaaaaattagcgatggggtcttgctacactgcccaggcyggagtgcagtggctgttcataggagcagtcatagctcactgcagcctggagctccttgccttgagcaatcctcctgcctcagcctcatgagtagcaggga

SEQ ID NO: 13988 - DNA, 201 bp, Homo sapiens
tgaggcaggagaatcgcttaaacctgggaggcggtgagccgagattgcaccactgcagtccagcctgggcgacagagcaagactccgtcttgggaaaaaamaaaaaagagaagaggtcttactatgttgcccaggctttagtacactcgctgtattcacaggcatgatcatagctcactttagcctcaaatccctgggctc

SEQ ID NO: 13989 - DNA, 201 bp, Homo sapiens
gctactccggaggctgaggcaggagaatcgcttaaacctgggaggcggtgagccgagattgcaccactgcagtccagcctgggcgacagagcaagactccrtcttgggaaaaaaaaaaaaagagaagaggtcttactatgttgcccaggctttagtacactcgctgtattcacaggcatgatcatagctcactttagcctc

SEQ ID NO: 13990 - DNA, 201 bp, Homo sapiens
ggtgggaaggaagtgggagggcaggaagccctgggctgcaggggcggggccgtaggtgggaaggaagtgggagggcaggaagccctgggctgcaggggcgsggccgtaggtgggaaggaagtgggagggcaggaagccctgggctgcaggggcggggccgtaggtgggaaggaagtgggagggcaggaagccctgggctgc

SEQ ID NO: 13991 - DNA, 201 bp, Homo sapiens
gggccgtaggtgggaaggaagtgggagggcaggaagccctgggctgcaggggcggggccgtaggtgggaaggaagtgggagggcaggaagccctgggctgyaggggcggggccgtaggtgggaaggaagtgggagggcaggaagccctgggctgcaggggcggggccgtaggtgggaaggaagtgggagggcaggaagccc

SEQ ID NO: 13992 - DNA, 201 bp, Homo sapiens
aaaaaatcgctttactttttggtctcctgcaatagtctgggaaccgcagatggacaatgtcttatggtttttttgttttttgttgttgtttttgagacggmgtctcactctcctcactctgtgatctgtgatttcggctcactctgcgatctcagctcactgcaatctccggctcctgagtagctgggactacaggtgtgt

SEQ ID NO: 13993 - DNA, 201 bp, Homo sapiens
ttactttttggtctcctgcaatagtctgggaaccgcagatggacaatgtcttatggtttttttgttttttgttgttgtttttgagacggagtctcactctsctcactctgtgatctgtgatttcggctcactctgcgatctcagctcactgcaatctccggctcctgagtagctgggactacaggtgtgtgccaccatgcc

SEQ ID NO: 13994 - DNA, 201 bp, Homo sapiens
ggctttggactcggctgtgatccaggtatttaatctcgctcctcactgtgtccaggtagagcccatgctcggacgcacacagactgtaggcacctggacayagcacatcttctaaccgctccaggcctctgcagatacgctttcctcagtctctttccccttgcctgtcctggaaaatctccatttccttccagactaaac

SEQ ID NO: 13995 - DNA, 201 bp, Homo sapiens
taaccacttcaccgaactgtccgtctcttaccaagaaagtccttggtgtgaggctagagcatgggtgcagagtggagctctggggttcagaaggaggagcrttttgggtgatggggccatttcaaagatggcggagccaaggctgtggcgggacgaccgccatccctacgcactgctcccaggatgaagtcctaggctttg

SEQ ID NO: 13996 - DNA, 201 bp, Homo sapiens
tgcagtggctgttcataggagcagtcatagctcactgcagcctggagctccttgccttgagcaatcctcctgcctcagcctcatgagtagcagggactacrgtcacgggccaccgtgcttggctcgggattctttttaaaactttgttttggagtaatttttagactgacagaaaagttccaaagataatattaatggaaa

SEQ ID NO: 13997 - DNA, 201 bp, Homo sapiens
gttcccagaccccgtccagggccccacagtgcatttagtatttatgtctccttagactcttgattggtgcaaatattctaatttcttttcttatttatttwttttttttaagagaagaggttgggccgggcgcggcggctcacgcctgtaatcccagtactttgggaggctgaggtgggtggatcacttaaggtcaggagt

SEQ ID NO: 13998 - DNA, 201 bp, Homo sapiens
tatctagaggatatagggaaccacggggaagacctaacattgttttgctttcttagaattctcagaagccaccgctgaactgaccgtctcattcacaaacraagtcttcacaactggtgagtaaccaggcatttcatgctcagcagaaaggagtgtgaggacggagctctctcttccattatctaagcctgtaggctttta

SEQ ID NO: 13999 - DNA, 201 bp, Homo sapiens
tggctgttcataggagcagtcatagctcactgcagcctggagctccttgccttgagcaatcctcctgcctcagcctcatgagtagcagggactacggtcaygggccaccgtgcttggctcgggattctttttaaaactttgttttggagtaatttttagactgacagaaaagttccaaagataatattaatggaaatattt

SEQ ID NO: 14000 - DNA, 201 bp, Homo sapiens
ttctgttcccagaccccgtccagggccccacagtgcatttagtatttatgtctccttagactcttgattggtgcaaatattctaatttcttttcttatttwttttttttttttaagagaagaggttgggccgggcgcggcggctcacgcctgtaatcccagtactttgggaggctgaggtgggtggatcacttaaggtcag

SEQ ID NO: 14001 - DNA, 201 bp, Homo sapiens
tttaaacaaaattaaaaattagtggggcatggtggcatacacctatagtcccagctactcaggaggctgaggcaggaggatcgcttgagccagggaggccraggctgcagggagctgtgatcacgccactgcactccagcctgggtgacagagtgagaccctgtatcaaaaaacaaacaaaaaactaaccatagacacaac

SEQ ID NO: 14002 - DNA, 201 bp, Homo sapiens
aactatgtggctttttctgaccggtttctctcacttaaattacattcctgtgtgtcttttgaagaaattattaggacagagtaaagcatatgcatgcaaaygtcttatcaccgcgcccagcaggcaggaatgtccataaaagcgagtcctggcatctggtccctttcttctttcctcagggctgtgtctggggcgtgtgcc

SEQ ID NO: 14003 - DNA, 201 bp, Homo sapiens
gtgggctcaagctatccttccaccttggcttcccaaagtgttgggatttcaggcgtgagccactgcatctggctgtgaataacattttcatgcaatttttwaaaaaatcaaaataaattgcaaaaacatccacaatgaaaaaaaccagaatttcaaataaaggcagaatcagccagtgcctgtgtcaagtcataccagagt

SEQ ID NO: 14004 - DNA, 201 bp, Homo sapiens
atgacaaaaacgtcaaaagcaattgtaacaaaagcaaaaactgacaaatgggatctaactaaactaaagagcttctgctcagcaaaagaaagtatcatcgsagtgaacagacaacctacagaatgggagaaaatgtttgcaatctatcaattcacaaaagtctaatatccagaatctacaaggaagttaaacaaatttaca

SEQ ID NO: 14005 - DNA, 201 bp, Homo sapiens
acaattgtatgtggcaatacaagcttacagcacagtataagcttaagctatttacttactccagcgcttgctaggcaacaggcactctgcaaattactgtrtactgtctcattcagtcatccccattttaacagaacaaggcagtgaggctcagatacagagggagatttgtctccagggccaccaggcccctgaaggcag

SEQ ID NO: 14006 - DNA, 201 bp, Homo sapiens
catgacaaaaacgtcaaaagcaattgtaacaaaagcaaaaactgacaaatgggatctaactaaactaaagagcttctgctcagcaaaagaaagtatcatcrcagtgaacagacaacctacagaatgggagaaaatgtttgcaatctatcaattcacaaaagtctaatatccagaatctacaaggaagttaaacaaatttac

SEQ ID NO: 14007 - DNA, 201 bp, Homo sapiens
aatgtctcaggtcccattcctcacatccactgaggaagtcaatgggcaatgtctaacacgaacgagcccaccgtgtctaacacaacacaaacgagtccacygtgtctaacacaacacgaacgagccgtgtctaacacaacacgaacaagcccaccgcgtctaacacgaacgagcccaccgcgtctaacacgaacgagccca

SEQ ID NO: 14008 - DNA, 201 bp, Homo sapiens
cgaagtcttcacaactggtgagtaaccaggcatttcatgctcagcagaaaggagtgtgaggacggagctctctcttccattatctaagcctgtaggctttyaaccacttcaccgaactgtccgtctcttaccaagaaagtccttggtgtgaggctagagcatgggtgcagagtggagctctggggttcagaaggaggagca

SEQ ID NO: 14009 - DNA, 201 bp, Homo sapiens
aaggtccatcacgttgtagcatgtatctgaatttattcttttataatattttttattttttggagacagaatctcgctctgtcacccaggctggagtgcartggcgtgatctcggctcaccgcaacttccgcgtcccgggttcaagccattctcctgtctcagcctccggagtagctgggactacaggtgcctgccgccat

SEQ ID NO: 14010 - DNA, 201 bp, Homo sapiens
aggccctaagaataccattttcttgctctaagttgctcttacgggaaagaagtgataatattcttcctaaacgccatcattcgtgcatccttcccacctayatgtgtcaccggatcattctccgcctgggcggggccgtcctgtgcactgcagaatgctgagcagtgtccttggcttcgaccgaccacatgccaggagcac

SEQ ID NO: 14011 - DNA, 201 bp, Homo sapiens
cgcacgccagaggacaggtccggctgcctgccgcggagtcgtcacggcgtgtcgcgtctgagcgcttctccaaagcacccaagtggcacccggggtgacakttacatcatcttgagtacagttctctcaaggaaaaagcaagcccagcatcttctgccatggcaaccctggcttggagcctccataagagagaaggcccta

SEQ ID NO: 14012 - DNA, 201 bp, Homo sapiens; identical to SEQ ID NO: 13909

SEQ ID NO: 14013 - DNA, 201 bp, Homo sapiens
aggtaggggtggaaggagggcccttacgcttctctttctttggcttctgcaattctgtgttctcatcacattcatgccacaagtattttctgtgcttgacbgtacctgagttggggtttgagggaaggagcagaccccttgccccattgacaggagaaaacagaggctcagagagggaagtcagtagcctaaggttacagt

SEQ ID NO: 14014 - DNA, 201 bp, Homo sapiens
gctgttcccacagcccggagtctcctccctggctgagggaaatcttgccggctcacatggccgtgatccccatcatttcctgcagaaagcttgcccagctytccgacacggggaccttctgcccctcctgagccctgagtcccctccatcttaactgggaggtcacctgtttgcgtggtgtctgctcagcttgcaggcaag

SEQ ID NO: 14015 - DNA, 201 bp, Homo sapiens
tccctcccttcttctcttctttccttctagttactgagccatgcatgtgttgcatgcagcaaggatgaataaaataaaataaacctacagcaatcattccrgttactatggccatataacaaattattctaaaactcagtggcttcagacaaggatcgtatctattttactcaaaaacctaccatctgcacaggccttggt

SEQ ID NO: 14016 - DNA, 201 bp, Homo sapiens
agtgagactctgtctcaataaaaaagaagacagaactaaacaactttgatctgcaccagccccaggagaatcacttttatggatctttctagtcttgtttmtaataggtttgtgtgtgtatttatatatttttatgtaaaactgggaccatcctctagcttttctattcttgttcatctttaaatagactcaagaatacac

SEQ ID NO: 14017 - DNA, 201 bp, Homo sapiens
agagcctccagaaggaacctgactctaccaataccttgatttattccagtgagacatgttttggactcttgacctgccgaactggaggaggatgcacttaygtggttttaagccactaagtctgtggtaatgcgtacagcagccatgggaatctcgtgcagcgggcattttaaatttaaatttaaatttttttgagacaga

SEQ ID NO: 14018 - DNA, 201 bp, Homo sapiens
tccagtgagacatgttttggactcttgacctgccgaactggaggaggatgcacttacgtggttttaagccactaagtctgtggtaatgcgtacagcagccwtgggaatctcgtgcagcgggcattttaaatttaaatttaaatttttttgagacagagtctcgctctgttgcccaggctggcaccatttcgactcactgca

SEQ ID NO: 14019 - DNA, 201 bp, Homo sapiens
ccaaagtgctgggattataggtgtgagccagtgcacccagccctttttgcttttttagagacgaggtcttactgtgttgccaaggctggagtgcagtgccrtcacagctcactacaacctcgacctgtgattctcctgcctcagcctcctgagtatctgggactacaggtgcatgccaccacacttggctaattatttgta

SEQ ID NO: 14020 - DNA, 201 bp, Homo sapiens
cacagaccctgtttccggcacaggccacattcacaggttgtgggagcacaggagtgtttctgctggtgcatcaggctggggtctgtcctcaccgggatgtytcctcctccacccctctcttccagaggaggagcgagtggacattctaatcaacaacgcgggtgtgatgcggtgcccccactggaccaccgaggacggctt

SEQ ID NO: 14021 - DNA, 201 bp, Homo sapiens
atgtttgccaggctggactcgaactcctgacctcaagtgatccgcccccgcccccccccacccccaaaactttggcctcccaaagtgctgggattacaggygcaagccccctcacctggccgggaatctcatgcagtgagcatttataaaataatgactgtcacttgctgaaggcgttccacacgccagacactgggtgga

SEQ ID NO: 14022 - DNA, 201 bp, Homo sapiens
ccctgtttctactaaaaaaatacaaaaaattagctgggcatggtggtgggcgcctgtagtcccagctactcgggaggctgaggcaggagaatggtgtgaasccgggaggcggagcttgcagtgagccgagatcatgccactgccctccagcctgggtgacagagcaagattccgtctcaaaaaaaaaaaaaaagttccgac

SEQ ID NO: 14023 - DNA, 201 bp, Homo sapiens
tgcagtgagcatttataaaataatgactgtcacttgctgaaggcgttccacacgccagacactgggtggagccacttatggagaacatgacagaggtcccktggtgtgatgtgatgatgtctgtgtttcagttggggtatgtgagtgagctcagacaaggttgcctgagatcattcagtcaggggcacgtggggtgagagt

SEQ ID NO: 14024 - DNA, 201 bp, Homo sapiens
tctcgtccctggcccatgttgctgggcacatagactttgacgacttgaactggcagacgaggaagtataacaccaaagccgcctactgccagagcaagctygccatcgtcctcttcaccaaggagctgagccggcggctgcaaggtacgggggcgctaggctcggcctccctcttgctttactctgagcctagagcggcct

SEQ ID NO: 14025 - DNA, 201 bp, Homo sapiens
acaatgtactgcaaacccagtggcttacaccctcagacgtgcattccctcacggttccggaagccggcagtctgaatcgcggtgtccctgtggctgtgacytgtgagacgggccataatcctcccagcctcttccacttccagcgggggcggcccaccctcaccttggagctgtgcctctccggtctttgcctctgtccac

SEQ ID NO: 14026 - DNA, 201 bp, Homo sapiens
tgatggcagggaggtttttagatatcaacaccctgatagttctcattttaaccacctgtaagtgcacatacaagtcaacggcactggccgggcgcggtggstcatgcctgtattcccagcactttgggaggccaaatcacaaggtcaggagatcgagaccatcctggctaacacggtgaaaccccgtctctactaaaaata

SEQ ID NO: 14027 - DNA, 201 bp, Homo sapiens; identical to SEQ ID NO: 13931

SEQ ID NO: 14028 - DNA, 201 bp, Homo sapiens; identical to SEQ ID NO: 13932

SEQ ID NO: 14029 - DNA, 201 bp, Homo sapiens
ggcagggaggtttttagatatcaacaccctgatagttctcattttaaccacctgtaagtgcacatacaagtcaacggcactggccgggcgcggtggctcaygcctgtattcccagcactttgggaggccaaatcacaaggtcaggagatcgagaccatcctggctaacacggtgaaaccccgtctctactaaaaatacaaa

SEQ ID NO: 14030 - DNA, 201 bp, Homo sapiens; identical to SEQ ID NO: 13934

SEQ ID NO: 14031 - DNA, 201 bp, Homo sapiens
agcaaggatgaataaaataaaataaacctacagcaatcattccggttactatggccatataacaaattattctaaaactcagtggcttcagacaaggatcrtatctattttactcaaaaacctaccatctgcacaggccttggtggaggcagcttatctgtgtgccctttggtgatggctggggctgtcaagaagctgggg

SEQ ID NO: 14032 - DNA, 201 bp, Homo sapiens
actacaggtgcatgccaccacacttggctaattatttgtagaggtggcaacataacatttgctatgttgcccaggctggtctcaaactcctgggctcaagkgacccttccgccatggcctcccaaattgttgggattacaggcatgagccaccgtacctggccttagttttctttccgatgccacaccaaatggctagagg

SEQ ID NO: 14033 - DNA, 201 bp, Homo sapiens; identical to SEQ ID NO: 13940

SEQ ID NO: 14034 - DNA, 201 bp, Homo sapiens; identical to SEQ ID NO: 2565

SEQ ID NO: 14035 - DNA, 201 bp, Homo sapiens; identical to SEQ ID NO: 2520

SEQ ID NO: 14036 - DNA, 201 bp, Homo sapiens
caggactgaccgtgccgcttctcaccctcagggactatgtcaccggtggggcttgccccagcaaggccaccatccctgggaagacggtcatcgtgacgggygccaacacaggcatcgggaagcagaccgccttggaactggccaggagaggtaaaatctcccctgctttggctctcagagagatatctgtacatccatgct

SEQ ID NO: 14037 - DNA, 201 bp, Homo sapiens
cgcaagataagaccacttcactaagattccagagcaagagggacgatggggtttgagtgcaggaagcagcctggtgcccggaagccccacagctgggtgtrggctgccacagcctcccaggtgaggctggacccctccctcagtcttctctttctttcttccccaggctctggtgtgactgtcaacgccctgcaccccggc

SEQ ID NO: 14038 - DNA, 201 bp, Homo sapiens; identical to SEQ ID NO: 2563

SEQ ID NO: 14039 - DNA, 201 bp, Homo sapiens; identical to SEQ ID NO: 2564

SEQ ID NO: 14040 - DNA, 201 bp, Homo sapiens
gtgcccagtaataggtgcttagaaaatacttaccgaatgagtaagtatacagttgtaccaggcaggtgatgttattatcctttttttttttttttttttamaaggagtaaactgagtcacagagaagtgatgtgacttggccaggatcatgcagctggtcggggtggagccaggctttgaacctgtctgtcctgctccaga

SEQ ID NO: 14041 - DNA, 201 bp, Homo sapiens
cagtgcccagtaataggtgcttagaaaatacttaccgaatgagtaagtatacagttgtaccaggcaggtgatgttattatcctttttttttttttttttttacaaggagtaaactgagtcacagagaagtgatgtgacttggccaggatcatgcagctggtcggggtggagccaggctttgaacctgtctgtcctgctcca

SEQ ID NO: 14042 - DNA, 201 bp, Homo sapiens
tgtgcccttggggatcaagaaagagccggcactgttgtcgggtaggtgagaggcactacggtgagatcacaaagaacagtgagagggcaatgcctcagagwctcagaggtggatgaacatttattaagcacctgctgtgtaccaggtacagcactgtcaccttcatgcacactgtcccaggcaatcccacccagggcgcct

SEQ ID NO: 14043 - DNA, 201 bp, Homo sapiens
cacattcgttggttcattcattcattcatactgagcccctgctgtgcccttggggatcaagaaagagccggcactgttgtcgggtaggtgagaggcactayggtgagatcacaaagaacagtgagagggcaatgcctcagagtctcagaggtggatgaacatttattaagcacctgctgtgtaccaggtacagcactgtca

SEQ ID NO: 14044 - DNA, 201 bp, Homo sapiens
cacttcggcacagaccctgtttccggcacaggccacattcacaggttgtgggagcacaggagtgtttctgctggtgcatcaggctggggtctgtcctcacsgggatgtctcctcctccacccctctcttccagaggaggagcgagtggacattctaatcaacaacgcgggtgtgatgcggtgcccccactggaccaccgag

SEQ ID NO: 14045 - DNA, 201 bp, Homo sapiens
aatggcatgatctcagctcactgcaacctgtgtctcccatgttcaagcgattctcatgcctcagcctcccgagtagctgggattacaggcgcccaccaccacacctggctaattaaagacagggtatcaccatgttggccaggcttatcttgaactcctgacctcaggtgatccacccgtcttggcctcccaaagtgctgg

SEQ ID NO: 14046 - DNA, 201 bp, Homo sapiens
caatggcatgatctcagctcactgcaacctgtgtctcccatgttcaagcgattctcatgcctcagcctcccgagtagctgggattacaggcgcccaccaccacacctggctaattaaagacagggtatcaccatgttggccaggcttatcttgaactcctgacctcaggtgatccacccgtcttggcctcccaaagtgctg

SEQ ID NO: 14047 - DNA, 201 bp, Homo sapiens
ctgtttctactaaaaaaatacaaaaaattagctgggcatggtggtgggcgcctgtagtcccagctactcgggaggctgaggcaggagaatggtgtgaaccygggaggcggagcttgcagtgagccgagatcatgccactgccctccagcctgggtgacagagcaagattccgtctcaaaaaaaaaaaaaaagttccgactt

SEQ ID NO: 14048 - DNA, 201 bp, Homo sapiens
ttcccgtcttctgatttcacttcttgcctgcctccgactgcaaatcctggtttgacgtcacttcctgtcttctgattttacttcctgtatgacctcacttyctgtcttctacaaccacttcctgtcttcttacttcacttcctgtcttctgactttacttcctgtatgacttcacttcttgtcttctaccaccacttcctg

SEQ ID NO: 14049 - DNA, 201 bp, Homo sapiens
gtttcttttaacaatcccacaatgtcaccccttaccacaaaatcttccttcagcttaatcgctcccactttaggttcccacgccgcccctaatcctgctcraagcagccttgagaaacatcacccattatctctccataccacccccaaaaatttttgctgtcccaacactttacccctatttcattttatttttcttatt

SEQ ID NO: 14050 - DNA, 201 bp, Homo sapiens
tgggcatggtggcgcatgcctgtggccccagctacttgggaggctgagcaagaagactgcttgagcctgggaggttgaggctgcagtgagcagtgattgcrccactgtactccagcccaggtgtcagagggagaccctgtctcaaagaaatataaaaaataggccaagtagactgagtgtggtggctcacgcctgcagtcc

SEQ ID NO: 14051 - DNA, 201 bp, Homo sapiens; identical to SEQ ID NO: 13985

SEQ ID NO: 14052 - DNA, 201 bp, Homo sapiens
ctttccttattccctttagtttttcaattcatacaaaactgtatccaggccatcaccaataattctaaatgacaaatgtttcttttaacaatcccacaatrtcaccccttaccacaaaatcttccttcagcttaatcgctcccactttaggttcccacgccgcccctaatcctgctcaaagcagccttgagaaacatcacc

SEQ ID NO: 14053 - DNA, 201 bp, Homo sapiens; identical to SEQ ID NO: 13987

SEQ ID NO: 14054 - DNA, 201 bp, Homo sapiens
cccataccgccactgttaactcttaaaataaataaataatctttgctggcaaggctatgctgaacctccttaggcactttctaattagatgtcctgagtcstcccaattcttagacctttaatacctgtttttctcctttccttattccctttagtttttcaattcatacaaaactgtatccaggccatcaccaataattc

SEQ ID NO: 14055 - DNA, 201 bp, Homo sapiens
atccccataccgccactgttaactcttaaaataaataaataatctttgctggcaaggctatgctgaacctccttaggcactttctaattagatgtcctgagtcgtcccaattcttagacctttaatacctgtttttctcctttccttattccctttagtttttcaattcatacaaaactgtatccaggccatcaccaataa

SEQ ID NO: 14056 - DNA, 201 bp, Homo sapiens
tttttattaggccccagtctcattccagacaccagaccaacttagattgtgccccaaaaaacttgtcatccctactatcttctgtctagtcatactcctawtcaccgttctcaactactcacacatgccctgctcttgtttacactgccagtttacactgtttctccaagccagcacagctggtatctcctggtactatcc

SEQ ID NO: 14057 - DNA, 201 bp, Homo sapiens
ccgtacctggccttagttttctttccgatgccacaccaaatggctagagggtgtgtttgggatgacctgagtctggtaggcaacttccagtggaccccacrgtgcgaccacctccctttgagtgtgggggagatgtagcgactggcttctagcagtaggatagggcagaagtgacagtaggttagtcttgtggttaggtta

SEQ ID NO: 14058 - DNA, 201 bp, Homo sapiens
gaagtgacagtaggttagtcttgtggttaggttacaaaactgacctctgtgatggtagcgtccctcgtcagccctcttgtcttgccctctcgctggctggyggtgatggagccggctgccatggtgagcggccctgtggagaagccagggaggaatggagacaatctggagaaacagaatcacaccaacaaccacgtgcgt

SEQ ID NO: 14059 - DNA, 201 bp, Homo sapiens; identical to SEQ ID NO: 13992

SEQ ID NO: 14060 - DNA, 201 bp, Homo sapiens; identical to SEQ ID NO: 13993

SEQ ID NO: 14061 - DNA, 201 bp, Homo sapiens; identical to SEQ ID NO: 13996

SEQ ID NO: 14062 - DNA, 201 bp, Homo sapiens
aatgaaaccacgcctgcggtgccggggctcccaccggtaacctcccgtttttggcctcggggctccggcaggaaggagtcccaaggcttagatggaggtgyggagggcgtgtgagtgtcctggagctgctgtaacaatgtactgcaaacccagtggcttacaccctcagacgtgcattccctcacggttccggaagccggc

SEQ ID NO: 14063 - DNA, 201 bp, Homo sapiens; identical to SEQ ID NO: 13999

SEQ ID NO: 14064 - DNA, 201 bp, Homo sapiens; identical to SEQ ID NO: 14002

SEQ ID NO: 14065 - DNA, 201 bp, Homo sapiens
cgcctgtcatcccggcactttgggagacagaagttttgggaagatcagtttgtgagatgacactctgacaaagctggaagctgtggctcttcccagctccmgactagaaagaacacaaagcaaagagccccaggaagcaggtacccacagccttgtttatcagggagtttgagatcagcctgggcaacatagcaagacctc

SEQ ID NO: 14066 - DNA, 201 bp, Homo sapiens
gcctcagcctcccaaagtgctgggattacaggcatgagccaccatgcccagctgctttgtttcttttctagtctggcactgaaagggccaaagctttcttsttcagagtcaatgtgccccgctcagtaaacgggtactcaggaaatgaacaaggaatgggggagttgtgggacctcatttatttagcagacgtgatctcag

SEQ ID NO: 14067 - DNA, 201 bp, Homo sapiens; identical to SEQ ID NO: 14007

SEQ ID NO: 14068 - DNA, 201 bp, Homo sapiens; identical to SEQ ID NO: 14005

SEQ ID NO: 14069 - DNA, 201 bp, Homo sapiens
tgctaatttttgtatttttagtagagacggggtttcaccacgttggccaggctggtctggaactcctgacctcaggtgattcacctgcctcagcctcccaragtgctgggattacaggcgtgggccactgcgcccggctgactttgttttgtttgtttgttttgagacagatggggtctcgctctgttgcccaggctggag

SEQ ID NO: 14070 - DNA, 201 bp, Homo sapiens
atgcctgctaccataccctgctaatttttgtatttttagtagagacggggtttcaccacgttggccaggctggtctggaactcctgacctcaggtgattcwcctgcctcagcctcccaaagtgctgggattacaggcgtgggccactgcgcccggctgactttgttttgtttgtttgttttgagacagatggggtctcgct

SEQ ID NO: 14071 - DNA, 201 bp, Homo sapiens; identical to SEQ ID NO: 13906

SEQ ID NO: 14072 - DNA, 201 bp, Homo sapiens; identical to SEQ ID NO: 13907

SEQ ID NO: 14073 - DNA, 201 bp, Homo sapiens
ggaggctgaggcaggagaatcgcttgaacccgggaggcggaggttgcggtgagccaagatcgcgccactgcactccagcctcggcgacagagtgagactcygtctcaaaaaaccaaaaaacaaaaaacagtcaatggcattaaatataaatacatttacagtgttgtgtaaccatcaccactatggatcccccagactttg

SEQ ID NO: 14074 - DNA, 201 bp, Homo sapiens; identical to SEQ ID NO: 13908

SEQ ID NO: 14075 - DNA, 201 bp, Homo sapiens
atggcgtgaacccgggaggtggagcttgcagtgagccgagatggcgccactgcactccagcctgggtgacagagtgagactccatctcaaaaaaaaaatamaaaacaatgaggcaggcgtgatggtgtgcacttgtagtcccaactacttgggaggtggaggtgggaggattgcttgagcctgggaggttgaggctgcagt

SEQ ID NO: 14076 - DNA, 201 bp, Homo sapiens; identical to SEQ ID NO: 13910

SEQ ID NO: 14077 - DNA, 201 bp, Homo sapiens
gcacatagactttgacgacttgaactggcagacgaggaagtataacaccaaagccgcctactgccagagcaagctcgccatcgtcctcttcaccaaggagytgagccggcggctgcaaggtacgggggcgctaggctcggcctccctcttgctttactctgagcctagagcggcctttccatgatcctaggctgatgggag

SEQ ID NO: 14078 - DNA, 201 bp, Homo sapiens
gaggttgaggctgcagtgagccatgattgcaccactgctgtcaaacctgggtgacagagtgagaccctgcctcaaaagaaaataaaaataaaaaacaaatrtaaactttaggggaacaataacaacaacaaaaataaaagaagcaagttatattacccgaaaattctcggctgcgaatatctgtgggtataaacatgtgat

SEQ ID NO: 14079 - DNA, 201 bp, Homo sapiens
actttagagcagagttttggcaaactatgagttaggggccaagtccagttgctgcctttttttgtacagcctgcaagcaacgactttatttatttatttattactactgttattttgagagggagtctcactctgtcggccaggctgagtgcaatggcgcgatctcggctcactgtaacctctgcctcctgggttcaagcg

SEQ ID NO: 14080 - DNA, 201 bp, Homo sapiens
cagcactttgggaggctgaggcgggatcgcttgagcctaagagttcgagaccagcctgggcaacatggtgaaaccttgtctcatatacaaaaaatataaamaattagctgggtgtggtaccacatgcctactctcaggtactcaggaggctgaggttggggatcacctgagcccggggaggttgaggctgcagtgagccat

SEQ ID NO: 14081 - DNA, 201 bp, Homo sapiens
aactttagagcagagttttggcaaactatgagttaggggccaagtccagttgctgcctttttttgtacagcctgcaagcaacgactttatttatttatttattactactgttattttgagagggagtctcactctgtcggccaggctgagtgcaatggcgcgatctcggctcactgtaacctctgcctcctgggttcaagc

SEQ ID NO: 14082 - DNA, 201 bp, Homo sapiens; identical to SEQ ID NO: 13911

SEQ ID NO: 14083 - DNA, 201 bp, Homo sapiens
ttgtggcttatttgtaatcccagtactttgggaggccgcggggtggatcacctgaggtcagaaattcaagactagcttggctaacatggtgaaaccgctgwctctactaaaaataaaaaaataaaaaattagctagttgtggtaggtgcctgtaatcccagctactcgggaggctgaggcaggagaattgcttgaacccag

SEQ ID NO: 14084 - DNA, 201 bp, Homo sapiens; identical to SEQ ID NO: 13913

SEQ ID NO: 14085 - DNA, 201 bp, Homo sapiens; identical to SEQ ID NO: 13912

SEQ ID NO: 14086 - DNA, 201 bp, Homo sapiens; identical to SEQ ID NO: 13914

SEQ ID NO: 14087 - DNA, 201 bp, Homo sapiens
tctactaaagatacaaaaaattaacccggtgtggtggtggatgcctgtagtccagctacttgggaggctgaggcaggagaattgtttgaacctgggaggcrgaggttgcagtgagccaagatcgcaccattgcactccagcctgggtgacaagagtgaaactccatctccccccccaaaaaaaaaaaaataggctgggggc

SEQ ID NO: 14088 - DNA, 201 bp, Homo sapiens
ggagacaatctggagaaacagaatcacaccaacaaccacgtgcgtgagcttgctgtgtgctcttgcttgggagcaagttacaggttcagcccaagaggagyggaccactccagggtgtaaataccaggagggggaattggaagactaccctaagcatgccgaccggagactgtgtgtgtgtagtaggtatttcttactggg

SEQ ID NO: 14089 - DNA, 201 bp, Homo sapiens
ccgctcctggctgtaacatgttttcaatatcccccctcttcggtggcacaggggctggccccatatacatgtgcgatggcaactgacagggtccctgatamaccggagtgctccagaaacaccccattgcgtgggacggaggatgttaggtggccctcctagcgtttgagtttgataaatgagcaaaggaagtggttttta

SEQ ID NO: 14090 - DNA, 201 bp, Homo sapiens
gtcaaaggacaaactaaagccggcagcgtctttctggcttcctagtcaggctgttcggtagcggagtgtcaccctgatttccagccccgcagcacacacastgagagcctgcctggcgtgattcagaggcaacgtatttcccaaggtggctgtgaaggaaccagggggataaacacagcccgtgaaccgcacgccagagga

SEQ ID NO: 14091 - DNA, 201 bp, Homo sapiens
tctgtgacttttttagcaaatcaagtaccagcttcttggtgttttcctaagatcaacagccaggaataaagacagcagtggatttaaaaatagtgaagatsgtccattttatgtggtgtgtattctaccacactggggcaggccaggtgcagcggttcacgcctgtcatcccggcactttgggagacagaagttttgggaa

SEQ ID NO: 14092 - DNA, 201 bp, Homo sapiens; identical to SEQ ID NO: 13917

SEQ ID NO: 14093 - DNA, 201 bp, Homo sapiens
cggcctttccatgatcctaggctgatgggaggccaaacggtggatccagaacagagtcagcaaaagtagagcatgtggaccacgctgcccgcttctggtgyctgaagcagacatcactaatcgatcgttcttctgaggattgtctgttcatcccaggtggtctagtctgcctggatcagatgtccttccctgctgctgttg

SEQ ID NO: 14094 - DNA, 201 bp, Homo sapiens; identical to SEQ ID NO: 2566

SEQ ID NO: 14095 - DNA, 201 bp, Homo sapiens; identical to SEQ ID NO: 13919

SEQ ID NO: 14096 - DNA, 201 bp, Homo sapiens
ccgtccctgaggcctcatgcctgctcctcgcctacgtcttctgaggcacagagcacaggtccctttcctccgttgacctggcctgccagcctctaacagcyccgggaagcaggcagagccctgctggcggatgagaaaaccgtgtctcagaggaagaggccgtggagctgacgcctggagtcaggctgtactcagggtaac

SEQ ID NO: 14097 - DNA, 201 bp, Homo sapiens; identical to SEQ ID NO: 13924

SEQ ID NO: 14098 - DNA, 201 bp, Homo sapiens; identical to SEQ ID NO: 13926

SEQ ID NO: 14099 - DNA, 201 bp, Homo sapiens; identical to SEQ ID NO: 13927

SEQ ID NO: 14100 - DNA, 201 bp, Homo sapiens; identical to SEQ ID NO: 13928

SEQ ID NO: 14101 - DNA, 201 bp, Homo sapiens
gtatactgcttggaaacattgtgttaacaaggcacttcctgcacagccctagatcccttaaaccttgatttcatacaacacaggtttttgtgagctccagrttgggtcaaagtggctgggtcaaagctacaaattaacaacatctcagcaaagcaattgttcaaagtacaggtctttttcaaaatggagtctcttatgtct

SEQ ID NO: 14102 - DNA, 201 bp, Homo sapiens; identical to SEQ ID NO: 13929

SEQ ID NO: 14103 - DNA, 201 bp, Homo sapiens; identical to SEQ ID NO: 13930

SEQ ID NO: 14104 - DNA, 201 bp, Homo sapiens
agtaggtatttcttactgggagatcacggaaaagcaagtttgagaaacactcccatcagatgggtgggccgaggataacctcaaagcctttggttctccgwataggtgcgtaggactcacccaggcactctttccttttttaaattgtggtaaaaactacataacagtggccaggcgtgatggtgcacgcctgtaatccca

SEQ ID NO: 14105 - DNA, 201 bp, Homo sapiens
ttaggaaaggccggggctggtggaggaagggaggagagcattcttcatcctcatcacatcctgagcctgtgccccaggctcccaccacttccctccctggycacagagctcaggacagggctgaggaaccatgtctccatccccgaccgccctcttctgtcttggtgagtcctgagggtcagatctgggaaatgctgaagg

SEQ ID NO: 14106 - DNA, 201 bp, Homo sapiens
aggctggccagaggagataagcgcggctccttggagcttgtgtgcaagtcactgtactgaggagccggctacggctcgatgagtctcaattaggaaaggcyggggctggtggaggaagggaggagagcattcttcatcctcatcacatcctgagcctgtgccccaggctcccaccacttccctccctggccacagagctca

SEQ ID NO: 14107 - DNA, 201 bp, Homo sapiens
cagtaacagtctaatctctcttttccctacacacctggctaatttttgtattttaagtagagacggggtctcgccatgtttgccaggctggactcgaactyctgacctcaagtgatccgcccccgcccccccccacccccaaaactttggcctcccaaagtgctgggattacaggcgcaagccccctcacctggccgggaa

SEQ ID NO: 14108 - DNA, 201 bp, Homo sapiens; identical to SEQ ID NO: 13935

SEQ ID NO: 14109 - DNA, 201 bp, Homo sapiens
ataacaaggcagcattgctgtaaacatgtctcgcctcccgccatagggcggcttttctcctgtctcagaattgaacaaatgtacaatcgggttttataccragacattcagttcccaggggcaggcaggagacagtggccttcctctagctcaactgcaagaggctttcctcttttactaatccacctcagcacagaccct

SEQ ID NO: 14110 - DNA, 201 bp, Homo sapiens; identical to SEQ ID NO: 13936

SEQ ID NO: 14111 - DNA, 201 bp, Homo sapiens; identical to SEQ ID NO: 13937

SEQ ID NO: 14112 - DNA, 201 bp, Homo sapiens; identical to SEQ ID NO: 13938

SEQ ID NO: 14113 - DNA, 201 bp, Homo sapiens; identical to SEQ ID NO: 13939

SEQ ID NO: 14114 - DNA, 201 bp, Homo sapiens; identical to SEQ ID NO: 13941

SEQ ID NO: 14115 - DNA, 201 bp, Homo sapiens; identical to SEQ ID NO: 13942

SEQ ID NO: 14116 - DNA, 201 bp, Homo sapiens
ggacaaactaaagccggcagcgtctttctggcttcctagtcaggctgttcggtagcggagtgtcaccctgatttccagccccgcagcacacacagtgagabcctgcctggcgtgattcagaggcaacgtatttcccaaggtggctgtgaaggaaccagggggataaacacagcccgtgaaccgcacgccagaggacaggtc

SEQ ID NO: 14117 - DNA, 201 bp, Homo sapiens; identical to SEQ ID NO: 13943

SEQ ID NO: 14118 - DNA, 201 bp, Homo sapiens; identical to SEQ ID NO: 13944

SEQ ID NO: 14119 - DNA, 201 bp, Homo sapiens
caaggtcaggagatcgagaccatcctggctaacacggtgaaaccccgtctctactaaaaatacaaaaaatcaactaggcatggtggcacgcacctgtagtyccagctactcaggaggctgaggcaggagaatcgcttgaacccgggaggcggaggttgcggtgagccaagatcgcgccactgcactccagcctcggcgaca

SEQ ID NO: 14120 - DNA, 201 bp, Homo sapiens; identical to SEQ ID NO: 2515

SEQ ID NO: 14121 - DNA, 201 bp, Homo sapiens
ggctggcggtgatggagccggctgccatggtgagcggccctgtggagaagccagggaggaatggagacaatctggagaaacagaatcacaccaacaaccaygtgcgtgagcttgctgtgtgctcttgcttgggagcaagttacaggttcagcccaagaggagcggaccactccagggtgtaaataccaggagggggaattg

SEQ ID NO: 14122 - DNA, 201 bp, Homo sapiens
ccccgtctctactaaaaatacaaaaaatcaactaggcatggtggcacgcacctgtagtcccagctactcaggaggctgaggcaggagaatcgcttgaaccygggaggcggaggttgcggtgagccaagatcgcgccactgcactccagcctcggcgacagagtgagactccgtctcaaaaaaccaaaaaacaaaaaacagt

SEQ ID NO: 14123 - DNA, 201 bp, Homo sapiens; identical to SEQ ID NO: 2518
  misc_feature (1)...(201): n = A,T,C or G, or insertion/deletion polymorphism (see Tables 1-2)

SEQ ID NO: 14124 - DNA, 201 bp, Homo sapiens
gtagaggggtccacgtcctaatcctcggaaggtgtgacgacattacctcacgtgtcagaggttctcgctgatgtgttaagtgaagcatcttttttttttttgagacagagtttcgctgttgttgcccaggctggagtgcaatggcacgacctcggctcaccacaacctccacctcccgggttcaagcgattgtccggcctc

SEQ ID NO: 14125 - DNA, 201 bp, Homo sapiens; identical to SEQ ID NO: 13957

SEQ ID NO: 14126 - DNA, 201 bp, Homo sapiens; identical to SEQ ID NO: 13958

SEQ ID NO: 14127 - DNA, 201 bp, Homo sapiens
accactggagctccttgcccccctttgcttatctctacacagcaacagggtcgctaaacttaccttacactgctgaggcctcttaagatgtgtatagggaragagagttggggggagagggagagagagaacagagagagagagacacacacaagaagagagagaggaagaaaggaggagagagaggaagaggaagggaga

SEQ ID NO: 14128 - DNA, 201 bp, Homo sapiens; identical to SEQ ID NO: 13959

SEQ ID NO: 14129 - DNA, 201 bp, Homo sapiens
tacccagcgccctctgagtcaacgccaagcttcctaccatggcattggagccgcgctctgggtccttttactgatggctcccgcctcagcccttccacccctcccataccctgcatgccagcccaggcagccctccctcctcccacaatatctctcatatgcattcctgtcccatgccttctgcttaagctgttcccacag

SEQ ID NO: 14130 - DNA, 201 bp, Homo sapiens; identical to SEQ ID NO: 13960

SEQ ID NO: 14131 - DNA, 201 bp, Homo sapiens
gggagaaagagagagagagaaggagacacaggagggggagagaaagagggagagagcaatgagagagatatgagacagagaagagagagagaggagacacrgaggagggggacagaaagagggagacagagagatgagagagagaaaagacacagatgagggggagagaaagagggagagagagatgagagagagattgat

SEQ ID NO: 14132 - DNA, 201 bp, Homo sapiens; identical to SEQ ID NO: 13962

SEQ ID NO: 14133 - DNA, 201 bp, Homo sapiens
tgagctaccgtgccaggccgtggagtagctaaacttatcttacactgctgaggtctctcaagatgtgtgtagggagagagagttggggggagagagagagmcaaaggaaaagaggaagagagagacagggagaaagagaggaagaaagagaaagagagaaacaggaagagtgagaggagaaagagaggaagggggagagaa

SEQ ID NO: 14134 - DNA, 201 bp, Homo sapiens; identical to SEQ ID NO: 13963

SEQ ID NO: 14135 - DNA, 201 bp, Homo sapiens; identical to SEQ ID NO: 13964

SEQ ID NO: 14136 - DNA, 201 bp, Homo sapiens; identical to SEQ ID NO: 13966

SEQ ID NO: 14137 - DNA, 201 bp, Homo sapiens; identical to SEQ ID NO: 13968

SEQ ID NO: 14138 - DNA, 201 bp, Homo sapiens; identical to SEQ ID NO: 13970

SEQ ID NO: 14139 - DNA, 201 bp, Homo sapiens; identical to SEQ ID NO: 13971

SEQ ID NO: 14140 - DNA, 201 bp, Homo sapiens
gtagtcccagctactcaggaggctgaggcaggagaatcgcttgaacccgggaggcggaggttgcggtgagccaagatcgcgccactgcactccagcctcgkcgacagagtgagactccgtctcaaaaaaccaaaaaacaaaaaacagtcaatggcattaaatataaatacatttacagtgttgtgtaaccatcaccactat

SEQ ID NO: 14141 - DNA, 201 bp, Homo sapiens; identical to SEQ ID NO: 13980

SEQ ID NO: 14142 - DNA, 201 bp, Homo sapiens; identical to SEQ ID NO: 13981

SEQ ID NO: 14143 - DNA, 201 bp, Homo sapiens
tcatcttgagtacagttctctcaaggaaaaagcaagcccagcatcttctgccatggcaaccctggcttggagcctccataagagagaaggccctaagaatwccattttcttgctctaagttgctcttacgggaaagaagtgataatattcttcctaaacgccatcattcgtgcatccttcccacctacatgtgtcaccgga

SEQ ID NO: 14144 - DNA, 201 bp, Homo sapiens
agtcgtcccaattcttagacctttaatacctgtttttctcctttccttattccctttagtttttcaattcatacaaaactgtatccaggccatcaccaatwattctaaatgacaaatgtttcttttaacaatcccacaatgtcaccccttaccacaaaatcttccttcagcttaatcgctcccactttaggttcccacgcc

SEQ ID NO: 14145 - DNA, 201 bp, Homo sapiens
agtgatctgcctgccttggcctctcaaagtgctgggattaaaggcgtgagctaccgtgccaggccgtggagtagctaaacttatcttacactgctgaggtctctcaagatgtgtgtagggagagagagttggggggagagagagagacaaaggaaaagaggaagagagagacagggagaaagagaggaagaaagagaaaga

SEQ ID NO: 14146 - DNA, 201 bp, Homo sapiens; identical to SEQ ID NO: 13990

SEQ ID NO: 14147 - DNA, 201 bp, Homo sapiens
gaggacacgaggggctctgccaaggccaggagaggctgctgagggtcaggacaggctgcctggaggaggaggacaggctgcctggaggaggagggcaggcyaggaatcaccttgaaggatgagtttgacagccagtgtcaatcctagaagataggggtgttctgggccctgcaactgcctgagtgaaggatgggggctgca

SEQ ID NO: 14148 - DNA, 201 bp, Homo sapiens; identical to SEQ ID NO: 13991

SEQ ID NO: 14149 - DNA, 201 bp, Homo sapiens
tatacatgtgcgatggcaactgacagggtccctgatacaccggagtgctccagaaacaccccattgcgtgggacggaggatgttaggtggccctcctagcrtttgagtttgataaatgagcaaaggaagtggtttttactagaaagccagctttcctttttttttttttttttttccagccagcaaaccccaaacaggaac

SEQ ID NO: 14150 - DNA, 201 bp, Homo sapiens; identical to SEQ ID NO: 13997

SEQ ID NO: 14151 - DNA, 201 bp, Homo sapiens; identical to SEQ ID NO: 14000

SEQ ID NO: 14152 - DNA, 201 bp, Homo sapiens
agggaagatgatggcagggaggtttttagatatcaacaccctgatagttctcattttaaccacctgtaagtgcacatacaagtcaacggcactggccgggmgcggtggctcatgcctgtattcccagcactttgggaggccaaatcacaaggtcaggagatcgagaccatcctggctaacacggtgaaaccccgtctctac

SEQ ID NO: 14153 - DNA, 201 bp, Homo sapiens; identical to SEQ ID NO: 14001

SEQ ID NO: 14154 - DNA, 201 bp, Homo sapiens; identical to SEQ ID NO: 14003

SEQ ID NO: 14155 - DNA, 201 bp, Homo sapiens
ctggggtctggactcttgggtctgagggaggaggggctgggggcctggactcctgggtctgagggaggaggggctatctcattgctttgggggtggcgcargcggccctccaggccatggtctggagcagcaggtgagaccgaaacccgagcctccacccaagtcccaagtcccagggcccagggcctctttcctccttct

SEQ ID NO: 14156 - DNA, 201 bp, Homo sapiens
ttttatggcaatcccacgtttaacttctggaggagctgctggaactgttttccacagcaggggcgccatgttacgtccctgccagcaatgcacgcgcagtycaatttctctgcatactcaccaatatctgctattttccattaaaaaaaattatagccggtcgggtgcagtggctcatgcctgtaatcccagcactttggg

SEQ ID NO: 14157 - DNA, 201 bp, Homo sapiens
gagctgctggaactgttttccacagcaggggcgccatgttacgtccctgccagcaatgcacgcgcagtccaatttctctgcatactcaccaatatctgctrttttccattaaaaaaaattatagccggtcgggtgcagtggctcatgcctgtaatcccagcactttgggagaccgaggcaggtggatcaactgaggtcagg

SEQ ID NO: 14158 - DNA, 201 bp, Homo sapiens
agcccagggcccaggaccctccctcagagaccgtccctgaggcctcatgcctgctcctcgcctacgtcttctgaggcacagagcacaggtccctttcctcygttgacctggcctgccagcctctaacagccccgggaagcaggcagagccctgctggcggatgagaaaaccgtgtctcagaggaagaggccgtggagctga

SEQ ID NO: 14159 - DNA, 201 bp, Homo sapiens; identical to SEQ ID NO: 13915

SEQ ID NO: 14160 - DNA, 201 bp, Homo sapiens; identical to SEQ ID NO: 13916

SEQ ID NO: 14161 - DNA, 201 bp, Homo sapiens
agctgagattgcatcactgcgctccagcctgggcatcggagagagactctcaaacaggagctggcgaactgtggcgcactgcttatttttataaataaagwtttatgggaacacagctgtgctcacttgttttcacatcatctgtggctgcttcccagctcctctggcagaggaggtgcaacagccactgtgtggatcaca

SEQ ID NO: 14162 - DNA, 201 bp, Homo sapiens; identical to SEQ ID NO: 13918

SEQ ID NO: 14163 - DNA, 201 bp, Homo sapiens; identical to SEQ ID NO: 13920

SEQ ID NO: 14164 - DNA, 201 bp, Homo sapiens; identical to SEQ ID NO: 13921

SEQ ID NO: 14165 - DNA, 201 bp, Homo sapiens; identical to SEQ ID NO: 13922

SEQ ID NO: 14166 - DNA, 201 bp, Homo sapiens; identical to SEQ ID NO: 13923

SEQ ID NO: 14167 - DNA, 201 bp, Homo sapiens
gatcctcagaggaggaatatgcatgcattgttctctttataataaccatattaacagccagcaatgttctggcacttactatggattaagtccttgttatraatgacttcatgccatccttccaaattcaatgacaggtagctgggcgcagtggctcacgctttgtaatcccagcactttgggaggctgaggcaggtggat

SEQ ID NO: 14168 - DNA, 201 bp, Homo sapiens
tggagtgcagtggcgtgatctcggctcaccgcaacttccgcgtcccgggttcaagccattctcctgtctcagcctccggagtagctgggactacaggtgcstgccgccatgcccggctattttttttttgtattttttgggggttttactgtgttgcccaggctggtcttgaactgctgagctcaggcaatctgcctgcct

SEQ ID NO: 14169 - DNA, 201 bp, Homo sapiens; identical to SEQ ID NO: 13933

SEQ ID NO: 14170 - DNA, 201 bp, Homo sapiens; identical to SEQ ID NO: 2562

SEQ ID NO: 14171 - DNA, 201 bp, Homo sapiens
aaaaattacctgggtgcagtggtgcacacctgtggtcccagctacatgggaggctgagatgggagaactgcttaaactggggaggtggaggctgcagtgasccgagatcgtgccattgcattccagcctgggtgaaagagcaagattctgccaccaaaaaaaaaaaaaaaaaaaaaaaaaaaaaagaaaaaaatgttgcca

SEQ ID NO: 14172 - DNA, 201 bp, Homo sapiens
catcacgttgtagcatgtatctgaatttattcttttataatattttttattttttggagacagaatctcgctctgtcacccaggctggagtgcagtggcgygatctcggctcaccgcaacttccgcgtcccgggttcaagccattctcctgtctcagcctccggagtagctgggactacaggtgcctgccgccatgcccgg

SEQ ID NO: 14173 - DNA, 201 bp, Homo sapiens
gctttattgctcacacaaagcctgtttggtggtctcttcacacggacgtgcatgaaaggtgcgtgtatatttttgtaacacaataaataataacagtatayactttttcttttagaagtatgctgttaaacagaattaagaacaggaagtctcaaaattgtttctttcaggagagaagacttattaatgggggagagttct

SEQ ID NO: 14174 - DNA, 201 bp, Homo sapiens
aaagctcccctactgagcaccttatgaccccgactctgcccgccagagaacaacccccctttgactgtaattttcctttacctacccacatcctataaaayggccccacccctatcccccttcgctgactctcttgtcagactcagcccacctgcacccaggtgattaaaagctttattgctcacacaaagcctgtttggt

SEQ ID NO: 14175 - DNA, 201 bp, Homo sapiens
ggaggatgttaggtggccctcctagcgtttgagtttgataaatgagcaaaggaagtggtttttactagaaagccagctttcctttttttttttttttttttccagccagcaaaccccaaacaggaacctatggttggtgatggatgtgcgttcagaaagcagggagggagggggagtcagaggtgagggggtcatcagcca

SEQ ID NO: 14176 - DNA, 201 bp, Homo sapiens
agggggaatgggaaagttgcttagagaagcctccaaatgtaagaatgggtcaattcctcgtcttaacatagtggaaaatcatactgagatgctatcagaaracagaggaaaaataattttagaggtcaagtaaactaagtagattttaaaaagaccagtatagcctaggcacagtggctcacacctgtaatcccagcactt

SEQ ID NO: 14177 - DNA, 201 bp, Homo sapiens; identical to SEQ ID NO: 2567

SEQ ID NO: 14178 - DNA, 201 bp, Homo sapiens
cggaggatgttaggtggccctcctagcgtttgagtttgataaatgagcaaaggaagtggtttttactagaaagccagctttcctttttttttttttttttttccagccagcaaaccccaaacaggaacctatggttggtgatggatgtgcgttcagaaagcagggagggagggggagtcagaggtgagggggtcatcagcc

SEQ ID NO: 14179 - DNA, 201 bp, Homo sapiens
gtgagtcacttgggaaaagacagaaggatggcaccaagaagttccaggacgacggctgtgaatcagggctagtgagcacacagcttgggtgaagggggaaygggaaagttgcttagagaagcctccaaatgtaagaatgggtcaattcctcgtcttaacatagtggaaaatcatactgagatgctatcagaagacagagga

SEQ ID NO: 14180 - DNA, 201 bp, Homo sapiens
ctacttaaaataaagaagataaaaattgttttaaaaaaggaaaagaatggctggccacagtggctcatgcctgtaatcccggcactgtgggaggttgaggkaggtgagtcacttgggaaaagacagaaggatggcaccaagaagttccaggacgacggctgtgaatcagggctagtgagcacacagcttgggtgaaggggg

SEQ ID NO: 14181 - DNA, 201 bp, Homo sapiens; identical to SEQ ID NO: 13948

SEQ ID NO: 14182 - DNA, 201 bp, Homo sapiens
gtgagaccccatctctacttaaaataaagaagataaaaattgttttaaaaaaggaaaagaatggctggccacagtggctcatgcctgtaatcccggcactktgggaggttgagggaggtgagtcacttgggaaaagacagaaggatggcaccaagaagttccaggacgacggctgtgaatcagggctagtgagcacacagc

SEQ ID NO: 14183 - DNA, 201 bp, Homo sapiens; identical to SEQ ID NO: 13950

SEQ ID NO: 14184 - DNA, 201 bp, Homo sapiens
tgcaacctgtgtctcccatgttcaagcgattctcatgcctcagcctcccgagtagctgggattacaggcgcccaccaccacacctggctaattaaagacagggtatcaccatgttggccaggcttatcttgaactcctgacctcaggtgatccacccgtcttggcctcccaaagtgctgggattataggtgtgagccagtg

SEQ ID NO: 14185 - DNA, 201 bp, Homo sapiens; identical to SEQ ID NO: 13952

SEQ ID NO: 14186 - DNA, 201 bp, Homo sapiens
ctgcaacctgtgtctcccatgttcaagcgattctcatgcctcagcctcccgagtagctgggattacaggcgcccaccaccacacctggctaattaaagacagggtatcaccatgttggccaggcttatcttgaactcctgacctcaggtgatccacccgtcttggcctcccaaagtgctgggattataggtgtgagccagt

SEQ ID NO: 14187 - DNA, 201 bp, Homo sapiens
atggcatgatctcagctcactgcaacctgtgtctcccatgttcaagcgattctcatgcctcagcctcccgagtagctgggattacaggcgcccaccaccacacctggctaattaaagacagggtatcaccatgttggccaggcttatcttgaactcctgacctcaggtgatccacccgtcttggcctcccaaagtgctggg

SEQ ID NO: 14188 - DNA, 201 bp, Homo sapiens
gcctcaaaagaaaataaaaataaaaaacaaatgtaaactttaggggaacaataacaacaacaaaaataaaagaagcaagttatattacccgaaaattctcrgctgcgaatatctgtgggtataaacatgtgatactggccgggcgtggtggctcatgcctgtaatcccagcacttcgggaggctgaggtgggcagatcacg

SEQ ID NO: 14189 - DNA, 201 bp, Homo sapiens; identical to SEQ ID NO: 13956

SEQ ID NO: 14190 - DNA, 201 bp, Homo sapiens
gtatgagtgaggtggcaggtttgggaatgaaaccacgcctgcggtgccggggctcccaccggtaacctcccgtttttggcctcggggctccggcaggaagsagtcccaaggcttagatggaggtgcggagggcgtgtgagtgtcctggagctgctgtaacaatgtactgcaaacccagtggcttacaccctcagacgtgca

SEQ ID NO: 14191 - DNA, 201 bp, Homo sapiens
cggctgtgctgtccaccctgtatttccagtgcccagtaataggtgcttagaaaatacttaccgaatgagtaagtatacagttgtaccaggcaggtgatgtyattatcctttttttttttttttttttacaaggagtaaactgagtcacagagaagtgatgtgacttggccaggatcatgcagctggtcggggtggagccag

SEQ ID NO: 14192 - DNA, 201 bp, Homo sapiens; identical to SEQ ID NO: 13961

SEQ ID NO: 14193 - DNA, 201 bp, Homo sapiens
cagctgcactggaatgtccggtccacacggacgggacctcggctgtgctgtccaccctgtatttccagtgcccagtaataggtgcttagaaaatacttacygaatgagtaagtatacagttgtaccaggcaggtgatgttattatcctttttttttttttttttttacaaggagtaaactgagtcacagagaagtgatgtg

SEQ ID NO: 14194 - DNA, 201 bp, Homo sapiens
gaccagcctgggcaacatagtgagaccccatctctacttaaaataaagaagataaaaattgttttaaaaaaggaaaagaatggctggccacagtggctcaygcctgtaatcccggcactgtgggaggttgagggaggtgagtcacttgggaaaagacagaaggatggcaccaagaagttccaggacgacggctgtgaatca

SEQ ID NO: 14195 - DNA, 201 bp, Homo sapiens
ggcctcctgtcagcttccacgcagctctgtcacgggtagattctctcacgagtggaagtggctctcagctgcactggaatgtccggtccacacggacgggrcctcggctgtgctgtccaccctgtatttccagtgcccagtaataggtgcttagaaaatacttaccgaatgagtaagtatacagttgtaccaggcaggtga

SEQ ID NO: 14196 - DNA, 201 bp, Homo sapiens; identical to SEQ ID NO: 2513

SEQ ID NO: 14197 - DNA, 201 bp, Homo sapiens
aaaacaccagaagctggcggcactcctgggcgcccagctgtgagtggagtctccctgtcccgcctttgggccttacccgtgctgcgcctgctgcctgcatyccccttccctgggtctccgcacgtgggccctgcctcattttcccggtcccagtttctgcgtcacctcctgagaggggcctcctgtcagcttccacgcagc

SEQ ID NO: 14198 - DNA, 201 bp, Homo sapiens; identical to SEQ ID NO: 2514

SEQ ID NO: 14199 - DNA, 201 bp, Homo sapiens; identical to SEQ ID NO: 2516

SEQ ID NO: 14200 - DNA, 201 bp, Homo sapiens; identical to SEQ ID NO: 2519

SEQ ID NO: 14201 - DNA, 201 bp, Homo sapiens; identical to SEQ ID NO: 2521

SEQ ID NO: 14202 - DNA, 201 bp, Homo sapiens; identical to SEQ ID NO: 2522

SEQ ID NO: 14203 - DNA, 201 bp, Homo sapiens; identical to SEQ ID NO: 2524

SEQ ID NO: 14204 - DNA, 201 bp, Homo sapiens
gggattacaggcgtgagccaccacgcctagccgggtttatagttttataacccttatgacaaatctcatagtattctgcagggataagcatgaaaccactygttcaataagtgcaaacaaaaacgccaacaattcttaagacatttctaatcttattttaccaataattttaaagccagcttatgtattaaagatttataa

SEQ ID NO: 14205 - DNA, 201 bp, Homo sapiens; identical to SEQ ID NO: 13978

SEQ ID NO: 14206 - DNA, 201 bp, Homo sapiens; identical to SEQ ID NO: 2525

SEQ ID NO: 14207 - DNA, 201 bp, Homo sapiens; identical to SEQ ID NO: 13986

SEQ ID NO: 14208 - DNA, 201 bp, Homo sapiens; identical to SEQ ID NO: 13988

SEQ ID NO: 14209 - DNA, 201 bp, Homo sapiens; identical to SEQ ID NO: 13989

SEQ ID NO: 14210 - DNA, 201 bp, Homo sapiens; identical to SEQ ID NO: 13994

SEQ ID NO: 14211 - DNA, 201 bp, Homo sapiens
ctctagagggttttttttttttttctgagacggtatcttgctttgtcgcccaggctggaggacagtggcacatctcggctcactccaagctccgcctcccrggttcatgccattctcctgcctcagcctcccgagtggcgggggactacaggcgcctgccaccacgcccggctaattttttatattttttactagagacgg

SEQ ID NO: 14212 - DNA, 201 bp, Homo sapiens; identical to SEQ ID NO: 13995

SEQ ID NO: 14213 - DNA, 201 bp, Homo sapiens
gctggacacacctgggcaggtgatgcctcctctcttagccacacgttcctcttccgggaaatggaataattccttctattttctgggattctctagagggktttttttttttttctgagacggtatcttgctttgtcgcccaggctggaggacagtggcacatctcggctcactccaagctccgcctcccgggttcatgcc

SEQ ID NO: 14214 - DNA, 201 bp, Homo sapiens; identical to SEQ ID NO: 13998

SEQ ID NO: 14215 - DNA, 201 bp, Homo sapiens
gtgtaccaggtacagcactgtcaccttcatgcacactgtcccaggcaatcccacccagggcgcctctgatcctgtctctggcttgtggacacaggtgtccrgagcactgaggtccctgagacagtgaggaccccggctggacacacctgggcaggtgatgcctcctctcttagccacacgttcctcttccgggaaatggaa

SEQ ID NO: 14216 - DNA, 201 bp, Homo sapiens
cagacgaggaagtataacaccaaagccgcctactgccagagcaagctcgccatcgtcctcttcaccaaggagctgagccggcggctgcaaggtacgggggygctaggctcggcctccctcttgctttactctgagcctagagcggcctttccatgatcctaggctgatgggaggccaaacggtggatccagaacagagtca

SEQ ID NO: 14217 - DNA, 201 bp, Homo sapiens
gcactttgggaggccaaatcacaaggtcaggagatcgagaccatcctggctaacacggtgaaaccccgtctctactaaaaatacaaaaaatcaactaggcrtggtggcacgcacctgtagtcccagctactcaggaggctgaggcaggagaatcgcttgaacccgggaggcggaggttgcggtgagccaagatcgcgccac

SEQ ID NO: 14218 - DNA, 201 bp, Homo sapiens; identical to SEQ ID NO: 14004

SEQ ID NO: 14219 - DNA, 201 bp, Homo sapiens
attacaggcacccgccaccgtgcctggctaattttttgtgttttaggtagagacagggtttcaccatgttggtcaggctggtctcgaactcctgacctcargtgatctgcttcccttggcctcccaaagtgctgggattacaggtgtgagccaccgtgccctacctgaataattagtttgtttgagacaggatccatctct

SEQ ID NO: 14220 - DNA, 201 bp, Homo sapiens; identical to SEQ ID NO: 14006

SEQ ID NO: 14221 - DNA, 201 bp, Homo sapiens
ctatccccataccgccactgttaactcttaaaataaataaataatctttgctggcaaggctatgctgaacctccttaggcactttctaattagatgtcctgagtcgtcccaattcttagacctttaatacctgtttttctcctttccttattccctttagtttttcaattcatacaaaactgtatccaggccatcaccaat

SEQ ID NO: 14222 - DNA, 201 bp, Homo sapiens
gcctgtggctgcgtcgcgcgctcttcctcggagctacccaggcggctggtgtgcagcaagctccgcgccgaccccggacgcctgacgcctgacgcctgctmcccggcccggcatgagccgctacctgctgccgctgtcggcgctgggcacggtagcaggcgccgccgtgctgctcaagtgagtacattctagccccgcgtg

SEQ ID NO: 14223 - DNA, 201 bp, Homo sapiens
aaactttagagcagagttttggcaaactatgagttaggggccaagtccagttgctgcctttttttgtacagcctgcaagcaacgactttatttatttatttattactactgttattttgagagggagtctcactctgtcggccaggctgagtgcaatggcgcgatctcggctcactgtaacctctgcctcctgggttcaag

SEQ ID NO: 14224 - DNA, 201 bp, Homo sapiens
ggaggccaaatcacaaggtcaggagatcgagaccatcctggctaacacggtgaaaccccgtctctactaaaaatacaaaaaatcaactaggcatggtggcrcgcacctgtagtcccagctactcaggaggctgaggcaggagaatcgcttgaacccgggaggcggaggttgcggtgagccaagatcgcgccactgcactcc

SEQ ID NO: 14225 - DNA, 201 bp, Homo sapiens
ttttgtacagcctgcaagcaacgactttatttatttatttattactactgttattttgagagggagtctcactctgtcggccaggctgagtgcaatggcgmgatctcggctcactgtaacctctgcctcctgggttcaagcgcggacctcagcctcctgagtagctgggattaagatgcctgctaccataccctgctaatt

SEQ ID NO: 14226 - DNA, 201 bp, Homo sapiens
gcagagttttggcaaactatgagttaggggccaagtccagttgctgcctttttttgtacagcctgcaagcaacgactttatttatttatttattactactrttattttgagagggagtctcactctgtcggccaggctgagtgcaatggcgcgatctcggctcactgtaacctctgcctcctgggttcaagcgcggacctc

SEQ ID NO: 14227 - DNA, 201 bp, Homo sapiens
ctttagagcagagttttggcaaactatgagttaggggccaagtccagttgctgcctttttttgtacagcctgcaagcaacgactttatttatttatttattactactgttattttgagagggagtctcactctgtcggccaggctgagtgcaatggcgcgatctcggctcactgtaacctctgcctcctgggttcaagcgc

SEQ ID NO: 14228 - DNA, 201 bp, Homo sapiens
gcacctggacttggcttccctcaagtctatccgagagtttgcagcaaagatcattgaaggtaggagaacgctggccatgtgggatgaggactgggataggyggctcccagggccaggctctgagaagtgaatgaagcaagcaaactttagagcagagttttggcaaactatgagttaggggccaagtccagttgctgcctt

SEQ ID NO: 14229 - DNA, 201 bp, Homo sapiens
gttttcaggaggcaacatcatcctggcctgccgagacatggagaagtgtgaggcggcagcaaaggacatccgcggggagaccctcaatcaccatgtcaacrcccggcacctggacttggcttccctcaagtctatccgagagtttgcagcaaagatcattgaaggtaggagaacgctggccatgtgggatgaggactggga

SEQ ID NO: 14230 - DNA, 201 bp, Homo sapiens
ggttttcaggaggcaacatcatcctggcctgccgagacatggagaagtgtgaggcggcagcaaaggacatccgcggggagaccctcaatcaccatgtcaamgcccggcacctggacttggcttccctcaagtctatccgagagtttgcagcaaagatcattgaaggtaggagaacgctggccatgtgggatgaggactggg

SEQ ID NO: 14231 - DNA, 201 bp, Homo sapiens; identical to SEQ ID NO: 13925

SEQ ID NO: 14232 - DNA, 201 bp, Homo sapiens
cttgaaagggccagcacaggaccccgcccagagaataggtggaacaaacagttggagctttacttacttatttttgagatgaagtcttgctctgtcgcccrggctggagtacaatggcatgatctccactcactgcaacttccacctcccaggttcaagcgattctcctgtctccaagtagctgggattacaggtgcacac

SEQ ID NO: 14233 - DNA, 201 bp, Homo sapiens
ctgggctcatttcttcatgaacaaggggagaaaactatctcatagaagcatttggtatgggtccgaggcctttgggtctgagggaggaggggctggggtcyggactcttgggtctgagggaggaggggctgggggcctggactcctgggtctgagggaggaggggctatctcattgctttgggggtggcgcaggcggccct

SEQ ID NO: 14234 - DNA, 201 bp, Homo sapiens
gtattttaccacaacaaaaaaaattggaggctgggcattgtggcttatttgtaatcccagtactttgggaggccgcggggtggatcacctgaggtcagaarttcaagactagcttggctaacatggtgaaaccgctgactctactaaaaataaaaaaataaaaaattagctagttgtggtaggtgcctgtaatcccagcta

SEQ ID NO: 14235 - DNA, 201 bp, Homo sapiens
gttaagatgataaattttaagtgatttgtattttaccacaacaaaaaaaattggaggctgggcattgtggcttatttgtaatcccagtactttgggaggcygcggggtggatcacctgaggtcagaaattcaagactagcttggctaacatggtgaaaccgctgactctactaaaaataaaaaaataaaaaattagctagt

SEQ ID NO: 14236 - DNA, 201 bp, Homo sapiens
ccatcctggctaacacggtgaaaccccgtctctactaaaaatacaaaaaatcaactaggcatggtggcacgcacctgtagtcccagctactcaggaggctraggcaggagaatcgcttgaacccgggaggcggaggttgcggtgagccaagatcgcgccactgcactccagcctcggcgacagagtgagactccgtctcaa

SEQ ID NO: 14237 - DNA, 201 bp, Homo sapiens
ccaggtcacttgagcctaggagttcaaggctgaatgagctgtgatggcgccagcactccagccgcggcagcagagtgagactgactcaaaaaaaaaaaaaataataataaacaaaaagaaaagggggttaagatgataaattttaagtgatttgtattttaccacaacaaaaaaaattggaggctgggcattgtggcttat

SEQ ID NO: 14238 - DNA, 201 bp, Homo sapiens
gaggacattccatgaagtgaaataagccagtcgacagaagagcaaatacggtatgattccacttacaggagctacctacagttaaattcatagagaagttkgaatggtgcttgccaggggtcaggaggggaggggagaatggggagttactgtttaatggaaacggaagtttagtttggcaagatgaaacaatttgagaga

SEQ ID NO: 14239 - DNA, 201 bp, Homo sapiens
acccatccacagatgaacagggaaacagaatgtggcttctatagacaggggcatatgattcagccttaaaaaggaagggcattctggccgggcgcggtggygcacgcctgtaatcagtactttgggaggccaaagctggcggatcacgaggtcaggagttcgagaccagcctaaccaacatggtgaaaccccctctctact

SEQ ID NO: 14240 - DNA, 201 bp, Homo sapiens
gaggccaaatcacaaggtcaggagatcgagaccatcctggctaacacggtgaaaccccgtctctactaaaaatacaaaaaatcaactaggcatggtggcasgcacctgtagtcccagctactcaggaggctgaggcaggagaatcgcttgaacccgggaggcggaggttgcggtgagccaagatcgcgccactgcactcca

SEQ ID NO: 14241 - DNA, 201 bp, Homo sapiens; identical to SEQ ID NO: 13949

SEQ ID NO: 14242 - DNA, 201 bp, Homo sapiens; identical to SEQ ID NO: 13951

SEQ ID NO: 14243 - DNA, 201 bp, Homo sapiens
atgtacaatcgggttttataccgagacattcagttcccaggggcaggcaggagacagtggccttcctctagctcaactgcaagaggctttcctcttttacyaatccacctcagcacagaccctttacgggtgttgggctgggggacggtcaggtctttctcatcccacgaggccatatttcagactatcccacggggagaa

SEQ ID NO: 14244 - DNA, 201 bp, Homo sapiens
gcagcattgctgtaaacatgtctcgcctcccgccatagggcggcttttctcctgtctcagaattgaacaaatgtacaatcgggttttataccgagacattyagttcccaggggcaggcaggagacagtggccttcctctagctcaactgcaagaggctttcctcttttactaatccacctcagcacagaccctttacgggt

SEQ ID NO: 14245 - DNA, 201 bp, Homo sapiens; identical to SEQ ID NO: 13953

SEQ ID NO: 14246 - DNA, 201 bp, Homo sapiens; identical to SEQ ID NO: 13954

SEQ ID NO: 14247 - DNA, 201 bp, Homo sapiens; identical to SEQ ID NO: 13955

SEQ ID NO: 14248 - DNA, 201 bp, Homo sapiens
ataatatttgaaaggtggcaggcattcaaccatggtcactgaatgagagatgtagggaagatgatggcagggaggtttttagatatcaacaccctgatagktctcattttaaccacctgtaagtgcacatacaagtcaacggcactggccgggcgcggtggctcatgcctgtattcccagcactttgggaggccaaatcac

SEQ ID NO: 14249 - DNA, 201 bp, Homo sapiens
gccttgacctcctgggctcaggtgatcctcccaccttggcgtccccaggagctgagatcacacgtgcgccaccacgcccggctaatttttgtatttttcgyagagacggggttttgccatgttggccaggctggtctcaaacacctgccctcaggtgatccgcctgcctcggcctccaaagtgctgggattacagacgtga

SEQ ID NO: 14250 - DNA, 201 bp, Homo sapiens; identical to SEQ ID NO: 13974

SEQ ID NO: 14251 - DNA, 201 bp, Homo sapiens; identical to SEQ ID NO: 13977

SEQ ID NO: 14252 - DNA, 201 bp, Homo sapiens
ttttgacagaatttcactctgtcgccaggctggaatgcagtagggcaatctcggctcactgcaacctccacctcccgagttcaagtgatgctcctgcttcrgcctcctgagtagctgggactacaggtgagtgccaccacatccagctaatttttgtatttttagtagagacagggtttcaccatgttggccaggctggta

SEQ ID NO: 14253 - DNA, 201 bp, Homo sapiens
gaggcctcttaagatgtgtatagggagagagagttggggggagagggagagagagaacagagagagagagacacacacaagaagagagagaggaagaaagraggagagagaggaagaggaagggagaggaagagagagagaaagagaaagagggagagagagaggagagaaagagacaagaagagaggaagaaaaaagagg

SEQ ID NO: 14254 - DNA, 201 bp, Homo sapiens; identical to SEQ ID NO: 13979

SEQ ID NO: 14255 - DNA, 201 bp, Homo sapiens
gtctgggaccactggagctccttgcccccctttgcttatctctacacagcaacagggtcgctaaacttaccttacactgctgaggcctcttaagatgtgtrtagggagagagagttggggggagagggagagagagaacagagagagagagacacacacaagaagagagagaggaagaaaggaggagagagaggaagagga

SEQ ID NO: 14256 - DNA, 201 bp, Homo sapiens
tgtcaagaagctggggcagtgcttgggctgcaaagactcaaatggctggagtctgggaccactggagctccttgcccccctttgcttatctctacacagcmacagggtcgctaaacttaccttacactgctgaggcctcttaagatgtgtatagggagagagagttggggggagagggagagagagaacagagagagagag

SEQ ID NO: 14257 - DNA, 201 bp, Homo sapiens; identical to SEQ ID NO: 13982

SEQ ID NO: 14258 - DNA, 201 bp, Homo sapiens; identical to SEQ ID NO: 2558

SEQ ID NO: 14259 - DNA, 201 bp, Homo sapiens; identical to SEQ ID NO: 13983

SEQ ID NO: 14260 - DNA, 201 bp, Homo sapiens
gcagtgctgtttacctgctcagcctcctgttgctggacactatcttgttgccagcgttagcctctgtgggacatgggtgtggtgggcagagtcgtgactcmgtagaggggtccacgtcctaatcctcggaaggtgtgacgacattacctcacgtgtcagaggttctcgctgatgtgttaagtgaagcatcttttttttttt

SEQ ID NO: 14261 - DNA, 201 bp, Homo sapiens
gggtacccacaggctattagatccttgtttctgtgcatggaaattctcaaattatctccaaaagtctatgaagaaggtaaacacacatttccagatgaggraataggctgatatagttgaaagacacacagagggtcacagtctggaattgacagtggtgggattcgaacctatttcactccagaactgcgtagcgcctta

SEQ ID NO: 14262 - DNA, 201 bp, Homo sapiens
ggagtccaggcccccagcccctcctccctcagacccaggagtccaggcccccagccgccttctcctgcaggaccccaggagcttgggtacccacaggctaytagatccttgtttctgtgcatggaaattctcaaattatctccaaaagtctatgaagaaggtaaacacacatttccagatgagggaataggctgatatagt

SEQ ID NO: 14263 - DNA, 201 bp, Homo sapiens
ctctgagaacagccagccctggtgagagtgcggggagaggcgcttatgacacagggagggtgggtctgggaaccagcctggcaggaggaggagggagactsccggtggccgggagctgtttgttctctgggagggatcgtggcggggtggtttgtgcagccctttcctgaaaccggaggagcctggctccttcccaggtct

SEQ ID NO: 14264 - DNA, 201 bp, Homo sapiens
agctttccgacacggggaccttctgcccctcctgagccctgagtcccctccatcttaactgggaggtcacctgtttgcgtggtgtctgctcagcttgcagrcaaggccaccaacaccctcctttcctgtctttccttcctaccatcctctcctgtccaccctctgcctctccctcccttcttctcttctttccttctagtt

SEQ ID NO: 14265 - DNA, 201 bp, Homo sapiens; identical to SEQ ID NO: 2571

SEQ ID NO: 14266 - DNA, 201 bp, Homo sapiens
gtaccacatgcctactctcaggtactcaggaggctgaggttggggatcacctgagcccggggaggttgaggctgcagtgagccatgattgcaccactgctstcaaacctgggtgacagagtgagaccctgcctcaaaagaaaataaaaataaaaaacaaatgtaaactttaggggaacaataacaacaacaaaaataaaag

SEQ ID NO: 14267 - DNA, 201 bp, Homo sapiens
ccaggccccagcaggcggacaaacggtgcaacgccaggctggccagaggagataagcgcggctccttggagcttgtgtgcaagtcactgtactgaggagcyggctacggctcgatgagtctcaattaggaaaggccggggctggtggaggaagggaggagagcattcttcatcctcatcacatcctgagcctgtgccccag

SEQ ID NO: 14268 - DNA, 201 bp, Homo sapiens
ccggagtagctgggactacaggtgcctgccgccatgcccggctattttttttttgtattttttgggggttttactgtgttgcccaggctggtcttgaactsctgagctcaggcaatctgcctgcctcagcctcctaaagtactaggattacaggcatgggccaccacgcccggccttatttttatttttgagacagtctca

SEQ ID NO: 14269 - DNA, 201 bp, Homo sapiens
tgcgtcgcgcgctcttcctcggagctacccaggcggctggtgtgcagcaagctccgcgccgaccccggacgcctgacgcctgacgcctgctacccggcccsgcatgagccgctacctgctgccgctgtcggcgctgggcacggtagcaggcgccgccgtgctgctcaagtgagtacattctagccccgcgtgcgcggtcaa

SEQ ID NO: 14270 - DNA, 201 bp, Homo sapiens
tggctggtggccactgtattgcatggtgcccttctctcctgtgggtgcagtgctgtttacctgctcagcctcctgttgctggacactatcttgttgccagygttagcctctgtgggacatgggtgtggtgggcagagtcgtgactccgtagaggggtccacgtcctaatcctcggaaggtgtgacgacattacctcacgtg

SEQ ID NO: 14271 - DNA, 201 bp, Homo sapiens; identical to SEQ ID NO: 14008

SEQ ID NO: 14272 - DNA, 201 bp, Homo sapiens
aaaagtagctgggtgtggtggcgtgcgcttgtagtcccagctactagggagactgaggcaggagaatcacttgaacccgggaggcagaggttgcagcgagycattgcgccatgcactccaggctgggtgactgactgagattctgactcaaaaaaaaaaaaaatcctatgacaaggagaaaggtcagattccctggcaatg

SEQ ID NO: 14273 - DNA, 201 bp, Homo sapiens
aagaccagtatttgtcccaggtcctgcttttttacaatttcctccgaaatccagatacctgtcaacaccttggaaaaactgacttctccccaattagtagkgttgtgtgactgtcataagcccagtacaaaaatggccttctttgttggggagcttcttaccctccagtgttttgcccaatttttgtccaaggtggcaaca

SEQ ID NO: 14274 - DNA, 201 bp, Homo sapiens
gacagattcgttgtctcagatttgatctcaaagaaaaaccaagaccagtatttgtcccaggtcctgcttttttacaatttcctccgaaatccagatacctrtcaacaccttggaaaaactgacttctccccaattagtagtgttgtgtgactgtcataagcccagtacaaaaatggccttctttgttggggagcttcttac

SEQ ID NO: 14275 - DNA, 201 bp, Homo sapiens
agaaagcagctttcggacagattcgttgtctcagatttgatctcaaagaaaaaccaagaccagtatttgtcccaggtcctgcttttttacaatttcctccraaatccagatacctgtcaacaccttggaaaaactgacttctccccaattagtagtgttgtgtgactgtcataagcccagtacaaaaatggccttctttgt

SEQ ID NO: 14276 - DNA, 201 bp, Homo sapiens
ctcccctgaccgcatgttccctggagggctcgctgtcttcagagccaggcttgtctcctgctgcagcctccactgttctcctagtcactctgtaacccacyccctctgcctgcggcccccaccacgcccctcaaagtggtcaaggttgtcctgttgtctaattccatggagcttgcctgtcttcattttattagcctcttt

SEQ ID NO: 14277 - DNA, 201 bp, Homo sapiens
ccacctccctgtcctgccccttgtgctctgtgtaccctcaggaggtcaggacaggcctttctgagaatgaaaatctgttcatttgctttcctactggatayttgtcatcagcatacaaaccaatgcgctctgcagtgtgtcatctttcagaacctcccctgaccgcatgttccctggagggctcgctgtcttcagagccag

SEQ ID NO: 14278 - DNA, 201 bp, Homo sapiens
aatgggggaaaattatttcaaactgaaaagagaaaagtttgattctgttttgggatatttcctagggacatgagctggggaggggatctcagcagcgatgygctatgaagcatagtaacataacacagagaacttaattgaagggggaaataaatggaagttttctttttttgaatatcagttgtagcctgctctgctata

SEQ ID NO: 14279 - DNA, 201 bp, Homo sapiens
gccagcaaataagccctatcaaatcctattgccatatgagtcctagaggtgaataagagaagaaaaaatgggggaaaattatttcaaactgaaaagagaamagtttgattctgttttgggatatttcctagggacatgagctggggaggggatctcagcagcgatgcgctatgaagcatagtaacataacacagagaactt

SEQ ID NO: 14280 - DNA, 201 bp, Homo sapiens; identical to SEQ ID NO: 2630

SEQ ID NO: 14281 - DNA, 201 bp, Homo sapiens
ctagagaaggctcagggaggaggtgggaactgagctgggtttggagttgagagagctcttgacaagcaccaggaaggcaggggaagatgcggccctgcacyttctgagggggaccattaagagatgaagttgactaaagcagagactttgtgtaggtgacgggcttgggaaggtagctatggaatccagactgagcaccca

SEQ ID NO: 14282 - DNA, 201 bp, Homo sapiens
gggtgtggcctcatagctccttttgaacaggggcacaggaaggacggctttagagcattcaaaaaataactttgccaaaataataataataataatagaarggaagaagaggctgagcatggtggctcacacctgtaatccctacactttgggaggctgagacaagcagatcacctgaggtcaggagttcgagactagcct

SEQ ID NO: 14283 - DNA, 201 bp, Homo sapiens; identical to SEQ ID NO: 2675

SEQ ID NO: 14284 - DNA, 201 bp, Homo sapiens
aagatgccctttatgaaatttaagtcagatttttcgagaaaaaatttggatgggccatcaggtcaccatgggacttcccttagcctcatgcattctctgckatggtttactttggggcctatgaatagggaagactgagatataggaaaaaccaaagtgtctgtgttcccccactctcacacccatgcagcataacacttc

SEQ ID NO: 14285 - DNA, 201 bp, Homo sapiens; identical to SEQ ID NO: 2676

SEQ ID NO: 14286 - DNA, 201 bp, Homo sapiens
atggcatttctcaaagtatgctctggagaaacctgaagtctcttgagatcccttcagagacagtctatgaggttaaaacacctttaaatttaaaaaaaaaagattttatttgctatttcacttttatttcctgataagtgtacagtggagttttccagaggctacataatgtttgatcacattatctctctgatggctaat

SEQ ID NO: 14287 - DNA, 201 bp, Homo sapiens; identical to SEQ ID NO: 2678

SEQ ID NO: 14288 - DNA, 201 bp, Homo sapiens
tgctgcagtttctcagaggtgctaggagggcattaggagtctgaagccctggaagtgtgttctgactttgccactagctagatagacctggactaggcacrttacctctttgtaccactcagctctaacccctcattcaaaaacccagcattttcaagtggtgtttttcacatcagcctttgcataagttttcatttgaag

SEQ ID NO: 14289 - DNA, 201 bp, Homo sapiens
gcccttctgatatatgaagcaaacactgacagaactgaagagacaaacagataagcccacaattagagtgggagatatcctaatgtctctctccgtatggwtatacatcttcccaaacaaaatataatagaaaaaatacacaaaaaaatcagaaagaatatatatgttttaaaggaaattgtcaacctatttaacactatg

SEQ ID NO: 14290 - DNA, 201 bp, Homo sapiens
aagcatttactgtgatccataaccaggagaaaaagcactcaaaacaaataaaccccaaaatgaagaaattggcaagaagatttgaaatatatatatatcayaattgtgttcaaggatttaaataaaacatgaacatggaagaaacaaatggataatatcaaaaaagaaaaattataaaataaccaaatagaaattaaataa

SEQ ID NO: 14291 - DNA, 201 bp, Homo sapiens
gtggaaagatgttagtggaattcctggcagatagttcacatggacaaaatggtattaactacaaaaatttttacagagaaaacggtaactgacaaaagcasgtgtttggaatgaattaagaccatggcagccttttgaggcctttatatttctcctgactgtgcaataaaaatattttggctctctaagacttggctgtca

SEQ ID NO: 14292 - DNA, 201 bp, Homo sapiens
aaatagggataataacaccttcctcaaatggttttattaggactaaaagagagaatgtgtggaaagatgttagtggaattcctggcagatagttcacatgracaaaatggtattaactacaaaaatttttacagagaaaacggtaactgacaaaagcaggtgtttggaatgaattaagaccatggcagccttttgaggcct

SEQ ID NO: 14293 - DNA, 201 bp, Homo sapiens
tgaattcttgatctgcttcttcatagctatttacacttaggcaagttttgttttgttttgttttacgttgccactcagttttctcatctgtaaaatagggrtaataacaccttcctcaaatggttttattaggactaaaagagagaatgtgtggaaagatgttagtggaattcctggcagatagttcacatggacaaaatg

SEQ ID NO: 14294 - DNA, 201 bp, Homo sapiens
tgaggtctcggggggtgggggttatcccaaataggttcacagaagaaccagaaataaaacctgcctttctagactgtaagtcttgtgattttcatctaaayggttgtctctatacagcaactcatctctagaactgaaaataagcttaaatccctcctccatccccaataattcaagctgcatttcagagaaaaccaggac

SEQ ID NO: 14295 - DNA, 201 bp, Homo sapiens
ggttgaggcagctagagaaggctcagggaggaggtgggaactgagctgggtttggagttgagagagctcttgacaagcaccaggaaggcaggggaagatgyggccctgcaccttctgagggggaccattaagagatgaagttgactaaagcagagactttgtgtaggtgacgggcttgggaaggtagctatggaatccaga

SEQ ID NO: 14296 - DNA, 201 bp, Homo sapiens
accaaatggcaaagtcagagactatcgggggccatggagacactctgggccatttttatgaggtagtctaggctcatctttatgagggaactgaggtctcrgggggtgggggttatcccaaataggttcacagaagaaccagaaataaaacctgcctttctagactgtaagtcttgtgattttcatctaaatggttgtctc

SEQ ID NO: 14297 - DNA, 201 bp, Homo sapiens; identical to SEQ ID NO: 2688

SEQ ID NO: 14298 - DNA, 201 bp, Homo sapiens; identical to SEQ ID NO: 2689

SEQ ID NO: 14299 - DNA, 201 bp, Homo sapiens; identical to SEQ ID NO: 2692

SEQ ID NO: 14300 - DNA, 201 bp, Homo sapiens
attttatattgtttccttgaatatttcctgtaacccccctgcctgattccactagaatgtaagctccatgacggccaagcctctggctgcactgtgccccrtgtgtccccagcatcctggtggggctcgatacacagagagctcataagtagcatttgaatacatgaatcaaagaatggctcagtttactgcagccttttt

SEQ ID NO: 14301 - DNA, 201 bp, Homo sapiens
tcactctgtctcatcatgtatgtaatatgtatcatcattaagtgatctcattttatattgtttccttgaatatttcctgtaacccccctgcctgattccaytagaatgtaagctccatgacggccaagcctctggctgcactgtgccccgtgtgtccccagcatcctggtggggctcgatacacagagagctcataagtag

SEQ ID NO: 14302 - DNA, 201 bp, Homo sapiens
agtggcatgggtctctgagagaatcattaacttaatttgactatctggtttgtggatgcgtttactctcatgtaagtcaacaacatcctgggattgggacmcactttctgggcactgctggccagtcccaaaatggaacataaggaagtggttcttctacttcttttatttctgaaatcaggtaagacatagtttttttaa

SEQ ID NO: 14303 - DNA, 201 bp, Homo sapiens
ttgaaccctgctgagccagtggcatgggtctctgagagaatcattaacttaatttgactatctggtttgtggatgcgtttactctcatgtaagtcaacaayatcctgggattgggacccactttctgggcactgctggccagtcccaaaatggaacataaggaagtggttcttctacttcttttatttctgaaatcaggta

SEQ ID NO: 14304 - DNA, 201 bp, Homo sapiens
acatgttgtaaggactctttattcaaggtaatgtttgaaccctgctgagccagtggcatgggtctctgagagaatcattaacttaatttgactatctggtytgtggatgcgtttactctcatgtaagtcaacaacatcctgggattgggacccactttctgggcactgctggccagtcccaaaatggaacataaggaagtg

SEQ ID NO: 14305 - DNA, 201 bp, Homo sapiens
cagttatgtggcatccacaatgtgtgacctaaatttataactttaccagacatacaaaaagcatttactgtgatccataaccaggagaaaaagcactcaawacaaataaaccccaaaatgaagaaattggcaagaagatttgaaatatatatatatcataattgtgttcaaggatttaaataaaacatgaacatggaagaa

SEQ ID NO: 14306 - DNA, 201 bp, Homo sapiens; identical to SEQ ID NO: 2680

SEQ ID NO: 14307 - DNA, 201 bp, Homo sapiens
acacagtggatcctgagcaccagtggcctgaaaggatatgggttgctgggacatgaagaacaaaagcaggatacgcagatgctgaacagcgaaagaggccrttagatgaacagaaaaccaggtctaacaaggacagcttttcttccataaatgagtacacaatatatggaaaaaactatttttacatattggagaacagat

SEQ ID NO: 14308 - DNA, 201 bp, Homo sapiens
aaatgactcgttgtaagcacataactcacgtggggggaacagacatgggtgggcacactagcaaacacctgccagctgcatgtggacccaggtgggcaccrgactgttttaaacacaggagagggcccgttgtctaactggtgagttggttgagtggaagctggttgagaacttttactgcaaaccatttacagtagacca

SEQ ID NO: 14309 - DNA, 201 bp, Homo sapiens
accaaacaaaaaagagctttgtttcttttcacattcatttctcagtttagatcatctttaattaaatataaatgtaagaaagttggaaaatgcaaagaaaygactcgttgtaagcacataactcacgtggggggaacagacatgggtgggcacactagcaaacacctgccagctgcatgtggacccaggtgggcaccggac

SEQ ID NO: 14310 - DNA, 201 bp, Homo sapiens
atagtgtgtatatatatgtacacatatatgtgtgtatatatatgtacacatatatgtgtgtatattagaatatatataacataaatatgtatatatatatwttctgacctgtataaacacagtggatcctgagcaccagtggcctgaaaggatatgggttgctgggacatgaagaacaaaagcaggatacgcagatgctga

SEQ ID NO: 14311 - DNA, 201 bp, Homo sapiens
tcctccaccaccaccacaggaaagaagtgtcagtcttggtcatctatgacaccacaccggcaccagaagaccccagaaaactacccaaatgcgtatgtctytgatttttactgtaagaggggcatcagccaactgaaatttctgttaaaagagccatgcttcatgcttcaagccaacttcctaggaccaaatttctcttag

SEQ ID NO: 14312 - DNA, 201 bp, Homo sapiens
agataaattccattgcccacataacgaattggttttgacctacagtccatgtgacaaaatgatcattttggagaaagctgtgcaaattcctatccatgaawgtggtccaccccactcctgattttgcctgggcacctgtctatgtcttaatcagtcttcaaggcacatgatcaaagggaggaaaactgtgtctttgagtct

SEQ ID NO: 14313 - DNA, 201 bp, Homo sapiens
aacattcatgtgcatgtgtctttagggtagaatgatttatattcctctaggtatatcgccagtagtaggattgctgggttgaaagttagttctgcttttakctctttgagaatcaccatactgctttctacagtggatgaactaatttacagtcccaccagctgttagtgttctcttttctctgcaaccttgccagcatct

SEQ ID NO: 14314 - DNA, 201 bp, Homo sapiens
gataaattccattgcccacataacgaattggttttgacctacagtccatgtgacaaaatgatcattttggagaaagctgtgcaaattcctatccatgaatrtggtccaccccactcctgattttgcctgggcacctgtctatgtcttaatcagtcttcaaggcacatgatcaaagggaggaaaactgtgtctttgagtctc

SEQ ID NO: 14315 - DNA, 201 bp, Homo sapiens
ctccgttttctcatgtggaaaaagagttgaaatgaggtactctgttactcctagaactcacttaatgttcaccagttcatacacattcatgatcagagaaygattcagttattccaggctgacaattcccccttcatcataatatgtttaagagaatcatataagactatatttgtttcaaagcactttaaaaaccacaag

SEQ ID NO: 14316 - DNA, 201 bp, Homo sapiens
aaaagcattagtttgctgtaggtatgttaggagcactttccccatgtgattgatcaattaattaaaaaatggctaaagtgggtaaccttaaatgatggtgyaaatataccttaaacattttatattttcattgaaaacacaagtgtacttgacaccttttgacgtagagcagaggcttttcttcttcgaatatggggtcac

SEQ ID NO: 14317 - DNA, 201 bp, Homo sapiens
agtgcagattaaatctaaactttatctggtgaagttattagttcttacaagtagcaagcaaacggtaaactaaataggatcacctaattgtaccagatttwaaaaaaaaaaaaccctgattctcctgattctctctacaaaatgctaacatttaaatatgtcatttgtaaattgttaaccagaaggaacatgggaatgact

SEQ ID NO: 14318 - DNA, 201 bp, Homo sapiens
tactgaccatttattccacttggatctcccacctctaggtcaaggagagcctctggatgactatgtgaatacccagggggcttcactgttcagtgtcactragaagcagctgggagcaggaagtatagaagaatgtgcagcaaaatgtgaggaggacgaagaattcacctgcaggtatttccattgtcgttgcacctacgc

SEQ ID NO: 14319 - DNA, 201 bp, Homo sapiens
ggaaggtaagggcagataagatttgctgccacgttggtgtattttgttcagtacttcatcgatgccatgcccaaataactgaaagaggcagcaattctgarctctctggtccctcaagatattcaatgatctttagcatgtctcacttattaataaacatttgttttctttaaataaagaaaaatacttattggatttcct

SEQ ID NO: 14320 - DNA, 201 bp, Homo sapiens
tgtgttttgaagtcacactgtgagctatatagaattaaccaaaacacaactcttcttgaaaatgagagttcaagttggcagaaagtgcggggtaaagacayggatatgggcctaaagcatctatttctttgtgatcttttgatatatctctcaagtgctttttagtggattagctttagaatgcatcagccaactcctgct

SEQ ID NO: 14321 - DNA, 201 bp, Homo sapiens
atatttcctagggacatgagctggggaggggatctcagcagcgatgcgctatgaagcatagtaacataacacagagaacttaattgaagggggaaataaayggaagttttctttttttgaatatcagttgtagcctgctctgctatacttcaaaaaaactcttcagaaagtttaactgaactcactgtaggacacactttg

SEQ ID NO: 14322 - DNA, 201 bp, Homo sapiens
ccaggactgctaccatggtgatggacagagctaccgaggcacatcctccaccaccaccacaggaaagaagtgtcagtcttggtcatctatgacaccacacyggcaccagaagaccccagaaaactacccaaatgcgtatgtctttgatttttactgtaagaggggcatcagccaactgaaatttctgttaaaagagccatg

SEQ ID NO: 14323 - DNA, 201 bp, Homo sapiens
ttctaaaatgctataaatctatttttatgttaatctgtctgctaatacagaaaagagaacagtcataattctcagaggctaccgtactgtttttgtcatarattgcttcatgcttcttttttttcagtaattgttaagcttgatttcttttattttaatttcagcaccacctgagctaacccctgtggtccaggactgcta

SEQ ID NO: 14324 - DNA, 201 bp, Homo sapiens
tggggaaggcctcagccccatccctcgtacagcaggaatgagaacagccctgcctgttgggaagcttgagggaggctatggacgtgcagcgcttggcagarggtctcgtcatggaaggttccagcaaatgtgagatacttttatgatttcattttctccaaaagaaagggaataagagaagaggggaggaaataagactaa

SEQ ID NO: 14325 - DNA, 201 bp, Homo sapiens
catctgccctcgtgttctcatgaacactcagtagggacccataaaaaagagcttgcatgtaagtgcaatttccaattataagtactctatctgttctttcmcacccaggttttaaatgaaatattactaggaacttattaatgttctaaaatgctataaatctatttttatgttaatctgtctgctaatacagaaaagaga

SEQ ID NO: 14326 - DNA, 201 bp, Homo sapiens
cactcaccacccacagcctgcactgccgaatgcatcctcctctcatctgccctcgtgttctcatgaacactcagtagggacccataaaaaagagcttgcaygtaagtgcaatttccaattataagtactctatctgttctttcacacccaggttttaaatgaaatattactaggaacttattaatgttctaaaatgctata

SEQ ID NO: 14327 - DNA, 201 bp, Homo sapiens
ggtgaaactctgtgttctacgttgctctgtgtcagtgaagcaaggcagtgccagttcagagggctctggggcctcaagacagggatgactggttgtgggtrctgcagctgcgagcagagcagtcaaacataactgctgatgcttttctttcagtcctgccgtcatcactgacaaagtaatcccagcttgtctgccatcccc

SEQ ID NO: 14328 - DNA, 201 bp, Homo sapiens
tattaagctgaataaaaatcaaagcccaattatgttctttttactatacatgctctttaattgtaaagagctagtccaaaaaccaagtgtggaaaatgacrtatcatgaaaataagaatcagaagaaagctggagtggtaatgttaatcccaaagtaatctacaagaaataataccacgatgaaaaagttatttcttaagt

SEQ ID NO: 14329 - DNA, 201 bp, Homo sapiens
tgaaattcaaatgttgcaacttgcctattatttattttagtgcatttttttgtacttttcccagtttggtgttaggtggcattaagttctcagtaatgacrcttatcaaataggaacttagtgcttgttactcacctttatccattcccccaacactcaacaaattgcctttgctatatccctatgagatgagcagatcaa

SEQ ID NO: 14330 - DNA, 201 bp, Homo sapiens
gcattatggtacacttaaactgaactgaaaatatatttaatatactcctaagcatattaaatataaagggattaaacattgcacagaaaaggcagagattrttaagctgaataaaaatcaaagcccaattatgttctttttactatacatgctctttaattgtaaagagctagtccaaaaaccaagtgtggaaaatgacat

SEQ ID NO: 14331 - DNA, 201 bp, Homo sapiens
tttatccaaaagaaggaaagaaaggaagaaaaaagaatgaagaagatatggcaaagagagaaaatacacagcattatggtacacttaaactgaactgaaartatatttaatatactcctaagcatattaaatataaagggattaaacattgcacagaaaaggcagagattattaagctgaataaaaatcaaagcccaatta

SEQ ID NO: 14332 - DNA, 201 bp, Homo sapiens
tgtcccaggtcctgcttttttacaatttcctccgaaatccagatacctgtcaacaccttggaaaaactgacttctccccaattagtagtgttgtgtgactktcataagcccagtacaaaaatggccttctttgttggggagcttcttaccctccagtgttttgcccaatttttgtccaaggtggcaacataatttagttca

SEQ ID NO: 14333 - DNA, 201 bp, Homo sapiens
tgttaccgtgtccgggcacacctgtcagcactggagtgcacagacccctcacacacataacaggacaccagaaaacttcccctgcaagtaagtcccctccrgtctcattctgctgctatggaatgtgaaatcccattgactttgccttagttttagttactgtaggaacgcaggataaagtattctggaagaaaaactgat

SEQ ID NO: 14334 - DNA, 201 bp, Homo sapiens
tgccctctgtggatttgatagcaattttttaaatgattcatgtttcaacttgttaaaaacatttaatttagttaaaaaccaaacaaaaaagagctttgttycttttcacattcatttctcagtttagatcatctttaattaaatataaatgtaagaaagttggaaaatgcaaagaaatgactcgttgtaagcacataactc

SEQ ID NO: 14335 - DNA, 201 bp, Homo sapiens
aaaactatcgcgggaatgtggctgttaccgtgtccgggcacacctgtcagcactggagtgcacagacccctcacacacataacaggacaccagaaaacttyccctgcaagtaagtcccctccggtctcattctgctgctatggaatgtgaaatcccattgactttgccttagttttagttactgtaggaacgcaggataaa

SEQ ID NO: 14336 - DNA, 201 bp, Homo sapiens
aaaacctttagatttttatgaattcctcctcaagctttatagtcaactatatgagtggattgccctctgtggatttgatagcaattttttaaatgattcaygtttcaacttgttaaaaacatttaatttagttaaaaaccaaacaaaaaagagctttgtttcttttcacattcatttctcagtttagatcatctttaatta

SEQ ID NO: 14337 - DNA, 201 bp, Homo sapiens
aattattcattgtagggctgggcacggtggctcacgcctgtaatcccagcacttccggaggccgaggtgggcggatcacgaggtcaggagttcaagaccarcctggccaatatgatgaaaccccacctctactaaaaatacaaaaaaattagccagttgtggtgacacgcacctgtagtctgagctactcgggaggctgag

SEQ ID NO: 14338 - DNA, 201 bp, Homo sapiens
acatttattaatcaatctgaatgtgtaaaacctttagatttttatgaattcctcctcaagctttatagtcaactatatgagtggattgccctctgtggatytgatagcaattttttaaatgattcatgtttcaacttgttaaaaacatttaatttagttaaaaaccaaacaaaaaagagctttgtttcttttcacattcat

SEQ ID NO: 14339 - DNA, 201 bp, Homo sapiens
aacatccatctgtgcattctctattttaaaattattcattgtagggctgggcacggtggctcacgcctgtaatcccagcacttccggaggccgaggtgggyggatcacgaggtcaggagttcaagaccaacctggccaatatgatgaaaccccacctctactaaaaatacaaaaaaattagccagttgtggtgacacgcac

SEQ ID NO: 14340 - DNA, 201 bp, Homo sapiens
tccttgtgaaagggtctcacaggcatagatgctactaaattgatttcatctgaaaacatgaaacaattctcaagtgccaaattccaagagaggctgagcaraagccaagacaggccagaacaccctgcagccatcctccttaacatccatctgtgcattctctattttaaaattattcattgtagggctgggcacggtggc

SEQ ID NO: 14341 - DNA, 201 bp, Homo sapiens
tctccaagtgcagtcttgctgggtttttatggaggcttcattacagaggcacagttgaatacatcgttggccattggagaccagctcaccttcagctcctrttccctccctggaagttggacgtggggggctgaacagttccaaccctgcaatcacatggttggttcctttggcaaccagccccatcctgagactatccaa

SEQ ID NO: 14342 - DNA, 201 bp, Homo sapiens
aggtaggaagaactgagcaaagagaacatagaaagaagcacctacccaagggtctttctctgaaggagttccttgtgaaagggtctcacaggcatagatgstactaaattgatttcatctgaaaacatgaaacaattctcaagtgccaaattccaagagaggctgagcaaaagccaagacaggccagaacaccctgcagcc

SEQ ID NO: 14343 - DNA, 201 bp, Homo sapiens
atgctacacgagaaatcaagtgtttttagagggtctgccatgtggaaggaagcctcagtgcactctctcaaggaggcagaggtgtgacttttggcacaacrtgagtgggctgtgcctttaggacaggtgcaaaccctccaaggtgctcaacttaaccactcaccttgttctaaaatgggttatctcagtatcccagtccaa

SEQ ID NO: 14344 - DNA, 201 bp, Homo sapiens
gaccatattttcctcttgacatcctcatcttttctaggtccccaaggccttcatcctacaaggtcatcctgggtgcacaccaagaagtgaatctcgaaccrcatgttcaggaaatagaagtgtctaggctgttcttggagcccacacgaaaagatattgccttgctaaagctaagcaggtactcgttcacctgtggtcttc

SEQ ID NO: 14345 - DNA, 201 bp, Homo sapiens
ggcctgacaatgaactactgcaggaatccagatgccgataaaggcccctggtgttttaccacagaccccagcgtcaggtgggagtactgcaacctgaaaawatgctcaggaacagaagcgagtgttgtagcacctccgcctgttgtcctgcttccagatgtagagactccttccgaagaaggtaagaaatctgtggctgga

SEQ ID NO: 14346 - DNA, 201 bp, Homo sapiens
acatgctagctgtgctcttgagaaaggcagcaggactccgttttctcatgtggaaaaagagttgaaatgaggtactctgttactcctagaactcacttaaygttcaccagttcatacacattcatgatcagagaacgattcagttattccaggctgacaattcccccttcatcataatatgtttaagagaatcatataaga

SEQ ID NO: 14347 - DNA, 201 bp, Homo sapiens
taccacagaccccagcgtcaggtgggagtactgcaacctgaaaaaatgctcaggaacagaagcgagtgttgtagcacctccgcctgttgtcctgcttccaratgtagagactccttccgaagaaggtaagaaatctgtggctggacatctacacacttggacgctgggatgaaaagccatggaaaatctcactgatgcaga

SEQ ID NO: 14348 - DNA, 201 bp, Homo sapiens
ttgattcatagctacccattctacttccagtaaacagaaagttttatttggttaatgctaaccaaatagattaaaaggaagtcatgacaattagacattgrcattgatttactgaccatttattccacttggatctcccacctctaggtcaaggagagcctctggatgactatgtgaatacccagggggcttcactgttca

SEQ ID NO: 14349 - DNA, 201 bp, Homo sapiens
aacagaagcgagtgttgtagcacctccgcctgttgtcctgcttccagatgtagagactccttccgaagaaggtaagaaatctgtggctggacatctacacrcttggacgctgggatgaaaagccatggaaaatctcactgatgcagaaaccttccatgctacacgagaaatcaagtgtttttagagggtctgccatgtgga

SEQ ID NO: 14350 - DNA, 201 bp, Homo sapiens
agatgcggccctgcaccttctgagggggaccattaagagatgaagttgactaaagcagagactttgtgtaggtgacgggcttgggaaggtagctatggaakccagactgagcacccatagcaggaccacgggatggagatgggaggggtcaggggccagggtggggtggaatgtggagcagaggttcaggggaactgatca

SEQ ID NO: 14351 - DNA, 201 bp, Homo sapiens
gcatgtaacacagccatgcttattaatgatgaggagacagccaatgaaaattaattttttcaaagatgaatagatatctagattttttcaagcacaactcrtttaagaaaatatcacctcactgagccccaaatgagttaggtctcacttagaaagtgtcccctagtgccaggtaaagtgcctcatatttgcaatcccagc

SEQ ID NO: 14352 - DNA, 201 bp, Homo sapiens
cgtggggggaacagacatgggtgggcacactagcaaacacctgccagctgcatgtggacccaggtgggcaccggactgttttaaacacaggagagggcccrttgtctaactggtgagttggttgagtggaagctggttgagaacttttactgcaaaccatttacagtagaccacaattttatagccctgtttggcactttt

SEQ ID NO: 14353 - DNA, 201 bp, Homo sapiens
acatgaaaggaaacattgtggaggaaagcagctccaggaatgtccatagaaaagtcctcaagtctttggctaaatagaaagctgcatatgcacagggagargttccagagagaaaataggataaagaacagctactggggaaagaaaaactgcaggggaacagtgagctcaatggagatgccagagctcacatagcactgg

SEQ ID NO: 14354 - DNA, 201 bp, Homo sapiens
aaccaatgcgctctgcagtgtgtcatctttcagaacctcccctgaccgcatgttccctggagggctcgctgtcttcagagccaggcttgtctcctgctgcmgcctccactgttctcctagtcactctgtaacccaccccctctgcctgcggcccccaccacgcccctcaaagtggtcaaggttgtcctgttgtctaattcc

SEQ ID NO: 14355 - DNA, 201 bp, Homo sapiens
aacttagtgcttgttactcacctttatccattcccccaacactcaacaaattgcctttgctatatccctatgagatgagcagatcaaatattccccgtgasttaatgaaaactgattcaaccaaatggcaaagtcagagactatcgggggccatggagacactctgggccatttttatgaggtagtctaggctcatcttta

SEQ ID NO: 14356 - DNA, 201 bp, Homo sapiens
tttagtgcatttttttgtacttttcccagtttggtgttaggtggcattaagttctcagtaatgacgcttatcaaataggaacttagtgcttgttactcacytttatccattcccccaacactcaacaaattgcctttgctatatccctatgagatgagcagatcaaatattccccgtgagttaatgaaaactgattcaacc

SEQ ID NO: 14357 - DNA, 201 bp, Homo sapiens
tgtaggtatgttaggagcactttccccatgtgattgatcaattaattaaaaaatggctaaagtgggtaaccttaaatgatggtgtaaatataccttaaacrttttatattttcattgaaaacacaagtgtacttgacaccttttgacgtagagcagaggcttttcttcttcgaatatggggtcaccagtagaaggtctctg

SEQ ID NO: 14358 - DNA, 201 bp, Homo sapiens
atcaagttagaactctcatcacatgttcgactcaaattgtggagcaaaagagtaaataagatataaaaatgaaaatgaagatacgtgaaattcaaatgttrcaacttgcctattatttattttagtgcatttttttgtacttttcccagtttggtgttaggtggcattaagttctcagtaatgacgcttatcaaataggaa

SEQ ID NO: 14359 - DNA, 201 bp, Homo sapiens
atgagtgtcttatgtctactgtaatactatgtcccaatgaagatgtacttgcaatcataatacgcagtattgggttaaaagcattagtttgctgtaggtaygttaggagcactttccccatgtgattgatcaattaattaaaaaatggctaaagtgggtaaccttaaatgatggtgtaaatataccttaaacattttatat

SEQ ID NO: 14360 - DNA, 201 bp, Homo sapiens
cttttgatgagtgtcttatgtctactgtaatactatgtcccaatgaagatgtacttgcaatcataatacgcagtattgggttaaaagcattagtttgctgyaggtatgttaggagcactttccccatgtgattgatcaattaattaaaaaatggctaaagtgggtaaccttaaatgatggtgtaaatataccttaaacatt

SEQ ID NO: 14361 - DNA, 201 bp, Homo sapiens
aatgtggagcagaggttcaggggaactgatcagagttgggaggtcatggagacggactatcttggcgaatgggttcaaagcaaccagagttgcttctttcyaacccaaaaacaaaaattaagaagatgagtgaagaagaagtaaagcagttgaaacaggaagaaagggaaaattatgagggagggaaggtaagggcagata

SEQ ID NO: 14362 - DNA, 201 bp, Homo sapiens
ctctctgtgctaaagggaaatcagacccatgctctctgacacatggatttcattttcaaccagagttctaatagttgttttgtaaacaaagagtgtctttstttacaatgttcaggtctgtgggtgtccagtttttccaccttggggagcagagggtgagtggtgggggtggggaagagttcaagaggagaagatgaaatg

SEQ ID NO: 14363 - DNA, 201 bp, Homo sapiens
gaggtgggcggatcacgaggtcaggagttcaagaccaacctggccaatatgatgaaaccccacctctactaaaaatacaaaaaaattagccagttgtggtracacgcacctgtagtctgagctactcgggaggctgaggcaggagaatgacttgaacccaggaggcagaggttgcagtgagctgagatcgtgccactgact

SEQ ID NO: 14364 - DNA, 201 bp, Homo sapiens
aggaccacgggatggagatgggaggggtcaggggccagggtggggtggaatgtggagcagaggttcaggggaactgatcagagttgggaggtcatggagayggactatcttggcgaatgggttcaaagcaaccagagttgcttctttccaacccaaaaacaaaaattaagaagatgagtgaagaagaagtaaagcagttga

SEQ ID NO: 14365 - DNA, 201 bp, Homo sapiens
ttccaaacaagaacctgaagaagaattactgtcgtaaccccgatagggagctgcggccttggtgtttcaccaccgaccccaacaagcgctgggaactttgygacatcccccgctgcagtgagtatgatgcacacccagattccaggatttggacctgccctgttcttgaaatcaaaagaaaacatgtgtcagtgcctgagt

SEQ ID NO: 14366 - DNA, 201 bp, Homo sapiens
ctgaatctgatttgaataataaccagatcctcagctgatgtgcacacacattcaaacactaatgtcagtaatgaatacattaacatctgtcttcagaaatrcacacacacatgttgctggtgtattttccaaatattttccttttctctttactccttgtctttcttttccctttgtaccaatgagattcaagtctcctaa

SEQ ID NO: 14367 - DNA, 201 bp, Homo sapiens
gtgtatttcctgcataaactatgctccagtgcaacatctacaataattactttccttatttttgaagtggaccatatctcgacatttattaatcaatctgmatgtgtaaaacctttagatttttatgaattcctcctcaagctttatagtcaactatatgagtggattgccctctgtggatttgatagcaattttttaaat

SEQ ID NO: 14368 - DNA, 201 bp, Homo sapiens; identical to SEQ ID NO: 2726

SEQ ID NO: 14369 - DNA, 201 bp, Homo sapiens
tgggaaaaacattccatgtttaattaaggctctgcagctctatcagacatttgctgtcatttagatattttagcattcctcaagaagtgaacgcctgatgwttttaatttcaaagctaacctcctcccacaatattgcaagtgaaatacgcattcttgctgctcaaaatatggtccacgggtcagcagcagggatgttttc

SEQ ID NO: 14370 - DNA, 201 bp, Homo sapiens
gaatgaaaatctgttcatttgctttcctactggatacttgtcatcagcatacaaaccaatgcgctctgcagtgtgtcatctttcagaacctcccctgacckcatgttccctggagggctcgctgtcttcagagccaggcttgtctcctgctgcagcctccactgttctcctagtcactctgtaacccaccccctctgcctg

SEQ ID NO: 14371 - DNA, 201 bp, Homo sapiens
ttaagctgaaataaaacaattccaggaaaatatataatattttcacaaacttgaggaaggcaaaatttttttcaggcaggacccagaaaacactagctttraaagaaaataaattataatttgggctttcataaaatgaaaattatgttcatcaaaagtcattgttaagaaatcagtaggtaagtaacagactggaataaa

SEQ ID NO: 14372 - DNA, 201 bp, Homo sapiens; identical to SEQ ID NO: 2658

SEQ ID NO: 14373 - DNA, 201 bp, Homo sapiens
tctgcagtgtgtcatctttcagaacctcccctgaccgcatgttccctggagggctcgctgtcttcagagccaggcttgtctcctgctgcagcctccactgytctcctagtcactctgtaacccaccccctctgcctgcggcccccaccacgcccctcaaagtggtcaaggttgtcctgttgtctaattccatggagcttgc

SEQ ID NO: 14374 - DNA, 201 bp, Homo sapiens; identical to SEQ ID NO: 2659

SEQ ID NO: 14375 - DNA, 201 bp, Homo sapiens
tttctttgtgatcttttgatatatctctcaagtgctttttagtggattagctttagaatgcatcagccaactcctgctcaataatccatttttccagcccrgaatgtcttaaattgaggaaggacaaagtcccagaggtggggagcagggggactttggccgaggactttgcatgaatcgatgagcatgcatccacctccc

SEQ ID NO: 14376 - DNA, 201 bp, Homo sapiens
agctccctgtgattgagaataaagtgtgcaatcgctatgagtttctgaatggaagagtccaatccaccgaactctgtgctgggcatttggccggaggcacygacagttgccaggtaagcaaagatcaagagaccaaagttagtcttgtgctctcttgtctcagtctcagtccctcagacttcattccccaggtggcaaatt

SEQ ID NO: 14377 - DNA, 201 bp, Homo sapiens; identical to SEQ ID NO: 2662

SEQ ID NO: 14378 - DNA, 201 bp, Homo sapiens; identical to SEQ ID NO: 2663

SEQ ID NO: 14379 - DNA, 201 bp, Homo sapiens
ccagcctgaggagagacctcgctgaacatcttgggcattcagtagtcaccacataaagccaaactttgggagtaggattagtgtattcctataataaaggycactccagaaacagcatagtaaagctgaaaagcaagtctaaaaaaatcaacacgatctccaagtaaattaactgattgccagaagaaaattcaacccttt

SEQ ID NO: 14380 - DNA, 201 bp, Homo sapiens; identical to SEQ ID NO: 2754

SEQ ID NO: 14381 - DNA, 201 bp, Homo sapiens
ttggattaagcaaaaaagagaaattattagtgaactgaaaattctgcaggctcacatcatggccccagaccctgtccattattcttgggcacaaatgtgayattctcgtggctgcagatgctgtggtggctctggctctgccaggaaaagaaataaggaaggccactctccccattacacaaacaatagtcttccagctct

SEQ ID NO: 14382 - DNA, 201 bp, Homo sapiens
tccatatcatcctgggtctctgtggctcttcataatcatccattttttccctgtacagactgtatgtttgggaatgggaaaggataccgaggcaagagggygaccactgttactgggacgccatgccaggactgggctgcccaggagccccatagacacagcattttcactccagagacaaatccacgggcgggtctggaa

SEQ ID NO: 14383 - DNA, 201 bp, Homo sapiens
ccaggctgctcccagtgttttgcatttttaaaaatttaaatgctgcaaacctctatgaattacatattattgttcctagtttacaaatgaggagcctgagkctcagagaatgtgtgggatggtacagactaacctgaattagaaccctggctcccatttactggctgtcaggacttagaaaagtcataaactctctggctg

SEQ ID NO: 14384 - DNA, 201 bp, Homo sapiens
catggcacaatcaatagcaaacataaaatttgttcttgtttaaggatttatatccactaatatggtaacatagtagtggttccatagttctaacctgtttrtcaatccagttaatcttttactatcttgcaatctgctaatgaaactgtttttctttgttttataatttcaacttttagagtcaggggtacatgtgcaggt

SEQ ID NO: 14385 - DNA, 201 bp, Homo sapiens
ggaggctgaggcaggagaatgacttgaacccaggaggcagaggttgcagtgagctgagatcgtgccactgactccagcctgggcgacagagcgagactccrtctcaaaaaatatatatattcattgtaacttattttgcccattcaagcaacacctccaccatcttctggtcccacctaccagtgtctgaagggaacaggt

SEQ ID NO: 14386 - DNA, 201 bp, Homo sapiens
catacaaaccaatgcgctctgcagtgtgtcatctttcagaacctcccctgaccgcatgttccctggagggctcgctgtcttcagagccaggcttgtctccygctgcagcctccactgttctcctagtcactctgtaacccaccccctctgcctgcggcccccaccacgcccctcaaagtggtcaaggttgtcctgttgtct

SEQ ID NO: 14387 - DNA, 201 bp, Homo sapiens
tccatgcccgactgtgcctagcacacagcaggtgctcaatgtttgctcttgaaaaagagtcttatccatgaatgtaaatgttcagtgctactaaaatcttkcttgtccattcagatttccaaacaagaacctgaagaagaattactgtcgtaaccccgatagggagctgcggccttggtgtttcaccaccgaccccaacaa

SEQ ID NO: 14388 - DNA, 201 bp, Homo sapiens
aggactttgcatgaatcgatgagcatgcatccacctccctgtcctgccccttgtgctctgtgtaccctcaggaggtcaggacaggcctttctgagaatgaraatctgttcatttgctttcctactggatacttgtcatcagcatacaaaccaatgcgctctgcagtgtgtcatctttcagaacctcccctgaccgcatgtt

SEQ ID NO: 14389 - DNA, 201 bp, Homo sapiens
tgggcactgctggccagtcccaaaatggaacataaggaagtggttcttctacttcttttatttctgaaatcaggtaagacatagtttttttaaattataakaattattttttctcccacaatgtagtaaaaatacatatgccatggctttatgtgcaattcatttaatttttgattcatgaaacttccagttgaaaatctt

SEQ ID NO: 14390 - DNA, 201 bp, Homo sapiens
ttttgttttcttggtttaatcaaacatttaaaaacgaatggtctagatgatttcaaagtggctttccttttcctgtgcttttcctactatttaaaaacttyacctccttgatttcttgatctccctttctgcactgctgggtctgggagcattgaggccaagtaaaaggaaccttggcaaaggaggaacacctatgggtgt

SEQ ID NO: 14391 - DNA, 201 bp, Homo sapiens
gcctatgggtgtcattacatgtgagatgggtctcttgaaggtagcataccagtgggtcttgctttttatccagcttgccactctgtgcctcttaagttggrcatttagcccatttacattcaaggttagtattgctatgtgtgaatttgatgccctcattgtgttgttatgctggcttgtttgtgtgatggttttatagtg

SEQ ID NO: 14392 - DNA, 201 bp, Homo sapiens; identical to SEQ ID NO: 2632

SEQ ID NO: 14393 - DNA, 201 bp, Homo sapiens
taagtttaattagatcccatttgtcaatttttgcctttgttgagattgcttttggcatcttcatgaaatttttgcccgttcctatgtccaggatggtgttrcctaggttgtcttccaggatttttgtacttttggattttacatttaagtctttaatccatcttgagttgatttctgtatatggtgtaaggaaaggggtcc

SEQ ID NO: 14394 - DNA, 201 bp, Homo sapiens
taagaataacggcctccagctccattcatgttcctgtaaaagatattacctcattctttcttatggctaaacagtattccatggtgtatatgtaccacatwttcttcatccaatgtgtcattgatggtcatataggtgattccatgtctttgctactgtgaatagtgctgcaatgaacattcatgtgcatgtgtctttagg

SEQ ID NO: 14395 - DNA, 201 bp, Homo sapiens
gaatgcctagtttaaaaaaaatcaatgaaactatgagttttaggccaaatctgagaaaagatcaaagatgactatgtttgggactgaagtaagcatatcargttagaactctcatcacatgttcgactcaaattgtggagcaaaagagtaaataagatataaaaatgaaaatgaagatacgtgaaattcaaatgttgcaac

SEQ ID NO: 14396 - DNA, 201 bp, Homo sapiens
agcaccaggaaggcaggggaagatgcggccctgcaccttctgagggggaccattaagagatgaagttgactaaagcagagactttgtgtaggtgacgggcytgggaaggtagctatggaatccagactgagcacccatagcaggaccacgggatggagatgggaggggtcaggggccagggtggggtggaatgtggagcag

SEQ ID NO: 14397 - DNA, 201 bp, Homo sapiens
cttattaataaacatttgttttctttaaataaagaaaaatacttattggatttcctgcttcgttctgcagggcattccaatatcacagtaaagagcaacartgtgtgataatggctgaaaacaggaagtcctccataatcattaggatgagagatgtagttttatttgaaaagaaaggtgagtacattttcttcctcctcc

SEQ ID NO: 14398 - DNA, 201 bp, Homo sapiens
gcagtatcttgcatgcaactgatgcctttcaaatgaaaccttacatctgcatagtccatagacaaccacaggcaaatgtgagggtgaaactctgtgttctrcgttgctctgtgtcagtgaagcaaggcagtgccagttcagagggctctggggcctcaagacagggatgactggttgtgggtactgcagctgcgagcagag

SEQ ID NO: 14399 - DNA, 201 bp, Homo sapiens; identical to SEQ ID NO: 2684

SEQ ID NO: 14400 - DNA, 201 bp, Homo sapiens
ctgtgcagaccttcatgtggtgtcttgtgaaagactttgaccactgtgtggacttcccttcagtgtatctctcagagtgcaagactgggaatggaaagaaytacagagggacgatgtccaaaacaaaaaatggcatcacctgtcaaaaatggagttccacttctccccacagacctaggtaagacattccctttcatcttt

SEQ ID NO: 14401 - DNA, 201 bp, Homo sapiens
agcagtcaaacataactgctgatgcttttctttcagtcctgccgtcatcactgacaaagtaatcccagcttgtctgccatccccaaattatgtggtcgctraccggaccgaatgtttcatcactggctggggagaaacccaaggtgagataaattccattgcccacataacgaattggttttgacctacagtccatgtgac

SEQ ID NO: 14402 - DNA, 201 bp, Homo sapiens
tgttgggagtatgaggcttggatcaggggaaggggagttgacattagttcttaaagaattggaataacaaatccatgggtatttctgaaaaaaaaaaaaaraaaaagaaaggaagctacttggaattgtcccatatttaacattctgctgaccaatcaatttgtcctagttacagaaaaccaccctggacttctcctatgc

SEQ ID NO: 14403 - DNA, 201 bp, Homo sapiens
aagcctgccattcccccatctaaaaagccctttccccattctctcactctgtctcatcatgtatgtaatatgtatcatcattaagtgatctcattttataytgtttccttgaatatttcctgtaacccccctgcctgattccactagaatgtaagctccatgacggccaagcctctggctgcactgtgccccgtgtgtccc

SEQ ID NO: 14404 - DNA, 201 bp, Homo sapiens
atccctacactttgggaggctgagacaagcagatcacctgaggtcaggagttcgagactagcctggccaaaatggtgaaacctcatctctactgaaaatasaaaaaaaaattagccaggtgtggtggcgtgcacctgcagttgcagctactcaggaggctgaagcaggagaatcgcttgaacccaggagatggaggttgca

SEQ ID NO: 14405 - DNA, 201 bp, Homo sapiens
agaattggttctgtgttacagaaaatctgacctggactgctcttttttgtaatgggggagaggggacagaagaaaatattggaaaggcatcagggggctamgctagaatataattggccttagtatggaaagtacaagcagcacaggccaggaaacctccacacatgtgagggttctcaggcctcttccctttagtgacat

SEQ ID NO: 14406 - DNA, 201 bp, Homo sapiens
gaaatgactcgttgtaagcacataactcacgtggggggaacagacatgggtgggcacactagcaaacacctgccagctgcatgtggacccaggtgggcacsggactgttttaaacacaggagagggcccgttgtctaactggtgagttggttgagtggaagctggttgagaacttttactgcaaaccatttacagtagacc

SEQ ID NO: 14407 - DNA, 201 bp, Homo sapiens
aaagtcctcaagtctttggctaaatagaaagctgcatatgcacagggagaggttccagagagaaaataggataaagaacagctactggggaaagaaaaacygcaggggaacagtgagctcaatggagatgccagagctcacatagcactgggggatatttgagttctgaccagcctgaggagagacctcgctgaacatctt

SEQ ID NO: 14408 - DNA, 201 bp, Homo sapiens
ttaagagtcaatatcacttctcaccaaattgatctttggattcagcccatacccaattgttaaggaagaaattacaagatctaaataaagatatatcatgyttatatattaaaagagtcaatatcacttctcaccaaattgatctttggattcagcccatacccaaccagaatctcagcagtcgttttttttaaaaaatgt

SEQ ID NO: 14409 - DNA, 201 bp, Homo sapiens
catggtgaaaccccatctctactaaaaatacaaaaattagctgggcatggtggcacgtgcctgtaatcccagcaactcaggaggctgaggcaggagaatcscttgaacccaggaggtggaggttgcagtgagctgagatcgtgccattacggtccaacctgggtgacagagcgagactcaaaacaaacaaacaaacaaaca

SEQ ID NO: 14410 - DNA, 201 bp, Homo sapiens
gtcgggcagatcatggggtcaggagtttgagaccagcctgaccaacatggtgaaaccccatctctactaaaaatacaaaaattagctgggcatggtggcakgtgcctgtaatcccagcaactcaggaggctgaggcaggagaatcacttgaacccaggaggtggaggttgcagtgagctgagatcgtgccattacggtcca

SEQ ID NO: 14411 - DNA, 201 bp, Homo sapiens
acctccctttcacaaagtaccttgagtttacacttttgatgagtgtcttatgtctactgtaatactatgtcccaatgaagatgtacttgcaatcataatasgcagtattgggttaaaagcattagtttgctgtaggtatgttaggagcactttccccatgtgattgatcaattaattaaaaaatggctaaagtgggtaacc

SEQ ID NO: 14412 - DNA, 201 bp, Homo sapiens
tgtctttagttgccatctttatttatgtccaaatgcccgactgtgtgttcttaactaaacattttgattcatagctacccattctacttccagtaaacagmaagttttatttggttaatgctaaccaaatagattaaaaggaagtcatgacaattagacattgacattgatttactgaccatttattccacttggatctcc

SEQ ID NO: 14413 - DNA, 201 bp, Homo sapiens; identical to SEQ ID NO: 2648

SEQ ID NO: 14414 - DNA, 201 bp, Homo sapiens
ttgcatttttcagactctacattttaaacattattctttatagttttaaaagcaaaaagtaaagaaacaacaaccaaccccaaaccaacacgacaaagccsagattgttaattccagggctcaggaacacagaatcatatatgatgtttacactctgcagggtcagagactccagcggcattgggagctgcctcgtgttct

SEQ ID NO: 14415 - DNA, 201 bp, Homo sapiens
tatatatggatagtagaaggatggcatcccataataaaaggcaggcagcctaaccctcacatgcatttttctctccctctgtatagggtgacagtggaggkcctctggtttgcttcgagaaggacaaatacattttacaaggagtcacttcttggggtcttggctgtgcacgccccaataagcctggtgtctatgttcgtg

SEQ ID NO: 14416 - DNA, 201 bp, Homo sapiens
acaaacaatagtcttccagctctgagaggtcgaacttgtgtcaccagcctgcccctaaacccgtcactgattaactccaacctgcatcagctgttccatgmtggaggtggacgcaggaccacactcataccaagatgggggcaaagtgtagttccctcaacaggattataggatatagtgtgataggctgctgggcagcca

SEQ ID NO: 14417 - DNA, 201 bp, Homo sapiens
aattaacctgaattttttttttttctgagacagagttttgctctcgttgcccaggctagagtgcaaccgtgcaatctcggctcaccacaacctccgcctcygggttcaagagattctgctacctcagcctcccaagtagctgggattacaggcatgtgccaccatgcctggctaattttatatttttagtagagacagggt

SEQ ID NO: 14418 - DNA, 201 bp, Homo sapiens
agatgtattttctccttacgaacatttccttttctctagcttactttattgtaagaatacagtatatcatacatataacatacaaaatacatgttattaamtgttgctggtcaacagcaggctgttagtagttaagtttttgagagtcagagttatacctggattttctactgtgtatggtcagtgtgccaacccctgaaa

SEQ ID NO: 14419 - DNA, 201 bp, Homo sapiens
ttttaagtgccataactacctcaggccactcaccctcctggggtgtgctggtggccagggactaaagtggtgacttttccggtagggaaggaggtagaggrtacaggacagagaccaactgcacacactttacactgatgcccaggctagcccagtctaaaggaaacaccaacataggaagggatgtgtgcaggattcaca

SEQ ID NO: 14420 - DNA, 201 bp, Homo sapiens
aactctgtgctgggcatttggccggaggcactgacagttgccaggtaagcaaagatcaagagaccaaagttagtcttgtgctctcttgtctcagtctcagyccctcagacttcattccccaggtggcaaattcaaggattttcaaccgaagaccccagtctaagtgttgtttagaaacttcctagatctgtccctgaatgc

SEQ ID NO: 14421 - DNA, 201 bp, Homo sapiens
aaaaagagaaattattagtgaactgaaaattctgcaggctcacatcatggccccagaccctgtccattattcttgggcacaaatgtgatattctcgtggcygcagatgctgtggtggctctggctctgccaggaaaagaaataaggaaggccactctccccattacacaaacaatagtcttccagctctgagaggtcgaac

SEQ ID NO: 14422 - DNA, 201 bp, Homo sapiens
tgatcaagaataaaactattttaaatattttctttatttatttattttaccatttctggtgcttctcatctactggggtagatctcaatttccatctggtrtcagtttctttctgtgaaaaacaacttttagcattttttgtagcacaggtctgctactgctgaagtctttcagattttgagtgtctgaaaaagtattttg

SEQ ID NO: 14423 - DNA, 201 bp, Homo sapiens
aaaatcctgagtccttattgccaattttattgccaagtgcctgttgtgaattacatcggaatgagaggcaagtcgcacttaagtgagtaggattctggttyttactctctattttgcttcatccatttcagttttcttcttcctctctgtccttccttcccactctgtccagaggaatgtatgcattgcagtggagaaaac

SEQ ID NO: 14424 - DNA, 201 bp, Homo sapiens
ttttgattcatagctacccattctacttccagtaaacagaaagttttatttggttaatgctaaccaaatagattaaaaggaagtcatgacaattagacatygacattgatttactgaccatttattccacttggatctcccacctctaggtcaaggagagcctctggatgactatgtgaatacccagggggcttcactgtt

SEQ ID NO: 14425 - DNA, 201 bp, Homo sapiens
gcatgagatctttttctcaacgtgactatgctgtgcagaccttcatgtggtgtcttgtgaaagactttgaccactgtgtggacttcccttcagtgtatctytcagagtgcaagactgggaatggaaagaactacagagggacgatgtccaaaacaaaaaatggcatcacctgtcaaaaatggagttccacttctccccaca

SEQ ID NO: 14426 - DNA, 201 bp, Homo sapiens
gcattttttgtagcacaggtctgctactgctgaagtctttcagattttgagtgtctgaaaaagtattttgccttcagtttttaaaagtaattttgctgaaygtagatactgggttgagagtttcatcacttgcaacactttaatgatgatgttccattatcttctgttttaaatagtttgactagtaatctgatctttgtt

SEQ ID NO: 14427 - DNA, 201 bp, Homo sapiens
ctgctgaagtctttcagattttgagtgtctgaaaaagtattttgccttcagtttttaaaagtaattttgctgaatgtagatactgggttgagagtttcatyacttgcaacactttaatgatgatgttccattatcttctgttttaaatagtttgactagtaatctgatctttgttcctatgttttcaataggtcatttttc

SEQ ID NO: 14428 - DNA, 201 bp, Homo sapiens; identical to SEQ ID NO: 2679

SEQ ID NO: 14429 - DNA, 201 bp, Homo sapiens
gcaagctgatttttagaatatagtctaagtgcttcttttccatcctccccagattctcacctgctacacacccctcagagggactggaggagaactactgmaggaatccagacaacgatccgcaggggccctggtgctatactactgatccagaaaagagatatgactactgcgacattcttgagtgtgaaggtcaggagt

SEQ ID NO: 14430 - DNA, 201 bp, Homo sapiens
agattcatatttaatgccttaatttctttaaaagataattgatgggaggctgagtcgggcagatcatggggtcaggagtttgagaccagcctgaccaacayggtgaaaccccatctctactaaaaatacaaaaattagctgggcatggtggcacgtgcctgtaatcccagcaactcaggaggctgaggcaggagaatcact

SEQ ID NO: 14431 - DNA, 201 bp, Homo sapiens
acggaaaaagggccccatggtgccatacaaccaacagccaagtgcggtgggagtactgtaagataccgtcctgtgactcctccccagtatccacggaacarttggctcccacaggtaagcaagggtatgggagcttactgagggcccaagttttctccttatttttgtataccagtggcatcatcacaatatacagtagct

SEQ ID NO: 14432 - DNA, 201 bp, Homo sapiens
tctgcttgaggtattctgagttcctagatttgtagattgttgatttttttcttttctcttttttcttttcttttctttttttttttttttttttttgagakggagcctcactctgtcacccaggctggagtgcagtggcgcaatctcggctcactgcaaactccacctcccaggttcaagtgattctcctgcttcagcctc

SEQ ID NO: 14433 - DNA, 201 bp, Homo sapiens
atgaaaccccacctctactaaaaatacaaaaaaattagccagttgtggtgacacgcacctgtagtctgagctactcgggaggctgaggcaggagaatgacktgaacccaggaggcagaggttgcagtgagctgagatcgtgccactgactccagcctgggcgacagagcgagactccgtctcaaaaaatatatatattcat

SEQ ID NO: 14434 - DNA, 201 bp, Homo sapiens
tgcagccatcctccttaacatccatctgtgcattctctattttaaaattattcattgtagggctgggcacggtggctcacgcctgtaatcccagcacttcrggaggccgaggtgggcggatcacgaggtcaggagttcaagaccaacctggccaatatgatgaaaccccacctctactaaaaatacaaaaaaattagccag

SEQ ID NO: 14435 - DNA, 201 bp, Homo sapiens
ccttaagcaccaccaatgcatcactgttatattaagtctgcccgttttccttagtactccataaaatttaagtcacatattactctgcctcaccatgttayttcaataattctgaatcaaagtttaagtttgtgaataattttgcaaaaaagagccaatcatgcttctcaacaacataaaaagagaagcgctgtcacttca

SEQ ID NO: 14436 - DNA, 201 bp, Homo sapiens
tgtttaaggatttatatccactaatatggtaacatagtagtggttccatagttctaacctgtttgtcaatccagttaatcttttactatcttgcaatctgytaatgaaactgtttttctttgttttataatttcaacttttagagtcaggggtacatgtgcaggtgtgttacataactaaattgcgtgacactgagctttg

SEQ ID NO: 14437 - DNA, 201 bp, Homo sapiens
ccctggtgctatactactgatccagaaaagagatatgactactgcgacattcttgagtgtgaaggtcaggagtggttctagaaaatgttttcatttctgcycttcacctgtaaaataatttgttgtaaagccccttcccacagggatgttattaataattgagtaacgtattcacctctcggaaagaagcaaaaccccaga

SEQ ID NO: 14438 - DNA, 201 bp, Homo sapiens
ctcacctgctacacacccctcagagggactggaggagaactactgcaggaatccagacaacgatccgcaggggccctggtgctatactactgatccagaasagagatatgactactgcgacattcttgagtgtgaaggtcaggagtggttctagaaaatgttttcatttctgcccttcacctgtaaaataatttgttgtaa

SEQ ID NO: 14439 - DNA, 201 bp, Homo sapiens; identical to SEQ ID NO: 2717

SEQ ID NO: 14440 - DNA, 201 bp, Homo sapiens; identical to SEQ ID NO: 2718

SEQ ID NO: 14441 - DNA, 201 bp, Homo sapiens
aaaagtgacctacaagtcctatgggatgttattggtctttattttattgctggtttaaaacagttatggttattggttactgtgggtgattgatcagagcrtccatttatcatgtttttctttctttgcaactgaaacttctgcctcaggagttcactgaaatgtaggctttaggtgttgttcatcctattctctctgtgc

SEQ ID NO: 14442 - DNA, 201 bp, Homo sapiens
gcttcgttctgcagggcattccaatatcacagtaaagagcaacaatgtgtgataatggctgaaaacaggaagtcctccataatcattaggatgagagatgyagttttatttgaaaagaaaggtgagtacattttcttcctcctcctcctactgtcctccccatcctcccactcttcctctttctctattctatctttaatt

SEQ ID NO: 14443 - DNA, 201 bp, Homo sapiens
gaaaaaccaagaccagtatttgtcccaggtcctgcttttttacaatttcctccgaaatccagatacctgtcaacaccttggaaaaactgacttctccccarttagtagtgttgtgtgactgtcataagcccagtacaaaaatggccttctttgttggggagcttcttaccctccagtgttttgcccaatttttgtccaagg

SEQ ID NO: 14444 - DNA, 201 bp, Homo sapiens
tctaaggatagacatgaaatgcgtgagccttggaacaccttctccctctcctgccccacgtgagctggagcttacatgccttcttgttttcagtactgccrtaaccctgatggtgatgtaggtggtccctggtgctacacgacaaatccaagaaaactttacgactactgtgatgtccctcagtgtggtaggttgccttct

SEQ ID NO: 14445 - DNA, 201 bp, Homo sapiens
caaagtatcaatttaactaaaatttgaactaaatcctctttccaggtttggaatgcacttctgtggaggcaccttgatatccccagagtgggtgttgactrctgcccactgcttggagaagtatgtttaggggacaattgacatgaagtcttgtcttaaatactttttctgtccttcttttcctcctttcctcctttcctt

SEQ ID NO: 14446 - DNA, 201 bp, Homo sapiens
acctacaactgggggagaggcggacaggtcccatggccccaggtctaggatggcatttggtattggttgatgggtgtggatgagaacaagagagggaacayttgtgcaggatatggtatcagcacctgtaatacattttagggattctttcttctctttgcagtatgccctgacaataattatatccatcagcctagtccc

SEQ ID NO: 14447 - DNA, 201 bp, Homo sapiens
ggtgtgatccattttttatttgtatatttccctacacctaaaacaagcaaaaaaacagtaaaggtctttgagtctcttaatccataatttcagcattcctragtatgcttccctgggtaagtggggttttcacccagccctcaagttaagagtgttagattatttttcatgtgaaattagccagactggctttcttaacac

SEQ ID NO: 14448 - DNA, 201 bp, Homo sapiens
tttttgaattgaaccctttaccattatgtaatgcccttctttgtcttttttggtctttgttggtttaaagtctgttttgtctgaaattaggatggcaaccyttgcttttttgtctgatttccatttgcttggtaggttctcctccatccctttattctgagcctatgggtgtcattacatgtgagatgggtctcttgaagg

SEQ ID NO: 14449 - DNA, 201 bp, Homo sapiens
agttttgcaaaattttaatgaaacctgggcttgcaaaattggaaaactagattatttgtgacgacactgagacatccctgggcatgtctatctggaaaaayggcattttctctggcaattttgcagacattctatttcaatttggcaaagaaaataaagcagtttttcacaaaggcagaaatacaactagaatgttcactc

SEQ ID NO: 14450 - DNA, 201 bp, Homo sapiens
ttgtcagctttgttaaaaatcagatgtctgtaggtgtgtggccttatttctgggctctctattctgttccactggtctacgtgtcttttttttttttttttaccagtaccatgctgtttttgttactgtagccctgaagtatagtttgaagccaggtaatgtgatgtctccagctttgttctttttgtttaggattgcctt

SEQ ID NO: 14451 - DNA, 201 bp, Homo sapiens
acacagtccaggtgatgcacccactgcccaatgcttggtagtcaagaggagcttcctccctgcagctctgcccagatagggctgagctgggctctggagcsaggcgctgggatgagcctcttccatgctgctcatgtaaactccagattcagtgtcggttttctgaacccgagacaatgatctaaatgcagtcgaaggctt

SEQ ID NO: 14452 - DNA, 201 bp, Homo sapiens
gtaattatgattaccaccaccattagcattatcattaccaccaccagtaccatcaccatcaccaccgccaccacctccatgatcattactacccaccaccrtcaccgtcaccatcatttcactaccagcacaattatcattaccaccaccatcactaccacccttatcacaaccctcatcatcaccaccattccaccactg

SEQ ID NO: 14453 - DNA, 201 bp, Homo sapiens
gaagtcactaattctgagtggccaagggtgtcagggagacagcaccaatttcatggcacagaggttacctgaaggggctggaccatattttcctcttgacrtcctcatcttttctaggtccccaaggccttcatcctacaaggtcatcctgggtgcacaccaagaagtgaatctcgaaccgcatgttcaggaaatagaagt

SEQ ID NO: 14454 - DNA, 201 bp, Homo sapiens; identical to SEQ ID NO: 2727

SEQ ID NO: 14455 - DNA, 201 bp, Homo sapiens
ttccttttcattcttttttcttaatttttgtcaactgtcttatttcagaaagccagtcttccatttctgagattctttcctcagcttggtttattttgctrttaatacttggattgctttgtgaaattcttacagtttgtttctcagctctcagctctgtcagatccattaggttcttttttaaaccagtgattttgtctt

SEQ ID NO: 14456 - DNA, 201 bp, Homo sapiens
agtattacggcaaaactctaagtagcattttaaatagtatttatttgggttggaattatttctatgcattgactcatcttcctgggtttcattagctgtaygcattgtacttccttccttaccactatttatctcgaattcttgagattaaagtgcagattaaatctaaactttatctggtgaagttattagttcttacaa

SEQ ID NO: 14457 - DNA, 201 bp, Homo sapiens
agtctcctaacctttgacctatgagcagacgtcatggatttttgaatccctgatgttttatgtatatttacatcaatgtgtttttctggaatgaggattcrtaacttccatcagattctctaaggggaccacgaatttaaaataagaataagcttcttgctctagaaagtcatgatggttcctagaataaggtttcgtgag

SEQ ID NO: 14458 - DNA, 201 bp, Homo sapiens
tttaaataaagaaaaatacttattggatttcctgcttcgttctgcagggcattccaatatcacagtaaagagcaacaatgtgtgataatggctgaaaacargaagtcctccataatcattaggatgagagatgtagttttatttgaaaagaaaggtgagtacattttcttcctcctcctcctactgtcctccccatcctcc

SEQ ID NO: 14459 - DNA, 201 bp, Homo sapiens
ctgtagccctgaagtatagtttgaagccaggtaatgtgatgtctccagctttgttctttttgtttaggattgccttggctattctggctcctttttggttmtatataaatttttgaagtagttttttaatagtgctgtgaagaatatcattggcagtttgataggaatagcaatgaatctgtaaattactttgggcagtat

SEQ ID NO: 14460 - DNA, 201 bp, Homo sapiens
ggcttgggaaggtagctatggaatccagactgagcacccatagcaggaccacgggatggagatgggaggggtcaggggccagggtggggtggaatgtggarcagaggttcaggggaactgatcagagttgggaggtcatggagacggactatcttggcgaatgggttcaaagcaaccagagttgcttctttccaacccaaa

SEQ ID NO: 14461 - DNA, 201 bp, Homo sapiens; identical to SEQ ID NO: 2687

SEQ ID NO: 14462 - DNA, 201 bp, Homo sapiens
tttgtgtaggtgacgggcttgggaaggtagctatggaatccagactgagcacccatagcaggaccacgggatggagatgggaggggtcaggggccagggtrgggtggaatgtggagcagaggttcaggggaactgatcagagttgggaggtcatggagacggactatcttggcgaatgggttcaaagcaaccagagttgct

SEQ ID NO: 14463 - DNA, 201 bp, Homo sapiens
ctgcatgacaggctgggccttctgatgatgctcagaagcagaaagtgtgcctgcttcaaagttggtgacgatgatgtttcttgatcagaatagggcatttyttatttccaatcctttatcctcttgaacttactaaagtagaatcaggtctaaaaaccggagttctaatgtttgagagtccctgggactctaaagtatatg

SEQ ID NO: 14464 - DNA, 201 bp, Homo sapiens
tgatctcaaagaaaaaccaagaccagtatttgtcccaggtcctgcttttttacaatttcctccgaaatccagatacctgtcaacaccttggaaaaactgayttctccccaattagtagtgttgtgtgactgtcataagcccagtacaaaaatggccttctttgttggggagcttcttaccctccagtgttttgcccaattt

SEQ ID NO: 14465 - DNA, 201 bp, Homo sapiens
ctttgtgtaggtgacgggcttgggaaggtagctatggaatccagactgagcacccatagcaggaccacgggatggagatgggaggggtcaggggccagggyggggtggaatgtggagcagaggttcaggggaactgatcagagttgggaggtcatggagacggactatcttggcgaatgggttcaaagcaaccagagttgc

SEQ ID NO: 14466 - DNA, 201 bp, Homo sapiens
ctcccacctctaggtcaaggagagcctctggatgactatgtgaatacccagggggcttcactgttcagtgtcactaagaagcagctgggagcaggaagtakagaagaatgtgcagcaaaatgtgaggaggacgaagaattcacctgcaggtatttccattgtcgttgcacctacgcaggaatctgtaattcagatggcaag

SEQ ID NO: 14467 - DNA, 201 bp, Homo sapiens
gccaccctctgccacgaccaggcagaaagcagctttcggacagattcgttgtctcagatttgatctcaaagaaaaaccaagaccagtatttgtcccaggtyctgcttttttacaatttcctccgaaatccagatacctgtcaacaccttggaaaaactgacttctccccaattagtagtgttgtgtgactgtcataagccc

SEQ ID NO: 14468 - DNA, 201 bp, Homo sapiens
atctcccacctctaggtcaaggagagcctctggatgactatgtgaatacccagggggcttcactgttcagtgtcactaagaagcagctgggagcaggaagyatagaagaatgtgcagcaaaatgtgaggaggacgaagaattcacctgcaggtatttccattgtcgttgcacctacgcaggaatctgtaattcagatggca

SEQ ID NO: 14469 - DNA, 201 bp, Homo sapiens
atcactagcattctgtgccaaggacggagctggcatctccaggcttggaatagagctaccaaagctcagccagatgtctggaagagcctcaggacaagggracaccctgtagccttgtggtgggagcacagctgaggcccccttggccaccctctgccacgaccaggcagaaagcagctttcggacagattcgttgtctca

SEQ ID NO: 14470 - DNA, 201 bp, Homo sapiens
aattagacattgacattgatttactgaccatttattccacttggatctcccacctctaggtcaaggagagcctctggatgactatgtgaatacccaggggscttcactgttcagtgtcactaagaagcagctgggagcaggaagtatagaagaatgtgcagcaaaatgtgaggaggacgaagaattcacctgcaggtattt

SEQ ID NO: 14471 - DNA, 201 bp, Homo sapiens
agtcatgacaattagacattgacattgatttactgaccatttattccacttggatctcccacctctaggtcaaggagagcctctggatgactatgtgaatrcccagggggcttcactgttcagtgtcactaagaagcagctgggagcaggaagtatagaagaatgtgcagcaaaatgtgaggaggacgaagaattcacctg

SEQ ID NO: 14472 - DNA, 201 bp, Homo sapiens
caccacgcccctcaaagtggtcaaggttgtcctgttgtctaattccatggagcttgcctgtcttcattttattagcctcttttggcctctcacccttgtgmaaatcactagcattctgtgccaaggacggagctggcatctccaggcttggaatagagctaccaaagctcagccagatgtctggaagagcctcaggacaag

SEQ ID NO: 14473 - DNA, 201 bp, Homo sapiens
aggaagtcatgacaattagacattgacattgatttactgaccatttattccacttggatctcccacctctaggtcaaggagagcctctggatgactatgtraatacccagggggcttcactgttcagtgtcactaagaagcagctgggagcaggaagtatagaagaatgtgcagcaaaatgtgaggaggacgaagaattca

SEQ ID NO: 14474 - DNA, 201 bp, Homo sapiens
ctgcggcccccaccacgcccctcaaagtggtcaaggttgtcctgttgtctaattccatggagcttgcctgtcttcattttattagcctcttttggcctctyacccttgtgcaaatcactagcattctgtgccaaggacggagctggcatctccaggcttggaatagagctaccaaagctcagccagatgtctggaagagcc

SEQ ID NO: 14475 - DNA, 201 bp, Homo sapiens
ggcctccaagttccatttctacccagggatgaacaaatcaacatcaatcttggtaacacaactgccactgatggtgccttactcttctctcatgacatggmacaatcaatagcaaacataaaatttgttcttgtttaaggatttatatccactaatatggtaacatagtagtggttccatagttctaacctgtttgtcaat

SEQ ID NO: 14476 - DNA, 201 bp, Homo sapiens
ccggaaaaactaagtggtgtggtttcgctaaacagattttgctaagtacttaagcactgcagatgcttgagtaatatgctcataagttcctttctgatttsaattactgggaaaatgtatatatggatagtagaaggatggcatcccataataaaaggcaggcagcctaaccctcacatgcatttttctctccctctgtat

SEQ ID NO: 14477 - DNA, 201 bp, Homo sapiens
cataagttccattttcttgggtatctcttaggaagcaagcataggaaacaggcccatccgtctgcctgttttgcttcctcatctcacttctacacgagggygcctgtgctcaattgctgttttcccctaaagagactcttttccataagtttgtgaaatgccatcgacaaacctgatcgcattgcatttcactctgctgtt

SEQ ID NO: 14478 - DNA, 201 bp, Homo sapiens
tggtactgtgtgacaactcagttctcccatcacttccacctgttcgaatcacggggatcctttatttgtacaccatgttataggtatttgcccttaagcaycaccaatgcatcactgttatattaagtctgcccgttttccttagtactccataaaatttaagtcacatattactctgcctcaccatgttacttcaataat

SEQ ID NO: 14479 - DNA, 201 bp, Homo sapiens
ttagtacaacgatgcatgtctactgtatgtaaggcatactagcagaaattgagctcagcactagagaagatgattgcattctatgccttgcttcttttttwaaaaaaaggcttccatagatagattctcagaacagcccatggcaaatgtaaagttatttggaaaacccaggttccagattcactagagcatagaatctct

SEQ ID NO: 14480 - DNA, 201 bp, Homo sapiens
cacctctaactcaaagtccctcgatggagtcagttccagttctccacttctggccccatctggtacacaccactgcctctcactgcccgggctctctatccttgacaggctgccttgaagttgagcccagactgattttcttgcctcagaccccactaccgtgcctgggactcatgcacctttgactcccatggaagggaa

SEQ ID NO: 14481 - DNA, 201 bp, Homo sapiens
ggcgacaagagcaaaactccacctcagaaaaaaaaaaaaaaaaaaagaaggaaggaaaaagaaacactcctttatgtcttctaaggatagacatgaaatgygtgagccttggaacaccttctccctctcctgccccacgtgagctggagcttacatgccttcttgttttcagtactgccgtaaccctgatggtgatgtagg

SEQ ID NO: 14482 - DNA, 201 bp, Homo sapiens
tgccactgcactccagcctgggcgacaagagcaaaactccacctcagaaaaaaaaaaaaaaaaaaagaaggaaggaaaaagaaacactcctttatgtcttctaaggatagacatgaaatgcgtgagccttggaacaccttctccctctcctgccccacgtgagctggagcttacatgccttcttgttttcagtactgccgt

SEQ ID NO: 14483 - DNA, 201 bp, Homo sapiens
gctcctgataataatatggaatagagttgtatctaacatgactctttcttgcaagtgacagaaaatgcaacttaagttggattaagcaaaaaagagaaatyattagtgaactgaaaattctgcaggctcacatcatggccccagaccctgtccattattcttgggcacaaatgtgatattctcgtggctgcagatgctgtg

SEQ ID NO: 14484 - DNA, 201 bp, Homo sapiens
cccaggagatggaggttgcagtgagctgagatcatgccactgcactccagcctgggcgacaagagcaaaactccacctcagaaaaaaaaaaaaaaaaaaaraaggaaggaaaaagaaacactcctttatgtcttctaaggatagacatgaaatgcgtgagccttggaacaccttctccctctcctgccccacgtgagctgg

SEQ ID NO: 14485 - DNA, 201 bp, Homo sapiens
aaatggtgaaacctcatctctactgaaaatagaaaaaaaaattagccaggtgtggtggcgtgcacctgcagttgcagctactcaggaggctgaagcaggakaatcgcttgaacccaggagatggaggttgcagtgagctgagatcatgccactgcactccagcctgggcgacaagagcaaaactccacctcagaaaaaaaa

SEQ ID NO: 14486 - DNA, 201 bp, Homo sapiens
cagagcagtcaaacataactgctgatgcttttctttcagtcctgccgtcatcactgacaaagtaatcccagcttgtctgccatccccaaattatgtggtcrctgaccggaccgaatgtttcatcactggctggggagaaacccaaggtgagataaattccattgcccacataacgaattggttttgacctacagtccatgt

SEQ ID NO: 14487 - DNA, 201 bp, Homo sapiens
gaacctgtagagtgaggacgtctgcatgacaggctgggccttctgatgatgctcagaagcagaaagtgtgcctgcttcaaagttggtgacgatgatgtttyttgatcagaatagggcatttcttatttccaatcctttatcctcttgaacttactaaagtagaatcaggtctaaaaaccggagttctaatgtttgagagtc

SEQ ID NO: 14488 - DNA, 201 bp, Homo sapiens
agagttcccaccccacatccccacaccccgagtctagggcatttagtgctccaccagggaacctgtagagtgaggacgtctgcatgacaggctgggccttytgatgatgctcagaagcagaaagtgtgcctgcttcaaagttggtgacgatgatgtttcttgatcagaatagggcatttcttatttccaatcctttatcct

SEQ ID NO: 14489 - DNA, 201 bp, Homo sapiens
tgtgggtgcctgtaatcccagctacttgggaggctgaggcaggagggtcacttgagtcccggagtttgaggctgcagtgagttatgatcgtgtcactgcaycagcctgggcgacagagtaagacactgtaccaaaaaaaaaaacaccaaaaaaacaaaaaacaaacaaaaaaaaaacaacttcacaatgtcaaaaaaatca

SEQ ID NO: 14490 - DNA, 201 bp, Homo sapiens
acccaggagatggaggttgcagtgagctgagatcatgccactgcactccagcctgggcgacaagagcaaaactccacctcagaaaaaaaaaaaaaaaaaaagaaggaaggaaaaagaaacactcctttatgtcttctaaggatagacatgaaatgcgtgagccttggaacaccttctccctctcctgccccacgtgagctg

SEQ ID NO: 14491 - DNA, 201 bp, Homo sapiens
gtatcttgcatgcaactgatgcctttcaaatgaaaccttacatctgcatagtccatagacaaccacaggcaaatgtgagggtgaaactctgtgttctacgytgctctgtgtcagtgaagcaaggcagtgccagttcagagggctctggggcctcaagacagggatgactggttgtgggtactgcagctgcgagcagagcag

SEQ ID NO: 14492 - DNA, 201 bp, Homo sapiens
gagcagtcaaacataactgctgatgcttttctttcagtcctgccgtcatcactgacaaagtaatcccagcttgtctgccatccccaaattatgtggtcgcygaccggaccgaatgtttcatcactggctggggagaaacccaaggtgagataaattccattgcccacataacgaattggttttgacctacagtccatgtga

SEQ ID NO: 14493 - DNA, 201 bp, Homo sapiens
aacccaggagatggaggttgcagtgagctgagatcatgccactgcactccagcctgggcgacaagagcaaaactccacctcagaaaaaaaaaaaaaaaaaaagaaggaaggaaaaagaaacactcctttatgtcttctaaggatagacatgaaatgcgtgagccttggaacaccttctccctctcctgccccacgtgagct

SEQ ID NO: 14494 - DNA, 201 bp, Homo sapiens
gaacccaggagatggaggttgcagtgagctgagatcatgccactgcactccagcctgggcgacaagagcaaaactccacctcagaaaaaaaaaaaaaaaaaaagaaggaaggaaaaagaaacactcctttatgtcttctaaggatagacatgaaatgcgtgagccttggaacaccttctccctctcctgccccacgtgagc

SEQ ID NO: 14495 - DNA, 201 bp, Homo sapiens
gtctgccatccccaaattatgtggtcgctgaccggaccgaatgtttcatcactggctggggagaaacccaaggtgagataaattccattgcccacataacraattggttttgacctacagtccatgtgacaaaatgatcattttggagaaagctgtgcaaattcctatccatgaatgtggtccaccccactcctgattttg

SEQ ID NO: 14496 - DNA, 201 bp, Homo sapiens
tgaacccaggagatggaggttgcagtgagctgagatcatgccactgcactccagcctgggcgacaagagcaaaactccacctcagaaaaaaaaaaaaaaaaaaagaaggaaggaaaaagaaacactcctttatgtcttctaaggatagacatgaaatgcgtgagccttggaacaccttctccctctcctgccccacgtgag

SEQ ID NO: 14497 - DNA, 201 bp, Homo sapiens
taccctccagtgttttgcccaatttttgtccaaggtggcaacataatttagttcagttcttgtttatttccaccatcatctatgcaccaaaatttatgttyctcaaggagggaccattcagaggatgcttcccaccggttcaagtgacagtgccagaaccaaagcgcatattgtaggaaatcaaacaatggcctccaagtt

SEQ ID NO: 14498 - DNA, 201 bp, Homo sapiens
agtgttgtgtgactgtcataagcccagtacaaaaatggccttctttgttggggagcttcttaccctccagtgttttgcccaatttttgtccaaggtggcarcataatttagttcagttcttgtttatttccaccatcatctatgcaccaaaatttatgtttctcaaggagggaccattcagaggatgcttcccaccggttc

SEQ ID NO: 14499 - DNA, 201 bp, Homo sapiens
tgtaaagccccttcccacagggatgttattaataattgagtaacgtattcacctctcggaaagaagcaaaaccccagaattaacctgaattttttttttttctgagacagagttttgctctcgttgcccaggctagagtgcaaccgtgcaatctcggctcaccacaacctccgcctccgggttcaagagattctgctacct

SEQ ID NO: 14500 - DNA, 201 bp, Homo sapiens
tggtttcgctaaacagattttgctaagtacttaagcactgcagatgcttgagtaatatgctcataagttcctttctgatttcaattactgggaaaatgtayatatggatagtagaaggatggcatcccataataaaaggcaggcagcctaaccctcacatgcatttttctctccctctgtatagggtgacagtggagggcc

SEQ ID NO: 14501 - DNA, 201 bp, Homo sapiens
aaaataatttgttgtaaagccccttcccacagggatgttattaataattgagtaacgtattcacctctcggaaagaagcaaaaccccagaattaacctgawttttttttttttctgagacagagttttgctctcgttgcccaggctagagtgcaaccgtgcaatctcggctcaccacaacctccgcctccgggttcaagag

SEQ ID NO: 14502 - DNA, 201 bp, Homo sapiens; identical to SEQ ID NO: 2690

SEQ ID NO: 14503 - DNA, 201 bp, Homo sapiens
attagtagtgttgtgtgactgtcataagcccagtacaaaaatggccttctttgttggggagcttcttaccctccagtgttttgcccaatttttgtccaagktggcaacataatttagttcagttcttgtttatttccaccatcatctatgcaccaaaatttatgtttctcaaggagggaccattcagaggatgcttcccac

SEQ ID NO: 14504 - DNA, 201 bp, Homo sapiens
gccagaagcagcctatcaatagagaaattgaaaatctgaccacacaaatgctgcagcacccagctgaaatgcatttggatgacaatctcagatgggaatcragagcatctccttctgccttgctaatagcaagctgatttttagaatatagtctaagtgcttcttttccatcctccccagattctcacctgctacacaccc

SEQ ID NO: 14505 - DNA, 201 bp, Homo sapiens
cagaaagcagctttcggacagattcgttgtctcagatttgatctcaaagaaaaaccaagaccagtatttgtcccaggtcctgcttttttacaatttcctcygaaatccagatacctgtcaacaccttggaaaaactgacttctccccaattagtagtgttgtgtgactgtcataagcccagtacaaaaatggccttctttg

SEQ ID NO: 14506 - DNA, 201 bp, Homo sapiens
cagtgagctgtgattgtaccactgcactccaacctgggtgacagcgagaccctgtctcaaaaaaaaaaaaaaaaaaaaaatagtttaaacagtagttaaaccagacctacaagaaagctttgccaagagtaagaaatgtgctgtcatcttttaaatcagtctgcacgggtattcttttttccttccttcctcatacaacaa

SEQ ID NO: 14507 - DNA, 201 bp, Homo sapiens
agtgagctgtgattgtaccactgcactccaacctgggtgacagcgagaccctgtctcaaaaaaaaaaaaaaaaaaaaaatagtttaaacagtagttaaaccagacctacaagaaagctttgccaagagtaagaaatgtgctgtcatcttttaaatcagtctgcacgggtattcttttttccttccttcctcatacaacaaa

SEQ ID NO: 14508 - DNA, 201 bp, Homo sapiens
ctaccgatttctctcctcacagataaagagagttttaatgagcaaaaaacttgcagaatctgaaggaaaaggctggtatagctgtacgaagtggcagagcrtgaaattggtggttattactttttttttttttccccgccatcagattccaccccgcatcaaagctgtgccaaataggctcgctttgtttagggacagggt

SEQ ID NO: 14509 - DNA, 201 bp, Homo sapiens
cactcgagtgcattgaccccaggagacggcagcgctaacttagcagagcgtttgctgtcaggcctttggatacctacagagcttactgtttcttgatagaytcctaatttttttcgtaaacaaatctgaaagtcaccaccttccccgttgactaccgatttctctcctcacagataaagagagttttaatgagcaaaaaac

SEQ ID NO: 14510 - DNA, 201 bp, Homo sapiens
cgtagtagcagcagtatcaattttgtgcaataaaattttgaataaccaattttatgcaaattgatatcaatagagaggagtaatgctgtattgaaattacytgttgccttccctgcttttttagggtgaaaaggtaataaaaagcatgtctaaaagtgatatgaattgcagatagtgataatgttgtaacattttggtgac

SEQ ID NO: 14511 - DNA, 201 bp, Homo sapiens
ccttaaacgcattgccaaagcttctggaggtatgtcttgtgctggctgtcacataaaatacttttattatccctgatcctatcaaaggtctttttacattrgaatattgacagaaaacagctcaaaaacatttatattctcttaatgctttgtgctaccaacacatttatagagccatttttcatgtaactggagaaattt

SEQ ID NO: 14512 - DNA, 201 bp, Homo sapiens; identical to SEQ ID NO: 2778

SEQ ID NO: 14513 - DNA, 201 bp, Homo sapiens
cactgcgacctccgccttccgggtttaagtgatactcctgcctcagtctcctgagtatctgggattacaggcgcccaccaccaggcccaactaattttttstatttttagtagaggcggtttcaccgtgttggccaggttggtctcgaactcctgacctcaggtgatctgcccgcctcagcctcccaaagtgctgggatta

SEQ ID NO: 14514 - DNA, 201 bp, Homo sapiens
ggcgtgagccactgcacttggcctggactcatcttcattgtccacctcctaggctaaatttatgtcttttatgtgcttgtaatctctgcataccactttartgacacttgccctggagtgtgattggtaatccctctccccactagatccttgaaggcaggacctgtgttccctgtttaaccatagttctcaattagtaat

SEQ ID NO: 14515 - DNA, 201 bp, Homo sapiens; identical to SEQ ID NO: 2768

SEQ ID NO: 14516 - DNA, 201 bp, Homo sapiens
ctgtgttccctgtttaaccatagttctcaattagtaattcaaatttgggttggggagagctaagtggtaatttttaattccttcaaattttccatgaattsgactaatttaaattctggtcagagataacaaaggataatacaatttgatctatgattatcttgtgataaatacttaatggaagttaaattatttttaaaa

SEQ ID NO: 14517 - DNA, 201 bp, Homo sapiens; identical to SEQ ID NO: 2771

SEQ ID NO: 14518 - DNA, 201 bp, Homo sapiens
ttagtgacatccattccatccaaaaggttaagggtgtgatctaaaagatcccttagaaattctaaattgtcttaaaattttgaaccagtagcatctgttaygtgtacctaaggctaatgtaacagaatcagttcccctagaaagcatgtgatccaaatgctctcagtggctgggggtagtggctcacacctgaaatctcaa

SEQ ID NO: 14519 - DNA, 201 bp, Homo sapiens
tactcacagcttgctttatggctggaattggtcctattcccataatggaaggctccacacccacttgggaccaggaaactatccgtgctaaaggtgtaagyccacgtttatcagcttctgacttcttcataagaacgacagctgcagcaccatcatttattcctgtaaaatatgagtgacttaatttctaccatgcttatt

SEQ ID NO: 14520 - DNA, 201 bp, Homo sapiens
ctgctgtagatccccaaactctccacgccagacgccgccgacccggaagtagcaagtcccctgccactgagtggccaagaaggcgatctgttatcctgcaycgccaatcatcgctcacgtcgaggggcacgcaggccctggagcccaccaaccacctcgtagctacgcccaagaccacgcttgttgcttaagtccggggtc

SEQ ID NO: 14521 - DNA, 201 bp, Homo sapiens
agccggtgtggtggtgtgcgcctgtagtcccagccactcaggaggctgagacaggagaattgcttgaacctgggaggcggagattgcagtgagccaagatygcaccactgcactccagcctgggcgacagagtgaggctccgtctcaaaaagaaaaaaaaaggattacagcagttggggaggggagatctctgacaggaaa

SEQ ID NO: 14522 - DNA, 201 bp, Homo sapiens
gtctagttgggatgtcaagaaaccaaattaattctttcagtataggttaagtcaatgatcaaatacagagaaatgacatgtttccttaaactgttttaagrataattttgtacataaatattgagttgggtgtggtggctcatgcctgtagtcccccagctacttgggaggttaaggcagggggctcacttgagcccagga

SEQ ID NO: 14523 - DNA, 201 bp, Homo sapiens
ttaattcatttcatcactaccattttggttaataatatatggccattttagtgtcattccatatgtattgcacatgttgaatatccggcacactcagaccrgtgaatgttttctcaacaggttattattgcagcagaactcctaaaaaatgcagatgaattagtcaaacagaaaattcatcccacatcagttattagtggc

SEQ ID NO: 14524 - DNA, 201 bp, Homo sapiens
actaagatataatttctaaagattcctatgtattactcttttagatgttactcttacctataaataggttgatgtttaaaccactatgatatactcacctyttctagttgacaccaaaactggtacaatctctttgtcaaaatggccagctttctgtgcattctctgtcctgttctgggacagaactgcaaccttgtcctg

SEQ ID NO: 14525 - DNA, 201 bp, Homo sapiens; identical to SEQ ID NO: 2769

SEQ ID NO: 14526 - DNA, 201 bp, Homo sapiens
agacataggagactccattttgttctgtactaagaaaaattcttctgccttgagattctgttaatctatgaccttacccccaaccccctgctctctgaaayacgtgctgtgtcaaactcagggttaaatggattaagggttgtgcaagatgtgctttgttaaacagatgcttgaaggcagcatgctcgttaagagtcatca

SEQ ID NO: 14527 - DNA, 201 bp, Homo sapiens
tctccattaaaaataaatttagccgggcatggtgtgtgtgccatgtagctagtagtcctagctgcttgggaggctgaggcagaaggatcacttgagcctargagttcaaggctgcagtgagccatgattgtgcctctgcactccagcctgggtgaccctgtctcacaaaacaaaacaaaaatcaggaaatttaacatgaat

SEQ ID NO: 14528 - DNA, 201 bp, Homo sapiens
cttccccatcatattttcacccactagttttagcattcattcatgactttctaactccaacattccttctattggtaagatattaattggcattttaccayaaagaaaaccttttccttttctcccatttattcagttatttatatcaggatggactcatacattttcattttattgaataagttataactcattactttc

SEQ ID NO: 14529 - DNA, 201 bp, Homo sapiens
cataaagaaaaccttttccttttctcccatttattcagttatttatatcaggatggactcatacattttcattttattgaataagttataactcattactytcattacttactttgatgctgaaatttttcaatacttgggcagttataacccattactatcattacttatttgcacgctgaaattgttcaaaatttaggc

SEQ ID NO: 14530 - DNA, 201 bp, Homo sapiens
agataaagagagttttaatgagcaaaaaacttgcagaatctgaaggaaaaggctggtatagctgtacgaagtggcagagcatgaaattggtggttattactttttttttttttccccgccatcagattccaccccgcatcaaagctgtgccaaataggctcgctttgtttagggacagggtcccacctgtcgcccagacga

SEQ ID NO: 14531 - DNA, 201 bp, Homo sapiens
tagagccttttctttgattcttgtttcatacttgcatcttcaactaattatgctctttcctggattcttcctgtggctcttttgtccttcaagcttcttcrtacatccttgtgctataggtactccctatcgtacatctttacaggcagatgtcatgagtggtttactacacaaaacttctctggtgcttttcttctcatc

SEQ ID NO: 14532 - DNA, 201 bp, Homo sapiens; identical to SEQ ID NO: 2765

SEQ ID NO: 14533 - DNA, 201 bp, Homo sapiens
aggctggagtgcagcagctactaacaggcaaaatcaaccatagtatactatacaacctcaaactgctggcctcaagtgatcctcccaccacagcctccctrgtagctgggactataggcacctgccactgcaccctgtaaaagctattctcttatatatacttctagaagctttacattttttgcttttatttttaaatcc

SEQ ID NO: 14534 - DNA, 201 bp, Homo sapiens
tccctgcctatcttacctcgttccttttatgccaagtaagccaatgtctttttttttttttttttttttttaccttgggaagtaatgaactcagtcctagtaactagtatttctttaactattacccacatggccaacacctagaagatactatcttaaaattggattgtgaaattcactggtaagctctcagggttactt

SEQ ID NO: 14535 - DNA, 201 bp, Homo sapiens
gggagagctaagtggtaatttttaattccttcaaattttccatgaattggactaatttaaattctggtcagagataacaaaggataatacaatttgatctrtgattatcttgtgataaatacttaatggaagttaaattatttttaaaaatcacagaaggtaactcaggttacaaaaatactttgcagagaatcagatatc

SEQ ID NO: 14536 - DNA, 201 bp, Homo sapiens
tggggcagggcgctgtggccccacttttcccacagcgaggaggagccccgccgcgcgcggcagggttttgagaccggcaacgcgtggatgtggtgtccggkgcggcgttggaaacgcgccctccgcgggaaagcgggcctcccgggctcgcacgtgcgggccacgcctcgcacccccttttgtttcagggcgaccccctga

SEQ ID NO: 14537 - DNA, 201 bp, Homo sapiens
ctggtcagagataacaaaggataatacaatttgatctatgattatcttgtgataaatacttaatggaagttaaattatttttaaaaatcacagaaggtaaytcaggttacaaaaatactttgcagagaatcagatatcaccaaggagagaattcagaagatcctggcaactggtgccaatgttattctaaccactggtgga

SEQ ID NO: 14538 - DNA, 201 bp, Homo sapiens
aaagattcatagaaaagaggtctaaacttgggtggaaaggctaaagttaaaccattctttgtcaacataaatatatgctgcatgatactggtaactgctastttggtttgttcttaggttaatacagtgacattctcacacatttttgccttagtgacatccattccatccaaaaggttaagggtgtgatctaaaagatcc

SEQ ID NO: 14539 - DNA, 201 bp, Homo sapiens
aatgctcttggttactcttctggtagggaaagactagagctaactacatgaataagctcacttaaggctaacaggaagacaaatttcataaaagggaatarggttatactcacagcttgctttatggctggaattggtcctattcccataatggaaggctccacacccacttgggaccaggaaactatccgtgctaaaggt

SEQ ID NO: 14540 - DNA, 201 bp, Homo sapiens
tcttcatttgtatgtctagttgggatgtcaagaaaccaaattaattctttcagtataggttaagtcaatgatcaaatacagagaaatgacatgtttccttmaactgttttaagaataattttgtacataaatattgagttgggtgtggtggctcatgcctgtagtcccccagctacttgggaggttaaggcagggggctca

SEQ ID NO: 14541 - DNA, 201 bp, Homo sapiens
cttttttagggtgaaaaggtaataaaaagcatgtctaaaagtgatatgaattgcagatagtgataatgttgtaacattttggtgacaagtaatgcttgctkctttaatagattagattactaaaaggaagtcccttgaaattacccttgatttttcacgtgtgtaccctttgtccattccaaacctgttactgtccttaac

SEQ ID NO: 14542 - DNA, 201 bp, Homo sapiens
ctgaggaaagtagctaccagggacctgtttgtgccaaattctgctatagtttgggtcatagtacttggctggttacgagtgagtggatcaggcagtctcaragccaatcgtgcactgctggcaggacataagagatatcagttatcaataagggagcttgacgggagcattctgtattagaaaatagcgagtgaccccaaa

SEQ ID NO: 14543 - DNA, 201 bp, Homo sapiens
gcagctaaaatgatttttttttttttgagacagaattttgctctgtcgcccaggcgctcagctcactgcaacctccgcctcctgggttcaagtgattctcrtgcctcagccactggagtagctgggattacaggcgtgcaccaccacgcccctctaatttttatatttttagtagagacggggtttcaccatgttggccag

SEQ ID NO: 14544 - DNA, 201 bp, Homo sapiens
cgggaaagcgggcctcccgggctcgcacgtgcgggccacgcctcgcacccccttttgtttcagggcgaccccctgagtgtccatgttaaacgccaggtttyattttaggaccatttaccagaaaaagagtaggtccatccgcgcgccctcggatgagcccggtgccctgtccgcccgcagctgcagtcgaggtcgggcgtc

SEQ ID NO: 14545 - DNA, 201 bp, Homo sapiens
ctcaacacttggggagcctaaggcaagaggatcaattgaactcaggagttcaaaaccagcctgggcgacatagaccttgtctctacgaaatgaagaaggcktggtgcacctgtagttcgaggtaatgggaggctaaggcaggaggaatatttgagcctaggagttttgaggctgcagtgagctatgatggtgccactgcac

SEQ ID NO: 14546 - DNA, 201 bp, Homo sapiens; identical to SEQ ID NO: 2759

SEQ ID NO: 14547 - DNA, 201 bp, Homo sapiens
gtttctctccctgttgtccctgcctctttttccttcccgccgtgccccgcggccgggccggggcagccgggaagcgggtggggtggtgtgttacccagtakctcctgggacatcgctcgggtacgctccacgccgtcgcagccactgctgtggtcgccggtcggccgaggggccgcgatactggttgcccgcggtgtaagc

SEQ ID NO: 14548 - DNA, 201 bp, Homo sapiens
tgtgagaaattaataaatacatcatgatatgacagtgtgatcttaccgagtcagtaaatgtgatacacagtataaactcttcatagatcatccagcatgcyggtatagtagaaacactattgtttggtgagaaagatgttaattctggagaaactagatagtttgtggggaaaatgtatttctagattaaactttagccat

SEQ ID NO: 14549 - DNA, 201 bp, Homo sapiens
ttcccataatggaaggctccacacccacttgggaccaggaaactatccgtgctaaaggtgtaagcccacgtttatcagcttctgacttcttcataagaacracagctgcagcaccatcatttattcctgtaaaatatgagtgacttaatttctaccatgcttattaacctcagttacatatctgtggcttctttaccacct

SEQ ID NO: 14550 - DNA, 201 bp, Homo sapiens
agttttccttccataagaagctgacagtctttttgctttaaaaatatttcttagtgttttatcaacttgaagaactatcttttttaaataaaataatagcytaatataggtcatatgaatagtcacactcggtttagcttctgttgagcattttttctaaaggtaatagatgtgttgtcttttacggttgtattgatgaac

SEQ ID NO: 14551 - DNA, 201 bp, Homo sapiens
gcacgcgtgcgtagtagcagcagtatcaattttgtgcaataaaattttgaataaccaattttatgcaaattgatatcaatagagaggagtaatgctgtatkgaaattacctgttgccttccctgcttttttagggtgaaaaggtaataaaaagcatgtctaaaagtgatatgaattgcagatagtgataatgttgtaacat

SEQ ID NO: 14552 - DNA, 201 bp, Homo sapiens
tgtgcgcatgtgttgcgcgcacgcgtgcgtagtagcagcagtatcaattttgtgcaataaaattttgaataaccaattttatgcaaattgatatcaatagrgaggagtaatgctgtattgaaattacctgttgccttccctgcttttttagggtgaaaaggtaataaaaagcatgtctaaaagtgatatgaattgcagata

SEQ ID NO: 14553 - DNA, 201 bp, Homo sapiens
ttttaaagcataagactttgagatgggcatggtggtatgtgcctgtagtcccagctactaaggaggctgaggtaggagtattaattgaacccaggagtgcyagtccaatgtgggcaacatagcaagaccctgtctcgggagtgggtgcgtgtgtgcgcatgtgttgcgcgcacgcgtgcgtagtagcagcagtatcaattt

SEQ ID NO: 14554 - DNA, 201 bp, Homo sapiens
gcactccagcctgggtgaccctgtctcacaaaacaaaacaaaaatcaggaaatttaacatgaatcaaacactattatctaatccttggtccacattcaaayttcacctatatttcagtaatgtccttctagctcctttatttgagccaataaagaagcatgcattgtacaactatcaatctctctagtttgcttttgtctg

SEQ ID NO: 14555 - DNA, 201 bp, Homo sapiens
ctgaatttgttcatttctaaaatgacagttccatcttaggataaaaggagttaccgtgtgctgcctaactaaattctaaacttgtaatatagcacttttaycacaaatgctactgagtccaaggatattaaaatcatgaaagagcaatattcacagatcctttgtaactctcttattagcaactattctgtcaaccctggc

SEQ ID NO: 14556 - DNA, 201 bp, Homo sapiens
agaagtccttaagaaattctaaaaaatcctcaccaagcagataagcagcagataaacctgataaacacttacatgctgtagtatagtggtaataacctagygtcctggctctgaggtcagttaaaacatatgtaaatcttagctctggcacttactaatcatgtctccctaaacctcaatttctttgatcctgtaaaatgg

SEQ ID NO: 14557 - DNA, 201 bp, Homo sapiens
tgtgtgcgcatgtgttgcgcgcacgcgtgcgtagtagcagcagtatcaattttgtgcaataaaattttgaataaccaattttatgcaaattgatatcaatagagaggagtaatgctgtattgaaattacctgttgccttccctgcttttttagggtgaaaaggtaataaaaagcatgtctaaaagtgatatgaattgcaga

SEQ ID NO: 14558 - DNA, 201 bp, Homo sapiens
gcgccaccagcctggctaattttgtatttttagtagagatggagtttctccatgttggtcatgtgggtctcaaactcccgacctcaggtgatctgcctgcrttgacctcccaaagtgctgggattacaggcatgagccaccacacctggcctattttttaatttaatttaatttaatttaattttttgagacagagttttg

SEQ ID NO: 14559 - DNA, 201 bp, Homo sapiens
gtgtgcgcatgtgttgcgcgcacgcgtgcgtagtagcagcagtatcaattttgtgcaataaaattttgaataaccaattttatgcaaattgatatcaatagagaggagtaatgctgtattgaaattacctgttgccttccctgcttttttagggtgaaaaggtaataaaaagcatgtctaaaagtgatatgaattgcagat

SEQ ID NO: 14560 - DNA, 201 bp, Homo sapiens
gtgcgcatgtgttgcgcgcacgcgtgcgtagtagcagcagtatcaattttgtgcaataaaattttgaataaccaattttatgcaaattgatatcaatagagaggagtaatgctgtattgaaattacctgttgccttccctgcttttttagggtgaaaaggtaataaaaagcatgtctaaaagtgatatgaattgcagatag

SEQ ID NO: 14561 - DNA, 201 bp, Homo sapiens
tgaggaaggagaatcactggaacctgggaggcggagattgcagtgagccaagatcacaccactgcactccagcctgggctacagagtgagactccgtctcaaaaaaaaaaaaaaataaaaaatgtttttttgtggattatgtgcagtacatctttttgtaatttaaagcacatacaacatggtagaaggaatgtgaattaa

SEQ ID NO: 14562 - DNA, 201 bp, Homo sapiens
ggctgaggtggcaagaatctgaagcccaggaggttgaggctgcagtgagctgtgattgtaccactgcactccaacctgggtgacagcgagaccctgtctcaaaaaaaaaaaaaaaaaaaaaatagtttaaacagtagttaaaccagacctacaagaaagctttgccaagagtaagaaatgtgctgtcatcttttaaatcag

SEQ ID NO: 14563 - DNA, 201 bp, Homo sapiens
agttctttgtgagctggctgatctgcaagacaaagaagttggagatggaactacttcagtggtaggtagactggctaaagaatgatcatttttctaaaaaygaccgactttcagaaagttgaagccataagtgggtcatttgtgctgtgtcagaaataagttacatattctgaatgcccagaagattgagcaagaagaaaa

SEQ ID NO: 14564 - DNA, 201 bp, Homo sapiens
gctgaggtggcaagaatctgaagcccaggaggttgaggctgcagtgagctgtgattgtaccactgcactccaacctgggtgacagcgagaccctgtctcaaaaaaaaaaaaaaaaaaaaaatagtttaaacagtagttaaaccagacctacaagaaagctttgccaagagtaagaaatgtgctgtcatcttttaaatcagt

SEQ ID NO: 14565 - DNA, 201 bp, Homo sapiens
ctgcagtgagctgtgattgtaccactgcactccaacctgggtgacagcgagaccctgtctcaaaaaaaaaaaaaaaaaaaaaatagtttaaacagtagttaaaccagacctacaagaaagctttgccaagagtaagaaatgtgctgtcatcttttaaatcagtctgcacgggtattcttttttccttccttcctcatacaa

SEQ ID NO: 14566 - DNA, 201 bp, Homo sapiens
cctgtttgtgccaaattctgctatagtttgggtcatagtacttggctggttacgagtgagtggatcaggcagtctcaaagccaatcgtgcactgctggcakgacataagagatatcagttatcaataagggagcttgacgggagcattctgtattagaaaatagcgagtgaccccaaaagatccaccctttagaaatgtga

SEQ ID NO: 14567 - DNA, 201 bp, Homo sapiens
ctggaaccaagagtgcttgagtgctgacataggtcccatgttaccgtgtcctgtaaacccagcataccccctccccacattcatgtatccaggacatatayttgcaacctgaaaaacataactaagatataatttctaaagattcctatgtattactcttttagatgttactcttacctataaataggttgatgtttaaac

SEQ ID NO: 14568 - DNA, 201 bp, Homo sapiens
tccagcttctcatgaaacctgctgtgtgtgcacagtggtcatggacgctctggaaccaagagtgcttgagtgctgacataggtcccatgttaccgtgtccygtaaacccagcataccccctccccacattcatgtatccaggacatatatttgcaacctgaaaaacataactaagatataatttctaaagattcctatgta

SEQ ID NO: 14569 - DNA, 201 bp, Homo sapiens; identical to SEQ ID NO: 2761

SEQ ID NO: 14570 - DNA, 201 bp, Homo sapiens
atacttacttcacttcagttaatcaaagaagagatataaaaatccttaagacagtctctggccataaggacgaaagcacctaagaagcagattagtatatkgtctttttaacctttttaaagctaatacagtttcagccatgtctgccttacctgtaatacccatatgacagttgtgaaatgcatctgtaagaccatcaca

SEQ ID NO: 14571 - DNA, 201 bp, Homo sapiens
ttagcatttaagtagtaatatttgaagttaaaaacttggaccagtatcttttttctcatttgactaccacattttctcctaataatagattttagtggctrtgcttatgggatagattaaacttgccatgatctgaagagggagggttttttcatgtcctcctcctatatgaaatggctgaacgggtattattacttacga

SEQ ID NO: 14572 - DNA, 201 bp, Homo sapiens
tagattttagtggctatgcttatgggatagattaaacttgccatgatctgaagagggagggttttttcatgtcctcctcctatatgaaatggctgaacggrtattattacttacgacattttggctctgtgttaagcatgatgaatgcaaagagtttgagtagtgactttataagcgtttttctcccccacacttttaaac

SEQ ID NO: 14573 - DNA, 201 bp, Homo sapiens
acagcgagaccctgtctcaaaaaaaaaaaaaaaaaaaaaatagtttaaacagtagttaaaccagacctacaagaaagctttgccaagagtaagaaatgtgytgtcatcttttaaatcagtctgcacgggtattcttttttccttccttcctcatacaacaaagtgtcctttcttccatcaaagccagtccctctacagtaa

SEQ ID NO: 14574 - DNA, 201 bp, Homo sapiens
aaaaaaaaaatagtttaaacagtagttaaaccagacctacaagaaagctttgccaagagtaagaaatgtgctgtcatcttttaaatcagtctgcacgggtrttcttttttccttccttcctcatacaacaaagtgtcctttcttccatcaaagccagtccctctacagtaagtgttctagagtctgtttccttctgctcta

SEQ ID NO: 14575 - DNA, 201 bp, Homo sapiens
gcaaccctttgattatgtccttcttgaaatgctttcggggatggaaggctttgtgatgctgctttgtctggaccatgtcataatactctccaggatagccyctttgttcccatgacttcatgtattatctctctatgccagagactctttcagctgtttctctaagctccaaacacacatacctctatctagtagaatgct

SEQ ID NO: 14576 - DNA, 201 bp, Homo sapiens
tttgaaaacacagatgatatactagtcttgcttagagatattaagcttagtatctagattgtttggtgtaacctgcaaggtttttcacttttctggttctrccttcttttgtgctttcaactctggactcctgtttttgtttgtttgtttgtttttgagacggagttttgctcttgttgcccaggctggagtgcagtggca

SEQ ID NO: 14577 - DNA, 201 bp, Homo sapiens
cggtctcggctcactgcgacctccgccttccgggtttaagtgatactcctgcctcagtctcctgagtatctgggattacaggcgcccaccaccaggcccarctaattttttgtatttttagtagaggcggtttcaccgtgttggccaggttggtctcgaactcctgacctcaggtgatctgcccgcctcagcctcccaaag

SEQ ID NO: 14578 - DNA, 201 bp, Homo sapiens
cttgtagtctcacagtgatacgagcagttatacgcatgggataaaataacattgggccactgtaaattgagatgaagtaaccattttcatctcttctgcakggactagacattgtttctgtatagtatatctaaatatcctgtgtaggcaggacttaagggaactttatgtagacttattttattaaaatgccattttttt

SEQ ID NO: 14579 - DNA, 201 bp, Homo sapiens; identical to SEQ ID NO: 2763

SEQ ID NO: 14580 - DNA, 201 bp, Homo sapiens; identical to SEQ ID NO: 2766

SEQ ID NO: 14581 - DNA, 201 bp, Homo sapiens; identical to SEQ ID NO: 2767

SEQ ID NO: 14582 - DNA, 201 bp, Homo sapiens
tgcagtgagctgtgattgtaccactgcactccaacctgggtgacagcgagaccctgtctcaaaaaaaaaaaaaaaaaaaaaatagtttaaacagtagttaaaccagacctacaagaaagctttgccaagagtaagaaatgtgctgtcatcttttaaatcagtctgcacgggtattcttttttccttccttcctcatacaac

SEQ ID NO: 14583 - DNA, 201 bp, Homo sapiens
gcagtgagctgtgattgtaccactgcactccaacctgggtgacagcgagaccctgtctcaaaaaaaaaaaaaaaaaaaaaatagtttaaacagtagttaaaccagacctacaagaaagctttgccaagagtaagaaatgtgctgtcatcttttaaatcagtctgcacgggtattcttttttccttccttcctcatacaaca

SEQ ID NO: 14584 - DNA, 201 bp, Homo sapiens
gggcttgcgggcagaaccgcggacctcggacgcatttacagagcgcctgaaaccccagtgtttctggacaccccaatgttggagttccccgacttgacgtyttgggcttttttttaaaaaatcttagggtttctcgaaacagtaaagactggggggtgacaaagacttatctctcgttcagctcaggactggaatcccacg

SEQ ID NO: 14585 - DNA, 201 bp, Homo sapiens
aactcatataaaaataacttgaccctacacaaaatgtccttttagcaacattcaaagtaattaactgttacaatttccaaagcggcagaagtattgaagcaaaaaaaaaaaaaaaaaaaaaaaaagaaaagaaaaaaaaaacaaagaaaaaaaacaacaaaaaaaaaccaaaacgtacacccacaaaaaggcaaattgtga

SEQ ID NO: 14586 - DNA, 201 bp, Homo sapiens
caaacttggcagtcataaacccacatctactctaacaagtctgaatggtgcataagtacagtaacagcatgagtacgaatgcccttacacagcacagattytaaacagacagatttatacagacatcattgtgttgtattttaaggaaaaatttccatttacaatttcacattaactcatataaaaataacttgaccctac

SEQ ID NO: 14587 - DNA, 201 bp, Homo sapiens
cagaccacctagcagttccgcccctgccgcaggcattaccgatggcgcctcccggagccggccaatcaggggccccggaggagaacacctccctacgccamccaatgggagaggcaggccacgcgatggctctaccccgggagccaatccaagcacgagggacggagtacgcacatcgggagaggagagggtggggctgta

SEQ ID NO: 14588 - DNA, 201 bp, Homo sapiens
ctcgaaacagtaaagactggggggtgacaaagacttatctctcgttcagctcaggactggaatcccacgggcgagaatctcgagtgcgagcccggcccgcrgcgggtctcagcacagctctgatgggtccttttgctctcggcggcttcgggaggtcctatgcgtttctcctggcgccagtcattcgctcgcgtgaggggc

SEQ ID NO: 14589 - DNA, 201 bp, Homo sapiens
aggggcgggcggaggcgcgcggggcgcggggcgcggggcgcggggcggaagtgaggccggggcgcggggcgcggggcggaagtgaggccggggtctgggcytgcgggcagaaccgcggacctcggacgcatttacagagcgcctgaaaccccagtgtttctggacaccccaatgttggagttccccgacttgacgtcttgg

SEQ ID NO: 14590 - DNA, 201 bp, Homo sapiens; identical to SEQ ID NO: 2793

SEQ ID NO: 14591 - DNA, 201 bp, Homo sapiens; identical to SEQ ID NO: 2794

SEQ ID NO: 14592 - DNA, 201 bp, Homo sapiens
caaaataagaaagccatgttgttaaacagtagaggagccagggactctgtctccattctctcatcacacacaagtcatgcatctaccaaaaaaaaaaaaacaaaaaaacacaacaacaaaaaaactgtcctctgaggaggcacaggtgtgacagataaggaacctgcagctcagattcaacaggcacctgccaagtccaca

SEQ ID NO: 14593 - DNA, 201 bp, Homo sapiens; identical to SEQ ID NO: 2796

SEQ ID NO: 14594 - DNA, 201 bp, Homo sapiens
gaatggctttgtgcttagttttaattgtagtttgtgctattctgtgaattaacaattcaaacaaaataagaaagccatgttgttaaacagtagaggagccrgggactctgtctccattctctcatcacacacaagtcatgcatctaccaaaaaaaaaaaaacaaaaaaacacaacaacaaaaaaactgtcctctgaggagg

SEQ ID NO: 14595 - DNA, 201 bp, Homo sapiens; identical to SEQ ID NO: 2798

SEQ ID NO: 14596 - DNA, 201 bp, Homo sapiens
taaaaaataatcttcattttggggttattttttgttgttttctgttctaaaaaaaaatcactgttctccatgcttatacgagtgtcatgatgtgacacaaygtgttcacttgttcacagcagtggtaaaatatttcagaacgcgcaactgatttttcttccttaaaacaaaacaaagaggagaccagagggggaggggggg

SEQ ID NO: 14597 - DNA, 201 bp, Homo sapiens
tgatgctcatatctcgtagagagagaatgttcacttactgaaagcctgcctggactttgtccttttccaggcaccatttaactattaggagttctagatcrtacttggcattaaggatgtcataacaaactccactttctaaggtttctgatccttaaatataatcaagagaagtaatggtttattttcatctgcatgcat

SEQ ID NO: 14598 - DNA, 201 bp, Homo sapiens
cttactaggtttaaagtagtgtttaatgattagacaattttcatttaatagatttgtacatctgctttgtttggtatttgaatctcattgtgctgtagtctatggatttgctacccttgatcagatactcacccttggttcaatcaattctatctggtacagtggaagtaatggttcacccaggtccctgataagtctggg

SEQ ID NO: 14599 - DNA, 201 bp, Homo sapiens
ttactaggtttaaagtagtgtttaatgattagacaattttcatttaatagatttgtacatctgctttgtttggtatttgaatctcattgtgctgtagtctatggatttgctacccttgatcagatactcacccttggttcaatcaattctatctggtacagtggaagtaatggttcacccaggtccctgataagtctgggg

SEQ ID NO: 14600 - DNA, 201 bp, Homo sapiens
cacaacatacaaatgtatcttttatcagccagaatatatattgtaggaattctttccccatctctactccctgtgggaactaaaaaacaaaacaaacaaaygaaaaaaaaacacaaaacaaacaaaaatataccccccatcccccatcccctaagccagtaaagcaatgacaacagcaccttgacattgttttaattccaa

SEQ ID NO: 14601 - DNA, 201 bp, Homo sapiens
gaatgaatttggaatttgttttgtcaagtgtgggagcaggcacacagatgggctttgatccagtggtgctgcttggaattctcattatagcaatgatgtcmcttgtcacgtggagtaagtgataatgctgccaaattgtggaaaaagcaaggcaaataggaaagtacacagaccaagagaaaggacttaggtagcacagta

SEQ ID NO: 14602 - DNA, 201 bp, Homo sapiens
agcagtaaaacagatatagtactaacaagaacgaagatacttactgtctaaaatgtaaacggaatgttttggttcaaatttttgttgtgtgtgtgtgtgtktttttctgttttctgaaagaggacagtttattatcaattcacaattaaagcagcatgcaatttattattttttttaactttttatgttttcagttcttgg

SEQ ID NO: 14603 - DNA, 201 bp, Homo sapiens
gggttgtttgttttaaatttgtccctcaaaaggaagctgcataaagttgacatatagcagatattccaagcattccttacatattaaaaataattacaaakataatattttcaaacaacacaaaacaaatctacactacgtaaagtcttccttctttcaaagaggtattcagatggtactgtgaaagactagctctaaatg

SEQ ID NO: 14604 - DNA, 201 bp, Homo sapiens
ccacttaacagatctggcccttgcaatcctttaagtttgtgatggggggttgtttgttttaaatttgtccctcaaaaggaagctgcataaagttgacatayagcagatattccaagcattccttacatattaaaaataattacaaagataatattttcaaacaacacaaaacaaatctacactacgtaaagtcttccttct

SEQ ID NO: 14605 - DNA, 201 bp, Homo sapiens
ggaaattaaaggaatgtcgttaaggcttctttttgctgttgctattggcatgttcagccctctgaaccttggagttatgaatctgccagtttgctaaatgyatactcagaagggcaatttcgttttcagaatacaaggacactttagctattactactcaccctccccattgctcctttctagctctttgagctcccctga

SEQ ID NO: 14606 - DNA, 201 bp, Homo sapiens
aggggaagatgatctatctgtctctttctctttctctagctatttatctacttatctatctatgtatctgtctagctgtctacatacttacctgtctgtghctatctatctatctatctatctaatcagatgttttatatatgaggtattaaaactcaagatgttaggtatctggctgaagatctcatagctaacatgggt

SEQ ID NO: 14607 - DNA, 201 bp, Homo sapiens
aaagagataatttgtcctgattctgcctttttgttttatgtgggccctcaatggaatggataatgcccacccacataggtgagtgtgatcttctttacctmgtctaccaattcagatgctaatctcttctggaaacaccctcagagatacacccataaataatgtgttgccagctatctgggcgtctcttaccccagttaa

SEQ ID NO: 14608 - DNA, 201 bp, Homo sapiens
agcattggatctataaattactttgggcagtatggccattttcatgatattgattcttcctatccatgagaatggaatgttcttccatttgtttgtgtccyctcttatttcattgagcagtggtttgtagttctctttaaagaggtccttcacatcccttgtaagttgtattcctaggcattttattctctttgtagcaat

SEQ ID NO: 14609 - DNA, 201 bp, Homo sapiens
tttaaagtagttttttctaattctatgaagaaagtcaatggtagcttgatggggatagcattggatctataaattactttgggcagtatggccattttcaygatattgattcttcctatccatgagaatggaatgttcttccatttgtttgtgtcctctcttatttcattgagcagtggtttgtagttctctttaaagagg

SEQ ID NO: 14610 - DNA, 201 bp, Homo sapiens
ttaaagattcaagggtaattctgatgctgaatgtgtttgagaatcactgctgtatgctgcattctattttattgtatttcttttattattattattattawaataataataatacttttaagttctggggtacatgtgcagaacgtgcaggtttgttacctaggtatacagatgccatggtggtttgctgcactcatcaac

SEQ ID NO: 14611 - DNA, 201 bp, Homo sapiens
aatgggtgcagcacaccaacatggcacatgtatacatatgtaacaaacctgcaggttgtgcacatgtaccctagaacttaaagtataattaaaaaaaaaaagaacctggagaaattatcaagtaagcatcatatttaatgaatttatggtgaaatcatgtgggaaaaatttttctgtacagggatgatgactctggaaatg

SEQ ID NO: 14612 - DNA, 201 bp, Homo sapiens
attcaaataggaagagaggaagtcaaattgtctctgtttgcagatgacatgattgtatatttagaaaaccccatcatctcagcccaaaatctccttaagcygataagcaacttcagcaaagtctcaggatacaaaatcaatgtgcaaaaatcacaagcattcctatacaccaataacagacaaacagagagccaaatcatg

SEQ ID NO: 14613 - DNA, 201 bp, Homo sapiens
aattaataagtcagttcaacactagctgagtacctacagtgttgcagatggtgaaaggtatacaaacatgtacaagaaataagaactgaatttatttaacycaaccttctcattttaaagataaagaagctgagacttaggaaggaaataacttggcccaaggacatgcttaatctgcctccctcctctcccattgccata

SEQ ID NO: 14614 - DNA, 201 bp, Homo sapiens
aattgaggcaataattaatagcctaccaaccaaaaaaatccatcaggaccagatggattcacagctgaattctaccagaggtataaggaggagctggtacyattctgaaactattctaatcaatagaaaaagagggaatcctccctaactcattttatgaggccagcatcatcctgataccacagcctgacagagacacaa

SEQ ID NO: 14615 - DNA, 201 bp, Homo sapiens
ggaaccaagttggaaaacgctctgcaggatattatccaggagaacttccccaatctagtgaggcaggccagcattcaaattcaggaaatacagagaatgcygcaaagatactcctcaagaagagtaactcaaagacacataattgtcagattcaccaaagttgaaatgaaggaaaaaacattaagtgcagcgagagagaaa

SEQ ID NO: 14616 - DNA, 201 bp, Homo sapiens
aagctactctccaccacaaatatagtacacatgcagaagatactcataactacatggctagtccatttctaaatgtattcatgtagtttgttgaatcagattttttttttttttttttgagacagagtcttgctctgtcacccaggctggagtgcagtggtaagatctcagctcactgaaacctctgcttcccgggttcaa

SEQ ID NO: 14617 - DNA, 201 bp, Homo sapiens
gaagtttcagtgacccactctgtaataaagaacttggaaagggaggttccaagatggccaaataggaacagctccagtctacagcccccagcgtgagtgaygcagaagacgggtgatttctgcatttccaactgaggtaccgggttcatctcactggggcttgtcagacagtgggtacaacccacggagcatgagccaaag

SEQ ID NO: 14618 - DNA, 201 bp, Homo sapiens
ttctgtcttattttccttatttggcataatcattaaccaacttctagtaaatggaagcattctcacaatttaagtttttttagggggaaacacacaatttrtaaatactgtcaagtgaagaacagattcctgaatactaaaagacccatgcatatccttgtatgtaaaaaaaaaaaaaatccatcataaaatcatagactc

SEQ ID NO: 14619 - DNA, 201 bp, Homo sapiens
ttacgtagtacttgattcccttctcacttgttttgttttgtttttttcccaagacagagtcttgctctgtcgcccaggctggagtgcaatggtgcaatctyggctcactgcaatctccacctcctgggttcaagcaattctcctgcctcagcaggaggtagctgggattacaggcgcccaccaccatgcccggctaatttt

SEQ ID NO: 14620 - DNA, 201 bp, Homo sapiens
ggggctgcctcatgaagtgtctgtttaggaaatgtgtctttaaagtcaacagactgtcctgagtaggacattctagaacatttttctagacaaaaacatcrtatctacaacttccagcctagaatctgatacagcaaagacacacaataatgttttgttatataagtgcatatacaattaattaccaaattatgaggtaca

SEQ ID NO: 14621 - DNA, 201 bp, Homo sapiens
tttctctaattactccagcatacactgccttccttccctaaaattccacattacatcttacgtagtacttgattcccttctcacttgttttgttttgtttttttcccaagacagagtcttgctctgtcgcccaggctggagtgcaatggtgcaatctcggctcactgcaatctccacctcctgggttcaagcaattctcct

SEQ ID NO: 14622 - DNA, 201 bp, Homo sapiens
taggtcttgaagaatgagtagaattcagatgaataaacagcagaaaaaatcattaataaacacatgagactcagagaattacaacaaaacagttttagtcwtgtaaactttgctataaagtgaagcatatttaggtatgaagcatgctgattaaactttttattgtcttaatacaagtctaaaaaaagtatctttttgggg

SEQ ID NO: 14623 - DNA, 201 bp, Homo sapiens
agcccctcctctgaatgagaggctacagtgacattttgggtttcctggaatcagtgtcagttcaaatctagtgttcagtagtcccccaaaggtctgattayatgttttaccctggtgcacagttaccctgctaaaattctgtaggtcctttcggagaaagctgggagaaagattcacagtataaattttcatttgagggct

SEQ ID NO: 14624 - DNA, 201 bp, Homo sapiens
acacatttaatccctaccaataccctgttgagaggttgagatacagagaatttaaattactgacccaaggtcatagacctagtaagtgttaggcctggagwcaaactcgatcctcctctggctcaggaatattgttccaggcctttgctctcacctggaagtttctaattagaaaatttatttcaagtcagaataaaatct

SEQ ID NO: 14625 - DNA, 201 bp, Homo sapiens
acattaattaagaagataatttccaatttgttccatgaagtttcagtgacccactctgtaataaagaacttggaaagggaggttccaagatggccaaatakgaacagctccagtctacagcccccagcgtgagtgacgcagaagacgggtgatttctgcatttccaactgaggtaccgggttcatctcactggggcttgtc

SEQ ID NO: 14626 - DNA, 201 bp, Homo sapiens
tgtaattacaattcatattattactcattatcgtgtgcctggcaaatggcaagtgccacttgacctcccattgctcagtgtgtgatttttgggtttcagtrtggtggactgtaggatggcacccacacaaagaggcattctgcttggatgtcaaaggaaaggaacctgtgagaggcatttttgaggttgatcgggtcattt

SEQ ID NO: 14627 - DNA, 201 bp, Homo sapiens
atatagtcaataattgggttcatgacctttctaaatctttacagtgtaaatattctggaaatccagtgaggcacttaagtataaaattatttaggattaartaattctatgccttaagtagaagtttaagaggacgtttaggacacacatgactaagcctacaaataccaaagccactctatgtttcctaggtttaaatac

SEQ ID NO: 14628 - DNA, 201 bp, Homo sapiens
tcaaaatataactctgcaatatgaaggtagactacttttgctcctaaacaatttgagaataaattgcaaggaattaaagattgagaaatgcaatgtcatasatggttaagtaattgctattgatcacttactagttatgcaatttgggcaaattattttgactgtgactcccagtttagttagttatgaaatggttataac

SEQ ID NO: 14629 - DNA, 201 bp, Homo sapiens
tagcttaccttgtcgtgttccaaatgtggaaggcttgctgtttctggtaagttgaggaccatttcaaagcctcaagaaaatgattagaaatgaaccaatgkgagaacattttctttgttgggtagttcatccgattattatgtatgttgtttgtcttcttttcatttggatataggttgccttcagctgccagtactgtga

SEQ ID NO: 14630 - DNA, 201 bp, Homo sapiens
ggtttcttaaaaatttaacctgggccaggcacagtggctcacgcctgtaatcccaggactttgggaggccgaggtgggtggatcacgaggtcaggagatcragaccatcctggccaacatggtgaacccccatctctactaaaactacaaaaaaattagccaggcatggagacatatgactgtagtcccagctattctgga

SEQ ID NO: 14631 - DNA, 201 bp, Homo sapiens
tcctgtatacttgacatcatctctagattacttataatacctaatacaatgcttacacatcatttcatttgcttgaattaaacatagcacttggcatgtgrcaaattcaagttttgctttttggaactttgtggaacttttttttcccgaacatttttgacccgcaggcagttgaatccatgaatgcagaacccacgaatg

SEQ ID NO: 14632 - DNA, 201 bp, Homo sapiens
taatttctgtgggctttgggctataaaggtggtctctaattgcctcatacgtggttccaggataatttagggcagggaaaatattagcttggtgtgtgagrgttagataaagggggtagttggggatatagactctggataggttggttggcatgtgaaaggaatgcctttcataagagctcaatcctgagcttttaacta

SEQ ID NO: 14633 - DNA, 201 bp, Homo sapiens
tctatgaaattatactgcatagtttcactaatgaacatttccaattgtcagggcctcagtctcatagctgtcccacctcttggagcctccatggctccctragcccctgtgatacacggagggatcctacttgctaaagttcacaatggatctgtcctttgaaaagatgtgtcttatcttagattgagttctatgaaaaca

SEQ ID NO: 14634 - DNA, 201 bp, Homo sapiens
cttaggtccttacaatttttaaactctgggattcggtggcaattaaatgtgtaatgacatgttgtcagttctcaatttgtgacagcattgctttaaatttraaaatccacggcttgaatcttccctccaaatctgttaaggggtggaaagtacaaagagcatgaaacatatctgggtgagggagagaacaaggtgctttgg

SEQ ID NO: 14635 - DNA, 201 bp, Homo sapiens
gtggcgagctctgttgctgggaagggccgtcagagttgtcccagattgaatcacagaatcttgggtctttgcatcttcatatcagctgtcattggatatcrgctgctccctgagaaaatatttagtaaatgattgctttattattattactattgtttgctctagactgaatgtttgtgtcccctcaaaattaatatgtcg

SEQ ID NO: 14636 - DNA, 201 bp, Homo sapiens
ttcaccatgtgagaacacagcaaggtggcactgttgatgagccagaaggcaggccctcaccagacaccaccaaatctgccttgatcttggacagcccggcytccagagctgtgtgaaataaatttctgttgcttataaggtacccagtttataatattttgttatgagggtcaaatgggctaagatattattaatcccaaa

SEQ ID NO: 14637 - DNA, 201 bp, Homo sapiens
taaagtgggataacaatgcctacttgtggcaaatggacctaagccagtttgctcattcacaaatactagatccttcgaggattatgattgggttctttttrgtagatggtaggtagatggtagatgttataatcgttgcaggtagaaggctttcagtttcctcctcaaaatttctctaccaggtgctacttgctacatgaa

SEQ ID NO: 14638 - DNA, 201 bp, Homo sapiens
tgtgtctgtatgatacttatagacagtgcagtgcctggaacacttttatttatttcaccaatgagaaatgatttctaacatttttatgctaatgaataaamctttggtgttgaccagaaatcatgatagctaaagaataaagtagttctgtgggaactctttctggaatactgtattctaatatagtctcacaaaagctag

SEQ ID NO: 14639 - DNA, 201 bp, Homo sapiens
ttaattagggcaattaactagggtaattaactactttaagatgtggattaaaatacgtatgcaaacactctctcacagacaaactactgtctatgctgatrtattttaaagttaaagaccacatagaatgtctcatagaattaaatgacataatcaagtggtaactgacagcctgccctgatttatgggaatgaatgatac

SEQ ID NO: 14640 - DNA, 201 bp, Homo sapiens
atcaagtggtaactgacagcctgccctgatttatgggaatgaatgatacttctttggtggccaccagaaatacattgacggtgggggagtttttgcaaggrattggaattcttgagtcaacagctaaggggtgggtgtagagagctttagatgttaatgttaatgtgatattgatagatatcactagagggtaaactccat

SEQ ID NO: 14641 - DNA, 201 bp, Homo sapiens
ctgtacttcacatcactggcctgaattttcagcctcattaaattctttcaggtcgtctggtcccaatctttgtggttacccaagtgtatatttatgtctcwtgagttattgccatttctaacctgtgcttaactgctcccacctcccactacccttaattgatcttgcagtacttctggtattttttttaaagtcttccct

SEQ ID NO: 14642 - DNA, 201 bp, Homo sapiens
aatgtggataataaggagccctgttagagagccatagaaaccatccctgagtcatgtcttcctttctccttcaatatgaccttctctgggagtcttcttgyggggaggcagcaatgccttggaaagtttgagctggtttctgatgagaggttgaggcagggatctcatggttatctccttcctcaaaatggagccagaaga

SEQ ID NO: 14643 - DNA, 201 bp, Homo sapiens
atggtgttttctaggttttctcctaggattcttagagtttgaggtcttacatttaaatctttaattcattttaatttttgtaaatggtaaaaggtagcagrctggtttcattcttctgcatatggctagctagctataccaggaccatttattgaacaggaagtcctttctccattgcttatttttgttgattttgttgaa

SEQ ID NO: 14644 - DNA, 201 bp, Homo sapiens
ctttctctaattactccagcatacactgccttccttccctaaaattccacattacatcttacgtagtacttgattcccttctcacttgttttgttttgtttttttcccaagacagagtcttgctctgtcgcccaggctggagtgcaatggtgcaatctcggctcactgcaatctccacctcctgggttcaagcaattctcc

SEQ ID NO: 14645 - DNA, 201 bp, Homo sapiens
attcatagattcaactcaattcaaatcaaaatcccaacaggactttttgtaggtatataaagctgattctggaatttatatgaaaagaccgtatagcatasggacaatagttaaaaatactgtattgtatacttgcaatctgctaagaagatagatcttaaatctcctcactatacacatacacaaatagtaactgtagag

SEQ ID NO: 14646 - DNA, 201 bp, Homo sapiens
aatacctttccaattaaaaatgattttaaactaggcaacttaggcaaattattcttttccttcatgtacctgggctttcccgcctcatctaagcacacttkttctttctaatgctccctgactgtaaccaaaacctccagagcccttcatccatcctctgattgccatgaattgccaacatcagataaatagtttaaaaag

SEQ ID NO: 14647 - DNA, 201 bp, Homo sapiens
cctttctctaattactccagcatacactgccttccttccctaaaattccacattacatcttacgtagtacttgattcccttctcacttgttttgttttgtttttttcccaagacagagtcttgctctgtcgcccaggctggagtgcaatggtgcaatctcggctcactgcaatctccacctcctgggttcaagcaattctc

SEQ ID NO: 14648 - DNA, 201 bp, Homo sapiens
ctgtaaccaaaacctccagagcccttcatccatcctctgattgccatgaattgccaacatcagataaatagtttaaaaagtggcaagaaagtaggatttcragtcagaagacttggatttgaatcttgcttcagctttgtattaattgttatcattctgaatcatagtttccccatctgaaaaataagatgtggagttgtt

SEQ ID NO: 14649 - DNA, 201 bp, Homo sapiens
ccctttctctaattactccagcatacactgccttccttccctaaaattccacattacatcttacgtagtacttgattcccttctcacttgttttgttttgtttttttcccaagacagagtcttgctctgtcgcccaggctggagtgcaatggtgcaatctcggctcactgcaatctccacctcctgggttcaagcaattct

SEQ ID NO: 14650 - DNA, 201 bp, Homo sapiens
ctcctgggttcaagcaattctcctgcctcagcaggaggtagctgggattacaggcgcccaccaccatgcccggctaatttttgtatttttagtagagacakggtttcaccatgttggccgagctggcctactcacttgttaattgttaaccgtatttgctcattctagtcagtcttcagctgaaaggtaagttctttgagg

SEQ ID NO: 14651 - DNA, 201 bp, Homo sapiens
cccctttctctaattactccagcatacactgccttccttccctaaaattccacattacatcttacgtagtacttgattcccttctcacttgttttgttttgtttttttcccaagacagagtcttgctctgtcgcccaggctggagtgcaatggtgcaatctcggctcactgcaatctccacctcctgggttcaagcaattc

SEQ ID NO: 14652 - DNA, 201 bp, Homo sapiens
agcatctgcatagaattaggaattaacacaatggtgacaaagtccaaccccacattgcaagccctgctctctgagtggcacttctgcaattctaactaactgtctactcacttgtaaggccttgaagttaagtgggtgcaacaccaaactcaatactttttgttggaacagtggtatctcctaccttttctaacaatggtt

SEQ ID NO: 14653 - DNA, 201 bp, Homo sapiens
gagcatctgcatagaattaggaattaacacaatggtgacaaagtccaaccccacattgcaagccctgctctctgagtggcacttctgcaattctaactaactgtctactcacttgtaaggccttgaagttaagtgggtgcaacaccaaactcaatactttttgttggaacagtggtatctcctaccttttctaacaatggt

SEQ ID NO: 14654 - DNA, 201 bp, Homo sapiens
tgagcatctgcatagaattaggaattaacacaatggtgacaaagtccaaccccacattgcaagccctgctctctgagtggcacttctgcaattctaactaactgtctactcacttgtaaggccttgaagttaagtgggtgcaacaccaaactcaatactttttgttggaacagtggtatctcctaccttttctaacaatgg

SEQ ID NO: 14655 - DNA, 201 bp, Homo sapiens
ctgagcatctgcatagaattaggaattaacacaatggtgacaaagtccaaccccacattgcaagccctgctctctgagtggcacttctgcaattctaactaactgtctactcacttgtaaggccttgaagttaagtgggtgcaacaccaaactcaatactttttgttggaacagtggtatctcctaccttttctaacaatg

SEQ ID NO: 14656 - DNA, 201 bp, Homo sapiens
cactccttggctttttctggctaatacacacatctagctaagaaagctcaacttttctttttactagagatgttctctctgtgtgtgtgtgtgtgtgtgtgcgcgcgcgcgtgtgcgcgcgctctgagtttatcctacttttaaaaagctgagtggtgttttacacattttggaataggcagctagtgcttctttttctgc

SEQ ID NO: 14657 - DNA, 201 bp, Homo sapiens
tttttctgcttttgaagtttcctgggaagtcccttaaaagcataccacaaaattaatctcttcctgtttgccagagggttgctctactctaaatttggctytacatctacaagcatgctctaggaagccaattaaaatggatgaacaagcaaaatgaaaacatacctatggaccaacccaaggttaccgtcaggtggtgaa

SEQ ID NO: 14658 - DNA, 201 bp, Homo sapiens
tcactccttggctttttctggctaatacacacatctagctaagaaagctcaacttttctttttactagagatgttctctctgtgtgtgtgtgtgtgtgtgtgcgcgcgcgcgtgtgcgcgcgctctgagtttatcctacttttaaaaagctgagtggtgttttacacattttggaataggcagctagtgcttctttttctg

SEQ ID NO: 14659 - DNA, 201 bp, Homo sapiens
ttactgggtgtattttagaataaacattcctggaggaaaaagatgtttggctatttctcagaaataacggagcttgaaaggagcatttatcaaaacaactaaaaaaaaatctctgtgactggttgctggattaaaggaagaagacatgaatctacaacataataaattactaattgtttctcaagttcatggccatttgta

SEQ ID NO: 14660 - DNA, 201 bp, Homo sapiens
gctttagatgttaatgttaatgtgatattgatagatatcactagagggtaaactccataaggacaggaacatttcccctttatttccctgctgtatttcartgtttagaacagtacctggtatattgtagttgctcaatagatagttgttgaatgaaggaatgaataaattttaaaaatctgatctgattcttttgaggat

SEQ ID NO: 14661 - DNA, 201 bp, Homo sapiens
atgtgattagtgcactgagaacctgaattttaaatttaatttaattaacttaaggttacatagtcgcatgtagctaatgattagtgtatatcacagcacasctttatatgctcaaagtgatggataaatgggcttctggatttgtaaaagaagagagtcaagaagggactgttagccaagcgcagtggctcatgcttgtaa

SEQ ID NO: 14662 - DNA, 201 bp, Homo sapiens
gtagtgtctttcggcctgtgggagccctcattcctctgcaatcacggtttgggagtggttctatatcctgatacaagagaaatgcttttgtgaaaggcagmtttggaggtatgttgagcagagaagctggaaactgatctccttaaaacattgatttcatcatgtctgtgtttaagttgtggctgcagtttgctattttcg

SEQ ID NO: 14663 - DNA, 201 bp, Homo sapiens
gcagatagaaaactatgaataaatgtagtaaagaaagatatttatttatttatttgagatggagtctcactctgttgcccaggctggagtgcagtggcgcmatctccactcactgcaacctctgcctcccaggttcaagcaagtctcctgcctcagcctcctgagtagctgggattacaggagtccaccaccatgctcggc

SEQ ID NO: 14664 - DNA, 201 bp, Homo sapiens
gattatagacatgagtcactactcctggaccctccattttcaataaacttgaaagtttatgttcaatttttcttttggcaagcatgcagtacttcaaaagyggtgctatgtgctgcacattgtatcacatcaggaggcacacaatgttgttcataccactctctaagcatcctccatcttcccctacgaagtttaagagaa

SEQ ID NO: 14665 - DNA, 201 bp, Homo sapiens
gagcatgaaacatatctgggtgagggagagaacaaggtgctttggtgcaccacaaagtaacaattttataagcagctgattcttataaaatcttaagtaawtgaaatattgtgaagcaaataatattcttaatgcattacagatttttgagccacttctgaaattttcgcgaaccaagaagaattttagtatttggatttg

SEQ ID NO: 14666 - DNA, 201 bp, Homo sapiens
tcaggaggcacacaatgttgttcataccactctctaagcatcctccatcttcccctacgaagtttaagagaaccttggggaaatcatttaaccttgcagakcctcagctttctcatagagacaatggggataatagtagtacacccttgcaaagtttagtgtaaagattacactatgtaatctttgtaaagaccataacat

SEQ ID NO: 14667 - DNA, 201 bp, Homo sapiens
ttgtcctcaagtgattcacccaccttgatttcccaaagtgctggattacaggcgtgagccgccacacccgggtggatgtttaacacatgtaatcatcataraatttcagaatcctaggaatagatagaagatcctagaagtttccagagaggataaaaaattatattctaaggattggaaatcagaacaagattgtacttc

SEQ ID NO: 14668 - DNA, 201 bp, Homo sapiens
tttgctttgttacaaagagatatctgaagctgtgtgctttatgaaggaaagaggtttaattggctcacggttctgcagactgtacatgaagcatggtgccrgtttctgcttctggaaagggcttcaggaagcttacagtcatgatgagggggaaggggagccaacatgtcacatggtgagagggagtaagagagaggaggg

SEQ ID NO: 14669 - DNA, 201 bp, Homo sapiens
ttatgtgcctgtgtccctatcaaactgatagagtcctggaaacagagattatggatttttacttctgttgccctaggaacttgcacagggattggcacatmacagataatcaatcaatgatgaatttaagaaattgtgggccaaccaatttgatgaaattcacttttgcctaaaaaaaaaatttgactgactatttagact

SEQ ID NO: 14670 - DNA, 201 bp, Homo sapiens
gatcttgacaatgtcacattctcactctggacctgtttccttatttggcacgaccactgaataagatctgtctgagccagctgcagtgacatccacctgtrtgtagtcccagttcttggaagactgaggcaggaggatggaggccgggagtttgaggctgtatgattgcgcctgtaaatagccacttttcttcagcctgag

SEQ ID NO: 14671 - DNA, 201 bp, Homo sapiens
aatacaacgtactaagtgaaaaaaggagtgggtggggaacagtgggagtagaaggctgtctaaagggaagctaggaaaatggaaagtaatatggagaagcmacatgctccaagtggagtgttttactatttcattgcctgttgaactgtacacaaataggcactactacataaaatagctatttgaaacagttatgccatt

SEQ ID NO: 14672 - DNA, 201 bp, Homo sapiens
atccccaagcttaaacatttccttccaatagatgatattctatcaggaagagaaaaaaaaaaaaacccaaagtacaactttaatccttgagtgaatgggcwaaaatcaggtttcaatatgctttttagaatacttccatgtaattaatttaacattgacctgcttattaagagtccattattaaggaaacaattgtaaaag

SEQ ID NO: 14673 - DNA, 201 bp, Homo sapiens
ttattaaggaaacaattgtaaaagtcattaagggcatttccacagatcttagctactgactcatcttgctagttctcaataaacgtgacctgaaaatctcycattcgcagtatcaggtaaaatgttatttttctaaccattaggaaacatttactcttgggctgatttttatgtgtttttattgttgttgttaatgtgaag

SEQ ID NO: 14674 - DNA, 201 bp, Homo sapiens
ttcactccttggctttttctggctaatacacacatctagctaagaaagctcaacttttctttttactagagatgttctctctgtgtgtgtgtgtgtgtgtktgcgcgcgcgcgtgtgcgcgcgctctgagtttatcctacttttaaaaagctgagtggtgttttacacattttggaataggcagctagtgcttctttttct

SEQ ID NO: 14675 - DNA, 201 bp, Homo sapiens
tatctcctccagttctctaaaacccttcactccttggctttttctggctaatacacacatctagctaagaaagctcaacttttctttttactagagatgtyctctctgtgtgtgtgtgtgtgtgtgtgcgcgcgcgcgtgtgcgcgcgctctgagtttatcctacttttaaaaagctgagtggtgttttacacattttgga

SEQ ID NO: 14676 - DNA, 201 bp, Homo sapiens
ctttatatttattttaaatcggagctaggcagactagtttctttcatgaatttcttacttctttcttagaattttagagtccatgaaatactgtaaataakgtgtgtgtgtgtgtgtgtgtgtgtgtgtgtgtgtgtgtgtctttaaaaatgttcactttttgttaaactcagtgctaggtattttatgtgcattttctta

SEQ ID NO: 14677 - DNA, 201 bp, Homo sapiens
ttcagtcccaaagccttattcttttccctcaagtctatgcaatcgtttggaatccatcactcatcacctagaggtttcagtgcctttagattagggttctrcacccatagctgatgatccactggactaccacacttggcacctgaacagagccaacaggactggttacaaattcgttgttaattactgtgtgtaattaca

SEQ ID NO: 14678 - DNA, 201 bp, Homo sapiens
atgttaaccaataggggccccaagagacacagaagtcacagaatggtgacactcaggctttgtgtccccgatgccagtttcactcatggatcaagggaggratgaggcaggggaggagggatgttcagaagataagtgagggaggggtggtaatctcccgatagttgttctttcagactttgcacttcccttttagaaacc

SEQ ID NO: 14679 - DNA, 201 bp, Homo sapiens
ttctgtatattagcccttcatcatatggatagtttgcaaaaattttctcccattctgtaggttgcctgttcactctgatgatagtttcttttgttgtgccraagctctttagtttaattagatctcatttgtcaattttggcttttgttgccgttgcttttggtgttttagtcatgaagtctttgcctatgcctatgtcct

SEQ ID NO: 14680 - DNA, 201 bp, Homo sapiens
aattttctcccattctgtaggttgcctgttcactctgatgatagtttcttttgttgtgccgaagctctttagtttaattagatctcatttgtcaattttgrcttttgttgccgttgcttttggtgttttagtcatgaagtctttgcctatgcctatgtcctggatggtatacatttccattttttaaaaatcaaggtcaag

SEQ ID NO: 14681 - DNA, 201 bp, Homo sapiens
catttgtcaattttggcttttgttgccgttgcttttggtgttttagtcatgaagtctttgcctatgcctatgtcctggatggtatacatttccattttttaaaaatcaaggtcaagttagattgttgtcacttgctatgaacatcctgactgatatccttcagccagccagattgccctccagaatactcttctatccttt

SEQ ID NO: 14682 - DNA, 201 bp, Homo sapiens
taaaaactttgacttatttttgtcttctctttatatcaaaccagctgttaaatgtggtaggcagaattctaagatggtccccaagattcctgcaacctggkttaacactttctatataatttcttccctttaagcgtaggtgggacctatgaatatgatgatgtcactctagcgattaggttacattatatggcaaaggca

SEQ ID NO: 14683 - DNA, 201 bp, Homo sapiens
gtgaagaaagtcctatacaggaacagctgcgcatatgggtaaatgcctgggaatggtttaaagatgccttttcaaaacatcttccccacactggtattatkcaatgcctctgtctcaacaattaataagtatttccttttgagttaaaccatgaagtatatagtcacactagctcattttgagatagggcaagactcttct

SEQ ID NO: 14684 - DNA, 201 bp, Homo sapiens
tctgctagggggcaagtttaatgagggagccattcatcctggatctgaggaagtcgtaaagatgacaccaaagtttcaaagggccccagaaccctggcaargttctggcatgaccctcatccctcgtcccccaacactgacagcctctccaccacaatctgcctaagagacaatccaggacaatctcgccactcccttcat

SEQ ID NO: 14685 - DNA, 201 bp, Homo sapiens
agcctctccaccacaatctgcctaagagacaatccaggacaatctcgccactcccttcatcccatataccaaactataaggtcattcctaatagtctagayctacatcctgtttgtttattccctattctgaccccattgcccatttcccacttccaccccttttctgtgctctgtggcccattatcggctaaagccctca

SEQ ID NO: 14686 - DNA, 201 bp, Homo sapiens
gagacggggtttcaccatgttggccaggctggtctcaaactcctgacctcaaatgatccacgtgcctcggcctcccaaaatgctgggattacaggcatacrtgatgacgcccagccaaggctctctcttcttcctcctgatcaatttatgtccatcagtatataaatatgctttatttctatattaaaatactttcccttg

SEQ ID NO: 14687 - DNA, 201 bp, Homo sapiens
ttcaaagcctcaagaaaatgattagaaatgaaccaatgggagaacattttctttgttgggtagttcatccgattattatgtatgttgtttgtcttcttttmatttggatataggttgccttcagctgccagtactgtgaaataagagacgatattataaatcctttggagattaagcatttccatcctaatagctgctgct

SEQ ID NO: 14688 - DNA, 201 bp, Homo sapiens
tgccagtgaggtttgtctcctaagctagccaaagctccactcagaatgacctctttaccattctgaaatatctgctgtttctctgaggaaatctgctgctgaatgtggtgttgctgtgatttgttatgagatacttttgttctcaaggccatcctctcaggaggaggaactatccagagtactcgggaggtggtggtgaaa

SEQ ID NO: 14689 - DNA, 201 bp, Homo sapiens
tttttgaggttgatcgggtcattttgggtcagagcagtatttcccaatatatgttctgtaggattcttgtctcaatggatcaaataagaatgagaaatatmccatatatatcccttttccacttcacggagccacagtgcatgtaagtatatttaaggctctgaaaaatactgtgagaatcaacccttcttctatttatac

SEQ ID NO: 14690 - DNA, 201 bp, Homo sapiens
atgccagtgaggtttgtctcctaagctagccaaagctccactcagaatgacctctttaccattctgaaatatctgctgtttctctgaggaaatctgctgctgaatgtggtgttgctgtgatttgttatgagatacttttgttctcaaggccatcctctcaggaggaggaactatccagagtactcgggaggtggtggtgaa

SEQ ID NO: 14691 - DNA, 201 bp, Homo sapiens
actccttggctttttctggctaatacacacatctagctaagaaagctcaacttttctttttactagagatgttctctctgtgtgtgtgtgtgtgtgtgtgygcgcgcgcgtgtgcgcgcgctctgagtttatcctacttttaaaaagctgagtggtgttttacacattttggaataggcagctagtgcttctttttctgct

SEQ ID NO: 14692 - DNA, 201 bp, Homo sapiens
aggcttctgatgcggttaagttttaatgccaatttttttcaataacataattatataaatatactaaaatacaataaatattgttttttgttttacatggkgaataatatctttaccatagagagaacaaggccacagacatttacttacattttcaatgggaatcgccataaaaaagcaacaggcctgctgccatgcatg

SEQ ID NO: 14693 - DNA, 201 bp, Homo sapiens
catgccagtgaggtttgtctcctaagctagccaaagctccactcagaatgacctctttaccattctgaaatatctgctgtttctctgaggaaatctgctgctgaatgtggtgttgctgtgatttgttatgagatacttttgttctcaaggccatcctctcaggaggaggaactatccagagtactcgggaggtggtggtga

SEQ ID NO: 14694 - DNA, 201 bp, Homo sapiens
cctccagttctctaaaacccttcactccttggctttttctggctaatacacacatctagctaagaaagctcaacttttctttttactagagatgttctctbtgtgtgtgtgtgtgtgtgtgtgcgcgcgcgcgtgtgcgcgcgctctgagtttatcctacttttaaaaagctgagtggtgttttacacattttggaatagg

SEQ ID NO: 14695 - DNA, 201 bp, Homo sapiens
ggggatgaaattttccactgctggcatgtctgggcaagtcacctgtgtagcctttcttatctgtgcagctgtgggcatgtcttaggcaagtaccccagtgyaagttcccttatctgtgcctgcaggctgttcttttgtttctaaaaattcaatccagggcccatcctaactgcctgcctgaccggtttctttctttttcct

SEQ ID NO: 14696 - DNA, 201 bp, Homo sapiens
tttctgagggataatttgaggaaaaaccttgtctcatatctatatttacataacccagtgttgtttgtgtgtgaatgtgtatatgtgtgctgaaatacctstttacgtgctagaaacaccctcgtggtaatggtggcatagtgggtaattgttttcatcaggatttttcttgagaataggctgctagcaagtgctgtatgt

SEQ ID NO: 14697 - DNA, 201 bp, Homo sapiens
acggcaccaaatttcatgtgtgtccgtgtgaagagaccaccaaacaggctttgtgtgagcaataaagcttttaatcacctgggtgcaggtgggctgagtcygaaaagagagtcagcaaagggagataggggtggggccatttataggatttgggtaggtaagggaaaattacagtcaaaggggggttgttctctggcaggc

SEQ ID NO: 14698 - DNA, 201 bp, Homo sapiens
ggtggttagaccacagaagaacccccaggggaaggtaaaggcctggggataaagacatggccctttttattctgtcatccttctctccttgtaatctcagyactgatgaaccattagaatctccatggaaggttttaaaaaaacacatgctgtcacctgagaacatttaagtcagaatgtctgggagtggaccccaagcat

SEQ ID NO: 14699 - DNA, 201 bp, Homo sapiens
agttgagaacggtgaataggagtatgactagacagaagatagtagggatgacaagatttttggggcacagtctaagttggtctggtgtctggaatgagacyggggcctaataaaaaggagcatctatacaggagcttaaatgggctgtaccctgtagcattccgaggacaggcctgaattctgagaagggaaagtggtaaa

SEQ ID NO: 14700 - DNA, 201 bp, Homo sapiens
ggctacatagtattccatggtatatatgtaccatattttctttatccattctactattgctgggcatttaggtttattccatgtctttgctattgtgaatrgtgccgcaatgaacatatacatgcatgtgtctttatggtagaacaatttacattccttcaggtatataattaataatgggatttgctgggtcaagtggta

SEQ ID NO: 14701 - DNA, 201 bp, Homo sapiens
gccagcaaagattatttatttacttcaagagttaacagtggcagtttggggatagcaccaggagatatcagctgtgatggcttggaaaaacagtgtaaacyggcagtgtaaacaagagcagggtatgagtagttgagaacggtgaataggagtatgactagacagaagatagtagggatgacaagatttttggggcacagt

SEQ ID NO: 14702 - DNA, 201 bp, Homo sapiens
gagaaagaagaggcagcactctccaatggcatggagaagttgagtaagatgaggtttgaaaagtctcagtgtgtttgtccaatagaacagcagttctcaayctttttggcaccaaggaccggttttgtggaatataattttttcatggaggtgaggggatgggatggtttggggatgaaactgttctgcctcagatcatca

SEQ ID NO: 14703 - DNA, 201 bp, Homo sapiens
tgcactcacctctctccagccgcacgggttcccctagcgccgccatcttctcccttaacctacagacccacaggaaatgacgacagaagggctgaggtggsggggcggggcctaggggaagccggaaaagtgagtaccggctagtatcgcgagatcaggaaggtggccgagtgtgtcgccgcggccatcagggtaagggta

SEQ ID NO: 14704 - DNA, 201 bp, Homo sapiens
ggaaggcagggaaggtggagcatgttgagagaagagaggtggataaagtcacccagctctgagcaggccaagggtagatttggtctatattttaatttaargctggcctggtttcattgatggtgatatgatccctatgtgtgggaataggtgaaatggtttgatcaccatgggaccataatccattacccaaagccttca

SEQ ID NO: 14705 - DNA, 201 bp, Homo sapiens
tgttaattactgtgtgtaattacactagacccaaggttggagggagacaccctactctgttgttgtcttatatacgaattctgtataattttttaaaagcscaccatttttactttctaattaggatatggggatttggggcagcaacctttgttatttaatcatgctttttctggggaggggaggagaggaaaatatttt

SEQ ID NO: 14706 - DNA, 201 bp, Homo sapiens
ttacactgcattcattcaatttaatagacacttgttgactgctttccggtacatggctaggtgaactgcagtgggtacacaggtgaatgaaaatgtccacygctctagaagagtttatacaaataactgcagcttagtaagggagcaattattttacccaagaaaatgctaaaggcttcatgcaattgaacctttaacata

SEQ ID NO: 14707 - DNA, 201 bp, Homo sapiens
gtctcacaaatccttttttactattcatcaaacctttgcagagacacacagtgacatttattgcttaccactgcccccctccaacacacacacacacacamtcacacagacacacaatgcagagagacagagagaaagagagagagagaggccagacacttttctggtaagaattcttgccctttgtgccagcatatcagg

SEQ ID NO: 14708 - DNA, 201 bp, Homo sapiens
ttttttaaaaacaagatttagaatatccccaaaggtagtacagtgaaaggaaaattcaagacaggaaatcagaagctatctatggggtgaaaaaaaaaaaacctcaataaatggcaaagttccacaaataacaaaccagaaaggaatcattctgtaagccaagaattgaacctgggccaccattgtcaagagataaaaacc

SEQ ID NO: 14709 - DNA, 201 bp, Homo sapiens
catgtgtcaggggatgaaattttccactgctggcatgtctgggcaagtcacctgtgtagcctttcttatctgtgcagctgtgggcatgtcttaggcaagtmccccagtgcaagttcccttatctgtgcctgcaggctgttcttttgtttctaaaaattcaatccagggcccatcctaactgcctgcctgaccggtttcttt

SEQ ID NO: 14710 - DNA, 201 bp, Homo sapiens
cacacaagaatcaaatgtatttctttatactagcaatgaataattggcaactaaacatttttaaaaaatttacattagctccaaaaaatgaaacacatagrtgtaagtgaaacaaagcatgaacagggtctgtatgctgaaaattacaaaaacttagtgaaataaagcaaaaaagacctaaataaatggagagatacacag

SEQ ID NO: 14711 - DNA, 201 bp, Homo sapiens
ggtctgatgggcctttctagctatgtgatgtctaggcatgaatagcacaataaaacagcagttggggaactataaggagcctttaaattgacttttttttycctcttcccacagagatactctattatagcaaagaagaaagataatttcattgagccatcctgttttacaggtaaggaaaccaaaggccatagaagactt

SEQ ID NO: 14712 - DNA, 201 bp, Homo sapiens
tttgaagaaaaaacccttggaagagcactccctctctgctggactagagtttaactatcatcatgttctttgtgaatttgatagccttttaatccaccgargccatgaccttcttgtaatgtgttgacttcctctaccgccagtgtttctctcgagggacctccatctgcatttgtttgtggctgtccctctcagtgacat

SEQ ID NO: 14713 - DNA, 201 bp, Homo sapiens
ggtatcacccaagaccaagagaattaaggagtatggacccaaagggtgaggtcggagtgaaagtttaataagtgaatgaagaaagctctctgttgcagaarggggacctggaagaggattgctgtttttcacagttgaatgcaaaggcttttataggaaactgatgagggctgggcattttgtttgcataaggcatgtttt

SEQ ID NO: 14714 - DNA, 201 bp, Homo sapiens
cctcaaattgattcatagattcaactcaattcaaatcaaaatcccaacaggactttttgtaggtatataaagctgattctggaatttatatgaaaagaccktatagcatagggacaatagttaaaaatactgtattgtatacttgcaatctgctaagaagatagatcttaaatctcctcactatacacatacacaaatagt

SEQ ID NO: 14715 - DNA, 201 bp, Homo sapiens
cagtgagagaggttggagaagagagtaagaagaggccgcttacctgatttaaaattggtgagatgttcgttgggctggtcggtctgaggacctgaggtcgyaggtggatctttctcacggagcaaagaacaggaggacaggggattgatctcccaagggaggacccccgatccgagtcacggcaccaaatttcatgtgtgt

SEQ ID NO: 14716 - DNA, 201 bp, Homo sapiens; identical to SEQ ID NO: 2799
  misc_feature (1)...(201): n = A,T,C or G, or insertion/deletion polymorphism (see Tables 1-2)

SEQ ID NO: 14717 - DNA, 201 bp, Homo sapiens
aagaagaggcagcactctccaatggcatggagaagttgagtaagatgaggtttgaaaagtctcagtgtgtttgtccaatagaacagcagttctcaaccttkttggcaccaaggaccggttttgtggaatataattttttcatggaggtgaggggatgggatggtttggggatgaaactgttctgcctcagatcatcaggca

SEQ ID NO: 14718 - DNA, 201 bp, Homo sapiens
gtccactgcagtctttttgtctgccgccgttacccactcactaatactgtcacacacgctcagctcccctcggcgggcagggtcagagtggcgccggaccvtcatggacatgtttgcagcatctaggtaatttttgtattcctccagcagaaagagaagaggaggctccaaaggcacttgactactgagcatcaccctgga

SEQ ID NO: 14719 - DNA, 201 bp, Homo sapiens
ttgtacattgtaaaggtcaaccctacaaacagcagctgtgaaacacaacacaaccctgagggggtggccatggccaaacataggaggggaaaaggacccaktctcaaaagcatctgagatactgagatagtgcagaggaatgaaatcttccaaaagatggaatctaaacataaacagacatcaagagcgggctgacttgca

SEQ ID NO: 14720 - DNA, 201 bp, Homo sapiens
cagagaggttacagtgagctgacagccacatacacatccattctacttgaccatttttttttttcccattttctcacatttacttgtacctttctggaaasgcactgagtagaggggcaatactcaagataagcaatgaaagttaaccataatgttttctttcttttcttttcttttttctgtgacagggtctcactctgt

SEQ ID NO: 14721 - DNA, 201 bp, Homo sapiens
gacagtgagagaggttggagaagagagtaagaagaggccgcttacctgatttaaaattggtgagatgttcgttgggctggtcggtctgaggacctgaggtmgtaggtggatctttctcacggagcaaagaacaggaggacaggggattgatctcccaagggaggacccccgatccgagtcacggcaccaaatttcatgtgt

SEQ ID NO: 14722 - DNA, 201 bp, Homo sapiens
gggcacggaaataagggatggggcacagaaataagggatggggcatggaaataagggatgaggcgtggaaataaggggtaggggcacagaaataaggggtyggggcacagaaataagggattggggtgcagagatacgaggttggggtacttgcccctcctctagaaaagtgggacttgccactaagagtgaaggagaagg

SEQ ID NO: 14723 - DNA, 201 bp, Homo sapiens
gctcaggttcggtgggtggatgtctgcttgagttcattcagttacttatggggtgtgtaaccttaaaaaagtatcttgacctctttaagactcagtttccscctctgtaaaatgggttccttgtgagtacaaaagatatacaatatacctagtgcagtgccagacttattaaacaaaatacttcatattagattttaattt

SEQ ID NO: 14724 - DNA, 201 bp, Homo sapiens
tttgttgtatagaatgattggtgatggcctagatacggttttggatgaattgagaaactaaatggaataacagaaggagaaaaacaggtataaaaggtctragaattgggacgactcaggatatctgattagagagtgcctaaggagatacagcatagtcctgccagcaaagattatttatttacttcaagagttaacagt

SEQ ID NO: 14725 - DNA, 201 bp, Homo sapiens
ggcacagagactgggaagggactgatgtgtaaaagaatgcctggatgtcaggcacctcagaccatttgcctattttatgacaagaattatttagatcttgyaggatggaaaaagtcaaagtgccattttctggctatttggaactgctgttgagtttgtattggggtcaggcggcattgcagaagaaaataaggcatttag

SEQ ID NO: 14726 - DNA, 201 bp, Homo sapiens
tactcttctttacctccattgtttaggagtagttcaattttggtggtttggatcaatcactccagccaacactgtaactcccttctttgcttattgacatrgaggcattaggagcccaacatggttgggtggcagtcttaacttccagttcaatggagtcattgttgtatctcctggtggaagcagtcttccctctagaac

SEQ ID NO: 14727 - DNA, 201 bp, Homo sapiens
ggtcagatgggtctgtagaaaaggaagattagaaagactcagcgacgcttggtgttgggactgaggggacaggcgggagggaaagaaggaagatttgggaygagttgcactgggcacagagactgggaagggactgatgtgtaaaagaatgcctggatgtcaggcacctcagaccatttgcctattttatgacaagaatta

SEQ ID NO: 14728 - DNA, 201 bp, Homo sapiens
ttacctccattgtttaggagtagttcaattttggtggtttggatcaatcactccagccaacactgtaactcccttctttgcttattgacatagaggcattrggagcccaacatggttgggtggcagtcttaacttccagttcaatggagtcattgttgtatctcctggtggaagcagtcttccctctagaactatgacctc

SEQ ID NO: 14729 - DNA, 201 bp, Homo sapiens
ggctatttcaacatgcccacaccatagacccctagaaatttaactgaggtagatagatcacacctaaactttaattggatttatatcccaccctgtaacaygtaaatgattaccaatcaaatctaaagcggttgctactttttgctcactaggtccaatcagcataatgtcatcaacgtaatgaaccagtatgatgtcttg

SEQ ID NO: 14730 - DNA, 201 bp, Homo sapiens
tctttatatctagtatctagatatatctttatatctagtatctagatatatctttatatctagtatctagatatatctttatatctagtatctagatatayctatatctagatatagatatatatatggatatatatgtggtaactgtgatatatacatacatatatatataaaatggaatactactcagcccaaaaagga

SEQ ID NO: 14731 - DNA, 201 bp, Homo sapiens
tagcccccagtccacaagtcaaggaaccaatgtggagattctgccagtggctaagtatgtcattccaattatttcttctggaactgggaaataactacagratggattctgacacctattgtgagatgaacttgagctaaaacttccattgatcacctgacctatataagcccctcctctgaatgagaggctacagtgaca

SEQ ID NO: 14732 - DNA, 201 bp, Homo sapiens
tcatactggaaacgatatgaccaactatggcaggtagtagatgtccagtcacactagtattgctttcagccagatgtctctggtccttgtgagttcctttsgtccttaatggtgaaatagcaacagagggaaccaactcactcactcaaggcagatttcttatttctagacttgtcctgaaaccaacagatccagctctct

SEQ ID NO: 14733 - DNA, 201 bp, Homo sapiens
ggcttactgacttgaaaaaaaattttttttaagtaattgagcagtttgaattaattaaaagtctgaattaacaaaatctgccagaatagacttcatttaatttttttttgtagaaattacaaaagtgccaggaatttaattctctgagtgacatccttgtggtgagattaggtcaataaaaagctggagaaaacagccaga

SEQ ID NO: 14734 - DNA, 201 bp, Homo sapiens
gtgcaccagatttgccacagcctaagactagtctcacaaatccttttttactattcatcaaacctttgcagagacacacagtgacatttattgcttaccaytgcccccctccaacacacacacacacacactcacacagacacacaatgcagagagacagagagaaagagagagagagaggccagacacttttctggtaag

SEQ ID NO: 14735 - DNA, 201 bp, Homo sapiens
ctcggctcactgcaacctctgcctcccgggttcaagcgattatcctgcctcagcctcccaagtagctgggactacaggcgcacgccgcaacacctggctartttttgtatttttagtagagatgaggttttgccatgttggccaggctgggcttgaactcccgatctcaggttatctgcccgcctctgcctcccaaagtgc

SEQ ID NO: 14736 - DNA, 201 bp, Homo sapiens
taagcattcccttttctccacagccctgccagcatttgttttttgactttttaatgattgccattttgactgctatgacatggtatctcattgtggttttratttgcattatctctgatgattactgatgtggagcattttcccgtttatttgttggccacttatatgtcttctttttagaagtgtccatgtcttttgccc

SEQ ID NO: 14737 - DNA, 201 bp, Homo sapiens
agtccctgagaagccagagaatgatatcttggctaaaggagtatttgatgttagttgaactgtaaatttttaggaatttaatattgattacagttatatgcaaagaggacatgaggaatgtgatgggctgccatcagccaggagagactgttgtacttggaaccataagaaacatgtgtgagtggtcagggtgctgaaaga

SEQ ID NO: 14738 - DNA, 201 bp, Homo sapiens
agtattgcatggtgtatatgcgccacattttctttatccaatctatcattgatgggcatttggattggttccaagtctttgctattgtgaacagtgctgtwataaacatacgtgtgcatgtgtctttatagtagaatgatttataatcctttgggtatgtacccagtaatgagattgctgggtcaaatggtatttctggtt

SEQ ID NO: 14739 - DNA, 201 bp, Homo sapiens
tgtgtctttatagtagaatgatttataatcctttgggtatgtacccagtaatgagattgctgggtcaaatggtatttctggttctagatgcttgaggaatygccacactgtcttccacaatggttgaactaatttacactcccaccaacagtgtaaaagcattcctatttctgtacttcctctccagcatccgttgtttcc

SEQ ID NO: 14740 - DNA, 201 bp, Homo sapiens
gcacattttataccttgtttaagaaattctcttctagatcaaggttaaaaatatatacttctttattttttattaaagttttgaaaactttgtctctctcrgaggtcatcaaaccatcaagaattgatattttgcatatagtataaggtaggaaaatacaatttcattttcccttatatggttggtcattatttaaatata

SEQ ID NO: 14741 - DNA, 201 bp, Homo sapiens
gtagaatgtcattcaatttggaatgttttctcatgattggattgaggctgtgtgtttttggcaagagcactacaaaaatacacctatatctttctcaaggkatcattatccaggagtaatgatcttgatatgtcttattgctggaggactttatcttgatcagttgttttaagtcggtgtctgatcagttaggccaaatta

SEQ ID NO: 14742 - DNA, 201 bp, Homo sapiens
ggcctgagcatagtggcattataaccaaatgaatgtctctatctgaagaatacaggttaagagacccatattgaactgaagaaagggctctatagtagtcrttggaaggctcccttctaagctcatcagagtctccatgtagagattgccattttccacgttgtatattttgctttttatgaacagctcttaattttaatt

SEQ ID NO: 14743 - DNA, 201 bp, Homo sapiens
agatagagtcttgctctgttgcccaggctggagtgcaatggcgtgatctcagctcactgcagcctccacctcccaggctcaagtgattctcatgtctcagyctcccaagtagctgggattacaggcatgagccaccatgcccagctaatttttatatttttagtagagacagggtttcaccatgttggctaggctgctctt

SEQ ID NO: 14744 - DNA, 201 bp, Homo sapiens
tctcgtagaagtattgcttcagttggccttttgatacagggaccttttcaaggactgtgaccgtcccgcccgacatgtccactgcagtctttttgtctgcygccgttacccactcactaatactgtcacacacgctcagctcccctcggcgggcagggtcagagtggcgccggaccctcatggacatgtttgcagcatcta

SEQ ID NO: 14745 - DNA, 201 bp, Homo sapiens
ggcagcacctaggatactcaccaacccagacaccctacaatggggctatagacagacaccctgtgatagggctacagttatgggacgtctccccaggactrtttctctattaaatccatgcccattgggtcgggagtgccctgtcagtagagagagtaccagagtcaactcccagtccaagtgaactaggtggctgcttgg

SEQ ID NO: 14746 - DNA, 201 bp, Homo sapiens
aggagtgagaaaggacaaacaaaaaaccagggatgagaggggtgaggtatagtttggaaacaggcaatagatggttcaataaaagtggaccctgggatatrtgcaggagagcagggaaaggtgaggcctgcaaccctccctaggtgaagtcagatcacaaggggcctcaagtaccaagctaaagagtgtgcatctaaaatt

SEQ ID NO: 14747 - DNA, 201 bp, Homo sapiens
tatgtcctctgaatttatattctagttctgctatatgctcactgagtgatcttctgcaaattactgcctctctcagcctcagttacctgaaaaataggcawaattagatctacatcttacatctctcatcaggtttatcacagtgacatacaattgccaagcaggcaagtccaccttgaatgcctttttgactcgtttgag

SEQ ID NO: 14748 - DNA, 201 bp, Homo sapiens
ttgtgtaacgtattacgaagtgttttcatgttcattattgtcattgaaccttcagagagatcattctgctatcatgggaggatgttggaagtgggttgggktagagagattgggggtagagagatgggttggaaggctgctgtgatagcccaggcgagatgcaatgaagacctgaaccagagtagtggaaaggtgagctga

SEQ ID NO: 14749 - DNA, 201 bp, Homo sapiens
tgaagacctgaaccagagtagtggaaaggtgagctgaaagtgaaaggaatggatgaaaacaaacggcacagaaataaaaacaaagggaagttctgacaccygcgttttggtctccttgacattgcttccatttcctctagggacatgtcctggataagggtgaaactggatgctccttggcagtttcagatgtcaccaccc

SEQ ID NO: 14750 - DNA, 201 bp, Homo sapiens
catctgtagatgagagatcctcatctgtagactcagccctcctgcagccattagtgcctctcctgtttctaatcacagggaatctaaagaaatttaaggascctcgttcaggagctcagtgttagattgagctttctggtgggtccattctgactctgaatgttgattttactatctaaaatcattattcttgtttctatg

SEQ ID NO: 14751 - DNA, 201 bp, Homo sapiens
aaaccctacattcaggtttttcagcacagagtagggttgtatccacttttggaaaggcctccatgcaatgaaagactgtttgcatgttaaccttaaaagaycaatccaggactcttctgaaagctaaaaattctaagcaccactggtggtctccctttttgaaggaagccaaatcccttggacatgtaactagctattcca

SEQ ID NO: 14752 - DNA, 201 bp, Homo sapiens
cagctgcgaagccgagaagatctgggaaggagtcagtcagagagccttgggccagagttccagggcctctgggagtggctgccaggtgagttgaacagtcygattttcagtggggtcccacacagatgggacacggcttaggaggaatcctgggctgcaggcattccttggcctggtggtcagatttctggcacttgtggc

SEQ ID NO: 14753 - DNA, 201 bp, Homo sapiens
agcctccgtattgattaagaaggggacaggcttgccttccactgtgagagttacccgaagctctgcgtctgtgatggtctagggggcttccgaggccatcrggcagtgtcagtcttcagctgcgaagccgagaagatctgggaaggagtcagtcagagagccttgggccagagttccagggcctctgggagtggctgccag

SEQ ID NO: 14754 - DNA, 201 bp, Homo sapiens
agcagcagcagcaacaacaacaatgaaatattaaaatagtaaatataagtatcaaacatcaaaaccccctctccaaccaaaatctctcttcttcgataaasttcccaggaggtaacccaatttctaggttggtgtccaatatttgggatcatttgattcaagactgaagtacttaaaatggcttttaaaaaaggaaaaaag

SEQ ID NO: 14755 - DNA, 201 bp, Homo sapiens
acgcaaaggaggctttggattgggaagaagggtggcaatgagatatagctgtagtccagggatagtcagggaagcagataatttagttaaagtgtctcagyctaataagggaactgggcaggtggggataactaaaaaggagtgcttaaaagagtattttctaagttggcaccagagttggggagttttaagaggtttaga

SEQ ID NO: 14756 - DNA, 201 bp, Homo sapiens
agccttgtttatctggaaatcatttctttctgcttatatcatttataaatagaaaatgttctgtaataacttaaaatagttccacatacataatgcttttmgtgtcataatacttactactggtctatatttaccaacatttatcacattttacaaaatgaagtagaagaaaaaaaagacaacgactttatggccctggaa

SEQ ID NO: 14757 - DNA, 201 bp, Homo sapiens
tgaccccactcaaagtatcatccagctatttctgggtatttccatggggatggaatagatcccttgggctcttcctacctgagtttctccacctcttctcytcttctctgagtttcatgctattgtccatgctctgttctccttgtggttcactgcttttctgtgcctatctttgttcattcccacctcccatgaacccat

SEQ ID NO: 14758 - DNA, 201 bp, Homo sapiens
aggacagaataatgggttatagagacaggtattgaggataggagagtatatgggtttggcatcacagggtggataggcaaaacaatttggttgataaggcrcagatcctgaactaacttgtaaggcttgtctggttttaggacaggtaaaatgggggaattgtaaggagagtttataggctttaaaaggccatgctatagc

SEQ ID NO: 14759 - DNA, 201 bp, Homo sapiens
aaaaatacaaaataaaaatacaaaattagccgggcatggtggcacatgcctgtaattccatctactagggaggctgaggcaggagaattgcttgaacctgrgaggaggaggttgtggcgagctgagatggtgccattgcactccagcctgggcaacaagaatgaaacaccgtctcaaaaaaaaaaaaaaaaaaaaaaaaaa

SEQ ID NO: 14760 - DNA, 201 bp, Homo sapiens
gtcagggtcagtccaagtgaaagcgaagagaggctgggattaagggtgcaaaggaatagtaaagaaagcatgtttgagatctaggacagaataatgggttrtagagacaggtattgaggataggagagtatatgggtttggcatcacagggtggataggcaaaacaatttggttgataaggcacagatcctgaactaactt

SEQ ID NO: 14761 - DNA, 201 bp, Homo sapiens
cgacatgtccactgcagtctttttgtctgccgccgttacccactcactaatactgtcacacacgctcagctcccctcggcgggcagggtcagagtggcgcvggaccctcatggacatgtttgcagcatctaggtaatttttgtattcctccagcagaaagagaagaggaggctccaaaggcacttgactactgagcatcac

SEQ ID NO: 14762 - DNA, 201 bp, Homo sapiens
acaggaacaatatataagagaggtgggaaactaaggcagtagcttctctgtgctaagtgaaaccatatatgtgttgaagtcatccccattttctgtacacmtgctgtgtaggtaaggggagataaaggaagctgtgcatacatatacttttaggacctctaagtagtaataaggctgtttttcttgacttctatgcttcta

SEQ ID NO: 14763 - DNA, 201 bp, Homo sapiens
ttggacagaaaggctacagggtgtggtcctggctcttgtgtaagaattctgaccatgctagccatgcctaggaaggaaaggagttgttgttttgtagaagstgcttgggtttgagagatcagtcggacacgattggcagggagagcacgtgtgtttttatgagaattatgccgagataggtaacagatgaggaagaaattt

SEQ ID NO: 14764 - DNA, 201 bp, Homo sapiens
aatgttttggttcaaatttttgttgtgtgtgtgtgtgtttttttctgttttctgaaagaggacagtttattatcaattcacaattaaagcagcatgcaatktattattttttttaactttttatgttttcagttcttggcaacggcaacaaaccacaacattatcaaggaatgtaatgcagactttttaagttgtgcgcaa

SEQ ID NO: 14765 - DNA, 201 bp, Homo sapiens
tgccaacttagaccattatttcccagaaacattcctcttagtctatcgatttcattcccttgcaatgcactggcctttacacctgcatagtcaacagtgaktaaagacagcatttctgtctctcctgccacatcggtacatttgtgtataggtaggtgttgctatttgtgtaacgtattacgaagtgttttcatgttcatt

SEQ ID NO: 14766 - DNA, 201 bp, Homo sapiens
aatagattttggaagttatgagaactgtagagagtgagttgagcatagcttgtgattttgagggcctctaaaagtattaaagcagcggcagccgctgcacrcagacatgagggctaggctaaaacagtaaggtcaagttgtttggacagaaaggctacagggtgtggtcctggctcttgtgtaagaattctgaccatgcta

SEQ ID NO: 14767 - DNA, 201 bp, Homo sapiens
ctcacatttacttgtacctttctggaaaggcactgagtagaggggcaatactcaagataagcaatgaaagttaaccataatgttttctttcttttcttttyttttttctgtgacagggtctcactctgtcacccaggctggagtgcagtagtgtgatctcagctcactgcaacctctgcttcctgggttcaagtgattctt

SEQ ID NO: 14768 - DNA, 201 bp, Homo sapiens
aaaaggttgcatattgtatgattccatttatataatattattgatgtggcaaaatcataatgctgcatagatctatgattgccaggagttaggattggggstaggatatgatcattaaggtgtaactcaagggagtttctttgtggtgataaaacagttctgtatactgactggtgatggttacaccaatcatagaacgat

SEQ ID NO: 14769 - DNA, 201 bp, Homo sapiens
cattcaccaagtctgtgtctaaggatcaaagatagaccagagaggttacagtgagctgacagccacatacacatccattctacttgaccatttttttttttcccattttctcacatttacttgtacctttctggaaaggcactgagtagaggggcaatactcaagataagcaatgaaagttaaccataatgttttctttct

SEQ ID NO: 14770 - DNA, 201 bp, Homo sapiens
tgttggccgcataaatgtcttcttttgagaagtgtctgttcatatccttcaccgactttttgatggggttgtttgtttttttcttgtaaatttgtttatgytccttatagattctgtatattagcccttcatcatatggatagtttgcaaaaattttctcccattctgtaggttgcctgttcactctgatgatagtttctt

SEQ ID NO: 14771 - DNA, 201 bp, Homo sapiens
aatatacagttaaatctaaatgtgctctttccaccagaagaataaagtctgttaccagctgaagatgagaaagtggaaataggcatagctgagataaattwaaaaaaaatgggagccttgggcatttttcataacagccctggagttagtggttggctgggaggagggactgtcctgtgtgtggctttgaagttatgtgga

SEQ ID NO: 14772 - DNA, 201 bp, Homo sapiens
gaggatgttcaggagttagtgcagtgctaggcatagagtaaatgcctaatgaatgtttactaattagtatgaatgaatgaatgaatgaataagcaattgartgaacaagtaaaagaatttcctaaaggatattgtcaaactagatcaatataatgctgcacagaaatttaatttatgctgtgtttatagcaactctagcga

SEQ ID NO: 14773 - DNA, 201 bp, Homo sapiens
gacatgcagcctgtgtttcagggatgattttacattccagtatggaatacagaaaagtgaacaggcaattgcaactcagtgtaataagtagaatacatctwctgattataattataacaataatagggatgtatttcttaggtcattctctcaactatcccttgagctaggtagtaattttattcctgttttactgaaaaa

SEQ ID NO: 14774 - DNA, 201 bp, Homo sapiens
caacatagcaagaccctgtctctacaaaaataaaaaataaaaaaaattagctagtcataatagtgtgtgcttgtagtcctaactacttaggaggctggggygggaagattgctcaggcccagaagttcaaggttgtagtgtaccactacactccagcttcggtggcagagcaagaccctgttttggaaaacaaacaaaaaa

SEQ ID NO: 14775 - DNA, 201 bp, Homo sapiens
tttacattccagtatggaatacagaaaagtgaacaggcaattgcaactcagtgtaataagtagaatacatcttctgattataattataacaataatagggrtgtatttcttaggtcattctctcaactatcccttgagctaggtagtaattttattcctgttttactgaaaaagcttgaggcttggtcaattttgcaagtt

SEQ ID NO: 14776 - DNA, 201 bp, Homo sapiens
ctggcctgacctgcagattgtggactcaacactgactgaaacatcaactcatctgaattttcagaccaccagcttgccctacagattttggactggctggyccccacaactgaataagccaattccctaaaatctcctctctctctcctctccctctcgactagtacacatgtgtatatgtaacatctggattcagagaaa

SEQ ID NO: 14777 - DNA, 201 bp, Homo sapiens
ctaagatggtccccaagattcctgcaacctggtttaacactttctatataatttcttccctttaagcgtaggtgggacctatgaatatgatgatgtcactytagcgattaggttacattatatggcaaaggcaaagggatttcacagatggaattaaggtccctagtcacttgattttgacttaatcaaagtggattatcc

SEQ ID NO: 14778 - DNA, 201 bp, Homo sapiens
ggtaaacaagagttatctctctgagtcttccagaaaagacaaagtgaccctggatgctaatggcacagatgagatgggatctcttccaggagtctgaataygagaaaagagtctctgaagtgtgtactagatgagcccagcttattaccagtcagcagagtgacttccaagagtttgtaaacattttctgaggctttctca

SEQ ID NO: 14779 - DNA, 201 bp, Homo sapiens
gctaacagtgatcccagattgcatttatttatttctccttagtttctttcagtctataagtctataacagttcctcagtctttccttttttttttttttgkgacattcacacttttaataagtaccagtcagttaatttgtagaatgtcattcaatttggaatgttttctcatgattggattgaggctgtgtgtttttggc

SEQ ID NO: 14780 - DNA, 201 bp, Homo sapiens
ttaagattgaccctgagtaaaacgtaaatttcatcaaactgtagtaacaatacactttctttatcctaacacatacattgccaacactgctcccttaaaamacacacacacacacacacacacacacacacacacgcacacacaaaaccactgcttagtatttctgaaatcaggttgtcagtctaaatactgagatttgtt

SEQ ID NO: 14781 - DNA, 201 bp, Homo sapiens
ctattcctgtttgttagttttccttctaacagtcaggcccctctgctgcaggtctgctggaatttggtggaggtccactccagaccctgtttgcctgggtrtcaccagcagaagctgcagaacagcaaagactgctgcctgttccttcctctggaaggtttgtcccagaggggcacccaccagatgccagccagagctctc

SEQ ID NO: 14782 - DNA, 201 bp, Homo sapiens
aatagcacaataaaacagcagttggggaactataaggagcctttaaattgactttttttttcctcttcccacagagatactctattatagcaaagaagaawgataatttcattgagccatcctgttttacaggtaaggaaaccaaaggccatagaagacttgccttatgtcatgaagaaagtttatgttagaactcagggc

SEQ ID NO: 14783 - DNA, 201 bp, Homo sapiens
ctcactctctttccttttgaggcagggtctcactctgtcacgcaggctggagtgcagtggtgcgatctcagcttactgcagccttggcctcttgggctcamagcgatccttccacctcagcctccatagtagctgcaactacaggcacacaccaccaagcccagctaatttttatgttatttatagagacagagttttgcc

SEQ ID NO: 14784 - DNA, 201 bp, Homo sapiens
taattgtaataagtttaggaaaatatattctttattagtagcattaatatgttcacccttttattccacactcatattttagaaaataactacagagatayaatagatactcataattgcatatacactgtattaaggtcaaaggtggctacattgttaaaactaagctgttttggccaaccaatggccaatttcacccaa

SEQ ID NO: 14785 - DNA, 201 bp, Homo sapiens
ttgcaggagataggacagggttatgttttgagctgtaaagaattttctatggttcatagttgtggcataaactactaattgtatctttcaacactcatttytcctttcttctaaaacaatagaaaccaggttctattcattgtcactgtgctcagctatagccctaaaattctcaactttccttgcagggggttatagcca

SEQ ID NO: 14786 - DNA, 201 bp, Homo sapiens
atatggatttaatgaccagagctccagaagccatctaaaaccatgaggcgtgcttgaagatggaagccatgtacggagggtaacagagcagaaagttaggrgcctggcttcctgatgacaccatgaagccactatacaaatcttattcctcgaaattttaaaacaaaaaatagcttttttgagatataacttatatataca

SEQ ID NO: 14787 - DNA, 201 bp, Homo sapiens
agaaagttaggagcctggcttcctgatgacaccatgaagccactatacaaatcttattcctcgaaattttaaaacaaaaaatagcttttttgagatataayttatatatacagttcaccccttgaaagtgtacaatccaatggtttttagtttgttcacagagttgtgcaaccatcaccacaatcaattttagaacatttg

SEQ ID NO: 14788 - DNA, 201 bp, Homo sapiens
ggccagggctggtggctcatgcctgtaatcccagcacttcgggaggctgagacatgtttatcacttgaggtcaggagtttgaacccagcctggccaacatygcgaaactccatctctactaaaaatacaaaaattagccaggggtggtaatcccagcccctcgggaggctgaggcaggagaatcacttgaacccgggaggt

SEQ ID NO: 14789 - DNA, 201 bp, Homo sapiens
acagaatttctctattgcccacgctggaatgccctggtgtgatcatggctcgtggcagcctccaactcctgggttcaagtgatcattttgcctcggcttcyccagtagctggaactatagggacataccaccatgctctattattattattattttggtagtgatgggggtctcactattttgcccaggctggtcctgaat

SEQ ID NO: 14790 - DNA, 201 bp, Homo sapiens
ggcaatgtatttggcctgtctaatatagtacattacatatacatttgggaaaaatgttgcaaattccataagagtagcagcctgacattatgggaagagcrcaggactaagtgtcaggagctctggttactaatcatagatgagccaccttgtgatagtgtgatcttgacaatgtcacattctcactctggacctgtttcc

SEQ ID NO: 14791 - DNA, 201 bp, Homo sapiens
ttcagtgtggatggacacctagtttgattccatgtctttgcttttgtgaatagtgctgcgatgaacacacaagtgtatatgtctttttggtggaacaaccyattttcttttggatatatacctagtaatggcattgctgagttgattggtggatctgttttaagttttttgaaaaatctcggccaggcaaagtggctgacg

SEQ ID NO: 14792 - DNA, 201 bp, Homo sapiens
gaatgtaggtttgtcactctcagttgttccctcctgggagctactatcaagcttgtgcttgagtcacttgctttgatgtgccaaaatatgttaaccaatargggccccaagagacacagaagtcacagaatggtgacactcaggctttgtgtccccgatgccagtttcactcatggatcaagggagggatgaggcagggga

SEQ ID NO: 14793 - DNA, 201 bp, Homo sapiens
cctcagttgatggcaaaggctctgctatttttgttttcagacaggatttcactctgtcacttatgctggagtgcagtggtatgatcacagctcactgcagscttgacctcctgggttcaagtgatcctcctacctcaccttccagggtaactgggactacaggcatgtgccaccaccccaggctaatttttaattttttgc

SEQ ID NO: 14794 - DNA, 201 bp, Homo sapiens
gatgtcactctagcgattaggttacattatatggcaaaggcaaagggatttcacagatggaattaaggtccctagtcacttgattttgacttaatcaaagkggattatcctaggtgggcctgacctaatcagatgagccctttaaaacagggatttagccttcctgagtccagacatttggagtagcagatgtactcttgc

SEQ ID NO: 14795 - DNA, 201 bp, Homo sapiens
gccaggaataaaccaaagttggattgctgaaatgaggagtttcaaacactggcatgccagtgaggtttgtctcctaagctagccaaagctccactcagaatgacctctttaccattctgaaatatctgctgtttctctgaggaaatctgctgctgaatgtggtgttgctgtgatttgttatgagatacttttgttctcaag

SEQ ID NO: 14796 - DNA, 201 bp, Homo sapiens
ttggacaccctcccctccatcctagaaatagaaaaatcttctaatgcaatttgccttgtaaaatgtgcaggagtgtgcacacacacatacacatacacacrgagatgggaatagctatgttcaggtcctcatttccagaaaccagttcctacaatatagaaaagctttgccacaaagtctgaggaagccctttgtatttat

SEQ ID NO: 14797 - DNA, 201 bp, Homo sapiens
cattgcacagatatagttcaccacgttatgggatgggttgtcagtgttcaaatggggaggctgaagagtaagaacagatgctttttttccttaatggcccyttctctgatttaaaatccttccatttatttccctaagatttagtgataactttaaacactttaactaaattacccagcggcttggcagccatcacggagg

SEQ ID NO: 14798 - DNA, 201 bp, Homo sapiens
tgactactgagcatcaccctggacgtgtacaagtctgcgtccttattgttttcttcattgggccgaactttctggtcctcatccaacagctcttctatcaygtgttcgaaagtgtcagccaatgatgtcaagcctcttgaacctgccttgggcccattcacgctctccagagtcccatgggtccgcacacctgggtaggcc

SEQ ID NO: 14799 - DNA, 201 bp, Homo sapiens
tctagaacatacttttttttttttttttgccttcattgtacagtcttcccttggtatctgtaagagatttgtcccagtacccctggaggatactaaaatcytaggatgctcaagtcctttatgtaaaatagcatagtatttgcatataacatacacacatcctcctgtatacttgacatcatctctagattacttataata

SEQ ID NO: 14800 - DNA, 201 bp, Homo sapiens
gggtctgaggtggagtaccactccataaaaggaagcttaaaaaaaacaaaaacaaaaaactgctgtctaatactaccagaatatcaagaaaggaagtaaaratgaagctacagttttgaagccagagcttctgtgaagctgccttctggctcagtgacgagtgataatgtcacaattatcccaatgaggcaggaacactga

SEQ ID NO: 14801 - DNA, 201 bp, Homo sapiens
gttcagcactcacaaggtgacaggatctaaaagtgccaagcaggtggcaaccagacattggatcattgtttgaaatcagggtctgaggtggagtaccactscataaaaggaagcttaaaaaaaacaaaaacaaaaaactgctgtctaatactaccagaatatcaagaaaggaagtaaagatgaagctacagttttgaagcc

SEQ ID NO: 14802 - DNA, 201 bp, Homo sapiens
tccttaaaatgatagtgtaaggaaatggaattcttttgcctggagatgagattacccaagggtataatatttccagaatggatactatgaagttgtaggawgttgctgtatctcattttcagtgaggccacaagagaaaattgttgtagcaagaagttgtggtttaggctttaaaatgcctttgctgtgaggttaacatag

SEQ ID NO: 14803 - DNA, 201 bp, Homo sapiens
aatttgacagatagcaattatcagccatgaccaacttcttgagttcctctaatggaataaaaccttacttgaataattaaaaagcagataacactaccacrtactaactgtcctacaatttcctgtgtagctctatttctaacagatcaataagagacttgggaagtaataacaataataatagcaaaatttgtagttttc

SEQ ID NO: 14804 - DNA, 201 bp, Homo sapiens
atgactgacggtacctggaaaatcaggacactccccaccctaatactgtgcttttccaatggtcttagcaaacggcacaccaggagattatgtcccaggcytggctcggagggtcccatgcccacggagcctggctcactgctagcacagcagtctgagatcgaactgcaaagcagcagcgaggctgggggaggggtgtcc

SEQ ID NO: 14805 - DNA, 201 bp, Homo sapiens
attaaatattaaaatattacatataccatccctctcggagatgacaggtttcagggaaaaaaacaacagccaagagatgtttcaaccctaccataccagakatattctatctataagcagggctatgtcttatggtcactgtcaactgcagtggggacccttttttaagtgctatttattgtggttaactctagaggctgg

SEQ ID NO: 14806 - DNA, 201 bp, Homo sapiens
gaaaactggtggctccacacatccagttgtccttcgggttatttttgcatcccactctataatttcttttaattacttaactgtaaagcacaggaaagtgmtcattacttgtagcttaatgcaggaggaaatataattgaatatgttctcctagccactgctctaccccagctcccagctcttctgaagtgtcacggttca

SEQ ID NO: 14807 - DNA, 201 bp, Homo sapiens
acatgtggtcatctgccattgcatacactgcaaattctgtgaagcctactaagggaaattagggagatgtaactgggagcgcactgtaaagatactgataygaacacgaatgtgagatcaatgttgaatgatggacccaaaaggatggctcttagtccttgtgaacatatagttgttggagacatgtgtctgtcatacaca

SEQ ID NO: 14808 - DNA, 201 bp, Homo sapiens
caccaaacaggctttgtgtgagcaataaagcttttaatcacctgggtgcaggtgggctgagtctgaaaagagagtcagcaaagggagataggggtggggcmatttataggatttgggtaggtaagggaaaattacagtcaaaggggggttgttctctggcaggcaggagtgggggtcgcaaggtgctcagtgggggtgctt

SEQ ID NO: 14809 - DNA, 201 bp, Homo sapiens
tcatacacagataggcctccaactcacctctgaaatcagatgcaaacttcaaatacttttgaaaagtctccctagaggaccttttacccccaaatgtagasactaaatgaaaaaccattctttaaaaggggttaaaaaaaacactcaaaaaacttctcctttccacatgtatagtcatctggaaaacagatctcccattaa

SEQ ID NO: 14810 - DNA, 201 bp, Homo sapiens
aagctgctggctgtgttatatttcacagttcacagttctctctctctctctctccccctctacacacacgcgcacgtgcacgcacacacacacacacacasagagagagagagagagagagagagagagagagagagagcaccccaggttttagaagatgaatgtaaaaagaatgtaaacaagttctctgctatactatca

SEQ ID NO: 14811 - DNA, 201 bp, Homo sapiens
ctcctggacctcctcttaatgaaacaagggaccttgactttgggccccatgttgagaagctctgaagccaaatataatggtcaaatataatgtcctctcayttctagcttcatagcagaccatgtttccatatagaaatttctctaggaggcttactatcctatgttatctcaagccgaggcctcctcttacacaagaggc

SEQ ID NO: 14812 - DNA, 201 bp, Homo sapiens
gtgcccctgccttttcttgtatcttctagtagcaaaagaacacaaggctgcagcttaaaagtccagaatgtagtctcttcagtttccctcaactgtgacargttagtggggagcaataattcaaaaggatctttctagaggtaatcttgcaaaattcttagaaaaatctaaattgcaaagtgaatgtacaagggggtaatg

SEQ ID NO: 14813 - DNA, 201 bp, Homo sapiens
caaagctgctggctgtgttatatttcacagttcacagttctctctctctctctctccccctctacacacacgcgcacgtgcacgcacacacacacacacasacagagagagagagagagagagagagagagagagagagagcaccccaggttttagaagatgaatgtaaaaagaatgtaaacaagttctctgctatactat

SEQ ID NO: 14814 - DNA, 201 bp, Homo sapiens
tgaaaagaactcagctgtagacctttactccatgagaaaacattttttaaaaacccacaaataatttttaggtttcatttttgcctctgctttctccagarctacaaaggtcacccaaatttctgtggcgaggttatttaggagagcctttcttttggatgtcaacttgtcaaacttgcagtttagatgagtgtgatgtag

SEQ ID NO: 14815 - DNA, 201 bp, Homo sapiens
agttagtggggagcaataattcaaaaggatctttctagaggtaatcttgcaaaattcttagaaaaatctaaattgcaaagtgaatgtacaagggggtaatkgtgcaagcatcttcagcccaagatgcttcaaaaatactgagtcatcaccaaggccagaaaaatagaccttatcttatataaccacacactgaacttaaaa

SEQ ID NO: 14816 - DNA, 201 bp, Homo sapiens
tcagttattgaagcttgtgtatgcttcacagagttctcgtgctgtgtttttcagctccattaggtcatttatgttcttctctaaactagttattctagttrgcaattcctccaaccttttttcaaggttcttagcttctttgcattgggttagagcatgctcctttagcttggaggagtctgtttttacccactttctgaa

SEQ ID NO: 14817 - DNA, 201 bp, Homo sapiens
aatagtgggtttcaaactgtgtcctacgatcatacatagaatgctccagaaagagagattatgtttgtttttactcaacgaatatctttctatcacttagyacaatgtggaggcagaaatattcaatgaatatttgttgaatgagtgaacgaggtggctcattggttgctgggaaatggaattagagaaagacaagaaatt

SEQ ID NO: 14818 - DNA, 201 bp, Homo sapiens
ggtgacaaaatctctcagcatttgctcgtctgtaaaggattttatttctacttcacttctgaagcttagttggctggatatgaaattctgggttgaaaatwcttttctttaagaatgttgaatattggcccccactctcttctggcttgtaggcttgtagggtttctgctgagagatccactgttagtctgatgggcttcc

SEQ ID NO: 14819 - DNA, 201 bp, Homo sapiens
tgagctgagatgttctggcctttatacttccacagtgattagtcactggatatgggctacccagggaagggcaagctcttggacaaggcaactctcagcakctgaggcaaaccctgaagtagatgatagatgaaggctgtctactgaccacatggccagcatctgggaaaacatattgttctgtgaaagggtatctgagcg

SEQ ID NO: 14820 - DNA, 201 bp, Homo sapiens
taaagtctgttttatcagagactaggattgcaacccctgctttttttttgctttccatttgcttggtagatcttcctccatccctttattttcagcctatrtgtgtctttgcatgtgagatgggtctccagaacacagcacactgatgggtcttgactctttatccaatttgccagtctgtggtcttttaattggggcatt

SEQ ID NO: 14821 - DNA, 201 bp, Homo sapiens
tattgggtgcatatatgtttaggatagttagctcttcttgttgaattgatccctttatcattatgtaatggccttctttgtctcttttgatctttgttggyttaaagtctgttttatcagagactaggattgcaacccctgctttttttttgctttccatttgcttggtagatcttcctccatccctttattttcagccta

SEQ ID NO: 14822 - DNA, 201 bp, Homo sapiens
cttcacaacatacaaatgtatcttttatcagccagaatatatattgtaggaattctttccccatctctactccctgtgggaactaaaaaacaaaacaaacraacgaaaaaaaaacacaaaacaaacaaaaatataccccccatcccccatcccctaagccagtaaagcaatgacaacagcaccttgacattgttttaattc

SEQ ID NO: 14823 - DNA, 201 bp, Homo sapiens
ggaggaggggaagaaacactgggaggacaaacacaagttaatattccaaaaattataccactacaaactgttgaccgttttctaagtctctttccagaatrttcttgtgcttataaagcaaaaatctctctacacataagcttttcttttttaagcaaaaaggggattgtactatatatatgcagttacagcttgcttttt

SEQ ID NO: 14824 - DNA, 201 bp, Homo sapiens
gtctctaatctccttcagttctgctctgatcttagttatttcttgtcttctgctagcttttgaatgtgtttgctcttgcttctctagttcctttaattgtratgttagagtgttgattttagctctttcctgctttctcctgtgggcatttattgctatgaatttcccctaaacactgttttagctgtgtcccagagattc

SEQ ID NO: 14825 - DNA, 201 bp, Homo sapiens
gcaagctattgtcagtatcatttacttaactattcttcgttagctagctacgtagtctagcttaccttgtcgtgttccaaatgtggaaggcttgctgtttstggtaagttgaggaccatttcaaagcctcaagaaaatgattagaaatgaaccaatgggagaacattttctttgttgggtagttcatccgattattatgta

SEQ ID NO: 14826 - DNA, 201 bp, Homo sapiens
gagactttgctgaagttgcttatcagcttaaggagattttgggctgagatgatggggttttctaaatatacaatcatgtcatctgcaaacagagacaattkgacttcctctcttcctatttgaatatgctttatttctttctattgcctgattgccctggctagaacgtccaatactatgttgaataggagtggtgacaga

SEQ ID NO: 14827 - DNA, 201 bp, Homo sapiens
agttataagtatccgtttgtataatacctgaattaaaaaattcatcctagtgtatttttataattgttataataaatgatctttaaaaggttttttttttaaaaaaaaaaagcaagtaaaattgtgaggttgtaatttcagaaataattgtgaattttagttaaatttactggccttccatttaatactttttgtcaggta

SEQ ID NO: 14828 - DNA, 201 bp, Homo sapiens
ctgcatttacttttcttccccaatatctttttaatgatcattttagtaacagtactgtcaacatatattacactgaaaatgctgaaaggagtccctttggraggaggcacacaggctgaaaaattgctcttcttattttcctctccttgctattccagcctcaactgctcttcttggtggagacaaccactatgggaccag

SEQ ID NO: 14829 - DNA, 201 bp, Homo sapiens
acctctaccattcgtccagcactactttgtcttccactggatggctggcctctggcagaactgttttttgtgacactgttttatgaaataatgggtctcaratgaaggatggggtgagaaaaattccatgggactttgtcccaacctctaaggatgttgttcactacattgcagtgttctttctacaagaccctcaggaga

SEQ ID NO: 14830 - DNA, 201 bp, Homo sapiens
gctaaatttctcttttcacattggctgctggataactcaagccaaacttgcacacccttagcaaatgtgtaacatactatgtcagatgccagtaactgttrcctccaggtcattgagactgaggacgtgattgtttgtttaagtgtgttgatatggtttggctgtgtccccaccaaaatctcaccttgagttgtaataatc

SEQ ID NO: 14831 - DNA, 201 bp, Homo sapiens
ttgtaaactactttttccagtgattcagtgtcatattccttagttttccaaaagtgttcaaagctaatatatacagagttactaagctccttgcatcttaraagtgtttgattaggaatatccatattttgtatatatctacagtttgtgccacgaactgtttgcctctttactactggaaaaggaatcattatcatcttt

SEQ ID NO: 14832 - DNA, 201 bp, Homo sapiens
cagaaacgccagtggtgcagtttggtccatgtccaaaggcctgagaaccaggatgaggtggctgatgctagtcctggagtctgaagacctgagaaccaggygctctgatgtcgaagggcaggagaaaatggatatcccagctcaagaagagggcaaattcttcctttctccaccttttagttctatgtgtgccctcaacag

SEQ ID NO: 14833 - DNA, 201 bp, Homo sapiens
agatgttaggtatctggctgaagatctcatagctaacatgggtgatgctgagtttgaagtgaagtattcctgtatagacttcaaaatccctagtttccctrccctaccagacctttttcatatatcattgcttttaatcttcacaacagcttttatccacactttaaaattataaaacctaaagtttagagagtttacaca

SEQ ID NO: 14834 - DNA, 201 bp, Homo sapiens
ggctatgggggtaagggtgatgctcatatctcgtagagagagaatgttcacttactgaaagcctgcctggactttgtccttttccaggcaccatttaactrttaggagttctagatcatacttggcattaaggatgtcataacaaactccactttctaaggtttctgatccttaaatataatcaagagaagtaatggttta

SEQ ID NO: 14835 - DNA, 201 bp, Homo sapiens; identical to SEQ ID NO: 2805

SEQ ID NO: 14836 - DNA, 201 bp, Homo sapiens
tgaggcaggagaattgcttgaacccaggaggcagaggttgcagtgagctgagatggcaccactgcactgcagcctgggggacagcgagacttccactcaaaaacaaacaaacaaacaaacaaacaaaaaaccaatttagtcatagttattggacagttcaggccaaaacaggtcatttggcttgaattacatggtttcctt

SEQ ID NO: 14837 - DNA, 201 bp, Homo sapiens
gaggcaggagaattgcttgaacccaggaggcagaggttgcagtgagctgagatggcaccactgcactgcagcctgggggacagcgagacttccactcaaaaacaaacaaacaaacaaacaaacaaaaaaccaatttagtcatagttattggacagttcaggccaaaacaggtcatttggcttgaattacatggtttccttt

SEQ ID NO: 14838 - DNA, 201 bp, Homo sapiens
gaagtgaggagcgtctctgcccggcagctgccccgtccgggagggaggtgggggtcagcccccgcccggccagccgccccgtccgggagggaggtgggggrgtcagccccccgcccggccagccgcctcgtccgggaggttaggggcgcctctgcccggccgcccctactgggaagtgaggagcccctctgcccggccacc

SEQ ID NO: 14839 - DNA, 201 bp, Homo sapiens
aggcaggagaattgcttgaacccaggaggcagaggttgcagtgagctgagatggcaccactgcactgcagcctgggggacagcgagacttccactcaaaaacaaacaaacaaacaaacaaacaaaaaaccaatttagtcatagttattggacagttcaggccaaaacaggtcatttggcttgaattacatggtttcctttt

SEQ ID NO: 14840 - DNA, 201 bp, Homo sapiens
ggcaggagaattgcttgaacccaggaggcagaggttgcagtgagctgagatggcaccactgcactgcagcctgggggacagcgagacttccactcaaaaacaaacaaacaaacaaacaaacaaaaaaccaatttagtcatagttattggacagttcaggccaaaacaggtcatttggcttgaattacatggtttccttttc

SEQ ID NO: 14841 - DNA, 201 bp, Homo sapiens; identical to SEQ ID NO: 2807

SEQ ID NO: 14842 - DNA, 201 bp, Homo sapiens
gaatgtccctctatgcttccaagatcatctcttatgctcaaggctttatgctgctaaggcagggagccaccgagtttggctggaccctcaattatggtgayattgccctgatgtggagagggggctgcattattagaagtgtattcctaggaaagataaaggatgcgtttgatcgaaacccagaacctcagaacctcctac

SEQ ID NO: 14843 - DNA, 201 bp, Homo sapiens; identical to SEQ ID NO: 2810

SEQ ID NO: 14844 - DNA, 201 bp, Homo sapiens
acttcctattatcagttttaaagatcagactcttcctccatgcctcgccgctcttcggttctactctgtccactgccatggcccaagctgacatcgtgctratcggattggcagtcatgggccagaacttaattctgaccatgaaagaccatggctttgtggtctgtgcttttaataggactgtctccgaagtggatgatt

SEQ ID NO: 14845 - DNA, 201 bp, Homo sapiens
cctattatcagttttaaagatcagactcttcctccatgcctcgccgctcttcggttctactctgtccactgccatggcccaagctgacatcgtgctgatcrgattggcagtcatgggccagaacttaattctgaccatgaaagaccatggctttgtggtctgtgcttttaataggactgtctccgaagtggatgatttctt

SEQ ID NO: 14846 - DNA, 201 bp, Homo sapiens
atcatcattgatggaggaaattctgaatatagggacaccacaagacggtgccaagacctcaaggccaagggaattttatttgtggggagcggagtcagtgrtggagaggaaggggcctggtatggctcattgctcacgccaggagggaacaaagaagcatggccccacatcaagaccatcttccaaggtgttgctgcaaaa

SEQ ID NO: 14847 - DNA, 201 bp, Homo sapiens
aatggcgccatctaggctcactgaaacctcagcctcccaattagtcgggattacaggcacctgccaccatgcccggctaattttgtatttttagtagagagggggggtttcgtcatgttggtcaggctggtctcgaactcctgacctcaggtgatccacccgcctcggcctcccaaagtgctgggataacaggcgtgagcc

SEQ ID NO: 14848 - DNA, 201 bp, Homo sapiens
ttctttctttatccacttttattgctgatcctctagtttcaaaaataagtaaatttaaaaataaaacaaaaaaggccaggtgtggtggctcacacctgtartcccagcactttgggagaccaaggtgggcggatcacttgaggtcaggagtttcagaccagcctggccaacatggtgaaaccctgtctctactaaaaaaca

SEQ ID NO: 14849 - DNA, 201 bp, Homo sapiens
tgcctcgccgctcttcggttctactctgtccactgccatggcccaagctgacatcgtgctgatcggattggcagtcatgggccagaacttaattctgaccrtgaaagaccatggctttgtggtctgtgcttttaataggactgtctccgaagtggatgatttcttggccaatgaggcaaagggaaccaaagtggtgggtgc

SEQ ID NO: 14850 - DNA, 201 bp, Homo sapiens
ggaacaaagaagcatggccccacatcaagaccatcttccaaggtgttgctgcaaaagtaggaaccctgctgtgactgagtgggagatgagggagcaggccrctttgtgaagatggcgcacaacaggatagagtatggggacatgcagctgatctgtgaggcataccacctgatgaaagacgtgctgggcatggcacaggac

SEQ ID NO: 14851 - DNA, 201 bp, Homo sapiens
gggcctggtatggctcattgctcacgccaggagggaacaaagaagcatggccccacatcaagaccatcttccaaggtgttgctgcaaaagtaggaaccctrctgtgactgagtgggagatgagggagcaggccactttgtgaagatggcgcacaacaggatagagtatggggacatgcagctgatctgtgaggcataccac

SEQ ID NO: 14852 - DNA, 201 bp, Homo sapiens; identical to SEQ ID NO: 2809

SEQ ID NO: 14853 - DNA, 201 bp, Homo sapiens
ggatgggagaattcaagctagcaaaaagctgaagggtccccaaaagttccagtttgatggtgataagaaatcattcctggaggatattcagaatgtccctstatgcttccaagatcatctcttatgctcaaggctttatgctgctaaggcagggagccaccgagtttggctggaccctcaattatggtgacattgccctga

SEQ ID NO: 14854 - DNA, 201 bp, Homo sapiens; identical to SEQ ID NO: 2815

SEQ ID NO: 14855 - DNA, 201 bp, Homo sapiens
tcttccaaggtgttgctgcaaaagtaggaaccctgctgtgactgagtgggagatgagggagcaggccactttgtgaagatggcgcacaacaggatagagtrtggggacatgcagctgatctgtgaggcataccacctgatgaaagacgtgctgggcatggcacaggacaagatggcccaggcctttgaggattggaataag

SEQ ID NO: 14856 - DNA, 201 bp, Homo sapiens
ggccccacatcaagaccatcttccaaggtgttgctgcaaaagtaggaaccctgctgtgactgagtgggagatgagggagcaggccactttgtgaagatggygcacaacaggatagagtatggggacatgcagctgatctgtgaggcataccacctgatgaaagacgtgctgggcatggcacaggacaagatggcccaggcc

SEQ ID NO: 14857 - DNA, 201 bp, Homo sapiens
accagagacctttgttcacttgtttatctgctgaccttccctccgctattgtcctatgaccctgccaaatccctctctgtgagaaacacccaagaatgatyaataaaaataaaaattaaaaaaatatatatataaaagctgaatttagatagaagttatgctatcacatgaaatgacaggagctagggttctttttttttt

SEQ ID NO: 14858 - DNA, 201 bp, Homo sapiens; identical to SEQ ID NO: 2816

SEQ ID NO: 14859 - DNA, 201 bp, Homo sapiens; identical to SEQ ID NO: 2817

SEQ ID NO: 14860 - DNA, 201 bp, Homo sapiens
tacagagtggaaactaaggttggaagtgaaatgatactgctccaaggggtaggctcaggatttggaaccagatttgggctctgttcccagtccagtgcctattttattttattttattttattttatttatttattttattttattttatttattttattttattttattttatattttattttatattttattttattaa

SEQ ID NO: 14861 - DNA, 201 bp, Homo sapiens
ctcttgagcccaggagtcccaggctgcagtaagctatgatcgcaccactgcactccagccagggtggcagagcgagaccctgtctaaatgaaagaaagaarctgggcacagtgactcatgcctgtaatcccagcactttgggaggccgaggcgggtggatcacttgcagtcaggagttcgagaccagcctgatccacaggg

SEQ ID NO: 14862 - DNA, 201 bp, Homo sapiens
acagagtggaaactaaggttggaagtgaaatgatactgctccaaggggtaggctcaggatttggaaccagatttgggctctgttcccagtccagtgcctattttattttattttattttattttatttatttattttattttattttatttattttattttattttattttatattttattttatattttattttattaaa

SEQ ID NO: 14863 - DNA, 201 bp, Homo sapiens
agacccctggagatggagaaagtttgggggctcagtagggcagacccagggtcttcacctcgtcctctcccacccccacattagcagctcttcacatccaragttgcccctgaacacagcccctggccaggtcactccgccatctcaccccctccccttagaatgctgtctcccagagcctggtcctgacctggccctggg

SEQ ID NO: 14864 - DNA, 201 bp, Homo sapiens
atggcgtgatctcagctcactgcaacctctgcctcccaggttcaagtgattctcctgcctcagactcccgagtagctgggattataggcgcccgccaccaygcctggctaatttttttgtatttttagtagagacggggtttcaccatgttggccaggctggtcttgaactcctgacctcaggtgatccacccgcctcagc

SEQ ID NO: 14865 - DNA, 201 bp, Homo sapiens
gaagggccacttagctaaccaaggatgctggattcagctacagaacccaagcccggggcactcagtggtggtcttggggagccttgatcttggcctggccyggggagcctttgaggattacagcaggcaggaggctggacgaggcaggaaaaaacaaggagatcaacctcaaccagaaggtgataggaggtggggactggg

SEQ ID NO: 14866 - DNA, 201 bp, Homo sapiens
tgaggcagaagaatggcatgaacccgagaggtggaggttgcagtgagccgagatcatgccactgcactccagcctgggtgacagagcaagactccgtctcaaaaaaaaaaaaagaaaaaagaaaagaaaagcgtttggtgcctatgttgttcccagcgcctgccccacagcagccttgtcaatgtttaagtacgggtaaca

SEQ ID NO: 14867 - DNA, 201 bp, Homo sapiens
ggactgggcaggtgaggactgagctggggtctgcactgccttccccacctgatgtactaagggtctcccctccccagcccaccccacctttctgccccagrtgggctcactctctctccaccaataccctggggagcctggtcagaatcaaaaatgtctgcaaagtgtcatattttagctctaaaagtcaagaacttgacg

SEQ ID NO: 14868 - DNA, 201 bp, Homo sapiens; identical to SEQ ID NO: 2821

SEQ ID NO: 14869 - DNA, 201 bp, Homo sapiens
tcccaggatgggggaagtgtgaacagagggtgtggtggcccaggtgagcgcagggagtctgctgtagctagaggtgaggtcaggttgggtttacggcaggygccggggcttggagagcatcaggggattgaagctgttgtatttgtccagctgcgttgtgccaagagctgcaaaggtacaggcagattctaaaatcgttta

SEQ ID NO: 14870 - DNA, 201 bp, Homo sapiens
gctacggcgtcaccatcctgggcctgctgctgctgcgctggaggcggcctgcactccacaggcccatcaaggtgaggccctgggacagctggccctgtgcygggtgctgccagagccacccctgcatccacagtgggcaccaggggcaggtgggatgggaggtgccagcttttgtggagtgttgggccctgctcagggctc

SEQ ID NO: 14871 - DNA, 201 bp, Homo sapiens
ccgaaagtgagtggggcccccaactgggccctgggaagcagccaggccctctggtgggacaggcagcctctccgcccagccccactgccacccaaggctcrggctggtcctcggtggcccacgcctgttgccctgcaaaaatggccctgggaagaaagccggggggcttgcattctagcctggccctgttctctctggcta

SEQ ID NO: 14872 - DNA, 201 bp, Homo sapiens
ctgggctgtcgccaagagggggtgtagtgggtgcaattgcccttcaggcctcagctcccagggaagggaggaaaattccccagacccccaggggtcggggrtacagacagctggaggccctgcaccatcggtgtttctgctcccccttccccaggtgaaccttctcatccccgtggcgtacttggtcttctgggccttcct

SEQ ID NO: 14873 - DNA, 201 bp, Homo sapiens
gaggatggggtagcagctcagtccgcccctaccccaggcccctcgatgccagtctgagctcggccacccaggagagctcaggggctccaggctgggattgyctttcttcccgtaaatcaccacagagtgaaggtcaggacttcagagcccacagtctcaccctggcttacaggtggggaaaccgaggccctgagataggat

SEQ ID NO: 14874 - DNA, 201 bp, Homo sapiens
ggccggggcctggagaccagacctccctcttagaggctcaccccagagcagggtgtcctagcagctgaggtgggaacacagggcccagccgccaccaaatrtctcttcccaagatgtacccaaagtttccagaaccacgggtaccgacggagcaactccctgaagacccctgcccaaggggaggtgtccggagctgggggt

SEQ ID NO: 14875 - DNA, 201 bp, Homo sapiens
cggctcctgcaggggtttgtgggccagatgtgtgttcagtgactcaggagttgacatcatgaacctcaactcctcaggaaccaatccctgctcacccagcytcagccaggaccctccctggtctccagggctgcaggtggctgggcttcccagaggggtggacctctgcagaaccccagcccctcctcaccggggccctga

SEQ ID NO: 14876 - DNA, 201 bp, Homo sapiens
agatcagccacctgcccgggctccatcctgccctgagcaggaggacagaggggtgaaatttcccttcagaaaattccagctgctataggggatgccattcycgggccgcctgggctggacttggccatggtccactgtgaaaggtcccggcctcggcgcccacccccgccttccctccgcagtgctcctgacatgggtgaa

SEQ ID NO: 14877 - DNA, 201 bp, Homo sapiens; identical to SEQ ID NO: 2826

SEQ ID NO: 14878 - DNA, 201 bp, Homo sapiens
cagagtggaaactaaggttggaagtgaaatgatactgctccaaggggtaggctcaggatttggaaccagatttgggctctgttcccagtccagtgcctattttattttattttattttattttatttatttattttattttattttatttattttattttattttattttatattttattttatattttattttattaaaa

SEQ ID NO: 14879 - DNA, 201 bp, Homo sapiens
agagtggaaactaaggttggaagtgaaatgatactgctccaaggggtaggctcaggatttggaaccagatttgggctctgttcccagtccagtgcctattttattttattttattttattttatttatttattttattttattttatttattttattttattttattttatattttattttatattttattttattaaaac

SEQ ID NO: 14880 - DNA, 201 bp, Homo sapiens
aaatgatactgctccaaggggtaggctcaggatttggaaccagatttgggctctgttcccagtccagtgcctattttattttattttattttattttatttatttattttattttattttatttattttattttattttattttatattttattttatattttattttattaaaacaaactcttgctccatagcacaaact

SEQ ID NO: 14881 - DNA, 201 bp, Homo sapiens
aatgatactgctccaaggggtaggctcaggatttggaaccagatttgggctctgttcccagtccagtgcctattttattttattttattttattttatttatttattttattttattttatttattttattttattttattttatattttattttatattttattttattaaaacaaactcttgctccatagcacaaacta

SEQ ID NO: 14882 - DNA, 201 bp, Homo sapiens
caaggggtaggctcaggatttggaaccagatttgggctctgttcccagtccagtgcctattttattttattttattttattttatttatttattttattttattttatttattttattttattttattttatattttattttatattttattttattaaaacaaactcttgctccatagcacaaactatagtgcagtggca

SEQ ID NO: 14883 - DNA, 201 bp, Homo sapiens
aagggttagcctggtgtggtggtgcgcacctgtggtcccagctacttgagaggctgaaatgggaggatcgcttgagcccgggaggttgaggctgcagtgascggtgctagggccaccgtactccaacctgggtgacagagggagaccctgtctcaaaaaaaaaaaaaaaattaaagaaaatgagactcaggaactgttcaa

SEQ ID NO: 14884 - DNA, 201 bp, Homo sapiens
ctcgtgggcgacacgtacacgctcatcaactatgtgtccttcatcaactacctctgctacggcgtcaccatcctgggcctgctgctgctgcgctggaggcrgcctgcactccacaggcccatcaaggtgaggccctgggacagctggccctgtgccgggtgctgccagagccacccctgcatccacagtgggcaccagggg

SEQ ID NO: 14885 - DNA, 201 bp, Homo sapiens
gggtaggctcaggatttggaaccagatttgggctctgttcccagtccagtgcctattttattttattttattttattttatttatttattttattttattttatttattttattttattttattttatattttattttatattttattttattaaaacaaactcttgctccatagcacaaactatagtgcagtggcatgat

SEQ ID NO: 14886 - DNA, 201 bp, Homo sapiens; identical to SEQ ID NO: 2818

SEQ ID NO: 14887 - DNA, 201 bp, Homo sapiens
ggtaggctcaggatttggaaccagatttgggctctgttcccagtccagtgcctattttattttattttattttattttatttatttattttattttattttatttattttattttattttattttatattttattttatattttattttattaaaacaaactcttgctccatagcacaaactatagtgcagtggcatgatc

SEQ ID NO: 14888 - DNA, 201 bp, Homo sapiens
gtaggctcaggatttggaaccagatttgggctctgttcccagtccagtgcctattttattttattttattttattttatttatttattttattttattttatttattttattttattttattttatattttattttatattttattttattaaaacaaactcttgctccatagcacaaactatagtgcagtggcatgatca

SEQ ID NO: 14889 - DNA, 201 bp, Homo sapiens
taggctcaggatttggaaccagatttgggctctgttcccagtccagtgcctattttattttattttattttattttatttatttattttattttattttatttattttattttattttattttatattttattttatattttattttattaaaacaaactcttgctccatagcacaaactatagtgcagtggcatgatcat

SEQ ID NO: 14890 - DNA, 201 bp, Homo sapiens
aggctcaggatttggaaccagatttgggctctgttcccagtccagtgcctattttattttattttattttattttatttatttattttattttattttatttattttattttattttattttatattttattttatattttattttattaaaacaaactcttgctccatagcacaaactatagtgcagtggcatgatcata

SEQ ID NO: 14891 - DNA, 201 bp, Homo sapiens
tgccctgagcaggaggacagaggggtgaaatttcccttcagaaaattccagctgctataggggatgccattctcgggccgcctgggctggacttggccatsgtccactgtgaaaggtcccggcctcggcgcccacccccgccttccctccgcagtgctcctgacatgggtgaacagctccagtgtgcgctgggccacgcgc

SEQ ID NO: 14892 - DNA, 201 bp, Homo sapiens
aatgcctgcatcaaataaaagcatcccttcccagccatcatccaggtaccgtggccgtggggcgatgtccagattgcaggggccagggtggctggtcaggragagcttcctggaggtggtgctgcttcagggagaccagtgagctgggcagaggcctaccacagtgagggacatgttccctgagcagactgtttccttggc

SEQ ID NO: 14893 - DNA, 201 bp, Homo sapiens
tggggcgatgtccagattgcaggggccagggtggctggtcagggagagcttcctggaggtggtgctgcttcagggagaccagtgagctgggcagaggcctrccacagtgagggacatgttccctgagcagactgtttccttggcccagcacagatatgcagggtgcatcccctctgctgaagtcacggttggactagccct

SEQ ID NO: 14894 - DNA, 201 bp, Homo sapiens
agccccctccctcctccgtgcccaagcccgcagccccggctgctccatgcagtgccccacccatccttcatggtgccgggagcagccagtgtgcggagtgygtgatgcgattttctgccaccttcaaacatgatcctgagggagatgctgcgagtggtctaggcccagagggagaaacccctgaggacctcagagacactg

SEQ ID NO: 14895 - DNA, 201 bp, Homo sapiens
caagggagaaagtcctgaactgtggcctgaggccacgtgttccaaacaatagtggcctctccacccctggcaagcccagtatctgagtcttcagccactgrgcacaaggctagtgatacagccctggaagatagggtgccagatgtggcttaccccggagctccacccaggaggccccaccaagcagaagcatggtgggct

SEQ ID NO: 14896 - DNA, 201 bp, Homo sapiens
gggggcgtgacggctctgggctccctctgctatgcagagctgggagtcgccatccccaagtctggcggggactacgcctacgtcacagagatcttcggggrcctggctgggtgagtgtggggcaccagcgggcagggggacaccctcttgggaatgggatggccaaatgagccctggcatcagtttccactcctgcttccg

SEQ ID NO: 14897 - DNA, 201 bp, Homo sapiens
ccagcccccgctggcttccaacctccctggctttcggcaaatcccagtccgccaggtcctgagaacagaggccctgctgccggatggagggaactcaaagrctctttagaaaccttacagcccacccaggcctgggcccctctgctagatgagagaggcgcttctctctctcccccgagaagtagactaagggtacagctt

SEQ ID NO: 14898 - DNA, 201 bp, Homo sapiens
acagcccacccaggcctgggcccctctgctagatgagagaggcgcttctctctctcccccgagaagtagactaagggtacagcttacctctgggggctggrgcacaggaattagttcgtccttatctggatgtatttagggctcctgggatgtgactggaaaactgagtggggcgtcgtagctgtccagactggaaatctg

SEQ ID NO: 14899 - DNA, 201 bp, Homo sapiens
gaagtgggtggtcaattgagcccaggagttcgagaccagcctcagcaacatagtgggacccctcaactctacaatttttttttgattagccgggtgtggtkgcactcacctgtaatcctagcactttgggaatccaagcagggagggtcacttgagcccaggagttggagaccagcctaggcaatatagtgagaacctgtc

SEQ ID NO: 14900 - DNA, 201 bp, Homo sapiens; identical to SEQ ID NO: 2824

SEQ ID NO: 14901 - DNA, 201 bp, Homo sapiens
cctgtctaaatgaaagaaagaagctgggcacagtgactcatgcctgtaatcccagcactttgggaggccgaggcgggtggatcacttgcagtcaggagttygagaccagcctgatccacagggtgaaaccccatctctactaaaaaagtacaaaaaatattagccaggcgtggtggctcatgcctgtaattctaactactt

SEQ ID NO: 14902 - DNA, 201 bp, Homo sapiens
ggcaggacaagtggctgcatgctgatatgcctggggctctgaggtagacgggagggctgagcatgggccttgtggggtgcctgaggagccaccgtctgccrtcgctcaggtggttcagcctcctcactttgctggccccgcctcacgggggcaatggagggctgagaaagtcaaacagggcctgtctctggcagaggggcc

SEQ ID NO: 14903 - DNA, 201 bp, Homo sapiens; identical to SEQ ID NO: 2819

SEQ ID NO: 14904 - DNA, 201 bp, Homo sapiens
tcatccccgtggcgtacttggtcttctgggccttcctgctggtcttcagcttcatctcagagcctatggtctgtggggtcggcgtcatcatcatccttackggggtgcccattttctttctgggagtgttctggagaagcaaaccaaagtgtgtgcacagactcacaggtgagccgggcagctgcaggtcacccagcacag

SEQ ID NO: 14905 - DNA, 201 bp, Homo sapiens
ctgcatcccccccaccacagcctcccgggtgctgtccatggcctgcctgagtaagcatcccctttggcccactgtccccagatcagccacctgcccgggcyccatcctgccctgagcaggaggacagaggggtgaaatttcccttcagaaaattccagctgctataggggatgccattctcgggccgcctgggctggactt

SEQ ID NO: 14906 - DNA, 201 bp, Homo sapiens
gggtttggcagcaggacccaggagagggggcgggttagccagcaattgggggcagcagtgggcagacccagcctgcagaaggccagctgctccctgagctsggatcctggtgggcactggacactcgcctggtctggaggccttggactccaaagtccccacctgagaatgggtccatgtcctgcccccacataggggttt

SEQ ID NO: 14907 - DNA, 201 bp, Homo sapiens
taatttttgtattttttgtagagactgggttttgccatgttgcccaggctgatctcaaattcctaggctcaagtgatcctcccacctcagcctcccagagkgttagggttacaggcgggagccatcatgcccggtcccagtgccctttatactgttctgatgctgggcaaattggggccagagtcagagccctgacggggg

SEQ ID NO: 14908 - DNA, 201 bp, Homo sapiens
attccagggtgggggttgggggtggggccagggctcatcctgcaggggcgtcaggaggcaggctaggggccagccgtcagccccaggtcctctcccagtgyggggccacagccgtcatcatgctcgtgggcgacacgtacacgctcatcaactatgtgtccttcatcaactacctctgctacggcgtcaccatcctgggcc

SEQ ID NO: 14909 - DNA, 201 bp, Homo sapiens
ggttgtggcccaagcaattgggaggacgttttgccatttattcatcagggaagatcgagaggagcattctgggggcaaggaggtaaaagtcgggaattccrttttgaacacggaaagtctgtgatgtccgcggctgagtggttcgttgcatatacagatttcatttagcagagcagtctatgctagggatataaatttagg

SEQ ID NO: 14910 - DNA, 201 bp, Homo sapiens
aaatggttttccaaactggtggtaccaactccacatccttgccaacattgggtgtgtaattttcaccattttggtggctactcagtggtatcttattctcrttttaatttgcatttccctgatggcccatgaggtttgagtgcctgttcaggagtttaacagtcattggacatcctcttttgggaagcacctatttaaagt

SEQ ID NO: 14911 - DNA, 201 bp, Homo sapiens
ctcaggatttggaaccagatttgggctctgttcccagtccagtgcctattttattttattttattttattttatttatttattttattttattttatttattttattttattttattttatattttattttatattttattttattaaaacaaactcttgctccatagcacaaactatagtgcagtggcatgatcatagct

SEQ ID NO: 14912 - DNA, 201 bp, Homo sapiens
gatttggaaccagatttgggctctgttcccagtccagtgcctattttattttattttattttattttatttatttattttattttattttatttattttattttattttattttatattttattttatattttattttattaaaacaaactcttgctccatagcacaaactatagtgcagtggcatgatcatagctcactg

SEQ ID NO: 14913 - DNA, 201 bp, Homo sapiens
ggccccgacgcggcccccctggatcttttccgccggcctcggctgcacagtccggacggcttccgggaggaggcagcctccctcggatccccgcactcccraccctctcccgcgaccacagcctccttctccgtgtctcccgggcattccaggtcgcctggccttcttgggccgggctggatcgcgcgggacctgcaccag

SEQ ID NO: 14914 - DNA, 201 bp, Homo sapiens
atttgggctctgttcccagtccagtgcctattttattttattttattttattttatttatttattttattttattttatttattttattttattttattttatattttattttatattttattttattaaaacaaactcttgctccatagcacaaactatagtgcagtggcatgatcatagctcactgcagcctcgacctc

SEQ ID NO: 14915 - DNA, 201 bp, Homo sapiens
caattgggggcagcagtgggcagacccagcctgcagaaggccagctgctccctgagctgggatcctggtgggcactggacactcgcctggtctggaggccytggactccaaagtccccacctgagaatgggtccatgtcctgcccccacataggggtttctgggcaggcagagagctcagaggtcatgggaatggcagtgg

SEQ ID NO: 14916 - DNA, 201 bp, Homo sapiens
tttgggctctgttcccagtccagtgcctattttattttattttattttattttatttatttattttattttattttatttattttattttattttattttatattttattttatattttattttattaaaacaaactcttgctccatagcacaaactatagtgcagtggcatgatcatagctcactgcagcctcgacctcc

SEQ ID NO: 14917 - DNA, 201 bp, Homo sapiens
ttacagagtggaaactaaggttggaagtgaaatgatactgctccaaggggtaggctcaggatttggaaccagatttgggctctgttcccagtccagtgcctattttattttattttattttattttatttatttattttattttattttatttattttattttattttattttatattttattttatattttattttatta

SEQ ID NO: 14918 - DNA, 201 bp, Homo sapiens; identical to SEQ ID NO: 2843

SEQ ID NO: 14919 - DNA, 201 bp, Homo sapiens
gcccgcagccaggggaccgggcttcttcatcacccaggcttgctgtccccgtagctgtgggtttgcaaacgggggcctggactagctacatggaggctgcyctggtgcacactggggtccctatatcttggggtgtctgggtggagggtcgtcctggaatcctgttgttgttcctgctgcaggtcccgggcagcccagtca

SEQ ID NO: 14920 - DNA, 201 bp, Homo sapiens
accgggagactcagcagtgcggttcctgccttaggtaagtaagcactttctctccttcctccactccttcagtcccttttgggtgagtggtccctgaagayaggccttcagggtcctggcactaccccgagttcctgtgtgcatcttttctacatcacaaaggagctgtttggctttggacaggcttcaacttgtctgagc

SEQ ID NO: 14921 - DNA, 201 bp, Homo sapiens; identical to SEQ ID NO: 2845

SEQ ID NO: 14922 - DNA, 201 bp, Homo sapiens
agctgtgatcgcaccactgcactccagcctgggagacagagcaagatcttgtctcagaaaaaaaaaaaaaaaaaggagtccctgcctagaacttgcagctscctgcacagagcccagcctccctcctgcctcccatcccctctgcatgaggctgggctgctgctgcacccaccatggtctctgccaacccgctttggagaa

SEQ ID NO: 14923 - DNA, 201 bp, Homo sapiens
tgtcctcaagtttcatccatgtcatagtatgtgtcagaatttccttctgttaagactgaataggtggctcacacctgtaatcccagcactttgggaggccraggcaggtggatcacctgaggacaggagtttgagaacagcctggccaatgtggcgaaacactgtctctactaaaaatacaaaaattagccaggtgtggtg

SEQ ID NO: 14924 - DNA, 201 bp, Homo sapiens
taaacgattttagaatctgcctgtacctttgcagctcttggcacaacgcagctggacaaatacaacagcttcaatcccctgatgctctccaagccccggcrcctgccgtaaacccaacctgacctcacctctagctacagcagactccctgcgctcacctgggccaccacaccctctgttcacacttcccccatcctggga

SEQ ID NO: 14925 - DNA, 201 bp, Homo sapiens; identical to SEQ ID NO: 2821

SEQ ID NO: 14926 - DNA, 201 bp, Homo sapiens
tagccagagagaacagggccaggctagaatgcaagccccccggctttcttcccagggccatttttgcagggcaacaggcgtgggccaccgaggaccagccygagccttgggtggcagtggggctgggcggagaggctgcctgtcccaccagagggcctggctgcttcccagggcccagttgggggccccactcactttcgg

SEQ ID NO: 14927 - DNA, 201 bp, Homo sapiens; identical to SEQ ID NO: 2855

SEQ ID NO: 14928 - DNA, 201 bp, Homo sapiens
gtggtggctttataccaccggcaagctgccgagggtcccgtggaattgacatcttgtgcctcattgcaggccatgagcttcctaggatttaatttataggrgtatgactgaggggtgacacagagaggcccatgccagggaaagaaggctttattaattttcttgaaaggaggggacatgctacgccatgcagggccacct

SEQ ID NO: 14929 - DNA, 201 bp, Homo sapiens
ccatgaagtcacaagttgtggccttgcccttggccatggccacccttggctggactcgatcccaccatgggggaggcctgtgctgaagcccccttcccccyactgcaacccgcatcccaaccaaagatgggccggcctttctcggcctcctctcccgacagcggcctgcagtgggaagctggagcagcacacggagcggcg

SEQ ID NO: 14930 - DNA, 201 bp, Homo sapiens; identical to SEQ ID NO: 2858

SEQ ID NO: 14931 - DNA, 201 bp, Homo sapiens
ccgtaaccccccgggccagagcagaaggtgaaagtaagggccaaaccccacggaggtgggtgcttgaggggtggctggggagttctgctttcctcctcaargtcagcttggcacgggggaagaggatggttccgtcactagctgcgtgccctgtaaatggggattatcagaactgcctcccctcctgcctctgctgctgct

SEQ ID NO: 14932 - DNA, 201 bp, Homo sapiens; identical to SEQ ID NO: 2860

SEQ ID NO: 14933 - DNA, 201 bp, Homo sapiens
agttgggtttccccccaccccccgactctgggcccgtaaccccccgggccagagcagaaggtgaaagtaagggccaaaccccacggaggtgggtgcttgargggtggctggggagttctgctttcctcctcaaagtcagcttggcacgggggaagaggatggttccgtcactagctgcgtgccctgtaaatggggattatc

SEQ ID NO: 14934 - DNA, 201 bp, Homo sapiens
ccagggcttccgtctgtcttacatccgaggtgatggaggctgcagggcaggcaggacaccacggagcacaccgtgcatgcccacaggctcccggcccacargggcggcaccctccacagggccccggctccctgtgggatgtcccctgaccgccctgtcaatctcaggacagtggcaggactgggcatgcggatgccttgg

SEQ ID NO: 14935 - DNA, 201 bp, Homo sapiens
cccgcctggccccgggcctgggagggcgactctggtggcgcagccccggctcccgccccgctcggagtagcgcccggagcccgggctgagcgctggcaggmggcccttcgtgcaggcggcagccttcaacccggcccgcccgcgctgagcctggagacgagggggccccgggagctggggacaaaggccaggccggctgtc

SEQ ID NO: 14936 - DNA, 201 bp, Homo sapiens
agtggtcccgaggtggagggttctgggcccttgggccactgcccttttggggagggtgtcggggcagggggctcttgacttcctgctccacttcggcttckggctgggggtactgtgtgcactgatggagggaaggggagccgcagcagagctggaaatgacctgcgtggatgtcgcaattcttcatggagcctcccgtgc

SEQ ID NO: 14937 - DNA, 201 bp, Homo sapiens
atgtcggagaagacataaaggacacatgtgagagactgcatgtgtgagcacatgtatgtgcacgagccatgcctgcaaaggtgcagagagcgtgtatgtgygcatgcatgtaagataacaggtgtaaccatgtgtgaaccgtaagcatgtatgtgcacatgtgaatgcatgcacgcaagtgtgtccagtgctctgggtctc

SEQ ID NO: 14938 - DNA, 201 bp, Homo sapiens; identical to SEQ ID NO: 2849

SEQ ID NO: 14939 - DNA, 201 bp, Homo sapiens
tcgcaggatgggctatgccggctgggcaggcctaggggtgtgggattctccactgacccgaggccacgaggctacaccttggaggtgccggctggcaggasgggttgttggtgggttttctcccagctctgccagagatgcgggggacaggacctaggctgtagtccactgcatagggttgggggctacagctgcctcaag

SEQ ID NO: 14940 - DNA, 201 bp, Homo sapiens
acaagttgtggccttgcccttggccatggccacccttggctggactcgatcccaccatgggggaggcctgtgctgaagcccccttccccccactgcaaccbgcatcccaaccaaagatgggccggcctttctcggcctcctctcccgacagcggcctgcagtgggaagctggagcagcacacggagcggcgtggggtcatc

SEQ ID NO: 14941 - DNA, 201 bp, Homo sapiens
accacctccatgaagtcacaagttgtggccttgcccttggccatggccacccttggctggactcgatcccaccatgggggaggcctgtgctgaagcccccktccccccactgcaacccgcatcccaaccaaagatgggccggcctttctcggcctcctctcccgacagcggcctgcagtgggaagctggagcagcacacgg

SEQ ID NO: 14942 - DNA, 201 bp, Homo sapiens; identical to SEQ ID NO: 2856

SEQ ID NO: 14943 - DNA, 201 bp, Homo sapiens
cttccccccactgcaacccgcatcccaaccaaagatgggccggcctttctcggcctcctctcccgacagcggcctgcagtgggaagctggagcagcacacrgagcggcgtggggtcatctacagcccggcctggcccctcaactacccgccaggcaccaactgcagctggtacatccagggcgaccgtggtgacatgatta

SEQ ID NO: 14944 - DNA, 201 bp, Homo sapiens; identical to SEQ ID NO: 2859

SEQ ID NO: 14945 - DNA, 201 bp, Homo sapiens
cccctggtgcccactgtggatgcaggggtggctctggcagcacccggcacagggccagctgtcccagggcctcaccttgatgggcctgtggagtgcaggcygcctccagcgcagcagcagcaggcccaggatggtgacgccgtagcagaggtagttgatgaaggacacatagttgatgagcgtgtacgtgtcgcccacgag

SEQ ID NO: 14946 - DNA, 201 bp, Homo sapiens; identical to SEQ ID NO: 2844

SEQ ID NO: 14947 - DNA, 201 bp, Homo sapiens
aatgtgtgtgtgtgagcaggtgtggagggcacacgcctgagggtgtacatgtgtgtgagcaggtgtgggatcatgtgcatgtgtgtgagcatatgagtgaggcgtgtgtgagcactcgtgtgaacaggtgtatgggtgtgtgcatgtgtgtgagcatttgtgagtaggtgtgtgtgcatgcagatgtgtgtgtgtgaggta

SEQ ID NO: 14948 - DNA, 201 bp, Homo sapiens
gaatgtgtgtgtgtgagcaggtgtggagggcacacgcctgagggtgtacatgtgtgtgagcaggtgtgggatcatgtgcatgtgtgtgagcatatgagtgaggcgtgtgtgagcactcgtgtgaacaggtgtatgggtgtgtgcatgtgtgtgagcatttgtgagtaggtgtgtgtgcatgcagatgtgtgtgtgtgaggt

SEQ ID NO: 14949 - DNA, 201 bp, Homo sapiens
ggaagctggagcagcacacggagcggcgtggggtcatctacagcccggcctggcccctcaactacccgccaggcaccaactgcagctggtacatccagggygaccgtggtgacatgattaccatcaggtaggggcacccgggggtgtcggaaggaatcaatgtgggcccacgtgcatggggtgggtgagaatgtgtgtgtg

SEQ ID NO: 14950 - DNA, 201 bp, Homo sapiens
agaatgtgtgtgtgtgagcaggtgtggagggcacacgcctgagggtgtacatgtgtgtgagcaggtgtgggatcatgtgcatgtgtgtgagcatatgagtgaggcgtgtgtgagcactcgtgtgaacaggtgtatgggtgtgtgcatgtgtgtgagcatttgtgagtaggtgtgtgtgcatgcagatgtgtgtgtgtgagg

SEQ ID NO: 14951 - DNA, 201 bp, Homo sapiens
gagaatgtgtgtgtgtgagcaggtgtggagggcacacgcctgagggtgtacatgtgtgtgagcaggtgtgggatcatgtgcatgtgtgtgagcatatgagtgaggcgtgtgtgagcactcgtgtgaacaggtgtatgggtgtgtgcatgtgtgtgagcatttgtgagtaggtgtgtgtgcatgcagatgtgtgtgtgtgag

SEQ ID NO: 14952 - DNA, 201 bp, Homo sapiens
gctggctcagtgctgcagcaagaagctgaggcccccagaggcctacagtgattcctgactctgcccctccctaactgtgtggccccaggcaagtcgctgaycctctctgagcctgtttcctcacctggttccgagatctacctttggcggctttgcacttgtactcaggataaaactcaaattctgcacaaggtgtgatca

SEQ ID NO: 14953 - DNA, 201 bp, Homo sapiens
accacttcagcctcactgggccttcccttctgtggaacctcctgttcggccccctccaatgggaaagatctcttcttttggatttccttcttttttttaawtttttttggagaaaaagtcttgctgtgtcacccaggctggagtgcagtggtgtgatcttggttcaccacaacatccgcctcctgggttcaagcgattctc

SEQ ID NO: 14954 - DNA, 201 bp, Homo sapiens; identical to SEQ ID NO: 2848

SEQ ID NO: 14955 - DNA, 201 bp, Homo sapiens
gggcaggtctatgtctgtcccctaggggaggcctctggggctgagtaggaatggacagcgccttgccctgcccctggccttgtcctccaggacaggggacstcacaggtttttacccctcagcaaaaaggtgaacatgggaggttcccagccacgctgactcagaggctgacacttcagcttagcatgcgctttagagatg

SEQ ID NO: 14956 - DNA, 201 bp, Homo sapiens
aaccacctgcccgcttttggccccaggccccctggccgaagggaggctcttctgtctcctgactgtcccctgctacgtctccaccccacagggaagctggrccaggcatcctgccaggcagatgagttccgctgtgacaacggcaagtgcctgcccggcccgtggcagtgcaacacggtggacgagtgtggagacggctct

SEQ ID NO: 14957 - DNA, 201 bp, Homo sapiens
ttgagcctggaagttaaggctgcagtgagctgtgatcgcaccactgcactccagcctgggagacagagcaagatcttgtctcagaaaaaaaaaaaaaaaaaggagtccctgcctagaacttgcagctccctgcacagagcccagcctccctcctgcctcccatcccctctgcatgaggctgggctgctgctgcacccacca

SEQ ID NO: 14958 - DNA, 201 bp, Homo sapiens; identical to SEQ ID NO: 2851

SEQ ID NO: 14959 - DNA, 201 bp, Homo sapiens
gtgtgtgagcactcgtgtgaacaggtgtatgggtgtgtgcatgtgtgtgagcatttgtgagtaggtgtgtgtgcatgcagatgtgtgtgtgtgaggtaggygtgtgtaggtatttgagcaggtatgtggtgtgtgcatgcatgtgaacacatgtaagtaggtgtgtgtgcatatgtgtgtgtgtgcatgtatgtgaacaca

SEQ ID NO: 14960 - DNA, 201 bp, Homo sapiens; identical to SEQ ID NO: 2852

SEQ ID NO: 14961 - DNA, 201 bp, Homo sapiens
gaggagagagtgtcactgggctcgggaaaggggtcgtccctcacctcagtttttccatctgcaaaatgggccctgccttcatctcaggctgttgtgagaawcagatggaccagcgtggggaagggtcagggtgctgtggggtgggaggtgtggtcaagtgcaggggccagccgcctggtcctgggagggtcagggcacagc

SEQ ID NO: 14962 - DNA, 201 bp, Homo sapiens
gttgttcctgctgcaggtcccgggcagcccagtcatgtcgccctccgcccactgcttctagggccttcgagacccagatgacgcgcctggaggctgagttygtgcggcgggaggcacccccatcctatggtcagctcatcgcccagggcctcattccacccgtggaggactttcctgtctacagtgcgtcccaggtgagcc

SEQ ID NO: 14963 - DNA, 201 bp, Homo sapiens
cagcggcctgcagtgggaagctggagcagcacacggagcggcgtggggtcatctacagcccggcctggcccctcaactacccgccaggcaccaactgcagytggtacatccagggcgaccgtggtgacatgattaccatcaggtaggggcacccgggggtgtcggaaggaatcaatgtgggcccacgtgcatggggtgggt

SEQ ID NO: 14964 - DNA, 201 bp, Homo sapiens
aggctgacacttcagcttagcatgcgctttagagatgcaatgtgggggaccataccacttcagcctcactgggccttcccttctgtggaacctcctgttcrgccccctccaatgggaaagatctcttcttttggatttccttcttttttttaaatttttttggagaaaaagtcttgctgtgtcacccaggctggagtgcag

SEQ ID NO: 14965 - DNA, 201 bp, Homo sapiens
aggcacccgttgtcagggttttgctgagaggcagggcagctggcagttgtcccttcctctgctcctgatgtggctggtggcctcccaacccctgatgaagrggtcagacataggtctatgagggagaagggttctggctgaagtgagtgggaagagagaaaggtggcaggtgacacctggcttttcccagaaagcgtgggt

SEQ ID NO: 14966 - DNA, 201 bp, Homo sapiens; identical to SEQ ID NO: 2824

SEQ ID NO: 14967 - DNA, 201 bp, Homo sapiens
caggaaaggacactggcccgaaagtacctggtcattccttccctacttgtgtgggccaccatggctccgagggcccaggccatcttctgcctgagagaagkcaggtcacctccagctgaagctcagacagacctcttgacagcccccaacacctccgaacccctccctcttccccattatcccgcaaatcatgcagtcctc

SEQ ID NO: 14968 - DNA, 201 bp, Homo sapiens
ctctggcaggcccttgccccagctgtgtgagcctggctcagtgggaatgtgccattggggagcattgagggtgtaaccccagcgcgcccaccccaacctcrgtgcggggtcatgtgtgctgggctctgagctgctgggtgctggcatccctggtgagcagagcagggggacaggcgctccatgcttaggagctttggcctg

SEQ ID NO: 14969 - DNA, 201 bp, Homo sapiens
cggtggggcaggaggtgcctgggtttctagttctgtgcagggcccggcttgctggagaaaggacccggagctgtcaggcagcgggacccctgctgtggtcraaggggaggcccagggtgcacagaagctgtgctcactggctcctctggcaggcttgggcctctttccctctctctctgccctgagctgtgctctcaggag

SEQ ID NO: 14970 - DNA, 201 bp, Homo sapiens
cggtggcatgtgcctgtagtcttagctactcgggagactgaggcaggatgattgcttgagcccaggagtttgagattgtagtgggctatgacggctccacygtgctccagcctgggtgacagagcgagaccctgtctgtaaaaccaaaaccaaaacctgaggtcaaggtgcagcccgggagaacaatgggggcctctgact

SEQ ID NO: 14971 - DNA, 201 bp, Homo sapiens
gagcaacatagtgaaactccatctctacaaaaaaaatctgaaaattagctgggcacggtggcatgtgcctgtagtcttagctactcgggagactgaggcargatgattgcttgagcccaggagtttgagattgtagtgggctatgacggctccactgtgctccagcctgggtgacagagcgagaccctgtctgtaaaacca

SEQ ID NO: 14972 - DNA, 201 bp, Homo sapiens
ctaggatttaatttataggagtatgactgaggggtgacacagagaggcccatgccagggaaagaaggctttattaattttcttgaaaggaggggacatgcyacgccatgcagggccacctgggaattactagatttggacaagcaggagcaggggtggaagaaaggtgtaagttagaagctgcatcacagcttccgtggga

SEQ ID NO: 14973 - DNA, 201 bp, Homo sapiens; identical to SEQ ID NO: 2847

SEQ ID NO: 14974 - DNA, 201 bp, Homo sapiens
ctgtgctgggtgacctgcagctgcccggctcacctgtgagtctgtgcacacactttggtttgcttctccagaacactcccagaaagaaaatgggcaccccmgtaaggatgatgatgacgccgaccccacagaccataggctctgagatgaagctgaagaccagcaggaaggcccagaagaccaagtacgccacggggatga

SEQ ID NO: 14975 - DNA, 201 bp, Homo sapiens
ctgactctgcccctccctaactgtgtggccccaggcaagtcgctgaccctctctgagcctgtttcctcacctggttccgagatctacctttggcggctttscacttgtactcaggataaaactcaaattctgcacaaggtgtgatcagatccaggtggcgtttccagccacagctggactttgccacctctcttcaggcct

SEQ ID NO: 14976 - DNA, 201 bp, Homo sapiens
gcttgggcctctttccctctctctctgccctgagctgtgctctcaggagcccggcctcctctgatgcttcgggctggctcaaggccgggccttgctcagcrctgacctagccccagccctgtctgctgtcctggtccacacaactgatggaggcccagtctcccatcccaatttccaggaaaaggctgactggcccagcct

SEQ ID NO: 14977 - DNA, 201 bp, Homo sapiens
ggcccaggatggtgacgccgtagcagaggtagttgatgaaggacacatagttgatgagcgtgtacgtgtcgcccacgagcatgatgacggctgtggccccrcactgggagaggacctggggctgacggctggcccctagcctgcctcctgacgcccctgcaggatgagccctggccccacccccaacccccaccctggaat

SEQ ID NO: 14978 - DNA, 201 bp, Homo sapiens
ggtctctgctgccacagtgatggggaaccacctgcccgcttttggccccaggccccctggccgaagggaggctcttctgtctcctgactgtcccctgctaygtctccaccccacagggaagctgggccaggcatcctgccaggcagatgagttccgctgtgacaacggcaagtgcctgcccggcccgtggcagtgcaacac

SEQ ID NO: 14979 - DNA, 201 bp, Homo sapiens
gccactctttgaccggttgctcattttctggtctgaccggcggaacccccacgaggtgaagccagcctatgccaccaggtatgacctgtacttctggagamgcacccaggtgctccccctgtgacaatgtcctgtcagagcctcagagtgactagggagcgacgaagtattgagagggggcctaggtgggagcagaaccgg

SEQ ID NO: 14980 - DNA, 201 bp, Homo sapiens
gagcctcaggaactccgggtccccatagcgatagcggttcccgaagacaagaacagataacattggatacagcattatccagtagccgcacggggtcaaayggggctcctgggggtaggaacaggacggtggtcataacgcgtggtcctgcccccagccagccccatgggcttactggctttcttccacccaaataccttc

SEQ ID NO: 14981 - DNA, 201 bp, Homo sapiens
gcccttccgctctcccggccaggccgaagcaatggtggcttgaaattcgtctagcagacaagccgcctcctccaggacgcgcgcctcgacggtccgcgtayccaacccgaacttcttaagcgctccaagtgcaaaattgcgcagtgtccaccagcacggccggttagaaaacaagattcctgtggtggggacgggaaagga

SEQ ID NO: 14982 - DNA, 201 bp, Homo sapiens
aagttgtcactgaagaggttcaggagcctcaggaactccgggtccccatagcgatagcggttcccgaagacaagaacagataacattggatacagcattayccagtagccgcacggggtcaaacggggctcctgggggtaggaacaggacggtggtcataacgcgtggtcctgcccccagccagccccatgggcttactgg

SEQ ID NO: 14983 - DNA, 201 bp, Homo sapiens
tacctggaaatgagatagagaccggctggacagaccccggggaccctgcaggtcaccacacccttctctttcagctcacctgttctccaggaccagccctrctggggcccaggcccaggctctgagaggccgtgtcctaacctgccctggccccggagaagctacgttgccacctgtcccccttccctggcctggtggggc

SEQ ID NO: 14984 - DNA, 201 bp, Homo sapiens
gaactaatgatgcagaagttgtcactgaagaggttcaggagcctcaggaactccgggtccccatagcgatagcggttcccgaagacaagaacagataacaytggatacagcattatccagtagccgcacggggtcaaacggggctcctgggggtaggaacaggacggtggtcataacgcgtggtcctgcccccagccagcc

SEQ ID NO: 14985 - DNA, 201 bp, Homo sapiens
catctggaactaatgatgcagaagttgtcactgaagaggttcaggagcctcaggaactccgggtccccatagcgatagcggttcccgaagacaagaacagrtaacattggatacagcattatccagtagccgcacggggtcaaacggggctcctgggggtaggaacaggacggtggtcataacgcgtggtcctgcccccag

SEQ ID NO: 14986 - DNA, 201 bp, Homo sapiens
ccggctggacagaccccggggaccctgcaggtcaccacacccttctctttcagctcacctgttctccaggaccagccctgctggggcccaggcccaggctytgagaggccgtgtcctaacctgccctggccccggagaagctacgttgccacctgtcccccttccctggcctggtggggcctggctttggggcaagactga

SEQ ID NO: 14987 - DNA, 201 bp, Homo sapiens
tgggggcctggccttgagtccaaggcttggtgtcctttggacaaggccctgtggggagtgcccactgctcaacacagtgatgcctggctggctgatggcaygggcagtgttgtgccctgcaggcgtgaggctgagctcctgatgtcctctgcctcctcctgcagatcccatcttgggttctgcttctgtgtggctttcctc

SEQ ID NO: 14988 - DNA, 201 bp, Homo sapiens; identical to SEQ ID NO: 2899

SEQ ID NO: 14989 - DNA, 201 bp, Homo sapiens; identical to SEQ ID NO: 2871

SEQ ID NO: 14990 - DNA, 201 bp, Homo sapiens
ctttggggcaagactgagccacgggggaagggggaatcccgtacctgctgctgcttcctctgtcttggctaacgtctgtccccctgaacccctaaccataycccaagagctcccaaagcctgagaccagggtcatttgtccccaactccccatctggccctgctgttgctagtacctgttatttattacctggaggcctgt

SEQ ID NO: 14991 - DNA, 201 bp, Homo sapiens
atatggtagctggaattgcagaaaactaatgtccaaccaccctggtctccaggtacgccatcactgtctggtattttgatgccaaggagcgggcagcagcyaaagacaagtatcagctaggtacctgcttccctcccttcagtccttcctattctgtgggccctcttgggcctgatgccaccccatccccctcatcagcct

SEQ ID NO: 14992 - DNA, 201 bp, Homo sapiens
cctcaggtgatccgcctgcctcggcctcccgaggtgttgagactacaggccactgcgcctggctcaaatacacttctaaagacacccctggcattcctgtsctctgtgcctgtgattcctaggagctcacacctgagcccttgtcacttccattactcttaggaccctgtgtactatgcttgttccccagatctgccttca

SEQ ID NO: 14993 - DNA, 201 bp, Homo sapiens
aaggccatgaaccaggctgtcgaagcattggtgccctcatggcccatgtggacgccgtcatccgccactgcgcagggcggctgggcagctatgtcatcaaygggcgcaccaaggtaaggctaggtgggggcctctttggaggggctttgcagcaccctggtttgcagcattcagtgctctgagcacagtgggtttggagac

SEQ ID NO: 14994 - DNA, 201 bp, Homo sapiens; identical to SEQ ID NO: 2861

SEQ ID NO: 14995 - DNA, 201 bp, Homo sapiens
caggaactccgggtccccatagcgatagcggttcccgaagacaagaacagataacattggatacagcattatccagtagccgcacggggtcaaacggggcycctgggggtaggaacaggacggtggtcataacgcgtggtcctgcccccagccagccccatgggcttactggctttcttccacccaaataccttccagtgg

SEQ ID NO: 14996 - DNA, 201 bp, Homo sapiens
ccaggaccctccagccatccccagactgcagcctcccattctgggtctctccgggttgcacacctgccacctctaggtacttaagcagaatgaggagcccrtagcacagggtggtgctcgtggtttcggtgacgccaaaaaaaaaatgcgtcgtcattaccgacgtctactcctggaaatggctctccgggtcctgctgtt

SEQ ID NO: 14997 - DNA, 201 bp, Homo sapiens
ggaagtctggggggacactgcccaggccagtgcactgcaggtgaggttgatggtgccagggcgtaccacagggagcaggcagaacctctgtaaggtggccrtaaggaataggaagatacccgagtgggccaggcctgtgcccaggcacatctgctttgccgggtacacaggtgcacagtgagcaccaggtaccccagagcc

SEQ ID NO: 14998 - DNA, 201 bp, Homo sapiens
gtccatccctgtttgctggcccatgtttctagtccatccatcctgtctccaaggcaggagaagcagaagggggagggtggctgtgatgagtgagccctggsctgagggaaggaaaggggtgctgcccgctgggccgagtgcttggccctggactgcattgtgccctgggtccccactgtggcatctgcatcgaggacagtc

SEQ ID NO: 14999 - DNA, 201 bp, Homo sapiens
tccatccctgtttgctggcccatgtttctagtccatccatcctgtctccaaggcaggagaagcagaagggggagggtggctgtgatgagtgagccctgggstgagggaaggaaaggggtgctgcccgctgggccgagtgcttggccctggactgcattgtgccctgggtccccactgtggcatctgcatcgaggacagtct

SEQ ID NO: 15000 - DNA, 201 bp, Homo sapiens; identical to SEQ ID NO: 2865

SEQ ID NO: 15001 - DNA, 201 bp, Homo sapiens; identical to SEQ ID NO: 2868

SEQ ID NO: 15002 - DNA, 201 bp, Homo sapiens; identical to SEQ ID NO: 2900

SEQ ID NO: 15003 - DNA, 201 bp, Homo sapiens
tcaagtctgtcctggtcgtcttccccactcctgcccataccatcccggctttcccctgcctgcctgtctctagtttctctcacatccctttttttttttcytttctctagccaccctgaagggtcccttcccaagcccttagggaccgcagaggacttggggaccagcaagcaacccccagggcacgagaagagctcttgc

SEQ ID NO: 15004 - DNA, 201 bp, Homo sapiens; identical to SEQ ID NO: 2862

SEQ ID NO: 15005 - DNA, 201 bp, Homo sapiens
tgaacagaggtctctggttttcctaggcagaggaccctgcggccttctgcgtgtttgtgtccctgggtacttgagattagggagtggtgatgactcttaaygagcatgctgccttcaagcatcgccacagtggttcttgactttgccaggaaccctcttaaactcatgagagctgctgacattcacagcgtggaccttggt

SEQ ID NO: 15006 - DNA, 201 bp, Homo sapiens
ggtcaccacacccttctctttcagctcacctgttctccaggaccagccctgctggggcccaggcccaggctctgagaggccgtgtcctaacctgccctggccccggagaagctacgttgccacctgtcccccttccctggcctggtggggcctggctttggggcaagactgagccacgggggaagggggaatcccgtacct

SEQ ID NO: 15007 - DNA, 201 bp, Homo sapiens
acggaatacgaaaaccaggttacatccccagtgagtctggcagtttggggaggggagagtaggagaagatctcttgtgttttggtgcctctggtgcccacyttctatgtggttggggacagggccccagcgaggattggggaaggggcgtgtttggacttttttagccctaggtgaccttgattgtcctagggaagtaagg

SEQ ID NO: 15008 - DNA, 201 bp, Homo sapiens; identical to SEQ ID NO: 2893

SEQ ID NO: 15009 - DNA, 201 bp, Homo sapiens
agcagaaccgggtggctcaaaaggatggccgcctagtgtgtgtggatatggtagctggaattgcagaaaactaatgtccaaccaccctggtctccaggtaygccatcactgtctggtattttgatgccaaggagcgggcagcagccaaagacaagtatcagctaggtacctgcttccctcccttcagtccttcctattctg

SEQ ID NO: 15010 - DNA, 201 bp, Homo sapiens
cccgctccgccccgggtcctccctcccagcttccctccggtctatttttctgtctctgggcccctcgttctctttgtttttggactccccagtttcctctgtcttttgacccccccgcccccaccctgactctccctggaacccccacgtttctcgttgtctttctggaacgccgaggcaggtccctcctattttccaaac

SEQ ID NO: 15011 - DNA, 201 bp, Homo sapiens
gggcctctatagtcaagtctgtcctggtcgtcttccccactcctgcccataccatcccggctttcccctgcctgcctgtctctagtttctctcacatccctttttttttttcctttctctagccaccctgaagggtcccttcccaagcccttagggaccgcagaggacttggggaccagcaagcaacccccagggcacgag

SEQ ID NO: 15012 - DNA, 201 bp, Homo sapiens; identical to SEQ ID NO: 2895

SEQ ID NO: 15013 - DNA, 201 bp, Homo sapiens; identical to SEQ ID NO: 2896

SEQ ID NO: 15014 - DNA, 201 bp, Homo sapiens; identical to SEQ ID NO: 2872

SEQ ID NO: 15015 - DNA, 201 bp, Homo sapiens
cagactccgtctcaaacaacaacaacaaaaagcctaagggaaggcagagctgccttcctgctccaggggtaactgattgtgttttggtctgcacagcgcamacctgctgattctggctgatctcatgcacccgggtcccgcacgggatccccagactcagtgggtacctttgggcagacagtggctgtgcaggtgggtgtc

SEQ ID NO: 15016 - DNA, 201 bp, Homo sapiens
caatgaaatcgcggggctccgctggctgccgcatctgccagtgtcgttgaatttgctcagagatgacccgcagctccgaaaagtttcggaagattcggtgrtgcgggcccgggagccagtccatgagggacaggcaaatgtacatctggagagacagggtctgtctcaacatgggccctgcacaaggccactaggccttag

SEQ ID NO: 15017 - DNA, 201 bp, Homo sapiens
gcagaatgaggagcccatagcacagggtggtgctcgtggtttcggtgacgccaaaaaaaaaatgcgtcgtcattaccgacgtctactcctggaaatggctstccgggtcctgctgttactgtgggcagaggagatgtgctgccgcgtgccaggcacctgttggtgggcggcatggatagagtttagagagctgggacccat

SEQ ID NO: 15018 - DNA, 201 bp, Homo sapiens
aacatcaacgtcctactgttatgaatctaataaaatacaaaatctctcctatacagttttgggaacacacaaaatcgaagatggtacgttagcctctaagrctaaaggaacatttgcacaccgtgacttcagtgcagaatatgaagaagatggcaaatatgaaggacttcagtatggagcttttattgaattgaaacctta

SEQ ID NO: 15019 - DNA, 201 bp, Homo sapiens; identical to SEQ ID NO: 2913

SEQ ID NO: 15020 - DNA, 201 bp, Homo sapiens; identical to SEQ ID NO: 2914

SEQ ID NO: 15021 - DNA, 201 bp, Homo sapiens
attgcttgaacccgggaggtggaggttgcagtgagccgagatcacgccgttacactccagcccgggtgacagtgtgagactgtatcttaaaaaaaaaaaaagtatgaactctgggcatagatttaattctaacttccctgtcttgaagctgtgcgcacttggggaagttggttgatattatgtgtatctgtttctgtctgt

SEQ ID NO: 15022 - DNA, 201 bp, Homo sapiens
gtcgctatgcataaatatcctggaaaatggggtatagctgaatggtgcagattcattcattcatattcagcaaattatgttctaagcacctacttcagtaygtgaacagcactaaactcagaatattggtctgctggggtcctttattagcttccatgattccctgaacttggccaagacccttctggtcggctgcagata

SEQ ID NO: 15023 - DNA, 201 bp, Homo sapiens
tctagaaaaaagcaagtaataaggtcaagattctagtgagattttaataaagcagctcctgtgaaatgctaaggtcagctcctggcctgtggtattcaaayacttgtttagataaatggacatcaagagtggggactactaggctggcatacaacaaagaaacctgatgccattttcttgtctgattttctttctcagatt

SEQ ID NO: 15024 - DNA, 201 bp, Homo sapiens
atatttattgagaacatagtgatattttgatacatgtaatgtatggtgatcagatcagagtaattagcatacccatcatctcaaacatttatcatttcttygtgttgggaactttctgagagagtgtaggctgtgggagataagtccgtcaccttttcctcctgatgtaaccagagtggctgcagccaggtcctcagaaac

SEQ ID NO: 15025 - DNA, 201 bp, Homo sapiens; identical to SEQ ID NO: 2916

SEQ ID NO: 15026 - DNA, 201 bp, Homo sapiens; identical to SEQ ID NO: 2917

SEQ ID NO: 15027 - DNA, 201 bp, Homo sapiens; identical to SEQ ID NO: 2919

SEQ ID NO: 15028 - DNA, 201 bp, Homo sapiens; identical to SEQ ID NO: 2922

SEQ ID NO: 15029 - DNA, 201 bp, Homo sapiens
agataccaaaaaaatgacttccaatttccctgtggatctctccgattatcctaagagcttgcatatgtatgctaatagactcctggatcacagagtccctsaaacagacatgactttccggcacgtgggttccaaattaatagttgtaagtatgagtctgccagtcaataaatacatggatataagtgctaattacatcct

SEQ ID NO: 15030 - DNA, 201 bp, Homo sapiens
caaggatttttcccagacagtgtcaacaaagctttgtactgggttaatggtcaagttcctgatggtgtctctaaggtcttagtggaccactttggctatamcaaagatgataaacatgagcaggtgtgtatttgtgaagtatcttcttaaggaaagctttgggtctcaatgcaaaaacaattcttttctaagcatggaagt

SEQ ID NO: 15031 - DNA, 201 bp, Homo sapiens; identical to SEQ ID NO: 3019

SEQ ID NO: 15032 - DNA, 201 bp, Homo sapiens; identical to SEQ ID NO: 2927

SEQ ID NO: 15033 - DNA, 201 bp, Homo sapiens; identical to SEQ ID NO: 2929

SEQ ID NO: 15034 - DNA, 201 bp, Homo sapiens; identical to SEQ ID NO: 2932

SEQ ID NO: 15035 - DNA, 201 bp, Homo sapiens; identical to SEQ ID NO: 2933

SEQ ID NO: 15036 - DNA, 201 bp, Homo sapiens
gtaagaaatatcctgcctcctctcctagatactgtatattttcaatgagagttatgagtaaataattatgtatttagttgtgagtagatgtacaattactsaatgtcacaaaattttaagtaagaaaagagatacatgtataccctacacgtaaaaaccaaactgtagaaaatctagtgtcattcaagacaaacagcttta

SEQ ID NO: 15037 - DNA, 201 bp, Homo sapiens
caggcacggatgtgactgtaagtatttgtattccgtatccatcgtggatcagggaattactgagttttcacaatcatcaaaaagagagaagcattagttamccttccctagttaggttcctttaattatcattttcatgtgtttctaaaaatctcatgctttaaacttcttgagattataaaactgagatgctttgtttaa

SEQ ID NO: 15038 - DNA, 201 bp, Homo sapiens
gtggctggggaggtctcacaatcatggcggaaggtgagggacagcaagtcacatcttatgtagatggtggctggcaaagagagcttgtgcagagaaactcmtgtttttagaaccatcagatctcccgacacccatctgcaatcacgagaacagcacgggaaagacctgcccccatgattcaatcacctccccccgggtccc

SEQ ID NO: 15039 - DNA, 201 bp, Homo sapiens
caccaaactgcctctaatctcatcacttgagagtaatgactactcacctctgagaaggttccggggatggatgtagggcagcaaaaccaccttctgttctyttctgcacaaggactccttgtgccagctccaagcctctggcctttgaagaagtcccaagacctgtgttctccccctctccctcatcccatgaagtggagt

SEQ ID NO: 15040 - DNA, 201 bp, Homo sapiens; identical to SEQ ID NO: 2935

SEQ ID NO: 15041 - DNA, 201 bp, Homo sapiens
tgagaaggttccggggatggatgtagggcagcaaaaccaccttctgttcttttctgcacaaggactccttgtgccagctccaagcctctggcctttgaagragtcccaagacctgtgttctccccctctccctcatcccatgaagtggagtgacttagagtgctccagcttcttgtccttccacccccagtaccaccctga

SEQ ID NO: 15042 - DNA, 201 bp, Homo sapiens
gctttttcttttttacatttttatataaatttatgtggaacaagtgtaattttgttacatgaatagattgtgcagtagttaagtcagggctttcagggtatccatcacccagacaacatatagtgtacccactaagtaatttctcaccatccatctccctccacttccacaccttctgagtctcaattgtctatcattcca

SEQ ID NO: 15043 - DNA, 201 bp, Homo sapiens
gtctttgatccatcttgagttgatttttttatatggtgacagataggagtccagttttattcttctgcatatggcaatccatctttcccagcaccacttaytgaaaagggtgtcctttccctagtgtatgtttttgtcaattttgtcaaagatccgttgactgtaagtatgtgactttatttctgggttcagtattctgtt

SEQ ID NO: 15044 - DNA, 201 bp, Homo sapiens
attcttgatagacaacctcaatgctctgctaccctgaattctcaggttgagctggaggttccccagctctgcagcttcatcctgaagaccagccagtgcaycctgaaagaggtgtatggcttcaaccctgagggcaaagccttgctgaagaaaaccaagaactctgaggagtttgctgcagccatgtccaggtaagtcatg

SEQ ID NO: 15045 - DNA, 201 bp, Homo sapiens
tgacaaccatgtcaggctggtttcgaactcctgacctcaagtgatcctccagcctgggcctcccacagtgctggaataacaggtgtgagccactgcacctracctgaaggtccttttaagattgaaatgatacaatgattataaaagaaagtatttggcaaactataattcactatctaaatatgctataatttttattat

SEQ ID NO: 15046 - DNA, 201 bp, Homo sapiens
gtttttattaagttgtgattttttgttatctatttgttttgagaatgaagaaacaatagctctggagagatcatctttggaaaattaatattttccccccmaaaaaatacctaagaacatattgatttgaggtagctaggtaggtaaagcatgaaactcctaacctcgtgataatggaatacagcctcttttggagagttc

SEQ ID NO: 15047 - DNA, 201 bp, Homo sapiens
aggaaggaggcgcccttcattttaataagaactacagtgggagagcttctggtttcaaggaaagtgacaaattcagttttggatgtgctgtatttgatgtmctcctatgaaacaaccagtttagaaatctagctgtcaaatagacctatggatctgagcccagtaaagaggcttgggctccacatatggatttgggaatca

SEQ ID NO: 15048 - DNA, 201 bp, Homo sapiens
aaaacctcttcttaaaaaggtaaaagaagaaagcagcaaggcttcttgaaccatgcaaagtaaatgaaagattttacatagcatgatttagacattttttwaaatttttaaaggaaataatttaagcattttaaggagattaataactatagcacaaacactgtggcatctttgcattagtaaacatgagaacaccaaccc

SEQ ID NO: 15049 - DNA, 201 bp, Homo sapiens
atctttgcattagtaaacatgagaacaccaaccctgtcaggaagaatctaagaaagtcattagaggattctggtactttcaccctaagatattttattcartacaacctgttataagcaaattctccctctgactgtgaagaattcagaatggctagaggcgttattgactacaggcttgctgttaagctagagagagtca

SEQ ID NO: 15050 - DNA, 201 bp, Homo sapiens; identical to SEQ ID NO: 2939

SEQ ID NO: 15051 - DNA, 201 bp, Homo sapiens; identical to SEQ ID NO: 2938

SEQ ID NO: 15052 - DNA, 201 bp, Homo sapiens; identical to SEQ ID NO: 2943

SEQ ID NO: 15053 - DNA, 201 bp, Homo sapiens; identical to SEQ ID NO: 2945

SEQ ID NO: 15054 - DNA, 201 bp, Homo sapiens; identical to SEQ ID NO: 2946

SEQ ID NO: 15055 - DNA, 201 bp, Homo sapiens; identical to SEQ ID NO: 2947

SEQ ID NO: 15056 - DNA, 201 bp, Homo sapiens; identical to SEQ ID NO: 2948

SEQ ID NO: 15057 - DNA, 201 bp, Homo sapiens
gaacacaggcaccaatgtagataccaaaaaaatgacttccaatttccctgtggatctctccgattatcctaagagcttgcatatgtatgctaatagactcmtggatcacagagtccctcaaacagacatgactttccggcacgtgggttccaaattaatagttgtaagtatgagtctgccagtcaataaatacatggatat

SEQ ID NO: 15058 - DNA, 201 bp, Homo sapiens; identical to SEQ ID NO: 3042

SEQ ID NO: 15059 - DNA, 201 bp, Homo sapiens
catcatctaaatcataggcaagctcagccataggcagggtatatttttcagagaggactggtttctgtagtatttaaaactttaaaattcttccccacaakagaattgctagatgagatacatcaaattcctctcatgtcatttacaagctctgccagggccaaatcaagggtgacattaccagaggagaagaccaaacat

SEQ ID NO: 15060 - DNA, 201 bp, Homo sapiens; identical to SEQ ID NO: 2951

SEQ ID NO: 15061 - DNA, 201 bp, Homo sapiens; identical to SEQ ID NO: 2952

SEQ ID NO: 15062 - DNA, 201 bp, Homo sapiens
gcaccctgatgggttcttgtttcttttcttcaatgcaggtcattggaaatatgggccaaaccatggagcagttaactccagaactcaagtcttcaatcctsaaatgtgtccaaagtacaaagccatcactgatgatccagaaagctgccatccaggctctgcggaaaatggagcctaaagacaaggtaaagtccacaagaa

SEQ ID NO: 15063 - DNA, 201 bp, Homo sapiens
ctttgagccaacattggaagctctttttgggaagcaaggatttttcccagacagtgtcaacaaagctttgtactgggttaatggtcaagttcctgatggtrtctctaaggtcttagtggaccactttggctataccaaagatgataaacatgagcaggtgtgtatttgtgaagtatcttcttaaggaaagctttgggtctc

SEQ ID NO: 15064 - DNA, 201 bp, Homo sapiens
ccgtgacttcagtgcagaatatgaagaagatggcaaatatgaaggacttcagtatggagcttttattgaattgaaaccttataccttttgaaaactcattstgattttcttcatctccatacccctttcgtgatagctcatctgtttttctgctttcagggaatgggaaggaaaagcgcacctcaatatcaaaagcccagc

SEQ ID NO: 15065 - DNA, 201 bp, Homo sapiens; identical to SEQ ID NO: 3055

SEQ ID NO: 15066 - DNA, 201 bp, Homo sapiens; identical to SEQ ID NO: 2967

SEQ ID NO: 15067 - DNA, 201 bp, Homo sapiens
actaaaagtttgtcatgggcttggagaatgcgtactgatgttgggattctgggtctctgcagggtgggctccaacttgccttttttgctatttcttctttycctatctgtcatttcctgactcttcttctctctcctcttctttctcttccccccactcctcttccagttttcagtcctaggaaggctttaattttaagtg

SEQ ID NO: 15068 - DNA, 201 bp, Homo sapiens
agctagattccttctgctttttctttcacgatccccaccccatccctcccaagtacccaaggatgttgcccgtgttgaatacatgtggttgcatcttcttyctccataggataccgtgtatggaaactgctccactcactttaccgtcaagacgaggaagggcaatgtggcaacagaaatatccactgaaagagacctggg

SEQ ID NO: 15069 - DNA, 201 bp, Homo sapiens
tgctggtctcttttacgaatttcaggtttcactgtgagacagaattcatttcacctcagtcccatgagcacttttgtgtgttctaatttctctacgacacyataatgggagaagacaccgatgcaacctgcggaggcctttctgcagacccacctttaactggttttctctctcccaacttgggctggccaggcactagca

SEQ ID NO: 15070 - DNA, 201 bp, Homo sapiens; identical to SEQ ID NO: 2976

SEQ ID NO: 15071 - DNA, 201 bp, Homo sapiens
ctactgttatgaatctaataaaatacaaaatctctcctatacagttttgggaacacacaaaatcgaagatggtacgttagcctctaagactaaaggaacayttgcacaccgtgacttcagtgcagaatatgaagaagatggcaaatatgaaggacttcagtatggagcttttattgaattgaaaccttataccttttgaaa

SEQ ID NO: 15072 - DNA, 201 bp, Homo sapiens; identical to SEQ ID NO: 2980

SEQ ID NO: 15073 - DNA, 201 bp, Homo sapiens
aatacatgtggttgcatcttcttcctccataggataccgtgtatggaaactgctccactcactttaccgtcaagacgaggaagggcaatgtggcaacagawatatccactgaaagagacctggggcagtgtgatcgcttcaagcccatccgcacaggcatcagcccacttgctctcatcaaaggcatggtaagtcccatgt

SEQ ID NO: 15074 - DNA, 201 bp, Homo sapiens; identical to SEQ ID NO: 2981

SEQ ID NO: 15075 - DNA, 201 bp, Homo sapiens; identical to SEQ ID NO: 2986

SEQ ID NO: 15076 - DNA, 201 bp, Homo sapiens; identical to SEQ ID NO: 2988

SEQ ID NO: 15077 - DNA, 201 bp, Homo sapiens; identical to SEQ ID NO: 2990

SEQ ID NO: 15078 - DNA, 201 bp, Homo sapiens; identical to SEQ ID NO: 3000

SEQ ID NO: 15079 - DNA, 201 bp, Homo sapiens
ggaattgtcattccttcctttcaagcactgactgcacgctttgaggtagactctcccgtgtataatgccacttggagtgccagtttgaaaaacaaagcagrttatgttgaaacagtcctggattccacatgcagctcaaccgtacagttcctagaatatgaactaaatggtaagaaatatcctgcctcctctcctagatac

SEQ ID NO: 15080 - DNA, 201 bp, Homo sapiens; identical to SEQ ID NO: 3003

SEQ ID NO: 15081 - DNA, 201 bp, Homo sapiens
ggcacggatgtgactgtaagtatttgtattccgtatccatcgtggatcagggaattactgagttttcacaatcatcaaaaagagagaagcattagttaccyttccctagttaggttcctttaattatcattttcatgtgtttctaaaaatctcatgctttaaacttcttgagattataaaactgagatgctttgtttaaac

SEQ ID NO: 15082 - DNA, 201 bp, Homo sapiens
aattcaacaggcattccacaggctttttctgggaacccttacttgatagtgctctaggaaacactggcaagaagattcaataccagcatttgaagaacgaytacagagaaattagacctgtgcttaagaaagagctagcagacaatgccagtgtttgccaggcatgttctgtgttctgaccacaggacagtgataaccatc

SEQ ID NO: 15083 - DNA, 201 bp, Homo sapiens; identical to SEQ ID NO: 2915

SEQ ID NO: 15084 - DNA, 201 bp, Homo sapiens; identical to SEQ ID NO: 2918

SEQ ID NO: 15085 - DNA, 201 bp, Homo sapiens; identical to SEQ ID NO: 2920

SEQ ID NO: 15086 - DNA, 201 bp, Homo sapiens; identical to SEQ ID NO: 2921

SEQ ID NO: 15087 - DNA, 201 bp, Homo sapiens
tatggagcttttattgaattgaaaccttataccttttgaaaactcattgtgattttcttcatctccatacccctttcgtgatagctcatctgtttttctgytttcagggaatgggaaggaaaagcgcacctcaatatcaaaagcccagcgttcaccgatctccatctgcgctaccagaaagacaagaaaggcatctccacc

SEQ ID NO: 15088 - DNA, 201 bp, Homo sapiens; identical to SEQ ID NO: 2923

SEQ ID NO: 15089 - DNA, 201 bp, Homo sapiens
tgtcactgggtaaacaggccaccctgggcacagttccatctacaatgtttgaagtttactttccagcttctgggcatcatttgcaattataatgctgtcayaggcagaaacgagataggctaattaatcgttgtcaatactgatccctatttgccagatgagattttggagcagcatggctgggaataattggtatagact

SEQ ID NO: 15090 - DNA, 201 bp, Homo sapiens; identical to SEQ ID NO: 2928

SEQ ID NO: 15091 - DNA, 201 bp, Homo sapiens
cccgggaggcgccctttggaccttttgcaatcctggcgctcttgcagcctgggcttcctataaatggggtgcgggcgccggccgcgcattcccaccgggasctgcggggctgagtgcccttctcggttgctgccgctgaggagcccgcccagccagccagggccgcgaggccgaggccaggccgcagcccaggagccgccc

SEQ ID NO: 15092 - DNA, 201 bp, Homo sapiens
gcatgttctgtgttctgaccacaggacagtgataaccatctcctcttttgactgcaggaccaggaggttcttcttcagactttccttgatgatgcttctcygggagataagcgactggctgcctatcttatgttgatgaggagtccttcacaggcagatattaacaaaattgtccaaattctaccatgggaacagaatgag

SEQ ID NO: 15093 - DNA, 201 bp, Homo sapiens
aactgcaaggtatggaggatgcaggcaggagggacctagagcccacagctttcccccagccctgttccagcgggcgcccaacacgcgaccttcccggaggktgtgtactgagcaaacgcagaacatcccagaactgttgtaatctgatcaaagcactgggactttgcctctgtttgtaagtcagccacattgctgagatgt

SEQ ID NO: 15094 - DNA, 201 bp, Homo sapiens
ggcttcaaccctgagggcaaagccttgctgaagaaaaccaagaactctgaggagtttgctgcagccatgtccaggtaagtcatgttgtacatgagcacacrcatgtgtgtgtgtccgctgaggtatgaacttgtgtgtttgcaccaggcacggatgtgactgtaagtatttgtattccgtatccatcgtggatcagggaat

SEQ ID NO: 15095 - DNA, 201 bp, Homo sapiens; identical to SEQ ID NO: 2934

SEQ ID NO: 15096 - DNA, 201 bp, Homo sapiens
gaagaaaaccaagaactctgaggagtttgctgcagccatgtccaggtaagtcatgttgtacatgagcacacgcatgtgtgtgtgtccgctgaggtatgaayttgtgtgtttgcaccaggcacggatgtgactgtaagtatttgtattccgtatccatcgtggatcagggaattactgagttttcacaatcatcaaaaagag

SEQ ID NO: 15097 - DNA, 201 bp, Homo sapiens
caaccactcgggtgtccgtatggggaggatgggcaaagagactgatatgggtggagaacagagcagggctggatgagccaagcaaaaaaagttaaaacacrgctggacctggtggctcatgcctgtagtcccagcactttgggaggccgaggagggagaatcacctgaggtcaggagtttgagaccagcctggccaacatg

SEQ ID NO: 15098 - DNA, 201 bp, Homo sapiens
gagtttctctaccttttcctctctttccttccaaaacatagcttctttatttatttatttatttatttgtttgtttatttatttatttatttatttatttwttttttgagatggagtctcgctcttttgcccaggctgcagtgcagtggtgccatctcggctcactgcaagccccgcctcccgggttcatgccattctcct

SEQ ID NO: 15099 - DNA, 201 bp, Homo sapiens
ttcaataagctggttactgagctgagaggcctcagtgatgaagcagtcacatctctcttgccacagctgattgaggtgtccaggtatctaatggttacagytcaactttttataaaactgatggtaactgactgaactttcaaaccttggccaaatggagaatctcagggaccatttggatatcaatccagttaatcaatt

SEQ ID NO: 15100 - DNA, 201 bp, Homo sapiens
ccccttctgagtgatcctgggttagtaaaccgagtgtccctgaaattccactaccgctgattccctacagctgggcagaggcagcgagcgctggctgaagyttccggtgggaaatgggcagtgcctagaagagaaggaaacgatgcatgagaaggttccagatgtctatgaggaacatgacgtgtcctgtccactactctg

SEQ ID NO: 15101 - DNA, 201 bp, Homo sapiens; identical to SEQ ID NO: 2936

SEQ ID NO: 15102 - DNA, 201 bp, Homo sapiens
cttctttctctgagtttatctagtggtacaggactcctgctcccttctaccttgaaggtaaatgcttttaacagaagatacagggactgatcaaaatgctygtctccaatctctttcatagacccgccccttgtcaactctgatcagcagcagccagtcctgtcagtacacactggacgctaagaggaagcatgtggcaga

SEQ ID NO: 15103 - DNA, 201 bp, Homo sapiens
agttatgagtaaataattatgtatttagttgtgagtagatgtacaattactcaatgtcacaaaattttaagtaagaaaagagatacatgtataccctacaygtaaaaaccaaactgtagaaaatctagtgtcattcaagacaaacagctttaaagaaaatggatttttctgtaattattttaggactaacaatgtctttta

SEQ ID NO: 15104 - DNA, 201 bp, Homo sapiens; identical to SEQ ID NO: 2940

SEQ ID NO: 15105 - DNA, 201 bp, Homo sapiens; identical to SEQ ID NO: 2942

SEQ ID NO: 15106 - DNA, 201 bp, Homo sapiens
ccgatctccatctgcgctaccagaaagacaagaaaggcatctccacctcagcagcctccccagccgtaggcaccgtgggcatggatatggatgaagatgaygacttttctaaatggaacttctactacagccctcaggtaaataccacctaatgagtgacacgcccccaagagcgagtggagaattggggcagatacattt

SEQ ID NO: 15107 - DNA, 201 bp, Homo sapiens; identical to SEQ ID NO: 2944

SEQ ID NO: 15108 - DNA, 201 bp, Homo sapiens
tggcgtgaaatactggtgcccgaggttcctcctgccccttaggctcactgacagatcatcccaagcaggcttatcaggttgggtctaattttaaaacagtyattgaggagtcctggccaccccacccctgcttttgtttgatgcttcacctgtgtttgctgggttatggtgtaacacagtaaatcctgtgtgtattttaaa

SEQ ID NO: 15109 - DNA, 201 bp, Homo sapiens
ctaggttttggcatagccactgtctgcccttgcttctgaaacaaacacttgtgcaaatgtgtagcagatctagacccaaagacttagggtcaatgaaatcmagacattttggtagtgattggaaatccatatttacttggggtgcaagagtcaaaggataataacatggtgtgtcagctcaaaatatacttcttcttatct

SEQ ID NO: 15110 - DNA, 201 bp, Homo sapiens
ccatatttacttggggtgcaagagtcaaaggataataacatggtgtgtcagctcaaaatatacttcttcttatctagtctgaaaaagttagtgaaagaagytctgaaagaatctcaacttccaactgtcatggacttcagaaaattctctcggaactatcaactctacaaatctgtttctcttccatcacttgacccagcc

SEQ ID NO: 15111 - DNA, 201 bp, Homo sapiens
ccctgtgctgatactccacaatttccagcttccagtagacaaagatatggttgagatgaagaaagctagagttcctttgacactttccatcttccaggtamtaagaagatgggcctcgcatttgagagcaccaaatccacatcacctccaaagcaggccgaagctgttttgaagactctccaggaactgaaaaaactaacc

SEQ ID NO: 15112 - DNA, 201 bp, Homo sapiens
ggagggctaggagtaggagggaggaagaagggcagggaaagcagtgcatttggaataataagggaaagtctccctggtaaagtgagcataaggagacctawcagaaataagaggagaagccgtgtggtaagactgttaacaggcagagggaccagcaagtgcaaaggccctgaggctgacacactactaccatgtttcaag

SEQ ID NO: 15113 - DNA, 201 bp, Homo sapiens; identical to SEQ ID NO: 2957

SEQ ID NO: 15114 - DNA, 201 bp, Homo sapiens
aacattggaagctctttttgggaagcaaggatttttcccagacagtgtcaacaaagctttgtactgggttaatggtcaagttcctgatggtgtctctaagrtcttagtggaccactttggctataccaaagatgataaacatgagcaggtgtgtatttgtgaagtatcttcttaaggaaagctttgggtctcaatgcaaaa

SEQ ID NO: 15115 - DNA, 201 bp, Homo sapiens
agtagccaacgtaagattctgtttgccttttgatttcttaggttattactttcttccagggtgcatttcttgttaaaacatatttaaaaatgtgtttccasttcaagacaaaatgcttcatcattgtaatcacctcattatttttttatgaaaaacttcaagcttccaccagaatgcactacctcactagctccagtagtg

SEQ ID NO: 15116 - DNA, 201 bp, Homo sapiens
atggacagtgatcagtgactggcaacgaagattcataattttctgttatttatttttaactttcagtgcattgtccagcttaataattaacttgtcaaatyggtatttttgcctaatgttcattgctctttgaggctcatccaagcccattaccttaaaaatctcctgtcattttgtaggcaatgagctcatggcttcaga

SEQ ID NO: 15117 - DNA, 201 bp, Homo sapiens
tctcctgcctcagcctcctgagtagctgggactacaggcacccaccaacgcgcccggctaattttttgtatttttagtagagacggggtttcaccatgttrgccagaatggtcttgatctcctgacctcatgatctgcccgccttggcctcccaaagtgctgggattacaggtgtgagccaccgcacccggcccaaaacat

SEQ ID NO: 15118 - DNA, 201 bp, Homo sapiens
agtgtttgacaggtggaggtaaaagcaaaggggtccaggcataggagtagcacaaagaaaagtgcagagtggctttgggaatggggcaagtacaatattgytgtgaaggtcagaggcagagaactttgaatgactgatgtctgactgtggggatgttatctttgttgttcatttcagcgatggccgggtcaaatatacctt

SEQ ID NO: 15119 - DNA, 201 bp, Homo sapiens
aaagtccttaatttgtgctgaatgttggctttagaagttgatgagtttgatctgtggctgtttctctgaaccatccttgtatctggttttgatcaccacawatggaacttctgtttaatcctgcatatctccattgaaaggacaaaatcattggtgccaactgattttctttaccatagttgtgacacaaaggaagaaaga

SEQ ID NO: 15120 - DNA, 201 bp, Homo sapiens
ctctggaaatgtactgcttaatttaaccaatgtcttttcatttttatgttaggatctggagaaacaacatatgaccacaagaatacgttcacactatcatrtgatgggtctctacgccacaaatttctagattcgaatatcaaattcagtcatgtagaaaaacttggaaacaacccagtctcaaaaggtttactaatattc

SEQ ID NO: 15121 - DNA, 201 bp, Homo sapiens
tacagggactgatcaaaatgctcgtctccaatctctttcatagacccgccccttgtcaactctgatcagcagcagccagtcctgtcagtacacactggacrctaagaggaagcatgtggcagaagccatctgcaaggagcaacacctcttcctgcctttctcctacaagtaggtcatgtgatgcacccctgatttgtcatt

SEQ ID NO: 15122 - DNA, 201 bp, Homo sapiens
aagtccttaatttgtgctgaatgttggctttagaagttgatgagtttgatctgtggctgtttctctgaaccatccttgtatctggttttgatcaccacaawtggaacttctgtttaatcctgcatatctccattgaaaggacaaaatcattggtgccaactgattttctttaccatagttgtgacacaaaggaagaaagaa

SEQ ID NO: 15123 - DNA, 201 bp, Homo sapiens; identical to SEQ ID NO: 2961

SEQ ID NO: 15124 - DNA, 201 bp, Homo sapiens
actctgagctaggtgcaggaaggtttccaaagatgtataaggcatgcttccttccccccagggaattcttggggagaaaaaaaaactttcacaagtgtgtmgttacccagttacacaaagctgaatgtgatacatatcaaagagatgctactaagtagaacagttctttgcctagtggtatcaaaggaagcttcaggacac

SEQ ID NO: 15125 - DNA, 201 bp, Homo sapiens
cattagaggattctggtactttcaccctaagatattttattcagtacaacctgttataagcaaattctccctctgactgtgaagaattcagaatggctagwggcgttattgactacaggcttgctgttaagctagagagagtcagaacagccattgagcactaaatggaggcagcattctgagaaaatactttaacccagg

SEQ ID NO: 15126 - DNA, 201 bp, Homo sapiens; identical to SEQ ID NO: 2963

SEQ ID NO: 15127 - DNA, 201 bp, Homo sapiens; identical to SEQ ID NO: 2964

SEQ ID NO: 15128 - DNA, 201 bp, Homo sapiens; identical to SEQ ID NO: 2965

SEQ ID NO: 15129 - DNA, 201 bp, Homo sapiens
caaacaaatcacaacttggccataatttatgtgttttaatggaattgaattcaacaggcattccacaggctttttctgggaacccttacttgatagtgctstaggaaacactggcaagaagattcaataccagcatttgaagaacgattacagagaaattagacctgtgcttaagaaagagctagcagacaatgccagtgt

SEQ ID NO: 15130 - DNA, 201 bp, Homo sapiens; identical to SEQ ID NO: 2966

SEQ ID NO: 15131 - DNA, 201 bp, Homo sapiens; identical to SEQ ID NO: 2968

SEQ ID NO: 15132 - DNA, 201 bp, Homo sapiens
tgaactgacatatgaaagataaatccctttcagtatatgaaagattctctgatctttatttttaactgctaatgaagttttagtgtactatattgtgtaaytggagtaattgaaaacatgttatttttttttttctctctgtttagtcctctccagataaaaaactcaccatattcaaaactgagttgagggtccgggaat

SEQ ID NO: 15133 - DNA, 201 bp, Homo sapiens; identical to SEQ ID NO: 2969

SEQ ID NO: 15134 - DNA, 201 bp, Homo sapiens; identical to SEQ ID NO: 2972

SEQ ID NO: 15135 - DNA, 201 bp, Homo sapiens; identical to SEQ ID NO: 2971

SEQ ID NO: 15136 - DNA, 201 bp, Homo sapiens; identical to SEQ ID NO: 2970

SEQ ID NO: 15137 - DNA, 201 bp, Homo sapiens; identical to SEQ ID NO: 2973

SEQ ID NO: 15138 - DNA, 201 bp, Homo sapiens; identical to SEQ ID NO: 2974

SEQ ID NO: 15139 - DNA, 201 bp, Homo sapiens; identical to SEQ ID NO: 2975

SEQ ID NO: 15140 - DNA, 201 bp, Homo sapiens; identical to SEQ ID NO: 2978

SEQ ID NO: 15141 - DNA, 201 bp, Homo sapiens
acaaaaattagctgggtgtgatggcacatgccagtagtcctagctactccggaggctgaggcaggagaatcacttgatcccaggaggtggaggttgcagtragctgaggttgcgccattgcactccagcccgggcgaccgagcgagactccatttcaaaaaaagaaaaagaaaaaagaaaaaaagaaaaaaaaagaatcac

SEQ ID NO: 15142 - DNA, 201 bp, Homo sapiens; identical to SEQ ID NO: 2979

SEQ ID NO: 15143 - DNA, 201 bp, Homo sapiens; identical to SEQ ID NO: 2982

SEQ ID NO: 15144 - DNA, 201 bp, Homo sapiens; identical to SEQ ID NO: 2983

SEQ ID NO: 15145 - DNA, 201 bp, Homo sapiens; identical to SEQ ID NO: 2985

SEQ ID NO: 15146 - DNA, 201 bp, Homo sapiens; identical to SEQ ID NO: 2987

SEQ ID NO: 15147 - DNA, 201 bp, Homo sapiens
caagttgtaatggagaaggacatttccgtgaccatcctctctctgggacaggtatgagctcaagctggccattccagaagggaagcaggttttcctttacycggagaaagatgaacctacttacatcctgaacatcaagaggggcatcatttctgccctcctggttcccccagagacagaagaagccaagcaagtgttgtt

SEQ ID NO: 15148 - DNA, 201 bp, Homo sapiens; identical to SEQ ID NO: 2989

SEQ ID NO: 15149 - DNA, 201 bp, Homo sapiens; identical to SEQ ID NO: 2992

SEQ ID NO: 15150 - DNA, 201 bp, Homo sapiens; identical to SEQ ID NO: 2993

SEQ ID NO: 15151 - DNA, 201 bp, Homo sapiens
agccgagccaccttgtatgcgctgagccacgcggtcaacaagtgagtttccacactgtatttctcctcctaggagcagaggaacatcttgcacctctgtgmatctctgtattaaaactgaacccctccttccactttcaaactctgctccttactcttgtgttttttcttgatcatttttggggtaatgacttgaaataag

SEQ ID NO: 15152 - DNA, 201 bp, Homo sapiens; identical to SEQ ID NO: 2994

SEQ ID NO: 15153 - DNA, 201 bp, Homo sapiens
ctctaccttttcctctctttccttccaaaacatagcttctttatttatttatttatttatttgtttgtttatttatttatttatttatttatttattttttgagatggagtctcgctcttttgcccaggctgcagtgcagtggtgccatctcggctcactgcaagccccgcctcccgggttcatgccattctcctgcctca

SEQ ID NO: 15154 - DNA, 201 bp, Homo sapiens
tcccaaagtgctgggattacaggtgtgagccaccgcacccggcccaaaacatagcttcttaccacacatctcttgattctcttatacactcgtccaggtgygaagcagactgaggctaccatgacattcaaatataatcggcagagtatgaccttgtccagtgaagtccaaattccggattttgatgttgacctcggaaca

SEQ ID NO: 15155 - DNA, 201 bp, Homo sapiens; identical to SEQ ID NO: 2995

SEQ ID NO: 15156 - DNA, 201 bp, Homo sapiens
ttgtttaagcacattgattccttggagtttctctaccttttcctctctttccttccaaaacatagcttctttatttatttatttatttatttgtttgtttrtttatttatttatttatttatttattttttgagatggagtctcgctcttttgcccaggctgcagtgcagtggtgccatctcggctcactgcaagccccgc

SEQ ID NO: 15157 - DNA, 201 bp, Homo sapiens
ctttcttctcagccccatcactttacaagccttggttcagtgtggacagcctcagtgctccactcacatcctccagtggctgaaacgtgtgcatgccaacmcccttctgatagatgtggtcacctacctggtggccctgatccccgagccctcagcacagcagctgcgagagatcttcaacatggcgagggatcagcgcag

SEQ ID NO: 15158 - DNA, 201 bp, Homo sapiens
cttctgatagatgtggtcacctacctggtggccctgatccccgagccctcagcacagcagctgcgagagatcttcaacatggcgagggatcagcgcagccragccaccttgtatgcgctgagccacgcggtcaacaagtgagtttccacactgtatttctcctcctaggagcagaggaacatcttgcacctctgtgcatct

SEQ ID NO: 15159 - DNA, 201 bp, Homo sapiens
tctttccctatctgtcatttcctgactcttcttctctctcctcttctttctcttccccccactcctcttccagttttcagtcctaggaaggctttaatttyaagtgtcacaatgtaaatgacaaacagcaagcgtttttgttaaatcctttctggggcatgtgataaagagaaattaacaacagtagacttatttaaccat

SEQ ID NO: 15160 - DNA, 201 bp, Homo sapiens; identical to SEQ ID NO: 3092

SEQ ID NO: 15161 - DNA, 201 bp, Homo sapiens
tgttaggatctggagaaacaacatatgaccacaagaatacgttcacactatcatgtgatgggtctctacgccacaaatttctagattcgaatatcaaattsagtcatgtagaaaaacttggaaacaacccagtctcaaaaggtttactaatattcgatgcatctagttcctggggaccacagatgtctgcttcagttcatt

SEQ ID NO: 15162 - DNA, 201 bp, Homo sapiens
gtcccagctacttgggaggatgaggcaggagaatggcgtgaacccaggaggctgagcttgcagtgagccgagagattgcgccactgcgctccagcctgggygacagagcaagactccatctcaaaaaaaaaaaaaaaaaaaaaaattgaaatgcaaatgtctcgtctttaagtcccaaagccaaggaagcatatgtgctgc

SEQ ID NO: 15163 - DNA, 201 bp, Homo sapiens
aagagaccagtcaagctgctcagtggagggtaattctttcagccaagtctgcctagccagtttgaaagagagaacagagaatgtacctgcagaattttgcyaggctaaacagttgattgagatcattcaggtcctgaggaagcaggagaggagtagaaaggaaagattccgggttacctattttaattctagcctagactt

SEQ ID NO: 15164 - DNA, 201 bp, Homo sapiens
ccaggaataagtatgggatggtagcacaagtgacacagactttgaaacttgaagacacaccaaagatcaacagccgcttctttggtgaaggtaagagtttstgtccacatagttgctggaaaatctactcaagatgtgcctatcatggcttagccacttgctgagccctgttaaatgtctgctgactaacaagtgatacag

SEQ ID NO: 15165 - DNA, 201 bp, Homo sapiens
ttgctctttgaggctcatccaagcccattaccttaaaaatctcctgtcattttgtaggcaatgagctcatggcttcagaaggcatctgggagtcttccttrtacccagactttgcaagaccacctcaatagcctgaaggagttcaacctccagaacatgggattgccagacttccacatcccagaaaacctcttcttaaaa

SEQ ID NO: 15166 - DNA, 201 bp, Homo sapiens
gccgtgggaccaaaccgtgggtgcccttagccaggatagatgatcgtaaactatgtctatgagtgagccctcctcatcgaaggtgttcatttccatctctstcttcaggacagctacagaacagtacacattttagaatgaaaatgaggagtcactggtaactgcggtacctaaaacataatttgctctgtgcatttcatg

SEQ ID NO: 15167 - DNA, 201 bp, Homo sapiens
atcttaaaaagagacacacatgagaataaccaatctcacattccagtcctgtaatcccagtatgtttgggctactgattctctttttaaaagtggcatctytcatttttaaaagagaaaatcctagatagtgactcctattatcatcaagtaatatatatcaaggccccaaggctaccttgtcacattttactctggcata

SEQ ID NO: 15168 - DNA, 201 bp, Homo sapiens
aggaatcccctttgttccagcaggaaacttgatgcctatccagaagcaaagttcacttggccgccctcaccgtggaaacgtgttgccacaccaaatgaacwtccccctcctgctgtcaaagagcagtcagtggccaccgctattgacctgagctctaattaggctggttttataatgaggaaaagagtgcgattctaatta

SEQ ID NO: 15169 - DNA, 201 bp, Homo sapiens
gccctcaccgtggaaacgtgttgccacaccaaatgaacatccccctcctgctgtcaaagagcagtcagtggccaccgctattgacctgagctctaattagkctggttttataatgaggaaaagagtgcgattctaattagtaaatttccatctctttctcaataggtatcctccagtcaaagcaatcagctatcctcatca

SEQ ID NO: 15170 - DNA, 201 bp, Homo sapiens
atcacactggttccattgccaaaaaaataactgtatcataaaactctagtaaaagtgatgatggttaagacaacaagagagcagaacgaggttttatttgstgctaatgacctgcattctctctcttaggtccgtggcactcaggtagttggttctgacatgactgtgacaattcagtttaccaatcctttaaaagaaacc

SEQ ID NO: 15171 - DNA, 201 bp, Homo sapiens
actgggcacaacatatagaaggcaatggcagccatagcttgcgccatgcatagcctggagtagacaaacctaaatgaactttcttccttctcacttctcayggactcatttaggtgaatgccaaagatgacgaaggtgtcctcgttggatcctgggacaatatctatgcctatggcgtccccccatcggcctggactggaa

SEQ ID NO: 15172 - DNA, 201 bp, Homo sapiens
aggctattggtgtgtatcctttggccagaataaccagccaagcatgtttacagtgatgcagggaatcaatccgttctatgactatttccttaactctccarttagttgctatcctgcccagcaaacacagctgagagaagctgcttaataagaaccaaaatactgagctatttgcatacctgaagaactagtgcaattacc

SEQ ID NO: 15173 - DNA, 201 bp, Homo sapiens
attcaggaaaatctcttactacagtgaggtacagtataggtaaaatcttcctgtcttgctatttgatctttattcctttttaagaaaattctggtattgcytgtggctagcagttctttctaagaagactgaactggtaccagactcctcccttgatagtgtaatctactttctgcagccttctgccctctccttgatcct

SEQ ID NO: 15174 - DNA, 201 bp, Homo sapiens
gtggaggtatgaatatgcttctgtttgaattgatgagtgtgaattacttgagggactttcaggtaaacctgtccaatagataatatgagtctgaagcttcrggaggaggtttgggttggacaggagataatttggatatcatacacacgtgggcaagctcactcagaaaaaggtaaatcaagtcagcagtggactgaggct

SEQ ID NO: 15175 - DNA, 201 bp, Homo sapiens
tgggaggccaagatgggaggatcgcttgaggccaggagtttgagacctagtctctaaaaaataaaaattaaaaattagatgggtgtggtggtgcacacctrtactcccagctacttgggaggctgaagtgggagaattgcttgagttcgggagttggaggttacagtgagcaatgattgtgccactgtactccagcctggg

SEQ ID NO: 15176 - DNA, 201 bp, Homo sapiens
tatttgatctttattcctttttaagaaaattctggtattgcctgtggctagcagttctttctaagaagactgaactggtaccagactcctcccttgatagygtaatctactttctgcagccttctgccctctccttgatcctggggtccaccttgtctcagaagaggggaaaccttagagggacagtcactatatgaggtc

SEQ ID NO: 15177 - DNA, 201 bp, Homo sapiens
tctaaaaaataaaaattaaaaattagatgggtgtggtggtgcacacctgtactcccagctacttgggaggctgaagtgggagaattgcttgagttcgggarttggaggttacagtgagcaatgattgtgccactgtactccagcctgggcaacagagcaagactccgtctttgaaaaaagaaaaaaaacaagctcatgtat

SEQ ID NO: 15178 - DNA, 201 bp, Homo sapiens
aggggtgagactgtcgcccaagtgaaaaagatagcagaagataagaaggaaaactgtttccagaaattgtcaaaagacagccaggtgaacaagattgtggyccgaggtggcacaggatgctgggctgaaaattacagcagcatgcacagcacttattgataggagaatgctcagctgtgctcctgagggcccttcagcctg

SEQ ID NO: 15179 - DNA, 201 bp, Homo sapiens
cagaaaatggttaagattaaaactgttcaatgcactgattcaaatatctttgggtggccttgaagctgctcttagcagagggaaagagacatccagccatktgagtgtcctgagggatgccaatgagaatgaatctgcccagaaaacccaagtctagagccccaggatatctccaggagccctcagatttggcttaatcca

SEQ ID NO: 15180 - DNA, 201 bp, Homo sapiens
tgcactgattcaaatatctttgggtggccttgaagctgctcttagcagagggaaagagacatccagccatgtgagtgtcctgagggatgccaatgagaatsaatctgcccagaaaacccaagtctagagccccaggatatctccaggagccctcagatttggcttaatccattctaataatctgtagatagcatatgcaca

SEQ ID NO: 15181 - DNA, 201 bp, Homo sapiens
ttagagggacagtcactatatgaggtctcctactattttgggtgcaaactaagtagtgtgaagcaccttcctgtgatacacctgagagctctttattttckaaatgcacgaggattcacattactttcgaggtcctaagactctggcctgactttggtaaatgattcattccttcttcttgggtacaggagccaatatgtt

SEQ ID NO: 15182 - DNA, 201 bp, Homo sapiens
aaacctctttttttggagtgaacggtcgtagatacatctgaggacccaggtgctcaatgggcattgtccttggcatttctaaatcaccaaggaactttttygcatttacccatatggattttaatttttgaaaaagttcatctatcaaaacaaatcatgattatgtaataataccttgttaccccattcttgtgtcagatt

SEQ ID NO: 15183 - DNA, 201 bp, Homo sapiens
gagcttctgggtctccaaccctatcagcttttatttaaaagtgttattgtctctttctatgattcatatcaggaatgaaatttctcagtttggaacagcakaaaaaggcagaagcctccggtgttccttgcaacctttccaattgtaacgcatatcaattagtaggagctctcggggtgacaactttgggagaatccactg

SEQ ID NO: 15184 - DNA, 201 bp, Homo sapiens
gccctttgtggtatgcactggtaagatataaggcaggagagaaaatagagaactcgaaaaataattatagatcatcctttaaattgtttttccagaacctrgcctccttttatgtcatgtgatttcctccaaagcttcagtatgtgggtatttgtcttctaacttgccaactatgctaagcagctgcagctctgacctccc

SEQ ID NO: 15185 - DNA, 201 bp, Homo sapiens
atctcagcctcaaataatctttatttaaagtactactaaatcaactagattcgcctttagaatattttcaaaacctgtttggccctatgatacgaatccartgttgttgaagaaaggggcatgtcagctccagagatctctagacgactgctctatggacagttaaagactttggcaacagcagacatgtgatgatggcta

SEQ ID NO: 15186 - DNA, 201 bp, Homo sapiens
acagtgatttctgcatttccatctgaggtatggggttcatctcactagggagtgccgcacagtgggcacaagtcagtgggtgcgtgcactgtgcgcgagcygaagcagggcgaggcattgcctcactcaggaagtgcaaggggtcagggagttccctttccgagtcaaagaaaggggtgacggacggcacctggaaaatgg

SEQ ID NO: 15187 - DNA, 201 bp, Homo sapiens
tcatttacattacagctaagaaagatggcactcatgtggtggaaaatgtggatgccacccacattgggaaattaattgtgaccaaacaaattggaggagayggcatgatggatattactgatacttacaaattccaagaaggtaatttactaccactgaatgaagatttatttgcccaagtccattgagtacttattcatt

SEQ ID NO: 15188 - DNA, 201 bp, Homo sapiens
tgaaaattgcatgcccaacctctccacctccttatcctcctccatgtggctcaatttccaaagcagttcctacctcctcacccctaagtggatttacttayggctcttcttgggctccaccctaaccctatcagactataatctatcagagcaaacattctgttttgttctctgatgtatcccatgtacctagatcacagc

SEQ ID NO: 15189 - DNA, 201 bp, Homo sapiens
cgaccatttctgtagggcgtggagtaaaactagggttggtttgaccagcactttcatcatttaatccttaaagacaccctacgatgtagatactgctattrtctcccttctgtagctgaggaatttgaggctttgagaggttgactggttacacaggttcagttacacagtttatgaaaacagagccaagattcagactca

SEQ ID NO: 15190 - DNA, 201 bp, Homo sapiens
attcatataggactgtaattccaggaggaaactagtggcaaaaactgagctgaggctcagaagatcagtcacatagataaggctactatggagggcttggrgacaagctagagttcagttgattaatggttggatgggaatcagcccagctcctgatggccactgggaggctggcggatgcatcccagtggaaggaaccat

SEQ ID NO: 15191 - DNA, 201 bp, Homo sapiens
catatcaggaatgaaatttctcagtttggaacagcagaaaaaggcagaagcctccggtgttccttgcaacctttccaattgtaacgcatatcaattagtargagctctcggggtgacaactttgggagaatccactgatttatattaatgaagagtgttactgtagtccaacagagtaaagtactaaattaccaactctaa

SEQ ID NO: 15192 - DNA, 201 bp, Homo sapiens
attgtagtgggccaaatatgctcatagtttctctttgactgcagaatctttatagaaagaatgatagactatatcctgtgtaatccatcacttaacacccraagaaatagagggttacagtaaaaatatagagaaaaaagccattttcttttcagccaccacattttaaaaaaactaaaacagttaaaactaaaataataa

SEQ ID NO: 15193 - DNA, 201 bp, Homo sapiens
ttctctttgactgcagaatctttatagaaagaatgatagactatatcctgtgtaatccatcacttaacacccgaagaaatagagggttacagtaaaaatayagagaaaaaagccattttcttttcagccaccacattttaaaaaaactaaaacagttaaaactaaaataataaataacaaaagatatatattgcttattta

SEQ ID NO: 15194 - DNA, 201 bp, Homo sapiens
gtccattgagtacttattcattgtcactcagagatgagttccagagaatgcactggcatttgcagcatttggtagcaacagcagaagtataaactttcacrtgtgaaagacacgtcacatatgcaatttttcattgtagttttctttgctagcttgctttgggcagaattctcattcacgtggcttgtaaaatgatttggt

SEQ ID NO: 15195 - DNA, 201 bp, Homo sapiens
agcagaagtataaactttcacgtgtgaaagacacgtcacatatgcaatttttcattgtagttttctttgctagcttgctttgggcagaattctcattcacstggcttgtaaaatgatttggtttaaagtcatacctaatttaacagaatatagaatatgttcttgctcacaagaaccttaattttaaataatcctattaga

SEQ ID NO: 15196 - DNA, 201 bp, Homo sapiens
ctgtgtctgagcacttattaatggttttgactatcactcctactacacatacacctcatagtttaatggtggaagctacagcacctgtccaagtgcacccygccatctgcaaccccctccattgaggtctcttgtgctatatcagactgtatttacacgtgacttctcagtgagacttgcaaaaccccttgccttcacagg

SEQ ID NO: 15197 - DNA, 201 bp, Homo sapiens
tcagatgcaagaatcgttcaggcaaagtgaaacacgtttcctcttccatacagccccctgctgtatccaactttttccttcccagacagtaaacccacaarctttatctgagtgtaccggaaacttctctatctttacaccttggctatccccctagaattccaccttggtcaaggccaacacatgaaaaaagacactgtg

SEQ ID NO: 15198 - DNA, 201 bp, Homo sapiens
aatagaaattaaaataactacttcacatttgtttagtactttaccaattatttccacatacattgttctattacattatcatggaagactacaacgtagayaatacaatattaataggacaatgcaatctctctaactcaggacaattaggtcgaaggccagtttcaattccaaaataatgtcatggtgggtttttgttaa

SEQ ID NO: 15199 - DNA, 201 bp, Homo sapiens
ggcatctaagaaagtaggacagtgtttcccagagtgtgttctctatgaacacctgtcatgtgagattctccttgggggaaaaaagttccatcatcaaatayagttggatcatgctgtgttttgtgtctcttctcatagaggcccaaggcacattaatatataaaaggctatgagtagacacgtagtcaaaaaatgaatctt

SEQ ID NO: 15200 - DNA, 201 bp, Homo sapiens
ctaataatggcatctaagaaagtaggacagtgtttcccagagtgtgttctctatgaacacctgtcatgtgagattctccttgggggaaaaaagttccatcrtcaaatacagttggatcatgctgtgttttgtgtctcttctcatagaggcccaaggcacattaatatataaaaggctatgagtagacacgtagtcaaaaaa

SEQ ID NO: 15201 - DNA, 201 bp, Homo sapiens
ttcttgggtaactactgggctccagacgctgttcttaaagcactttacatggttgcattttcaaccaccaacaaccccacaaggtaaagagtactggcatyactttacagatgagaaaactgaagcacagagaggttctataactcctccaaggccatacagccagcaaatggcggagctgggcttccaaccccagcaggc

SEQ ID NO: 15202 - DNA, 201 bp, Homo sapiens
ggagtcactggtaactgcggtacctaaaacataatttgctctgtgcatttcatgtttgctatttttttgaatcttaaaaagagacacacatgagaataacsaatctcacattccagtcctgtaatcccagtatgtttgggctactgattctctttttaaaagtggcatctctcatttttaaaagagaaaatcctagatagt

SEQ ID NO: 15203 - DNA, 201 bp, Homo sapiens
ttccaggaggaaactagtggcaaaaactgagctgaggctcagaagatcagtcacatagataaggctactatggagggcttggagacaagctagagttcagytgattaatggttggatgggaatcagcccagctcctgatggccactgggaggctggcggatgcatcccagtggaaggaaccatgacccaataagactgtca

SEQ ID NO: 15204 - DNA, 201 bp, Homo sapiens; identical to SEQ ID NO: 3191

SEQ ID NO: 15205 - DNA, 201 bp, Homo sapiens
atagaaagaatgatagactatatcctgtgtaatccatcacttaacacccgaagaaatagagggttacagtaaaaatatagagaaaaaagccattttctttycagccaccacattttaaaaaaactaaaacagttaaaactaaaataataaataacaaaagatatatattgcttatttatcattgagaagttgtataaatat

SEQ ID NO: 15206 - DNA, 201 bp, Homo sapiens; identical to SEQ ID NO: 3192

SEQ ID NO: 15207 - DNA, 201 bp, Homo sapiens
ctgtgtaatccatcacttaacacccgaagaaatagagggttacagtaaaaatatagagaaaaaagccattttcttttcagccaccacattttaaaaaaackaaaacagttaaaactaaaataataaataacaaaagatatatattgcttatttatcattgagaagttgtataaatatgcgtatttatttattattgagaat

SEQ ID NO: 15208 - DNA, 201 bp, Homo sapiens
aaaataatgtcatggtgggtttttgttaacttttattgcatagaatgtttcaaatggcactactgagtttaattctatctcaatcaatgcttagtgtccgstctatgcctgcaattggtttggtgctggcgattccagcagtgagcaggactcagttcctgtcctggtccgagtgacaggattattgtgcagaggggtctt

SEQ ID NO: 15209 - DNA, 201 bp, Homo sapiens
aattctatctcaatcaatgcttagtgtccgctctatgcctgcaattggtttggtgctggcgattccagcagtgagcaggactcagttcctgtcctggtccragtgacaggattattgtgcagaggggtctttggaaacaataagtaggggcatttagtccaactgattcagaaaaagacttgagaagagaagtcgtggacc

SEQ ID NO: 15210 - DNA, 201 bp, Homo sapiens
tgactttgcagaatttataacataggaataatgacggcaccctcctcctggggaggtctgaagcttgtattatagaaacaccccaacaagtgcagtacacrgtgcatccattaatgtgactttctctctggtggattgtatttttgcctgtcattatctctggatctcccccaggtcaagaagaagagagattggccctag

SEQ ID NO: 15211 - DNA, 201 bp, Homo sapiens
gattatacaggaaagttttacttatcactgccttagtttttccccacttatagtaccactgtgattttatgtttttcctgaggcattggcttgttgaagtkatattgcaacagagaatcaaaagatcacttagaaaaagtaacatgttagaaaacatcatgcttagaattaaatgtctaaagtataccagtatagatgata

SEQ ID NO: 15212 - DNA, 201 bp, Homo sapiens
attaatcagcaccctttttctcaccctttgttatcaacatataagcaggctagaaagacagtattttattccaatgtgaaacaaaactgctgatctggagktcttatgttataaattcccacatcataccttcaactatatatatgtcctgaaactagcatattttgagaataaaatgggaaatgacatttaaaggacacc

SEQ ID NO: 15213 - DNA, 201 bp, Homo sapiens
ggagcctcacctcaggggggctacagttttgcacagagcggccccactgttgacgccaacagaggccatggtctgagctccttagctgttcaggagagggmtggggactcaggaacctcagaagggcagagcagggcagagtaattagatcccagggtagcaaatgaaaccccaagtgggcaaatgcaaagtagcagatcc

SEQ ID NO: 15214 - DNA, 201 bp, Homo sapiens
gccaccacattttaaaaaaactaaaacagttaaaactaaaataataaataacaaaagatatatattgcttatttatcattgagaagttgtataaatatgcrtatttatttattattgagaattttataaatatatccacttaatttttatcccagttatggaaggtattatagcaggtggtctcatattcatttttccaca

SEQ ID NO: 15215 - DNA, 201 bp, Homo sapiens
catataaagaattgtaggcctttataaggcctttggtttttattttgagtgagctgaggagcctttagagagttttgagcagaaatgtggcataatctaasttaggttttgaaaagaccactggctgctgtgttgagaagagactaaagaggaagtagggcggaaggttagagactggtaggatgcttctgcaatcactcc

SEQ ID NO: 15216 - DNA, 201 bp, Homo sapiens; identical to SEQ ID NO: 3203

SEQ ID NO: 15217 - DNA, 201 bp, Homo sapiens; identical to SEQ ID NO: 3206

SEQ ID NO: 15218 - DNA, 201 bp, Homo sapiens; identical to SEQ ID NO: 3208

SEQ ID NO: 15219 - DNA, 201 bp, Homo sapiens; identical to SEQ ID NO: 3211

SEQ ID NO: 15220 - DNA, 201 bp, Homo sapiens; identical to SEQ ID NO: 3212

SEQ ID NO: 15221 - DNA, 201 bp, Homo sapiens
tctgtaactgtaaatcccaaagatgcttaacttatatagagttttctcacccctgaatctgttatcacagagtctctgttcctgggttctttgtttgactyagcccctaattattttgatatcactttcaagtattaatagtttggttatgataggtaccatattccctgaagtacttcatgttcgacaatgtgtgtaaaa

SEQ ID NO: 15222 - DNA, 201 bp, Homo sapiens
ggccaacctcttcccatcttccccttcatgttctcctcctcagtctctggtaaccactgttctgctctttgcttctatggtataataatttttttttttttagtgtctacatgtgagtgaaatcatgtagtatttgtctttccatgtctggtttatttcacttaccatgatgcccttcctccaagtctaattcatgttgtt

SEQ ID NO: 15223 - DNA, 201 bp, Homo sapiens
tctcttttccatctgatggtttgcaaatgtttgcaaacagctgtctcatcttccttgaatcttttctacctggggacaaatatctgtcctgactttatttycctctcctctaacatggtttcagctctctctctctctctcccacacattccaatttgtcactactcctcttaaagtgtgacacccagaatggatcccaat

SEQ ID NO: 15224 - DNA, 201 bp, Homo sapiens
tccattctcagtcttgtcagtgtggcttcaaatccaatgttgctcccaccggtttgaaaatctcccttactttctgactgccgttttttttttttttttttggacgtcagtacgaaacagttttggttgtcttgttattgctgagttgttggcttttccagctcctctgacctcagagtagcactctatcttagagttcaa

SEQ ID NO: 15225 - DNA, 201 bp, Homo sapiens
atccattctcagtcttgtcagtgtggcttcaaatccaatgttgctcccaccggtttgaaaatctcccttactttctgactgccgttttttttttttttttttggacgtcagtacgaaacagttttggttgtcttgttattgctgagttgttggcttttccagctcctctgacctcagagtagcactctatcttagagttca

SEQ ID NO: 15226 - DNA, 201 bp, Homo sapiens
tatccattctcagtcttgtcagtgtggcttcaaatccaatgttgctcccaccggtttgaaaatctcccttactttctgactgccgttttttttttttttttttggacgtcagtacgaaacagttttggttgtcttgttattgctgagttgttggcttttccagctcctctgacctcagagtagcactctatcttagagttc

SEQ ID NO: 15227 - DNA, 201 bp, Homo sapiens
caacagccacaaccgttacaccatcacagcttatctctcagccaacatcaccttctacaccggggtcccgaaggcagaattcaagaaggagacgttcgacrtgacgctggagcccttgtcctgtaagctaacaatggtgtggttctttgtgagactcgctgtctggcccctgtcttgctaggtgttaatgcccgttatagc

SEQ ID NO: 15228 - DNA, 201 bp, Homo sapiens
aatgtcatcatttacagactgaatttggtgctgattatgttcaccattactaaaaatattgggaaatgagctatgcttggtgaaacaaagggcattttttwaaaatttggctgattaaatgtagtttagaaacaaaataaacttgcataaacttgcaagtgtttggaaacagtctggtttggtaatagtcactatgtttaa

SEQ ID NO: 15229 - DNA, 201 bp, Homo sapiens
gaccgcctttggaggcagaagagcagttccacccaataactctaatgcagcggaagatgacctgcccacagtggagcttcagggcgtggtgccccggggcrtcaacctgcaaggtatgagcataccccccttccccaccactctgggtccaggcacagccgggccctggcccctcttccctgcaggtaaacatcctctgtc

SEQ ID NO: 15230 - DNA, 201 bp, Homo sapiens
gttgatgagagtggaagataaatgtgggagcctctgtgctcctacttctcaggcccacagctgtagcttctgggggcatctgtggttgcatccatgagacrccttcctgccctggaagcaggaacccaggcttctggcagtgaccctgaggagtgacatctcatgcagcccttatccaggtcttagagcccttccctagtc

SEQ ID NO: 15231 - DNA, 201 bp, Homo sapiens
ctggaatctgtgggataaatgcaaggcctcacttataccctctggggcaactttattgcccataaagggctctccgcatttctttcaaattacaatgctcrtagcttctgcatctcatcatttaagagatgccttattgcagatgcaataaacaacagagaaaataatcttagtgcttttgaaacaacgcaagcacaaaac

SEQ ID NO: 15232 - DNA, 201 bp, Homo sapiens
tacacataaaagtttcttcttgaactaaccttctctaaattgcctgaaggctccctttatttaaggttttatgagagcaagaaaatgaaaaatatgactgygaaaatgaaatgaaaatatgactatgcagatatggaattatgctttcagcaataaggaaaagggagctttgcagattcctaaaataatgtgatgcaaaca

SEQ ID NO: 15233 - DNA, 201 bp, Homo sapiens
cgtcctcaactgatggtttagcgataacttaaaaggtgatgctgcaaatgattctttgctggatttcagaaaataaagaagctattccagcaaaaaaaaaagtttctatttttacctgtattctgtcagggatcacagtatatgtagttttgaagatgaatgttttagagtcagaaagacctggatttatatccaacttcc

SEQ ID NO: 15234 - DNA, 201 bp, Homo sapiens
ttgagatataatgagtgccccaaacaaagtacatgacagtgactggctacactgtgagacttaactgtagtttcatttagtgctgtaaatatcacaaacttcattaaggtggaaaatgggaacagactatgtgttctaattattgctgaaccctgaccattttcccctccatgtccacaaccgagcacgttctctctccag

SEQ ID NO: 15235 - DNA, 201 bp, Homo sapiens
taaattgtagcaaatgcctagagctttcaaaaccattatcagagaggccgggtgcagtggctcacacctgtaatcccagcactttggaaggccaaggtggstggatcacttgaggtcaggagtttgggatgaacctgaccaacatggtgaaaccctgtttctactaaaaataaaaaattagccaggctgtagtggtgcgtg

SEQ ID NO: 15236 - DNA, 201 bp, Homo sapiens
cctgaactcaggaggtggaggttgcagtgagccaagatcgtgccactgcactccagcctgggggacagagcaagacttcatctcaaaaaaaaaaaacactrtagtgttttctttggaaactaaaagctttggcacttttcctattcctagggtagtaaaggtaattttcatggaaaagaatagtcagtgtaaaggactgaa

SEQ ID NO: 15237 - DNA, 201 bp, Homo sapiens
ctcgaacccgggaggcggaggttgcagtgagctgagatcgtgccactgccctccagcctgggtgactgagcgatactccgtctcaaaaaaaaaaaaaaaaraaaagaatggaggctggaaacaaagctgtgtcatctaggaggggcctaggaagaggttttctgcctctgccatctcttgtggggcctctttctcgtcctt

SEQ ID NO: 15238 - DNA, 201 bp, Homo sapiens
tgtggagcatggatctaaatgatccatctcagaaacaggccctctgctggtgcctctcgcccaagttaggaaagtcttttgggggctgtccagaatgaatrgtgtgctttgctttcccattcaaaaagatacacgcgctgacataggccgcttcttaaaacgctgtctcctgtaatctcagcactttgggaggctgaggtt

SEQ ID NO: 15239 - DNA, 201 bp, Homo sapiens
tgcgatgatcttggttcactgcaacctttgcctcctgggttcaagcaatcctcctgcctcagcctcccgagtagctgggattacaggcacatgccaccacrccaggcaaatttttgtatttttagtagagacgggatttcactatgttggccaggctgatctcaaactcctgacctcaggtgatccacccacctcggcctg

SEQ ID NO: 15240 - DNA, 201 bp, Homo sapiens
tggagtgcaatgcgatgatcttggttcactgcaacctttgcctcctgggttcaagcaatcctcctgcctcagcctcccgagtagctgggattacaggcacrtgccaccacgccaggcaaatttttgtatttttagtagagacgggatttcactatgttggccaggctgatctcaaactcctgacctcaggtgatccaccca

SEQ ID NO: 15241 - DNA, 201 bp, Homo sapiens
agaacccactcattctgcaaaagcctccactttctttttttttatttttattttttgagatggaatctcgctctgacacccaggctggagtgcaatgcgaygatcttggttcactgcaacctttgcctcctgggttcaagcaatcctcctgcctcagcctcccgagtagctgggattacaggcacatgccaccacgccagg

SEQ ID NO: 15242 - DNA, 201 bp, Homo sapiens
acttcatccattctatctagagacacgataaactgaccatttgtgctcatctgaggctgtaaccaatagagggccagaacctcactcatctaaacaattawttgcaaggggagccatggaggaagcagggtccaggcttaggtccaaagacagcaatacgagagcgggtcattccaaaaggcaggacctgggggccaaggt

SEQ ID NO: 15243 - DNA, 201 bp, Homo sapiens
caggagatatgtttggaagctgtagagatactccaggctagaagaggaatagaccagagggattttagcccctggaggtatggggctcatttctcttgttscagcttcctctgagcacctgagcaatccttcaacattataggttccaggatgtattaataacaacactttataaattaagccacttaagaaaatgctttt

SEQ ID NO: 15244 - DNA, 201 bp, Homo sapiens
tgagagtggaagataaatgtgggagcctctgtgctcctacttctcaggcccacagctgtagcttctgggggcatctgtggttgcatccatgagacgccttyctgccctggaagcaggaacccaggcttctggcagtgaccctgaggagtgacatctcatgcagcccttatccaggtcttagagcccttccctagtctctgg

SEQ ID NO: 15245 - DNA, 201 bp, Homo sapiens
gagcctccaccaaggagatggtggaggtatgaatatgcttctgtttgaattgatgagtgtgaattacttgagggactttcaggtaaacctgtccaatagayaatatgagtctgaagcttcgggaggaggtttgggttggacaggagataatttggatatcatacacacgtgggcaagctcactcagaaaaaggtaaatcaa

SEQ ID NO: 15246 - DNA, 201 bp, Homo sapiens
gtgagggtaggtagtccttgcttctcgtgaatcctttgctgtgagtcatttggaaagccaatgactgctgtgcagcattcagaatggcagtgtttcttggrtaactactgggctccagacgctgttcttaaagcactttacatggttgcattttcaaccaccaacaaccccacaaggtaaagagtactggcatcactttac

SEQ ID NO: 15247 - DNA, 201 bp, Homo sapiens
ctacctatgagtcctgagggactctgagcaaggaaagcctgcttaccccaggggaccctaggaggggacaccttcagccctgctcccatagctgactctcsatcccctcgtggctactttcacagaggattgtggccgtgggaccaaaccgtgggtgcccttagccaggatagatgatcgtaaactatgtctatgagtgag

SEQ ID NO: 15248 - DNA, 201 bp, Homo sapiens
gggagaacccactcattctgcaaaagcctccactttctttttttttatttttattttttgagatggaatctcgctctgacacccaggctggagtgcaatgmgatgatcttggttcactgcaacctttgcctcctgggttcaagcaatcctcctgcctcagcctcccgagtagctgggattacaggcacatgccaccacgcc

SEQ ID NO: 15249 - DNA, 201 bp, Homo sapiens
agggatgtgaaggacctcttcaaggagaactacaaaccactgctcaaggaaataaaagaggatacaaacaaatggaagaatattccatgctcatgggtagsaagaatcaatatcgtgaaaatggccatactgcccaaggtaatttacagattcaatgccatccccatcaagctaccagtgactttcttcacagaattggaa

SEQ ID NO: 15250 - DNA, 201 bp, Homo sapiens
ccaacttacaagggatgtgaaggacctcttcaaggagaactacaaaccactgctcaaggaaataaaagaggatacaaacaaatggaagaatattccatgckcatgggtaggaagaatcaatatcgtgaaaatggccatactgcccaaggtaatttacagattcaatgccatccccatcaagctaccagtgactttcttcac

SEQ ID NO: 15251 - DNA, 201 bp, Homo sapiens
acctaggaatccaacttacaagggatgtgaaggacctcttcaaggagaactacaaaccactgctcaaggaaataaaagaggatacaaacaaatggaagaayattccatgctcatgggtaggaagaatcaatatcgtgaaaatggccatactgcccaaggtaatttacagattcaatgccatccccatcaagctaccagtga

SEQ ID NO: 15252 - DNA, 201 bp, Homo sapiens
ttcagcaaagtctcaggatacaaaatcaatgtacaaaaatcacaagcattcttatacaccaacaacagacaaacagagagccaaatcatgagtgaactccyattcacaattgcttcaaagagaataaaatacctaggaatccaacttacaagggatgtgaaggacctcttcaaggagaactacaaaccactgctcaaggaa

SEQ ID NO: 15253 - DNA, 201 bp, Homo sapiens
atatctagaaaaccccattgtctcagcccaaaagctccttaagctgataagcaacttcagcaaagtctcaggatacaaaatcaatgtacaaaaatcacaarcattcttatacaccaacaacagacaaacagagagccaaatcatgagtgaactcccattcacaattgcttcaaagagaataaaatacctaggaatccaact

SEQ ID NO: 15254 - DNA, 201 bp, Homo sapiens
gggccaatattcaacattcttaaagaaaagaattttcaacccagaatttcatattcagccaaactaagcttcataagtgaaggagaaataaaatactttayagacaagcaaatgctgagagattttgtcaccaccaggcctgccctaaaagagctcctgaaggaagcgctaaacatggaaaggaacaaccggtaccagccg

SEQ ID NO: 15255 - DNA, 201 bp, Homo sapiens
aacagcggatctctcggcagaaactctacaagccagaagagagtgggggccaatattcaacattcttaaagaaaagaattttcaacccagaatttcatatycagccaaactaagcttcataagtgaaggagaaataaaatactttacagacaagcaaatgctgagagattttgtcaccaccaggcctgccctaaaagagct

SEQ ID NO: 15256 - DNA, 201 bp, Homo sapiens
aaaagcaaggctcaagacctacgtgaagaatgcagaagcctcaggagccgatgcgatcaactggaagaaagggtatcagcgatggaaaatgaaatgaaagmaatgaagcaagatgggaagtttagagaaaaaagaataaaaagaaaccagaaaagcctccaagaaatatgggactatgtgaaaagaccaaatctacgtctc

SEQ ID NO: 15257 - DNA, 201 bp, Homo sapiens
gtaggtctttaagggtccccaggtgattgtgatatagagccatgactgagaactcttcaatcagaagtcctggaagcaaggcacagcacttacgcatctgyaaagagacttccaaatagaagtgctgcccaagacagaggctttcccagcctcttggtcttcaaggtccagagcaagctgctgcagatccatcgcaggtgt

SEQ ID NO: 15258 - DNA, 201 bp, Homo sapiens
aaaactctttcaagaatgaacaaaacctggggtcgcctatggctctgcccccctacttaatgccaacatcaaatacctgttgcgtctacttcctgcttccrctggcacccctccacttaccttcccccgagagtcagtcaaagacaccatcatgcctcccttgagcacttcagcaccctctgactggtttccttgctccac

SEQ ID NO: 15259 - DNA, 201 bp, Homo sapiens
agtgaataagttttgctcttgaaggttctcctgcttacaatcaaagtaatttgcagacttgcctgatttgtatgtttcttcaagtcaagaataattctaakggattactcctgtcccttcagctataagataacagagtgagaacaaaaatggcttgtgaaatcaacctaacagagtatttcttctctcttctcataggtc

SEQ ID NO: 15260 - DNA, 201 bp, Homo sapiens
caagtgtttggaaacagtctggtttggtaatagtcactatgtttaaaccctgatgcagatgatgctgtgtatctggacaatgagaaagaaagagaagagtwtgtcctgaatgacatcggggtaattttttatggagaggtcaatgacatcaagaccagaagctggagctatggtcaggtgagccacttaaaatttgttatt

SEQ ID NO: 15261 - DNA, 201 bp, Homo sapiens
atggaatctggtggtcacagggtactttcttggctccggatgccttgctttgacttccatatgggatctccctgtgttccttacccactgctccagtaccygtgttatcctgcctacctggctttgtgaacagcttccctgactccggagaattacatgcccagtgctcaggcttccccgcctgcatttctaatgtcctgc

SEQ ID NO: 15262 - DNA, 201 bp, Homo sapiens
tgaaaagcaaggctcaagacctacgtgaagaatgcagaagcctcaggagccgatgcgatcaactggaagaaagggtatcagcgatggaaaatgaaatgaawgaaatgaagcaagatgggaagtttagagaaaaaagaataaaaagaaaccagaaaagcctccaagaaatatgggactatgtgaaaagaccaaatctacgtc

SEQ ID NO: 15263 - DNA, 201 bp, Homo sapiens
actctagaaagaagagcgcctctcctcctccaaaggaacgcagttcctcaccagcaaaggaacaaagctggacggagaacgactttgacgagctgagagamgaaggcttcagacgatcaaattactctgagctacgggaggacattcaaaccaaaggcaaagaagttgaaaactttgaaaaaaatttagaagaatgtataa

SEQ ID NO: 15264 - DNA, 201 bp, Homo sapiens
gggaaaaaacagagcagaaaaactggaaactctagaaagaagagcgcctctcctcctccaaaggaacgcagttcctcaccagcaaaggaacaaagctggayggagaacgactttgacgagctgagagaagaaggcttcagacgatcaaattactctgagctacgggaggacattcaaaccaaaggcaaagaagttgaaaac

SEQ ID NO: 15265 - DNA, 201 bp, Homo sapiens
actgcctcctcaagtgggtccctgacccctgacccccgagcagcctaactgggaggcaccccccagcaggggaacactgacaccttacacagcagggtatwccaacagacctgcagctgagggtcctgtctgttagaaggaaaactaacaaacagaaaggacatccacaccaaaaacccatctgtacatcaccatcatcaa

SEQ ID NO: 15266 - DNA, 201 bp, Homo sapiens
gaaggggcagactgcctcctcaagtgggtccctgacccctgacccccgagcagcctaactgggaggcaccccccagcaggggaacactgacaccttacacrgcagggtattccaacagacctgcagctgagggtcctgtctgttagaaggaaaactaacaaacagaaaggacatccacaccaaaaacccatctgtacatca

SEQ ID NO: 15267 - DNA, 201 bp, Homo sapiens
atgcagctggagatctgagaaggggcagactgcctcctcaagtgggtccctgacccctgacccccgagcagcctaactgggaggcaccccccagcaggggmacactgacaccttacacagcagggtattccaacagacctgcagctgagggtcctgtctgttagaaggaaaactaacaaacagaaaggacatccacaccaa

SEQ ID NO: 15268 - DNA, 201 bp, Homo sapiens
cattgcctcactcgggaagcacaaggggtcagggagttccctttcctagtcaaagaaaggggtgacggatggcacctggaaaatcgggtcactcacacccraatactgcgcttttccgacgggcttaaaaaacggcgcaccacgagattatatcccgcacctggctcggagggtcctacgcccacggagtctcgctgattg

SEQ ID NO: 15269 - DNA, 201 bp, Homo sapiens
atgagtgacgcagaagactggtgatttctgcatttccatctgaggtaccgggttcatctcactagggagtgccagacagtgggcacaggtcagtgggtgcrcgcaccgtgcgcgagccaaagcagggtgaggcattgcctcactcgggaagcacaaggggtcagggagttccctttcctagtcaaagaaaggggtgacgga

SEQ ID NO: 15270 - DNA, 201 bp, Homo sapiens
cagcaatccaggtaagacaaaatccacatacacacacccaaccatggtcttaccctggcctttgcaatctatgtcctgccatcccacaccatcacctgtggccagggagggagggttgagttgccaaaggaggaaggggagcctggaggctactctaagagaggaatacagcccacctacagggttgatgggaatgcctgg

SEQ ID NO: 15271 - DNA, 201 bp, Homo sapiens
ctgttggatttggaggctggcaagctgtggacagcaccccccaggaaaatagcgatggtaaaactgtgtcctccctctgggaacttgcttcattgctgatytttgttttgcttttatgcttgcatttgatgtgtgggaaccacgcccattgggaggcaacatctgaagtgtgcttcctgggcacatgtacagtattagcta

SEQ ID NO: 15272 - DNA, 201 bp, Homo sapiens
gtcaggaagaaagtcccctacaagaagggttttttcactctgtgtttattaaatgctggtgatgtgtttagctgtggtctgtcctttcctgtagttttacratgccttggaataccagcaagaattgttaccaattatttctctgcccatgataatgatgccaatttgcaaatggacatcttcctggaagaagatgggaac

SEQ ID NO: 15273 - DNA, 201 bp, Homo sapiens
gtgttttctaaggaactaccactgctggaatgaagcatggatgacaaggcctgaccttcctgttggatttggaggctggcaagctgtggacagcacccccyaggaaaatagcgatggtaaaactgtgtcctccctctgggaacttgcttcattgctgatctttgttttgcttttatgcttgcatttgatgtgtgggaacca

SEQ ID NO: 15274 - DNA, 201 bp, Homo sapiens
tacagagtcaccctcagtgccatgaatcttgcagtatctggacagaattggagatgacaaactcacaccgcccttcctctgtgcaatgcaggcatgtatcrgtgtggccccgcctcggttcaagccatcaagcacggccatgtctgcttccaatttgatgcaccttttgtttttgcagaggtaagcaggaagctggaggaa

SEQ ID NO: 15275 - DNA, 201 bp, Homo sapiens
cagccagaaacagaatgagagtggcaatcgttttattgataagaccctgggtgaacagggctgaaaatcaagaaaggaaaatgggaacgggaggcccgtgrcagctgccactgttgtttggggcattaagatcaagtcctttaaggagggggacccttgaatctctaccagactccagtttggacttccaaggttgttctg

SEQ ID NO: 15276 - DNA, 201 bp, Homo sapiens
tgataatgatgccaatttgcaaatggacatcttcctggaagaagatgggaacgtgaattccaaactcaccaaggattcagtgtggtgagtttgattgacartggcattggctgatgtcacattatagtaatgttacacatttaccacaagatagactcaatctgatgtttctgttctattttgaggaccattcaacagcac

SEQ ID NO: 15277 - DNA, 201 bp, Homo sapiens
cctcttcctcctggcagtaggtcacatagccacagttagcccaaaagaagtccagggaagcaagcgatgggcatggtggcatggcattgtcttctctcctrtgagaggtaggacttatcacaaggacagaggagggagaaaaatggttgcttcttagacagtttattatctcagcctcaaataatctttatttaaagtact

SEQ ID NO: 15278 - DNA, 201 bp, Homo sapiens
gtgtcactcaatccacgagagttgtgtgtttcaagaggaaagcatgaccaatgttattaaatataactaggagatgcagtgagataggaacttcccactggagtcaacagttgggggacactggttgaactcgggtagattccaaattttaatggtctaaaagtcaaggagatgtgaggaaatgggtgtagtcaatttgga

SEQ ID NO: 15279 - DNA, 201 bp, Homo sapiens
cggggtttcaccaagttcgccaggatggtctcgatctcctgacctcgtgatctgcctgccttggcctcccaaggtgctaggattacaggcgtgagccaccragcccggccgtcctccatacattttttatctttgagcttgtcatttactgagtcttcacaatgtgccaacagtgtgctctgtgtttgcattagttttatg

SEQ ID NO: 15280 - DNA, 201 bp, Homo sapiens
ctgtcaccaggctgaagtgcagtggcacaatctcagctcactgtaacctccatatcccagattcaagcgattctcctgcctcagcctcccaagtagctggractacaggcacccgccaccacacccagctaatttttgtatttttagtagagacagggtttcatcatgttggcaaggctggtcttgatgtcttgaccttgt

SEQ ID NO: 15281 - DNA, 201 bp, Homo sapiens
ctggtgtgtagtgggtacatagtgaaattaatatctcttgaaccaatcaaaaatgggctgcactcagagaaagatgggagcatgggcaaacagctgacatygaagggcgtctaggcacggaacccgtggtagttgaacctgaaattcatcagtgtcataaacaaagactgctgtaactacctcaccacattattaaatctt

SEQ ID NO: 15282 - DNA, 201 bp, Homo sapiens
aacagacttccctgcattgcattacatgctagcccctgccctatcttttcttctgtcttacaacctagatcacttttttttttttttttttagacagggtytcactctgtcttccaggatggagtgcagtggtgcaatcatggctcactgcagccttgatctcccgggctcaagtgatcctcccactcagcccctcaagta

SEQ ID NO: 15283 - DNA, 201 bp, Homo sapiens
cagaagtgctcagaaagggctttctgctaactaatgatggcaaacgtggtctgtgtgatggggtggcatctactttctgaaaatttttaattttaatttttgttgttttcgttttgttttgttttataacttgtgttttatttttgccaaatttggtttcattccctgcctgttccatttggaggtactacactaaaaaaa

SEQ ID NO: 15284 - DNA, 201 bp, Homo sapiens
ccagaagtgctcagaaagggctttctgctaactaatgatggcaaacgtggtctgtgtgatggggtggcatctactttctgaaaatttttaattttaatttttgttgttttcgttttgttttgttttataacttgtgttttatttttgccaaatttggtttcattccctgcctgttccatttggaggtactacactaaaaaa

SEQ ID NO: 15285 - DNA, 201 bp, Homo sapiens
cccagaagtgctcagaaagggctttctgctaactaatgatggcaaacgtggtctgtgtgatggggtggcatctactttctgaaaatttttaattttaatttttgttgttttcgttttgttttgttttataacttgtgttttatttttgccaaatttggtttcattccctgcctgttccatttggaggtactacactaaaaa

SEQ ID NO: 15286 - DNA, 201 bp, Homo sapiens
acccagaagtgctcagaaagggctttctgctaactaatgatggcaaacgtggtctgtgtgatggggtggcatctactttctgaaaatttttaattttaatttttgttgttttcgttttgttttgttttataacttgtgttttatttttgccaaatttggtttcattccctgcctgttccatttggaggtactacactaaaa

SEQ ID NO: 15287 - DNA, 201 bp, Homo sapiens
gaacccagaagtgctcagaaagggctttctgctaactaatgatggcaaacgtggtctgtgtgatggggtggcatctactttctgaaaatttttaattttaatttttgttgttttcgttttgttttgttttataacttgtgttttatttttgccaaatttggtttcattccctgcctgttccatttggaggtactacactaa

SEQ ID NO: 15288 - DNA, 201 bp, Homo sapiens
ggaacccagaagtgctcagaaagggctttctgctaactaatgatggcaaacgtggtctgtgtgatggggtggcatctactttctgaaaatttttaattttaatttttgttgttttcgttttgttttgttttataacttgtgttttatttttgccaaatttggtttcattccctgcctgttccatttggaggtactacacta

SEQ ID NO: 15289 - DNA, 201 bp, Homo sapiens
tgcttgacaggtctcagtttctgtgacttctactaacaaagagtgtgacccaacaagataacccattccatggtcaggtagctctaacagtaaggaaacakgtttttctaccatttgatcctgccaatgatcctaattctgccatctggactgacagaaagtaaggcccatctcttttccatctgatggtttgcaaatgtt

SEQ ID NO: 15290 - DNA, 201 bp, Homo sapiens
gatgaatggtctccaatgaacagataacgttcaaccagtagagatggatggagagaccccttcagatactaggaagaaaatgttagcaagggctagagggraggtggacggcagtatgtagagcagtgagaagcgtgccttggctggggtggaggctgggagcagggatgagtaagggtaacctgaaaaagatagcttgag

SEQ ID NO: 15291 - DNA, 201 bp, Homo sapiens
ctgtcacaaggatgtgtcactgtagggctttctcacttacgaagtgggtattgattctttgcaggatcctgtgtggtaagtagggcagccattactcatgsacttttacaagttaggacacagggtaaggacagctttcagtgacaaagccacagctagaactccggtctgctgacttcaaatctagacattttctacttt

SEQ ID NO: 15292 - DNA, 201 bp, Homo sapiens
agaggacaggtctgtgcggctgtccatccagtcttcccccaaatgtattgtggggaaattccgcatgtatgttgctgtctggactccctatggcgtacttygaaccagtcgaaacccagaaacagacacgtacattctcttcaatccttggtgtgaaggtaagaggcagacatttagttttctcatttaaaaattcaccta

SEQ ID NO: 15293 - DNA, 201 bp, Homo sapiens
catttgaccagtagttttcatgatgcctctccagtgatcaccagaaatctctgcccaaatggctcaagagacttggcagaggaaggccgagggttgatgakagtggaagataaatgtgggagcctctgtgctcctacttctcaggcccacagctgtagcttctgggggcatctgtggttgcatccatgagacgccttcctg

SEQ ID NO: 15294 - DNA, 201 bp, Homo sapiens
caaagcagctactccattctgtattcccactagcaatacacaaaagttccaacttcatattcttgcaaataacttttattttctgttttttttttttttttaattattattgtagccatcctaatgggtgtgaagtggtatttcatggtgggattaattttcatttctctaatgaccaatgacgttgaacatctttttgtg

SEQ ID NO: 15295 - DNA, 201 bp, Homo sapiens
actgtattcctctagcctgggtgacagagtgagacttggtctcaaaaataaataaataaaaataattaacatccttattaaaatatgcttcacggcctggygaggtggctcacacctgtaatcccagcaatttaggaggctgaggcaggtggatcacaaggtcaggagatcaagaccatcctggctaacacagtaaaaatc

SEQ ID NO: 15296 - DNA, 201 bp, Homo sapiens
atcaggagtttgagaacagcctgaccaacacggtgataacctgtctctactaaaaatacaaaaaaattagctgggcgtggtggtgcatgcctgtaatcccygctacttgggaggctgaggcaggagaatcacttgaacctgggagacagaggttgcagtaagccaagatcatgccactgtattcctctagcctgggtgaca

SEQ ID NO: 15297 - DNA, 201 bp, Homo sapiens
atcccagcactttgggaggccgatgcaggaggatcacttgagatcaggagtttgagaacagcctgaccaacacggtgataacctgtctctactaaaaatasaaaaaaattagctgggcgtggtggtgcatgcctgtaatccccgctacttgggaggctgaggcaggagaatcacttgaacctgggagacagaggttgcagt

SEQ ID NO: 15298 - DNA, 201 bp, Homo sapiens
agaacctgaattacaaacccaagggggctgaccccagagcccactctttttaaaatgacatccttattgactgggcgtggtggctcacacctataatcccwgcactttgggaggccgatgcaggaggatcacttgagatcaggagtttgagaacagcctgaccaacacggtgataacctgtctctactaaaaatacaaaaa

SEQ ID NO: 15299 - DNA, 201 bp, Homo sapiens
caatgccctgatttaagtgctgacatgtattaatttacttctacctcttaacagcatgttaaggtaattactgttagtggcacggtaacttaaccaaggtyccagccaataagtggcagaacctgaattacaaacccaagggggctgaccccagagcccactctttttaaaatgacatccttattgactgggcgtggtggc

SEQ ID NO: 15300 - DNA, 201 bp, Homo sapiens
aaattcagaatgtagaccaaattgcttaaagatgcttaagggtttgtaaaaatatcccatgatgcattgcagttgccaattctggacagttatcagagatkcttattttcaaacattttcttgttaaccatatttctggccaagttggttttaggaaaatcacctggagttagaccatgagccttagcattagaggactga

SEQ ID NO: 15301 - DNA, 201 bp, Homo sapiens
gatctttgttggtttaaagtctgttttatcagagactaggattgcaacccctgcctttttttgttttccatttgcttggtagatcttcctccatccttttrttttgagcctatgtgtgtctctgcacgtgagatgggtttcctgaatacagcacactgaagggtcttgactctttatccaatttgccagtctgtgtctttt

SEQ ID NO: 15302 - DNA, 201 bp, Homo sapiens
atatgcggtgtttggttttttgttcttgtgatagtttactgagaatgatgatttccaatttcatccatgtccctacaaaggacatgaactcatcattttttatggctgcatagtattccatggtgtatatgtgccacatattcttaatccagtctatcatttgtggacatttgggttggttccaagtctttgctattgtga

SEQ ID NO: 15303 - DNA, 201 bp, Homo sapiens
gagtgttatgttccccttcctgtgtccatatgttctcattgttcaattcccacctatgagtgagaatatgcggtgtttggttttttgttcttgtgatagtwtactgagaatgatgatttccaatttcatccatgtccctacaaaggacatgaactcatcattttttatggctgcatagtattccatggtgtatatgtgcca

SEQ ID NO: 15304 - DNA, 201 bp, Homo sapiens
tgtgctcctgagggcccttcagcctgctttgcattcataggcaatttatcctccttaatcactaaatcattaatggggatcaatagcaatgccacatcagwgaaggcaggggtgcatgcggggagaataattgcttgcttagtttttagtttagtggtgctaaccgggcttcgggtccattctgggaggaaacccttctcc

SEQ ID NO: 15305 - DNA, 201 bp, Homo sapiens
ccaaaaactcattgcaattgttaaaaatgacaaaaagatagttatttggcattctccatatctcttccttaaaaacacacagacacacacacacacacacmgacagacacacagacacacacacacagcctttgtagctaagtgcagttcaaagttatctttcccagctccttgattcaggtacctcccatcatcaaataa

SEQ ID NO: 15306 - DNA, 201 bp, Homo sapiens
ggttcctagtgataaaaatcaatcattccttataatagcaaccaccaaaaaaaggtcatagttttagctgctgcatatgcctatactagttcctctctacyttgatatattaatattacagttaatagcagaagtattggagccaagcgttctctgggtcagtgccctgggactaatagagctaacatttatttagtattt

SEQ ID NO: 15307 - DNA, 201 bp, Homo sapiens
tgtctggtgtcctgggaggcagggagggcatttggattaagtttaatcagtaggtacatatggcaagaaaggtattcagataatttgttatctattaaaaygaactaaaatgaatctgtggtgtcacccaccaatgcatgtcacaggagcaaattctggccaagacagcaaattccaccaaggacctactctgtaaattcc

SEQ ID NO: 15308 - DNA, 201 bp, Homo sapiens
ttctgaaggagaaaataaaaaggcaagccaagtcattaatcttaaaattgtcagctgaattattttcaatgagccctgatgtctggtgtcctgggaggcakggagggcatttggattaagtttaatcagtaggtacatatggcaagaaaggtattcagataatttgttatctattaaaatgaactaaaatgaatctgtggt

SEQ ID NO: 15309 - DNA, 201 bp, Homo sapiens
ggtgaacagggctgaaaatcaagaaaggaaaatgggaacgggaggcccgtggcagctgccactgttgtttggggcattaagatcaagtcctttaaggaggrggacccttgaatctctaccagactccagtttggacttccaaggttgttctgttgaaggaggtgggtagtctttggttaaaaatgctaaactattctgaag

SEQ ID NO: 15310 - DNA, 201 bp, Homo sapiens
attgataagaccctgggtgaacagggctgaaaatcaagaaaggaaaatgggaacgggaggcccgtggcagctgccactgttgtttggggcattaagatcargtcctttaaggagggggacccttgaatctctaccagactccagtttggacttccaaggttgttctgttgaaggaggtgggtagtctttggttaaaaatgc

SEQ ID NO: 15311 - DNA, 201 bp, Homo sapiens
gggataatgtgaattagtgttcagccagaaacagaatgagagtggcaatcgttttattgataagaccctgggtgaacagggctgaaaatcaagaaaggaaratgggaacgggaggcccgtggcagctgccactgttgtttggggcattaagatcaagtcctttaaggagggggacccttgaatctctaccagactccagtt

SEQ ID NO: 15312 - DNA, 201 bp, Homo sapiens
gaggaacaggtgccctaaagtcaagcctcactttcttgaaattatgagtaaggcagagtcttgaccaagtcgtgtctgggataatgtgaattagtgttcakccagaaacagaatgagagtggcaatcgttttattgataagaccctgggtgaacagggctgaaaatcaagaaaggaaaatgggaacgggaggcccgtggca

SEQ ID NO: 15313 - DNA, 201 bp, Homo sapiens
ctaaaataataaataacaaaagatatatattgcttatttatcattgagaagttgtataaatatgcgtatttatttattattgagaattttataaatatatmcacttaatttttatcccagttatggaaggtattatagcaggtggtctcatattcatttttccacatttctcaatgcccctgagcaattagagatcagaac

SEQ ID NO: 15314 - DNA, 201 bp, Homo sapiens
ggcatgtgccactatgcccagctagtttttgtatttttagtagagatggggtttcaccatgttggccaggctggtcttgaattcctgacctcaagcaatcyatctgcctcatcctctcaaagggctgggattacatgcctggccaaaaagatcagcattttgattatatttattactttctagaatttaaaatataaatta

SEQ ID NO: 15315 - DNA, 201 bp, Homo sapiens
gtctacccagctctggagtgacactgggcattgtctgcacagaatcctgtgatgtgagccatctctgggtccctctcagccaccggaatagcgcctattcyggtggaggtggcagggggtacaatggacactgttagggttcttagctttggtgtttaatgctctatttttgtgctggttggctccctgccaggaggtggt

SEQ ID NO: 15316 - DNA, 201 bp, Homo sapiens
acacaggccacttcaaattgtgcttgacaggtctcagtttctgtgacttctactaacaaagagtgtgacccaacaagataacccattccatggtcaggtarctctaacagtaaggaaacaggtttttctaccatttgatcctgccaatgatcctaattctgccatctggactgacagaaagtaaggcccatctcttttcca

SEQ ID NO: 15317 - DNA, 201 bp, Homo sapiens
aagaggctgaagatagggttccaatcccttctagattgtagggtttctgctgagaaatttgctgttcatctgataggttttcttttataggttacctgatscttctgtctcacagctcttaagattcttttctttgtcttaactttggataacctaatgacaatgtgcctaggcaaagatctttctgcaatgaatttcctg

SEQ ID NO: 15318 - DNA, 201 bp, Homo sapiens
ttagcagttcttgtagtggtggcttggtaatggtgaattatctcagcatttgtttgtctgaaaaaggctgtatctttctttcatatatgatgcttagtttygctggatacaaaattcttggctgataattgttttgtttgaagaggctgaagatagggttccaatcccttctagattgtagggtttctgctgagaaatttg

SEQ ID NO: 15319 - DNA, 201 bp, Homo sapiens
gttgaaatgtgaggtaccattacattcatcatgctctttgttgcctgtgtactttggtttttttgttttttgtttttgctttttaacttgtatttttgttycataggtcctgtgtgatttatgctttaaagaagttctgttttgatgtgtttccaggatttgcttcaagatttagagctccttttagcagttcttgtagtg

SEQ ID NO: 15320 - DNA, 201 bp, Homo sapiens
ttcagttctgtatcttttaaatatagcatttaggccatttacattcaatgttagtgttgaaatgtgaggtaccattacattcatcatgctctttgttgccygtgtactttggtttttttgttttttgtttttgctttttaacttgtatttttgtttcataggtcctgtgtgatttatgctttaaagaagttctgttttgat

SEQ ID NO: 15321 - DNA, 201 bp, Homo sapiens
ccattcttcagttctgtatcttttaaatatagcatttaggccatttacattcaatgttagtgttgaaatgtgaggtaccattacattcatcatgctctttsttgcctgtgtactttggtttttttgttttttgtttttgctttttaacttgtatttttgtttcataggtcctgtgtgatttatgctttaaagaagttctgt

SEQ ID NO: 15322 - DNA, 201 bp, Homo sapiens
aggttatttggattttctctctttttggttaattttgctaatgatctatcaattttatttatctttttaaataaccagctttttgtttcatttatcttttrtatttttgtttgtttcaattttgtttagttctgctctgatcttggttatttcttttctcctgctgggttagggttttgtttgttcttgtttctccagttc

SEQ ID NO: 15323 - DNA, 201 bp, Homo sapiens
agtccttggggttttcaaggtaaacaatcatatcgtcagcaaacagtgacagtttgacttcctctttacctatttggatgtcctttatttctttctcttawcttattgctctggctaggacttccagtactatgttgaagaggagtggtgacagtgggactccttgtcttattccagttctcagaggaaatggctttcaac

SEQ ID NO: 15324 - DNA, 201 bp, Homo sapiens
cccgggttcataccattttcctgcctcagcctcctgggtagctggggactacaggcgcccgccaccaggcctggctaatttattgtatttttagtagaggyggggtttcaccaagttcgccaggatggtctcgatctcctgacctcgtgatctgcctgccttggcctcccaaggtgctaggattacaggcgtgagccaccg

SEQ ID NO: 15325 - DNA, 201 bp, Homo sapiens
gtaacagttttattaagaaaaattttaattacaaagcaatatctaacccatcctttggtttataaagcagcttaaacctctttttttggagtgaacggtcrtagatacatctgaggacccaggtgctcaatgggcattgtccttggcatttctaaatcaccaaggaactttttcgcatttacccatatggattttaatttt

SEQ ID NO: 15326 - DNA, 201 bp, Homo sapiens
gttcaacctggcttataaagaaaggtattttcaaagtgatgcaaagaatactgcaaggggtgtgcccaattcaaagaaatagcttctttttttttttttttaagtgttagcctagggtactgctaattagaaaagagtgttatcatttcatcaaaggaagggccactgagcttttacatagaaagattttatcagctgcaa

SEQ ID NO: 15327 - DNA, 201 bp, Homo sapiens
atctcattagttcaacctggcttataaagaaaggtattttcaaagtgatgcaaagaatactgcaaggggtgtgcccaattcaaagaaatagcttctttttktttttttttaagtgttagcctagggtactgctaattagaaaagagtgttatcatttcatcaaaggaagggccactgagcttttacatagaaagattttat

SEQ ID NO: 15328 - DNA, 201 bp, Homo sapiens
gtgagccacttaaaatttgttattgtcaaggacatttttacttcatattttttgtcacatgtatccctacaggatcccatatatcgatattagacaagcayaatttcctgctttttaggatctgagactccaaggcagagagcataggagtagggactcataaagacaactgcgtaatttatcagctgaaaccacatatct

SEQ ID NO: 15329 - DNA, 201 bp, Homo sapiens
aaatgtcatcatttacagactgaatttggtgctgattatgttcaccattactaaaaatattgggaaatgagctatgcttggtgaaacaaagggcattttttaaaaatttggctgattaaatgtagtttagaaacaaaataaacttgcataaacttgcaagtgtttggaaacagtctggtttggtaatagtcactatgttta

SEQ ID NO: 15330 - DNA, 201 bp, Homo sapiens
gactcatttaggtgaatgccaaagatgacgaaggtgtcctcgttggatcctgggacaatatctatgcctatggcgtccccccatcggcctggactggaagsgttgacattctattggaataccggagctctgagaatccagtccggtatggccaatgctgggtttttgctggtgtctttaacacatgtaagtatccaactg

SEQ ID NO: 15331 - DNA, 201 bp, Homo sapiens
tttttttggaggaaggggcaaaaatatttcataagtcacgccattgcttcctaggacattcatcctggcagaagatacatatatttaggtttgtcaatagyatctggttcacgttttatcagtctcatccacccgttacgaagttctcttcttaacgaattatttctgcctcaattcgttacttcattagggattgcaaga

SEQ ID NO: 15332 - DNA, 201 bp, Homo sapiens
ttggctattttctctctctctctctctctttttttttttttttttttttgggacagattctagctctgttgcccagcctggagtgcagtagtgctatctcrgcctcctgggctcaagcgattctcctgcctcagcctcccgagtagctaggattacaggcacacaccaccatgcctggcttatatttttatttttagtaga

SEQ ID NO: 15333 - DNA, 201 bp, Homo sapiens
atttacctttgggcaagtccttcaatctttcttctttttcaacatattagtttttggctattttctctctctctctctctctttttttttttttttttttttgggacagattctagctctgttgcccagcctggagtgcagtagtgctatctcggcctcctgggctcaagcgattctcctgcctcagcctcccgagtagct

SEQ ID NO: 15334 - DNA, 201 bp, Homo sapiens
tgttcttcacagctggctcttcctatagacatgtgggaccccctgctgcaggcctgtcccagctgcttggtggaagcagcttttgctacccttctgggctrttgcgcaggtttcatttatgagctcaaccctgaaccttccctgacagcagcaaggcctgtgtgcgtacctaattatgaagtgacggcctgtccctgtgaa

SEQ ID NO: 15335 - DNA, 201 bp, Homo sapiens
aatttacctttgggcaagtccttcaatctttcttctttttcaacatattagtttttggctattttctctctctctctctctctttttttttttttttttttttgggacagattctagctctgttgcccagcctggagtgcagtagtgctatctcggcctcctgggctcaagcgattctcctgcctcagcctcccgagtagc

SEQ ID NO: 15336 - DNA, 201 bp, Homo sapiens
gtcctaacttttggagcaaactcctcataaagcagcatgttctcccatgcttgaagcttagtctggaatctttgggttagagggaatgactgtttggttcrtggctgtatctcacttaaaacagtgcctagggccaggcacagtggctcacgcctgtaatcccagcacattgggaggccaaggcgggtggatctcttgagg

SEQ ID NO: 15337 - DNA, 201 bp, Homo sapiens
aaattggggtccaaagtttaatttacctttgggcaagtccttcaatctttcttctttttcaacatattagtttttggctattttctctctctctctctctytttttttttttttttttttttgggacagattctagctctgttgcccagcctggagtgcagtagtgctatctcggcctcctgggctcaagcgattctcctg

SEQ ID NO: 15338 - DNA, 201 bp, Homo sapiens
gacagagagagcacaggagacacaccctgacatctcccctcctcctgcttccaatcctctctttggccgaacctacctcgaagtcagagagcagaggagcrtgggaacatggcttcctgtggaacctgacagaagattctaggggtgcaggcaataggtctgagaacagccagtctgtcaataggtggagttgctgagaca

SEQ ID NO: 15339 - DNA, 201 bp, Homo sapiens
taaggattgttattaagaagttatttatcattattgttgctacgatttgaaagtagagggggtcgctgtttgtacttacatggcttcctccagagggaatkcccgaattctcagacagctcatttaaagcttccaaaatgacaaatattccacaggtatctgctgcgtcctctcctgtcctgattcctgacttcacatttc

SEQ ID NO: 15340 - DNA, 201 bp, Homo sapiens
acatcccaccccaacacacatatacaaaagccaccccatacaggtgtttctcgtctcctctctccgcaaaggacagtgctgttggtctgtcctgagatttyagcctacaggaatttctgaagccatattcaaggtgggggggcaggaatcagccactttcatattttgcttgtttccctggaaaaccacaagctgttataa

SEQ ID NO: 15341 - DNA, 201 bp, Homo sapiens
tcactctgtgtaggaagaatgctttgcatgctttgttccctctctgcattcaagtctctgctctggtcacctcttcaaagaggccttcgctcacccaactscacctaaaatatcaccatctgccctgttgttttcatcctccaaccttagtgtgtactccatttctcccttctagaatatgagctccatgaaggtagaagc

SEQ ID NO: 15342 - DNA, 201 bp, Homo sapiens
tacaataaaactgaacataaattcctacaagattccatggcttcccttccacttcatcccttgtttatttccctccagccatactgagatttttctcttcrgaaagcatccacacatcctcttgtgtcagcacttttagacatactgctccttttgctaggaaagctcccctcactatctttcactctgtgtaggaagaat

SEQ ID NO: 15343 - DNA, 201 bp, Homo sapiens
attataattactcctttctcacccactgcagaggcgtgtctgacagagggtacaatttgttgctttggcatgggctgcgctccaggggctgagccattttkaagagatgtttgagttgatgaaaagtgtatgaggaatcttttctcaagggtgcctgcagtgggaccccatggggagtgtcatatgagtcgatatgactca

SEQ ID NO: 15344 - DNA, 201 bp, Homo sapiens
aatgttaatatttagaaagcaaaacgaacatcaaaattcagacagcaagatcaggaatttgaaacacacaaaagaccagtgttcatctcatcgtacctgcygtggcagtttacagaagcctttggagaccaagcttactggacttggaattttatcccctcgttttcactttgggatttgaagatttccacaaacctccca

SEQ ID NO: 15345 - DNA, 201 bp, Homo sapiens
gaatgcatactggtaaccattgcactctagtactccaggaggaacaaatagttattattaatgtacaccaggcattgtactggggggaattctaaggttcragtctttaagaaacgtatttctagatgccaggtgacagggcacaaacacactgaacatgaaataacaacaatacttgtcaggtgggccatgtagagagca

SEQ ID NO: 15346 - DNA, 201 bp, Homo sapiens
aataaaatcgaggcaaagagtgattaagtgactttctcacaaccatctagctaataaatagcagtgctaagatttgaagccaggcagatacctgaatgcayactggtaaccattgcactctagtactccaggaggaacaaatagttattattaatgtacaccaggcattgtactggggggaattctaaggttcaagtcttt

SEQ ID NO: 15347 - DNA, 201 bp, Homo sapiens
ataaattggggtccaaagtttaatttacctttgggcaagtccttcaatctttcttctttttcaacatattagtttttggctattttctctctctctctctctctttttttttttttttttttttgggacagattctagctctgttgcccagcctggagtgcagtagtgctatctcggcctcctgggctcaagcgattctcc

SEQ ID NO: 15348 - DNA, 201 bp, Homo sapiens
tttatctgatggaaaagtctcattatagaaataaaaaataataaaagcataaaaagagctcaaagatctacaaattagagacactaacaattaacattttsttgtaatgtcatccatttaaagtattttcagtgcttttcatttttaattggcaattaattgaatatattgttcttttcaaataaacacacatgtacattt

SEQ ID NO: 15349 - DNA, 201 bp, Homo sapiens
tatgatgaaccgctccccccaacacacacacaagcacatacactgtagcccagcagtcccctgcagttttatgcttgtgtgtgtgttaatgcataacaaargattcagcgctatggcctggtaactggaaagtaggtcaaaagagaggggtgagactgtcgcccaagtgaaaaagatagcagaagataagaaggaaaactg

SEQ ID NO: 15350 - DNA, 201 bp, Homo sapiens
atatctcacttaccattcttttcacctctctgtcatacctatggtgacccctgattcatgactcttgtcctccatacatttttttttttttttttttttttgagacggagtctcactctgtcgcccaggctggagtgcagtggcatgatctcggctcactgcaagctctgcctcccgggttcataccattttcctgcctca

SEQ ID NO: 15351 - DNA, 201 bp, Homo sapiens
tcacctggagggtcaccacgcttggagcacatcagaatcacctggagggtcaccacgcttggagcacatcagaatcacctggagggtcaccacgcttggarcacatcagaatcacctggagggcttgttcagccacttctgtgcagcaccctcaggttgagtaggtctgaggcctggcctgagaatttgcatttctaacca

SEQ ID NO: 15352 - DNA, 201 bp, Homo sapiens
tatatctcacttaccattcttttcacctctctgtcatacctatggtgacccctgattcatgactcttgtcctccatacatttttttttttttttttttttttgagacggagtctcactctgtcgcccaggctggagtgcagtggcatgatctcggctcactgcaagctctgcctcccgggttcataccattttcctgcctc

SEQ ID NO: 15353 - DNA, 201 bp, Homo sapiens
cagtgatggaagcagcgagaaccagtccgatctgggcatgtgctgaaggtggagcccgcctgattggctgagagactggatatgtggtgtgagagaaggarggtatggaggaagccaaatgagtgatgaatgtgaaatgtgtgccacatggtagaatcttagtaaatggtaacttccaacatgtttacatttggggaaact

SEQ ID NO: 15354 - DNA, 201 bp, Homo sapiens
gtatatctcacttaccattcttttcacctctctgtcatacctatggtgacccctgattcatgactcttgtcctccatacatttttttttttttttttttttttgagacggagtctcactctgtcgcccaggctggagtgcagtggcatgatctcggctcactgcaagctctgcctcccgggttcataccattttcctgcct

SEQ ID NO: 15355 - DNA, 201 bp, Homo sapiens
cacacacaccccggggttcttgattcattcccctaacctttatttagtgcttgcaagtccaggttctgttttatgctggagacacagcaatgcctattctkactgaatttctgatctcatgggggaaccaaacaaacaagtgaatctatagtatagttatatgggtaatagaaaaatacaaagcaggttaaggaaaacggg

SEQ ID NO: 15356 - DNA, 201 bp, Homo sapiens
ttgcaaatagacaattctggatgtaagcgatgactgtgtcacctaccagctgtgtttcctgagcaaggtacttaagcactctgagctgtctctcctcatcygcaaaggggaaaaacagcacacacaccccggggttcttgattcattcccctaacctttatttagtgcttgcaagtccaggttctgttttatgctggagac

SEQ ID NO: 15357 - DNA, 201 bp, Homo sapiens
agctctccatcaccttccggaacaacagccacaaccgttacaccatcacagcttatctctcagccaacatcaccttctacaccggggtcccgaaggcagarttcaagaaggagacgttcgacgtgacgctggagcccttgtcctgtaagctaacaatggtgtggttctttgtgagactcgctgtctggcccctgtcttgct

SEQ ID NO: 15358 - DNA, 201 bp, Homo sapiens
ggcatgggtgttgggggcaatggcaattgagtgagatagggaagaacggggcaggagccctcaagggtcagctcagcaaacagcaagtgggacaggcccargtggaaggagagatgaggaagacaggtcttattggggggcaggtattcacaaatcagagagaaaagttacattgcaggaggtggaatggcaagaggcaat

SEQ ID NO: 15359 - DNA, 201 bp, Homo sapiens
agcaggaagctggaggaaagtgctgtttttctccccaacctcttaacacatgaaagagtaagctaaaagttgttgtttctaagttttccaggtacatagcrtatgcttcgtgttgacaaaggtaactaggcattattccaacttccaggctattaatgctaaatgcagttcttgtttaacatttttctttccttgatgttt

SEQ ID NO: 15360 - DNA, 201 bp, Homo sapiens
aaatcagcaatgaagttgggaacactggtctttacagagtcaccctcagtgccatgaatcttgcagtatctggacagaattggagatgacaaactcacacygcccttcctctgtgcaatgcaggcatgtatcggtgtggccccgcctcggttcaagccatcaagcacggccatgtctgcttccaatttgatgcaccttttg

SEQ ID NO: 15361 - DNA, 201 bp, Homo sapiens
taaatcagcaatgaagttgggaacactggtctttacagagtcaccctcagtgccatgaatcttgcagtatctggacagaattggagatgacaaactcacaycgcccttcctctgtgcaatgcaggcatgtatcggtgtggccccgcctcggttcaagccatcaagcacggccatgtctgcttccaatttgatgcacctttt

SEQ ID NO: 15362 - DNA, 201 bp, Homo sapiens
catggggacattttacaggtgactaatagcagctaatctcttattaactatatagataggtggttaaaatttaaagcattttagaagagtaacataggccytctgacttcctaaatgcatggtgggcatggccaaaatgcacaggcaatgtccaaattctccagttaaacttgacatatgttcataatgtccaaaaacaaa

SEQ ID NO: 15363 - DNA, 201 bp, Homo sapiens
cattgaagggcgtctaggcacggaacccgtggtagttgaacctgaaattcatcagtgtcataaacaaagactgctgtaactacctcaccacattattaaayctttctttattactatatgaacattttctatagtgctgaggggttaatgtgctctcatttgattctgtactgtcatataatttcaggtcttttcaaggac

SEQ ID NO: 15364 - DNA, 201 bp, Homo sapiens
atttagatcttcttcttaaattattccaatggctttttatagcctaagaataaagcatgaatgtttaatttgatatcaaaggatttcacaatcttatcctyacctatatcataggtcagtgttgaagagtgtggatttcagagctctatcactaactagctgtgacctcagcaaggttcttaaccttcctgggtttcagct

SEQ ID NO: 15365 - DNA, 201 bp, Homo sapiens
ggtatatctcacttaccattcttttcacctctctgtcatacctatggtgacccctgattcatgactcttgtcctccatacatttttttttttttttttttttttgagacggagtctcactctgtcgcccaggctggagtgcagtggcatgatctcggctcactgcaagctctgcctcccgggttcataccattttcctgcc

SEQ ID NO: 15366 - DNA, 201 bp, Homo sapiens
gcagggtcgcctttttaatgtcttgccagagcccagcatccttggggactgggggatgcaagttttggtagaaccttctgccatggcatgggtgttggggrcaatggcaattgagtgagatagggaagaacggggcaggagccctcaagggtcagctcagcaaacagcaagtgggacaggcccaagtggaaggagagatga

SEQ ID NO: 15367 - DNA, 201 bp, Homo sapiens
cccttcatctccaccacaaccactttgcaaaccctgcacaaaacattttcctaaaagcagcacacacacctcgaactgcattagaacttaggtgcaccacygcctgtcaacagatgtccctcaaaaaactgccctccgtgtcagatgagtttgggaaaccttgtgtaaagaaaggcaaagaggtgtccttgctgctgggct

SEQ ID NO: 15368 - DNA, 201 bp, Homo sapiens
gctgtgaagttgcttgtggctggcttcaaggcttcttctcccattcacctcaccttggccagctcagctcctctctgatgtgttcctgatgctcgaatttscctcctgcattttgcctcaatgcatctctggcccgcatccaaagtgatcatcattaatgttctcttctcatggatctattggccagatgatttctgctaa

SEQ ID NO: 15369 - DNA, 201 bp, Homo sapiens
cctgcacccatggcaggctgtgaagttgcttgtggctggcttcaaggcttcttctcccattcacctcaccttggccagctcagctcctctctgatgtgttmctgatgctcgaatttccctcctgcattttgcctcaatgcatctctggcccgcatccaaagtgatcatcattaatgttctcttctcatggatctattggcc

SEQ ID NO: 15370 - DNA, 201 bp, Homo sapiens
atatagtgcctgacacataataagtgtccaataaaagtttcccctattactagtaattctgttattcctgccatactactgctattagtttgggctatgawtagttttctcctggaaaaatacttgctctagcttcccaattccacctcacctcctcaggccctccttccctcagtctagcccctgccttgctgccaaagt

SEQ ID NO: 15371 - DNA, 201 bp, Homo sapiens
tttcctgtagttttacgatgccttggaataccagcaagaattgttaccaattatttctctgcccatgataatgatgccaatttgcaaatggacatcttccyggaagaagatgggaacgtgaattccaaactcaccaaggattcagtgtggtgagtttgattgacaatggcattggctgatgtcacattatagtaatgttac

SEQ ID NO: 15372 - DNA, 201 bp, Homo sapiens
atccacatagatggttgtaagcgacgactcatcctgcttcggggctggagtttgaccccaagtggatagtttcttaatcaagggtggcatacacatttcaractggaactttggaagtgaccaagtagaatgttgttttgagaagaacaccaagactgcatctgaatgtggcgggtagaaggattgatggccgccattggc

SEQ ID NO: 15373 - DNA, 201 bp, Homo sapiens
tggaatccatgaagtgctaaggagtgcagaatttattttaaatagtttagacagtctccctgctcttatttacaaaagtaatttgcactacaaagaagaarcttgctgaattgagaacacttgtgcatagtctcagaaagtcagaatttttgttatctgaactagtgaattttcactgtattttttaaatgcttcattttc

SEQ ID NO: 15374 - DNA, 201 bp, Homo sapiens
ataatgtcatggtgggtttttgttaacttttattgcatagaatgtttcaaatggcactactgagtttaattctatctcaatcaatgcttagtgtccgctcyatgcctgcaattggtttggtgctggcgattccagcagtgagcaggactcagttcctgtcctggtccgagtgacaggattattgtgcagaggggtctttgg

SEQ ID NO: 15375 - DNA, 201 bp, Homo sapiens
caagcgatgggcatggtggcatggcattgtcttctctcctgtgagaggtaggacttatcacaaggacagaggagggagaaaaatggttgcttcttagacartttattatctcagcctcaaataatctttatttaaagtactactaaatcaactagattcgcctttagaatattttcaaaacctgtttggccctatgatacg

SEQ ID NO: 15376 - DNA, 201 bp, Homo sapiens
tgggtttctgcattgatgatcaacgtgtttatttttaagcatctctgtgaagtgactaataatggcatctaagaaagtaggacagtgtttcccagagtgtrttctctatgaacacctgtcatgtgagattctccttgggggaaaaaagttccatcatcaaatacagttggatcatgctgtgttttgtgtctcttctcatag

SEQ ID NO: 15377 - DNA, 201 bp, Homo sapiens
acatgttggctatagttaattatactatactatatatttcaaaattgccaggagagtaaatttcaaatgtttgcaccacaaaaataaatatgggaggtaakcgatatgttattaacttaattatcctgcaatgtgatttgattttatatatatatgtaaaatcatcactttgtaccctataatatatacaattatacaatt

SEQ ID NO: 15378 - DNA, 201 bp, Homo sapiens
gaatcagttggtattttccaacctggagaatcagtagatgaaattaggaaaagtctgtacggaaggaataagtgtttgagatcaaatatacaacatgttgkctatagttaattatactatactatatatttcaaaattgccaggagagtaaatttcaaatgtttgcaccacaaaaataaatatgggaggtaatcgatatgt

SEQ ID NO: 15379 - DNA, 201 bp, Homo sapiens
gggagaaaattatacaaaattatgcaaaaggtagtgggagtcatttaaaattctgctctgcatgtgattttgaaacactaatatgccatggatgtctttcytgcctagtcaatatagatctgcatttttatggctgaatagcattctattctgtttcaaaatacttgatcacatgttggacagttaggctgcttccatgct

SEQ ID NO: 15380 - DNA, 201 bp, Homo sapiens
aaataaataaatagtcctcagtgtttcggagggaacctaatacatgtttattatgcagtattttaaatgttgcagaaaaaataccaaagtaagaagtatcyattttctaactactcagaacatctgtaacatttccttaacccttctgtaatatgtctctttgtgtgtcgtatgcatgtttttaatgctgcataccaaagt

SEQ ID NO: 15381 - DNA, 201 bp, Homo sapiens
acacgtaatcacaccatggggaaaaatgaaaggagaagaaaaaaagaaagctggataatcagcccctaattttctaaaaattgctattaacaaagctgctktacaattctcttgataaatatccaagaaatctgttcttggaagcttaagaagagagtggaaaggctgtactctcaggactaaggaaggactcactcccta

SEQ ID NO: 15382 - DNA, 201 bp, Homo sapiens
gaatgatatttcattgtgtggataaaccaggttttatttatccattcatcagttgtacatttgggttgtttccatttttggctttcatgaataatgttgtwatgaacattcaggtaaaagtttttatgtgaacatatgttttttatttctcatgggcatatatttagagtggaatttctgggttgtatggtaactctatgt

SEQ ID NO: 15383 - DNA, 201 bp, Homo sapiens
gctgaccccagagcccactctttttaaaatgacatccttattgactgggcgtggtggctcacacctataatcccagcactttgggaggccgatgcaggagkatcacttgagatcaggagtttgagaacagcctgaccaacacggtgataacctgtctctactaaaaatacaaaaaaattagctgggcgtggtggtgcatgc

SEQ ID NO: 15384 - DNA, 201 bp, Homo sapiens
gttggaaaaaacattatttgccaccttcaaagaataagagtagctcatgttcacaaaaatacttttttttgcaatgccctgatttaagtgctgacatgtaytaatttacttctacctcttaacagcatgttaaggtaattactgttagtggcacggtaacttaaccaaggtcccagccaataagtggcagaacctgaatta

SEQ ID NO: 15385 - DNA, 201 bp, Homo sapiens
ttcttgttaaccatatttctggccaagttggttttaggaaaatcacctggagttagaccatgagccttagcattagaggactgagaatatacactgaaggyacacaatagtgttggaaaaaacattatttgccaccttcaaagaataagagtagctcatgttcacaaaaatacttttttttgcaatgccctgatttaagtg

SEQ ID NO: 15386 - DNA, 201 bp, Homo sapiens; identical to SEQ ID NO: 3198

SEQ ID NO: 15387 - DNA, 201 bp, Homo sapiens
atattccagatgctgagcctgggaacaaggtctatcccaagggagttggcaaaagctaattcgagtgtcagggcctcagcaaaggcagctgggggattcayataggactgtaattccaggaggaaactagtggcaaaaactgagctgaggctcagaagatcagtcacatagataaggctactatggagggcttggagacaa

SEQ ID NO: 15388 - DNA, 201 bp, Homo sapiens
ccaatttggtggttgaaataggaatttgaattacagaacatgaagattctcaaagtcaaatggcagcaggcagggctatattccagatgctgagcctgggmacaaggtctatcccaagggagttggcaaaagctaattcgagtgtcagggcctcagcaaaggcagctgggggattcatataggactgtaattccaggagga

SEQ ID NO: 15389 - DNA, 201 bp, Homo sapiens
ttgggcttaaactttaagtttctcaaataggacagaagctaaggtctagacgcacagaggacaaaccatgggcagttgcagtttattgtaataataatctyatttgcctgcgtgcattcaagatgataaatggccggtatctcctgatggctcagcacgttactgagaatcgtttatcacaacatccatccccagaaaata

SEQ ID NO: 15390 - DNA, 201 bp, Homo sapiens
tttgggtttcaacaaatgaatgtgtgaggaccacaaacatttagtccgtaacagtcctcaatctctctttttaagttttttttactgacacattgtaattstacatatttatgtggggcaatttgatgtttcgatacatatatatgttgtataatgatcaaatcggagtatttagtgtatccatcaccccatgcatttatc

SEQ ID NO: 15391 - DNA, 201 bp, Homo sapiens
ggctagatttctctttcctatcttgtgaagaatactaatatcaagaaactgtgcacaaagctcaatcaagcctaggtagctaaggttggaaaagagtaacrtcacaaatggaattaaagattttcatcttcttcctcctacatcccagctggggggattaaggtaggtctgtgtaaggagagtgaggccctcagtaaaggg

SEQ ID NO: 15392 - DNA, 201 bp, Homo sapiens
tattgagcacctactacgttccaaacatcatgcaagctgctgggtatacaaagttaaacaaaactccatctctgtcttcacaaagtttccccccaaccctwcctaagtttgcctgagctagaataaacatggccaggaaggtctcttttctttaggaaacatctggaaatatgtatgtaatctgccaatggcaacttagca

SEQ ID NO: 15393 - DNA, 201 bp, Homo sapiens
aaagacttcaagctctccatcaccttccggaacaacagccacaaccgttacaccatcacagcttatctctcagccaacatcaccttctacaccggggtccygaaggcagaattcaagaaggagacgttcgacgtgacgctggagcccttgtcctgtaagctaacaatggtgtggttctttgtgagactcgctgtctggccc

SEQ ID NO: 15394 - DNA, 201 bp, Homo sapiens
tagtcagcatcaggtgacagccttatgatttctttctgattcactcaaaaaacctagcacgatgctggtttcatgtatatcccacaaaattacgccttacrtttactccaaaagaggctttaagtgatgtaggaagcactgaaagaaaagtaaaataaaatcaaggtagaaaagacaccttaacaagtacctagcttccat

SEQ ID NO: 15395 - DNA, 201 bp, Homo sapiens
gcatttaagcaggctcaaatatctgctgtgttaaaaacaaaaattacaaaaatctttttcaccactgtctcttcctcctcgcctccttgccgtcctggagygctgcctggacttgcgtcctgctgtgttccttctccactccttccgcgcacactctgtcctgatttctgctaccagcacttccttgaagttgttctcaag

SEQ ID NO: 15396 - DNA, 201 bp, Homo sapiens
gtcctcatgttcacattcctgccttggttagccatctaagtggtgcacttcttaaagccagggaccaggtagtcagcatcaggtgacagccttatgatttmtttctgattcactcaaaaaacctagcacgatgctggtttcatgtatatcccacaaaattacgccttacatttactccaaaagaggctttaagtgatgtag

SEQ ID NO: 15397 - DNA, 201 bp, Homo sapiens
tttattgagtatgtattgtaaatatccacttgtaggttaatactagatggactgtaccatactccttagaatgttttctatgttgatttttgtttctccartaattgctttaatctctggcaatgcaaactcatttaacacttgcttttatatattgcattcatatatactccaaagacaaacaaatgctttatcagaatt

SEQ ID NO: 15398 - DNA, 201 bp, Homo sapiens; identical to SEQ ID NO: 3220

SEQ ID NO: 15399 - DNA, 201 bp, Homo sapiens
agaacaattgtgttcccccacaaggcatcattaggcaaggatggtccaacctcaatacggtttctttacatccctgtgtttcagctacatccgtggtctcytgtattgtttatctatgtcacttgcaaaaaactaggcttgaatacagttttttaaaagtgatgcttttaaatataagcggtaatcaacttatgaaggaac

SEQ ID NO: 15400 - DNA, 201 bp, Homo sapiens; identical to SEQ ID NO: 3221

SEQ ID NO: 15401 - DNA, 201 bp, Homo sapiens
cagtggggaacacatgaccagaggaaatgagagaagattggaatatattctaaggccttaaaaagatgtcaagaacaattgtgttcccccacaaggcatcmttaggcaaggatggtccaacctcaatacggtttctttacatccctgtgtttcagctacatccgtggtctcctgtattgtttatctatgtcacttgcaaaa

SEQ ID NO: 15402 - DNA, 201 bp, Homo sapiens
ctcttgtcctccatacatttttttttttttttttttttttgagacggagtctcactctgtcgcccaggctggagtgcagtggcatgatctcggctcactgmaagctctgcctcccgggttcataccattttcctgcctcagcctcctgggtagctggggactacaggcgcccgccaccaggcctggctaatttattgtatt

SEQ ID NO: 15403 - DNA, 201 bp, Homo sapiens
attttagagcagaaattaaccagctttcacacctgggacactgccctaatcagtgtataatcctaattctcattatgtcctcagtactcatatggtgtttyacacattgtaggtgcatttttgaaattgagattgttcttctatacattattttatttttatttttatttatttttattattatactttaagttttagggt

SEQ ID NO: 15404 - DNA, 201 bp, Homo sapiens
atgaggacaaagggatggggctttgttcctccatagtgatcagtcactggatgtgagccacccctggaatgaggtgtgaccctggatgaggcagttttctyctgctaaggcaactcccaaggaggcctgaaccaccaaggactattttctgtcatcactcccagcagctgaggataagcctgtcggtcatttccgaaggtg

SEQ ID NO: 15405 - DNA, 201 bp, Homo sapiens
gtgtcctcctctcagcttttccccaccggaatgcacccacccacagggggagcagtgtctgatctattttatttttgttgttttgtcagcatgtaacagtrtgcagggcatagagcaagcactgaataaacagaattgcttggaaaaaatttttaatgcataaaaactccatgctgcaatgggtggtcttaatctataaac

SEQ ID NO: 15406 - DNA, 201 bp, Homo sapiens
gggcagagtaattagatcccagggtagcaaatgaaaccccaagtgggcaaatgcaaagtagcagatcccagaaggagcaatttcggccgcctgtccccagygtgctgatgagttctgaattatgtgtaacctctggggggaaggcagctatgaatcactggacagtttaatgaagacgcttgctcaatgtttagctgcagt

SEQ ID NO: 15407 - DNA, 201 bp, Homo sapiens
agaggtaggcctgatgctgatttaattattattggtcactggtaagaagcaggggctgcctgagcatagggctggtgaggaagggtgagggtgagggtgarggtggaggctaaacaggggctgaggtgggggtgggaatgatttgctgggcatcagctgacctctgtgaggtcagtgcggtgtagactggcgacacatggc

SEQ ID NO: 15408 - DNA, 201 bp, Homo sapiens
gctgtgtggctttgagaaaatgacttcacctctctgagcttcattttcttcatcagtagaatgaaagtaatcttagtagttaccatttcccgatggagtgrctataatgattaaatcaggtcatccaggtagagtgcttaccatagaggtaggcctgatgctgatttaattattattggtcactggtaagaagcaggggct

SEQ ID NO: 15409 - DNA, 201 bp, Homo sapiens; identical to SEQ ID NO: 3231

SEQ ID NO: 15410 - DNA, 201 bp, Homo sapiens
gcacatcagaatcacctggagggtcaccacgcttggagcacatcagaatcacctggagggtcaccacgcttggagcacatcagaatcacctggagggtcasccacgcttggagcacatcagaatcacctggagggtcaccacgcttggagcacatcagaatcacctggagggtcaccacgcttggagcacatcagaatcac

SEQ ID NO: 15411 - DNA, 201 bp, Homo sapiens
aatccatctgaaagtgctgagatgacaggcatgagccaccgcacctgactgacttcaggttttacctgttggcatacttctggggtcttgcgtccctactyctgtgattcttcccttaagtggtgtgtctgcgtgtgcagtggcctgctagcgcttagaagcggagcatgcacagtgcgtttactagtgttgtactcgtga

SEQ ID NO: 15412 - DNA, 201 bp, Homo sapiens
cttgcgtccctactcctgtgattcttcccttaagtggtgtgtctgcgtgtgcagtggcctgctagcgcttagaagcggagcatgcacagtgcgtttactastgttgtactcgtgaccacttgatgcattttttccttaccagttgagtgtccctggaggaaggccacatactggttaaattccgccattttggctcttagt

SEQ ID NO: 15413 - DNA, 201 bp, Homo sapiens
attggagtggagcaaagtggagtgaatcgggagaaaggatggataaggccagtcccttcttggacacagatgtcctgcccacacactggcttaaggtactrttagtagttactgcaacacgtaagtctaggcagacaagtagatagacagagagctagctgctcttagtcagtttgagctgctgtaacagaaatgccatag

SEQ ID NO: 15414 - DNA, 201 bp, Homo sapiens
tatttgggaggcctcaggctcaaaataggttaaatctccagatggtttgtttattgttaatgtctgacattggagtggagcaaagtggagtgaatcgggaraaaggatggataaggccagtcccttcttggacacagatgtcctgcccacacactggcttaaggtactgttagtagttactgcaacacgtaagtctaggca

SEQ ID NO: 15415 - DNA, 201 bp, Homo sapiens
tcaggcaaagtgaaacacgtttcctcttccatacagccccctgctgtatccaactttttccttcccagacagtaaacccacaagctttatctgagtgtacyggaaacttctctatctttacaccttggctatccccctagaattccaccttggtcaaggccaacacatgaaaaaagacactgtgtgtcttagacaaaagat

SEQ ID NO: 15416 - DNA, 201 bp, Homo sapiens
attcatttggtatacatagctcctaaacaaacaaacaagtcttatagccacctggcattttgcggcacattgcgtttatgttggaaaagcatatggttctraagtgtgtggcatacagtaaacacagcttaaggtatagtaataataagagcattctacatagatcgccccataaaagtgtcagcccattttaaagacaag

SEQ ID NO: 15417 - DNA, 201 bp, Homo sapiens
tgccgttttatgagcatttttcattccaaacctttcttgcaagggaagaactattattcttatcttattcccaagttacttagagcttatacagatccatycatttggtatacatagctcctaaacaaacaaacaagtcttatagccacctggcattttgcggcacattgcgtttatgttggaaaagcatatggttctaaa

SEQ ID NO: 15418 - DNA, 201 bp, Homo sapiens
ccatatattttctcccatattatatagtggctaaaggaacatggaatagtaatggctgtgttgtcatctggaagatccagacatccagtaaattccatttytgagccattgacttaatttaataaatatttactggacattggtattgaagtactaagtattggagttaaaagtgggctgaaatataaggtgaataagaca

SEQ ID NO: 15419 - DNA, 201 bp, Homo sapiens
caagggtcctcttctctgggcaatgtccttcctctttacgtccattcttaaaaacgcctcatttccatatattttctcccatattatatagtggctaaagraacatggaatagtaatggctgtgttgtcatctggaagatccagacatccagtaaattccatttttgagccattgacttaatttaataaatatttactgga

SEQ ID NO: 15420 - DNA, 201 bp, Homo sapiens
gatcagatcaggaagattttattcttgactgtagcataagtaagcaagggtcctcttctctgggcaatgtccttcctctttacgtccattcttaaaaacgsctcatttccatatattttctcccatattatatagtggctaaaggaacatggaatagtaatggctgtgttgtcatctggaagatccagacatccagtaaat

SEQ ID NO: 15421 - DNA, 201 bp, Homo sapiens
gtgctggactccctgcctggcacacgatccatgctgtctaggtgcacctgctgttgttgctaccatgaccatcgtctgcccctctcctagttcccctgaayccagctctccaccactgccctccaggagatgcggatttaaatgtaacaaagtttagggagttggctgaaagtttcgtttttcttatagacttaagaaatc

SEQ ID NO: 15422 - DNA, 201 bp, Homo sapiens
tttaagtgtgtttgtgtataattattgcagctaatacaaatcaacaagagctccttggtattatctaatgaaccatctttaatctaattttcccaatgtcyaaaaattatctttttagttagtttatttggattaaggtctgtagattaaatttggttggtatgtcacttaaatcttttcctctagagtaatcctcttcat

SEQ ID NO: 15423 - DNA, 201 bp, Homo sapiens
actgaggattgctggttaaagtgctggactccctgcctggcacacgatccatgctgtctaggtgcacctgctgttgttgctaccatgaccatcgtctgccyctctcctagttcccctgaatccagctctccaccactgccctccaggagatgcggatttaaatgtaacaaagtttagggagttggctgaaagtttcgtttt

SEQ ID NO: 15424 - DNA, 201 bp, Homo sapiens
tattttacctgtacatattttagcgtgtagctttttaaaaatagacatatatacagtatacatagatacatatgtacatatgtgtgtatgtatgtgtttawgtgtgtttgtgtataattattgcagctaatacaaatcaacaagagctccttggtattatctaatgaaccatctttaatctaattttcccaatgtccaaaa

SEQ ID NO: 15425 - DNA, 201 bp, Homo sapiens
tgccccagtggctggccctctgccatttgtaggccatctcagggatgacagctcacgtgattaaagggctaaatgaagccctttttggtggggaaagaggsggcttggactcaaggcagtgcccagtcagaacccgagctccaccatggatagcagtgacagaatcactttaccccaccccccatcacattactgtttcct

SEQ ID NO: 15426 - DNA, 201 bp, Homo sapiens
tgagactgtcgcccaagtgaaaaagatagcagaagataagaaggaaaactgtttccagaaattgtcaaaagacagccaggtgaacaagattgtggcccgakgtggcacaggatgctgggctgaaaattacagcagcatgcacagcacttattgataggagaatgctcagctgtgctcctgagggcccttcagcctgctttg

SEQ ID NO: 15427 - DNA, 201 bp, Homo sapiens
cagaagcctctgtagtagcattttaggtagagtattaagatctgatttttttctactttttagattactatagcagaagtgtggaagataaattggaggamcgagattttgttagggacattagtaagagactcaagggggaaaaaaatctcactaataaatgataggataaatggatgctgcatgagtttgtatgatttt

SEQ ID NO: 15428 - DNA, 201 bp, Homo sapiens
ctttggagggagtgactgatggcaagaatagttgaaagaatcctccagaaagtgctatttgaggcgggtctcaaaaaacgaatagaaattgacccaggggratggaaattgtatacattctagaaaaaaaaaaatagaaaagttcagtggagcatgacattttggaagcacactgatgtctttgtatgacttgataagaag

SEQ ID NO: 15429 - DNA, 201 bp, Homo sapiens
gtcacacagctggaatttcttagaggcaatatgtttccatcaacccaagtacatcaaagcggtcagaaaaagagggatgcccagtgtcctaagatgactgygctatttctgttactttggggtatttttaaagaaaaagcagacacttggcctcaccagtgcaaacacccatgcaccttagaagttataggtggtccagga

SEQ ID NO: 15430 - DNA, 201 bp, Homo sapiens
gggccttctctctctctcacctctgagcctgcagcctcgacaaatcatgaaaggcaaggaggggagtggtaatcacaggttttactaacctgtggctgagrctgtgaaagcttgggagcagcttctggtgttaatttgctgttactttgacatgggcccctgcttttttgatacccagttgagggtgaaatcccaagctgt

SEQ ID NO: 15431 - DNA, 201 bp, Homo sapiens
tgtcacaggagcaaattctggccaagacagcaaattccaccaaggacctactctgtaaattcctaacttcctattagtgggtttttaaaattgtattttcrggaacatagtcccattcatgggactaaaataatactacgttgatgatcaaacgcttagaaacgaaacaattagaaccctgttgggattctactctagttg

SEQ ID NO: 15432 - DNA, 201 bp, Homo sapiens
tttaaatccaaagatgtttttgaaatgtttcttaatgcaggaaaaaatatattggacacacttgagaatgaaatcagggacaccatgtaaagtattctgawgtattgctacaccttcaatatctaaattgattgaggcagggcctctgggaagaaagtgaaaaattcagtctgtcttccacatgttttgtctataccagtg

SEQ ID NO: 15433 - DNA, 201 bp, Homo sapiens
tcattaataaagaatttttacctagctaacattttttaaatcaaaaacaaagggaggggttggaggctggagggaggtcatttaaaaaaatgattacaaawcctatttgttttagctcaaagtctcaacagtctaagacttggtgatctaaatttaaaaaaaaaaagtcatgagttttgttttgttttattttcccatagt

SEQ ID NO: 15434 - DNA, 201 bp, Homo sapiens
ctgcagttttatgcttgtgtgtgtgttaatgcataacaaaggattcagcgctatggcctggtaactggaaagtaggtcaaaagagaggggtgagactgtcrcccaagtgaaaaagatagcagaagataagaaggaaaactgtttccagaaattgtcaaaagacagccaggtgaacaagattgtggcccgaggtggcacagg

SEQ ID NO: 15435 - DNA, 201 bp, Homo sapiens
atatgagattttatctgtttgcttgtttgtttttacataaatgatgcagaaataactgactctccaactggaagaaagtttaaaaattgaccctcatcttrtcccatatacagtagtaaatctcagatggaatgagtattaatgtaaaaaagacaattttttgaggaaatttaacagacttaactaaaaactggaaactct

SEQ ID NO: 15436 - DNA, 201 bp, Homo sapiens
atatttagtaggacataatagagaatccagaaatggatttcagtatatgagttaatatgattgttggtttcatgaagtaagaagaccatatgagattttawctgtttgcttgtttgtttttacataaatgatgcagaaataactgactctccaactggaagaaagtttaaaaattgaccctcatcttgtcccatatacagt

SEQ ID NO: 15437 - DNA, 201 bp, Homo sapiens
ctaaatttcaatttcacgtaaacagaatgggattaataatcatgtctacccccaagaccatagggctgtagagaagattaaataaggtagtgtaagtaaaytgatgaacagaatgcctgcattactaagtaaacactaactaaataaatgtaagttacttgttattattgttgtcattaaccagagtcaggatcacgtgtt

SEQ ID NO: 15438 - DNA, 201 bp, Homo sapiens
tacaaagggaaaaagaagctctgggccaggcatggtgacttatgcctgtaattccaactctttggaaggctgaggcaggagaatcacttgagcccaggagktcaagactagcctgggcaacatagggagaccctggctctacaaaaaaaataaatttaattagccgagcatacacctgtagtcctagctactcgggagcct

SEQ ID NO: 15439 - DNA, 201 bp, Homo sapiens
tatctaagtggaaaaaagttaacaaatttcactgtaatcagaaattagaaagaaatgcctgctatcatcattccctttttaaaaagaagtactttaaaggytttagtaaatgaacaatgtaagagatacatctgctataaatgctggaaactaagaagtaaaactatatatttgctaatactatgattgtgtatgtagaaa

SEQ ID NO: 15440 - DNA, 201 bp, Homo sapiens
tgtaatgtcaatgtaaacattgttgaaatggcaccagtttttggaaaagctcctggactccccacctaaactcttctgactgtaattaaacatgatcaacrttacaccaagagaggtagattcagcagtgcccagaaaaaaactggcaagatgccttgaaactgttacctcttggcctttgttttactatgtaaacacaaa

SEQ ID NO: 15441 - DNA, 201 bp, Homo sapiens
tgcttctaaacgaatgtgcacacaaatcacccagtgatcttgttaaaatgcaaattcttattcaagagttctgggaggggcctgagattctgaattcctamcaagctcccagggaatgccaatattgctgatccatgaatgcctcaagtagcaaggctccacaccattgtaatgtcaatgtaaacattgttgaaatggcac

SEQ ID NO: 15442 - DNA, 201 bp, Homo sapiens
gtcttattcttactcaaatatacatttcctatatgtttgttgactatataagtgattattgaacaactacagagcatccagtctttgctaacacttggtaraactcagaaagacggagattttttttctttgttcccaatgaattgataaaccagcggggaagacagacttctctacaactagacacagcaagtcaaaaag

SEQ ID NO: 15443 - DNA, 201 bp, Homo sapiens
tttcttgaccatctctctccaggcataaggtcttattcttactcaaatatacatttcctatatgtttgttgactatataagtgattattgaacaactacakagcatccagtctttgctaacacttggtaaaactcagaaagacggagattttttttctttgttcccaatgaattgataaaccagcggggaagacagacttc

SEQ ID NO: 15444 - DNA, 201 bp, Homo sapiens
tctgtcttttttctttttgagttggagtctcgctctggtgcccatgccggagtgcagtggcgtgatctcagctcactgcaacctctgcctcccaggttcawgtgattctcttgcctcagcctcctgagtagctgggattacaggtgcccgccaccaggcctagctaatttattttttgtatttttagtagaaacgggattt

SEQ ID NO: 15445 - DNA, 201 bp, Homo sapiens
ctgacctcaagcaatctatctgcctcatcctctcaaagggctgggattacatgcctggccaaaaagatcagcattttgattatatttattactttctagawtttaaaatataaattagaaatctcaggtttttgttgactagctggtaagatggttaaggttaggagctgagccatgttgcctctctgctttactccatag

SEQ ID NO: 15446 - DNA, 201 bp, Homo sapiens
gtatcccatgtacctagatcacagcctggcatgtcataggccctcaataaatattggttgaattaaattgcaaatgtaaacgctttagaagacaacatttrtctggacatggttgtgtgcgtttattcttaaaagtgacttataatctcataaatctgtatgaaatgaacatagatacagcacatgcatataacaggaaac

SEQ ID NO: 15447 - DNA, 201 bp, Homo sapiens
actttctctctggtggattgtatttttgcctgtcattatctctggatctcccccaggtcaagaagaagagagattggccctagaaactgccctgatgtacrgagctaaaaagcccctcaacacagaaggtgtcatgaaatcaaggtccaacgttgacatggactttgaagtggaaaatgctgtgctgggaaaagacttcaa

SEQ ID NO: 15448 - DNA, 201 bp, Homo sapiens
acctagatcacagcctggcatgtcataggccctcaataaatattggttgaattaaattgcaaatgtaaacgctttagaagacaacatttgtctggacatgsttgtgtgcgtttattcttaaaagtgacttataatctcataaatctgtatgaaatgaacatagatacagcacatgcatataacaggaaacatttcttgcga

SEQ ID NO: 15449 - DNA, 201 bp, Homo sapiens
atttcaagatcccatctgtgacaggtataatcattctctgaagaatattttacaacctagggagacaataatttacattttgttcatattagacaaaaagyaggaggacagggaggcagttgctcctccggagatttttttcttttctttaacagtccattttccgatatgtttggaattaggctaaattgtgttaggtag

SEQ ID NO: 15450 - DNA, 201 bp, Homo sapiens
cctggcaccagtgatcctgccctagaaaacctccttcttcttaagggaataactattattatagtctgatcgagctgatacaaatatagcccttgtgttgygaggcttatgtgagaatatatgtgaattatggttgtcagctggggctggttctttgtaatcaacaggggtgcctcaaataaatgaattacaggatccacc

SEQ ID NO: 15451 - DNA, 201 bp, Homo sapiens
aacatcgtacctggcacaggacagctctgcaacaaagatgcatccagcccgatatgtcagtagtgttgatgctgagaagccctgatctagatcatgattastgtttttgccacagccttcaaaccaggcttctctctccacaccccatgtgccagccagcctaaaagtaacttctggttcatgttctagtttgcctgtcat

SEQ ID NO: 15452 - DNA, 201 bp, Homo sapiens
gctactatcagatatacttttgaaggggcttatgcccatccttatatagcataccatggagaagacagatggctccaaaatattttttccagaaagaatawagtgatcatagcaaacacttttgccaataatgtctctgtggcagctccatcttcttcagtttagagagcttttgtaaatgctatctttattttgtatttt

SEQ ID NO: 15453 - DNA, 201 bp, Homo sapiens
tactggtatgggaagggttcttaatctagggttcatgggcccctagaaaaccatgtatggacttcataggtctatagtgcatcccctaaaaatacatgccyatattgtatatatcttgtatttgtcactgtgtatgtctgtgtagaggaaaggtcagtagctactatcagatatacttttgaaggggcttatgcccatcct

SEQ ID NO: 15454 - DNA, 201 bp, Homo sapiens
gaggcttcatgtagagccagtctactggtatgggaagggttcttaatctagggttcatgggcccctagaaaaccatgtatggacttcataggtctatagtrcatcccctaaaaatacatgcccatattgtatatatcttgtatttgtcactgtgtatgtctgtgtagaggaaaggtcagtagctactatcagatatacttt

SEQ ID NO: 15455 - DNA, 201 bp, Homo sapiens
catcagtgacctggaagggtgtatttcactttccacagcgtaggaggcttcatgtagagccagtctactggtatgggaagggttcttaatctagggttcaygggcccctagaaaaccatgtatggacttcataggtctatagtgcatcccctaaaaatacatgcccatattgtatatatcttgtatttgtcactgtgtatg

SEQ ID NO: 15456 - DNA, 201 bp, Homo sapiens
atactaagcattccttctcactgtcatcagtgacctggaagggtgtatttcactttccacagcgtaggaggcttcatgtagagccagtctactggtatggraagggttcttaatctagggttcatgggcccctagaaaaccatgtatggacttcataggtctatagtgcatcccctaaaaatacatgcccatattgtatat

SEQ ID NO: 15457 - DNA, 201 bp, Homo sapiens
aatactggaagcaaactgattaggcatgacatatgaaattacctgagaaggtttaatgtcctgaacatattcagatctgaagcctatctatgatggcccarttgcatgggccagtttctcaaatactaagcattccttctcactgtcatcagtgacctggaagggtgtatttcactttccacagcgtaggaggcttcatgt

SEQ ID NO: 15458 - DNA, 201 bp, Homo sapiens
atcaacacataacgtgaaaacactatgtgttggcagcattttcctcaaaagaagcaaggagagggagacacctccagttacatttcccaagcagaacacastgatgtcgagcattgggtaggtttttacatttagtttggtttgagtgtctaaggctcattatcatcagtagtcagggacaggaagtttacattctcggtg

SEQ ID NO: 15459 - DNA, 201 bp, Homo sapiens
ggtaccatagcatggtgcatcactgaaatcaacacataacgtgaaaacactatgtgttggcagcattttcctcaaaagaagcaaggagagggagacacctycagttacatttcccaagcagaacacagtgatgtcgagcattgggtaggtttttacatttagtttggtttgagtgtctaaggctcattatcatcagtagtc

SEQ ID NO: 15460 - DNA, 201 bp, Homo sapiens
cttgacaccatgggttgcattgtagagagaggtgggtacaggcacagttgtgtgatttcctagtgtcatatgtcaacagtggcaggagctggaatgacatscagcccctgaattaccctgtgctctaagactggtctgtatagtgccaaatattgataacttgggcccacccaaggagaaaatctcatataaataaaagta

SEQ ID NO: 15461 - DNA, 201 bp, Homo sapiens
tagcaatggaaagggcggatttctacagtcctcaaagagatgatttgcttttgaatacttgtgtttctctcctcttagttgctatcatccatgatttctgygcctttttgattgtttcttttttggtggtggcattttgtttttgtagctggtaacctggtatttctaagagttatttggtgacttattcccacttggtct

SEQ ID NO: 15462 - DNA, 201 bp, Homo sapiens
gccatgtgcaagctccagtcttgacaccatgggttgcattgtagagagaggtgggtacaggcacagttgtgtgatttcctagtgtcatatgtcaacagtgkcaggagctggaatgacatccagcccctgaattaccctgtgctctaagactggtctgtatagtgccaaatattgataacttgggcccacccaaggagaaaa

SEQ ID NO: 15463 - DNA, 201 bp, Homo sapiens
gttggcatcagacagtccaggttttgacttttgaactggcccattagtagctaaggaaagctgaggatagtttctgtgtcactgaaaacaatcacacttayctcatggaaatcttagtgtcctttctccagacctgctccctctctttcctgcatttgagggatgagatctacttttagaattacagagggaggaggcatt

SEQ ID NO: 15464 - DNA, 201 bp, Homo sapiens
tgatttgacacttttgaacattacaaggcagtaatttttagaatgcccctccatttgggtttgactgatgtttcctcacttgatgttaaaatcaagtcacrtatctttcacaggaagattgcagaaatgatgctgtgttcttcttggtgcctcctacctggttgcacataacttttacagatcccattactgatgatgtta

SEQ ID NO: 15465 - DNA, 201 bp, Homo sapiens
acggggattgtggtcttaataagaccagaggacttaggagaaaggcagcttggaatagagaggtctagagaattaaacatctttagctcacagcataatgsaaagaaagtgcccttcaggggaacatgtatacaacagggttctgagaagaggtaaaaataaaactgcatcctgcactttctgcttgccgtaatgctgcag

SEQ ID NO: 15466 - DNA, 201 bp, Homo sapiens
cttcctctgcatgcagtttcttttccctatatttatgctcaaacttgcatcattcttgtctctagacgttctatttgctgtaataaatgaaattcttctcmatctaaggttagtttgatctcacttctgaactacaatttgaggccaatgtaccacattctatctactcttcagtactctgcaagagattggagtgaggac

SEQ ID NO: 15467 - DNA, 201 bp, Homo sapiens
cctgtgctaagaaagaggaccagaggagttgattgctaagctccttttcaacaggaacatttgtgctcctccagctcattcttgggctggtttatcacggrgattgtggtcttaataagaccagaggacttaggagaaaggcagcttggaatagagaggtctagagaattaaacatctttagctcacagcataatggaaag

SEQ ID NO: 15468 - DNA, 201 bp, Homo sapiens
ctgctgtgggggatgggggtgagatttctaggtcactggagctgtgtacctaagaggattatggctgcctctgctgagtcatgcaggttgtcagggaagtkgggggaagctggcagtcacaggagtcacccagctgccatgcaaaccaaagggccagtctcactcccaccgtgcccccctcaacagccctaagtccatttc

SEQ ID NO: 15469 - DNA, 201 bp, Homo sapiens
aaaaaaaaaaagaatgtgttttaagggttttgctttatcagatgcataatataaatcaacagtgagttaagagtatccaagacactgacaatatcttgatktgaaataatagactgtttattttaaaagatgtaatggtctcttttttttttttttacagaaaaaccacaactagagtaatgtacttaattccagaaaata

SEQ ID NO: 15470 - DNA, 201 bp, Homo sapiens
cttggtaatggtgaattatctcagcatttgtttgtctgaaaaaggctgtatctttctttcatatatgatgcttagtttcgctggatacaaaattcttggcygataattgttttgtttgaagaggctgaagatagggttccaatcccttctagattgtagggtttctgctgagaaatttgctgttcatctgataggttttct

SEQ ID NO: 15471 - DNA, 201 bp, Homo sapiens
accgtggctcccactagtacatttcagccaaccatcatctttcaatttcttaagcaactatgcactctcttgcctcagtcttcacctatccttctttctcygcctgaagcattcctctccacccccctttccacatggacaactgactcctcttttgctcactgcttatgtctcacttccttcagagaaattccttatttt

SEQ ID NO: 15472 - DNA, 201 bp, Homo sapiens
tccctgtgaaggtctcaggagagaggcttcccaagctgtgaagtgctcaaaccacagcagaaaatagaatttaattgcaccactgataataaaccggatgkatgaaggaaactgataactttcatcttttaggcactattaatttgcaggattatttgttagttatcttctgggtttacttaaagagcagtttaattcccc

SEQ ID NO: 15473 - DNA, 201 bp, Homo sapiens
tgatgtgtgattttcacatacataacatactttctctattgagaaatgtcttgccccaaactgtgcagcttgtaacgtgtagataactatttcttagcctrtactctttcaactattttgtgctgcattttggtgaaaatagacagcctatttcatcattttgaagcaacatttatatagaatgtcatttcagatttttgc

SEQ ID NO: 15474 - DNA, 201 bp, Homo sapiens
tatgatgctacgagagcccctaatgaggagatcactctgaaatccacaaagccttgttttcagctttttattacactttattgctgcaaagaaggagaagraggacctccctccacaagcaagctgcctaatagctgtaaatgcaaacactttttgctattattaaatatagatcggggtgttatgaatgtcatcaggatt

SEQ ID NO: 15475 - DNA, 201 bp, Homo sapiens
tttcacatgaatcactatttgcccatgtttgccactatttctcctatgttttatttttgaagctttataatttgaacttttacattgtggtctatgatccrtcttgagttaccttttggtgttgtgtgaggtagggatcaaatcttattttttccaaatttatccatttgttccaccagcatttgttgaaaagactgttgg

SEQ ID NO: 15476 - DNA, 201 bp, Homo sapiens
tgctggtagcactgggggtgggtcatgagttgcctggccccactaattcacacacaatgttctatttcccctggatttgtcctctgtctgtcctctctccmggtcacatgagctccttggatacagatataatgccttttacatgtcctgtctgattcaatccttctctttcaggtgggggcagtggggggacgatgaact

SEQ ID NO: 15477 - DNA, 201 bp, Homo sapiens
tgatcctacagataaacagaaaataaagttattttccctttgtccatcttttcctccccctctttttgtcccagtatttagaaagatttttttctttccaygcatgaaaaagacagtaatgacataactacttttatatcttgccaagcagctcctcaaggggttaactataaaaccatgttttgttcattttctttcaat

SEQ ID NO: 15478 - DNA, 201 bp, Homo sapiens
ggaagcgctaaacatggaaaggaacaaccagtaccagccactgcaaaatcatgccaaaatgtaaagaccatcaagactaggaagaaactccatcaactaaygagcaaaatcaccagctaacatcataatgacaggatcaaattcacacataacaatattaactttgaatgtaaatggactaaatgctccaattaaaagaca

SEQ ID NO: 15479 - DNA, 201 bp, Homo sapiens
ttctttgctttttggaaaagagatgaggcagctccagtctgtgtctcccttggctttccccagacaccgtaaatgatattggcagcatcccagccctaccrctcatagagcgaaaacctattcctccttctcctgccacgtttaataaactttatctagaacaatttcttgtgcagtggcaaaacacagcacttacataac

SEQ ID NO: 15480 - DNA, 201 bp, Homo sapiens
cagacaagcaaatgctaagagattttgtcaccaccaggcctgccctaaaagagctcctgaaggaagcgctaaacatggaaaggaacaaccagtaccagccrctgcaaaatcatgccaaaatgtaaagaccatcaagactaggaagaaactccatcaactaatgagcaaaatcaccagctaacatcataatgacaggatcaa

SEQ ID NO: 15481 - DNA, 201 bp, Homo sapiens
actgaagaacttggagtctgatgttcaaaggcaggaagcatccagcatgggagaaagatgtaggctgggaggctaggcccatctctccttttcaagttttkctgcctgctttatattcactggaagctgattagcttgtgcccaccagattaagggtggatctgccttccccagcccactgactcaaatgttaatctcttt

SEQ ID NO: 15482 - DNA, 201 bp, Homo sapiens
ataaggaaaagggagctttgcagattcctaaaataatgtgatgcaaacagatattttctccccaaatagtcattgttctcagcattttgtaggtaccatarcatggtgcatcactgaaatcaacacataacgtgaaaacactatgtgttggcagcattttcctcaaaagaagcaaggagagggagacacctccagttacat

SEQ ID NO: 15483 - DNA, 201 bp, Homo sapiens
catatgcttagtggaagatatcttgtgatttctaaaaaagtaatttctttccaaaaagtttatataagagaaagagagtatgtgtgtgttagtaactttcytgtttaccaaagaatcagagtagcagctcattatcatgaattagtataaaggacaggaatgtcaatatcagtaagtgatatgtaacttgaaaaagcatac

SEQ ID NO: 15484 - DNA, 201 bp, Homo sapiens
ggatttcagaaaataaagaagctattccagcaaaaaaaaaagtttctatttttacctgtattctgtcagggatcacagtatatgtagttttgaagatgaawgttttagagtcagaaagacctggatttatatccaacttccgccagattcctaactctgtaggctttttatttatcttctaaatttcaatttcacgtaaac

SEQ ID NO: 15485 - DNA, 201 bp, Homo sapiens
cttagccaggatagatgatcgtaaactatgtctatgagtgagccctcctcatcgaaggtgttcatttccatctctctcttcaggacagctacagaacagtrcacattttagaatgaaaatgaggagtcactggtaactgcggtacctaaaacataatttgctctgtgcatttcatgtttgctatttttttgaatcttaaaa

SEQ ID NO: 15486 - DNA, 201 bp, Homo sapiens
aggagtgcagttgctctgttttaacctgagctaaccagcacttacacagagcctggggtgctcctcttgcaaagacagtgtacatggggcctgtgaaagakgcttaacccacagaaatcgacttcaacaagcagaatatctgcatgaccagcactgattggtggggaattgtatagataacacaagatccatgggaagtat

SEQ ID NO: 15487 - DNA, 201 bp, Homo sapiens
gagtagtgaagaaaagttgcacctacaggcagctaggggcagcaggaagcgagctgtccacatgacagatgtctcttggaaaccatggagccgagcacagytgccattagctgtcagcatggaggtgacagtgaaggccaactcaggaatgggacagaatcagatgccacgagaggaaagactaaaacccagtccacgaaa

SEQ ID NO: 15488 - DNA, 201 bp, Homo sapiens
aagatagactcaatctgatgtttctgttctattttgaggaccattcaacagcacaggcagaaaactctgattgtcaaagaatgttctagcaaatgattagwaatgttactgaagagacagtttgggttcctagtgataaaaatcaatcattccttataatagcaaccaccaaaaaaaggtcatagttttagctgctgcata

SEQ ID NO: 15489 - DNA, 201 bp, Homo sapiens
agggcatagagcaagcactgaataaacagaattgcttggaaaaaatttttaatgcataaaaactccatgctgcaatgggtggtcttaatctataaacaaasctttttcaaagcacattttagagcagaaattaaccagctttcacacctgggacactgccctaatcagtgtataatcctaattctcattatgtcctcagta

SEQ ID NO: 15490 - DNA, 201 bp, Homo sapiens
ttcccttgagatgtatgcatttatttttaaccctggccttttgctaatatcgaaccacaatgccatcattaatccccattaatactttgctctgactatgmcttttgggaactaactcatgactaaacttttttaaccaatcgatgttcgatgtactctttagcattgtaaaaaaatcttgaacttcagctagtaaatcaa

SEQ ID NO: 15491 - DNA, 201 bp, Homo sapiens
gaggtttttaaaaaaatactgaagagacctgaaattgcatgaatgctgagaagacccactattagcaagcaggagcttgaagctgcaagaggaagagtacrtaagagtcacagcaaagccccggagaacaaggcaacgcagaagcctggtttggagatgcagagggaggagggacctttccaacttcagtaacaagaagaa

SEQ ID NO: 15492 - DNA, 201 bp, Homo sapiens
attataactcagacctgtgcttctaaacgaatgtgcacacaaatcacccagtgatcttgttaaaatgcaaattcttattcaagagttctgggaggggcctsagattctgaattcctaacaagctcccagggaatgccaatattgctgatccatgaatgcctcaagtagcaaggctccacaccattgtaatgtcaatgtaaa

SEQ ID NO: 15493 - DNA, 201 bp, Homo sapiens
gagaaaagaaaaaaaagagaagcaattagaaaaaatgaagaaacttgcccacagttatacttctccctttaaattgcattgcttgattgctgctttctttycaatgcatttctgatgtgacagttcccaccaggaaaattgccagagaaagctaaggagaatgcttaactttgtgccatccgaacacttacttccctcaca

SEQ ID NO: 15494 - DNA, 201 bp, Homo sapiens
gccaggaactaggcttggacaggggaagcaaattcatttcctgtttgtggcaaacggagtctggatgatgataagactttttccatctaaactgccttgtkaacccagtaaacaaagcaaaaatcaatatgctagattcatcaatgcttgctggaacacactccatggcaagggacatttcctaggcaaaatggacaatgg

SEQ ID NO: 15495 - DNA, 201 bp, Homo sapiens
ggagggggagaatttgggtgttaaggggtagaggtcctgacctgagacattttgagcaatatttccatttccgtcatacccttgtttatatacacaaaatrttcaatggttttcaaaaacactttcacctctattagctcctttaaaccttagaatacctctgtgaatctttccaaaatctgttccgttttaataatttta

SEQ ID NO: 15496 - DNA, 201 bp, Homo sapiens
aaatacgttacagacaagcaaatgctaagagattttgtcaccaccaggcctgccctaaaagagctcctgaaggaagcgctaaacatggaaaggaacaaccrgtaccagccactgcaaaatcatgccaaaatgtaaagaccatcaagactaggaagaaactccatcaactaatgagcaaaatcaccagctaacatcataatg

SEQ ID NO: 15497 - DNA, 201 bp, Homo sapiens
aacagacttaactaaaaactggaaactctgacactgtagaagaaagcaagaaccatgtacagttatgtgccacatagcaacatttcagtcaatgacagatyatgcataggtgatcttatgagattctgatggagctgaaaaattcctgttacatagtgatgtcatagctatcataatagaatagtgagattacttattttt

SEQ ID NO: 15498 - DNA, 201 bp, Homo sapiens
catttttttcagtggccactcttccagttagcaagctgctcttgtaatactgactgagaaatgcagagaggcaagaagaggaaaaggggggaaatggcggstttttcatttctaatagttctgtagcagtgagtcctgcccatcactgtgtgtgatatatacagtgttctaaggtatactgagtgtatataacgcccttaa

SEQ ID NO: 15499 - DNA, 201 bp, Homo sapiens
gattgtcgtgagcatctagtgagcagtgtctgtgatcaagtctgacccacagcacgtgaccaataagtgttcattgactgggaatgtgcaacttatcataycccagcaaggtcaggaaagcactccagggaatacttgttcctatgaggaatatgtacgacctgtagcccccataaatctgacatctgaacaaaatgctgc

SEQ ID NO: 15500 - DNA, 201 bp, Homo sapiens
ggacgtggattaaatgggatgtccaggacccatgcagtcctggattatatcaatgtacccaacatggagagccagatgttggtacagagaagtagacccartctggctgaagagtagattatttctgaagaaatgttaaactgggtggtatttcaaacaatcaaagactgaaaaaaagaaatacttatattaccaatttcc

SEQ ID NO: 15501 - DNA, 201 bp, Homo sapiens
gtcagaaacttccaggaccgcctttggaggcagaagagcagttccacccaataactctaatgcagcggaagatgacctgcccacagtggagcttcagggcktggtgccccggggcgtcaacctgcaaggtatgagcataccccccttccccaccactctgggtccaggcacagccgggccctggcccctcttccctgcagg

SEQ ID NO: 15502 - DNA, 201 bp, Homo sapiens
tgaggtacagtataggtaaaatcttcctgtcttgctatttgatctttattcctttttaagaaaattctggtattgcctgtggctagcagttctttctaagragactgaactggtaccagactcctcccttgatagtgtaatctactttctgcagccttctgccctctccttgatcctggggtccaccttgtctcagaagag

SEQ ID NO: 15503 - DNA, 201 bp, Homo sapiens
taatgacctgcattctctctcttaggtccgtggcactcaggtagttggttctgacatgactgtgacaattcagtttaccaatcctttaaaagaaaccctgygaaatgtctgggtacacctggatggtcctggagtaacaagaccaatgaagaagatgttccggtaaaccttgggttggggagaccgggcaggcagtgcagg

SEQ ID NO: 15504 - DNA, 201 bp, Homo sapiens
cagaataaccagccaagcatgtttacagtgatgcagggaatcaatccgttctatgactatttccttaactctccagttagttgctatcctgcccagcaaayacagctgagagaagctgcttaataagaaccaaaatactgagctatttgcatacctgaagaactagtgcaattacccattactgcatccatcctgtcagtt

SEQ ID NO: 15505 - DNA, 201 bp, Homo sapiens
cctttgggtaggcaccctggagcacagtcacttgattgtatcttctgccactcaaagaggctattggtgtgtatcctttggccagaataaccagccaagcrtgtttacagtgatgcagggaatcaatccgttctatgactatttccttaactctccagttagttgctatcctgcccagcaaacacagctgagagaagctgc

SEQ ID NO: 15506 - DNA, 201 bp, Homo sapiens
tcctcagtgacatgcaacctttgactatactgcctactgcctgatgcccttgtcttgggtccccaatttctagcctttagcctggtgattctatttatggyccaaatatgacaatctatagatagctaacaaggggaaaagtcatcaaggtgggcagcaaggaggtctggaaaagtgtcccaagcccagtcagggcactct

SEQ ID NO: 15507 - DNA, 201 bp, Homo sapiens
ctaataaatgagggttgtgatttatctagcaacaggggaacagctcagcattaacaattaaaaggtctgtagaggacagagctttttttccttactcttcyccttagctgattgagttcagccctatgctataaatagcccttgtaattaatggctatctgtttgaaaatcagttatcaggaccacagtttaggagccttt

SEQ ID NO: 15508 - DNA, 201 bp, Homo sapiens
gtgggggccaatattcaacattcttaaagaaaagaattttcaaccccgaatttcatatccagccaaactaagcttcataagtgaaggagaaataaaatackttacagacaagcaaatgctaagagattttgtcaccaccaggcctgccctaaaagagctcctgaaggaagcgctaaacatggaaaggaacaaccagtacca

SEQ ID NO: 15509 - DNA, 201 bp, Homo sapiens
gttgctatcatccatgatttctgtgcctttttgattgtttcttttttggtggtggcattttgtttttgtagctggtaacctggtatttctaagagttattyggtgacttattcccacttggtctcagcacactccctttccatcctaagactgttagcacaagttttgcttccttttccaaagcaactgtattcacacttc

SEQ ID NO: 15510 - DNA, 201 bp, Homo sapiens
tactccagaagcatgttgtaaggattaatgagggaataactggaagctctttgaactgcttcgtgatagttccttcctaataagatgacccaattaccagscttattttcaatattgcaactatgtaggaaagctaaattcttatggtattccttaaggaaggataaccttcataaaatgctactataacagcagccagag

SEQ ID NO: 15511 - DNA, 201 bp, Homo sapiens
gctgggaaaagacttcaagctctccatcaccttccggaacaacagccacaaccgttacaccatcacagcttatctctcagccaacatcaccttctacaccrgggtcccgaaggcagaattcaagaaggagacgttcgacgtgacgctggagcccttgtcctgtaagctaacaatggtgtggttctttgtgagactcgctgt

SEQ ID NO: 15512 - DNA, 201 bp, Homo sapiens
tgatttatttagccaacacttactgagcacctcctaatgactgggccctgctctagtgctggagatgtgtagaagaataagaccaacagagctcccaaagkagatttatgcactctacaaatgcatgatggaattgcaagatgaaaacagaaaaactcttatggatctagataaagaagctttagaataaaaagtagcatt

SEQ ID NO: 15513 - DNA, 201 bp, Homo sapiens
gacacggtaccttttgactgtatagtgagaacttaagtttcaaatgaaggctccgagaacataaaaaaccatgaatcttaaagagaaacaaacaagcaaargtttaataagaacttccttgctagatgtcctcatgatttatttagccaacacttactgagcacctcctaatgactgggccctgctctagtgctggagatg

SEQ ID NO: 15514 - DNA, 201 bp, Homo sapiens
aaacctaaatgaactttcttccttctcacttctcacggactcatttaggtgaatgccaaagatgacgaaggtgtcctcgttggatcctgggacaatatctrtgcctatggcgtccccccatcggcctggactggaagcgttgacattctattggaataccggagctctgagaatccagtccggtatggccaatgctgggtt

SEQ ID NO: 15515 - DNA, 201 bp, Homo sapiens
gatccagttcaatatgttatttcaagagaaaaactcccccactttgtgatttgggcttaaactttaagtttctcaaataggacagaagctaaggtctagamgcacagaggacaaaccatgggcagttgcagtttattgtaataataatcttatttgcctgcgtgcattcaagatgataaatggccggtatctcctgatggc

SEQ ID NO: 15516 - DNA, 201 bp, Homo sapiens
ggggtagggaaacttggagaaaagtaaagcagaccctgtctcaagtcttgatgccaggcctgtgtgtgttttctcctactagtcaagaaagaggcggtgcwgatccaagccggcgagtacatgggtcagctgctggaacaagcgtccctgcacttctttgtcacagctcgcatcaatgagaccagggatgttctggccaag

SEQ ID NO: 15517 - DNA, 201 bp, Homo sapiens
attctgttttgttctctgatgtatcccatgtacctagatcacagcctggcatgtcataggccctcaataaatattggttgaattaaattgcaaatgtaaaygctttagaagacaacatttgtctggacatggttgtgtgcgtttattcttaaaagtgacttataatctcataaatctgtatgaaatgaacatagatacagc

SEQ ID NO: 15518 - DNA, 201 bp, Homo sapiens
actcacccagccaggcgtgcacctggggctccccccttctcccccttagcactgtgtctcccgacagcgcgccacactgttctgcacccctggcaatgccrcagcctaccttcggtatttctcactagaggatggctctcgcagccttctccctatcattaaccctttttcgctcttctccctcccttcccccgtcagctc

SEQ ID NO: 15519 - DNA, 201 bp, Homo sapiens
tacatacacgggtagattcaagggctgtttaagaggtaggatagaaaatatttgctcaaggatcggatttgatgattgagggagagaaacaaggaagcctsaagaatgatgcccatgtgtctggtgtaccacctgcgtgcaaagtgatggtattcattgaggtagggaactcctgagatgcaccaggttttccaggaaagt

SEQ ID NO: 15520 - DNA, 201 bp, Homo sapiens
aatgacttttaggggtttttgaaatttttttctaattttgtaggtattatgggagggcaatttagtgtagccttaatgaagttgaataatgcctcctgtaygtagtcctggacttgtattgtctacttgaccaccagtgactcaagaccaagacactttattctgccactggtcaaaccctgagatcatgagagggtgtta

SEQ ID NO: 15521 - DNA, 201 bp, Homo sapiens
gtgtgtggctgactcatgggcaatgaaataaattttgttgaatcagtggtattggggacctcacctctatccccaatactttggacaacccattaagcttsctcatgtcttttccatttgactacagtctggaacattatttctttaaactctcaacctctctgtgtagcttttaatcttccccttcttagccaagtttta

SEQ ID NO: 15522 - DNA, 201 bp, Homo sapiens
cattttgattatatttattactttctagaatttaaaatataaattagaaatctcaggtttttgttgactagctggtaagatggttaaggttaggagctgakccatgttgcctctctgctttactccatagtcctcatgttttgttgggaccatgttttgaagtttattgcattatgctgataatgacttttaggggttttt

SEQ ID NO: 15523 - DNA, 201 bp, Homo sapiens
ggtagacagtttgaaagctgtcactttgaaagagcgagctgccaagtttctagctaccgtatttaaaaaaaaaaaaaaaaaaaaggcggcttagcaatgarctgttccattttgccaggaactaggcttggacaggggaagcaaattcatttcctgtttgtggcaaacggagtctggatgatgataagactttttccatct

SEQ ID NO: 15524 - DNA, 201 bp, Homo sapiens
gggtccagcttgtataggccttgtcagtttcagcttgcaatttatccaaaaagcaaagagaagtagccatataagggctttgtgcaaataatttgatttcrgattttagccctgaaatgctcattctgactgcactgtagagaatggactggaaaggggtacatacacgggtagattcaagggctgtttaagaggtaggat

SEQ ID NO: 15525 - DNA, 201 bp, Homo sapiens
catccagcagggagttttcatggaatctggtggtcacagggtactttcttggctccggatgccttgctttgacttccatatgggatctccctgtgttcctyacccactgctccagtacccgtgttatcctgcctacctggctttgtgaacagcttccctgactccggagaattacatgcccagtgctcaggcttccccgcc

SEQ ID NO: 15526 - DNA, 201 bp, Homo sapiens
atatcatatataaatatattgtttataatatgtaaacaatatatacataaataatatataaaaactatatattatatatgtaaacaatatatttttaaaamccaaactcatgggtttatagttttttcatagtgaaaacaaacaaatatatagtttgcttatatctattatatataaacagtatataatatataaagatat

SEQ ID NO: 15527 - DNA, 201 bp, Homo sapiens
agtccattttccgatatgtttggaattaggctaaattgtgttaggtagacagtttgaaagctgtcactttgaaagagcgagctgccaagtttctagctacmgtatttaaaaaaaaaaaaaaaaaaaaggcggcttagcaatgagctgttccattttgccaggaactaggcttggacaggggaagcaaattcatttcctgtt

SEQ ID NO: 15528 - DNA, 201 bp, Homo sapiens
aacatggtaaagccccatctctactaaaaatacaaaaattaggcgggcatggtggcatgcacctgtagttccagctacttgggaggctgaggcagaagaaycacttgaacccgggaggtggaggttgcactccagcctttgcaacagagcaagacttcatctgaaagatagaaagatgaaagaaagaaagaaagaaagaaa

SEQ ID NO: 15529 - DNA, 201 bp, Homo sapiens
caaaatccaggtcttgttcagctggaaaaaaccagcagcgtccagacatgactgggttttttgtttgtttgtttgagatgtgaagttttgcatgtaaatcraatagagtttgccagaaaattcattgcctgaacaaatatggtctgctccttgggtattgccaagtaggagaaagatggtttgtctggagagactgcagag

SEQ ID NO: 15530 - DNA, 201 bp, Homo sapiens
gagttttggctgggatggctggaactgtgcatcattgcgctgggcatccagcagggagttttcatggaatctggtggtcacagggtactttcttggctccrgatgccttgctttgacttccatatgggatctccctgtgttccttacccactgctccagtacccgtgttatcctgcctacctggctttgtgaacagcttcc

SEQ ID NO: 15531 - DNA, 201 bp, Homo sapiens
ttagcgacacaagcgggggcgaatgtcatttctcaggagttttggctgggatggctggaactgtgcatcattgcgctgggcatccagcagggagttttcayggaatctggtggtcacagggtactttcttggctccggatgccttgctttgacttccatatgggatctccctgtgttccttacccactgctccagtacccg

SEQ ID NO: 15532 - DNA, 201 bp, Homo sapiens
accaaatacttggttgacctgtgggtggctgactcatgggcaatgaaataaattttgttttatacgtataactttatatatatgtaactttatatatatawaaaaagtttgcttatatataatatatatacacatatcatatataaatatattgtttataatatgtaaacaatatatacataaataatatataaaaactat

SEQ ID NO: 15533 - DNA, 201 bp, Homo sapiens
ttgtgttccagaatctctacctcttttaaggtgcagatactttttcactcgtttctccacagcaggtgtttccaccattctgttcagaacaataaaaagakcagcttttttttttttttttttttttgagacaggatctcactctgttgcccaggctggagtgcagtggtacaatcagctcactgcaacctctgcctcccc

SEQ ID NO: 15534 - DNA, 201 bp, Homo sapiens
atgtacatcagcatcatagaattctgaaactactgatgcaacagaatcataaaatgtttaatgagacatatcaatttaattctgctgcttggaacttaaaragccagagttcgtcagcattttgctaacaaatgtcatcatttacagactgaatttggtgctgattatgttcaccattactaaaaatattgggaaatgagc

SEQ ID NO: 15535 - DNA, 201 bp, Homo sapiens
tctcacgtgtcccagatttgttttaaaaatcattttcaattcatctagttttctattaatgttaaaaggttggaaattatattttaattagtgttagagaygtacatcagcatcatagaattctgaaactactgatgcaacagaatcataaaatgtttaatgagacatatcaatttaattctgctgcttggaacttaaaga

SEQ ID NO: 15536 - DNA, 201 bp, Homo sapiens
attaaaaggagatgacctactgcttccctcctgccagtgatgggccacaaaacagacatgacacgtgggccttctcacgtgtcccagatttgttttaaaartcattttcaattcatctagttttctattaatgttaaaaggttggaaattatattttaattagtgttagagatgtacatcagcatcatagaattctgaaac

SEQ ID NO: 15537 - DNA, 201 bp, Homo sapiens
actcccggctaattttttgtatttttagtagagacagggtttcaccgtgttagccaggatggtctcgatctcctgatctcgtgatctgcccctctcgcctyccaaagtactggaattacaggcatgagccaccgcgcccggcccccaagacgcacttttaagagattatacaggaaagttttacttatcactgccttagtt

SEQ ID NO: 15538 - DNA, 201 bp, Homo sapiens
ccaatgtccaaaaattatctttttagttagtttatttggattaaggtctgtagattaaatttggttggtatgtcacttaaatcttttcctctagagtaatyctcttcatctgtttcttcatgccacaaacttatggctgaaactgagtcattttttatgtagaactttccatattctgaattttgctgattccatcccccg

SEQ ID NO: 15539 - DNA, 201 bp, Homo sapiens
cccgggttcaagcggttctcctgcctcagcctcccgagtagctgggactacaggcgcccaccaccactcccggctaattttttgtatttttagtagagacwgggtttcaccgtgttagccaggatggtctcgatctcctgatctcgtgatctgcccctctcgcctcccaaagtactggaattacaggcatgagccaccgcg

SEQ ID NO: 15540 - DNA, 201 bp, Homo sapiens
tccttattttttgccttagcattttcaagtaaattctagtaatcatattattttacctgtacatattttagcgtgtagctttttaaaaatagacatatatrcagtatacatagatacatatgtacatatgtgtgtatgtatgtgtttaagtgtgtttgtgtataattattgcagctaatacaaatcaacaagagctccttg

SEQ ID NO: 15541 - DNA, 201 bp, Homo sapiens
ctgcaagctccacctcccgggttcaagcggttctcctgcctcagcctcccgagtagctgggactacaggcgcccaccaccactcccggctaattttttgtwtttttagtagagacagggtttcaccgtgttagccaggatggtctcgatctcctgatctcgtgatctgcccctctcgcctcccaaagtactggaattacag

SEQ ID NO: 15542 - DNA, 201 bp, Homo sapiens; identical to SEQ ID NO: 3194

SEQ ID NO: 15543 - DNA, 201 bp, Homo sapiens
ggcacaatcagaataccttatcccacaagttagcagacctgggcatgtagagagtactttaaatggagagttatattgttttgtgtttccttccacaaagsaaccagagatgctgttcctggaggaaacttatttagaggtagggacatttgatagggaagagagcatgagagagatggagattctggcttctgtccatgc

SEQ ID NO: 15544 - DNA, 201 bp, Homo sapiens
ttacttaaagagcagtttaattccccagggcacaatcagaataccttatcccacaagttagcagacctgggcatgtagagagtactttaaatggagagttrtattgttttgtgtttccttccacaaaggaaccagagatgctgttcctggaggaaacttatttagaggtagggacatttgatagggaagagagcatgagag

SEQ ID NO: 15545 - DNA, 201 bp, Homo sapiens
cctgtcccagctgcttggtggaagcagcttttgctacccttctgggctattgcgcaggtttcatttatgagctcaaccctgaaccttccctgacagcagcraggcctgtgtgcgtacctaattatgaagtgacggcctgtccctgtgaaggtctcaggagagaggcttcccaagctgtgaagtgctcaaaccacagcagaa

SEQ ID NO: 15546 - DNA, 201 bp, Homo sapiens
aaaatatacagcttgatgatgattttgtatgtgcgtgtgccttgcaaccacaagccagatgaagaaatggaggatttccaacacccctagaaggttccctsttgccttttacagccaataaccccctagactatcaccaagatagtaacttttctgacttttatcaccataggtttgttttgcccatttgaccagtagttt

SEQ ID NO: 15547 - DNA, 201 bp, Homo sapiens
cgtgctaaccatccctgagatcatcatcaaggtcagtcttagcgtctcatcctggaacagagacaaaggcacgcagacttagtgttcatgtgtgcatatgygtgcttgtatgtgtgtgtgtgtgtgaatgaatgtcctgctcaaaaaaaaaaaaaaaaaaaataccagtgctaggatcctcttgttctttgaaagaagtaa

SEQ ID NO: 15548 - DNA, 201 bp, Homo sapiens
ttaacttatttcaagatcccatctgtgacaggtataatcattctctgaagaatattttacaacctagggagacaataatttacattttgttcatattagasaaaaagtaggaggacagggaggcagttgctcctccggagatttttttcttttctttaacagtccattttccgatatgtttggaattaggctaaattgtgt

SEQ ID NO: 15549 - DNA, 201 bp, Homo sapiens
tgctgaaggtggagcccgcctgattggctgagagactggatatgtggtgtgagagaaggaaggtatggaggaagccaaatgagtgatgaatgtgaaatgtktgccacatggtagaatcttagtaaatggtaacttccaacatgtttacatttggggaaactgaagctcgagagatgagtcgatgtgttcaagcccccacac

SEQ ID NO: 15550 - DNA, 201 bp, Homo sapiens
cactgcaagctccacctcccgggttcaagcggttctcctgcctcagcctcccgagtagctgggactacaggcgcccaccaccactcccggctaattttttktatttttagtagagacagggtttcaccgtgttagccaggatggtctcgatctcctgatctcgtgatctgcccctctcgcctcccaaagtactggaattac

SEQ ID NO: 15551 - DNA, 201 bp, Homo sapiens
ggtacccaaaagaaatgtgagaaagagttatttttcctgtttttttttaaataaataaaccagtttctcatggatagcatttatgcttatagttcaataayaatattaccaaaaattgcatggagaattcagttcactagggaattcctagtatataaacctaaacatttaacttatttcaagatcccatctgtgacaggt

SEQ ID NO: 15552 - DNA, 201 bp, Homo sapiens
aatgttcacatccaattggaaacattttgtatgtgttcattttgtatttcagttttatatcttttgacaaagttaatttttcttataaatattttcagatraactcaaaagcagaaagagtagcacaatgaatatctacttatatgactctcagagttaatggttatcaagattttgccacatttgctttatctatccctt

SEQ ID NO: 15553 - DNA, 201 bp, Homo sapiens
agacagactttttttgtttttgttttgagacggagtccggctctgtcgccaggctggagtgcagtggcgcgatctcggctcactgcaagctccacctcccrggttcaagcggttctcctgcctcagcctcccgagtagctgggactacaggcgcccaccaccactcccggctaattttttgtatttttagtagagacaggg

SEQ ID NO: 15554 - DNA, 201 bp, Homo sapiens
gggactaaaagatgaaagagaagatataagcctgggaaaagatggcaggcatcacaccataccaggccttggggatcttgctttcctcctgcagataatgsgggacttgagaaggattctaattagcagaaatacataatcagaattatgctttacaaagtggtagggagggctgggcacggtggctcatgcttgtaaccc

SEQ ID NO: 15555 - DNA, 201 bp, Homo sapiens
aaatataatcatgcagtatgtactccttgtgaggcttcttttatgcttccttactgtattctgagcttcatccatgctgttttttgtttcagtagttcatwcctctttattgctgagtagtagtgtttcattgtatggatgaatcactatttgcccatgtatttacttgtggatggacatttaggccattttccgtttttg

SEQ ID NO: 15556 - DNA, 201 bp, Homo sapiens
tgaatgagcatgcaaagttccaaaacttctgagtagaagtttggttgggttcacattggtcatatagactaatttgggtagaatttatatctttacattastgaatgttcacatccaattggaaacattttgtatgtgttcattttgtatttcagttttatatcttttgacaaagttaatttttcttataaatattttcag

SEQ ID NO: 15557 - DNA, 201 bp, Homo sapiens
cagccttgactatcaacattcaattctcacctgccccaccccacaacaccgtaactactgagtttcttttgcaaaaccctagcatgtcatgaagcacaatytgacatccaccacaccacttccacctgtgattaagtctggtcaccaccacactgtagctggggatttgtggttcacaaaacctggaaacgattttctaca

SEQ ID NO: 15558 - DNA, 201 bp, Homo sapiens
gccctgcctggctgttttctttcacattgttttttccagataagcttttgaatgagcatgcaaagttccaaaacttctgagtagaagtttggttgggttcmcattggtcatatagactaatttgggtagaatttatatctttacattactgaatgttcacatccaattggaaacattttgtatgtgttcattttgtatttc

SEQ ID NO: 15559 - DNA, 201 bp, Homo sapiens
ggaaatacatgcacagagaagcaggggtggcacaacataggaaatctgcccatataatcctatgcacaaattaaaggaaaaaattaggcaatcaaatcagyagtcacagaaaggtacatggtaaaattcagcatccagttttaggaagagtttaaggggaaaaatttagaaaaaaaacacctcaatgataataaagattgc

SEQ ID NO: 15560 - DNA, 201 bp, Homo sapiens
gctaatgacctgcattctctctcttaggtccgtggcactcaggtagttggttctgacatgactgtgacaattcagtttaccaatcctttaaaagaaacccygcgaaatgtctgggtacacctggatggtcctggagtaacaagaccaatgaagaagatgttccggtaaaccttgggttggggagaccgggcaggcagtgca

SEQ ID NO: 15561 - DNA, 201 bp, Homo sapiens
ttaccttctctgggtcgggaggacagtgggaatgtcagagggtgactgaaatccaccccaaattttcttggcccactcttttcttttttaactacccttcyattcccaccagaggaacagtaaaataaatgaggtcattattcttcactacatgcctcttgtaaattgttagtcagcctgcaagggtggttatttacgagg

SEQ ID NO: 15562 - DNA, 201 bp, Homo sapiens
tcagtaggctcagcatttgtttttacatgtttgttataaatccttaccttctctgggtcgggaggacagtgggaatgtcagagggtgactgaaatccaccscaaattttcttggcccactcttttcttttttaactacccttccattcccaccagaggaacagtaaaataaatgaggtcattattcttcactacatgcctc

SEQ ID NO: 15563 - DNA, 201 bp, Homo sapiens
tagtcattgttatttcgaggataccagtcctggcgaactactctactttatactgaaggggctaaaaggaaagaagcaaactcaactgactattgaggaamcatttgcttgtgcttcatagattgattccattccagtgttactagataggcaagcaacgtctctggagtggctatatgaaaccattttaggaaggcagtg

SEQ ID NO: 15564 - DNA, 201 bp, Homo sapiens
tcagccctttaggatatgcacagcttcatgcaccttgggttcccttcataccctctttctttcccctgtctcctcctgttacatccttccctttttcctcytcctgctctgcatttttccctctctcatacgtccattcctttaattcagatatttttgaggcctgttctataccagctctacaccatgcagcagtggtat

SEQ ID NO: 15565 - DNA, 201 bp, Homo sapiens
ttccttgtagagtctcttatatgcttcaaagtgtgctcatagtcagtatctccctagattgtgtgtttggaaggtgtaatccttatctcattcagcctttygtggtgcctggaattgagtcaatgttcagtaaatgtttgctgaactgaactgataatcaccattctgagaggcaaggagacgattattagactcagattt

SEQ ID NO: 15566 - DNA, 201 bp, Homo sapiens
ctagtttctctttgtttttctttctccaaatagtttgaagatggcatcctggacacttgcctgtatgtgatggacagagcacaaatggacctctctggaakagggaatcccatcaaagtcagccgtgtggggtctgcaatggtaagcagcaattactgatacctaaaatctgttacacctgtcatttgcctcagtatatat

SEQ ID NO: 15567 - DNA, 201 bp, Homo sapiens
attccttcttaagcattctaaaatggcacactcatcagcataagcttactcacacactgtgtgtacttttacgcacccagaagtcagaaatcactgcctarcagaagccagtgcaaaagagaagcagacaggaagcagttaacctaatgtgtctgtggtggcagctggctaagcggaagctgttaattattgaataagcac

SEQ ID NO: 15568 - DNA, 201 bp, Homo sapiens
gagtttgagaccagcctgccctacatggcaaaaacttgtctctactaaaaatacaaaaagttagccaggcatggtggtgggtgcctgtaatcccagctacytgggaggctgaggcaggaaaattgcttgaacccaggaggcagaggttgcagtgagctgagactatgccactgcactccagcctgggtggcaagagtgaaa

SEQ ID NO: 15569 - DNA, 201 bp, Homo sapiens
tcacccagtggccactagtggcctctaagaggccttgtatccgcggttaccaatctgcggatgatgactttggctccaggaacaccagccccaagttaaaytcttgtctccatttttttcagtggccactcttccagttagcaagctgctcttgtaatactgactgagaaatgcagagaggcaagaagaggaaaagggggg

SEQ ID NO: 15570 - DNA, 201 bp, Homo sapiens
gtaatactgactgagaaatgcagagaggcaagaagaggaaaaggggggaaatggcgggtttttcatttctaatagttctgtagcagtgagtcctgcccatyactgtgtgtgatatatacagtgttctaaggtatactgagtgtatataacgcccttaagtcatggctttggtaacatttggttaagaattattttggtaaa

SEQ ID NO: 15571 - DNA, 201 bp, Homo sapiens
ttggcaattgctggagacacttttggttgtgatggctggggtgcggggctgctcctggcatgcagtgggtagacaccagggatgttgcttaacatcgtacmtggcacaggacagctctgcaacaaagatgcatccagcccgatatgtcagtagtgttgatgctgagaagccctgatctagatcatgattactgtttttgcc

SEQ ID NO: 15572 - DNA, 201 bp, Homo sapiens
ttaggaagttatttaagagccaactgtcttgtctttcccgagtccgtttgaggaagtccccgaggcgcacagagcaagcccacgcgagggcacctctggasgggagcgcctgcaggtaagccaccgcccctgcaccctatgagccagggcccgctgcgtccaccttctgcacctcggtttcctggttgaaccagcaagcgg

SEQ ID NO: 15573 - DNA, 201 bp, Homo sapiens
aacaagagagcagaacgaggttttatttgctgctaatgacctgcattctctctcttaggtccgtggcactcaggtagttggttctgacatgactgtgacarttcagtttaccaatcctttaaaagaaaccctgcgaaatgtctgggtacacctggatggtcctggagtaacaagaccaatgaagaagatgttccggtaaac

SEQ ID NO: 15574 - DNA, 201 bp, Homo sapiens
caccttctacaccggggtcccgaaggcagaattcaagaaggagacgttcgacgtgacgctggagcccttgtcctgtaagctaacaatggtgtggttctttstgagactcgctgtctggcccctgtcttgctaggtgttaatgcccgttatagctttatatcaaagttaaagttccctccaagatctcagaagtgtgagcct

SEQ ID NO: 15575 - DNA, 201 bp, Homo sapiens
tcttgtctttcccgagtccgtttgaggaagtccccgaggcgcacagagcaagcccacgcgagggcacctctggaggggagcgcctgcaggtaagccaccgmccctgcaccctatgagccagggcccgctgcgtccaccttctgcacctcggtttcctggttgaaccagcaagcggcttgctctgggccctgtggcgccggt

SEQ ID NO: 15576 - DNA, 201 bp, Homo sapiens
ttcaaatggcactactgagtttaattctatctcaatcaatgcttagtgtccgctctatgcctgcaattggtttggtgctggcgattccagcagtgagcagractcagttcctgtcctggtccgagtgacaggattattgtgcagaggggtctttggaaacaataagtaggggcatttagtccaactgattcagaaaaagac

SEQ ID NO: 15577 - DNA, 201 bp, Homo sapiens
gtcttgctcttcctctctgtctgtctctcatgcatacatacacactgtcctgtggatgcacgtctaggtgttagtggcagcaaatgtactggagtcccacrgcaccaaagtatgttagcagcagtgaatccacatggatctacagcagcctcaattcttgcctcctcataaggcaggagagactggggcaagttttagagc

SEQ ID NO: 15578 - DNA, 201 bp, Homo sapiens
aagagagcagaacgaggttttatttgctgctaatgacctgcattctctctcttaggtccgtggcactcaggtagttggttctgacatgactgtgacaattsagtttaccaatcctttaaaagaaaccctgcgaaatgtctgggtacacctggatggtcctggagtaacaagaccaatgaagaagatgttccggtaaacctt

SEQ ID NO: 15579 - DNA, 201 bp, Homo sapiens
actgactgagaaatgcagagaggcaagaagaggaaaaggggggaaatggcgggtttttcatttctaatagttctgtagcagtgagtcctgcccatcactgygtgtgatatatacagtgttctaaggtatactgagtgtatataacgcccttaagtcatggctttggtaacatttggttaagaattattttggtaaaatctg

SEQ ID NO: 15580 - DNA, 201 bp, Homo sapiens
cgaaatgtctgggtacacctggatggtcctggagtaacaagaccaatgaagaagatgttccggtaaaccttgggttggggagaccgggcaggcagtgcagrgctgtgggaagctttctctgtgtgtgtcttttccaaacatagatctgctccccagtgaaaatgtcttggaagctgcctcctccttgccgaccatttctgt

SEQ ID NO: 15581 - DNA, 201 bp, Homo sapiens
aaagtcatttctatgattctaaaatgacccagggaattcaatgatgaatgagaggtacagactcaaagcaattctctaatgtattcaaagtaaacaatacyataaggtcaccttattcaccagggattttcatttctgttcattgaagatttttaaaaaattgacagatatattggaagccagtgggaaaatagaatttat

SEQ ID NO: 15582 - DNA, 201 bp, Homo sapiens
aatgcagagaggcaagaagaggaaaaggggggaaatggcgggtttttcatttctaatagttctgtagcagtgagtcctgcccatcactgtgtgtgatatayacagtgttctaaggtatactgagtgtatataacgcccttaagtcatggctttggtaacatttggttaagaattattttggtaaaatctgtattttaaaat

SEQ ID NO: 15583 - DNA, 201 bp, Homo sapiens
ggagagatgggacactaacaaggtggaccaccacactgacaagtatgaaaacaacaagctgattgtccgcagagggcagtctttctatgtgcagattgacytcagtcgtccatatgaccccagaagggatctcttcagggtggaatacgtcattggtgagtgccatgtgcaagctccagtcttgacaccatgggttgcatt

SEQ ID NO: 15584 - DNA, 201 bp, Homo sapiens
tattgtctctttctatgattcatatcaggaatgaaatttctcagtttggaacagcagaaaaaggcagaagcctccggtgttccttgcaacctttccaattrtaacgcatatcaattagtaggagctctcggggtgacaactttgggagaatccactgatttatattaatgaagagtgttactgtagtccaacagagtaaag

SEQ ID NO: 15585 - DNA, 201 bp, Homo sapiens
aaataaatcaatttaatttaatatgaagaaatcaatatgttcccaatatcttggatgcttttaacagcaaataaataaatatgacctgcttgtattttatyattaaattcatccttagccaatttgctttgtatttatataaggtctttttagcccctttcatacagaatggagtaagtaaccaagactggtgtcctcaga

SEQ ID NO: 15586 - DNA, 201 bp, Homo sapiens
taggctaaattgtgttaggtagacagtttgaaagctgtcactttgaaagagcgagctgccaagtttctagctaccgtatttaaaaaaaaaaaaaaaaaaaaggcggcttagcaatgagctgttccattttgccaggaactaggcttggacaggggaagcaaattcatttcctgtttgtggcaaacggagtctggatgatga

SEQ ID NO: 15587 - DNA, 201 bp, Homo sapiens
agcagcctgcggtcccagctacttgggaagctgaggcaggaggattgcttgggcccaggagttcgaggcagccccgccagcctgtctctaagaagaaagaragacaataagcaataactttaaaactcaagaggcagggccgggcccagtggctcacgcctgtaatcccagcacttcgggagaccaaggcaggcagatcat

SEQ ID NO: 15588 - DNA, 201 bp, Homo sapiens
ggcacctttctcaagactttctgtagcacctagatgttgaagcgaaggtcaaaggagaattttttaaagacaagagagagtgggtgttattttatggtgayggagaggaaccaggaaagagagtttgcagtccagagagaggacggtggttcacagccttggctgcacgttgcaatcatctgggaagctttgaaactatgg

SEQ ID NO: 15589 - DNA, 201 bp, Homo sapiens
gaaggtggaggttacaatgagctgagatggcacccctgcactccagcctgggcaacagagcaagactccgtctccaaacaaaacaaaacaaacaaaaaaaataaaaaaaatggtgcctggcaccttgtaggcactgaaaaactctttcaagaatgaacaaaacctggggtcgcctatggctctgcccccctacttaatgcc

SEQ ID NO: 15590 - DNA, 201 bp, Homo sapiens
tgatcttgaaaaggacggtttcactaaagtgatagagacagaagccagggagatggtcatgggctgtgttgtaaacaggaggcgagaaagtagagacggcrggagatggcacctttctcaagactttctgtagcacctagatgttgaagcgaaggtcaaaggagaattttttaaagacaagagagagtgggtgttatttta

SEQ ID NO: 15591 - DNA, 201 bp, Homo sapiens
gttttcagttcatggaaaggattggaggaaggtgggacaaaaaccagagaccaatttggaagctgtggtctaggacaaagatgatgataaactaaacatgstggtaccagtggagatgagaaggggttagattggagatctattttgtatttagaacaaaaattgcacagggattcaagatgagaagtaaagaaatgggag

SEQ ID NO: 15592 - DNA, 201 bp, Homo sapiens
agtaacttatgtaaccacctccttagaatgttctctctctgacaatatgcctaccaaagactcttttaaagatctttgaaattagtaattagggaggttamaatggagcactgtttgcttgtcttaatgtggaatcctctacatgctttatagaaaacaaatgaagtgaataagttttgctcttgaaggttctcctgctta

SEQ ID NO: 15593 - DNA, 201 bp, Homo sapiens
aacctctttttttggagtgaacggtcgtagatacatctgaggacccaggtgctcaatgggcattgtccttggcatttctaaatcaccaaggaactttttcrcatttacccatatggattttaatttttgaaaaagttcatctatcaaaacaaatcatgattatgtaataataccttgttaccccattcttgtgtcagattt

SEQ ID NO: 15594 - DNA, 201 bp, Homo sapiens
gagctgaaaccagatatggtccttactctcagatcatattaccttagagggccactatcaacacgttattgccaataacacaataattatgtaagattgarttgccatttcctagaaaagaagagagccccaagggaatggagcccagatgaggcaaattattgaaaatggggaataagtgaagaaaggtatcaatcagag

SEQ ID NO: 15595 - DNA, 201 bp, Homo sapiens
ggagcaaagagaacaggcttccctgtccccagttctgtctccacttctgcctagctatgtgatgtgcacacatgacgccctcaccaagcctcagtttcccrtctgtaaaaatttcctcacagaggttttgtaaggaccccaagaaataaaacttatttcctgtcactttatttgcatcactatgtgaactgccttggcaac

SEQ ID NO: 15596 - DNA, 201 bp, Homo sapiens
gtctatgcctgttcctgcctcccgactgataggatctggcagcaactatgggcagagaatttcccccaaggagatgcagctgcttctgcaaaggctgccgytactgcagataaaggctcgttattcactgtgacacacctacatgtaccacctccatccatatttgctccagtgggtcaaggcattaccagtggaggatct

SEQ ID NO: 15597 - DNA, 201 bp, Homo sapiens
gaccctcatgcaggttctctccacctggtcttccttctcttcactcactcagttgttacctcctttgatccacatttctggctcacacaactcttatccayggcagcatattttctcaatgtcccttttcctcatattcctttggactttccagttttattcttctcttgtctcctttcatctccctagatcccttttgcc

SEQ ID NO: 15598 - DNA, 201 bp, Homo sapiens
gaggctgaggcaggagaatcgcttgaacctgggaggtggaggttgcagtgagccgagattgtgccattgcactccagcctgggcgacaagaccaagactcygtttcaaaaaaaaaaaaaaaaaaaagtgtaaggagaaaatggagaacaggagatatgtttggaagctgtagagatactccaggctagaagaggaatagac

SEQ ID NO: 15599 - DNA, 201 bp, Homo sapiens; identical to SEQ ID NO: 15410

SEQ ID NO: 15600 - DNA, 201 bp, Homo sapiens
acagtggtgtgatctcagctcactgcaacctcttcctcctaggttcaagcgattctggtgcctcagcctccagagtagctgggaccacagttgcacaccaytacgcccagctaattttatgtatttttggtagaggcagagtttcaccatgttgtccaggctggtttcgcactcctaacctcaagttatccacccacctca

SEQ ID NO: 15601 - DNA, 201 bp, Homo sapiens
gtacattaatcttgtatccagaaactttgctgaattcttttatcagtcctaggagctttctggaggagtccttggggttttcaaggtaaacaatcatatcrtcagcaaacagtgacagtttgacttcctctttacctatttggatgtcctttatttctttctcttaacttattgctctggctaggacttccagtactatgt

SEQ ID NO: 15602 - DNA, 201 bp, Homo sapiens
tgtgtgatatatacagtgttctaaggtatactgagtgtatataacgcccttaagtcatggctttggtaacatttggttaagaattattttggtaaaatctrtattttaaaatgtataaactcatgtaagtttcctctcatacacaccatgatattcaagaaaaaaaaatgaaatatttgaggtaggcacggaaatcccaga

SEQ ID NO: 15603 - DNA, 201 bp, Homo sapiens
caaagcctagagccccatgagttgtgagaattaaatgtaacttcttgctactcaaagtgtggtccatgagccagctgcatcagcattccccaggagtttgwaaaaaatgtagaatctcatgtcccaccccacaccctctgaatcaaaatccatgttttgacaagatcccaagcagactggagtgtacaggagagtttgtgg

SEQ ID NO: 15604 - DNA, 201 bp, Homo sapiens
agctttgttacaagctggctagagggaacttaagatcccagggaaattccatttttccttgagaccccctaagtccaaatcaatacactaagaagaaacgraaaaaatcctaagagtttaagtaggaagaatttttatcaaggtctgtgtgggaggaaattggggcataagttcctctgtggtcaggcattgagctaggta

SEQ ID NO: 15605 - DNA, 201 bp, Homo sapiens
aaaaaggtcatagttttagctgctgcatatgcctatactagttcctctctaccttgatatattaatattacagttaatagcagaagtattggagccaagcrttctctgggtcagtgccctgggactaatagagctaacatttatttagtatttactatgcatcggtcttggtgtatgcatgatcttatccagttcttttta

SEQ ID NO: 15606 - DNA, 201 bp, Homo sapiens
ccagctgaattgctttccccttagccacaatatctcaatcaacacaagtaacgtactttccttgggacattcacctttcttcagattcagaaccagagagsaaaaaagaaatcaccccttcttccttctgcctttactttctagtagaagttatacttaaaaaaaaaaaacaatttgccaggcatggtggctcacacctgt

SEQ ID NO: 15607 - DNA, 201 bp, Homo sapiens
ccgcccagaagcgagggctcctgcccgccgcactcacccagccaggcgtgcacctggggctccccccttctcccccttagcactgtgtctcccgacagcgygccacactgttctgcacccctggcaatgccgcagcctaccttcggtatttctcactagaggatggctctcgcagccttctccctatcattaacccttttt

SEQ ID NO: 15608 - DNA, 201 bp, Homo sapiens
cttcatgcagttcacccagtggccactagtggcctctaagaggccttgtatccgcggttaccaatctgcggatgatgactttggctccaggaacaccagcmccaagttaaactcttgtctccatttttttcagtggccactcttccagttagcaagctgctcttgtaatactgactgagaaatgcagagaggcaagaagag

SEQ ID NO: 15609 - DNA, 201 bp, Homo sapiens
tatctcctggttaccttttgcatttcagatttatatttaattgttctaaaagcaggttttctggcactatatatcaagttttctccaagtcactaagggaygaaatttgctaagcgactaaaccttggaaagaacactcatttttaaaatgccatcttcatgcagttcacccagtggccactagtggcctctaagaggcct

SEQ ID NO: 15610 - DNA, 201 bp, Homo sapiens
gtttcttaatgtcacgagcgttcacctgttcaaggagagatgggacactaacaaggtggaccaccacactgacaagtatgaaaacaacaagctgattgtcygcagagggcagtctttctatgtgcagattgacttcagtcgtccatatgaccccagaagggatctcttcagggtggaatacgtcattggtgagtgccatgt

SEQ ID NO: 15611 - DNA, 201 bp, Homo sapiens
atcagtcattatttacttggcagacatatgtgtccacaacccaagtgacattctgggatatccattagaggcactggcataggaatatgaatgtccagtgrctgtagaatgaatgaacgaacagtcaatcacttgtgaattgaatgactcatagctctagtggcattataatttattattaataacaagctacagatttca

SEQ ID NO: 15612 - DNA, 201 bp, Homo sapiens; identical to SEQ ID NO: 3199

SEQ ID NO: 15613 - DNA, 201 bp, Homo sapiens
tcccagctactcgggaggctgaggcaggagaatcgcttgaacctgggaggtggaggttgcagtgagccgagattgtgccattgcactccagcctgggcgayaagaccaagactctgtttcaaaaaaaaaaaaaaaaaaaagtgtaaggagaaaatggagaacaggagatatgtttggaagctgtagagatactccaggcta

SEQ ID NO: 15614 - DNA, 201 bp, Homo sapiens
aggtgggcagatcaccagatcaggagttcgagaccagcctggccaacatggtgaaaccctgtctctactaaaaatacaaaaattagcctggtgtggtggtkggcgcctgtaatcccagctactcgggaggctgaggcaggagaatcgcttgaacctgggaggtggaggttgcagtgagccgagattgtgccattgcactcc

SEQ ID NO: 15615 - DNA, 201 bp, Homo sapiens
gggaggccgaggtgggcagatcaccagatcaggagttcgagaccagcctggccaacatggtgaaaccctgtctctactaaaaatacaaaaattagcctggkgtggtggtgggcgcctgtaatcccagctactcgggaggctgaggcaggagaatcgcttgaacctgggaggtggaggttgcagtgagccgagattgtgcca

SEQ ID NO: 15616 - DNA, 201 bp, Homo sapiens
cagtaattaaccatgctattatttgaagaaaccctttctccatggtggaaattatatacaaacagctagtcaccaaaagcactgaagaaaaatgtagtagrgggttatttgctcttctgggggcttgtttgttttgcaattcagaaaactaaggttgacacaactgaagtttattccataggatctcaacatttacagtta

SEQ ID NO: 15617 - DNA, 201 bp, Homo sapiens
aatgaatgatttgactttattagtatgaaaagatgtgcctagagagcccacaagaaaatgttctgaagttgtggactcttagccagaaccctgttgcaggkcgacagagctgtgtgtgttttctcaggggctgggcccaggcctcacaggtaaaacagaggctggtgcagagttgttctgaattcctctcaaacacctccc

SEQ ID NO: 15618 - DNA, 201 bp, Homo sapiens
tttctgttaagcagctggttagatctacagactctgtcagattcagctccaagtggcattttttttttggaggaaggggcaaaaatatttcataagtcacrccattgcttcctaggacattcatcctggcagaagatacatatatttaggtttgtcaatagtatctggttcacgttttatcagtctcatccacccgttacg

SEQ ID NO: 15619 - DNA, 201 bp, Homo sapiens
aaaaaaaaaaaaaaaaaagtgtaaggagaaaatggagaacaggagatatgtttggaagctgtagagatactccaggctagaagaggaatagaccagagggrttttagcccctggaggtatggggctcatttctcttgttccagcttcctctgagcacctgagcaatccttcaacattataggttccaggatgtattaataa

SEQ ID NO: 15620 - DNA, 201 bp, Homo sapiens
gccggcggatcacctgaggtcaggagttcaagaccagcctggccaacatggtgaaaccccgtctctattaaattttttaaaaatacaaaaattagcggggyatggtggtgagtgcctgcaatcccagctactcaggaggatgaggtggggaggattgcttgaacccaggaggcagaggttgcagtgagccgagatcgcgcc

SEQ ID NO: 15621 - DNA, 201 bp, Homo sapiens
cccacccagcaagtctacccagctctggagtgacactgggcattgtctgcacagaatcctgtgatgtgagccatctctgggtccctctcagccaccggaayagcgcctattccggtggaggtggcagggggtacaatggacactgttagggttcttagctttggtgtttaatgctctatttttgtgctggttggctccctg

SEQ ID NO: 15622 - DNA, 201 bp, Homo sapiens
atatgaagaaatcaatatgttcccaatatcttggatgcttttaacagcaaataaataaatatgacctgcttgtattttatcattaaattcatccttagccwatttgctttgtatttatataaggtctttttagcccctttcatacagaatggagtaagtaaccaagactggtgtcctcagagtaacaatgacccacattcc

SEQ ID NO: 15623 - DNA, 201 bp, Homo sapiens
accaaatgaacatccccctcctgctgtcaaagagcagtcagtggccaccgctattgacctgagctctaattaggctggttttataatgaggaaaagagtgygattctaattagtaaatttccatctctttctcaataggtatcctccagtcaaagcaatcagctatcctcatcacactggttccattgccaaaaaaataac

SEQ ID NO: 15624 - DNA, 201 bp, Homo sapiens
actgaaggggctaaaaggaaagaagcaaactcaactgactattgaggaaccatttgcttgtgcttcatagattgattccattccagtgttactagataggmaagcaacgtctctggagtggctatatgaaaccattttaggaaggcagtgcgtttggatccttccagaataaaaagctcagactctaaaaatgccattcct

SEQ ID NO: 15625 - DNA, 201 bp, Homo sapiens
ggtaacatttggttaagaattattttggtaaaatctgtattttaaaatgtataaactcatgtaagtttcctctcatacacaccatgatattcaagaaaaaraaatgaaatatttgaggtaggcacggaaatcccagaggtgggaccagccattcagtggtagcgtttgacatctttgcatgattttaggcatctttaatgt

SEQ ID NO: 15626 - DNA, 201 bp, Homo sapiens
tcatttaacagttctattgtattgaattaaaactggaaagcaagcctggccctatttaaaaactgggttctagtagtttttcaggctaatggggtcttatrcctttctaagaatctcctccatcccaccactccttgtcagaattaaatcaaccaattaatgataaacctcctctttgtgcagagtaaacctctctggatt

SEQ ID NO: 15627 - DNA, 201 bp, Homo sapiens; identical to SEQ ID NO: 3225

SEQ ID NO: 15628 - DNA, 201 bp, Homo sapiens
cgtggttgtcttttctccagcatgttgttagtgctccacatgtctctggaaccatctctctactctggtggcctctataatggggactcttcacctcttgkgggtgtgcctggtttttgaaaatagccaagtctccaggagtcatgactgggtaatccaggggatcaagggggaaccttcactgggcccagaaacaaagtc

SEQ ID NO: 15629 - DNA, 201 bp, Homo sapiens; identical to SEQ ID NO: 3228

SEQ ID NO: 15630 - DNA, 201 bp, Homo sapiens
gggagtggggccaagtgagaacagcctgctagactggaaccccgccggcttggctccccactcctgcgcgcctccccactcctgcgcatcgcctgcctccrtcccaatttggagctgaactcgagccacttctcctccttagacccgcccagaagcgagggctcctgcccgccgcactcacccagccaggcgtgcacctgg

SEQ ID NO: 15631 - DNA, 201 bp, Homo sapiens
caggcttggggaatgggaaatgttggcaaccctgacttcttaagcctattgatagccctattgaaaattgcatgcccaacctctccacctccttatcctcytccatgtggctcaatttccaaagcagttcctacctcctcacccctaagtggatttacttatggctcttcttgggctccaccctaaccctatcagactata

SEQ ID NO: 15632 - DNA, 201 bp, Homo sapiens
atttctctccagagcagcctggtgagctggcaaggcaagctgcttccccagcctcttgcctctgcctgatccctagaaacctgttccgggtacagcagccrgcagctgacctcctctcagccctgtcagtggtgacaaggtccaggtgccagcactggtttggtgatacagacatcattcccctgggccatggcagggaca

SEQ ID NO: 15633 - DNA, 201 bp, Homo sapiens
tgcttccccagcctcttgcctctgcctgatccctagaaacctgttccgggtacagcagccggcagctgacctcctctcagccctgtcagtggtgacaaggyccaggtgccagcactggtttggtgatacagacatcattcccctgggccatggcagggacattcagactcatgtccccgagtggcattgagcagggagtct

SEQ ID NO: 15634 - DNA, 201 bp, Homo sapiens
cctacaagaagggttttttcactctgtgtttattaaatgctggtgatgtgtttagctgtggtctgtcctttcctgtagttttacgatgccttggaataccmgcaagaattgttaccaattatttctctgcccatgataatgatgccaatttgcaaatggacatcttcctggaagaagatgggaacgtgaattccaaactca

SEQ ID NO: 15635 - DNA, 201 bp, Homo sapiens
ttcaatattttcttcatgttcagtcaggatattaattcctagcttgctatgccagagtggtaaaagggggtagggcttcattttcaaaatgaacccagcaragggaacccagaagtgctcagaaagggctttctgctaactaatgatggcaaacgtggtctgtgtgatggggtggcatctactttctgaaaatttttaatt

SEQ ID NO: 15636 - DNA, 201 bp, Homo sapiens
tggaaaccattgcccctctgagatatctgtggtatacatcagcatattaaagtctcacatgaatgcttcagtaaagaatcctgatcagctttggttaggcyagcattttccacactggtttaaacatggagctctaattcttccaatacctgtcaatatcccataaaactagcactatgccatgatggactgactctaacc

SEQ ID NO: 15637 - DNA, 201 bp, Homo sapiens
ctcggttcaagccatcaagcacggccatgtctgcttccaatttgatgcaccttttgtttttgcagaggtaagcaggaagctggaggaaagtgctgtttttytccccaacctcttaacacatgaaagagtaagctaaaagttgttgtttctaagttttccaggtacatagcgtatgcttcgtgttgacaaaggtaactaggc

SEQ ID NO: 15638 - DNA, 201 bp, Homo sapiens
tggtgtcagccactctataagataggtacttcattcccatattaaagataagaaaactgaggctcagatagattaaataacttttctgaggctgcacaatwagtaagtagtgaagcatttccaaaaacatattctgaaaaatgcagatctccaaagaaaaaagtttccatagtcatttacatttggaaaccattgcccctc

SEQ ID NO: 15639 - DNA, 201 bp, Homo sapiens
caataataataaacatttattaagaatgtacttggtgtcagccactctataagataggtacttcattcccatattaaagataagaaaactgaggctcagakagattaaataacttttctgaggctgcacaataagtaagtagtgaagcatttccaaaaacatattctgaaaaatgcagatctccaaagaaaaaagtttcca

SEQ ID NO: 15640 - DNA, 201 bp, Homo sapiens; identical to SEQ ID NO: 15410

SEQ ID NO: 15641 - DNA, 201 bp, Homo sapiens
tttattttgctactatcttatcagatgcagcctatttttttggcatctcctacttggctataaaataatccagtcatttattcaaatagcatacaaaactytggaattattttagctttccttcttaacctcccttatgcatcttgccaaaaataccttcccaaaattatcataaatccagccacttctacaatctctatc

SEQ ID NO: 15642 - DNA, 201 bp, Homo sapiens
tgttccggtaaaccttgggttggggagaccgggcaggcagtgcagggctgtgggaagctttctctgtgtgtgtcttttccaaacatagatctgctccccartgaaaatgtcttggaagctgcctcctccttgccgaccatttctgtagggcgtggagtaaaactagggttggtttgaccagcactttcatcatttaatcct

SEQ ID NO: 15643 - DNA, 201 bp, Homo sapiens
aggctgagacatgagaattgcttgaacccgggaggcagaagttgcagtgagctgaaattgcaccactgaactccagcctgagcaacagagcaggactctgyctcaaaaaaaaaaaaaaaaaaaaaaaagaatgtgttttaagggttttgctttatcagatgcataatataaatcaacagtgagttaagagtatccaagaca

SEQ ID NO: 15644 - DNA, 201 bp, Homo sapiens
gggaggctgaggcagggggattacctgaggtcaggagttcaagaccagcctgaccaatatagtgaaaccccatctctactaaaacaaaaacaaaaacaaamaaattagccaggcatggtggtgtgagcctgtagtcttagcaacttgagaggctgagacatgagaattgcttgaacccgggaggcagaagttgcagtgagc

SEQ ID NO: 15645 - DNA, 201 bp, Homo sapiens
actgagattataaaggtagcaagagcctctgtaaagaaatcatatcccattagccaaaagaaatccagtggtcaaacatagtcctctagaaatagtcagargaagtcattttattattgttattactggaaacagctagaggcaaaaggcatcttcttcgaggccttccaccttgccacttcatccattctatctagagac

SEQ ID NO: 15646 - DNA, 201 bp, Homo sapiens
agtcttggtgccctcatccataatacggttacaatatatacctcacaggcttgttgttgtgaggttcaaactaaatcctttataaaatgtccctgaaacaytgtaggtatgcaacaaatgttggctatctcccccttagtagaaatccgacttcatgtgcactcagaacattctgtgagaaagtaaaattgctctctttaa

SEQ ID NO: 15647 - DNA, 201 bp, Homo sapiens
tccaatacatctctttttgaaggggtagtaagattattctaaatacatatgcctctcctacatataccatctttaatgattgaaagagaaagatagaaaaytcatcctccatgtgtatgaagataaaacctctatatgtgaagtcaatgctgctatacatttatttcgggattaattggagattgtctaaagttgcagtta

SEQ ID NO: 15648 - DNA, 201 bp, Homo sapiens
catacatacacactgtcctgtggatgcacgtctaggtgttagtggcagcaaatgtactggagtcccacagcaccaaagtatgttagcagcagtgaatccayatggatctacagcagcctcaattcttgcctcctcataaggcaggagagactggggcaagttttagagcaggagtgaaagtttattcaaaagctttagaac

SEQ ID NO: 15649 - DNA, 201 bp, Homo sapiens
aggggtagtaagattattctaaatacatatgcctctcctacatataccatctttaatgattgaaagagaaagatagaaaattcatcctccatgtgtatgargataaaacctctatatgtgaagtcaatgctgctatacatttatttcgggattaattggagattgtctaaagttgcagttagttatttgtggagctattaa

SEQ ID NO: 15650 - DNA, 201 bp, Homo sapiens
gaaatttctgccataataaataaatacataaataaataaataaattcaggttgatatttacaagatcaaatgaaagctttctctgggaaaaaaaattaaarcataccaacaagggcacaggctcccttagaggatatgtgctaagtaaagaagctctgacattttctttgtagaattgcttcatgaataatagtctatctt

SEQ ID NO: 15651 - DNA, 201 bp, Homo sapiens
gctgtcccttgggacatgaagttgagtaagttagtccctggcctcaagaaactctcagtgtagaagacaaaataaataaaagatcattgcaattcagtgtrataaagactgtgactgtgatttatgcaaattgcagtgaaataacagaaatcaatgtctagcggtgtggtggagtggggaagaggatgaggagggcttcct

SEQ ID NO: 15652 - DNA, 201 bp, Homo sapiens
gaggaagtccccgaggcgcacagagcaagcccacgcgagggcacctctggaggggagcgcctgcaggtaagccaccgcccctgcaccctatgagccagggmccgctgcgtccaccttctgcacctcggtttcctggttgaaccagcaagcggcttgctctgggccctgtggcgccggtcacaggcagctccacttgcccaa

SEQ ID NO: 15653 - DNA, 201 bp, Homo sapiens
ctccatccatcttccacgaacagagatttgcaaatttagatcttcttcttaaattattccaatggctttttatagcctaagaataaagcatgaatgtttartttgatatcaaaggatttcacaatcttatccttacctatatcataggtcagtgttgaagagtgtggatttcagagctctatcactaactagctgtgacct

SEQ ID NO: 15654 - DNA, 201 bp, Homo sapiens
gaagacaaaataaataaaagatcattgcaattcagtgtaataaagactgtgactgtgatttatgcaaattgcagtgaaataacagaaatcaatgtctagcrgtgtggtggagtggggaagaggatgaggagggcttcctgatgcaaggatattggagccgagacttagaggatgagtatgagtgttcctgacaggcaagcg

SEQ ID NO: 15655 - DNA, 201 bp, Homo sapiens
ccctctgaccaaaggggacgggtggggacttcctggcactgcagggccccttgcctggtactcccagcaactggttgcggtggggagggcagatctagggrtggggatggggaggagaagtgggaatgggaaattgggagtcagaggggcaagtgggagagaagggcgcacctgccgggataacaggccagatgaagtaaa

SEQ ID NO: 15656 - DNA, 201 bp, Homo sapiens
tgtggtggagtggggaagaggatgaggagggcttcctgatgcaaggatattggagccgagacttagaggatgagtatgagtgttcctgacaggcaagcgcrtggaaaagtgtttgcagtagagggaacagtatattgcaagtgaggagggactaaaagatgaaagagaagatataagcctgggaaaagatggcaggcatca

SEQ ID NO: 15657 - DNA, 201 bp, Homo sapiens
agcagccggcagctgacctcctctcagccctgtcagtggtgacaaggtccaggtgccagcactggtttggtgatacagacatcattcccctgggccatggsagggacattcagactcatgtccccgagtggcattgagcagggagtcttttttgtcaataacattcatgcaccaaaatctaattttactcctaagggtgtt

SEQ ID NO: 15658 - DNA, 201 bp, Homo sapiens
actcatgtccccgagtggcattgagcagggagtcttttttgtcaataacattcatgcaccaaaatctaattttactcctaagggtgttctgtgctgggttycactggggataaacacctatttgctgggataggtgagcatggtcatgctggagctgtgtggtcgattcccctcattagaaggagaccaatgcctgaaagc

SEQ ID NO: 15659 - DNA, 201 bp, Homo sapiens
agacacaatggagtactatacagcccttagaagaaggaaaattctgccattctcaacaagggtagaactggagagcactatgctaactgaaataagccagrcacagaaagatgaatactgtatgatctcacttatatgtggaatctgaaaaagtcaatctcagaaacacagtagaaagttgtttaccagaggctggggctt

SEQ ID NO: 15660 - DNA, 201 bp, Homo sapiens
agtggcattgagcagggagtcttttttgtcaataacattcatgcaccaaaatctaattttactcctaagggtgttctgtgctgggtttcactggggataarcacctatttgctgggataggtgagcatggtcatgctggagctgtgtggtcgattcccctcattagaaggagaccaatgcctgaaagcccagattgatgca

SEQ ID NO: 15661 - DNA, 201 bp, Homo sapiens
cagcctagctccacagtctatgctcttactatgctcttctacttctcttaataataataacaacaacaataataataaacatttattaagaatgtacttgstgtcagccactctataagataggtacttcattcccatattaaagataagaaaactgaggctcagatagattaaataacttttctgaggctgcacaataag

SEQ ID NO: 15662 - DNA, 201 bp, Homo sapiens
aaaatggcatgcttccctgggaaggctggaaggccactgctaaaaagcttcccagggacattctttaccttgtgacttccattgctcagattccagcctcrcaccatgccttctcagatacctgactacttaatgattggtcctaagggccaatccaaatgctcagtgctattatgattattattgccatcaatttctgag

SEQ ID NO: 15663 - DNA, 201 bp, Homo sapiens
aaattcaaagcaagcctgtctgctcagaagacaaggagtataaaatggcatgcttccctgggaaggctggaaggccactgctaaaaagcttcccagggacmttctttaccttgtgacttccattgctcagattccagcctcgcaccatgccttctcagatacctgactacttaatgattggtcctaagggccaatccaaat

SEQ ID NO: 15664 - DNA, 201 bp, Homo sapiens; identical to SEQ ID NO: 15410

SEQ ID NO: 15665 - DNA, 201 bp, Homo sapiens
ccatggcctaggtgagacacttcttatttgacaagggatcctatgtggaatgggggccttggacttcagcaccccacatgttccattttgggatgatcccrgcccaaatcaaagccaccattaaaacccattggtccttctttgccatgaaaatcacatcttttccatggcatttcttttacaacagcaaaagaactgttt

SEQ ID NO: 15666 - DNA, 201 bp, Homo sapiens
taagtccctatgaggcactcctacaaataaccccacaggccctaaacagagttaatacaaaatagcgaaggtagatcttgcccttggtaaccctgtcctcwttcaggtccctgctccaaattacttccccttttcctgacaccatttgttcctttggtgccttactcaaatatcccatcaccctgagactgttcttcctgg

SEQ ID NO: 15667 - DNA, 201 bp, Homo sapiens
atctggacagaattggagatgacaaactcacaccgcccttcctctgtgcaatgcaggcatgtatcggtgtggccccgcctcggttcaagccatcaagcacrgccatgtctgcttccaatttgatgcaccttttgtttttgcagaggtaagcaggaagctggaggaaagtgctgtttttctccccaacctcttaacacatga

SEQ ID NO: 15668 - DNA, 201 bp, Homo sapiens
agtccttgcaatgaaagacactggccagggaagctggttggacacacacacatacttgcacattcacaagtatctttcattaaaaggagatgacctactgsttccctcctgccagtgatgggccacaaaacagacatgacacgtgggccttctcacgtgtcccagatttgttttaaaaatcattttcaattcatctagttt

SEQ ID NO: 15669 - DNA, 201 bp, Homo sapiens
ccaggcctgggaataagtaccagactgatgatagacggggaggatgatcctcctgaaattctagccacagggaagaaaagtccttgcaatgaaagacactrgccagggaagctggttggacacacacacatacttgcacattcacaagtatctttcattaaaaggagatgacctactgcttccctcctgccagtgatgggc

SEQ ID NO: 15670 - DNA, 201 bp, Homo sapiens
cgaactgggtggagcccaccacagctcaaggaggccagcctgcctctgtaggctccacctcagggcacagacaaacaaaaagacagcagtaacctctgcasacttaaatgtccctgtctgacagctttgaagagagcagtggttctcccagcacacagctggagatctgagaacaggcagactgcctcctcaagtgggtcc

SEQ ID NO: 15671 - DNA, 201 bp, Homo sapiens
cctcctgccagtgatgggccacaaaacagacatgacacgtgggccttctcacgtgtcccagatttgttttaaaaatcattttcaattcatctagttttctrttaatgttaaaaggttggaaattatattttaattagtgttagagatgtacatcagcatcatagaattctgaaactactgatgcaacagaatcataaaatg

SEQ ID NO: 15672 - DNA, 201 bp, Homo sapiens
tgacaggcaagcgcatggaaaagtgtttgcagtagagggaacagtatattgcaagtgaggagggactaaaagatgaaagagaagatataagcctgggaaargatggcaggcatcacaccataccaggccttggggatcttgctttcctcctgcagataatgggggacttgagaaggattctaattagcagaaatacataat

SEQ ID NO: 15673 - DNA, 201 bp, Homo sapiens
aacgttgacatggactttgaagtggaaaatgctgtgctgggaaaagacttcaagctctccatcaccttccggaacaacagccacaaccgttacaccatcayagcttatctctcagccaacatcaccttctacaccggggtcccgaaggcagaattcaagaaggagacgttcgacgtgacgctggagcccttgtcctgtaag

SEQ ID NO: 15674 - DNA, 201 bp, Homo sapiens
taatatgattgttggtttcatgaagtaagaagaccatatgagattttatctgtttgcttgtttgtttttacataaatgatgcagaaataactgactctccractggaagaaagtttaaaaattgaccctcatcttgtcccatatacagtagtaaatctcagatggaatgagtattaatgtaaaaaagacaattttttgagg

SEQ ID NO: 15675 - DNA, 201 bp, Homo sapiens
ggcattgagcagggagtcttttttgtcaataacattcatgcaccaaaatctaattttactcctaagggtgttctgtgctgggtttcactggggataaacamctatttgctgggataggtgagcatggtcatgctggagctgtgtggtcgattcccctcattagaaggagaccaatgcctgaaagcccagattgatgcagct

SEQ ID NO: 15676 - DNA, 201 bp, Homo sapiens
cattgagcagggagtcttttttgtcaataacattcatgcaccaaaatctaattttactcctaagggtgttctgtgctgggtttcactggggataaacaccyatttgctgggataggtgagcatggtcatgctggagctgtgtggtcgattcccctcattagaaggagaccaatgcctgaaagcccagattgatgcagctct

SEQ ID NO: 15677 - DNA, 201 bp, Homo sapiens
tctgtgctgggtttcactggggataaacacctatttgctgggataggtgagcatggtcatgctggagctgtgtggtcgattcccctcattagaaggagacsaatgcctgaaagcccagattgatgcagctctccatatagcaaagggaaaggggaagtgcagtttatccagcaagccagacacttgcccaggtgttgtgga

SEQ ID NO: 15678 - DNA, 201 bp, Homo sapiens
tttttttttaaaaagaagacagatgtttcctgcgaatcaagaggagaaatgctttctatttacctgtggaaattcaaagcaagcctgtctgctcagaagayaaggagtataaaatggcatgcttccctgggaaggctggaaggccactgctaaaaagcttcccagggacattctttaccttgtgacttccattgctcagat

SEQ ID NO: 15679 - DNA, 201 bp, Homo sapiens
ccaggcactatagcaagataattaagacatggtccagtcttcaaggggattacaatcccatggctaaaaaatcacctatataaagataatacaaagagacratgatacttttttttttttaaaaagaagacagatgtttcctgcgaatcaagaggagaaatgctttctatttacctgtggaaattcaaagcaagcctgtct

SEQ ID NO: 15680 - DNA, 201 bp, Homo sapiens
aacaaaactgctgatctggaggtcttatgttataaattcccacatcataccttcaactatatatatgtcctgaaactagcatattttgagaataaaatggkaaatgacatttaaaggacacctatggttaatcctacagtaaatgagataatttattttgaaatgaatgatcaactctacgctccaaattttcacgtaaaa

SEQ ID NO: 15681 - DNA, 201 bp, Homo sapiens
agcgagtgaatgactaagaagccaaacaaacgacatggtgaggcaacccaggaattaggaacagtagaaaactgccaccacaccaggagctggaggcacayggaggaggaggtcccatcagaacccagaaggcatcagcaggtgctggagccatggaggagactcagactctcacctcaagacagagagagcacaggagac

SEQ ID NO: 15682 - DNA, 201 bp, Homo sapiens
gaatcaaaagatcacttagaaaaagtaacatgttagaaaacatcatgcttagaattaaatgtctaaagtataccagtatagatgatataatttaaaacaaytgatactatcagctgtcataagaaccaaatacttggttgacctgtgggtggctgactcatgggcaatgaaataaattttgttttatacgtataactttat

SEQ ID NO: 15683 - DNA, 201 bp, Homo sapiens
aaagatcacttagaaaaagtaacatgttagaaaacatcatgcttagaattaaatgtctaaagtataccagtatagatgatataatttaaaacaattgataytatcagctgtcataagaaccaaatacttggttgacctgtgggtggctgactcatgggcaatgaaataaattttgttttatacgtataactttatatatat

SEQ ID NO: 15684 - DNA, 201 bp, Homo sapiens
atataaaaagtttgcttatatataatatatatacacatatcatatataaatatattgtttataatatgtaaacaatatatacataaataatatataaaaastatatattatatatgtaaacaatatatttttaaaacccaaactcatgggtttatagttttttcatagtgaaaacaaacaaatatatagtttgcttatatc

SEQ ID NO: 15685 - DNA, 201 bp, Homo sapiens
ggaaaaactataaacccatgagctggggttttgtctttttttttttgacttaggttttctattctcaaaggcattaatcagcaccctttttctcacccttygttatcaacatataagcaggctagaaagacagtattttattccaatgtgaaacaaaactgctgatctggaggtcttatgttataaattcccacatcatac

SEQ ID NO: 15686 - DNA, 201 bp, Homo sapiens
gggttttgtctttttttttttgacttaggttttctattctcaaaggcattaatcagcaccctttttctcaccctttgttatcaacatataagcaggctagraagacagtattttattccaatgtgaaacaaaactgctgatctggaggtcttatgttataaattcccacatcataccttcaactatatatatgtcctgaaa

SEQ ID NO: 15687 - DNA, 201 bp, Homo sapiens
ttgacttaggttttctattctcaaaggcattaatcagcaccctttttctcaccctttgttatcaacatataagcaggctagaaagacagtattttattccratgtgaaacaaaactgctgatctggaggtcttatgttataaattcccacatcataccttcaactatatatatgtcctgaaactagcatattttgagaata

SEQ ID NO: 15688 - DNA, 201 bp, Homo sapiens
cttttctgaggctgcacaataagtaagtagtgaagcatttccaaaaacatattctgaaaaatgcagatctccaaagaaaaaagtttccatagtcatttacrtttggaaaccattgcccctctgagatatctgtggtatacatcagcatattaaagtctcacatgaatgcttcagtaaagaatcctgatcagctttggttag

SEQ ID NO: 15689 - DNA, 201 bp, Homo sapiens
tcccagaaccgttattagagttgtcaatctgatgtctcgtcatccctgaatactttagtgtgtactacctatgagcaaagacattcttctgtgcaaccatmaaaataaggaaattaacactgatatttgatggtagtctaatctttagaacacatttgagtttttctacttgttcagtaatgtaccttatagcaacagaag

SEQ ID NO: 15690 - DNA, 201 bp, Homo sapiens
atgtaatatcagtatattccttccattggtgctggtaaacggagaactgatgaaacccatttctaaggactttggtgtttagctatttttaaaaaaaaaaytttaaagcccctgtgctaagaaagaggaccagaggagttgattgctaagctccttttcaacaggaacatttgtgctcctccagctcattcttgggctggt

SEQ ID NO: 15691 - DNA, 201 bp, Homo sapiens
aagttttccaggtacatagcgtatgcttcgtgttgacaaaggtaactaggcattattccaacttccaggctattaatgctaaatgcagttcttgtttaacrtttttctttccttgatgttttgggattccctactcccaaaagtaaatgctttactaacattagcttagttctctgcacccattaagtatcaactgctcca

SEQ ID NO: 15692 - DNA, 201 bp, Homo sapiens
acatcaagaccagaagctggagctatggtcaggtgagccacttaaaatttgttattgtcaaggacatttttacttcatattttttgtcacatgtatccctrcaggatcccatatatcgatattagacaagcacaatttcctgctttttaggatctgagactccaaggcagagagcataggagtagggactcataaagacaa

SEQ ID NO: 15693 - DNA, 201 bp, Homo sapiens
tacttcatattttttgtcacatgtatccctacaggatcccatatatcgatattagacaagcacaatttcctgctttttaggatctgagactccaaggcagwgagcataggagtagggactcataaagacaactgcgtaatttatcagctgaaaccacatatctctgggtattacagtgttacagaaatgagagattccatg

SEQ ID NO: 15694 - DNA, 201 bp, Homo sapiens
tgcataggtgatcttatgagattctgatggagctgaaaaattcctgttacatagtgatgtcatagctatcataatagaatagtgagattacttatttttttaaatgtactgtagcctaagtttatagtgtttataaagtctacagtagcatgcagtaatgacctaggccttcgcattcactcaccactcacccagggctac

SEQ ID NO: 15695 - DNA, 201 bp, Homo sapiens
tcctgctttttaggatctgagactccaaggcagagagcataggagtagggactcataaagacaactgcgtaatttatcagctgaaaccacatatctctggktattacagtgttacagaaatgagagattccatgaataatgtggcattctattgagaaatgctttggccacttagaacagtgaaatctcattagttcaacc

SEQ ID NO: 15696 - DNA, 201 bp, Homo sapiens
aggccttcgcattcactcaccactcacccagggctacttctggtcctgcacgttccattcatggtaagtgtcctatgcaggtgtaccattttttacttttyatattgtatttttactgtactttttctatgtttatatataaatgtttctatgtttatatataaatacttaccattgtgttacaattgcctgcagtgctgt

SEQ ID NO: 15697 - DNA, 201 bp, Homo sapiens
attcaggataggagaggagatgatcagaagagagaggatgagaaccggggttatggctgcagttgtagacatggacaggagtgacagggtttgagaaatayttaggaggcaaaatctgcaggacttgtgttggggagtctgtgaggggtggaagggaggagggtcaaggtcgacttccaggtggctggcttatgtgactat

SEQ ID NO: 15698 - DNA, 201 bp, Homo sapiens
tatagcaaagggaaaggggaagtgcagtttatccagcaagccagacacttgcccaggtgttgtggactggtgtcattgtgttactgtcacactagatgatwtgatatcaaatagtgaaatcagggaggtatccagtaccatccaagtttgggaaaagaagttcacagaacagaagggcatcttcagtcaggtggtagagtt

SEQ ID NO: 15699 - DNA, 201 bp, Homo sapiens
atatttaattgttctaaaagcaggttttctggcactatatatcaagttttctccaagtcactaagggacgaaatttgctaagcgactaaaccttggaaagmacactcatttttaaaatgccatcttcatgcagttcacccagtggccactagtggcctctaagaggccttgtatccgcggttaccaatctgcggatgatga

SEQ ID NO: 15700 - DNA, 201 bp, Homo sapiens
aaagagtgctttcagatgtacttctctagttttttgctattccccaaagtgcatccttacataattagctttaaaattcctttcatcccttatttttttttaaatctatcattaacacgtagatttttatctctaagtttatttttactaaacttgcatctttttaaatacgacgtattctgaatctaaatcagtatttag

SEQ ID NO: 15701 - DNA, 201 bp, Homo sapiens
tctgagaaggggcagactgcctcctcaagtgggtccctgacccctgacccccgagcagcctaactgggaggcaccccccagcaggggaacactgacacctyacacagcagggtattccaacagacctgcagctgagggtcctgtctgttagaaggaaaactaacaaacagaaaggacatccacaccaaaaacccatctgta

SEQ ID NO: 15702 - DNA, 201 bp, Homo sapiens
gtggaaaatgggaacagactatgtgttctaattattgctgaaccctgaccattttcccctccatgtccacaaccgagcacgttctctctccagcctcctgyactctctgtggctccatcgcactctcgtcaccaagattcacccctgcccacacccacacccttcatggggaggccggggatgggaaccaggaggtgggct

SEQ ID NO: 15703 - DNA, 201 bp, Homo sapiens
tggaaaatgggaacagactatgtgttctaattattgctgaaccctgaccattttcccctccatgtccacaaccgagcacgttctctctccagcctcctgcrctctctgtggctccatcgcactctcgtcaccaagattcacccctgcccacacccacacccttcatggggaggccggggatgggaaccaggaggtgggctt

SEQ ID NO: 15704 - DNA, 201 bp, Homo sapiens
taaagttagttgattattttcttcaacccttgtttttcttgttcatagagtttcttaatgtcacgagcgttcacctgttcaaggagagatgggacactaamaaggtggaccaccacactgacaagtatgaaaacaacaagctgattgtccgcagagggcagtctttctatgtgcagattgacttcagtcgtccatatgacc

SEQ ID NO: 15705 - DNA, 201 bp, Homo sapiens
attctctttttaaaagtggcatctctcatttttaaaagagaaaatcctagatagtgactcctattatcatcaagtaatatatatcaaggccccaaggctamcttgtcacattttactctggcatagaaatctaattccttctctataaagtcaaaaagagagaggtgagttatagatgttttctaatttagtttagggtca

SEQ ID NO: 15706 - DNA, 201 bp, Homo sapiens
tcttaggtccgtggcactcaggtagttggttctgacatgactgtgacaattcagtttaccaatcctttaaaagaaaccctgcgaaatgtctgggtacaccyggatggtcctggagtaacaagaccaatgaagaagatgttccggtaaaccttgggttggggagaccgggcaggcagtgcagggctgtgggaagctttctct

SEQ ID NO: 15707 - DNA, 201 bp, Homo sapiens
aaggctaccttgtcacattttactctggcatagaaatctaattccttctctataaagtcaaaaagagagaggtgagttatagatgttttctaatttagttyagggtcaacttataatcctcgtcctcaactgatggtttagcgataacttaaaaggtgatgctgcaaatgattctttgctggatttcagaaaataaagaag

SEQ ID NO: 15708 - DNA, 201 bp, Homo sapiens
ataaatatgcgtatttatttattattgagaattttataaatatatccacttaatttttatcccagttatggaaggtattatagcaggtggtctcatattcrtttttccacatttctcaatgcccctgagcaattagagatcagaacataatgaacaatctttccctctccagtttcccctctggtttttaatccacccaac

SEQ ID NO: 15709 - DNA, 201 bp, Homo sapiens
caatctttccctctccagtttcccctctggtttttaatccacccaacatccaatctgtagaggaaagcatatgagaacagaattattctcttcagtgtcaygcatcatttttcagaggcatttgcctctctagacccagacgatattacaattaattcagtgaatatttttaaaaatacatttatttcagtatgtcttcat

SEQ ID NO: 15710 - DNA, 201 bp, Homo sapiens
gtacagactcaaagcaattctctaatgtattcaaagtaaacaataccataaggtcaccttattcaccagggattttcatttctgttcattgaagatttttwaaaaattgacagatatattggaagccagtgggaaaatagaatttatctaacagaaagtatcttcatagccacttttgagaaattgcataaatccattcca

SEQ ID NO: 15711 - DNA, 201 bp, Homo sapiens
ttggaggctggagggaggtcatttaaaaaaatgattacaaaacctatttgttttagctcaaagtctcaacagtctaagacttggtgatctaaatttaaaamaaaaaagtcatgagttttgttttgttttattttcccatagtatcaaacaggataagattattttcttagccatttaaatataacccagggaagaaggaat

SEQ ID NO: 15712 - DNA, 201 bp, Homo sapiens
tcaacagtctaagacttggtgatctaaatttaaaaaaaaaaagtcatgagttttgttttgttttattttcccatagtatcaaacaggataagattattttyttagccatttaaatataacccagggaagaaggaatacatatttcttgggagcaatgaaaatcaaaagtatagtcccctagaagcactggtctctgaagtt

SEQ ID NO: 15713 - DNA, 201 bp, Homo sapiens
cttataaagaaaggtattttcaaagtgatgcaaagaatactgcaaggggtgtgcccaattcaaagaaatagcttctttttttttttttttaagtgttagcstagggtactgctaattagaaaagagtgttatcatttcatcaaaggaagggccactgagcttttacatagaaagattttatcagctgcaagttgattgtct

SEQ ID NO: 15714 - DNA, 201 bp, Homo sapiens
taattgttctaaaagcaggttttctggcactatatatcaagttttctccaagtcactaagggacgaaatttgctaagcgactaaaccttggaaagaacackcatttttaaaatgccatcttcatgcagttcacccagtggccactagtggcctctaagaggccttgtatccgcggttaccaatctgcggatgatgactttg

SEQ ID NO: 15715 - DNA, 201 bp, Homo sapiens
gcttctttttttttttttttaagtgttagcctagggtactgctaattagaaaagagtgttatcatttcatcaaaggaagggccactgagcttttacatagraagattttatcagctgcaagttgattgtctagacacaaagtagcaaatggcatttctttaagatgttcagtcattcaaactatttcagtttggtatcttt

SEQ ID NO: 15716 - DNA, 201 bp, Homo sapiens
acacgtgcatggaggttccctgtatggagccatgttttccatccagattgggccaaggatagctgatgggcagtcatggatgttgatggatgggttttccmagggtagctggattgtggtctcgtaaccatgccgactcctggggctgagaagggctatttagtgaaatgaaatactactctgtcacaacttcctcactca

SEQ ID NO: 15717 - DNA, 201 bp, Homo sapiens
tcagaagagagaggatgagaaccggggttatggctgcagttgtagacatggacaggagtgacagggtttgagaaatatttaggaggcaaaatctgcaggayttgtgttggggagtctgtgaggggtggaagggaggagggtcaaggtcgacttccaggtggctggcttatgtgactatgatgacagatgctagcacttcca

SEQ ID NO: 15718 - DNA, 201 bp, Homo sapiens
tggacaggagtgacagggtttgagaaatatttaggaggcaaaatctgcaggacttgtgttggggagtctgtgaggggtggaagggaggagggtcaaggtcracttccaggtggctggcttatgtgactatgatgacagatgctagcacttccaaatgagataaagaatgcctggaattccagagggaaaaaatcgagtgtg

SEQ ID NO: 15719 - DNA, 201 bp, Homo sapiens
accagaagctggagctatggtcaggtgagccacttaaaatttgttattgtcaaggacatttttacttcatattttttgtcacatgtatccctacaggatcycatatatcgatattagacaagcacaatttcctgctttttaggatctgagactccaaggcagagagcataggagtagggactcataaagacaactgcgtaa

SEQ ID NO: 15720 - DNA, 201 bp, Homo sapiens
acatttttacttcatattttttgtcacatgtatccctacaggatcccatatatcgatattagacaagcacaatttcctgctttttaggatctgagactccwaggcagagagcataggagtagggactcataaagacaactgcgtaatttatcagctgaaaccacatatctctgggtattacagtgttacagaaatgagaga

SEQ ID NO: 15721 - DNA, 201 bp, Homo sapiens
tgaacccaggaggcagaggttgcagtgagctgagactatgccactgcactccagcctgggtggcaagagtgaaagtccttctcaaaaaaaaaaaaaaaaaatgagtgccccctcagccagcccctactgtgtgctaagcataaagctttcattatattataaaatctattgtctttttatttcccaaactaaactgcaaag

SEQ ID NO: 15722 - DNA, 201 bp, Homo sapiens
ttgaacccaggaggcagaggttgcagtgagctgagactatgccactgcactccagcctgggtggcaagagtgaaagtccttctcaaaaaaaaaaaaaaaaaatgagtgccccctcagccagcccctactgtgtgctaagcataaagctttcattatattataaaatctattgtctttttatttcccaaactaaactgcaaa

SEQ ID NO: 15723 - DNA, 201 bp, Homo sapiens
cttgaacccaggaggcagaggttgcagtgagctgagactatgccactgcactccagcctgggtggcaagagtgaaagtccttctcaaaaaaaaaaaaaaaaaatgagtgccccctcagccagcccctactgtgtgctaagcataaagctttcattatattataaaatctattgtctttttatttcccaaactaaactgcaa

SEQ ID NO: 15724 - DNA, 201 bp, Homo sapiens
ttagcgataacttaaaaggtgatgctgcaaatgattctttgctggatttcagaaaataaagaagctattccagcaaaaaaaaaagtttctatttttacctstattctgtcagggatcacagtatatgtagttttgaagatgaatgttttagagtcagaaagacctggatttatatccaacttccgccagattcctaactct

SEQ ID NO: 15725 - DNA, 201 bp, Homo sapiens
tgcaaatgattctttgctggatttcagaaaataaagaagctattccagcaaaaaaaaaagtttctatttttacctgtattctgtcagggatcacagtatakgtagttttgaagatgaatgttttagagtcagaaagacctggatttatatccaacttccgccagattcctaactctgtaggctttttatttatcttctaaa

SEQ ID NO: 15726 - DNA, 201 bp, Homo sapiens
agacagaaaggacccaagttctccccatgcctacaatttcactatcccagtgtaattccttccggctcacaacaagataaaatagtgaacaccttacatcygttcgtgtctttggcataaaaaggttatccaatctatgcctgaaaacaggctttggcggtaaatcaagaaaaggcagaaacacacagtggggaagtcaca

SEQ ID NO: 15727 - DNA, 201 bp, Homo sapiens
aggagggtcaaggtcgacttccaggtggctggcttatgtgactatgatgacagatgctagcacttccaaatgagataaagaatgcctggaattccagaggraaaaaatcgagtgtggaaaatgctaatggaggtagtagcttcattgataactcattggcactgttgctgtgcagaggtgctgtatgcctcccatttaatt

SEQ ID NO: 15728 - DNA, 201 bp, Homo sapiens
atttcatcaaaggaagggccactgagcttttacatagaaagattttatcagctgcaagttgattgtctagacacaaagtagcaaatggcatttctttaagrtgttcagtcattcaaactatttcagtttggtatctttaacaatggagcaaatgaatgatattttaccaattttccataaatgaatgcatgtcctgtgatt

SEQ ID NO: 15729 - DNA, 201 bp, Homo sapiens
tagcgacacaagcgggggcgaatgtcatttctcaggagttttggctgggatggctggaactgtgcatcattgcgctgggcatccagcagggagttttcatrgaatctggtggtcacagggtactttcttggctccggatgccttgctttgacttccatatgggatctccctgtgttccttacccactgctccagtacccgt

SEQ ID NO: 15730 - DNA, 201 bp, Homo sapiens
tgttccttacccactgctccagtacccgtgttatcctgcctacctggctttgtgaacagcttccctgactccggagaattacatgcccagtgctcaggctyccccgcctgcatttctaatgtcctgccaagctacaagctagttggcaccccctgttcttggattcctgcctgactccctggtttcaagccatcccctcct

SEQ ID NO: 15731 - DNA, 201 bp, Homo sapiens
taggagtcctactcacacttgtgctgctgcaagtgagaaacttgaccgtcaccttcaatttcaatgttggcaacaacaacaaaagcagccacacacaacayctgtgaatgcccagaccttaactgcagtttgggatggagggtgagagcaggaaggatgcactctgtggtcaccacgcttggagcacatcagaatcacctg

SEQ ID NO: 15732 - DNA, 201 bp, Homo sapiens
gaggcagagcttgcagtgagccaagattgcaccactgcactccagcctgggcaacagtgcaagactccatctcaaaacaaaacaaaataaaacaaacaaamaaaaaaacagtaggtaagctacatttggcccgcagactatagttttctaaccattgctctaaaggatgaatggagattacattgatcattaacaactcag

SEQ ID NO: 15733 - DNA, 201 bp, Homo sapiens
caatgccgcagcctaccttcggtatttctcactagaggatggctctcgcagccttctccctatcattaaccctttttcgctcttctccctcccttcccccstcagctcaccaatgactgtaaatatatttatctatacttatggatacccattcacaccttatgcatccaaacactcctgtctccttctcagaccagacac

SEQ ID NO: 15734 - DNA, 201 bp, Homo sapiens
tgggttcaagcaatcctcctgcctcagcctcccgagtagctgggattacaggcacatgccaccacgccaggcaaatttttgtatttttagtagagacgggrtttcactatgttggccaggctgatctcaaactcctgacctcaggtgatccacccacctcggcctgccaaagtgctggaattataggcgtcagccaccgca

SEQ ID NO: 15735 - DNA, 201 bp, Homo sapiens
cttttctccagcatgttgttagtgctccacatgtctctggaaccatctctctactctggtggcctctataatggggactcttcacctcttgtgggtgtgcmtggtttttgaaaatagccaagtctccaggagtcatgactgggtaatccaggggatcaagggggaaccttcactgggcccagaaacaaagtcccccttcat

SEQ ID NO: 15736 - DNA, 201 bp, Homo sapiens
attgctacaaaggaatatgctttttctaaataggaactatattaaaaagttcaaaataaatatttcagttttggttaacttttcttccccaccctgtcggyacctagtaagttctgtttcgttagtcagcagaaaatggttaagattaaaactgttcaatgcactgattcaaatatctttgggtggccttgaagctgctct

SEQ ID NO: 15737 - DNA, 201 bp, Homo sapiens
tccaaatgagataaagaatgcctggaattccagagggaaaaaatcgagtgtggaaaatgctaatggaggtagtagcttcattgataactcattggcactgktgctgtgcagaggtgctgtatgcctcccatttaattgttcaagcagccctctgggcattggactatggccatctccatttttcccatgagataatggttg

SEQ ID NO: 15738 - DNA, 201 bp, Homo sapiens
aaaggattaagtaatttacccaggtcacacctggaaagtgctgggacctcaatttggacccaagcagcctcttctacttacaatgcttactacctccaccragggagcctccaccaaggagatggtggaggtatgaatatgcttctgtttgaattgatgagtgtgaattacttgagggactttcaggtaaacctgtccaat

SEQ ID NO: 15739 - DNA, 201 bp, Homo sapiens
ccttacccactgctccagtacccgtgttatcctgcctacctggctttgtgaacagcttccctgactccggagaattacatgcccagtgctcaggcttcccygcctgcatttctaatgtcctgccaagctacaagctagttggcaccccctgttcttggattcctgcctgactccctggtttcaagccatcccctcctcagt

SEQ ID NO: 15740 - DNA, 201 bp, Homo sapiens
taaataggaactatattaaaaagttcaaaataaatatttcagttttggttaacttttcttccccaccctgtcggtacctagtaagttctgtttcgttagtsagcagaaaatggttaagattaaaactgttcaatgcactgattcaaatatctttgggtggccttgaagctgctcttagcagagggaaagagacatccagcc

SEQ ID NO: 15741 - DNA, 201 bp, Homo sapiens
cttctacttacaatgcttactacctccaccaagggagcctccaccaaggagatggtggaggtatgaatatgcttctgtttgaattgatgagtgtgaattasttgagggactttcaggtaaacctgtccaatagataatatgagtctgaagcttcgggaggaggtttgggttggacaggagataatttggatatcatacaca

SEQ ID NO: 15742 - DNA, 201 bp, Homo sapiens
ctgcctactgcctgatgcccttgtcttgggtccccaatttctagcctttagcctggtgattctatttatggcccaaatatgacaatctatagatagctaamaaggggaaaagtcatcaaggtgggcagcaaggaggtctggaaaagtgtcccaagcccagtcagggcactcttcgccagcttgcctttgggtaggcaccct

SEQ ID NO: 15743 - DNA, 201 bp, Homo sapiens
ttatggcccaaatatgacaatctatagatagctaacaaggggaaaagtcatcaaggtgggcagcaaggaggtctggaaaagtgtcccaagcccagtcaggkcactcttcgccagcttgcctttgggtaggcaccctggagcacagtcacttgattgtatcttctgccactcaaagaggctattggtgtgtatcctttggcc

SEQ ID NO: 15744 - DNA, 201 bp, Homo sapiens
tctccttgtatcatcatttccctcccttcttctaaagtgggaatccccatcatgatttagcattttactttcttatgcatgtttttatacttctaatctawacgtttgcatccatcaacataaacattgtacagtattactttgtagatttgaaatgttacgtaaatgttctcacacgtgttgtattattttgcggctttt

SEQ ID NO: 15745 - DNA, 201 bp, Homo sapiens
gagtaaatgaagtaacacatttcagacctttagtacagtgcctgcttcaaagtaaatgctcaattaatattcctcgttgttaaaaactattaaatgtttaraaagtgatttattgcatgactgcaattttaccttaagtcatgtgcttgctgtactttttcaagtggtcacatctattattttaaccactgggctttagtc

SEQ ID NO: 15746 - DNA, 201 bp, Homo sapiens
caaccttcccggtgtggggcgtggccagccagcagagactcatggaggaaaattggcaaaaacaaaacttcactctgctccctcccagcctcactgtgctmctatgctccagtctcctgggagcacctcctccccacctagaagtcggagggcagaggagccagccttgttgatgccctccacacaggcagcctggtgagc

SEQ ID NO: 15747 - DNA, 201 bp, Homo sapiens
tttggtatacttggcaatggggtaggggggagtcagtatttccttcaggaggttcgtaatacatattttatctaaattatttttagagggtctttccagakcctatggaactttttagaaggcttgaggggtatgggaaggggaaggaagcaatgtggtatccttttctgttgagcgtactaacttccttcacagcttttt

SEQ ID NO: 15748 - DNA, 201 bp, Homo sapiens
agaaatcttggggatgagacccaagtctaaacatgaaactcatttatgtttcatatacactttatatacataccctgaaggtaattttatttttctcttgrggatgcttaataaactgtgttgtgtgtctacattttgactgtgacctgttatgtgagatcaagtgtggaattttctacttgtgacattatgtctgcactc

SEQ ID NO: 15749 - DNA, 201 bp, Homo sapiens
gaagacgacagtgtgaggagtagaactcttgtcttggtagcctttaactacttagaatcacagtgctggccgggcgcggtggctcacgcctgtaatcccarcactttgggaggccgaggcgggcggatcacgaggtcaggagatcgagaccatcccggctaacacggtgaaaccctgtctctactaaaaatacaaaaaatt

SEQ ID NO: 15750 - DNA, 201 bp, Homo sapiens
tcttaaaagccagtttaactaaatgaggattcattttttttaagttgacatttctggtgagtcattacacagccagatcattctgtggcttttctgaccakattccctgcatccagggtagtcctcctcaaattttgagttatgagaacctttgaaaacagtgaatttcaggggagtcctcatgggtttgtttttgcccca

SEQ ID NO: 15751 - DNA, 201 bp, Homo sapiens
actcttgtcttggtagcctttaactacttagaatcacagtgctggccgggcgcggtggctcacgcctgtaatcccaacactttgggaggccgaggcgggcrgatcacgaggtcaggagatcgagaccatcccggctaacacggtgaaaccctgtctctactaaaaatacaaaaaattagccgggcgtagtggcgggcgcct

SEQ ID NO: 15752 - DNA, 201 bp, Homo sapiens
gaaatttataaatcgattcatttgaccgaccactaacagactcctttaaaaaaaaattgtaagaaaacagtgcaaaaaagaaaccaaataaatctgatgcrttaccaatcaaataaatcaatggttaccttgtaatctgaccctggacatgagaaagtgttctgttctgcagctcctgtcttctgattgtgatcactaccc

SEQ ID NO: 15753 - DNA, 201 bp, Homo sapiens
actgagaccccaaaattatgcagttcgttcttgtggctagtagttatcttattggacagcgcagagagaaaacattgcagccatcatagaaagttctgttrgatagtactgtcttagcagcatcatgtaaaacgtgtccatctagtggatagcagcacagctcccatctgttaccatcaatggctgcatgacgactccaag

SEQ ID NO: 15754 - DNA, 201 bp, Homo sapiens
atcatgtaaaacgtgtccatctagtggatagcagcacagctcccatctgttaccatcaatggctgcatgacgactccaagtaatcgctctttggaaagttrgcaaggttgatggtaacacatttgagaaaatagatattttggataataatttggaaaatgtgcattgtatgtacaatttttataataaatagcagcatag

SEQ ID NO: 15755 - DNA, 201 bp, Homo sapiens
agtacgttttgcagaacattcttcccatttcacaaaggtttgggagggcagacggatgcctttaatagagttggcctcagcttacccagtctctgtttaastaggagccatgcaaattttttaaaagtgtcataaatgtgaaaacaaaaaactgagccatccagagctttcatcagattcctagagcattctgcaatctaa

SEQ ID NO: 15756 - DNA, 201 bp, Homo sapiens
gcaggggctctctacaacagttttccttttgtgtctcagtcccagcaacttaatcggtggattcctccatacgtaccttctttatgaaggaatttctttcmttgcttttgtttcttgtcatcagtgacatttctgaagttttttttaaaatctatttcagtgtcataatagaaaaattatattgtactgagttatttacta

SEQ ID NO: 15757 - DNA, 201 bp, Homo sapiens
tgcatcataaaactggacatcataaaagatttggaacaaaagaaagctaagtttattggtgcccacattcagatactcacgtcccttcttcattttagttratgtttgaatgactgaactgtgctgaaagaactaaaaatagtgataaacatgtaggtaaaagagaaaagataaggtaatctataaactagagcatccctt

SEQ ID NO: 15758 - DNA, 201 bp, Homo sapiens
tctctactaaaaatacaaaaaattagccgggcgtagtggcgggcgcctgtagtcccagctacttgggaggctgaggcaggagaatggcgtgaacccgggargcggagcttgcagtgagccgagatcccgccactgcactccagcctgggcgacagagcgagactccgtctcaaaaaaaaaaaaaaaaaaaaaaaagaatca

SEQ ID NO: 15759 - DNA, 201 bp, Homo sapiens
acctcagcaacatgaatcaatcttaaaagcatactgttgattgcaagatgccagatgtggaaagcatatactatatgatttcctttatatataaagttccrgtgtaggcaatagcaatctaagttgttaggtgtcaggattttgatctcctagggagggagacatgcctagagaggcctgagggagtttctgagattccat

SEQ ID NO: 15760 - DNA, 201 bp, Homo sapiens
ggaagaacaaacaggagacatttccaacactggagactgtgttcactaaactccagctcctttcatattttgatcaacatcaagtgacatctcaggtagcyatttaaagctgtttattatgcatttgcagtattctaatttacttaaaaatttttttcatgcagtatattttctcaaccttaatggttttagacatatatt

SEQ ID NO: 15761 - DNA, 201 bp, Homo sapiens
agtgaatccatgaagcatcaattaaagcaagctaatggcaattaagcacccacagtctaacaatgaaaggctgactgcctgtaaataattacaaaacattrctaatgatggtaatgagactattaaagatttgttgtttttgtaggcaaacctttccctggaataagatcatcttgtgatagacacctcttagccgctgct

SEQ ID NO: 15762 - DNA, 201 bp, Homo sapiens
caggctctacagcagagccctctggtgggcgggggaattgatgctgtgctgacttctgcacatccaaaccttccctccgtgcccctgcctcaggatcccakgagacccagacagccgcaagttcgacagcagcagagactcctccaggtacggggcagggagatgagggcaatgccatcacccttcagacagtgcaaatat

SEQ ID NO: 15763 - DNA, 201 bp, Homo sapiens
atgaatttagtaaagaaactgaaagtaagtttgagatcagcctgtattatgagctcaagttgtttatggatttattatctagtgcattttaatttattacycattaaatgttattaattgtattcaacttaatttaatgtgattatttgctatttgtttcacctaaccttattagtacccagaagttacatgcacataacc

SEQ ID NO: 15764 - DNA, 201 bp, Homo sapiens
tgagcagtccctgtccaacctgtagtgtaagaagggataaaacatgcggaaggacaaaggacatgaaaggaattaaaacagtaagcagaagggatggcccyggacagcgcagtgtggaatagacagcagtactgactgccagtggaagagatccgtagggttggggtggtcctagaaggcttcatggatgagcaggtttag

SEQ ID NO: 15765 - DNA, 201 bp, Homo sapiens
tacaagtgtatacctgcacaaacatgtttttaacaaaagaaggaggaagtactcatgacagttacagtccgcttttctgccactgtcacgtggtcatagcyggtattgatgactaccttcttctgctacccattctgtattcccttcaccttcagcaagcacctcagcaggtcgtgtttttcttcctggttgagtgaccca

SEQ ID NO: 15766 - DNA, 201 bp, Homo sapiens
ctgtcatgaatttttcacaagtaacggtaaattttgtgtagcacagtgatttttctttaagtcataggaatgtgaagaacatagttacttgtaagcagggrttattattaataagttaatgagtaaagctggggtgaatgatagcttcggaatatttgattgagtaggcttaaacaccttgaaactgcaggtgaactcagg

SEQ ID NO: 15767 - DNA, 201 bp, Homo sapiens
ggattactactgagcagtccctgtccaacctgtagtgtaagaagggataaaacatgcggaaggacaaaggacatgaaaggaattaaaacagtaagcagaarggatggccccggacagcgcagtgtggaatagacagcagtactgactgccagtggaagagatccgtagggttggggtggtcctagaaggcttcatggatga

SEQ ID NO: 15768 - DNA, 201 bp, Homo sapiens
tttgtttgtgtgtgtgtgtgtgtgtgtctgtgtttaattcagcaaacaatggtatttcctggagaagtggttataccatgttgattagttatacctgacaktagtaagctgggtattcggtcttgtggttacagcaggagcatggcatggcttctgcctctgagaagtaaaaatccagaatcctagagagagaagcaatta

SEQ ID NO: 15769 - DNA, 201 bp, Homo sapiens
tataattgcatcataaaactggacatcataaaagatttggaacaaaagaaagctaagtttattggtgcccacattcagatactcacgtcccttcttcattktagttaatgtttgaatgactgaactgtgctgaaagaactaaaaatagtgataaacatgtaggtaaaagagaaaagataaggtaatctataaactagagca

SEQ ID NO: 15770 - DNA, 201 bp, Homo sapiens
ttccaggaaatttagcttaataggaaacctgaaggacttgttcccaagtgtgttagaaaacttgcttttccaatccccctttcctagcttgtggggatgcsgacgccgagcctggggcgagaatgacatgccgactcttgcttcatctcttccgagctccccaggcctgcttcttacctcaagcaacgggtgagctgactg

SEQ ID NO: 15771 - DNA, 201 bp, Homo sapiens
taagtaggagccatgcaaattttttaaaagtgtcataaatgtgaaaacaaaaaactgagccatccagagctttcatcagattcctagagcattctgcaatytaaaaacatttctataacacctctggtctgataaggctgtgaaatgggaggaacatagactgtttcaaaggatatttcatcttgtctttgttagaatcca

SEQ ID NO: 15772 - DNA, 201 bp, Homo sapiens
gtaaaaagtgactcagggcagaaattagtgcttctttaaaacgtgtcaccagaaaacagagtttttctgtgaaaagagcaagaaagactaagaaaagcctrtgtttacaaattaaatctggtctggacttaatatcaatgcctgtgttgccatctacttacttaagttgcttgtattctgtgaaggaaaaacatctggaaa

SEQ ID NO: 15773 - DNA, 201 bp, Homo sapiens
tttctgtgaaaagagcaagaaagactaagaaaagcctatgtttacaaattaaatctggtctggacttaatatcaatgcctgtgttgccatctacttacttmagttgcttgtattctgtgaaggaaaaacatctggaaataaagacatgggtacccttgctgggaaaatatatttggcatgtctgattttggcctaaattat

SEQ ID NO: 15774 - DNA, 201 bp, Homo sapiens
cttcaggaactgttgacatgcacactaacaagtatgtttttatcacttcacattgattttgctacatgtatgcatggtataagctttgatatactgatggygatttctgccacatcttatttacttggatgctattaaaaattctgtgccttgaataaaaatactcagttaaataagtgtatttcagtttcactttaagat

SEQ ID NO: 15775 - DNA, 201 bp, Homo sapiens
cagaggagcacccagtggactacagactgggccctgctactccttcagatcattacttcaggaactgttgacatgcacactaacaagtatgtttttatcayttcacattgattttgctacatgtatgcatggtataagctttgatatactgatggcgatttctgccacatcttatttacttggatgctattaaaaattctg

SEQ ID NO: 15776 - DNA, 201 bp, Homo sapiens
gcccgtggaagcagcaccctgagctttgcctccaccttcgcaggcattctccctgtgcatatacgtgtctacttttttataaggataccagtccttatgcrttttcactttttataaggacaccagtcatattggtttaggtcccatcctaattatctaatttcaacttgattaccactgtaaagaccctgtttctaaata

SEQ ID NO: 15777 - DNA, 201 bp, Homo sapiens
ggtactgggtgttacgactccagcatgtcttttttagggaacataattcaaccgaaataataacaggtcagaaggtgagagaagtttgggaagccttgacrgaggaggctgaatgtggcagatgttgaaggcagtaggatttgattcattgcttttttttttttttttttgaaaagaagaaattgaatgttaatttttttt

SEQ ID NO: 15778 - DNA, 201 bp, Homo sapiens
gactgtgaataaaggtgtcccctctgcagggtggtacttgaatcccaccacaagggtttttcagggcaaggatagtactctccggccattctgtttccctstacctgcagctggtactgagagcagtgacaagagggtagcatccatctgtgcaatagttttgtgtctgtaattttggttcaatttatttttctccttagg

SEQ ID NO: 15779 - DNA, 201 bp, Homo sapiens
aatagaagttacccagccatgtgttacttagattgatcttctgtttttttccaaatgctcttcaaatgctgctgaatgactttgtaaatagaagaagatgrctgaggcaaatctcactcattttagaggtttcttgtgccaaggttgaggacatgcctgggagaaaggaacacagaatcacaggaacatctctgctttttc

SEQ ID NO: 15780 - DNA, 201 bp, Homo sapiens
agaccatgtttctcttacttttaggaaagcaaatccaccaggcattgtgcaatttaaagtgagccaattagctgggcacagtggcttgtgcttgtaatccyggcactttgggaggccgaggtaggaggattgcttgaatctaggagttttagaccagcctgggcaacttagtgagaccccatctccacaaaaaatttaaaa

SEQ ID NO: 15781 - DNA, 201 bp, Homo sapiens
tacaatcccattctctcacatatttttaatatgtctaaaatatttattgtattttaagtggttgatatcttcagtaaattaacataaaaagctctatttgstttttctttgataaaacttggagttagcatagccaataggatgttcctgagattttatgttttactattccatcttaccctcatatattttccttcttta

SEQ ID NO: 15782 - DNA, 201 bp, Homo sapiens
gagccaattagctgggcacagtggcttgtgcttgtaatcccggcactttgggaggccgaggtaggaggattgcttgaatctaggagttttagaccagcctrggcaacttagtgagaccccatctccacaaaaaatttaaaaattagctggttgcatgcctgtagtcccagctacttgggaggctgaggcaggagactcact

SEQ ID NO: 15783 - DNA, 201 bp, Homo sapiens
gttatttactattctatttattagtttcaacaatccaatatcctttttcttacccaagtgatacatattttcattctaaaagagtcaaatgataacccacrtagtacaaatctatgtcttatttcttcgtatatttttctcctcaggttgtgtggtgtggtcaagcatgtcgtaaacccctcagaatgttcttcccctgaa

SEQ ID NO: 15784 - DNA, 201 bp, Homo sapiens
catggggttctttggttttatagtaccttttatttttttaatctagcacatgtaatcaatttatatgctatcctagaatgatatcaatttaacagtagctmttctgggaaagaggaaatgctacctttatttgtattaattacatgttatgaaatgaaatctgaaacatcctaaaaacatcagaatgtaagaatatttaca

SEQ ID NO: 15785 - DNA, 201 bp, Homo sapiens
ctgtcccacttctcactctctctctctctcttttttctttagaaagagctaggagacaagcgatcagaaagtattgacaaagttcgacagttactaccttwgccgaaacagacatgtgatgtcatcacttgtgaacctatgggttccttgattgacacaaaaggaaacaaaattgctggatttgactctatagataaaaaa

SEQ ID NO: 15786 - DNA, 201 bp, Homo sapiens
gtcaaatttcttggcctcagaatcttttcatgttcacagattattgcagacccaaagagcttttgtgtatcaatatttaccatgttagaaatcaaatattygttaatactaaatattgttatgtttagtacctaaagataaacttatgttcctggaagtaacatgcttttatgaaaaataggcatatatttcaaaataaag

SEQ ID NO: 15787 - DNA, 201 bp, Homo sapiens
tagctctttgcctttgagcaagtcaccccacctttctgcctctcagagcctcctttatacaataaggatggtgaatcagatagtttctaaagcttttttcrtctttaataatctgtcatctgtgactccgttagtgtaatataatggctgagccctgtaacaaaatacaagatggtgatggaatcagatgcacagataggt

SEQ ID NO: 15788 - DNA, 201 bp, Homo sapiens
acttcatttctgttttgttcttccacctatttagaaattatttattgaggaatttctacattccaaagtactttgattagcgccaattagtaagaagttcwaattaagaactcataatgtgaatcttctctaggaatgcattacagttcctgccatttaatatgtccttaagtgaaatagttttctagttattctagtttt

SEQ ID NO: 15789 - DNA, 201 bp, Homo sapiens
acataagaatgtccaggtctagattccgaggatgtccggtgttttttggcaattaatgcctggaagatgatgaaaagataccccttgtatatatcactgasttccttggatagcatgttgcatccatgatgtgtgtatttctttaaaaatctgtcttgattctttacttctcctgttgccacttattggagtagcctttgt

SEQ ID NO: 15790 - DNA, 201 bp, Homo sapiens
  misc_feature (1)...(201): n = A,T,C or G, or insertion/deletion polymorphism (see Tables 1-2)
ccaggtctagattccgaggatgtccggtgttttttggcaattaatgcctggaagatgatgaaaagataccccttgtatatatcactgagttccttggatancatgttgcatccatgatgtgtgtatttctttaaaaatctgtcttgattctttacttctcctgttgccacttattggagtagcctttgtcgtacactagta

SEQ ID NO: 15791 - DNA, 201 bp, Homo sapiens
cactgagttccttggatagcatgttgcatccatgatgtgtgtatttctttaaaaatctgtcttgattctttacttctcctgttgccacttattggagtagyctttgtcgtacactagtatctcttatgcatagttctttatacatttttacacctgcctctcagttgaaggttgacttctgaattctgctaatcaggactg

SEQ ID NO: 15792 - DNA, 201 bp, Homo sapiens
tctttaaaaatctgtcttgattctttacttctcctgttgccacttattggagtagcctttgtcgtacactagtatctcttatgcatagttctttatacatytttacacctgcctctcagttgaaggttgacttctgaattctgctaatcaggactggttggataatcctatctctatatcttcattatatgaagacttaag

SEQ ID NO: 15793 - DNA, 201 bp, Homo sapiens
catacgaagtgatttagaagcattacagtggcttttaattttataagtagaggtatgatttaaattttcaagcagtctttggctatttaccacctctcttrtttatctaatagtgaggcaaagaaatgaatgttgccagaggaagtaatgcattatttctaactagatctgttgttattattacttcctttgtagtatgtc

SEQ ID NO: 15794 - DNA, 201 bp, Homo sapiens
tttttaaattggaaaattcctatcagttttctattcaattatgcactgtggatttagtacatattgcatatatatataccgaaagccagtgcctgtcaatstaattgccatattatttttaggaatgggtaggagagcattgcttaaaagaacctgaaagattatgtacagacaaagaacttatattggaccctgtgcttt

SEQ ID NO: 15795 - DNA, 201 bp, Homo sapiens
tgggggatctgaagagaacaagcgtgcatacatgaatttagtaaagaaactgaaagtaagtttgagatcagcctgtattatgagctcaagttgtttatggrtttattatctagtgcattttaatttattactcattaaatgttattaattgtattcaacttaatttaatgtgattatttgctatttgtttcacctaacctt

SEQ ID NO: 15796 - DNA, 201 bp, Homo sapiens
tggcacatagtacaatagtttccccaagtaagcataaaaactattgaatagaaaagaatactaacatttccatataaatgaaagattgatttttatttttyactcttgatttgggcaatggaaaaaaatggcaagctgctgcttctctaatttgtattggggaaaatagtaacattggtggagggaatagttcattagttt

SEQ ID NO: 15797 - DNA, 201 bp, Homo sapiens
tattctgatagcacgacagtgtttttccctggaggacgtcgtgcagcatgtcgcacttccctctcttctagcagcaggtaaggcagcatccatgaacatcmgttgctctttgattgttgtcttgatggagtggtttctaacattacaacacagggaaaggagtatttgagggtatgtatattgggaagtggtgtagtatca

SEQ ID NO: 15798 - DNA, 201 bp, Homo sapiens
ctctttgcttttaacctgaaacctccacaaaacttggacatttcaaccactgagtgctcagttgacatttctgtaattcccttcacacagaaatgttttttgttttctaaaataggttaaattacgagtttatgtactgattttggaacttttatttagtgttaaaaggaaattagctagtgatgaaaatctaagctgtaa

SEQ ID NO: 15799 - DNA, 201 bp, Homo sapiens
ctctggaactgggcttcccaattataagatgccattagtagtaagatgtcattagttccatcccaatttgtgacctgttaaaaatgttaaaaaaaaaaaaagttgtatcacaaaattgataacatgtggtaaccgattaggagagtatggccttcagatagcaatctcagtcattgtatagatgttgtttccaatggtaaa

SEQ ID NO: 15800 - DNA, 201 bp, Homo sapiens
gatttgagacatttttaatgaaattccacagcattcttgctgcacagtggaagaaatattcaccatttcattcagatattcatgattggttattgtttacctatgtgagaactaaaatacatcttttcctagctgatagcttggtgattaatactattttagaaatgaccaccaccactttaggatgccacttgagcatca

SEQ ID NO: 15801 - DNA, 201 bp, Homo sapiens
ctaatttaaaacccatgtaattatgaaattatgccaacaactgtatgttttacacatttcaatttatgaactgaagacctccatgaaattaaagtagtatwattcacttctacatcactcccctcatcttttgtaagttatgcaactcaacaggtctataatatttgtggcaggtgggacagtgcatttttttctactttg

SEQ ID NO: 15802 - DNA, 201 bp, Homo sapiens; identical to SEQ ID NO: 3252

SEQ ID NO: 15803 - DNA, 201 bp, Homo sapiens
aagtagcaggcacagataatatgattctccttttgaagtggaagaaattaggtccagagaacattgagctacgttgccttcctttgcatgaatttggaaawtttttttttcttttggaaggaaaagaagaagtaatatttatagaaagaggttggggaagaaatatcaggagatttctggtaactggatagccaatatatt

SEQ ID NO: 15804 - DNA, 201 bp, Homo sapiens
gtgtttgtattttaatgagaaacatatgattatatattgataaattgaaatacattatttattcctctcctctgcttaagattttgttagtaaatactcaktaagccatttttttcagcaaagtcaaaactttttcttggttgacttgtgggttttaaaaggctttttccattaacttgggcattgttttgcccacttgct

SEQ ID NO: 15805 - DNA, 201 bp, Homo sapiens
tttgactttcgtcaaagtagaatcatgtatagattcaactgtcttaaaaagtaaaaatgatttatcttagtaaaagattatttagaatattggtcttacartatttttgtttttatttgcacagatttctaacaatgtgctagaacaaatcacaagctttgcgtcaggaacatcctatcatctccctttggctcaccacat

SEQ ID NO: 15806 - DNA, 201 bp, Homo sapiens
tttgctacatgtgctttgtaatttgtatgtggagatgtgggtgcatatacctattttttctgaatcatttaagagtagattgtatattttattcttttgamtattgcattatttcataacataaccaaaatatagctattaaacatcagaaaatttagcttttggtacagtaattttttctcatctataggccacagttcg

SEQ ID NO: 15807 - DNA, 201 bp, Homo sapiens
atattgcattatttcataacataaccaaaatatagctattaaacatcagaaaatttagcttttggtacagtaattttttctcatctataggccacagttcrattttattaattgtcccagtattgttggatttgtctgaggtttcctgtagattagcttcagattatgcatccctggccaagatactacagaaataatctt

SEQ ID NO: 15808 - DNA, 201 bp, Homo sapiens
atttagtttttaaatggaactgggaatattctattaggcaaggctgtcttattcctaaaaaatttcaggttataatccttaatacattagttctcaattcwgcctttatatccaaatcactgctgaactgttaaaaacagtgatttccgagacccgctttagaccaactgaatcagatctggatagctacctgatccctgt

SEQ ID NO: 15809 - DNA, 201 bp, Homo sapiens
gcaatcttaatttccagtttaatagaatcattgtattcctagtggcagtgttcctccctctggaactaagacctctaggccagcagaacgtaatgttgtgrgaacaggaagcaaaaattttgctagtggatcactaggagtgatggtgagtggtgccacttccacttctaccccttgattcctggacttgtgaatcctggc

SEQ ID NO: 15810 - DNA, 201 bp, Homo sapiens
taaaaagaaaaggataagtgaggaatactggccatgtttcttagtgaatccatgaagcatcaattaaagcaagctaatggcaattaagcacccacagtctracaatgaaaggctgactgcctgtaaataattacaaaacattactaatgatggtaatgagactattaaagatttgttgtttttgtaggcaaacctttccct

SEQ ID NO: 15811 - DNA, 201 bp, Homo sapiens
atttaaggaaaaatatttttaaattgacattttaaggcaagtgccaagagatgtcaccaattaatgttaagaataaaaagagggtaaccgtttttttttttctagagtcagtaaatataagcttgagttgaaagactttacttattcctgctgctacaatttaattctctaataataatattatattcagagtatggctta

SEQ ID NO: 15812 - DNA, 201 bp, Homo sapiens
gaagccaggagtttaaggctgcaatgtgctaggctcatgcctgtgaatagccactacaccctagcctgggcaacaaagtgagaccctgtctctgggggggraaaaaaaaaaaaaaaccttcctgtagtaagctatttcaaataaaaattattttaattgttaggatattctctattcctatcaagcagtatttaatggaca

SEQ ID NO: 15813 - DNA, 201 bp, Homo sapiens
cagatcattacttcaggaactgttgacatgcacactaacaagtatgtttttatcacttcacattgattttgctacatgtatgcatggtataagctttgatrtactgatggcgatttctgccacatcttatttacttggatgctattaaaaattctgtgccttgaataaaaatactcagttaaataagtgtatttcagtttc

SEQ ID NO: 15814 - DNA, 201 bp, Homo sapiens
aaacttatgttcctggaagtaacatgcttttatgaaaaataggcatatatttcaaaataaagttatatgagaatgacatggttttacttttttttttttttgagacagggtcttactttgttaccctgactggaatgcagtggtacgatcacggctcactgcagccttgacctcatgggctcaagtgatcctcccacatca

SEQ ID NO: 15815 - DNA, 201 bp, Homo sapiens
cattctgtggcttttctgaccatattccctgcatccagggtagtcctcctcaaattttgagttatgagaacctttgaaaacagtgaatttcaggggagtcstcatgggtttgtttttgccccatatatcgtagtgatgggaaagctaggtgataagttgaaacattgacttcttcccttgtgcctacctgcagaccatgcc

SEQ ID NO: 15816 - DNA, 201 bp, Homo sapiens
ggaggcggaggttgcagtgagccgagattgcgccactgcactccagccctggtaagagagcaagactctgtctcaaagaaagaaagaaagaaagaaagaartgttacacacataccactaggaagaacaaacctacctaaaaggctttgaagatttgtttgcaattccattttctctaagggtttaaaatactgtgttcaa

SEQ ID NO: 15817 - DNA, 201 bp, Homo sapiens
gccctctggtgggcgggggaattgatgctgtgctgacttctgcacatccaaaccttccctccgtgcccctgcctcaggatcccatgagacccagacagccrcaagttcgacagcagcagagactcctccaggtacggggcagggagatgagggcaatgccatcacccttcagacagtgcaaatatgcaacagtcataaaaa

SEQ ID NO: 15818 - DNA, 201 bp, Homo sapiens
agactcttaggctcaagtgatctttccacctcagccttccaagtagctgggaactacagtaaatacatttttgtttttgtttgtgtgtgtgtgtgtgtgtgtctgtgtttaattcagcaaacaatggtatttcctggagaagtggttataccatgttgattagttatacctgacattagtaagctgggtattcggtcttgt

SEQ ID NO: 15819 - DNA, 201 bp, Homo sapiens
ttgctattgtagttgtttttcttattattttctgccaaggtcacgtgagatctagaaaggtaaagatttcactgtgactgaattaatttccccctctgtctctttttcttctttttaaatttaagagtcaattggaaactttcagagttgtttttaaaacgagtttaatcattaaagaatccttagtagttaccactgaaa

SEQ ID NO: 15820 - DNA, 201 bp, Homo sapiens
atagtattccatggtgtatatgtgccacattttcttaatccagtctatcattgttggacatttgggttggttccaagtctttgctatagtgaataatgccrcaataaacatacgtgtgcatgtgtctttatagcagcatgatttatagtcatttgggtatatacccagtaatgggatggctgggtcaaatggtatttctag

SEQ ID NO: 15821 - DNA, 201 bp, Homo sapiens
gttaggttattagagtttggtcctatattgcaattgatgagaaatctgttgatgattgaaataaaatactacgaaattgagaagaaaacacatctgttttsctttacaaatccattgatattcaaatggttgtgtctaaaaattaatatttgtagttgttctaccattagaatacttaagatttaggtctgaatgacaact

SEQ ID NO: 15822 - DNA, 201 bp, Homo sapiens
tattctttctgatgtacatttttaaattctgcatattgatgtagaagatgaattcactgtcttctaccctcactgcccggcatgctcacatgcagtatggwttgatgctagtttgagaatggcttcgagggcaattagagcatacgaagtgatttagaagcattacagtggcttttaattttataagtagaggtatgattt

SEQ ID NO: 15823 - DNA, 201 bp, Homo sapiens
ggcggatcacgaggtcaggagatcgagaccatcccggctaacacggtgaaaccctgtctctactaaaaatacaaaaaattagccgggcgtagtggcgggcrcctgtagtcccagctacttgggaggctgaggcaggagaatggcgtgaacccgggaagcggagcttgcagtgagccgagatcccgccactgcactccagcc

SEQ ID NO: 15824 - DNA, 201 bp, Homo sapiens
gcggtggctcacgcctgtaatcccaacactttgggaggccgaggcgggcggatcacgaggtcaggagatcgagaccatcccggctaacacggtgaaacccygtctctactaaaaatacaaaaaattagccgggcgtagtggcgggcgcctgtagtcccagctacttgggaggctgaggcaggagaatggcgtgaacccggg

SEQ ID NO: 15825 - DNA, 201 bp, Homo sapiens
caaaatgttttgagtagacgctgagaaacaatccatgccttattcttctacctggcattgtagacaccacaagattaacaactttatattaatgagatatrtacaataaatgtgtactgcctataaaagtaaaattttatatattgcatataactttgaactatctgcccgtctcctaactctgcctcataggagaggacc

SEQ ID NO: 15826 - DNA, 201 bp, Homo sapiens
catgtgaaaatacctccagctttccacttctcctaagtgcaaagtctgcattacaaggtgaggccttccactctttgctctctgtaattacttccctgttkctaaagccttctgtttcccttgctgctttccttcctgtctggtcagacatctagacagtgctaggtattttaagcatagatttgccttctctacctctac

SEQ ID NO: 15827 - DNA, 201 bp, Homo sapiens
cttcaacccaaacagtattggaagtgctgatacaagtagcacgagacagaatggaataaagacattcctaaggtatttttgtctgttgttttattgaactrtcatgaatttttcacaagtaacggtaaattttgtgtagcacagtgatttttctttaagtcataggaatgtgaagaacatagttacttgtaagcagggatt

SEQ ID NO: 15828 - DNA, 201 bp, Homo sapiens; identical to SEQ ID NO: 3253

SEQ ID NO: 15829 - DNA, 201 bp, Homo sapiens
tacttacttaaaaccatttaaaaagtcttttaactcaaagttttgtccaactttccatcaaattgattataaagacaaatcccacagagaagttttatagraatttaaaatgtctcacatattgtgcattccttgagttttcttttcccatcaggcaggcccaagtgcaggcccctctggaggatggcctgcctgatactt

SEQ ID NO: 15830 - DNA, 201 bp, Homo sapiens
tgagctgtcagatcagggaaaaaccacaacagatgaagaaaagaaaacaaaaggaaggaagcgcaagacgaaatctagctcaagagttgatgtaagtgggraaaggaaggagaaccttggctcattagcatttagtatgagatttactcgtgcccaaatcatatccctcgaaacattaccaagagcaggataagttttgtt

SEQ ID NO: 15831 - DNA, 201 bp, Homo sapiens
attccttgagttttcttttcccatcaggcaggcccaagtgcaggcccctctggaggatggcctgcctgatacttttgcagttgtttctaaccttgtcccarcacgtgaactggtaggtgtgcgggccaagcctcctgcccaccactgctgtgatagtggatgtttccatatggtattatgatagcaggcttagattcaata

SEQ ID NO: 15832 - DNA, 201 bp, Homo sapiens
gtacttcctaattgtatacatcctgatgtctagacagaagaacaactctataaattggaaaaggattaaaaattttaaaaaagttaaatttagggaatgtrtttgtagtgtaatgactcagtatatctatggtttataaaaataaatgttttctctatttgttttggcacctacatgtttattcagtcttttctcctgtta

SEQ ID NO: 15833 - DNA, 201 bp, Homo sapiens
atgctgtgctgacttctgcacatccaaaccttccctccgtgcccctgcctcaggatcccatgagacccagacagccgcaagttcgacagcagcagagactyctccaggtacggggcagggagatgagggcaatgccatcacccttcagacagtgcaaatatgcaacagtcataaaaaatgaaaaacactatagttgtcaat

SEQ ID NO: 15834 - DNA, 201 bp, Homo sapiens
ttctaaccttgtcccaacacgtgaactggtaggtgtgcgggccaagcctcctgcccaccactgctgtgatagtggatgtttccatatggtattatgatagyaggcttagattcaatagtaattgtacagcaaacacaaagatgcagataattggattacatgactttgacattattcaggtttaattcaactataattgca

SEQ ID NO: 15835 - DNA, 201 bp, Homo sapiens
atcctggtaatttttgtgcagaattagaaccagtaggcatataaagtcttaaagtaattatttaatcatgaaaggctgatttgtatttcatcattttggtrtaaagtataactagcgaattttaaaccttaaaaattagctattagtatgcttacatataatatttcatattgtaactgtgacagaaaagtatattgtttg

SEQ ID NO: 15836 - DNA, 201 bp, Homo sapiens
ttccatacttaagtagtatgttgggacaaactggtggtcaggaggaaacataatatgctcacatataaatagttcacctttagacataaaggtggaaaatkttagggtgtgtacctgaacatggtataaaactatatacaaaaactatatttccatttgtatttctttttccttttaaaagtatggcacaattttctgaat

SEQ ID NO: 15837 - DNA, 201 bp, Homo sapiens
ccttggcaacaaagtgagatgctgtctcactttgtgtttcacataaacaaaaacaaacaaatcatgttcccatatagttctctccatgcattaaaaaataygaagttaaagtggcctcagttgttttggttgagcagaataaatagggagaaattaagttactcttcagatactaatgctggcaggaagaagaaatcatta

SEQ ID NO: 15838 - DNA, 201 bp, Homo sapiens
agtggctcatacctataatcccaacactttaggaggccaaggttggaggatctcttgagtccaggaatttgaggccgcagtgaagtatgatcttgccactkcactacagccttggcaacaaagtgagatgctgtctcactttgtgtttcacataaacaaaaacaaacaaatcatgttcccatatagttctctccatgcatt

SEQ ID NO: 15839 - DNA, 201 bp, Homo sapiens
caattacattataaaacatgtttaattttttaaagaactttagaaatccactgttaaatatataaccagaatactaacattagatagatttaggataactstatgcttggactggcacgtgtaattgaaaaaatagccatctgcattgaaatttataaatcgattcatttgaccgaccactaacagactcctttaaaaaaa

SEQ ID NO: 15840 - DNA, 201 bp, Homo sapiens
catatacactttatatacataccctgaaggtaattttatttttctcttggggatgcttaataaactgtgttgtgtgtctacattttgactgtgacctgttrtgtgagatcaagtgtggaattttctacttgtgacattatgtctgcactcaaagtttcatattttggagaatttcagattttggattctcagaatagggat

SEQ ID NO: 15841 - DNA, 201 bp, Homo sapiens
gtgattttgcttttgtgattctattacttaggagatgccaaaattggcaataacagtgtcagctctttaaagaatgatgacttcaccatgagaggtttgcratgtgatgggaatgctgatgatatctggactgcctcacaaaatccaaaatcctgtgggaaaagcatttccatagaaactgccaatttaagagaatacgct

SEQ ID NO: 15842 - DNA, 201 bp, Homo sapiens
agaggaacagaactaggttttttttttttttagcttttgcacaagtcccttctattttaatgcattctaggagatcataaatatatatatatatatatatwttttgaaacggagtcttgctctgtcacccaggctggagtccaatggtatgatctcagctcactgcaacctccacctccctggttcaagcgattctcctgc

SEQ ID NO: 15843 - DNA, 201 bp, Homo sapiens
aaaactttatgttgaaggaatatccacagagcaacatataccgagtgcctcctaattactcgcctatctcctcccaaatgatgcaccatccacagtccacsttgtggggttacaacctcgtgggccagccccagcagcccggctttttccttcagaaccaatctcttactccaggtatgtgatgagaaagcacagatcact

SEQ ID NO: 15844 - DNA, 201 bp, Homo sapiens
ggtacggggcagggagatgagggcaatgccatcacccttcagacagtgcaaatatgcaacagtcataaaaaatgaaaaacactatagttgtcaattgccarattccaaggatccctgtggatttgatgctaggagctacattggtacaatttagttacaacttggcaagaattttattttctctgtgtatctaccaggtta

SEQ ID NO: 15845 - DNA, 201 bp, Homo sapiens
cagacagtgcaaatatgcaacagtcataaaaaatgaaaaacactatagttgtcaattgccagattccaaggatccctgtggatttgatgctaggagctacrttggtacaatttagttacaacttggcaagaattttattttctctgtgtatctaccaggttatgggcagaagagtacgttttgcagaacattcttcccatt

SEQ ID NO: 15846 - DNA, 201 bp, Homo sapiens
taagatttgaacagttgcttccaggagcctaaagtttcttagtagccttaatcctcagcattctgatttttatccacacacccttctcatagctttccctyccagtgcttccagaaactgacccttctagtgacgtctgctacagttgttttggaaacctaaatgggaaaggtaaacataaattcctgaactcaggatata

SEQ ID NO: 15847 - DNA, 201 bp, Homo sapiens
taaaaaacaggcaagagtgaatgttttttcttatatataaatttatttacaaaagatgaaatacttttttttgtcttaccataggatatataaaatatatkaattttgctgttgatgtttttaaggcatatgcttgtcttctaagtgtacttagtcattggcattatcatataaagaggtcatatctttgaagatctacgt

SEQ ID NO: 15848 - DNA, 201 bp, Homo sapiens
attgcataaataagttctgattatacttcagatttagaagcagaatatatttatcaatgaaaaatttcttgtaagctgagcatggtggcacatgtctttarttccagctacttgggaggctgaggcaggaggattgcttgaagccaggagtttaaggctgcaatgtgctaggctcatgcctgtgaatagccactacaccct

SEQ ID NO: 15849 - DNA, 201 bp, Homo sapiens; identical to SEQ ID NO: 3262

SEQ ID NO: 15850 - DNA, 201 bp, Homo sapiens
agattacaggtgcctgccatcatgcctggctaatttttgtatttttagtggagacggagtttcaccatcttggccaggctggtcttgaactcctgacctcrtgatccacctgcctcagcctcccaaattgctgagattacaggtgtgagccaccacacctagcctttttttgtattcttagtagagacggggtttcaccat

SEQ ID NO: 15851 - DNA, 201 bp, Homo sapiens; identical to SEQ ID NO: 3247

SEQ ID NO: 15852 - DNA, 201 bp, Homo sapiens
cccacccgcctcagcctcaccaagtgttgggattacagacacgagccactgtgcctggcctgaaccttagttttagatgaagctactcataaaagaatgcrtatagataacaacagtaacacttacatcttagggaatgactgagtagttatttgggggccatttaaggaaaaatatttttaaattgacattttaaggcaa

SEQ ID NO: 15853 - DNA, 201 bp, Homo sapiens
tcatgcagatttggattgaagttaatactaacccaattacaggttgactataacttgactcttaaatttgatattatcttcaaaattataaatagattacrgagatttagaactggttataatttagtaagattaactttgcagtgttagaatttttagcaacaaatttttagaatttttttagcaaaaagaggaaataca

SEQ ID NO: 15854 - DNA, 201 bp, Homo sapiens
actctataaattggaaaaggattaaaaattttaaaaaagttaaatttagggaatgtatttgtagtgtaatgactcagtatatctatggtttataaaaatamatgttttctctatttgttttggcacctacatgtttattcagtcttttctcctgttacagttactaaatgaactgagtgttgtggaagctgaactgctcct

SEQ ID NO: 15855 - DNA, 201 bp, Homo sapiens
atgcataaaatgtttttctatttaaattaaattaaaacctggaaaatatttgatagaggatttgagacatttttaatgaaattccacagcattcttgctgyacagtggaagaaatattcaccatttcattcagatattcatgattggttattgtttacctatgtgagaactaaaatacatcttttcctagctgatagcttg

SEQ ID NO: 15856 - DNA, 201 bp, Homo sapiens
tatgtatgggccatcaggatgctggcaggtgagatgggttaccctggaattcatgattaaccaaagagttgttgccttggtgcttctttgaaattgatgtygttagtaagtgtctggactcacatttggctatcatttgctttttctaaatcttcttttattccttaatttacctctgcactatcttttaatttccttaac

SEQ ID NO: 15857 - DNA, 201 bp, Homo sapiens
tcaggtgattcacccgcctcggcctcccaaaatgctgagattagaggcgtgagccaccgcacctgcccagttcctatttcttaaattcccatgatctcaaytaatatatgtaaataagaatattgcccaatagctcagatatataccttattagtattctagctccccccaccatgtaagtcataatgtgtttcataaagt

SEQ ID NO: 15858 - DNA, 201 bp, Homo sapiens
gtaacggtaaattttgtgtagcacagtgatttttctttaagtcataggaatgtgaagaacatagttacttgtaagcagggattattattaataagttaatkagtaaagctggggtgaatgatagcttcggaatatttgattgagtaggcttaaacaccttgaaactgcaggtgaactcaggtttggttcatgctttcagtg

SEQ ID NO: 15859 - DNA, 201 bp, Homo sapiens
ttaaaagtatggcacaattttctgaatgttttgtgatttttaaaaatgtagaataatagttttcagtttccatttcttcttcttcttttttttttttttttgagatagggtctcattctggtgcccaggctggagtgcagtggcacgatcttggctcactgcaacctctgcctcccaggccaaggaatcctctcacctcaa

SEQ ID NO: 15860 - DNA, 201 bp, Homo sapiens
tttgagggtatgtatattgggaagtggtgtagtatcaaggtagatatggtagaattttaatagttattttatacaaattaacatgtatcaccgtgaaaaakgtgggaaactgctatgttacagtctgttttaaggaagcaccaagatttctcagaaaaatagccagggccttattttcttaccataaggaaaatttattta

SEQ ID NO: 15861 - DNA, 201 bp, Homo sapiens
catataaagtaatagctaatgaaatagttaggttattagagtttggtcctatattgcaattgatgagaaatctgttgatgattgaaataaaatactacgamattgagaagaaaacacatctgttttgctttacaaatccattgatattcaaatggttgtgtctaaaaattaatatttgtagttgttctaccattagaatac

SEQ ID NO: 15862 - DNA, 201 bp, Homo sapiens
ttgacattatgcttgggcctgaaccaagttgcattattctttgccagactgaaccatcaggctctacagcagagccctctggtgggcgggggaattgatgmtgtgctgacttctgcacatccaaaccttccctccgtgcccctgcctcaggatcccatgagacccagacagccgcaagttcgacagcagcagagactcctc

SEQ ID NO: 15863 - DNA, 201 bp, Homo sapiens
taaaaggagtaagcagtttcattctttagaggctttgatcagcattccctgaatctacattttacatatgaaagaagcaggttaaaggtttagtcaattayggtgttgaatctgcatttttacataagattaagtaaacatagagtagaggaagaagtcaagtatatatttgtctctgataagtggagggatgacttctag

SEQ ID NO: 15864 - DNA, 201 bp, Homo sapiens
acctgctgctaggtagtcccatctgttgatgtcatttcacagggtttgggatactacattgccatttcctcaagaagtctccttggttccacctatggtayctgtgattccattgtcctccttggcctagacatcctatgttctctccactttgccctttcccctgaatagtacagaggagtttgatctgggagtctggaa

SEQ ID NO: 15865 - DNA, 201 bp, Homo sapiens
attttaaatagcacccccatgtcatcattctgagcctcagcacttgctacccccactgtagattctatatttatttatggcctggctcctccttagaatgyatgcttcatgacagcagaagctttttctatttttttcactgctacatcccagtgtcttgaagagtatgtggctcttagtaggcactgaaaaaaaaatctg

SEQ ID NO: 15866 - DNA, 201 bp, Homo sapiens; identical to SEQ ID NO: 3260

SEQ ID NO: 15867 - DNA, 201 bp, Homo sapiens
cgaacttgcgatgggatccagacttcatgatggattttattgagaatccctcagcccgcagcatcaactactcaatgctgggcaagatcctcagtgacaaygcggccaatcgctacagctttgtctgcaatacactcatgaatgtatgtatgggccatcaggatgctggcaggtgagatgggttaccctggaattcatgat

SEQ ID NO: 15868 - DNA, 201 bp, Homo sapiens
atgtaaatgtcgtctttttcaaaatcccttactgtgctgtactcacctgttttcggactgcagttttctgcaggtaactgaaactgtgggaagtgaaaccrcagagaagtggcgactactgaaaaaaaagaactatttctatttcttactcaatatcctgtatttagatgggactcagtacaatggttacactatctttct

SEQ ID NO: 15869 - DNA, 201 bp, Homo sapiens
tattaactcacatgaccacaaggtcccacaataggctgtctgctggctgaggagcaaggagagccagtccaagttccaaaactgaagaacttgggagtccrgtgtttgagggcaggaagcatccaacacgggagaaagatgtaggctgggaggctaggccagtctctcctgttcatgtttttctgcctgctttatattcgc

SEQ ID NO: 15870 - DNA, 201 bp, Homo sapiens
ggaatcatggtagaataagaaaataacggggcttgaaatcagactttggcacagttcctagcaacttactagctgtgtgacattgtgtgagttacttactmtgagcttcggtttccttctctgtaaaatagagatgaagtgtatgaggacaacctatggaacaaccagtggaactaacctatggaactaacatagtgcctg

SEQ ID NO: 15871 - DNA, 201 bp, Homo sapiens
gacggccgccttggtgcggcagctccagaagcagctttccagtaagtacccctgtgtgtcatggaacagacagctcccggaaaattaaaaataagccagcraaacgtaaagtggcggctctcccaagatggtaccatcttcctcagtacaatgttcatgttatttggtttagcccaaggtattttcattctgtcttcgttt

SEQ ID NO: 15872 - DNA, 201 bp, Homo sapiens
gctcctttgtcccaaccaacaccaaacaagctctgtcaaacatgctacagcggcgctcaggcgccatgatgcagccgccttctcttcatgcaatcacatcrcagcagcagttgatacagatgaagcttctgcagcagcagcagcaacagcgacttctcaggcaagcccagactcggcctttccaacaggtttgtccagacc

SEQ ID NO: 15873 - DNA, 201 bp, Homo sapiens
caaccactcagagaggtccagccacatacctcttccccaaatttctttgtcactagttttccaatcatgcttcttcctgtgctttactgtgttttttttttgttttgtttctttgtgtttggagacagtgttgctctctcacccaggctggagtgcagtggcgcaatcttggctcactgcaacctgcacctcccgagttcc

SEQ ID NO: 15874 - DNA, 201 bp, Homo sapiens
tctatttttgtggcctataactcaatgttcttcatagaagacagtgatccatgtttaagaaaacatcagcacttagtataaactcatgaaacacctatgcrtctgtacattaaaataaagtgtgaggtgagaatggggatttctttttctagtttctgtatacttgtattttctagcttttctaaaatggtcatgcagtat

SEQ ID NO: 15875 - DNA, 201 bp, Homo sapiens
tctagacagaagaacaactctataaattggaaaaggattaaaaattttaaaaaagttaaatttagggaatgtatttgtagtgtaatgactcagtatatctrtggtttataaaaataaatgttttctctatttgttttggcacctacatgtttattcagtcttttctcctgttacagttactaaatgaactgagtgttgtgg

SEQ ID NO: 15876 - DNA, 201 bp, Homo sapiens
aatagaaataggcctagaggataatcatcatgatatgttatcatttccctctgctggttcatgttgggatttgagatcttattggtattgcctgcattctsttagttattaatcttagatactgcttacaaggttgttaggtattaaaacctgtcaatgtttttcttgaaggtgagtgacctttcattccatgattcatta

SEQ ID NO: 15877 - DNA, 201 bp, Homo sapiens
ccttaaaaatgtaaatcgtagctcagatttattcacgaaactaaaaatattctaattcgtgtatgtactgattattgtttgttgcttaacagcattgtcamaaatatttgaagccattgttatcttcttctcaaggttctactaagttatttgacaaatgagtattttatctgtgaatctaagaaaatgacttgtttgatg

SEQ ID NO: 15878 - DNA, 201 bp, Homo sapiens
attaatttccccctctgtctctttttcttctttttaaatttaagagtcaattggaaactttcagagttgtttttaaaacgagtttaatcattaaagaatcyttagtagttaccactgaaaggaactccaaaaccttagtgaggcttgtttttcaactagggggagcctcctggtttttccctgccttctaattgtctgact

SEQ ID NO: 15879 - DNA, 201 bp, Homo sapiens
ttaaatttaagagtcaattggaaactttcagagttgtttttaaaacgagtttaatcattaaagaatccttagtagttaccactgaaaggaactccaaaacyttagtgaggcttgtttttcaactagggggagcctcctggtttttccctgccttctaattgtctgactcttaaatggtatatcttgttgcagtctgccaaa

SEQ ID NO: 15880 - DNA, 201 bp, Homo sapiens
gtatcatttagtttggccttgaaaatttttatcctgttaaatattcataaaatcatatttgacattaactttgttgtatttttaccttatattagtaaggrtaagtattatgcttaaaactattatttcacttcttcgtacttatgtgaacagtacactggattacgatgtgaaatgtttttcttattgcttgcaaatcaa

SEQ ID NO: 15881 - DNA, 201 bp, Homo sapiens
ccccttgattcctggacttgtgaatcctggctatgggagaaacagtactatatattggatactgattaagagcatacacggccttctggagaactttgccscagccctgcaaagtattgtcacctaattggcattgtaattgtaacttcaaaaggccatttcaccattctgtcaatccagctgcttcaggatgatggggaa

SEQ ID NO: 15882 - DNA, 201 bp, Homo sapiens
ctgcaaccggaaacgcaccaatccccaacccaaatactattacataaagttaacaatgcttaaatcctgatatgaagtcagtaaatcctatgtcacatgayaaaggaaaaggaaataaaattaagatattagtacaagtgtatacctgcacaaacatgtttttaacaaaagaaggaggaagtactcatgacagttacagtc

SEQ ID NO: 15883 - DNA, 201 bp, Homo sapiens
ctctcacccaggctggagtgcagtggcgcaatcttggctcactgcaacctgcacctcccgagttccagcagttcttgtgcctcagcctcccaagaagctgrgattacaggcacgcaccatcacactaggctaatttttgtatttttagtagagatggggtttcaccatgttggccaggtgtctcgaactcctgacctcaag

SEQ ID NO: 15884 - DNA, 201 bp, Homo sapiens
caaggaaataggtaatttaaagaatgaaggatgactgagtcagaacctcccagagctgttagctccttggcaaaaatgaatctgtgacttcatgggaacaygctcttggattaccatttaaattgagtaattaccctttgttcggtaattgatctcccaccctaaggaaatggtatcaccttggaatatgtttattttctc

SEQ ID NO: 15885 - DNA, 201 bp, Homo sapiens
gctaggccagtctctcctgttcatgtttttctgcctgctttatattcgctggcagctgattagatggtgcccaccagattaagggtgcgtctgccttcccmatcgcactgactcaaatgttaatctcctttggcaacaccctcacagacacaccgaggatcaatactttgcatctttcaatctaatcaagttgacactcag

SEQ ID NO: 15886 - DNA, 201 bp, Homo sapiens
ggaggtgggtgcttcacttattacttatatctggtatttctctgtttatttgaatgatgaggaaggtgctgattttatttgctaaaattatgattaggcaratataatgagctcggagatagtgtttgcagcttgatttttatgagagagggcagaagattggatggaggggtgaggaaatgaatcaccaatacaagcatg

SEQ ID NO: 15887 - DNA, 201 bp, Homo sapiens
tttttatgagagagggcagaagattggatggaggggtgaggaaatgaatcaccaatacaagcatggcagctggatctaaagaccaatgtacaaatgcaatsaattatgtacctatatgtaaaatggtgagaataggtattatttgcctgggaaattcctcctatactttccaatcctcagtatagtaaaatgctttttcta

SEQ ID NO: 15888 - DNA, 201 bp, Homo sapiens
ggcatgtattggaagccagctgacagcctctctgctgagcagaccattgataacttaggcttgtatttatggctttgttatcattgggaaaatctgtagtsttctttggaaggaataagttcaacagtctaaacacataggatattgatgagaaataatatttaatacattttgaaaatctttgagttctttatccatgta

SEQ ID NO: 15889 - DNA, 201 bp, Homo sapiens
tgaagtttactatgacaacctttaagaggctaaagtttcaggacttaaagatttttaaaaaagaaaatcaaaattaagcaacaaaagagcaataatatgtyataaaagcaaattaacataagaaagatgaggaaaaatatatattgactataatgttactcatgtaaatatcattaaaataaagtatttcgttgagaatca

SEQ ID NO: 15890 - DNA, 201 bp, Homo sapiens
gcctggcaggaagttatacaacaggactgtgtgtctgcatcgtggctgttctcaggcgctatcacagttgtctaatcttgaatcctgatcagacagcccasgtgtttgaagggttggtatatagcatgtcattgttgtttttccaatctcagaatgtataactagtgatgaaatattatagtggctttaaaagaaaaatag

SEQ ID NO: 15891 - DNA, 201 bp, Homo sapiens
taataatcactaatgcacttactagctttattaaataatattcttccataatgctgtagattatttttttaaaaaaaattacagatgtggatgagtctccytgtatcatcatttccctcccttcttctaaagtgggaatccccatcatgatttagcattttactttcttatgcatgtttttatacttctaatctatacgtt

SEQ ID NO: 15892 - DNA, 201 bp, Homo sapiens
taaatagttgatttttctgttttgtaaaaatggtaatatacatatatttgtctctacaaagaagcacaacagtatgtctcagggaccttgtatgatgctartgtccaggagtggtctttaaggatctggttgatttaattattccttggcatagtgtttggaggatcaagagccatttggattctttgggaagaacagttt

SEQ ID NO: 15893 - DNA, 201 bp, Homo sapiens
aagagctttatttctcacatcaacctcaagaaactgaaaatgtcatgactctgaattgcaaacttgtatccttcaatgacaaccaacacattttttaaaayataagttgtctacacagaaagagagtgtagaagattgtaattgctgccatttagtagatgactttagtcctctttgttagagtagtgcttcccaagcatt

SEQ ID NO: 15894 - DNA, 201 bp, Homo sapiens
tcataaaatcatatttgacattaactttgttgtatttttaccttatattagtaagggtaagtattatgcttaaaactattatttcacttcttcgtacttaygtgaacagtacactggattacgatgtgaaatgtttttcttattgcttgcaaatcaaagaagttgaggaaacactgactactatacgatggatacctaaac

SEQ ID NO: 15895 - DNA, 201 bp, Homo sapiens
ggatcacgaggtcaggagatcgagaccatcccggctaacacggtgaaaccctgtctctactaaaaatacaaaaaattagccgggcgtagtggcgggcgcctgtagtcccagctacttgggaggctgaggcaggagaatggcgtgaacccgggaagcggagcttgcagtgagccgagatcccgccactgcactccagcctgg

SEQ ID NO: 15896 - DNA, 201 bp, Homo sapiens
aaacctaacagactctgaataaatgtttatttactttagtcacaaaataatttttcgctttatagataatatcaggattttgtttaacttttattttagarcagatttattacaggtttattacaaaggtatattgcttggtgctgaggtttcaggttatgattgaaaccatcaggaagtgagcatagtactcagtaggta

SEQ ID NO: 15897 - DNA, 201 bp, Homo sapiens
tttttatttcctggtgactcatagaaggttctatagccccattcacttttctagaactttttcagactgtgtttacttttcctcttttttcacaaaaacarttttgctgtttagcaggtaactttttcatgtgttaatgagtttttttaaaatgaccagtaccctcactgaataacattaaatcaatgtgcattaaaagta

SEQ ID NO: 15898 - DNA, 201 bp, Homo sapiens
ctttttcagactgtgtttacttttcctcttttttcacaaaaacaattttgctgtttagcaggtaactttttcatgtgttaatgagtttttttaaaatgacyagtaccctcactgaataacattaaatcaatgtgcattaaaagtaggaaacctggtttctattacagattgtattagattcaggttcagcttgataaatgc

SEQ ID NO: 15899 - DNA, 201 bp, Homo sapiens
attgtctgactcttaaatggtatatcttgttgcagtctgccaaaatgttttaatgatgttacatcttgtagtgatttcctgattttccatttttgttgttktgtttttcatttgcatgtatgcaagtcaaagctcagtattttcttacagcattggaatgtgggtaaacctcattcattgttttataaaatagaaataggc

SEQ ID NO: 15900 - DNA, 201 bp, Homo sapiens
ctgtggatacctctgcttggaccattgcagagttcttctaactggtttccttgcttccacccttaactctaaaacacattttcaacatccactaaagtgawccttttaatatacgaatgattcacaggctttcagtgattttccacccactcagaataaaattcaccatccctacctagccttcaagatctgcagggtccc

SEQ ID NO: 15901 - DNA, 201 bp, Homo sapiens
  misc_feature (1)...(201): n = A,T,C or G, or insertion/deletion polymorphism (see Tables 1-2)
agtgatttcctgattttccatttttgttgttttgtttttcatttgcatgtatgcaagtcaaagctcagtattttcttacagcattggaatgtgggtaaacntcattcattgttttataaaatagaaataggcctagaggataatcatcatgatatgttatcatttccctctgctggttcatgttgggatttgagatcttat

SEQ ID NO: 15902 - DNA, 201 bp, Homo sapiens
  misc_feature (1)...(201): n = A,T,C or G, or insertion/deletion polymorphism (see Tables 1-2)
tggtttccttgcttccacccttaactctaaaacacattttcaacatccactaaagtgatccttttaatatacgaatgattcacaggctttcagtgattttncacccactcagaataaaattcaccatccctacctagccttcaagatctgcagggtcccatcttctcttccacccctttccctctgtttattgtggccaca

SEQ ID NO: 15903 - DNA, 201 bp, Homo sapiens
tgacacgagtcattttgaaggattaagagttagctgggaggtagggaaaattgtggtacaaataaagggagagtttatatgaagacatgaaagaatcagawttaccagggaatttagagtagcctgagaatctaataccagtttgtgtaaagaaaaaaagctaaagtcatggtcaagtttgagtttgcagtgtcagcggac

SEQ ID NO: 15904 - DNA, 201 bp, Homo sapiens
aatattaggaaacagtcaatttacaggtggcaattgaaccttggttttattttgttttactttgtttatttatattttttgagatggaatctcgctctgtygcccaggctggagtgcagtagtgcgatctttgctcactgcaacctctgtctctcgggttcaaacgattctcctgtctcagcctcctgagtacctgggatt

SEQ ID NO: 15905 - DNA, 201 bp, Homo sapiens
agccttaatcctcagcattctgatttttatccacacacccttctcatagctttcccttccagtgcttccagaaactgacccttctagtgacgtctgctacrgttgttttggaaacctaaatgggaaaggtaaacataaattcctgaactcaggatatatctaagacctcacagagtccccttatcctctttctgtctagtg

SEQ ID NO: 15906 - DNA, 201 bp, Homo sapiens
gataagttttgttatgacagttctcctaacaggtttctgcattaactgaatggcacacaatgacttgtcacagacaaaagattaaagcttttgattttccrtcctccacttttaataattttattttaattgtaggcttccattgtaatatttaattaatatttcagtgcctcctaatttcctcgggtttgaaacttgaaa

SEQ ID NO: 15907 - DNA, 201 bp, Homo sapiens
cctgacacacttgtagtcttttgaaatagaattcagaagagatccttttccatctctgcccactgcaagccaagcactgtttaagtcaaggaaaagtttamctcaaatgaatatttccaggggatttattagcactcttccttccatcttctcctttataaaaaacagctttgtacattgggataggaggtacctcagata

SEQ ID NO: 15908 - DNA, 201 bp, Homo sapiens
acacaaagaacctactaggtgcaaggatatggaagtgtccagtgggtgagctagacatgtaaacagataatttacttgtggtctagtaaatgtagcaattmagtatggtcagagtgttgtggaagtatgaaggaggaagtaactaattgcctagggtattcagaaaggattcacagagggtctgtatttttagctgggtct

SEQ ID NO: 15909 - DNA, 201 bp, Homo sapiens
ttgttgttgttctgtgggtggttcttagccaataaaagttgaaagtggctgccatagccagtgtgatgctagtagagatctttaagtcaagagttgacatmgcttatttttgtacttttaaagaaagcagcttgcatttaattagaaagaatggacctaaagggaacctcgttgtcagggaaatgaattagaactggttat

SEQ ID NO: 15910 - DNA, 201 bp, Homo sapiens
cgggaggctgatgtgggaggatccccttgagcccaggagtttgaggctgccatgaactgtgattgtgccactgcactccagcctgggtgacgtaagactcygattcttaaaaaagaaaaattgctcaataaatgttgaactgaatgttaattattgcttttacatgtaagctttttctctttaggatatggaggcacagca

SEQ ID NO: 15911 - DNA, 201 bp, Homo sapiens
cgctactcgggaggctgatgtgggaggatccccttgagcccaggagtttgaggctgccatgaactgtgattgtgccactgcactccagcctgggtgacgtragactctgattcttaaaaaagaaaaattgctcaataaatgttgaactgaatgttaattattgcttttacatgtaagctttttctctttaggatatggagg

SEQ ID NO: 15912 - DNA, 201 bp, Homo sapiens
atggcataaataaaaagtgcctcgcttaaattaataaaattttcctgaccataacttctgtgatttttttaagggttttcagtttcttttaggtttcaccttttttttttttattttatttttttattattattatactttaagttttagggtacatgtgcacaatgtgcaggttagttacatatgtatacatgtgccatg

SEQ ID NO: 15913 - DNA, 201 bp, Homo sapiens
aaaagtgcctcgcttaaattaataaaattttcctgaccataacttctgtgatttttttaagggttttcagtttcttttaggtttcaccttttttttttttwttttatttttttattattattatactttaagttttagggtacatgtgcacaatgtgcaggttagttacatatgtatacatgtgccatgctggtgtgctgc

SEQ ID NO: 15914 - DNA, 201 bp, Homo sapiens
catgaagtgacttctttcatgatatttgaaatatcatgtcagaaattatgtcaagaggtctgccaatgcctacattttattgaagatgattaaccctgactatacagggtttttctataataatttttctataataaattctatttttaaaaacttcattaaattttattgagaaagcctctacttcatgtaaaagtatcc

SEQ ID NO: 15915 - DNA, 201 bp, Homo sapiens
gaagtgacttctttcatgatatttgaaatatcatgtcagaaattatgtcaagaggtctgccaatgcctacattttattgaagatgattaaccctgactatacagggtttttctataataatttttctataataaattctatttttaaaaacttcattaaattttattgagaaagcctctacttcatgtaaaagtatccatt

SEQ ID NO: 15916 - DNA, 201 bp, Homo sapiens
agtgacttctttcatgatatttgaaatatcatgtcagaaattatgtcaagaggtctgccaatgcctacattttattgaagatgattaaccctgactatacagggtttttctataataatttttctataataaattctatttttaaaaacttcattaaattttattgagaaagcctctacttcatgtaaaagtatccatttg

SEQ ID NO: 15917 - DNA, 201 bp, Homo sapiens
gtgacttctttcatgatatttgaaatatcatgtcagaaattatgtcaagaggtctgccaatgcctacattttattgaagatgattaaccctgactatacagggtttttctataataatttttctataataaattctatttttaaaaacttcattaaattttattgagaaagcctctacttcatgtaaaagtatccatttga

SEQ ID NO: 15918 - DNA, 201 bp, Homo sapiens
tgacttctttcatgatatttgaaatatcatgtcagaaattatgtcaagaggtctgccaatgcctacattttattgaagatgattaaccctgactatacagggtttttctataataatttttctataataaattctatttttaaaaacttcattaaattttattgagaaagcctctacttcatgtaaaagtatccatttgaa

SEQ ID NO: 15919 - DNA, 201 bp, Homo sapiens
acttctttcatgatatttgaaatatcatgtcagaaattatgtcaagaggtctgccaatgcctacattttattgaagatgattaaccctgactatacagggtttttctataataatttttctataataaattctatttttaaaaacttcattaaattttattgagaaagcctctacttcatgtaaaagtatccatttgaatg

SEQ ID NO: 15920 - DNA, 201 bp, Homo sapiens
aaagaccccctgccaaaagaagatcatacaatcaagcctgacatcagtgaggctggaaagaatgctcctcctacaggatgcactgcagtcgcatggcaacrggcgatgatgtgtaatccttaactggaaaagcaacttaatagttaggaacaacaataccacctaccagagaataatagtaccttccttatgcatgtgaga

SEQ ID NO: 15921 - DNA, 201 bp, Homo sapiens
cttctttcatgatatttgaaatatcatgtcagaaattatgtcaagaggtctgccaatgcctacattttattgaagatgattaaccctgactatacagggtttttctataataatttttctataataaattctatttttaaaaacttcattaaattttattgagaaagcctctacttcatgtaaaagtatccatttgaatgt

SEQ ID NO: 15922 - DNA, 201 bp, Homo sapiens
atttatttttaatagagatgggatcttgctgtgttacccaggctggaatgtagcggctattcacatgtatgatcatagtgcactgcagccccaaactcctscctcaagtaatcctcccacttcctcctcccaactcactgggatgcaggtgcacaccactgcacctagctccagctccagttgatacttttaaatataaaa

SEQ ID NO: 15923 - DNA, 201 bp, Homo sapiens
tctttcatgatatttgaaatatcatgtcagaaattatgtcaagaggtctgccaatgcctacattttattgaagatgattaaccctgactatacagggtttwtctataataatttttctataataaattctatttttaaaaacttcattaaattttattgagaaagcctctacttcatgtaaaagtatccatttgaatgttt

SEQ ID NO: 15924 - DNA, 201 bp, Homo sapiens
gagcgggggcgcagtcccttcagtggagaccctggtctctccgttttctttcgggtcgcgctcatcttcgccctgttaggggctgaggagggtaactggaragactccttgggcttcagccgacgtcgtttactgtcctcctctgtcttcctttctcctgacccctgcctggcctggccgttcttcccgcacggaacgaga

SEQ ID NO: 15925 - DNA, 201 bp, Homo sapiens
tctctccgttttctttcgggtcgcgctcatcttcgccctgttaggggctgaggagggtaactggagagactccttgggcttcagccgacgtcgtttactgycctcctctgtcttcctttctcctgacccctgcctggcctggccgttcttcccgcacggaacgagatgggtggggagcagagtgggggtctctgctcgctt

SEQ ID NO: 15926 - DNA, 201 bp, Homo sapiens
caatacatactgaagtgccagcttttcatcagacccatctgttattcacttagttatatactcattatataatacactctgttataaactcagttatatayggagttacatgttcagcacatactgattgtctaccatgtgccaggcactgatttaggtactgaggatggaataggggacacttactttgcttctgttttg

SEQ ID NO: 15927 - DNA, 201 bp, Homo sapiens
gccctgccaacactcccatttttaagtcacgtcttaggtgcccattccctaccccacttgattattagctttttgtggttattttttcttttaggtaaaaygtacatatattaagatgcacacaaatcttagctatatgacgaatggcaatacctgtgtaacccacacctttaccgtgttatagatttcctttgccccaga

SEQ ID NO: 15928 - DNA, 201 bp, Homo sapiens
ttcatgatatttgaaatatcatgtcagaaattatgtcaagaggtctgccaatgcctacattttattgaagatgattaaccctgactatacagggtttttctataataatttttctataataaattctatttttaaaaacttcattaaattttattgagaaagcctctacttcatgtaaaagtatccatttgaatgttttat

SEQ ID NO: 15929 - DNA, 201 bp, Homo sapiens
tttgaggccaggactttgcaaccagcctgtgcaataaagccatatcccatctcttaaaaaaaaaaaaaaaaacttaagccaggcctcgtggcatgtgcctrtagtcccgctactcgggaggctgatgtgggaggatccccttgagcccaggagtttgaggctgccatgaactgtgattgtgccactgcactccagcctggg

SEQ ID NO: 15930 - DNA, 201 bp, Homo sapiens
tcatgatatttgaaatatcatgtcagaaattatgtcaagaggtctgccaatgcctacattttattgaagatgattaaccctgactatacagggtttttctataataatttttctataataaattctatttttaaaaacttcattaaattttattgagaaagcctctacttcatgtaaaagtatccatttgaatgttttatc

SEQ ID NO: 15931 - DNA, 201 bp, Homo sapiens
tgatatttgaaatatcatgtcagaaattatgtcaagaggtctgccaatgcctacattttattgaagatgattaaccctgactatacagggtttttctataataatttttctataataaattctatttttaaaaacttcattaaattttattgagaaagcctctacttcatgtaaaagtatccatttgaatgttttatccca

SEQ ID NO: 15932 - DNA, 201 bp, Homo sapiens
tatttgaaatatcatgtcagaaattatgtcaagaggtctgccaatgcctacattttattgaagatgattaaccctgactatacagggtttttctataataatttttctataataaattctatttttaaaaacttcattaaattttattgagaaagcctctacttcatgtaaaagtatccatttgaatgttttatcccagaa

SEQ ID NO: 15933 - DNA, 201 bp, Homo sapiens
tccgaagataccccatagcgcgagtttttgtaattatatatatggtaagtaaatttatttgaaaaaacaatgatgcacttgatttttaactagtttttttktttgtttgtttgtttgttttggctacagatcttattgatattttagcaatcaatcaatttttttttgttttttttgaaacagggtctggctcttttgctg

SEQ ID NO: 15934 - DNA, 201 bp, Homo sapiens
aagataccccatagcgcgagtttttgtaattatatatatggtaagtaaatttatttgaaaaaacaatgatgcacttgatttttaactagtttttttttttstttgtttgtttgttttggctacagatcttattgatattttagcaatcaatcaatttttttttgttttttttgaaacagggtctggctcttttgctgaggc

SEQ ID NO: 15935 - DNA, 201 bp, Homo sapiens
agataccccatagcgcgagtttttgtaattatatatatggtaagtaaatttatttgaaaaaacaatgatgcacttgatttttaactagtttttttttttgtttgtttgtttgttttggctacagatcttattgatattttagcaatcaatcaatttttttttgttttttttgaaacagggtctggctcttttgctgaggct

SEQ ID NO: 15936 - DNA, 201 bp, Homo sapiens; identical to SEQ ID NO: 3264

SEQ ID NO: 15937 - DNA, 201 bp, Homo sapiens; identical to SEQ ID NO: 3265

SEQ ID NO: 15938 - DNA, 201 bp, Homo sapiens
aatgtcccttgcagggcaaaatcatcccagttgagaaccaatgtcctgagatgcctagaaatgtgtagaaatgggattgctgagctgtagggtttaacaaygttcagctacactagtaatgccaaagtggctttctgcagaggttgtgccaatttatactctaaccagctatggttaagaacttcttttgctccacatttt

SEQ ID NO: 15939 - DNA, 201 bp, Homo sapiens
aggccgaggcgggcggattgcctgaggtcaggagttcaagaccagtctggccaacatggtgaaaccctgtgtctactaaaaatacaaaaaaattagtcagrtgtggttgcaggcacctgtaatcccagccactcaggaggctgaggcaggggagttgcttgaaccagggaggtggaggttgcagtgaaccgagattgcact

SEQ ID NO: 15940 - DNA, 201 bp, Homo sapiens
ggagtctcgctttgttgcccaggctggagtgcagtgacgctatcttagctcactgcaacctccacctcctgggttcaagcgattctccatttcagcctccygagtagctgggactataggtgtgcaccaccacccttggctaatttttgtattttttggtagagatagggtttcatcacgttggccaggctggtcttgaac

SEQ ID NO: 15941 - DNA, 201 bp, Homo sapiens
aagtgctgggattacaggcgtgagccactgtgcctggccttttttaatgtttttatttatttatttatttatttttttgtgagacggagtctcgctttgtygcccaggctggagtgcagtgacgctatcttagctcactgcaacctccacctcctgggttcaagcgattctccatttcagcctcccgagtagctgggacta

SEQ ID NO: 15942 - DNA, 201 bp, Homo sapiens
caagccccaaataatgataaaagcatttatttacctctatgacatttttatattattatttcaagtaatcatttaacagtctgctataaaaattgttcttytgtggtagccacataaatagtttaaatgagttaaatttatcagcatcattagatattaccacaggaagatttgttttgactgtgactcttctctctcctc

SEQ ID NO: 15943 - DNA, 201 bp, Homo sapiens
tacactgtagacatgagttatttcacatgatgcattttcctttagaataatgcaggatcaaagtgaaggtaacagcctgcagaatcaagctctgcagactyttcaggagagactgcatgaagcggatgccactctgaagagagagcaggagagctataaacagatgcaggttagaatgagagacagcagattcctattgtt

SEQ ID NO: 15944 - DNA, 201 bp, Homo sapiens
tttgttttttattaatttaagtttttctgattccagattaatctggctcatttatttcaggagaaaattgtatgtaatatgtaaagagttttactcttagrtgaatatttgcatttagttcagtcccagccctgtctacacgtgggaatcacttgtgtgataccttgtgctgtctgagctccatatgcagtcacattccat

SEQ ID NO: 15945 - DNA, 201 bp, Homo sapiens
ccgtactgggctaaacctcacctgagagcaataaaagcaggagctgtaattacttccaatatttaatttggagacaataaagctttgagtctacgaggaayaggctttggagtaatgtggactccttattaggacagatgatcttagacaagttacttaaactgtttgaaccttactttcctcaactcaaagatttgagac

SEQ ID NO: 15946 - DNA, 201 bp, Homo sapiens
ctctggttttgaaggcctagatagcagcactgccagtagcatggagctggaagaacttcggcatgagaaagagatgcagagggaggaaatacagaagctgrtgggccagatacatcagctcagatccgaattacaggtaagattcatggtggttcagcttagtagacaccatttaccctcaggtgttaacagtttgagagg

SEQ ID NO: 15947 - DNA, 201 bp, Homo sapiens
gatatccgaatggatggttgtaaaatatgtttcaaagctaaatgatatcattaattatgatataaaaatttgtcacagagcgagtttgctgcacgccttartaaagtggaaatggaacgtcagaatttagcagaagcaattacactggccgaaagaaaatactcagatgagaagaagagggttgatgaactgcagcagcaa

SEQ ID NO: 15948 - DNA, 201 bp, Homo sapiens
aggatctgcatgaccaaatagctgggcagaaagcatccaaacaagaactagagacagaactggagcgactgaagcaggtcaggatttgagattgatgactkctgagactctgtcctctagcggtcatatgagcagacctcccaggaaagcagcttactgaaatttttagagtatgggcttagggttaccccacaagttcct

SEQ ID NO: 15949 - DNA, 201 bp, Homo sapiens
atgatatttgaaatatcatgtcagaaattatgtcaagaggtctgccaatgcctacattttattgaagatgattaaccctgactatacagggtttttctatmataatttttctataataaattctatttttaaaaacttcattaaattttattgagaaagcctctacttcatgtaaaagtatccatttgaatgttttatccc

SEQ ID NO: 15950 - DNA, 201 bp, Homo sapiens
tgtatgaagaaaaatagaatggggtgaaggtatagagtaggttggagggtgaccagcaaagttgtctctgcagaagtggcagggcctgaatgaagtggtgggccatgggaaatacagggcgggatttctgtgcagtaggttcagcaagaagcccaaagcttctgagtgggcgcgtgcttagtgtgttcgagaactagactg

SEQ ID NO: 15951 - DNA, 201 bp, Homo sapiens
ttgatttttgagacggagtgtcgctctgttgcccaggctggagtgcagtggcgcgatctcggctcactgcaacctccgcctcctgagttcaagcaattctyctgcctcagcctcccgagtagctgggattacagacgttcaccactatggctggctaatttttgtatttttagtagagacagggttttaccatgttggcca

SEQ ID NO: 15952 - DNA, 201 bp, Homo sapiens
tatgaagaaaaatagaatggggtgaaggtatagagtaggttggagggtgaccagcaaagttgtctctgcagaagtggcagggcctgaatgaagtggtgggccatgggaaatacagggcgggatttctgtgcagtaggttcagcaagaagcccaaagcttctgagtgggcgcgtgcttagtgtgttcgagaactagactggc

SEQ ID NO: 15953 - DNA, 201 bp, Homo sapiens
attttttttttttttttttgtatttttagtagagacagggtttcactgttagccaggaggctcttgatctcctgaccttgtgatccgcccgcctcggcctyccaaagtgctgggattacaggcgtgagccactgtgcctggccttttttaatgtttttatttatttatttatttatttttttgtgagacggagtctcgctt

SEQ ID NO: 15954 - DNA, 201 bp, Homo sapiens
aggatggcaggcaggggacagctaagagatatgtgggagatagaatatatgacatgtggagatttaactggaaggatgggggaaaaaggcaaatggaatcyaggatgactccaggtttttggtttaagtgtatgaatgatgtttccttgtgttaataaaaggggaaacaggaaagagaacaggttagggttaaaggagagt

SEQ ID NO: 15955 - DNA, 201 bp, Homo sapiens
agtggtcagagattggagagaaccaggaggagactgatgccatccaatgaagccaagcagagggagagtttcaagtggtgcatgatcaccaaccacagcasgcggctctgatgtgacaagtcccgagctaaattcctggacttggcaactaggaggtccctggggacctctcaacagagagttccggggtgcgctgggagc

SEQ ID NO: 15956 - DNA, 201 bp, Homo sapiens
atagtaaatattgtaggctatgttggctacctgtagtctccatcacatattctttgtctttattatttatgatccttttaaaatgtaaaaaaaaaatttarcttgcaggctgtacaaaaacaggcccacggaccatcatttgtgagcaccttcttcatagcactgccaggttagcctcctaaaatgcatctctagtcatgt

SEQ ID NO: 15957 - DNA, 201 bp, Homo sapiens; identical to SEQ ID NO: 3271

SEQ ID NO: 15958 - DNA, 201 bp, Homo sapiens
ataatagtctaaggaaaaattgattaacagcttgaaagaaggctctggttttgaaggcctagatagcagcactgccagtagcatggagctggaagaacttyggcatgagaaagagatgcagagggaggaaatacagaagctgatgggccagatacatcagctcagatccgaattacaggtaagattcatggtggttcagct

SEQ ID NO: 15959 - DNA, 201 bp, Homo sapiens
atatttgaaatatcatgtcagaaattatgtcaagaggtctgccaatgcctacattttattgaagatgattaaccctgactatacagggtttttctataataatttttctataataaattctatttttaaaaacttcattaaattttattgagaaagcctctacttcatgtaaaagtatccatttgaatgttttatcccaga

SEQ ID NO: 15960 - DNA, 201 bp, Homo sapiens
atgaagtgacttctttcatgatatttgaaatatcatgtcagaaattatgtcaagaggtctgccaatgcctacattttattgaagatgattaaccctgactatacagggtttttctataataatttttctataataaattctatttttaaaaacttcattaaattttattgagaaagcctctacttcatgtaaaagtatcca

SEQ ID NO: 15961 - DNA, 201 bp, Homo sapiens
tctgattatttacactgttaataattatttattatggatctttgtttacaatacatactgaagtgccagcttttcatcagacccatctgttattcacttarttatatactcattatataatacactctgttataaactcagttatatacggagttacatgttcagcacatactgattgtctaccatgtgccaggcactgat

SEQ ID NO: 15962 - DNA, 201 bp, Homo sapiens
gtttgattttcttaatagttcacagaaggagcctaccgggagggtggaaatcagaaaggaaaaaggcaagacacctgtctttcagagctctcagacatcargtgtcagttctgtgaaccccagtgtaaccaccatcaaaaccattgaagaaaattcttttgggagccaaacccacggtagttaatcagtcctcttatttct

SEQ ID NO: 15963 - DNA, 201 bp, Homo sapiens
attgtgccactgcactccagcctgggtgacgtaagactctgattcttaaaaaagaaaaattgctcaataaatgttgaactgaatgttaattattgcttttmcatgtaagctttttctctttaggatatggaggcacagcaagttaatgaagcagaatcagcaagagaacagttacaggatctgcatgaccaaatagctggg

SEQ ID NO: 15964 - DNA, 201 bp, Homo sapiens
ttagaaaggaaagatttatctaagaatatttcagtcaaattatcttttttgtgcttgactaaagctgacgctctaaaaattattctgccttatcacttgtrcactgtagacatgagttatttcacatgatgcattttcctttagaataatgcaggatcaaagtgaaggtaacagcctgcagaatcaagctctgcagactct

SEQ ID NO: 15965 - DNA, 201 bp, Homo sapiens
tggggcaaagaaaattgaagacgtgtaagttcccaattttgtcaataaggaaagtactaaaggcactcaaagtagaaactgtacgtgctctgagaaaaatrtgtttggttttgcttgtatagagaaatttaaattttttaatagaattaaacaaagcaagagcaagagttgaaaagtggaatgctgaccattcaaagagtg

SEQ ID NO: 15966 - DNA, 201 bp, Homo sapiens
aacttgtgaaaagatgccactgataaagctacatttttttaaaaaggacacagtaagaactttccccgtgttttcacctgagttcttttgtaacagtggtracaaaagttcttttcaacctggtatagaaaattcatctaatgccatttgagtctacatttgctctgttctatgatttgcttcttatagaagtatcttgta

SEQ ID NO: 15967 - DNA, 201 bp, Homo sapiens
gaaacaacccaaatgtccatcagcaggtaatggataaacaaattgcaaaccattcggcaaactaacacaactcagatgaatttttttttttaaaagccatrtgcaaaaggattcatactgtgtgattccactcaggaaattcaagaataggcaaaactaaattctgctaatagaaatcagaatagtgattgtctagggtga

SEQ ID NO: 15968 - DNA, 201 bp, Homo sapiens
acatgaatatttgtaacatgcttgttcataaatagcccaaattggaaacaacccaaatgtccatcagcaggtaatggataaacaaattgcaaaccattcgkcaaactaacacaactcagatgaatttttttttttaaaagccatatgcaaaaggattcatactgtgtgattccactcaggaaattcaagaataggcaaaac

SEQ ID NO: 15969 - DNA, 201 bp, Homo sapiens
gagttgcttcttaccgatgagctaagaaagtgatttcttaagatggaatccacttttggtgaagatgctgtgaacattgttgaaatgacaacaaagaattkagaatactacattaacttagttgatgaagcactggcagggtgttaaaggattgactccagttttgaaagatgttctgatgtgagtaaaatgctatcaaac

SEQ ID NO: 15970 - DNA, 201 bp, Homo sapiens
tcaagtctcattatttaattaaattaattaatttatttatttttattttttgagacagagcctgattctgttgcccagactggagtgcagtggcctgatckcagctcactgcaacctctgcctcttgggttcaagcaattcttgtgccttggtctcccaagtaactgggattacaggtgcatgccagcacactgggctaat

SEQ ID NO: 15971 - DNA, 201 bp, Homo sapiens
gaggccaaggtgggcagatcacttgaggccaggagttcaagaccagccaggccaacatagcaaaaccctgtctctattgaaaatacaaaaaaattagctgkgcatggtggtgcagacctgtaataccagctacttgagaggctgagacaggagaatcacttgaacccagaaggcagaggttgcagtgagccaagattgtgc

SEQ ID NO: 15972 - DNA, 201 bp, Homo sapiens
ccgcttcagctcagcagtttgagaccagcctgggcaacatagtgagaccttgtctctacaaaaaatcaaaaaattaggcgtggtggcacacacctgtagtyctagctactcagaggctgatatgggaggatcacttgcgcctgggaggtcaaggctgcagtgagctctcagtgcacctctacactccaccttgagtgacag

SEQ ID NO: 15973 - DNA, 201 bp, Homo sapiens
ttctgttttgtttgtgcctcactttgcaggagttccactatatagaagaagatctttatcgaacaaagaacacattgcaaagcagaattaaagatcgagaygaagaaattcaaaaactcaggaatcaggtatgaatcactattcacaacttgtgaaaagatgccactgataaagctacatttttttaaaaaggacacagta

SEQ ID NO: 15974 - DNA, 201 bp, Homo sapiens
cttcaggagagactgcatgaagcggatgccactctgaagagagagcaggagagctataaacagatgcaggttagaatgagagacagcagattcctattgtwacttggacacggaaaaaatgactttatgctgtttcatagcacattaactgtttaatataattctgcaatgcatttcagaaaattctgtttctgtgacaaa

SEQ ID NO: 15975 - DNA, 201 bp, Homo sapiens
tcacttaagacatactttttataaggctattgctgccatagattccttagttggatcttgaggcacagtcaattgagaaccttctggaaaagattcactayactagatgccattaagaacatttgtgattcatgggaggaggccagaatatcaacattaacaggagtgtggaagaagctgattccagccctcaaggatggc

SEQ ID NO: 15976 - DNA, 201 bp, Homo sapiens
tataaacagatgcaggttagaatgagagacagcagattcctattgttacttggacacggaaaaaatgactttatgctgtttcatagcacattaactgtttratataattctgcaatgcatttcagaaaattctgtttctgtgacaaaaatcagatatttgaaaatttagcttgatccttgctaaatgtatttaattttatg

SEQ ID NO: 15977 - DNA, 201 bp, Homo sapiens
ggttagaatgagagacagcagattcctattgttacttggacacggaaaaaatgactttatgctgtttcatagcacattaactgtttaatataattctgcartgcatttcagaaaattctgtttctgtgacaaaaatcagatatttgaaaatttagcttgatccttgctaaatgtatttaattttatgtgttgagagacaat

SEQ ID NO: 15978 - DNA, 201 bp, Homo sapiens
ggtattgacactttggttttagaaggttcacaggtgtatctaatgagcagtcagggttgcaaaccactggtctgggctagcttttcaacaggtgaaagtarttcagtcctgaaagtaaatatcaggtagtgtgtgtctcttaattttaacacaatatatccaaagtattaattatttcaatatgtagtcaatattaaaagt

SEQ ID NO: 15979 - DNA, 201 bp, Homo sapiens
atgaacaaggaaacaggctcagatttaatagctttcccaagatactgtagctaggaaatgtcagagctggggttttaaacttagatcaaacttttttcaawactgtattgatgtagacaatgattcttgccctcatgaagctgacttacagtgtcattgaggaggcaaaattgactcccataaaacagcgttatcggagtg

SEQ ID NO: 15980 - DNA, 201 bp, Homo sapiens
aatcaggtatgaatcactattcacaacttgtgaaaagatgccactgataaagctacatttttttaaaaaggacacagtaagaactttccccgtgttttcasctgagttcttttgtaacagtggtgacaaaagttcttttcaacctggtatagaaaattcatctaatgccatttgagtctacatttgctctgttctatgatt

SEQ ID NO: 15981 - DNA, 201 bp, Homo sapiens
aatgtagcggctattcacatgtatgatcatagtgcactgcagccccaaactcctccctcaagtaatcctcccacttcctcctcccaactcactgggatgcrggtgcacaccactgcacctagctccagctccagttgatacttttaaatataaaaccaaacttaactttcagtttgctaatattccctttaggatttttgc

SEQ ID NO: 15982 - DNA, 201 bp, Homo sapiens
atctttgatttattaggaatttactctgatgtgtgaggtgagctacagatccaaccgaattttcttccatatggctacttttttcctagtatcattttttwaaatagtttattgatttgagatgtcacctttatcatgtcctaaattctcaaggtatctagatctgcttctggacttttgttctcttccattagtcacttt

SEQ ID NO: 15983 - DNA, 201 bp, Homo sapiens
ctcagttatatacggagttacatgttcagcacatactgattgtctaccatgtgccaggcactgatttaggtactgaggatggaataggggacacttacttygcttctgttttgtttgtgcctcactttgcaggagttccactatatagaagaagatctttatcgaacaaagaacacattgcaaagcagaattaaagatcga

SEQ ID NO: 15984 - DNA, 201 bp, Homo sapiens
aaactcagttatatacggagttacatgttcagcacatactgattgtctaccatgtgccaggcactgatttaggtactgaggatggaataggggacacttaytttgcttctgttttgtttgtgcctcactttgcaggagttccactatatagaagaagatctttatcgaacaaagaacacattgcaaagcagaattaaagat

SEQ ID NO: 15985 - DNA, 201 bp, Homo sapiens
ccttgcctattttgtgaaatacttacagatggtcacgtgatgtgctagcagaaagtcaaaagaaggagcaaaaaccaccaattggtttaatcctttttctrtatttactaaatatttattgagtacctactgtatctgaagtattgcaccatttttgttaatcaagaattaggccaggtgaggtagttcatgcttgaaatc

SEQ ID NO: 15986 - DNA, 201 bp, Homo sapiens
tattttattttatttttgagacagagtcccacactatccaggctggagtgcagtggtacgatcttggctcactgcaccttccacctcctgggttcaagcarttctcctgcctcagcctcctgagtagctgggattacaggcatgcgctaccacgctcagctaatttttgtatttttagtagagatggggtttcaccatgtt

SEQ ID NO: 15987 - DNA, 201 bp, Homo sapiens
taagaaaacattcatcttagtggaaagaaacagataattgacgtaataaggttattaatgcagtacaatgggagcttgagagaagaatcccttaaaacttkcctgaggctgtcaaagatcactggactgaggagatgtggtataaagagaaacttgaaagatgaataggaagactcatgatagggaagagatttccgagag

SEQ ID NO: 15988 - DNA, 201 bp, Homo sapiens
agaattaccccgaaatttcagacctttgacatcagtgtggttgtgctgattgccaggttcataattgtgatttcattttcctaagaaaaatctaatgatamatcttcctattaatgattgatcagtcttccataaagtcaccaagatatttttttaaccgtgaaaatgtaaaatgtacagaaaataatgacactcatgtgc

SEQ ID NO: 15989 - DNA, 201 bp, Homo sapiens; identical to SEQ ID NO: 3267

SEQ ID NO: 15990 - DNA, 201 bp, Homo sapiens
tggaatctcgtatcatttcggtactaccatgagggaattaaatttgtcactatgaatcgtgttctgggccctacatcagcctctgaaacgacacattattyctgtctagaatattttcccatctcttcttcaccgaacattggttaaactctctttcagaataccaactataactgttctaaaagtgttttctaaccaact

SEQ ID NO: 15991 - DNA, 201 bp, Homo sapiens
gctaaacttactcatatctgttcatgtctttttggtgagattatgaaaaatacttgttttatttaatatatcagcatcattaatgacattgacccattttyttacccttctcaaaatttatgcaatgtataataagtgttaggtctaacaaaatgaaagaattgtaaataattacaatagctattgtttactgagcacgta

SEQ ID NO: 15992 - DNA, 201 bp, Homo sapiens
cgggcactgtcatgagatggtgcccatgagatgtgatttctggcacacgacaaagtggtgaggcacttagtgatggaatctcgtatcatttcggtactacyatgagggaattaaatttgtcactatgaatcgtgttctgggccctacatcagcctctgaaacgacacattatttctgtctagaatattttcccatctcttc

SEQ ID NO: 15993 - DNA, 201 bp, Homo sapiens
ttctgtgtttgggagatgggttttcactatgttggccaagctggtctcaaactcctgaccttgagtaatccgccctcttcggcctcccaaagtgctgggaytacaggtgtgagccactgcacctggcataataacaagtttttaagaaggaaagcgtggggagtacaaaaaaaaattgaatggcatcagaaagcattcaga

SEQ ID NO: 15994 - DNA, 201 bp, Homo sapiens
gctataaacagatgcaggttagaatgagagacagcagattcctattgttacttggacacggaaaaaatgactttatgctgtttcatagcacattaactgtytaatataattctgcaatgcatttcagaaaattctgtttctgtgacaaaaatcagatatttgaaaatttagcttgatccttgctaaatgtatttaatttta

SEQ ID NO: 15995 - DNA, 201 bp, Homo sapiens
tttgttctcttccattagtcactttgtctgtttatgcatcagtaccacattgcttttaatttctgagattttatatgttttaatgtctttatgacccgttytccttttcagagcttctggcttttctttttcttttctttttttttttgagccatggtttcactctgtcacccaggccagaatgcagtgatgcggtcacag

SEQ ID NO: 15996 - DNA, 201 bp, Homo sapiens
ttgagccatggtttcactctgtcacccaggccagaatgcagtgatgcggtcacagctcactgcagcctcgacctcctcaggctcaggtaattctcccacgycaacctcctgagtagctgggattacaggcacgcaccaccgagcctggctaatttttttatattttgtagagatgaggtctcactctgttgctcaggctgg

SEQ ID NO: 15997 - DNA, 201 bp, Homo sapiens
ggctaatttttttatattttgtagagatgaggtctcactctgttgctcaggctggtcttgaactcctggactcaagcaattcacccacttcagcctccccragtgctagaattacagttgtgagctaccgtgcccaacctggcttttctttcttacagttttccatatgaatactagaataactttacatagtttttttta

SEQ ID NO: 15998 - DNA, 201 bp, Homo sapiens
cattttcctaagaaaaatctaatgataaatcttcctattaatgattgatcagtcttccataaagtcaccaagatatttttttaaccgtgaaaatgtaaaaygtacagaaaataatgacactcatgtgcctaccacccagacttaccaaagcctttatcattagctgatagagtcacacgttcacattccctgtaatcatag

SEQ ID NO: 15999 - DNA, 201 bp, Homo sapiens
ataccaactataactgttctaaaagtgttttctaaccaacttcatgtgtatctagcagttttaatcactctgcattataatcaactgattattttgcatasacgtgcatattgtgaatgtgttgaagttcagagctgactcctctcaactgaattctgtaggagtagcaagtctttattaccttccattgcactgagctca

SEQ ID NO: 16000 - DNA, 201 bp, Homo sapiens
gatcccagctattcaggaggctgaggcaggagaattgcttgaacctgggaggcggaggttgcagtgaggtgagatcacaccattgcactccagtctgggcrgcagagcaaaactccgtctcaaaaacaaaagcaagcttgtccgacccatagtcaacccaacacagaattcgtaaacttaaatcattatgagatttttttt

SEQ ID NO: 16001 - DNA, 201 bp, Homo sapiens
tacaaaagcttctagattagctatttgcaggttaatgccaaccagactctttttttccccagtcacatagttgacacccacctaatctttcgtaacttctktaattccactaaaaaaagatttaggccgggcacggtggctcacacctgtaatcccagcactttggggaggctgaggcaggcggatcacctgaggtcagga

SEQ ID NO: 16002 - DNA, 201 bp, Homo sapiens
cacagttcgttttttgcttaatacctgggtatttcactatatagattttaccttgattaaaaaatcttgaagtatgttgattaggggatcatagtaccatsttaaaattgagcattcttttaaaaatagtaaaccttagtttatattcaataaaattccatctggtagttatttgttgtggtgtgcttaatttgtggggag

SEQ ID NO: 16003 - DNA, 201 bp, Homo sapiens
attcatttattcaacatacgtagttgttagagaacctaagtgcaagacattgtgctagtggcaatgaaagaagcagaaaggggtattgcttctgcatgtayctgtcttgatagggaaaaaaatgttgcagaggcataatagatctggacatcatattgcttccacactatttattcaaatgcatgagtttatagctttgta

SEQ ID NO: 16004 - DNA, 201 bp, Homo sapiens
ctgaccgactgacctccagcctccctccctctgtgctgacgcctggccttcgaagcaggccctgccgcagccctttgcagacccatccccatcccacgcaytctctgcccctgggcagtgtctggggaattgacgggtgcctctgaagtccttcgtgtctttgagatgtttgcccagggcccgtctaagtatttaattagg

SEQ ID NO: 16005 - DNA, 201 bp, Homo sapiens
ttttaccttgattaaaaaatcttgaagtatgttgattaggggatcatagtaccatcttaaaattgagcattcttttaaaaatagtaaaccttagtttataytcaataaaattccatctggtagttatttgttgtggtgtgcttaatttgtggggagtgctgtaaaggattcataagaaaggaagctaattttttaagtgcc

SEQ ID NO: 16006 - DNA, 201 bp, Homo sapiens
ccagatggaagatggaatgaaggaagtcgttaagtatcaactttcagccagagtctcctaggacaactatcatttactgtccctaaataccatgtgcaacrggtgctgtcatcttcactaacagatgaggaaacagattcagagaagtatagcaattaacctgaagtcaaatagcttgaaaattgcagagcagagatgaaa

SEQ ID NO: 16007 - DNA, 201 bp, Homo sapiens
attactttgaaatagtaataataaataataaaaatagaaataataataaaaacagtagtggtagttgtaataatggtaatagcagccactaaaatgagtgmttattatgtgccaagcattttgcaaagtgttttttatatattatttcatcataaaaccatcctataaggtaagtacactttcccccccattttctagata

SEQ ID NO: 16008 - DNA, 201 bp, Homo sapiens
cttgtatagagaaatttaaattttttaatagaattaaacaaagcaagagcaagagttgaaaagtggaatgctgaccattcaaagagtgatcgaatgactcraggactccgagcccaagtagatgacctgactgaagctgtggctgcaaaggattcccagctggctgtactgaaagtgagactccaggaagctgaccagcta

SEQ ID NO: 16009 - DNA, 201 bp, Homo sapiens
agatgaggaaacagattcagagaagtatagcaattaacctgaagtcaaatagcttgaaaattgcagagcagagatgaaaacctcagagtgtgatctttgcrctgcaccgtaactgttgaatgatggaggcttttgaatccctgttgaaaagtgtggattgtgtcctctaaacccatgctttgaaatactttgaccatgacg

SEQ ID NO: 16010 - DNA, 201 bp, Homo sapiens
ccaactataactgttctaaaagtgttttctaaccaacttcatgtgtatctagcagttttaatcactctgcattataatcaactgattattttgcatacacrtgcatattgtgaatgtgttgaagttcagagctgactcctctcaactgaattctgtaggagtagcaagtctttattaccttccattgcactgagctcattt

SEQ ID NO: 16011 - DNA, 201 bp, Homo sapiens
tcttctaattacagttttatccttattcttataatttatagtttatgtataattactatatttaaaagtaaagttgggccatttattttgcttaaacttcrgggtctttgacataaatatcgtaggaaggagtctctgaaggtgagagaagataaagtgcagcataacgagcttccttttcttaaaaggaagaaacttttt

SEQ ID NO: 16012 - DNA, 201 bp, Homo sapiens
cattttaaaatttgatggcctaatgttgtttatatctgtcccagggaaccacttttggttatgctgatcctctctagtatgtttatttcctcttttgttartttttgctttctttgggtttgttctgctgtttttatagtttttaagatggatatacaactcattagttttcttccttcctgcctttcatctttaatgtaa

SEQ ID NO: 16013 - DNA, 201 bp, Homo sapiens
caaatcacagatcttatatcattttttctataaacatttcattttcttactctaaaaatactctaaaagcaaatgttcacaccattatcaccttaaaaatrtaataatttctttctttttttttttttttttttgagacagggtctcaccttttgcccaggctggagtgcagtggtgcagtctcggctcattgcaacctct

SEQ ID NO: 16014 - DNA, 201 bp, Homo sapiens
tttctaatccataagttgaccataaagttatggtgataaaaaacagatcaattcattcaacaaatagttaccaagtgcctgccatgtgcctaggtttggarttagaacagggtcttcataattatagatcttacattctagtggttaaaagcaaatcagatttgagctcctatgtgaagctgagatgttttctaatattag

SEQ ID NO: 16015 - DNA, 201 bp, Homo sapiens
ttatcaccttaaaaatataataatttctttctttttttttttttttttttgagacagggtctcaccttttgcccaggctggagtgcagtggtgcagtctcrgctcattgcaacctctgcctcccaggttcaagcgattctcctgcctcagcctccgaagtagctgagattacaggcacccgccaccatgcccagctaattt

SEQ ID NO: 16016 - DNA, 201 bp, Homo sapiens
aaaagtatacttgcattatatttagtaacaaaaacaagattaatctgaattcatgtgtctctatctctttgggtaagacatgttagattccagtttgattaaaaaaaaaaaaaaaaaaaaccttgtagtgacctgttattactcttcttgccttgaaacctgcagctactctattgtgccttcccaatttttcagtatttg

SEQ ID NO: 16017 - DNA, 201 bp, Homo sapiens
cattatatttagtaacaaaaacaagattaatctgaattcatgtgtctctatctctttgggtaagacatgttagattccagtttgattaaaaaaaaaaaaamaaaaaaccttgtagtgacctgttattactcttcttgccttgaaacctgcagctactctattgtgccttcccaatttttcagtatttgagacttctcctgg

SEQ ID NO: 16018 - DNA, 201 bp, Homo sapiens
agaaatatttacatttaaactgtgagaaattagatgcgacttgtaaaatgatattttcatagaaaaactgcccagatttggaaatgggaccagtcatcctmccaccaacccaaaacataagagtattcgcttctttggtcatcctttaagaaccatgaaattgaagaactgagaggaacaaactagtagtagtctagttca

SEQ ID NO: 16019 - DNA, 201 bp, Homo sapiens
gtgttgagagacaattaaaatagttaatgtgcattagagatatacatcttttacttaatttttgcaacaatcattgtcattatttgattaaatgctaatgkttgggggatcgtatttgttttttattaatttaagtttttctgattccagattaatctggctcatttatttcaggagaaaattgtatgtaatatgtaaaga

SEQ ID NO: 16020 - DNA, 201 bp, Homo sapiens
ctctctgcaaatgtgtggtgtaaacaagggagacatcattgactactattagtcaatagacagttgtagcagggacttcatgttgtctggagggcaacttyacccactcagcatctaacaaagtatttcaaatttgtttctctaagacattttaagattaaaaaaagaaaattttgaaatctgaaagaaaacatgtcagtt

SEQ ID NO: 16021 - DNA, 201 bp, Homo sapiens
accttctttcttgtgaaatgagattaacgtggtaaatgtggctaattcaagtacctactaactgttttaaaatagctataggctgggcgtggtggcttacrcctgtaatccgagcactttggaacgctgaggcaggcagagcactcgtgcccaggagtttgagaccagcctaaacaacatagcaaaactttgtctctacaa

SEQ ID NO: 16022 - DNA, 201 bp, Homo sapiens
agcttgatccttgctaaatgtatttaattttatgtgttgagagacaattaaaatagttaatgtgcattagagatatacatcttttacttaatttttgcaayaatcattgtcattatttgattaaatgctaatggttgggggatcgtatttgttttttattaatttaagtttttctgattccagattaatctggctcattta

SEQ ID NO: 16023 - DNA, 201 bp, Homo sapiens
agtatagcaattaacctgaagtcaaatagcttgaaaattgcagagcagagatgaaaacctcagagtgtgatctttgcgctgcaccgtaactgttgaatgayggaggcttttgaatccctgttgaaaagtgtggattgtgtcctctaaacccatgctttgaaatactttgaccatgacgcctcagtgagaaaaacagtttac

SEQ ID NO: 16024 - DNA, 201 bp, Homo sapiens
gaaattataaataagtaaatcatactccttaatggcataaataaaaagtgcctcgcttaaattaataaaattttcctgaccataacttctgtgattttttwaagggttttcagtttcttttaggtttcaccttttttttttttattttatttttttattattattatactttaagttttagggtacatgtgcacaatgtgc

SEQ ID NO: 16025 - DNA, 201 bp, Homo sapiens
tattattattatactttaagttttagggtacatgtgcacaatgtgcaggttagttacatatgtatacatgtgccatgctggtgtgctgcacccattaactygtcatttagcattaggtctatctcctaatactatccctcctcccccctcccccagccccacaacagtccccagagtgtgatgttccccttcctgtgtcca

SEQ ID NO: 16026 - DNA, 201 bp, Homo sapiens
caataaaagttgaaagtggctgccatagccagtgtgatgctagtagagatctttaagtcaagagttgacatagcttatttttgtacttttaaagaaagcarcttgcatttaattagaaagaatggacctaaagggaacctcgttgtcagggaaatgaattagaactggttataatacacaggagttataaaaattgtttct

SEQ ID NO: 16027 - DNA, 201 bp, Homo sapiens
tcctcaaactcttctttctaagtacttttttgtatcaccctaatttgttaattcattgaaaagttacttattgagcacctaactactcactaggcacagargatacaaagctcaaaagatgtgtcctcttcctttaagaaaacattcatcttagtggaaagaaacagataattgacgtaataaggttattaatgcagtaca

SEQ ID NO: 16028 - DNA, 201 bp, Homo sapiens
ccgggttcacgccattcttctgcctcagcctccctagtagctgggactacaggcacctgccaccatgcctggctaattttttttgtatttttagtagagayggggtttcaccatattagccaggatggtctcgacctcctgacctcgtgatccgcccgcctcagcctcccaaagtgctgggattacaggcgtgagccaccg

SEQ ID NO: 16029 - DNA, 201 bp, Homo sapiens
gacgtgcgccaccacacctggctaatttttgtattcttagtagagatggggtttcaccatgttgcccaggctggtcttgaactcctgacctcaagtgatcygcccacctcggcctcccaaagtgctgagattagagacgtgagccaccatgcccgaccaggtttctaatccataagttgaccataaagttatggtgataaa

SEQ ID NO: 16030 - DNA, 201 bp, Homo sapiens
ctcccaggaaagcagcttactgaaatttttagagtatgggcttagggttaccccacaagttcctcctgccttcccatctcatctgaaggggtggcctgccyctccacacctgtgggtatatctcatcaggtgggatgagagactgagaaaagaaataagacacagagacaaagtatagagaaagaacagtgggcccaggag

SEQ ID NO: 16031 - DNA, 201 bp, Homo sapiens
aggtgggatgagagactgagaaaagaaataagacacagagacaaagtatagagaaagaacagtgggcccaggagaccggcgctcagcatacggaggacctkcaccggcactggtctctgcgttccctcagtatttattgatcactgttttcattatctcagcaagaggaatgcagtaggagagcagggcgatagtggggag

SEQ ID NO: 16032 - DNA, 201 bp, Homo sapiens
agagactgagaaaagaaataagacacagagacaaagtatagagaaagaacagtgggcccaggagaccggcgctcagcatacggaggacctgcaccggcacyggtctctgcgttccctcagtatttattgatcactgttttcattatctcagcaagaggaatgcagtaggagagcagggcgatagtggggagaaggtcagca

SEQ ID NO: 16033 - DNA, 201 bp, Homo sapiens
tagtctagttcattcatttattctgaactttcaagggaagctgttccattaaacaaagtagtaggcgctaatagagttgcagtgttgctgctctagggcayataaaaggtacatggaattcagttcagtgcccttgggaattgtgcagtgaggtggccctggagtagaaaacctcaagttcctcagaaataggtaattaag

SEQ ID NO: 16034 - DNA, 201 bp, Homo sapiens
atcagtaccacattgcttttaatttctgagattttatatgttttaatgtctttatgacccgttctccttttcagagcttctggcttttctttttcttttctttttttttttgagccatggtttcactctgtcacccaggccagaatgcagtgatgcggtcacagctcactgcagcctcgacctcctcaggctcaggtaatt

SEQ ID NO: 16035 - DNA, 201 bp, Homo sapiens
tgaaattgaagaactgagaggaacaaactagtagtagtctagttcattcatttattctgaactttcaagggaagctgttccattaaacaaagtagtaggcrctaatagagttgcagtgttgctgctctagggcacataaaaggtacatggaattcagttcagtgcccttgggaattgtgcagtgaggtggccctggagtag

SEQ ID NO: 16036 - DNA, 201 bp, Homo sapiens
gatcacttgcgcctgggaggtcaaggctgcagtgagctctcagtgcacctctacactccaccttgagtgacagagtgagaccctgtctcaaaaaaaaaaaraaaaaacaaccatagggtggcttatgcctatagtcctaactacttgggaggctgaggcagggagatcacttgaggtcaggagttcaagatcagcctgggc

SEQ ID NO: 16037 - DNA, 201 bp, Homo sapiens
tttatttttaatagagatgggatcttgctgtgttacccaggctggaatgtagcggctattcacatgtatgatcatagtgcactgcagccccaaactcctcsctcaagtaatcctcccacttcctcctcccaactcactgggatgcaggtgcacaccactgcacctagctccagctccagttgatacttttaaatataaaac

SEQ ID NO: 16038 - DNA, 201 bp, Homo sapiens
tttgggggcacacaaactgcatccacataagacagtgaacttaatccataaatgtgtgtgttctgacagctccatcaactggccattcccacatctctttmcctctcctcaggcctttctagtctttaagacacagcaatattgaaattaggccaattaataaacctacaatggcctctaggtgttcaagtgaaaggaaga

SEQ ID NO: 16039 - DNA, 201 bp, Homo sapiens
actccgtctcaaaaacaaaagcaagcttgtccgacccatagtcaacccaacacagaattcgtaaacttaaatcattatgagattttttttgtgactggtatttttttttttttagcttatcagatatcattagtgttagtgtattttgtgtgtggcccaagataattcttctagtgtggcccagaaaagccaaaagattag

SEQ ID NO: 16040 - DNA, 201 bp, Homo sapiens
tgttcgtctgattggctagctttaggtgccttactctactttagaaattttattaaaggatgcagtgtttcttgttcctaccacttcttttaaaaaaaaaytcattctgccactgcctagttcaggtcttcaacctgtcaccttactcactgtgatgatattaatgcttgttgttgagcagctgtttattcttccttgttg

SEQ ID NO: 16041 - DNA, 201 bp, Homo sapiens
tggcctcgttactccaaagatccaaagagactcaagaaggtagaggcttaaattgttcaggattaggaatttaacttttaaaaataaacttaaggctggasgcagtggctcgtgcctgtaatcccagcactttgggaggccgaggcgggcggattgcctgaggtcaggagttcaagaccagtctggccaacatggtgaaac

SEQ ID NO: 16042 - DNA, 201 bp, Homo sapiens
tgtcaataaggaaagtactaaaggcactcaaagtagaaactgtacgtgctctgagaaaaatgtgtttggttttgcttgtatagagaaatttaaattttttwatagaattaaacaaagcaagagcaagagttgaaaagtggaatgctgaccattcaaagagtgatcgaatgactcgaggactccgagcccaagtagatgacc

SEQ ID NO: 16043 - DNA, 201 bp, Homo sapiens
aaaacaaagtactcactagtcaggctgactttagaaaaagctttactttacccacactaatttagacatagaaatagagctgtttggccaggcacagtgastcacgcctgtaatcccagcgctttggaaggctgagatgggaaaattgctgaagccaggagttcaataacagcatgggcaacagagtgagacccctgggct

SEQ ID NO: 16044 - DNA, 201 bp, Homo sapiens
cagcctgggtgacgtaagactctgattcttaaaaaagaaaaattgctcaataaatgttgaactgaatgttaattattgcttttacatgtaagctttttctstttaggatatggaggcacagcaagttaatgaagcagaatcagcaagagaacagttacaggatctgcatgaccaaatagctgggcagaaagcatccaaaca

SEQ ID NO: 16045 - DNA, 201 bp, Homo sapiens
tgttgtgttttttatccttagggatttaagaaaatctgtggactttctttgatggagataatggaattttttttagtgggttattttctgtatagtagatratattcaatatacaaactaatctctgctttgcttaaacatatttcttcttttataatagtctaaggaaaaattgattaacagcttgaaagaaggctctgg

SEQ ID NO: 16046 - DNA, 201 bp, Homo sapiens
attttttttgagatggagtctcgctctgttgcccaggctggagtgcagtggtgcaatcttggctcactgcaacacctttggcctcccaggctcaagtgatwctcctgcctcagcctcctgagtagctggcactacaggtgtgtgccaccacacctggctaatttttgtatttttggtagagatggggtttcaccgtgttgg

SEQ ID NO: 16047 - DNA, 201 bp, Homo sapiens
tcagatctaaggtgatcttaccctctactttactaagaaagactacagtcatctaatgtcgtttttgaattctctttcctttgtccctcagagggaaaacmtgtcctttcatttttttctaggatcattttcctgcctgtgcattgattccatctcccatctcatgtgtaagccctttctccgtagatctatgcccttcct

SEQ ID NO: 16048 - DNA, 201 bp, Homo sapiens
aagtgacttctttcatgatatttgaaatatcatgtcagaaattatgtcaagaggtctgccaatgcctacattttattgaagatgattaaccctgactatacagggtttttctataataatttttctataataaattctatttttaaaaacttcattaaattttattgagaaagcctctacttcatgtaaaagtatccattt

SEQ ID NO: 16049 - DNA, 201 bp, Homo sapiens
gtccctcagagggaaaacatgtcctttcatttttttctaggatcattttcctgcctgtgcattgattccatctcccatctcatgtgtaagccctttctccrtagatctatgcccttccttcctgtgtgtgcctctctgctgctgctgccttctggctcagcttactcaagagcacatggttatttagtggaaaaatgaaga

SEQ ID NO: 16050 - DNA, 201 bp, Homo sapiens
gccggggtgagcctagagggcttcctggaggtggagtctagcctggcactcagggtgggtggaaactgatcgtcattttgcccacaggaatcctcgtagcycactacctccagagcatcacgccttgcctggccctgggtggagagctggtctaccaccggcggcctggagaggagggcactgtcatgtctctagctggga

SEQ ID NO: 16051 - DNA, 201 bp, Homo sapiens
tgagcaggtgcaggaggagctgctcagctcccaggtcacccaggaactgaggtgagtgtccccatcctggcccttgaccctcctggtgggcggctataccyccccaggtccaggtttcattctgcccctgtcgctaagtcttggggggcctgggtctctgctggttctagcttcctcttcccatttctgactcctggcttt

SEQ ID NO: 16052 - DNA, 201 bp, Homo sapiens; identical to SEQ ID NO: 3275

SEQ ID NO: 16053 - DNA, 201 bp, Homo sapiens; identical to SEQ ID NO: 3276

SEQ ID NO: 16054 - DNA, 201 bp, Homo sapiens
tctgaggcttctgtgctgcttcctggctctgaacagcgatttgacgctctctgggcctcggtttcccccatccttgagataggagttagaagttgttttgwtgttgttgtttgttgttgttgttttgtttttttgagatgaagtctcgctctgtcgcccaggctggagtgcagtggcgggatctcggctcactgcaagctc

SEQ ID NO: 16055 - DNA, 201 bp, Homo sapiens
gaggcttctgtgctgcttcctggctctgaacagcgatttgacgctctctgggcctcggtttcccccatccttgagataggagttagaagttgttttgttgktgttgtttgttgttgttgttttgtttttttgagatgaagtctcgctctgtcgcccaggctggagtgcagtggcgggatctcggctcactgcaagctccgc

SEQ ID NO: 16056 - DNA, 201 bp, Homo sapiens
ggggagccctataattggacaagtctgggatccttgagtcctactcagccccagcggaggtgaaggacgtccttccccaggagccggtgagaagcgcagtygggggcacggggatgagctcaggggcctctagaaagagctgggaccctgggaagccctggcctccaggtagtctcaggagagctactcggggtcgggctt

SEQ ID NO: 16057 - DNA, 201 bp, Homo sapiens; identical to SEQ ID NO: 3277

SEQ ID NO: 16058 - DNA, 201 bp, Homo sapiens
tgcctggacggggtcagaaggaccctgacccaccttgaacttgttccacacaggatgccaggccaaggtggagcaagcggtggagacagagccggagcccragctgcgccagcagaccgagtggcagagcggccagcgctgggaactggcactgggtcgcttttgggattacctgcgctgggtgcagacactgtctgagca

SEQ ID NO: 16059 - DNA, 201 bp, Homo sapiens
tagcaggggcagcatgcccagtgggcctggggtcccgggagggattccagaattgaggggcacgcaggattctgagcaccaggggcagaggcggccagacracctcagggaggagtgtcctggcgtccccatcctccaaagggcctgggcccgccccgagggggcagcgagaggagcttccccatccccggtcagtccacc

SEQ ID NO: 16060 - DNA, 201 bp, Homo sapiens; identical to SEQ ID NO: 3279

SEQ ID NO: 16061 - DNA, 201 bp, Homo sapiens
tctgcaagaaactcaaaaagggagatgaggggatcgtgggagggaggtagggagggaggagggtgccactgatcccctgaacccctgcctctgcctccagrgtgcccctccggcctcgccatgaggctcttcctgtcgctcccggtcctggtggtggttctgtcgatcgtcttggaaggtaaaagtgggatgggagaattg

SEQ ID NO: 16062 - DNA, 201 bp, Homo sapiens
gggagggaggtagggagggaggagggtgccactgatcccctgaacccctgcctctgcctccagagtgcccctccggcctcgccatgaggctcttcctgtcrctcccggtcctggtggtggttctgtcgatcgtcttggaaggtaaaagtgggatgggagaattgcggagttggagatttggaagagtgaaggtggctacag

SEQ ID NO: 16063 - DNA, 201 bp, Homo sapiens
agtctcaggagagctactcggggtcgggcttggggagaggaggagcgggggtgaggcaagcagcaggggactggacctgggaagggctgggcagcagagamgacccgacccgctagaaggtggggtggggagagcagctggactgggatgtaagccatagcaggactccacgagttgtcactatcatttatcgagcaccta

SEQ ID NO: 16064 - DNA, 201 bp, Homo sapiens; identical to SEQ ID NO: 3281

SEQ ID NO: 16065 - DNA, 201 bp, Homo sapiens
cacacaggatgccaggccaaggtggagcaagcggtggagacagagccggagcccgagctgcgccagcagaccgagtggcagagcggccagcgctgggaacyggcactgggtcgcttttgggattacctgcgctgggtgcagacactgtctgagcaggtgcaggaggagctgctcagctcccaggtcacccaggaactgagg

SEQ ID NO: 16066 - DNA, 201 bp, Homo sapiens
tggccaggctggtctggaactcctgacctcaggtgatctgcccgtttcgatctcccaaagtgctgggattacaggcgtgagccaccgcacctggctgggarttagaggtttctaatgcattgcaggcagatagtgaataccagacacggggcagctgtgatctttattctccatcacccccacacagccctgcctggggca

SEQ ID NO: 16067 - DNA, 201 bp, Homo sapiens
gccgctgcactccagcctgggtgacagagcaagaccctgtttataaatacataatgctttccaagtgattaaaccgactcccccctcaccctgcccaccakggctccaaagaagcatttgtggagcaccttctgtgtgcccctaggtactagatgcctggacggggtcagaaggaccctgacccaccttgaacttgttcca

SEQ ID NO: 16068 - DNA, 201 bp, Homo sapiens; identical to SEQ ID NO: 3284

SEQ ID NO: 16069 - DNA, 201 bp, Homo sapiens; identical to SEQ ID NO: 3285

SEQ ID NO: 16070 - DNA, 201 bp, Homo sapiens
cctgacccaccttgaacttgttccacacaggatgccaggccaaggtggagcaagcggtggagacagagccggagcccgagctgcgccagcagaccgagtgrcagagcggccagcgctgggaactggcactgggtcgcttttgggattacctgcgctgggtgcagacactgtctgagcaggtgcaggaggagctgctcagct

SEQ ID NO: 16071 - DNA, 201 bp, Homo sapiens; identical to SEQ ID NO: 3289

SEQ ID NO: 16072 - DNA, 201 bp, Homo sapiens
cactgcagcctccacctcctggactcaagtgataagtgatcctcccgcctcagcctttccagtagctgagactacaggcgcataccactaggattaatttggggggggggtggtgtgtgtggagatggggtctggctttgttggccaggctgatgtggaattcctgggctcaagcgatactcccaccttggcctcctgagt

SEQ ID NO: 16073 - DNA, 201 bp, Homo sapiens; identical to SEQ ID NO: 3292

SEQ ID NO: 16074 - DNA, 201 bp, Homo sapiens
ggaactgaatggcgcttcgggattctgagtagcaggggcagcatgcccagtgggcctggggtcccgggagggattccagaattgaggggcacgcaggattytgagcaccaggggcagaggcggccagacaacctcagggaggagtgtcctggcgtccccatcctccaaagggcctgggcccgccccgagggggcagcgaga

SEQ ID NO: 16075 - DNA, 201 bp, Homo sapiens; identical to SEQ ID NO: 3274

SEQ ID NO: 16076 - DNA, 201 bp, Homo sapiens
cggaggtgaaggacgtccttccccaggagccggtgagaagcgcagtcgggggcacggggatgagctcaggggcctctagaaagagctgggaccctgggaasccctggcctccaggtagtctcaggagagctactcggggtcgggcttggggagaggaggagcgggggtgaggcaagcagcaggggactggacctgggaagg

SEQ ID NO: 16077 - DNA, 201 bp, Homo sapiens
tggaacagcttcagaacaactagggtactaggaactgctgtgtcagggagaaggggctcaaggactcgcaggcctgggaggaggggcctaggccagccatkggagttgggtcacctgtgtctgaggacttggtgctgtctggattttgccaacctagggctggggtcagctgatgcccaccacgactcccgagcctccagg

SEQ ID NO: 16078 - DNA, 201 bp, Homo sapiens; identical to SEQ ID NO: 3280

SEQ ID NO: 16079 - DNA, 201 bp, Homo sapiens
tcttctgtcggagtctgcaccaggcccatgctgagacgagagctggcgctcagagaggggaagcttggatggaagcccaggagccgccggcactctcttcycctcccaccccctcagttctcagagacggggaggagggttcccaccaacgggggacaggctgagacttgagcttgtatctcctgggccagctgcaacatc

SEQ ID NO: 16080 - DNA, 201 bp, Homo sapiens
cctccacctcctggactcaagtgataagtgatcctcccgcctcagcctttccagtagctgagactacaggcgcataccactaggattaatttggggggggkgtggtgtgtgtggagatggggtctggctttgttggccaggctgatgtggaattcctgggctcaagcgatactcccaccttggcctcctgagtagctgaga

SEQ ID NO: 16081 - DNA, 201 bp, Homo sapiens
gccaccttgcccggcctcctagctccttcttcgtctctgcctctgccctctgcatctgctctctgcatctgtctctgtctccttctctcggcctctgcccsgttccttctctccctcttgggtctctctggctcatccccatctcgcccgccccatcccagcccttctccccgcctcccactgtgcgacaccctcccgccc

SEQ ID NO: 16082 - DNA, 201 bp, Homo sapiens
ttggccaggctgatgtggaattcctgggctcaagcgatactcccaccttggcctcctgagtagctgagactactggctagcaccaccacacccagcttttyattattatttgtagagacaaggtctcaatatgttgcccaggctagtctcaaacccctgggctcaagagatcctccgccatcggcctcccaaagtgctggg

SEQ ID NO: 16083 - DNA, 201 bp, Homo sapiens
caggggcagcgacacggtagctagccgtcgattggagaactttaaaatgaggactgaattagctcataaatggaacacggcgcttaactgtgaggttggarcttagaatgtgaagggagaatgaggaatgcgagactgggactgagatggaaccggcggtggggagggggtggggggatggaatttgaaccccgggagagg

SEQ ID NO: 16084 - DNA, 201 bp, Homo sapiens
ctgaattagctcataaatggaacacggcgcttaactgtgaggttggagcttagaatgtgaagggagaatgaggaatgcgagactgggactgagatggaacyggcggtggggagggggtggggggatggaatttgaaccccgggagaggaagatggaattttctatggaggccgacctggggatggggagataagagaagac

SEQ ID NO: 16085 - DNA, 201 bp, Homo sapiens
gaacttgttccacacaggatgccaggccaaggtggagcaagcggtggagacagagccggagcccgagctgcgccagcagaccgagtggcagagcggccagygctgggaactggcactgggtcgcttttgggattacctgcgctgggtgcagacactgtctgagcaggtgcaggaggagctgctcagctcccaggtcaccca

SEQ ID NO: 16086 - DNA, 201 bp, Homo sapiens
gttgctggtcacattcctggcaggtatgggggcggggcttgctcggttccccccgctcctccccctctcatcctcacctcaacctcctggccccattcagrcagaccctgggccccctcttctgaggcttctgtgctgcttcctggctctgaacagcgatttgacgctctctgggcctcggtttcccccatccttgagata

SEQ ID NO: 16087 - DNA, 201 bp, Homo sapiens; identical to SEQ ID NO: 3286

SEQ ID NO: 16088 - DNA, 201 bp, Homo sapiens; identical to SEQ ID NO: 3287

SEQ ID NO: 16089 - DNA, 201 bp, Homo sapiens; identical to SEQ ID NO: 3291

SEQ ID NO: 16090 - DNA, 201 bp, Homo sapiens; identical to SEQ ID NO: 3290

SEQ ID NO: 16091 - DNA, 201 bp, Homo sapiens
ttttgctgtgaggctacaagaattgctggaagacaacatttttatttcgtggaaatttgtgttgtgtttctccttggttgttaatgctttgcatttacatrgtgaacatcttattatcagagctggcctgtgaggagggtagtgggggggcattgatgttcccgtttctgagtgaggagacctatgtcggggccttggtga

SEQ ID NO: 16092 - DNA, 201 bp, Homo sapiens
attgaaaagaataaaagctgacaatgtaacaaattttttaaactttaaatttaatagttttaaagaattttcttggtgtgttcctgcagtaaacattttawaaaaaaaataattatttattctgatataatgaacttccttttttattgctgtctttttcttttttaatgaaaatatggtgattgattttttttaatgccc

SEQ ID NO: 16093 - DNA, 201 bp, Homo sapiens
tggacaaaatttggagcatatgtctttctttttacctgatttctccagaatttgaaaactatttgggagtattcttaactaatagcaatatagttatttgyctaagtgcagtaagaatcttttcttttgtaataggacacaattaaagaaactgcttattttatgaaggctttgactagaatggtgtgctttcagatacaa

SEQ ID NO: 16094 - DNA, 201 bp, Homo sapiens
cataagattaaaactttatggcaaacaaatttgtcccactatgatttgtctttggtaaaaatggaagctagagagagaatttgtttcaaaaactatgatayaccagttattagattctagtctcgtctgttgtttttgagtttcttctgcaatttaggcagaccctgcttattcctgagaatcaaccagtgatctatggct

SEQ ID NO: 16095 - DNA, 201 bp, Homo sapiens
ccattggatccagcaatcccattactgggtatataaccaaaggaatataaatcattctaccataaagacatgcatacgtatgttcactgcagcactattcaacgatagcaaagacatggaatcatcctaaatgcccattgacagtagactggataaagaacatctggcacatatacaccatggaatactatgtgttgataa

SEQ ID NO: 16096 - DNA, 201 bp, Homo sapiens
cctcctgatggcttgctcagagagcctgttttcattgcccactttatatgtcagtaaataatcttccctggcagtgggtccaccatgtctggatgcacacrgggaaatctggtggggtctggccagtgaaaaacactcctcaggttttgcaggaaaagcagtgaacccttcttttaagctcgagaatgctttaaagatgca

SEQ ID NO: 16097 - DNA, 201 bp, Homo sapiens
gaggagaccatgccccagttctccgctgtctttgcatggcccttggacagaggtaggagaaggtgatgatagtggcccctagttcaaggtccaagttgcttgtgtgtgtgtgtgtgtgtgtgtgtgtgtgtgtgttttcctcttctttcccatcagaacattattttggaggcttatgactgtgacctttgttaaccaatt

SEQ ID NO: 16098 - DNA, 201 bp, Homo sapiens
tgttttcattgcccactttatatgtcagtaaataatcttccctggcagtgggtccaccatgtctggatgcacacagggaaatctggtggggtctggccagkgaaaaacactcctcaggttttgcaggaaaagcagtgaacccttcttttaagctcgagaatgctttaaagatgcatcattggcaagccttgccaaagaaat

SEQ ID NO: 16099 - DNA, 201 bp, Homo sapiens
aggagaccatgccccagttctccgctgtctttgcatggcccttggacagaggtaggagaaggtgatgatagtggcccctagttcaaggtccaagttgcttgtgtgtgtgtgtgtgtgtgtgtgtgtgtgtgtgttttcctcttctttcccatcagaacattattttggaggcttatgactgtgacctttgttaaccaattt

SEQ ID NO: 16100 - DNA, 201 bp, Homo sapiens
ggagaccatgccccagttctccgctgtctttgcatggcccttggacagaggtaggagaaggtgatgatagtggcccctagttcaaggtccaagttgcttgtgtgtgtgtgtgtgtgtgtgtgtgtgtgtgtgttttcctcttctttcccatcagaacattattttggaggcttatgactgtgacctttgttaaccaattta

SEQ ID NO: 16101 - DNA, 201 bp, Homo sapiens
gagaccatgccccagttctccgctgtctttgcatggcccttggacagaggtaggagaaggtgatgatagtggcccctagttcaaggtccaagttgcttgtgtgtgtgtgtgtgtgtgtgtgtgtgtgtgtgttttcctcttctttcccatcagaacattattttggaggcttatgactgtgacctttgttaaccaatttag

SEQ ID NO: 16102 - DNA, 201 bp, Homo sapiens
tggtgcactgggactttggtaattcaccagttacctgtcctggtcatttatagaaaccgaggtatgaaattcgctggagggtcattgaatcaatcagcccrgatggacatgaatatatttatgtggacccgatgcagctgccttatgactcaagatgggagtttccaagagatggactagtgcttggtaagttccatgggg

SEQ ID NO: 16103 - DNA, 201 bp, Homo sapiens
cctgggcataggccgaactaactttgagaggaacttagtttatagtttgactttgaaaaaaagacaataatagccctttgccaaaacaaaccctctttttscctgggaactagactgcctttgcgggactaacgaattagctacaagattagaaagtatggtttaggggtcactgttgtaaaacctgaggtcagtgcttga

SEQ ID NO: 16104 - DNA, 201 bp, Homo sapiens
ttccctgtgggctcaattccttttttgacacgatgacttggaggagtcattatgattactccaaacaggaaagacactcgcccagctgtccgcccgcagaragctggctacggtgcagaaagctgaggaggcgtctggagtttttgggtgttaatgattctgcctgcccacaggtcgggtcttggggtctggagcgtttgg

SEQ ID NO: 16105 - DNA, 201 bp, Homo sapiens
ctcctttctcccgtctgtgttttctttcccttgcaagtgttattcgacaaaagcaattatgctaatttccttccctgtgggctcaattccttttttgacasgatgacttggaggagtcattatgattactccaaacaggaaagacactcgcccagctgtccgcccgcagagagctggctacggtgcagaaagctgaggagg

SEQ ID NO: 16106 - DNA, 201 bp, Homo sapiens
gtctcatatgttctgggacacgagctattccattctgacttctttctgcctcttgcagttccttcatccattctggacttggtcgatgatcaccatggctyaactgggggacagacggtgaggtgcacagctgaaggcacgccgcttcctgatattgagtggatgatatgcaaagatattaagaagtatggaaaacagatg

SEQ ID NO: 16107 - DNA, 201 bp, Homo sapiens
agcaaaatctgttgccagtccagtcatagccattcatggctctttattaaaaaaaaaaaaaaaaaaaaaaaaagcttttttggtatcttatttttttctgygccatatggtctgcaggacaattcatggcttttctgttcttcattttcatacccatctcctaacggcttttgtccccataggccccatttacatcatcac

SEQ ID NO: 16108 - DNA, 201 bp, Homo sapiens
acagggataaatctcaaaacaccaaaactgtgaaaatgctgctaaccatgtgggtctgtctaaactggagtgttacttgtacaactggtttcagcccctcsggagtgttttgaatgccatgtagatgagttgtgaactcatattccactttgtagtctcatatgttctgggacacgagctattccattctgacttctttct

SEQ ID NO: 16109 - DNA, 201 bp, Homo sapiens
caccaagactaaggaccctcatggagtccattgcactgtccaccacctccaccagaacaagcactggtatacatggctgagagacccatagatggttcacrtcacaggactctgtgcagacaacccccagtaccagcccagagctgggtagactaattgggtggctagacccagaagagagaaaacaaccactgcagttta

SEQ ID NO: 16110 - DNA, 201 bp, Homo sapiens
tgaaaaacaatctgactctgattgaaaatctcactgagatcaccactgatgtggaaaagattcaggaaataaggtaaagaaactctctgcccaagtatgcytttttttagtgtgcatcagaggcggactgaggtttgtgtgtgtcttacaacccagacccaaagtcagtctagaaaatgtaacaatctgagttaagagatg

SEQ ID NO: 16111 - DNA, 201 bp, Homo sapiens
ggtagaaggaattgtatgcccaagccacatgaccacacggctcaagttccaaccaaggcttgtgagttgaaaaactgagaaagaataatgacagacttaaygtagtgaattcttcaaactttaagtgtaatggacttacaggtccatgggagcacagccccactgtcttagatgtggctcttcaggatgtgcgggctcctg

SEQ ID NO: 16112 - DNA, 201 bp, Homo sapiens
tatactcactctgggtgttgggactttccagtggtttaatatgatacttaaagtatttagagggaagtgtatagggatggtaagtgaacctggcagcccaygtggtctctaaatgcaggtctgcacaaccagttctgtgacatgtttccaggtttgtggcctgtaaattgaaaagaataaaagctgacaatgtaacaaatt

SEQ ID NO: 16113 - DNA, 201 bp, Homo sapiens
aaggagatgatgacactgaattttcttgaaaaaaccagtgcttcaaggctataggatctgaaaggttttctaacagtgttctatcatgccaagtgtttcarcaatgcactgagcgtttgttagtcctggtgttttattgtttggcttttaggtggcaccccttaccccggcatgatggtggattctactttctacaataag

SEQ ID NO: 16114 - DNA, 201 bp, Homo sapiens
ctctttaccattggtggccccttcttcatgttctatgtctctggggatagttgacatgactctccttcaactaagtcccacatcttccaggtagtttggaratatgtacagttaaataatggtaagttctgagtgtctctattcatttttgaggtttggttgttaacacttgattaaatatgttcaatgaatgtttataga

SEQ ID NO: 16115 - DNA, 201 bp, Homo sapiens
tttaaatggtaatttattacattctttatccttcagcagtatagcacaaacaccttatatgtgtcattaactgtccttttaaaaaatgggctgggtgtggwggctcatgcctgtaatcccagtactttgggaggctgaggcaggagagtcacttgaggccaggagtttgagatcagcctgggcaatgtatcaagactccgt

SEQ ID NO: 16116 - DNA, 201 bp, Homo sapiens
atatgcctaattgttgtacaccatctcacaatcaagccttgtgagattttccaaattttatcttgatcaaactggtttgcaaattatttttcagggttttyttaaaaaaaaaaaaaaaaacccaaactttataagatcctggctatcctgtggatttttaggcccttgtatttgttcttttttatagcaacatcagagctg

SEQ ID NO: 16117 - DNA, 201 bp, Homo sapiens
tatgattgaagaaaagatttgggtgaaatctagtgttcttccctgcaaagggggttgttctcacggattcttatggtgccatgtttctcagaatttgtagyttcagttacttatatttgcacacctgactttagatgagctccagaatagcagttactaattaaggatgagcatttagagtagataaaagtggcaggaaca

SEQ ID NO: 16118 - DNA, 201 bp, Homo sapiens
gtatttctgggaggttctgggttactctagagtaggcgaggaatccctaggctccaccagctagctttatttttgtagagatggagtcttgccatgttgcycaggctggtctcctgggttcaagctatcttcccaccttggcctctcaaagtactgggattacaggtgtgagccactgcacctggcctccaccagcttact

SEQ ID NO: 16119 - DNA, 201 bp, Homo sapiens
gctcaggctggtctcctgggttcaagctatcttcccaccttggcctctcaaagtactgggattacaggtgtgagccactgcacctggcctccaccagcttrcttagcacctgcttctcaatctgagaagagagaagcagatgaccttagattgttctggagagttttgctacaagttttccttatagacattgtacagtgg

SEQ ID NO: 16120 - DNA, 201 bp, Homo sapiens
ttgggagggatggaacaccctgtggctttgcagggtttagcccctgcagctgctctcaggggctgttgtcgagtgcctgtggtttttcctggtgcagagtrcaggctgttggtggatatattattcatggaggatggtggccctcccctcgtagcttcacgaggcagtgccccagtggagactctgtgtggggacttcaac

SEQ ID NO: 16121 - DNA, 201 bp, Homo sapiens
ttttgcaaggatagcaccaaggggatggtgctaaaccatttgtgagaaattcacccccatgatccagtcacctcccaccaggccccacctccaatactggrgattacacttcaacatgagatttgggtggggacacatatccaaactatatcattgcgtgtgtgtgtgtgtgtgtataatttttaaaccagatatatgttt

SEQ ID NO: 16122 - DNA, 201 bp, Homo sapiens
accccacatttcccctctgcagtgccctagtagaggttctctgtgagggctccaatcctgcagcatgcttctgtctggacaccctggttttttaatatatmctccgaaatctaggcagaggctcccaagcctcaactcttaacactctgtacacccacaggctaacaccacatggaagcggccaaggtttatggctgtcac

SEQ ID NO: 16123 - DNA, 201 bp, Homo sapiens
tttacagtaaaaataaaacttaaattgaagagtacaattgtttaaacaattggaacttacttagctactgcttgttgaaacaaaatcctttttttaaaagstatcgaagcaaattaaagctgatccgtgctaaggaagaagacagtggccattatactattgtagctcaaaatgaagatgctgtgaagagctatacttttg

SEQ ID NO: 16124 - DNA, 201 bp, Homo sapiens
gaaaatctcactgagatcaccactgatgtggaaaagattcaggaaataaggtaaagaaactctctgcccaagtatgcctttttttagtgtgcatcagaggyggactgaggtttgtgtgtgtcttacaacccagacccaaagtcagtctagaaaatgtaacaatctgagttaagagatgcttgaaatcacatccctttaatg

SEQ ID NO: 16125 - DNA, 201 bp, Homo sapiens
atgatccagtcacctcccaccaggccccacctccaatactggggattacacttcaacatgagatttgggtggggacacatatccaaactatatcattgcgygtgtgtgtgtgtgtgtataatttttaaaccagatatatgtttctgcatatctctttcctttctttcattctttctttctttttttttttttttttttttg

SEQ ID NO: 16126 - DNA, 201 bp, Homo sapiens
tccaatcctgcagcatgcttctgtctggacaccctggttttttaatatatactccgaaatctaggcagaggctcccaagcctcaactcttaacactctgtrcacccacaggctaacaccacatggaagcggccaaggtttatggctgtcacaagctgaagcagcagcccaagctgcacctgaactcctttgagccacggct

SEQ ID NO: 16127 - DNA, 201 bp, Homo sapiens
cagaaagtacaatgaattcacttcataataaattacttggtggacaccaaatgggtgctaaattgattgggtagaaggaattgtatgcccaagccacatgrccacacggctcaagttccaaccaaggcttgtgagttgaaaaactgagaaagaataatgacagacttaatgtagtgaattcttcaaactttaagtgtaatg

SEQ ID NO: 16128 - DNA, 201 bp, Homo sapiens
acatatccaaactatatcattgcgtgtgtgtgtgtgtgtgtataatttttaaaccagatatatgtttctgcatatctctttcctttctttcattctttctwtctttttttttttttttttttttgagacagagtctcactctgtcacccaggctgcagtgcagtggtgtgatctcggctcactgcaactcattgcaacctc

SEQ ID NO: 16129 - DNA, 201 bp, Homo sapiens
ccagtggctgggcttcatggcggtgctccacgagaccctagtagcaatgatgaatgaaaaccctccccttcccgtggggctttcctttcatcttatatgtrcagtacctgtaagcactattctccagatgtttgagtatcagaagttagtgtgcagttagaagactcagggcatccatggccattacatcactaatttgag

SEQ ID NO: 16130 - DNA, 201 bp, Homo sapiens
tttgagtgcacttaaatccatgcgaaattggcttttaccagcggactggaaggaacaacctcagctgttatctgtggcaccagctggttttttgtggaatrggaagcattgttcaaaggaacaaatgtaatttcttggaaccaggcaggatatgtaaatgaatgaaacaactttctgctgaggtgttgagaggaaaactca

SEQ ID NO: 16131 - DNA, 201 bp, Homo sapiens
ttaaccctcagttggtcaaagatgctctgactggtggaaatgtgttggtgggaagagattgaagttattgttgaaaatagggtcttttcacatccaatgtkagacctctccaatgtttaaggatcatgaaggctttgggtattatccacccaatagaaggcctcactgcctctctatgggacccatccaagccctggaaag

SEQ ID NO: 16132 - DNA, 201 bp, Homo sapiens
tggtacattccgctttctaaaatgtcagttgtccatgctgctcgggatccatatgtggtaatcattatttaatggaaactcttccctgtacagagaaaggkttcattgaaatcaaacccaccttcagccagttggaagctgtcaacctgcatgaagtcaaacattttgttgtagaggtgcgggcctacccacctcccagga

SEQ ID NO: 16133 - DNA, 201 bp, Homo sapiens
aatagggtcttttcacatccaatgttagacctctccaatgtttaaggatcatgaaggctttgggtattatccacccaatagaaggcctcactgcctctctrtgggacccatccaagccctggaaaggcaacgtgatggggaccagaaggattctcagttgtagctactgacttggagaaggggctactggtatcttagcac

SEQ ID NO: 16134 - DNA, 201 bp, Homo sapiens
atttctgtccatggtacattccgctttctaaaatgtcagttgtccatgctgctcgggatccatatgtggtaatcattatttaatggaaactcttccctgtrcagagaaaggtttcattgaaatcaaacccaccttcagccagttggaagctgtcaacctgcatgaagtcaaacattttgttgtagaggtgcgggcctaccc

SEQ ID NO: 16135 - DNA, 201 bp, Homo sapiens; identical to SEQ ID NO: 3296

SEQ ID NO: 16136 - DNA, 201 bp, Homo sapiens
cgtcttactgtttgaaccttgaattttaacctgggacatgtttgactaaaatgatgctgttaatattttctgttgtgcaaaacacaaagagaactaggctycagggttgtttctatttgctaatgctgtttctgttgacttttgacttttctagtttcccagagctatggggacttcccatccggcgttcctggtcttagg

SEQ ID NO: 16137 - DNA, 201 bp, Homo sapiens; identical to SEQ ID NO: 3297

SEQ ID NO: 16138 - DNA, 201 bp, Homo sapiens
taaagtcaggtgttgcttctagagattcggtgcctgttttttaaaacatcaatagatttcaaggggtcagtacactgccttggcagcagattgcccaggtktgagtgccagctccaccacttacttaatttggatttggggctagatacttgactgttctgcccctctgtctccctgattgtagtgggaggtgataatagt

SEQ ID NO: 16139 - DNA, 201 bp, Homo sapiens
atgagctccagaatagcagttactaattaaggatgagcatttagagtagataaaagtggcaggaacagcaagactcactcccagagagcctcactacaggwctaataggtgaggaaattccccatgtttcccatttttcttcattacctccctgtggggcaagcactgccattattcatgagtaaactgtctgagttatag

SEQ ID NO: 16140 - DNA, 201 bp, Homo sapiens; identical to SEQ ID NO: 3306

SEQ ID NO: 16141 - DNA, 201 bp, Homo sapiens
ttggccctatacttaggccctttttctctctagatgtaataatgaaacttcctggactattttggccaacaatgtctcaaacatcatcacggagatccacycccgagacaggagtaccgtggagggccgtgtgactttcgccaaagtggaggagaccatcgccgtgcgatgcctggctaagaatctccttggagctgagaa

SEQ ID NO: 16142 - DNA, 201 bp, Homo sapiens
gctgaagctggtggctcccagtgagttcctcaacagtcaggacaactcatcagctgagccgcatctgccccaggcggaactttgaatcccagataggggtyatatagaaatgaaggtcccaaggcagaaattcagttacgaatgctcttaaaggcatgtgggactttgttttattttgttttgttttttgagacagagttt

SEQ ID NO: 16143 - DNA, 201 bp, Homo sapiens
aggacaactcatcagctgagccgcatctgccccaggcggaactttgaatcccagataggggtcatatagaaatgaaggtcccaaggcagaaattcagttaygaatgctcttaaaggcatgtgggactttgttttattttgttttgttttttgagacagagttttgctctgtggcccaggctggagtgcaatggcacaatat

SEQ ID NO: 16144 - DNA, 201 bp, Homo sapiens
ctgagccgcatctgccccaggcggaactttgaatcccagataggggtcatatagaaatgaaggtcccaaggcagaaattcagttacgaatgctcttaaagkcatgtgggactttgttttattttgttttgttttttgagacagagttttgctctgtggcccaggctggagtgcaatggcacaatattggctcactgcaacc

SEQ ID NO: 16145 - DNA, 201 bp, Homo sapiens
cccttcttcactttctctattgctcctcctttcatgcttgtacctgcttttccatgccctgtttagcctggcttgggatccagcaggttctccaagggttyctgcaagaaccccggctgggtgcccaggtctgagcctggtatgtgcctcagtatcacaaaggcctcctgtaaatgacacacattgttggaagtttcagaa

SEQ ID NO: 16146 - DNA, 201 bp, Homo sapiens
atggggaccagaaggattctcagttgtagctactgacttggagaaggggctactggtatcttagcacctaatggcagaagctctttaccattggtggcccyttcttcatgttctatgtctctggggatagttgacatgactctccttcaactaagtcccacatcttccaggtagtttggaaatatgtacagttaaataatg

SEQ ID NO: 16147 - DNA, 201 bp, Homo sapiens
cttcttcatgttctatgtctctggggatagttgacatgactctccttcaactaagtcccacatcttccaggtagtttggaaatatgtacagttaaataatrgtaagttctgagtgtctctattcatttttgaggtttggttgttaacacttgattaaatatgttcaatgaatgtttatagagttatgaaaaaattcacctg

SEQ ID NO: 16148 - DNA, 201 bp, Homo sapiens; identical to SEQ ID NO: 3302

SEQ ID NO: 16149 - DNA, 201 bp, Homo sapiens
ataagcctctcctgccattgtcttaaatagtcattgaactggggaaaaagtgaagagaggcgggactgggtcctttgacgctataccctacctgtgaattkgaatcacctgcagagatttaaaaactgctgatctacaagcctcacccaaaacaacaaattagaatccctgggggtggtggccaactgctccctggctgat

SEQ ID NO: 16150 - DNA, 201 bp, Homo sapiens
aaaatctcactgagatcaccactgatgtggaaaagattcaggaaataaggtaaagaaactctctgcccaagtatgcctttttttagtgtgcatcagaggcrgactgaggtttgtgtgtgtcttacaacccagacccaaagtcagtctagaaaatgtaacaatctgagttaagagatgcttgaaatcacatccctttaatga

SEQ ID NO: 16151 - DNA, 201 bp, Homo sapiens
agcaaaatcatggaatcaacctaaatgcccatcaatgatagactggataaagaaaatgtgatacatatacaccatggaatacgatgcagccgtaaaaaggwatgagatcatgtcctttgcagggacatggatggagctggaagccgttaccgtcagcaaactaacacaggaacagaaaaccaaacaccacatgttctcact

SEQ ID NO: 16152 - DNA, 201 bp, Homo sapiens
taaacaataccttatgtccttcaaggcaaggaattggatcagatgatatcatgaggcctcttaaggttttaagctgtgattagaacccaagagtcagaagrtacatctcacagcacccagctaaccagccctatacttttgtcagaaatcatctcagaaagacaaagtcagtcctgtatttcaagccttcaggaggaagaa

SEQ ID NO: 16153 - DNA, 201 bp, Homo sapiens
agcctcctgagtagctgggattacaggcatgtgccaccatgcctggctaatttttttttttttgtatttttagtagagatgggggtttcaccatgtttgtsaggctggtctcgaactcctgacctcaagtgattcacctaccttggcctcccaaagtgctgggattacaggtgtgagtcatcacacccagcctataacttt

SEQ ID NO: 16154 - DNA, 201 bp, Homo sapiens
gatcttggggccccattgattctttcatctttcaggcgtcttactgtttgaaccttgaattttaacctgggacatgtttgactaaaatgatgctgttaatrttttctgttgtgcaaaacacaaagagaactaggctccagggttgtttctatttgctaatgctgtttctgttgacttttgacttttctagtttcccagagc

SEQ ID NO: 16155 - DNA, 201 bp, Homo sapiens
aatcccgtgcttgaaaaataatcaaacaaaaagagaatgcattgtaagaagcctcactgtactcctgtccccagctgcccagttctcccctcctccccacrgggaaacatcttcattagtttcattaggttcttatgaaaccttccagagtttctttaagcaaaatacaagcaagtaggactgtcatatcctgcagaccgc

SEQ ID NO: 16156 - DNA, 201 bp, Homo sapiens
catgatcttggggccccattgattctttcatctttcaggcgtcttactgtttgaaccttgaattttaacctgggacatgtttgactaaaatgatgctgttmatattttctgttgtgcaaaacacaaagagaactaggctccagggttgtttctatttgctaatgctgtttctgttgacttttgacttttctagtttcccag

SEQ ID NO: 16157 - DNA, 201 bp, Homo sapiens
ccgccatgatcttggggccccattgattctttcatctttcaggcgtcttactgtttgaaccttgaattttaacctgggacatgtttgactaaaatgatgckgttaatattttctgttgtgcaaaacacaaagagaactaggctccagggttgtttctatttgctaatgctgtttctgttgacttttgacttttctagtttc

SEQ ID NO: 16158 - DNA, 201 bp, Homo sapiens
cccgcttttgccttttattccgcactctgatttttggggggatcgtttgttcccgctcattttctacaaacattacggtatcctgttagcattccgaacarggggctgttcatatatttgccttcaatgatttcctgaagggacatgtggaagtaatagcgagcggtgcagtcacccaagctgaagatgcacgagagcggg

SEQ ID NO: 16159 - DNA, 201 bp, Homo sapiens
accaacctggagtcctaattaaacttaaggtttgagctggtctctgaagtcaaggagatgatgacactgaattttcttgaaaaaaccagtgcttcaaggcyataggatctgaaaggttttctaacagtgttctatcatgccaagtgtttcagcaatgcactgagcgtttgttagtcctggtgttttattgtttggctttta

SEQ ID NO: 16160 - DNA, 201 bp, Homo sapiens
ttgaccaacctggagtcctaattaaacttaaggtttgagctggtctctgaagtcaaggagatgatgacactgaattttcttgaaaaaaccagtgcttcaasgctataggatctgaaaggttttctaacagtgttctatcatgccaagtgtttcagcaatgcactgagcgtttgttagtcctggtgttttattgtttggctt

SEQ ID NO: 16161 - DNA, 201 bp, Homo sapiens
cccactctgcccaggtctggttcctggagcatcagcgccccctttccctcgccggcaggatcgtttcctcccgacactggcctctcgccttgggcgcaggrtttggggctcagctgtcaattccaaggaattcgtagggttcgacccacgcggcgggagggaacggagggagaatcaaaaggcatcctcccccacgacgcg

SEQ ID NO: 16162 - DNA, 201 bp, Homo sapiens
aggcatatcacatggccagagcaggagcaagtgagagagagagagagagagagagagagagagagagaggtgccatacagttttaaacaggcagatcttgyaagaagtcactcacttttgcaaggatagcaccaaggggatggtgctaaaccatttgtgagaaattcacccccatgatccagtcacctcccaccaggcccc

SEQ ID NO: 16163 - DNA, 201 bp, Homo sapiens
tggtttccatttctgagttacttcacttagaataatagtctctaatcccatccaggttgctgcaaaagccattaattcattcctttttatagctgagttayatatatatatatatatatgcacacctacacatacatatgtatagatacactgcagtttctttatccactccttgattgatgggcatttggggttggttcc

SEQ ID NO: 16164 - DNA, 201 bp, Homo sapiens
aaatcacctttgcaaaaattgtaactgaggaaattatgacagtgaatgagatatgacctaaccaactccattttgctttagcctccaagttgtccttgttccttcctgggcataggccgaactaactttgagaggaacttagtttatagtttgactttgaaaaaaagacaataatagccctttgccaaaacaaaccctctt

SEQ ID NO: 16165 - DNA, 201 bp, Homo sapiens
attagccagtgagagttatcggaaccagtacttcctctcccctcccatattgttaaaaatagtttacattgcttcccaggctgggctggtggagttggcaygagatgtcagaggaacctgagtcatgctcaggcccaagccctgttggcaggcagaccactgctttctggccttccgtgactatctgaaaaaaatcgtgaa

SEQ ID NO: 16166 - DNA, 201 bp, Homo sapiens
ttgcaggggtgatgctatatcagctacagatggcttgatcctgagtcatttcttccttttccatgcagtgtgtccaccgtgatctggctgctcgcaacgtyctcctggcacaaggaaaaattgtgaagatctgtgactttggcctggccagagacatcatgcatgattcgaactatgtgtcgaaaggcagtgtacgtcctc

SEQ ID NO: 16167 - DNA, 201 bp, Homo sapiens
caaaccctctttttgcctgggaactagactgcctttgcgggactaacgaattagctacaagattagaaagtatggtttaggggtcactgttgtaaaacctraggtcagtgcttgagatattttggagaccctgtatttcgatgcaccagctgacaccacccaggtcaataaactggctcatctgatcttggggcccctacc

SEQ ID NO: 16168 - DNA, 201 bp, Homo sapiens
taaactgtctgagttatagataagtaatgacatgaaacttcacaaacacgctgagcacagtggctcacgcctgtaatcccagcactttgggaagccgacgygggtgaatcacgaggtcaggagttcgagatcagcctgaccaacatggtgaaaccctgtctgtactaaaaatacaagaaattagctggccatgatggtggg

SEQ ID NO: 16169 - DNA, 201 bp, Homo sapiens
ccgaattgtgctaagacctcaggatgtgcgcaaggagtgcctggaagaacttgccactcactccatcttcctgggtgggaggcaagcatggatggggcccmtatcaggtccctaccgccccgcgtccgaaaagccgcgggctgggcggtgtgggaaatggctttttggctccgaggccaaattgctcaatgttttggaccg

SEQ ID NO: 16170 - DNA, 201 bp, Homo sapiens
ccagcaggttctccaagggttcctgcaagaaccccggctgggtgcccaggtctgagcctggtatgtgcctcagtatcacaaaggcctcctgtaaatgacayacattgttggaagtttcagaaattctaggtcaaaatggcactgaaatattaaggtatttaccccaacccaagcaacttttctaaaagttgtagagagtgt

SEQ ID NO: 16171 - DNA, 201 bp, Homo sapiens
tgggcaagggtttggggcgctctggagcggtttgttgggtcagtgaggtgccagggagagcgggtgcctgccgggcagtgtgctcgggttgcacgccctakcgcgggggcgacagcggcggcgcgggcgggcggtctggaataatgacaaacacatttggccctgagtgaagaagtcgtcgtcgcctcgcattccagcaac

SEQ ID NO: 16172 - DNA, 201 bp, Homo sapiens
atagaaacttaatatattcataaggaatgtggcccaatatcaggcaaaacaagagttaacagcatggactaaactaataaaagaccaaaacaatcttttartgactttttgcttaaaacattgcatatcctttctgttttgcttttcagagtcaagaaaacttttcctttggaaagtatttactgcttttaacaattgaaa

SEQ ID NO: 16173 - DNA, 201 bp, Homo sapiens
agcctcatataagaagaaatctatgttaggtaaaagtgtctatactcactctgggtgttgggactttccagtggtttaatatgatacttaaagtatttagrgggaagtgtatagggatggtaagtgaacctggcagcccacgtggtctctaaatgcaggtctgcacaaccagttctgtgacatgtttccaggtttgtggcc

SEQ ID NO: 16174 - DNA, 201 bp, Homo sapiens
aagcaggctgatactacacagtatgtccccatgctagaaaggaaagaggtttctaaatattccgacatccagagatcactctatgatcgtccagcctcatrtaagaagaaatctatgttaggtaaaagtgtctatactcactctgggtgttgggactttccagtggtttaatatgatacttaaagtatttagagggaagtg

SEQ ID NO: 16175 - DNA, 201 bp, Homo sapiens
gtcctccgcagtgcatctcaccggacaaacatccccggagccacaggaggggaggaaggggctctccgggcgtgcgcacctccccagccgccgcgctgtcycatccccgacccctaatctggtcaacctggaccccggcactgctgaattgcatcccctcttctccctttctcctcggcctcctcctttccacaaccctca

SEQ ID NO: 16176 - DNA, 201 bp, Homo sapiens
gtaagatttctctttctgtttttacagctatgttattttatcttttgaaaacaatggtgactacatggacatgaagcaggctgatactacacagtatgtcyccatgctagaaaggaaagaggtttctaaatattccgacatccagagatcactctatgatcgtccagcctcatataagaagaaatctatgttaggtaaaag

SEQ ID NO: 16177 - DNA, 201 bp, Homo sapiens
gcatcccctcttctccctttctcctcggcctcctcctttccacaaccctcaagatgaggaggccctgcctcgactccccgacaggcgcaaggccgaccagsctcgctttgacgccctggtcaggccctgcttcggagcttgcagttttgggttgacccaagtgcagctggacctcgttcacaagagtgaggggaagccaag

SEQ ID NO: 16178 - DNA, 201 bp, Homo sapiens
gcaaatgaaagtagaggtagaggttgtgttatgatgaatgatctaacagtatatatgttaaagaatgccaaatgcaggttttaattatccaccggtctcaytgcaaaatacagaagagtttaagtcttcttagagagttaggtaaactgaaatcaagcaaggcaccagagtgaaatcacctttgcaaaaattgtaactgag

SEQ ID NO: 16179 - DNA, 201 bp, Homo sapiens
tgtacacccacaggctaacaccacatggaagcggccaaggtttatggctgtcacaagctgaagcagcagcccaagctgcacctgaactcctttgagccacrgctggagctggagtcatagggatgcagggagcagtgtctcgaggctgcacagggcagtggaccctggggctggcccatgagaccattcttccctcctagg

SEQ ID NO: 16180 - DNA, 201 bp, Homo sapiens
caccacatgttctcactcataggtgggagctgaacaacaagaacacatgaacacaggcgggggggaacatcacacatcagagcctgtcagggggtgggggsccgggggagagatagcattaggagaaacacctaatgtaaatgacgagttgatgggtgcagcaaaccaacatggcacatgtatacctatgtaacaaacccg

SEQ ID NO: 16181 - DNA, 201 bp, Homo sapiens
caaaatggcactgaaatattaaggtatttaccccaacccaagcaacttttctaaaagttgtagagagtgtgacctctttattaattgaaacgtgaaaatcrgctctagtttggaagctgagaaaaaatatatatatatgtatttatttctttgttgtttgaattcttaatataaatggtttaaaggaccattgaaaactgc

SEQ ID NO: 16182 - DNA, 201 bp, Homo sapiens
ggtttaaaggaccattgaaaactgcatgcaatcacagaaggttttggcttcaggcagctcccgccatgatcttggggccccattgattctttcatctttcrggcgtcttactgtttgaaccttgaattttaacctgggacatgtttgactaaaatgatgctgttaatattttctgttgtgcaaaacacaaagagaactagg

SEQ ID NO: 16183 - DNA, 201 bp, Homo sapiens
aagtccaagcatgttgtagatgacctatgtaagtcacgataaagtttatacaagagaatttattaaaatttagatgtaattagccataactgaaaggaaawttatttatttatttatttatttatttatttatttatttatgatttattttgagaaggagttttgctcttgttgcccaggctggagtgcaatgtcatgatc

SEQ ID NO: 16184 - DNA, 201 bp, Homo sapiens
gcaatggcaacaaaagccaaaattgacaaatgggatctaattaaactaaagagcttctgcacagtgaaagaaactaccatcagagtgaataggcaacctamaaaatgggagaaaatttttgcaacctactcatctgacaaagggctaatatccagactctacaatgaactttaacaaatttacaggaaaaaaacaaacaac

SEQ ID NO: 16185 - DNA, 201 bp, Homo sapiens
ttacaatttataggccttggcagaatagagatctgagcttgtgcttagtaagaactaggcaatggaaatttgctttcagaaatacatttctgtcttgacartaagttaattggatcattgcaatgatttttttaaatctctttccataacaaattatagttaaggaaaattttacaaagggagaagagaatatgaagaggg

SEQ ID NO: 16186 - DNA, 201 bp, Homo sapiens
actcataggtgggaattgaacaatgagaacaacacggacacaggaaggggaacatcacactctggggactgttgtggggtgggggtagtggggagggatasctttaggagatatacctcgtgctaaatgacgagttaatgggtgcagcacaccagcatggcacatgtatacatatgtaactaacctgcacattgtgcgcat

SEQ ID NO: 16187 - DNA, 201 bp, Homo sapiens
acaatgagaacaacacggacacaggaaggggaacatcacactctggggactgttgtggggtgggggtagtggggagggatacctttaggagatatacctcrtgctaaatgacgagttaatgggtgcagcacaccagcatggcacatgtatacatatgtaactaacctgcacattgtgcgcatgtaccctaaaacttaaagt

SEQ ID NO: 16188 - DNA, 201 bp, Homo sapiens
acggagcccagtcctctctgagttccttgtttgggtgtcttgtttttttaagctttgtgctgcatgggtttattaccagtactctgcatacacagtccaaragagtgaaaagaaatagaaaactataggacgttatccagaatgaccacaaaccttcagttccctttgctgtattgcacttactccatttcaaaaggaatg

SEQ ID NO: 16189 - DNA, 201 bp, Homo sapiens
tatcttccaaataaacactcgatttttcagattcactatcaacatacatttattcttggagagttggaaggaattttctttttccttttaaaaaagttacatatatatatatatatatatatatatatatatttttttttttttggtaacagggtctcactctgttgcccaggctggaatgcagtggcatgatcatcatag

SEQ ID NO: 16190 - DNA, 201 bp, Homo sapiens
atcttccaaataaacactcgatttttcagattcactatcaacatacatttattcttggagagttggaaggaattttctttttccttttaaaaaagttacatatatatatatatatatatatatatatatatttttttttttttggtaacagggtctcactctgttgcccaggctggaatgcagtggcatgatcatcatagc

SEQ ID NO: 16191 - DNA, 201 bp, Homo sapiens
tggtctcgaactcctgacctcaagtgattcacctaccttggcctcccaaagtgctgggattacaggtgtgagtcatcacacccagcctataactttttttwaataggtgatagaatcccgtgcttgaaaaataatcaaacaaaaagagaatgcattgtaagaagcctcactgtactcctgtccccagctgcccagttctcc

SEQ ID NO: 16192 - DNA, 201 bp, Homo sapiens
ttggtttccatttctgagttacttcacttagaataatagtctctaatcccatccaggttgctgcaaaagccattaattcattcctttttatagctgagttwtatatatatatatatatatgcacacctacacatacatatgtatagatacactgcagtttctttatccactccttgattgatgggcatttggggttggttc

SEQ ID NO: 16193 - DNA, 201 bp, Homo sapiens
tacagtccaacaaatgtacatcttccctgaaatatgaagtgatttggttcttctgttcatacttgattgactttaatccttaacacataaacactgctttytatttataggagacagcaatttttttttccaaaccgaagtacatgctatttggcttacaaatatataatcaaagtattgtttcatacagtatgttttttc

SEQ ID NO: 16194 - DNA, 201 bp, Homo sapiens
aggtttgagctggtctctgaagtcaaggagatgatgacactgaattttcttgaaaaaaccagtgcttcaaggctataggatctgaaaggttttctaacagygttctatcatgccaagtgtttcagcaatgcactgagcgtttgttagtcctggtgttttattgtttggcttttaggtggcaccccttaccccggcatgatg

SEQ ID NO: 16195 - DNA, 201 bp, Homo sapiens
ctatcaagttgcccgaggaatggagtttttggcttcaaaaaatgtaagttcaaggaacacagacctttttagacccagatttcagtgagtggagtgtggamggagatgctaggagatagatgttggaaaggccattaataacaggggcctcttacttacctgtctctctccttcatcccctacgcaggtcagggagtctga

SEQ ID NO: 16196 - DNA, 201 bp, Homo sapiens
cctacgacagcagacagggctttaatgggaccttcactgtagggccctatatctgtgaggccaccgtcaaaggaaagaagttccagaccatcccatttaaygtttatgctttaaaaggtacttgtatcatctccttccttctttaaataagagtaacaggcaaaatcataaggtgcgtgtaggatttttttttttttttaa

SEQ ID NO: 16197 - DNA, 201 bp, Homo sapiens
gaagttccagaccatcccatttaatgtttatgctttaaaaggtacttgtatcatctccttccttctttaaataagagtaacaggcaaaatcataaggtgcrtgtaggatttttttttttttttaaatcatcatcactggtgatcctaaattctgatttggggatttaggaccccagctaatacaatgtctgtggctataat

SEQ ID NO: 16198 - DNA, 201 bp, Homo sapiens
tcactatcaacatacatttattcttggagagttggaaggaattttctttttccttttaaaaaagttacatatatatatatatatatatatatatatatatwtttttttttttggtaacagggtctcactctgttgcccaggctggaatgcagtggcatgatcatcatagcttactgcaatctcaactcccttggttcaagc

SEQ ID NO: 16199 - DNA, 201 bp, Homo sapiens
tttttaacaatgaggtggttgaccttcaatggacttaccctggagaagtggtaggtaccctcaaaacgtgcaatggcttggagcagagcaacagggctcaraagacctgcatttgagctcggtctgtcactgatgggcacatcactgagtttctctagaccttagcttcccacctctgggatgaacacatttgattaaatg

SEQ ID NO: 16200 - DNA, 201 bp, Homo sapiens; identical to SEQ ID NO: 3301

SEQ ID NO: 16201 - DNA, 201 bp, Homo sapiens
catgaatatatttatgtggacccgatgcagctgccttatgactcaagatgggagtttccaagagatggactagtgcttggtaagttccatggggtaacctyccaagactcccttttcccttgcacacaactttacaatttataggccttggcagaatagagatctgagcttgtgcttagtaagaactaggcaatggaaatt

SEQ ID NO: 16202 - DNA, 201 bp, Homo sapiens
catatggaaaacagaaggggagagagccaggaggtgtgggtgagagccccgaaggcaagaggatcccaggggctggcccagcacggagctggtagacagcrcgctcacaccagggagggctgcaccctcctttctcccgtctgtgttttctttcccttgcaagtgttattcgacaaaagcaattatgctaatttccttccc

SEQ ID NO: 16203 - DNA, 201 bp, Homo sapiens
ccatgatccagtcacctcccaccaggccccacctccaatactggggattacacttcaacatgagatttgggtggggacacatatccaaactatatcattgygtgtgtgtgtgtgtgtgtataatttttaaaccagatatatgtttctgcatatctctttcctttctttcattctttctttctttttttttttttttttttt

SEQ ID NO: 16204 - DNA, 201 bp, Homo sapiens
attagtagagatagggttttaccatgttggccagactggtctcaaacttctgacctcaggcaatccacccacctcggcctcccaaagtgctgggattataggcataagccaccatgcctggcctatatatctattttctaagatagaatctttgcatagtgatattcatctgtgagatctaaacattctacaaaaaaatta

SEQ ID NO: 16205 - DNA, 201 bp, Homo sapiens
aggcctgggggcagaatcttgccatactgtgcagcccaaatttgaatgccaaaggctttcgtttgtctctggggggccacagtctaggtctagttctgtgyaggagttgtaatatttgctcttctctccctcctccagctcgcagacctctgaagagagtgccattgagacgggttccagcagttccaccttcatcaagag

SEQ ID NO: 16206 - DNA, 201 bp, Homo sapiens
tgggtggagtgagaacctgggagaaggccagccctttatatccaggcagacagctccaagtgccaccatggatcagccagtcttgcaggggtgatgctatatcagctacagatggcttgatcctgagtcatttcttccttttccatgcagtgtgtccaccgtgatctggctgctcgcaacgtcctcctggcacaaggaaaa

SEQ ID NO: 16207 - DNA, 201 bp, Homo sapiens
gctatggggattaaatcaatgaattcatgtaaagtgcttaggacagtgcctggcatatagaaacagcactcaataatgttagctattttatttatttattwatttatttatttatttatttatttattttctttttttttgagacagagtctcactctgtcacccaggctggagtgcagtggcgcaatcttggctcactgc

SEQ ID NO: 16208 - DNA, 201 bp, Homo sapiens
ctatggggattaaatcaatgaattcatgtaaagtgcttaggacagtgcctggcatatagaaacagcactcaataatgttagctattttatttatttatttatttatttatttatttatttatttattttctttttttttgagacagagtctcactctgtcacccaggctggagtgcagtggcgcaatcttggctcactgca

SEQ ID NO: 16209 - DNA, 201 bp, Homo sapiens
ctattttatttatttatttatttatttatttatttatttatttattttctttttttttgagacagagtctcactctgtcacccaggctggagtgcagtggygcaatcttggctcactgcaaacttctgcctcccaggttgaagcaattctcctgccttagcctcccgagtaggtgggattacaggcatgcaccaccatgtt

SEQ ID NO: 16210 - DNA, 201 bp, Homo sapiens
ccaggttgaagcaattctcctgccttagcctcccgagtaggtgggattacaggcatgcaccaccatgttcagctaatttttgtatttttagtagagacagsgtttcaccatgttgcccagactggtctcgaactcctggcctcaagtgatctacctgcctcagcctcccaaagtgctgggatgacaggtgtgagccactgc

SEQ ID NO: 16211 - DNA, 201 bp, Homo sapiens
atcaggcagccagttaaagttcaaattatctcacaaatattatcatactccattaaaaagtgggcagaggacataagcagacacttttcaaaagaagacakacctgcagccaacaagcatatgaaaaaatgctcaacatcactgatcactagagaaatgcaaatcagaaccgtgatgagataccatctcacaccagacaga

SEQ ID NO: 16212 - DNA, 201 bp, Homo sapiens
aattatctcacaaatattatcatactccattaaaaagtgggcagaggacataagcagacacttttcaaaagaagacatacctgcagccaacaagcatatgaaaaaatgctcaacatcactgatcactagagaaatgcaaatcagaaccgtgatgagataccatctcacaccagacagaatggttattattaaaaagtcaaa

SEQ ID NO: 16213 - DNA, 201 bp, Homo sapiens
ctgcctcccaggttcaagcgattctcctgcctcagcctcccgagtaactgggattacaggtgcccgccaccacgccaggctaatttttgtatttttagtasagacggggtttcaccatattggccatgctggtctcgaactcctgacctcaggtgatccgcccacctcggcctcccaaagtgctgggatttacaggcgtaa

SEQ ID NO: 16214 - DNA, 201 bp, Homo sapiens
cgattctcctgcctcagcctcccgagtaactgggattacaggtgcccgccaccacgccaggctaatttttgtatttttagtagagacggggtttcaccatrttggccatgctggtctcgaactcctgacctcaggtgatccgcccacctcggcctcccaaagtgctgggatttacaggcgtaagccaccgcgcccggccag

SEQ ID NO: 16215 - DNA, 201 bp, Homo sapiens
tgaattcttcaaactttaagtgtaatggacttacaggtccatgggagcacagccccactgtcttagatgtggctcttcaggatgtgcgggctcctgctaargatgtgcagggaactggctctgaaaacaagtgaacagtagtcatcatggcagctgacatttgtggagtcctttgtatgtgccaggtgccatgacaaatat

SEQ ID NO: 16216 - DNA, 201 bp, Homo sapiens
ggggtttcaccatattggccatgctggtctcgaactcctgacctcaggtgatccgcccacctcggcctcccaaagtgctgggatttacaggcgtaagccamcgcgcccggccaggaacggttcttaaatgccgagagggcgcatgctagctctcctcagcattcccggtgagccgctacccacggccgtgcggctctcgtg

SEQ ID NO: 16217 - DNA, 201 bp, Homo sapiens
ttaaatgccgagagggcgcatgctagctctcctcagcattcccggtgagccgctacccacggccgtgcggctctcgtgcccataggaggcgctggcgagckcctgtaaccctaaacccctcggcccctttccccccacccgcccggattctcttcccgctctcccccctctctccacacccgcccggccccctctcgggtc

SEQ ID NO: 16218 - DNA, 201 bp, Homo sapiens
gatgctaggagatagatgttggaaaggccattaataacaggggcctcttacttacctgtctctctccttcatcccctacgcaggtcagggagtctgaaatyatcaggcatctactcttctctagagctttctctctgttgggagtgggtggagtgagaacctgggagaaggccagccctttatatccaggcagacagctcc

SEQ ID NO: 16219 - DNA, 201 bp, Homo sapiens
atttagatgtaattagccataactgaaaggaaatttatttatttatttatttatttatttatttatttatttatgatttattttgagaaggagttttgctsttgttgcccaggctggagtgcaatgtcatgatcttggttcactgcagcctccgcatcctgggttcaggcatttctcctgtctcagcctcctgagtagcta

SEQ ID NO: 16220 - DNA, 201 bp, Homo sapiens
ttaacaatgaggtggttgaccttcaatggacttaccctggagaagtggtaggtaccctcaaaacgtgcaatggcttggagcagagcaacagggctcagaaracctgcatttgagctcggtctgtcactgatgggcacatcactgagtttctctagaccttagcttcccacctctgggatgaacacatttgattaaatggcc

SEQ ID NO: 16221 - DNA, 201 bp, Homo sapiens
tcctggtcttaggctgtcttctcacaggtacggagcccagtcctctctgagttccttgtttgggtgtcttgtttttttaagctttgtgctgcatgggtttwttaccagtactctgcatacacagtccaaaagagtgaaaagaaatagaaaactataggacgttatccagaatgaccacaaaccttcagttccctttgctgt

SEQ ID NO: 16222 - DNA, 201 bp, Homo sapiens
tttgtgcgactatttgattaatgctcatttccttgactagatcacctcatgtgaaaggtatggattggttttgcttttacccagttagctcccatgcctayctcagtacctggcacattgtaggtcccccagaatcatcatctactgaaagtggaatgaccacttcagaagggcaccctgggtaagatttctctttctgtt

SEQ ID NO: 16223 - DNA, 201 bp, Homo sapiens
cgagggctataagaaatggaagatgtggaattcttgagcacagatgtgctttgtgttttcttcagtctgtgtccttgcctccattcttattccatgtgggktttttttttttttttttttttttttttgagacagggtctctcgctctattgcccaggttggagtgcagaggctgactgcaacctcaatcccctgggctcc

SEQ ID NO: 16224 - DNA, 201 bp, Homo sapiens
aagtgtctatactcactctgggtgttgggactttccagtggtttaatatgatacttaaagtatttagagggaagtgtatagggatggtaagtgaacctggmagcccacgtggtctctaaatgcaggtctgcacaaccagttctgtgacatgtttccaggtttgtggcctgtaaattgaaaagaataaaagctgacaatgta

SEQ ID NO: 16225 - DNA, 201 bp, Homo sapiens
gaattgatggaagctcattggtttttgagcaaaatctgttgccagtccagtcatagccattcatggctctttattaaaaaaaaaaaaaaaaaaaaaaaaavcttttttggtatcttatttttttctgcgccatatggtctgcaggacaattcatggcttttctgttcttcattttcatacccatctcctaacggcttttgt

SEQ ID NO: 16226 - DNA, 201 bp, Homo sapiens
aattgaaaagaataaaagctgacaatgtaacaaattttttaaactttaaatttaatagttttaaagaattttcttggtgtgttcctgcagtaaacattttwaaaaaaaaataattatttattctgatataatgaacttccttttttattgctgtctttttcttttttaatgaaaatatggtgattgattttttttaatgcc

SEQ ID NO: 16227 - DNA, 201 bp, Homo sapiens; identical to SEQ ID NO: 3317

SEQ ID NO: 16228 - DNA, 201 bp, Homo sapiens
aagcaccattttgttagaactcagaggagaagctcgatctctgagccttccctcctcacagtttgggaaacatgcacaggatgaaggtaaatcctgcataraaatcttgtaattccagaattagtcaaacaaatttgaaatacacacatttaaaaatacttacattctcatttagcgttcatgaagtgattactgacattt

SEQ ID NO: 16229 - DNA, 201 bp, Homo sapiens
tgatcctataatgcatttatgcatttaaaagcacagagacacaagtcctcatatatgaagttgttatggttacagaaagaaaataaatatttgtgcacacrgagatagcatgaaatcattctacagtgaaaataatagcctctggaaaaagctttgaaaatcagagatggtgccatcaccagacaacacaagtgctggggt

SEQ ID NO: 16230 - DNA, 201 bp, Homo sapiens
aaacccatataaaaatgggccaaggatttaaatgaacacctctccaaaaaagaggcacaggtggcaaagaagtattgaagagatgctcaatagcacatgtmattagggaattgcaaattaaaacagcaatgagatatcactacatacctaatagaatggctaaaatccagaacactgacaattccaaatgttggcaaggtt

SEQ ID NO: 16231 - DNA, 201 bp, Homo sapiens
actgctgatcccccaggcagcaggaagtgaggaggacagggaagctcagggccccgcacaactaatgtcctggggcccaagtgctgcatgaagggtttttscctctaggttttgaaagtgtgttttggtcttccagtgttccttaagaaaatgcccctcttctggaataagaagaaatcctaacgcaatgaggccctacaa

SEQ ID NO: 16232 - DNA, 201 bp, Homo sapiens
gtgtttgtggatgcatatctctgtgtcatgcatgtgtgtgtttatgtgtgtgggtgtgtgtgttgggggaacagccatggttgttcatatcgaggaataayttccaagtgtatgttgttaatgaatagacttctaacaggatcagctgcatttaaccctaaataatggatatttattgcaagtgtcctgtaccattagcat

SEQ ID NO: 16233 - DNA, 201 bp, Homo sapiens
tatctaatcttcctggaaaccttgtgaggcggcactgcttgaacccgtcttacagcctttgaagggtcatgtggtgcccgtggccatgtgaccagcaggtktcaggctggggtcacacccaggtgtgtatgctgttcacaccacatatcagccctgcggggtgcttacagcggaaattgtgcaggttcctgcccaagaggg

SEQ ID NO: 16234 - DNA, 201 bp, Homo sapiens
gggaaaataagctgaagccttcgaagctggattttagagtgaccgagtgttggagctcacttctcacctggcacaaaaatcttcctgtttaagctatgatrtagatgcctgcaaatccaacattacagttcctctagcattgacaacattgctccaagcaactgcatcttcccttgatggaacagtatccactttgtgcaa

SEQ ID NO: 16235 - DNA, 201 bp, Homo sapiens; identical to SEQ ID NO: 3312

SEQ ID NO: 16236 - DNA, 201 bp, Homo sapiens
acgtcccaattattttcttccacctcacaaatttcattatttcatgatacttgaacacagtaggagccccacagagacaggtcacaggcttggcttcagaycttacaatatgaactatgtggacaggcgtaaggccagtggcagaggcaagcaggctttgcaggaaggtgacaggagggtgctgggcctcaccaaggccag

SEQ ID NO: 16237 - DNA, 201 bp, Homo sapiens
tgggcagtatgctctaagggggcccgagtgcctggcgtggggggaggttgaggggtcagctgcaaggaccagggtgtgtctgcccacaggaaacctgggcytgctcttgctgccacctctttgtactgtagtcagtgcccccatgcctgcccatcccctcccccggtcactcagggccccctttacctgtactggttctcc

SEQ ID NO: 16238 - DNA, 201 bp, Homo sapiens
tcgttgttttgtgtggccacggaggagtccccacctgcaggctcctgggggccagaggcagctgtggcgtgatggatgctgggctccctccagacgcctgrggacccactgggggccagcatcttgagtggggcagatgtgatgggggcgtcagatgacagcgaaggtctacttgtggtgggtgtagccttgggggtgccc

SEQ ID NO: 16239 - DNA, 201 bp, Homo sapiens
aaaaatcatttataaatcattaatatatggattccaccagggatacatacaaaaaaaaatggtttagatagaggagcctactcaaacatgctcaagcctgkgtgcagacatagactcactcattattaaagcttaccctggaaagagccacgtgaatctttttgggaacaatcatcccatgctccagctggagggaaccgg

SEQ ID NO: 16240 - DNA, 201 bp, Homo sapiens
cagatgtgatgggggcgtcagatgacagcgaaggtctacttgtggtgggtgtagccttgggggtgccctcggggccccttgtgggactggctgttgcagcrcggggcacggtgctcccttctttctctcctttgtcctcctcatcggggggcccagatggtggtcccagagacacaggccccatggtgcaagagaccccat

SEQ ID NO: 16241 - DNA, 201 bp, Homo sapiens
caaccctgctaacgtcacatggcagggcacacaagctggtggctgtgttattttccaactgaaaaatcatttataaatcattaatatatggattccaccarggatacatacaaaaaaaaatggtttagatagaggagcctactcaaacatgctcaagcctgtgtgcagacatagactcactcattattaaagcttaccctg

SEQ ID NO: 16242 - DNA, 201 bp, Homo sapiens; identical to SEQ ID NO: 3319

SEQ ID NO: 16243 - DNA, 201 bp, Homo sapiens
gacctgggccccccagggccagaggccggcacatgcctttgaagctgaacttgcacacgaagccctcaatgttacttccgggggagcctgggctcccacasgggccctcagaccacttggggaggcggctgggaaggagcggctgggacaggtccagcagcagagacacacagcgcttggagatgcacgagttccggagct

SEQ ID NO: 16244 - DNA, 201 bp, Homo sapiens
tagttacaatgcctaagcatagaatgataaaaccttcaaacgttagtgtcaggggatgctgggcaatcactggttctacccctgcaggtagaatggaggayttcagttcaaccggccagctacgctccaagcctaatatggaagtccaatgttttcttctgctggtgtggtgcagggcacggatttcaggaagtttgtcaa

SEQ ID NO: 16245 - DNA, 201 bp, Homo sapiens
tctgcagccctagcatccactcatagcagggagccgttctcgtggtctaggcccctgtttgtgcagctcggaggtagattcctcagaggtagattgtgatmtgcagcattcgctcagcattctacttagttggtgcttaaggatatgggctaaatgagtgactttcagcatgttagccactctgacccccagatctttgtc

SEQ ID NO: 16246 - DNA, 201 bp, Homo sapiens
attgcagggtttctttctggggtgattaaaatgttctagaattaatttgcaaaactctatgcgtatgccaaaagccattgaattatacattttagataggyaaactgtatgatgtgtggattatatctcagtatagctgtttttaagaagaagaacatatgttcccccagtgaatgaagcatgagagcttaagtgatgaac

SEQ ID NO: 16247 - DNA, 201 bp, Homo sapiens
cacgatgctggaatggaatgttctgatctcaaatatggggcgagtttaatctcagttatttgggagcagactaattggtttgtggatcattcaggcatccrgcctgtctttttcctttttttttttttttgtaactaaaaattaaattaaaaagggaaacaaagcacactgcgtatttcctggcataacatggtatatggt

SEQ ID NO: 16248 - DNA, 201 bp, Homo sapiens
ttgtaaaattgaaatttgtcctttattaatcgtttgctttaaaacttaaaaaactaggaaaatcactaatattgattatgacatgatgatttctgaaagtyattgtgttgtacagaggtgaggggtgctacaaggttcaccctgggcacaaagatgccaggattgctgcaggcaaccccactcgaggacacccgtctgccc

SEQ ID NO: 16249 - DNA, 201 bp, Homo sapiens
ttcagtgattgcttccccaaaaacacatttcacaagaggatagactttatcacatgggttcagccgggctgtgtcatagagacccatcccaactcaccccrtgttattaccagtgaactactgagatgctaaatctttggcttcttggtttgagttgtggaaggacagataaacaaaagtgcctgctaagacccagatatc

SEQ ID NO: 16250 - DNA, 201 bp, Homo sapiens
caccaccaggaatgtcagacaaccatcagatgatggtcaggcagttgttaactgtctttctaaaataatttgttgcagccagtgccagggaaagcagtctycctatcaatagaagaaacctcaaactggggatcagcagcttccagataagatctcaggagctgggtaagtgggctcaagcttgtgcattaagatgcaaaa

SEQ ID NO: 16251 - DNA, 201 bp, Homo sapiens
gctgggaaggccgccccagcacccaggaaacgaaggagctgctggacacgggggtctgaagctcccggaatgcacacagctgcgcctcccctgacgcggascccctgggaagaggaagggaagagcggcagatagcacagtagggcttgtccggcgggagcagtcaagctgtggctgcctaggctgaatcagggggtcgtg

SEQ ID NO: 16252 - DNA, 201 bp, Homo sapiens
agtctcctcatgatgttgtggagcatggagcagggaggaggtgtgagcagcctgccgcggaacaggaggctccacagatgcagataaccttaagagcacasgttgcagtaaaaatcatcaggcatgcaggttttactatttattattttaaaaaatataatttacttacctgtaggtttacaaagtttatttttaataatg

SEQ ID NO: 16253 - DNA, 201 bp, Homo sapiens
aagataattggaactatatattttaatgctattttacagaagtatattataatatattctttaaatgcatgaaatgtgagaaattgaacaatgaaaatatmtatcactaatataactgcaaatatttagtgcttgcctttaattttttgtgaaaattagagatctgaacattttgttagcacagtaagtatatttaatata

SEQ ID NO: 16254 - DNA, 201 bp, Homo sapiens
agctagcattgccctcaaagatgctcagcaagttctttcacagtaagaaatttcagagaaactccaaggagcttctctggaagagaacatctggggaatgyctggcttccatgcacccagcccagtgctggttgctagaatgcatagcaatgacctatgagcagtgggcccagcaaattattaactacagcttttcaggaa

SEQ ID NO: 16255 - DNA, 201 bp, Homo sapiens
gggctgatcacgaggtcaggagatcgagaccatcctggctaacacaatgaaaccccgtctctattaaaaacacagaaaattagccgggcgtggtggcgggygcctgtagtcccagctactcgggaggctgacgcaggagaatggcgtgaacccaggaggcagaggttgcagtgagccaagactgtgccactgcactccagc

SEQ ID NO: 16256 - DNA, 201 bp, Homo sapiens
ggccggccagggccagcgcgccaaggaccaggaccccaagcatgttacccaggcgcgccgcgtgcaggcgccggggaaagcgcgggcactgcgacagggcsgtgccggagcagaggggcacaggacgccgatggcgacagcctctcctgtccgtcccagcccagacacttcttgccgctgcgcgcagcccctgcgaggcag

SEQ ID NO: 16257 - DNA, 201 bp, Homo sapiens
tctccctcagacctggatgtccaatgatgtgaacagaaagcagagatcacacaggttgacccatggctctggtttcacaaggtctatcctgattttaaatkctcagggatagtttttaaagctaactgatttgtttatgtggtcctggtatctttccctgagaggcactatggctatttagcgttttgagaatctcaagtt

SEQ ID NO: 16258 - DNA, 201 bp, Homo sapiens
atgagcaagcccgaatgcacgagccccacggccggaggagtcaaggtggagccgggcgtcgggctgggcgggggctcgccagagccgctgtcgccaccgtmcaccttgccggagtcacagtcggtgccaatgtggcgggcaagggccgagtcgggcccgcagatgcactcgaaggtaccggggaggttgtggcacaccccg

SEQ ID NO: 16259 - DNA, 201 bp, Homo sapiens; identical to SEQ ID NO: 3320

SEQ ID NO: 16260 - DNA, 201 bp, Homo sapiens; identical to SEQ ID NO: 3321

SEQ ID NO: 16261 - DNA, 201 bp, Homo sapiens
ttctggtgaaagagtagccttccttcgcgggcactgacactgagggaagcagctcagtggctacttccacctgcagatattccaggtggtggctcagaacwgctgacaaccatacctggggaagactggcctttatttttctggttgttcatactccaacagctagcaccgtacgttggggtccaatgaagcgagcagcag

SEQ ID NO: 16262 - DNA, 201 bp, Homo sapiens; identical to SEQ ID NO: 3322

SEQ ID NO: 16263 - DNA, 201 bp, Homo sapiens
gactgtggaatggaagtttcaaaactaagtcagagaaccctctgatcctgcaaacacacatgcacacacacagagacatcaaccatctctaatttgttggyacccaccagggataccttgggcatctgaagtcagtctccatgtctgtgggtctcgtgtaaccataactacttggagttttttaaaactgcattatttctt

SEQ ID NO: 16264 - DNA, 201 bp, Homo sapiens
gtcagagatcttgctttttcttttacaattgtctttaatgtactgttccatggcaagccaggtgttccattttcccagatggtcagggaagatggtatttrgacatgacaggctgtcactcagcaggatacttgcccagtttgtcagctctgatctgtgagcaaagatgcatatgagtttcacactcatctgtgaagtatt

SEQ ID NO: 16265 - DNA, 201 bp, Homo sapiens
gtgaagtattggcttcactttcattaaagtcatcatagctggcattccttagatgctagaggtggatgcaaaggatcaactaaatatagcacgttttggcrgcactgcctcagaaaccagacatgaatcctagcaaatgtgggcattgacactcttctctgagaggttggaggtagtgaattacccccatctcccacattc

SEQ ID NO: 16266 - DNA, 201 bp, Homo sapiens
cgccaaacagagcagagtgctcctcaagatccagccgcatcccaaaagcaccatttccgtttgtcacgggcctccaggcagcttgctgttgagtttgctcrtgtttatcatggccgtatcctgtgctgtggagagtcatagacaaattaaacagtgaaactgggacttgccccatgcccttttcagactttccattctcct

SEQ ID NO: 16267 - DNA, 201 bp, Homo sapiens
ttattaaaagagggggacaatgaacaaggcgtaggatctccaaagagtctgtggaaggtgggatccatgttcccaaaggatttaaatcgaaacaaggcagkaggcagtgggaaaaggggaggaattagggagaatgtggaaaagcccctctcctctttgccaagtagaacaaagctttgctggacaacagcggggtaactt

SEQ ID NO: 16268 - DNA, 201 bp, Homo sapiens
aatgctggatagaccccacctgcacacagagaagaaaggctgctggagagacatcatcagaggagagagacagtggctctaatccaagaatccaggcaacrtgtgtagggctcagggtggcatgtgtgtgttttcatgcccagcaccaggacctgagcactgagagctttccctacctgccatgggatcctggtatcaagg

SEQ ID NO: 16269 - DNA, 201 bp, Homo sapiens
tcagcccagtctcccaaggccaggactgctgcctttgccttgccgcatctcagtgggcatccccaagctccactgacttagcacaagatgggaataatagyccctatcttctgtagtttcaaccactagtcaaaatgtgccacttactagccacgtgcccctgggcaaacaccgttcctctctgggcttcagtttccttac

SEQ ID NO: 16270 - DNA, 201 bp, Homo sapiens
ccatctgaattctgctctcactgctggcccatgttctgtggcttcagccgagtaattcaactctccagggctctttgtcatccatctgtgagagccagtcygggcagagaaggagaggagcagggcaagctgagaatgcagcccatgatgccgccccgattatggtgtttcctcactggacacgtggatgaagcgtgctcg

SEQ ID NO: 16271 - DNA, 201 bp, Homo sapiens
aaagatatttgagacattttgggaactctccatagaagccaccagaccctccctgtgccccttcattcatccatctgtttgtccatccacccatctaacawttgttgattaagaccctgctatgcactgagtgaggcactggattccaggaggggatccctgcctctgtgatcctggagtcctgttagagtggacaacttt

SEQ ID NO: 16272 - DNA, 201 bp, Homo sapiens
ttctttgcctgcttttattttaccagtggctacatttcatcatccagcttcatttcccatagaagttctgaatgttgtctggttttcctcgaaactatgartcacactgtgcacgccctacctctctctagcattgtaagaaaagcactcctctgtgcaggacacaatcctgtctactgcccctgagagccctggttcatc

SEQ ID NO: 16273 - DNA, 201 bp, Homo sapiens
ggacccactgggctccagcactgcctgtcacacccctgcaagccaggtgaggctggctcaggctggtgaggaagtgcttgtgaggagagccagggctccaygccagggtaagagtaggaccaggaacgatgtatttggttattgacttttcctgcttcctgagctttataacaacacggggaagagggtcctgtgatcatc

SEQ ID NO: 16274 - DNA, 201 bp, Homo sapiens
aattattaactacagcttttcaggaaaaaaaataacccatttgtatcatttgcctctttccgtggtataaatacctccaccagggtcagcttcagtctccycatgatgttgtggagcatggagcagggaggaggtgtgagcagcctgccgcggaacaggaggctccacagatgcagataaccttaagagcacaggttgcag

SEQ ID NO: 16275 - DNA, 201 bp, Homo sapiens
cgtaacccactggaagccgcgcaggggcccgaggcgcttggggtcgccgcagccgggtggcagctgcaggccgatccagaggcgccggcggccaacgccgscgtcgccgttcagtagcaaggaaatgacatcggcagccaccgaggagcgcactgtcattaggtggccccgcagtccgtcgcagatctgactggcattgag

SEQ ID NO: 16276 - DNA, 201 bp, Homo sapiens
ttcagtagcaaggaaatgacatcggcagccaccgaggagcgcactgtcattaggtggccccgcagtccgtcgcagatctgactggcattgaggaaggtcgyggggcccgggtagagcgcgaagcagtcgtgctcgacgcactggctgccacccggctgcggctctgcgggtgcggggaaccccaggccggccagggccagc

SEQ ID NO: 16277 - DNA, 201 bp, Homo sapiens
gtgtcagctcccgtccccgccccgggctgggtcaggagcagcagcagcagcagcagcaggcccatggaggtggccatcccggtctctgtgtggccctctgygggaggcgagaagcccagcggcgacaggagcttctatctcggctcccagctgggccccaaggggagctgaggggtgagctgcagccactccggcgcagag

SEQ ID NO: 16278 - DNA, 201 bp, Homo sapiens
ggaggtggccctgtcagcctggaaccggcatcgggagtgcccgtgggaccatttgattgacactttgctcctccagttttctgatcagaccgtgacttttrgctgtgatattgtccaggcctgccaaagtccactatggatgccaggttcagggacccattctgccctgcagttgacccttgtctcctgctcaaccctgaa

SEQ ID NO: 16279 - DNA, 201 bp, Homo sapiens
agaaatcttaagtgaccgactgcactagacatttattacatggaaagaggagtcactgagtaatggtattggtgtagaatcaagtaatgattgtgcacagrattctcttctctttgtggttcattgaattgttgtgacttttatataatggcctgcagaataacagtgcacctccacaaaacctcagttcagcctaaaggg

SEQ ID NO: 16280 - DNA, 201 bp, Homo sapiens
gacagcagcgatggtcacgttgggctgttgagcatccatgcatgcagggtgtgtgctctttgtatctggcgtctttgggcaattcatccgcattgtgtgtkgttgcaggctgttcatctcactgctgagtattccactttgtgaatatgccacggttttgcaaatctattctgctattgatgagatttagatggtttccgg

SEQ ID NO: 16281 - DNA, 201 bp, Homo sapiens
cactcacccagtgtgaacgtgtcgtagatggggagaaagaacaaattgagaggcacacaaaccaggactgagttccggctctcccacttccagcccacagyggcccagggaaggctgcatgactgtgtggagagggcagagcaacagtatccacctgcaggtgcacagtgacacacaaaggccatgttcctggcccagggg

SEQ ID NO: 16282 - DNA, 201 bp, Homo sapiens
gcaccatctcagctgagggagaggctccactgctctccaagtcccctgtcattggtagcaggctgtatctctcactttgagagactgactataaattctakccctgcccagtgaccaggggtctctctcacataaaacttgtttctatggacagacacccttgtggctctcgtctgacccatgtccagtttattcctatca

SEQ ID NO: 16283 - DNA, 201 bp, Homo sapiens
accgtcgtccaggatgtagccttcagggcactcacagctagcctgggtgttggggtcgcagtcggctggacaggcagtctggttgcaaaacatctggcacytgtgcggctcgtggggaatgggcgcgaagccctcggcgcagacgcagaggtagctagtttggttcaggggctggcactggtactcgcagttggctctgaa

SEQ ID NO: 16284 - DNA, 201 bp, Homo sapiens
tgaggcctcccagagatactcaggtaacttctagtgactctgaccatcggtgacccccaggaatgtgttccagtgccccaggcagaatggtgccgtgtctstgtgtgtgtgtgtgtgtgtgtgtgtgtgagagagagagagagagagaaagagtgcacactatcgactacattatcatagggagaaatatttgcaaatgta

SEQ ID NO: 16285 - DNA, 201 bp, Homo sapiens
ggctgacggcagcacacaagcccttccttactgaagacagcactcgcttcccagcccagagagggcatcagcaggcacaagagacgtctggaagggggctytactatcttcccagatcttcctgccttttaaaagacaagaactgctctcctctttgttttgtcactacataggatttatggctctttgctgaaatactat

SEQ ID NO: 16286 - DNA, 201 bp, Homo sapiens
caacgagcgccagggggcggcgctgtcgagctctaaacaaagccaaggaagttggagaagtttcgggctaaaaagggttaaggtgtaggagcacagagtcytccttctggggttggaagctccgttcccgggcagctcagcgtggattccgctgcgttcacctcttgcctccagggcccagtagatcctgggctttaaaca

SEQ ID NO: 16287 - DNA, 201 bp, Homo sapiens
atttgcatggtttgtgagccccatttaatgacataaaatgagggcactgagggaggaaaagtgaacagacacacaacccgagagcacattgttatttgttkattttgtacaagtgatgtcataagcaaggattttgcctgtgttctagattatctccaataaataaataactatgtacaaatattttgagtttacaaaata

SEQ ID NO: 16288 - DNA, 201 bp, Homo sapiens
cccaacagtaaactgtgagacagtcagagctggaaactcatccctcttgtctattgctggctccctagtgcctgctatagggagcaagtgatcagtaactmcttgatcccagccatacatgggaatcacctggggtgggggacaaaccatagtaccaagccccattctggaccaactatatcagacttgctgtgggtgagg

SEQ ID NO: 16289 - DNA, 201 bp, Homo sapiens
atttcttctttaaaaaatctttccgagccctgcatattgcattcagccagccctaccaccttagaaaagtgagcccaagaaacgtgtgcattgaaaagatsatgttgttaatctccaaaagagatgagaatgatttcatactggatgagacgtttagaaatgaatatttgaatgagagccacaaactgagacccttcatga

SEQ ID NO: 16290 - DNA, 201 bp, Homo sapiens
caaatcaaaacagcaacaaaattcaggctcactgtttaaaagtaaagataaatacctctttgggtgtaatttctatgacagtccagcaacatcaatttaayaccttttacatctcaacctttgtttaaaattattttgctctgggaatctgaaatttcaggataaattagcaaatctggtgaaaaagcaaatggccatttt

SEQ ID NO: 16291 - DNA, 201 bp, Homo sapiens
agtcaaggtggagccgggcgtcgggctgggcgggggctcgccagagccgctgtcgccaccgtccaccttgccggagtcacagtcggtgccaatgtggcggrcaagggccgagtcgggcccgcagatgcactcgaaggtaccggggaggttgtggcacaccccggagcagaagccgccgttttcgcactcgtcgatgtccgt

SEQ ID NO: 16292 - DNA, 201 bp, Homo sapiens
tccctccctcctccctctccctcccttcctccctctccctcccttcctcccttcctcttttcctcccttccatcctttcttccactcagttgaattctatraaccaattttaaccacaagagaacatcatcatccaagttaatcacgacaaacctcaaatagaacccaactaccagaactcagagagggacaaccgctcat

SEQ ID NO: 16293 - DNA, 201 bp, Homo sapiens
actgcagcttctctgccacatacagccaatgcttcaccacccgccttgtgcagggagagcaagcctcagctttgcctgtacactgtgctgtgcacaccagrtccccagcataggacagtaacagcacaggcactgcaggggacttcagggaggcctgaatggccctggacccccagcccagacttctgtgcagaagagtta

SEQ ID NO: 16294 - DNA, 201 bp, Homo sapiens
ccatgggggatgagggcctggatggaggccagggcatgaggacttgcaggacggatgagaaggaaagcagacaagggcgtgacaccccgacaaacacacgygggacaggaggcagcgatttcaacaatgaagtaaaacatttgtgatataacgtttttgggaaagccagaccctggagaaagaaggtagacgtcccaatta

SEQ ID NO: 16295 - DNA, 201 bp, Homo sapiens
ggtcctttctttagtctctcagtgatcagactgggcaaactctctgataagcaagacagggcacctaccaggagtcttggcaacactagtgtgtggctgcycagattagcatggaataagacacattctatttagaaatgtcagcctttttaacttagttgatgaaggttgaaggagaggcagcttcaggtgatggaaaga

SEQ ID NO: 16296 - DNA, 201 bp, Homo sapiens
ccccagggcttcttcccagcttgtacgtggggttgggggtcctttctttagtctctcagtgatcagactgggcaaactctctgataagcaagacagggcayctaccaggagtcttggcaacactagtgtgtggctgcccagattagcatggaataagacacattctatttagaaatgtcagcctttttaacttagttgatg

SEQ ID NO: 16297 - DNA, 201 bp, Homo sapiens
cagcactggcagtggtccccagggcttcttcccagcttgtacgtggggttgggggtcctttctttagtctctcagtgatcagactgggcaaactctctgakaagcaagacagggcacctaccaggagtcttggcaacactagtgtgtggctgcccagattagcatggaataagacacattctatttagaaatgtcagcctt

SEQ ID NO: 16298 - DNA, 201 bp, Homo sapiens
caaattagatgcaatctctatcaaaatctccgcttttttctttgcagaaatttacatattgatcctagcattcacatggaagttcaagggattccaaagarccaaagaaatcttggaaaagaaaaaaatatgaacacttacttcctgatttcaaaacttaccgcaaagcaccagaaccaaaacaatatagtgctgggataa

SEQ ID NO: 16299 - DNA, 201 bp, Homo sapiens
acacataaaaattaagtctctatggctatgagcaatatataaattcaaggatggaaaaataactgtctgttaagcaaatgttatctaataactgcagcacrttagagcaaaacaagtattttccaaaattttgcctcttactcaggctttcttaaagaaacagggtaaaagtggacaattgtttgttggtctattctttag

SEQ ID NO: 16300 - DNA, 201 bp, Homo sapiens
catcataacatcagggatctgcagcacttcctgtaacagcctatacactaaatattctcagcttggcaggccactggtctctgttgcaactatttaagtcyatctttgaggcttaaaagcagccatagacaatatgtacagcaatgggcatggctgtgttccaataagaccttctttacagaaacaggccgcaggctggtt

SEQ ID NO: 16301 - DNA, 201 bp, Homo sapiens
ggcgctgtctccagaaagttctgttaaaatgtaacacactacagaagcaaaggaacaccattaccatcataacatcagggatctgcagcacttcctgtaasagcctatacactaaatattctcagcttggcaggccactggtctctgttgcaactatttaagtccatctttgaggcttaaaagcagccatagacaatatgt

SEQ ID NO: 16302 - DNA, 201 bp, Homo sapiens
ctatgtggtatggcctattgctcctaagttacgaacctgtacagcatgttactctactgatcagtagaggcaattgtaacacaatggtaagtattcatatrtcttaacatctgaacatagaaaaagtatagtaaaaatacagtattataatcttatgggatcatcttcatatacatggtttgtcattgattgaaatgtcat

SEQ ID NO: 16303 - DNA, 201 bp, Homo sapiens
tttttaatcaggctttcattagtgttctgaagaggctgtaatttctttttaatctatttttaattggagtataatttacatatggtagagtgttctctttytagttgtacagttctatgaattttgacatgcaaatttttacattttacattttacaattttacattttacattggggcaactaactgttgccccaatcaa

SEQ ID NO: 16304 - DNA, 201 bp, Homo sapiens
agatgcagcagaatgaatcgggtatatcagttgtaaagtcatatataatataatttgaagtgaaaaggttcaaaaaggtatattttttattggtgaaggaygaaatctgccaaacacatattagtcccttcaccacgcggctgtaaatagaagacaaaactggtggaaatccgaggagaagctgacgaagccacagccatg

SEQ ID NO: 16305 - DNA, 201 bp, Homo sapiens
tctcccattaaaagacaaagacttttgattgaataaaagaaaaaaaaagtgaaatccagctttgttgtttacaagagacaaacatgaagtgtcaccagaargctgaatttagggaaaaaataccagatattcatcagatgcagcagaatgaatcgggtatatcagttgtaaagtcatatataatataatttgaagtgaaaa

SEQ ID NO: 16306 - DNA, 201 bp, Homo sapiens
ccagagctgcaggccctgggaggggtggggacaagctttgtgccaagaaggtgcaggaagccatccagcagggctttgatggtgcagtgggcactatagcytctaccatcctaagaagatgctggaactgtcaacacaatagccagtcctctgcaggcgctgtctccagaaagttctgttaaaatgtaacacactacagaa

SEQ ID NO: 16307 - DNA, 201 bp, Homo sapiens
aagctgaggtgttcagtggggccagagctgcaggccctgggaggggtggggacaagctttgtgccaagaaggtgcaggaagccatccagcagggctttgayggtgcagtgggcactatagcctctaccatcctaagaagatgctggaactgtcaacacaatagccagtcctctgcaggcgctgtctccagaaagttctgtt

SEQ ID NO: 16308 - DNA, 201 bp, Homo sapiens
tctgtattatttctcataagttgtatgtgaatctgcaaatatctcaaaataaaatgttttattaaaaaaaaacaggagagattctcagggcagaagtttayttatacattgcataagaactagatgcaagtggctttgtcacctgttcgctgcagggaagtcacacccgtccaaagggccaccagcatccacctggatctc

SEQ ID NO: 16309 - DNA, 201 bp, Homo sapiens
gtggggcagccataaccagaggttcatgttgtatgcttccatttatgcaataatcttaaaatgatattctatcaattctttcaatggagaacagactaatrgttgtcaggggttaaggtggggtggagtcagggggcaagtgagtgtggttaaaaaaggacagcaggagtcatcttcatggtgacagacatgtgccgtgct

SEQ ID NO: 16310 - DNA, 201 bp, Homo sapiens
cttctatctcggctcccagctgggccccaaggggagctgaggggtgagctgcagccactccggcgcagagaaggacacaaaggctgagggctttccacgtycccctgacccaaggcgcatcctgtactgttgtacttcttatttctcaccggatgttggggcttcctgcaatgaatagttctctgactcctgctgccttca

SEQ ID NO: 16311 - DNA, 201 bp, Homo sapiens
atcatggctcactgcagccttgacctcccagatcaagtgatccgcctatctcagcctccagagtagctgggactacaggtatgtgccatcacacccagctsatttttttcttttgtgtgtgtgtgcagaaatggggtctcactatgttgtccaggctagtctggaactcctgggctcagacaatcctccacctcagcctcc

SEQ ID NO: 16312 - DNA, 201 bp, Homo sapiens
tttaacaaatatggttgttattactgctatatataaaaaaaaaagctttatcaaagacccctgtggtcactggtagccatccaggaagtcttgctttttayttatttattgactgattgattgacttttgagacagagtctcaaaatcggtagcccagactagagtgcagcagtgttatcatggctcactgcagccttgac

SEQ ID NO: 16313 - DNA, 201 bp, Homo sapiens
caaggcaggtctcaggatgcacaatctttctgatcagagggcttttgagtagttctaccccagtgtgtgtgtgcgtgtgtgtgtgtgtgtgtgtgtgtgtktttggggggtacatacacaagcccaagtaagtttgtttgaacatattattaaaaatacccatattgcttaacactctgcttttcctatctgaaactggct

SEQ ID NO: 16314 - DNA, 201 bp, Homo sapiens
cctatctgtgccccctgcacaccagggtgggccactccttcctatccctttgcagataacacatccacttcccaatgcttggcccagttcctggcccagcrccctcactctggcccaccagcagacttgctttactcctgaaacagctcccttgaagaacacccatctggtcctaaatactgttgccaaaatcttgttttc

SEQ ID NO: 16315 - DNA, 201 bp, Homo sapiens
cattgtcccatggggggtaccacagtgtctgggttgccctacacaaggatgggtggacatgacccacttggctttcccacctgtaagggctttacccctgrccctcaggatacctttgccttgtggggcctgccctcagccgctttgtttttcctctccagccaataccttggaggctttgcatattttagactaccttct

SEQ ID NO: 16316 - DNA, 201 bp, Homo sapiens
gctaccagctttagttccatcaaccccaggcttttgtaacaactggttgcatgaaaccctcccttgtagtttgtgtacagaagactgcaatgaattgaagycatgagacatacagccaggatcctgaaagccaccaacatatgtcacctgcctgggaggcttgcttcgatggtcatcttgttctgcctgctaagaccagga

SEQ ID NO: 16317 - DNA, 201 bp, Homo sapiens
tttacaactcctcagaggtcctccgcatgcaattccctccaaaccactgacaggcagcctgaagacctggttaggtaccgggtttgggataaaatagacarccttgccctcaaggagctcacagacaagttaaaaactccaaaaccaagtttgattgatgtaatgccagaaaatgtagccagagtctggcatgcgagagta

SEQ ID NO: 16318 - DNA, 201 bp, Homo sapiens
gagcattgtcccatggggggtaccacagtgtctgggttgccctacacaaggatgggtggacatgacccacttggctttcccacctgtaagggctttacccmtgaccctcaggatacctttgccttgtggggcctgccctcagccgctttgtttttcctctccagccaataccttggaggctttgcatattttagactacct

SEQ ID NO: 16319 - DNA, 201 bp, Homo sapiens
gctgctctcttctttagcttcagggccttttcatttcccggcagcaacgaggtgcactgagcacttgtcggggctgtgtttggagcccatcaacagtgctrccagctttagttccatcaaccccaggcttttgtaacaactggttgcatgaaaccctcccttgtagtttgtgtacagaagactgcaatgaattgaagtcat

SEQ ID NO: 16320 - DNA, 201 bp, Homo sapiens
taactggggcacgttttgcgccttcaccattgtatgtctgagtcatgatgtctttacaactcctcagaggtcctccgcatgcaattccctccaaaccactsacaggcagcctgaagacctggttaggtaccgggtttgggataaaatagacagccttgccctcaaggagctcacagacaagttaaaaactccaaaaccaag

SEQ ID NO: 16321 - DNA, 201 bp, Homo sapiens
gagaggtaactggggcacgttttgcgccttcaccattgtatgtctgagtcatgatgtctttacaactcctcagaggtcctccgcatgcaattccctccaawccactgacaggcagcctgaagacctggttaggtaccgggtttgggataaaatagacagccttgccctcaaggagctcacagacaagttaaaaactccaaa

SEQ ID NO: 16322 - DNA, 201 bp, Homo sapiens
agccgcacaaaacctccatctttcctttcacttcccctgcccctttagttttctattaaaaacaatctgaaccatagcatctatatttcaaaactggcaasagtattaaccctgcaccttgtggcccttcaaccgctccagagtgtcacctcagagaccgatgcattgctaaggcaaaaccagaaacaccctttctctgag

SEQ ID NO: 16323 - DNA, 201 bp, Homo sapiens
aggggcctttcatcccagcagaagggagaggagaggtaactggggcacgttttgcgccttcaccattgtatgtctgagtcatgatgtctttacaactcctyagaggtcctccgcatgcaattccctccaaaccactgacaggcagcctgaagacctggttaggtaccgggtttgggataaaatagacagccttgccctcaa

SEQ ID NO: 16324 - DNA, 201 bp, Homo sapiens
gatctctgtgtactgtggagtacagggccttgggctgagcccaaagcattctgagcaaagcatgcatgtatgggcatgtatgggaactaggagttctaaaygctttcccttaccctgtccccttaatcctcttaccaacctgcaagacaggtccttccacagtttcatgtgagatgagtaacggcagttttctcagctgtt

SEQ ID NO: 16325 - DNA, 201 bp, Homo sapiens
cctggcattcatccacgtccacacagtccagctgactcgagtccagctggtacccttgggggcagcggcacgtgtagtttttcccatggggtcccaggacrcacgtggcccccccacgacatgggctggagctgcaagggtttcgagaggcacaggtcaccaggtcatccagcagccggaatcctggtcggcagccgcaga

SEQ ID NO: 16326 - DNA, 201 bp, Homo sapiens
agccccagagccagggccagcaggagtaggatggccaccacggtgcctaggatgtagaataaaagcagcttttgcccgtcagtgccatcgttgttttgtgyggccacggaggagtccccacctgcaggctcctgggggccagaggcagctgtggcgtgatggatgctgggctccctccagacgcctgaggacccactgggg

SEQ ID NO: 16327 - DNA, 201 bp, Homo sapiens
gccgaggctcattctcctccctctaatcaccccctcgccagttagccatggaatagaagaaaacagcttggggggtgcggggagggtcttctccagctgtmatgccagctaaggtgctttggtagcaaagctgggggtgaggaggcacaggctcctggacggagccaggctcctggacggaggccgctcagagtctctgcg

SEQ ID NO: 16328 - DNA, 201 bp, Homo sapiens
ggggctgcgtctcgtggaccttattgtctgctcagcaataacacagggcctggtgctttctgacgaatccacacacatgcactgagtggagctgcgctcasggatgagcacagctgcatctttcacggaggctgctttcctgtcagcttgcatttccctggatctctgtgtactgtggagtacagggccttgggctgagcc

SEQ ID NO: 16329 - DNA, 201 bp, Homo sapiens
tctcaaaaatgaaattataataatttaaaaaggatacttgaataaccccaaagaaaacaggaaaagagaactgaaaggaagggaaggaggaggaggtggargaggaaggtaggaaaggtagaaaaagaaccgaataacaggcctaaccccaataaatgctgattctatctacgaatacttctaaaacaggccaaacaaatc

SEQ ID NO: 16330 - DNA, 201 bp, Homo sapiens
tcctggttacatgctctcactgcaaacctctcaaccttgctcctcttcctcccagaactgagcatagtggtaactttgtatatgtgaaattgatctcccarcagtaaactgtgagacagtcagagctggaaactcatccctcttgtctattgctggctccctagtgcctgctatagggagcaagtgatcagtaactacttg

SEQ ID NO: 16331 - DNA, 201 bp, Homo sapiens
caatacacacacacgcacacacgtgtgtgaacatgcatgcagactgagtgactgatgaactcttttaactgcattaggccttggggagctttgcccatctycccactgtagattcagcctcctggttacatgctctcactgcaaacctctcaaccttgctcctcttcctcccagaactgagcatagtggtaactttgtata

SEQ ID NO: 16332 - DNA, 201 bp, Homo sapiens
aaagaaaataaatatttgtgcacacagagatagcatgaaatcattctacagtgaaaataatagcctctggaaaaagctttgaaaatcagagatggtgccaycaccagacaacacaagtgctggggtacagggcagccctccatgcatctcatagcatttgcatggtttgtgagccccatttaatgacataaaatgagggca

SEQ ID NO: 16333 - DNA, 201 bp, Homo sapiens
atgtccacattccccagccacagttctgtgggccacccagtccttccacaaggccaatacacacacacgcacacacgtgtgtgaacatgcatgcagactgrgtgactgatgaactcttttaactgcattaggccttggggagctttgcccatctccccactgtagattcagcctcctggttacatgctctcactgcaaacc

SEQ ID NO: 16334 - DNA, 201 bp, Homo sapiens
aaatcagatttttttttttttttgaggcagtctcactctgttgctcaggctggagtggcacgatctcggctcactgcaacctccgcctcttgggttcaagmgattctcctgcctcagcctcccaagtagctgagattacaagcatgtactaccatgcccagctaattttttctatttttagtagagatggcatttcaccat

SEQ ID NO: 16335 - DNA, 201 bp, Homo sapiens
aaacacaagcaatccaagaaaatgtagataagttagacattatcaaaatttaaaacttttatgcttcaaaaaaaaaaggtggagacaagccacagaatggragaatggtaggagacatttacaaattatgtacctgataaggtctctctagaatatataaggaactacaagtcaataattaaagacaacaaacccaattaa

SEQ ID NO: 16336 - DNA, 201 bp, Homo sapiens
ccatctctaatttgttggcacccaccagggataccttgggcatctgaagtcagtctccatgtctgtgggtctcgtgtaaccataactacttggagtttttwaaaactgcattatttctttgttcctcagtgtctgacaatgcctgccaggatgggcactgatgaatatggttgaacggaactccaaggaccacccaggttg

SEQ ID NO: 16337 - DNA, 201 bp, Homo sapiens
cccagctacctgggaggctgaggcaggagaatcacttaatcccaggaggcagaggttgtggtgagccgagatcgcaccattgcactcagcctgggcaacargagtgaaactctgtctcaaaataaataaaaaaataaaaataaaaacaaaaaataaaaataaaaataaaaaaaccttctgcccagctcttgcctgcatctg

SEQ ID NO: 16338 - DNA, 201 bp, Homo sapiens
ttcaaaaccttctgcccaggccgggagcagtggctcacgcctgtaatcccagcactttgggaggccaagacgggtggatcacctgaggtcgggagtttgasaccagcctgaccaacatggagaaaccctatctctactaaaaatacaaaaaattagctgggcgtgatggcacatgtctgtaatcccagctacctgggaggc

SEQ ID NO: 16339 - DNA, 201 bp, Homo sapiens
gtacagcatgttactctactgatcagtagaggcaattgtaacacaatggtaagtattcatatatcttaacatctgaacatagaaaaagtatagtaaaaatmcagtattataatcttatgggatcatcttcatatacatggtttgtcattgattgaaatgtcattatgcagtgcatgactttatctgatgaagggctaatat

SEQ ID NO: 16340 - DNA, 201 bp, Homo sapiens
gaaaatgagcgtgaacactgcccttgaccctgcagtcataagtcatgcaggtggtggcggggtgggggtgtagggtgagcctacccgctgctctcttcttyagcttcagggccttttcatttcccggcagcaacgaggtgcactgagcacttgtcggggctgtgtttggagcccatcaacagtgctaccagctttagttcc

SEQ ID NO: 16341 - DNA, 201 bp, Homo sapiens
gtaactacttgatcccagccatacatgggaatcacctggggtgggggacaaaccatagtaccaagccccattctggaccaactatatcagacttgctgtgrgtgaggcgcacgcgcacacacacacacacacacacacaggtgattcttacaccagctctgagaagcactgaggttgggaagtgagaggtggagagcttgc

SEQ ID NO: 16342 - DNA, 201 bp, Homo sapiens
attcttcttcagatccttctttttagctagatctacaatggcattccttttcccaggaatgcgattcccaggctggccaaactcatgttgccatgtattamcccccaaggcaaatagcaaagtttcctttgaagacaataaatacatagtccatgggctggacaactggaggtgttttggaaagttctttttattttcagc

SEQ ID NO: 16343 - DNA, 201 bp, Homo sapiens
catgttgaaatagaagcctgatcatttgttttcccataagcacacacaccacagtgaaatgctgctggggcttgccattgatcataggataaaaatcagatttttttttttttttgaggcagtctcactctgttgctcaggctggagtggcacgatctcggctcactgcaacctccgcctcttgggttcaagcgattctcc

SEQ ID NO: 16344 - DNA, 201 bp, Homo sapiens
cagatattccaggtggtggctcagaacagctgacaaccatacctggggaagactggcctttatttttctggttgttcatactccaacagctagcaccgtaygttggggtccaatgaagcgagcagcagtagatggcatggccagggcaaggcagacacgctggagcagtcgggaaacctggcatctacacccatgcactgg

SEQ ID NO: 16345 - DNA, 201 bp, Homo sapiens
tctcattcttaattgtttgagcagttatactttggttgttacttgcagccaaaagcattttctccagacttctgagtcctaaaaatttcattctttgacayaagagctgacccagaggccctgaagcccctctcaggcctgcagagctttggtctgtttgctgaatcagattcatatctacacaacagttctagggccaaa

SEQ ID NO: 16346 - DNA, 201 bp, Homo sapiens
tccatgcatctcatagcatttgcatggtttgtgagccccatttaatgacataaaatgagggcactgagggaggaaaagtgaacagacacacaacccgagawcacattgttatttgtttattttgtacaagtgatgtcataagcaaggattttgcctgtgttctagattatctccaataaataaataactatgtacaaatat

SEQ ID NO: 16347 - DNA, 201 bp, Homo sapiens
gtttcccaagcaggtttcccaaggggacttctcactggtgggtttagagcaaacagacacgggctccgtggggtccctgtggctgagaggtgggcatggcrgcatgtctgggaagtccctgtggggtgtggagtcactgagaccatcaaatgggctgtatctgcctgtcccacagggaaatggtcaccaggaggtgggtgt

SEQ ID NO: 16348 - DNA, 201 bp, Homo sapiens
atcaagacagccacttcctaagagatccctgatgggaggagagttgggttggggtgtgggtcaggggagatgcaggaggcagcacaagaagacacaggaarcaacacaagcaccgtgtcacttacagatcccagggagagggcagtgcaccccacggggccagcaaaaagtggggagctgtctgggtcacaaacactcacc

SEQ ID NO: 16349 - DNA, 201 bp, Homo sapiens
aaacaaatcatttcaatcctaatcagcatgagcaactcaccttttcctcttagatggtggaagtgagcagagaagatattcaggggagccccttagccccrgcctcctcacaccctgatccggaattggtcacattggaatttgaaaagggagggggagtaacaatcattatagagtcacgaaatccccaccgtggcacgc

SEQ ID NO: 16350 - DNA, 201 bp, Homo sapiens
aactggcaagagtattaaccctgcaccttgtggcccttcaaccgctccagagtgtcacctcagagaccgatgcattgctaaggcaaaaccagaaacacccyttctctgaggctttggggccttggagggagacacatttcctctgtctgttctcctgcacagtggtggtaaaaagcccacaggagacatgaggcctcccag

SEQ ID NO: 16351 - DNA, 201 bp, Homo sapiens
ccctgcccctttagttttctattaaaaacaatctgaaccatagcatctatatttcaaaactggcaagagtattaaccctgcaccttgtggcccttcaaccrctccagagtgtcacctcagagaccgatgcattgctaaggcaaaaccagaaacaccctttctctgaggctttggggccttggagggagacacatttcctct

SEQ ID NO: 16352 - DNA, 201 bp, Homo sapiens
tgctcccaaccctcacccccactctcacataaccattgaactaccatccatcactgcggattagttttacctcttctagaatgtcatagaaatggaatcakgcagtgtccagctaattttgttcctttgtgtctggctttcttgctcattgtgtatttcagacgcctgctccttttccttgataagggatatcccattgtg

SEQ ID NO: 16353 - DNA, 201 bp, Homo sapiens
ttaattcaccctgaatctgcccaggtcaatgttcaagactgtgcaccaggaaaggaaaacacttcatggagcaagaaacccagggctggcctagctatggycctaacagagcactcactcctgcccagtgttgctggaaaatcaggggccgattgaaagcgccttccctgggttgtgtgacagtgagctctcaccactaga

SEQ ID NO: 16354 - DNA, 201 bp, Homo sapiens
cgatagaccagtagccccagagccagggccagcaggagtaggatggccaccacggtgcctaggatgtagaataaaagcagcttttgcccgtcagtgccatygttgttttgtgtggccacggaggagtccccacctgcaggctcctgggggccagaggcagctgtggcgtgatggatgctgggctccctccagacgcctgag

SEQ ID NO: 16355 - DNA, 201 bp, Homo sapiens
gacttacaattgtttgctaagattccagtccagtctttcaaaaaaatgtgggtgcccctttggaatggggagttcaaagctctgaggatggtggctggtgwctctagtgtctctagggccacctcactttcagcagtctgtcccaggtgtcggactatgggaaacaaaacagacagcgttggaagccatggcgcctctgtg

SEQ ID NO: 16356 - DNA, 201 bp, Homo sapiens
gattcccatagacaggtcgttctctcagctctttagtactcaccactccctccctgccctgtacctaatcatgcatataccacactttttgctgcacttakactccagattcccacacatttttgtatccccttacacctaacagcacgctttgtaactagacagtgcccagagcttattggagcacctgtggtagatgtt

SEQ ID NO: 16357 - DNA, 201 bp, Homo sapiens
agagtgtggactttggagccgacttggctgcactggagacccagctccggcattcacaagtttttgtttattgttaagatttgactaataacccctccccrtgtagctcagtttccttgactgtgtaatgggaatagtccctccttcaaagtgttaggatgaagattaaatgggttatacatgtaaagcatttagaacaga

SEQ ID NO: 16358 - DNA, 201 bp, Homo sapiens
cagctccggcattcacaagtttttgtttattgttaagatttgactaataacccctccccgtgtagctcagtttccttgactgtgtaatgggaatagtcccwccttcaaagtgttaggatgaagattaaatgggttatacatgtaaagcatttagaacagaggagccgtagtcagctctcaataaattttagcaaaaaagaa

SEQ ID NO: 16359 - DNA, 201 bp, Homo sapiens
ctcacttcctcccccagtccaccatccgtccagtgatccacgacgtgcaggcggcatccttcctcccaccttcccagcctctagggatgatctggctccawgccctgggccagtcctctttttccccgcccatgccccacctccaccgcctctcacatgggtgggcacagcactggtgtcctgaccagcccctggctccag

SEQ ID NO: 16360 - DNA, 201 bp, Homo sapiens
gcctgtccacatcaggcctgtcctttcatctcccaatcagagcacccagctgtccactatttcccagaacatctcagagtcaccaagacccaaactactcycacttcctcccccagtccaccatccgtccagtgatccacgacgtgcaggcggcatccttcctcccaccttcccagcctctagggatgatctggctccatg

SEQ ID NO: 16361 - DNA, 201 bp, Homo sapiens
ggctcctggacccgtgcaaggatctggcaaagctgagatccaggccagcacagcccagttctctcctcctgctgcagccaggctctcagcacgtgcattcwcccccactgctttccatctgcccacttcttcattcatggctgtcctttctgcctctctggtgtcctggggctgctttcacgtcggcctcctctgacctct

SEQ ID NO: 16362 - DNA, 201 bp, Homo sapiens
acacagtgttttaaatatttcagtgaattgtgcatatttaagaaatgtgagattttacagaaagatttgcatttctggcttttctaaaaaaaaaaaaaaaatcaaagtgtcttgcaatgctggcaaccagcccaacgtggcaatcagtgcctgcattagcttcctccttagtgccgccaggctggctcctgcagccctggg

SEQ ID NO: 16363 - DNA, 201 bp, Homo sapiens
tggcgcagggcttgcaggctcacttcccccggctcaggattcctagcaagggccggaaatctgggcagggagcgggaatcgaagcccgggcaggccctccygcgacaccgcgactcggcaaaagccagggactcacagtgtgcttttcctgcagccacagacctttgctcattggttgggatcccccaggaggggaccctg

SEQ ID NO: 16364 - DNA, 201 bp, Homo sapiens
ccaaaagacctacagccaaaaagcagggtttggctgtggccatctctaagaaagaaatgtagtcagatgattcaaaggaaaatgggtaaacaaaaaaaaamaaagctgcaagtttaaaaagtcaatactcaggattgatgaaaggaaagtggccttggaacacacagaggtgaccgctccttcatgatgtgtgtgtgtttt

SEQ ID NO: 16365 - DNA, 201 bp, Homo sapiens
ctactcgggaggctgacgcaggagaatggcgtgaacccaggaggcagaggttgcagtgagccaagactgtgccactgcactccagcctgggcgacagagcragactccgtctcaaaaaaaaaaaaagaaagaaagaaatacttttggactaaggcttcccctgtgtgatgggtactacataaattaataaacttctgcttg

SEQ ID NO: 16366 - DNA, 201 bp, Homo sapiens
cgggcgtggtggcgggtgcctgtagtcccagctactcgggaggctgacgcaggagaatggcgtgaacccaggaggcagaggttgcagtgagccaagactgygccactgcactccagcctgggcgacagagcaagactccgtctcaaaaaaaaaaaaagaaagaaagaaatacttttggactaaggcttcccctgtgtgatg

SEQ ID NO: 16367 - DNA, 201 bp, Homo sapiens
tcttggtttgagttgtggaaggacagataaacaaaagtgcctgctaagacccagatatctggaggaattctgtggatgccctagagcaaggttgacgtgcygtgtctgtcaagggcaagagagtaaacatttcagctgcaggcctttcagcctctgtcataaccactgaactctgcctttgttgtgtgaaagcagcaagcc

SEQ ID NO: 16368 - DNA, 201 bp, Homo sapiens
ctctttgctgaaatactatttaaccaaggacccctaagccattgccttcagaaatacttttggactggccgggcacggtggctcgcgcctgtaatcccagyactttgggaggcagaggcgggctgatcacgaggtcaggagatcgagaccatcctggctaacacaatgaaaccccgtctctattaaaaacacagaaaatta

SEQ ID NO: 16369 - DNA, 201 bp, Homo sapiens
ttacacaagcatggatggcatagcctactacacacctaggctatgtggtatggcctattgctcctaagttacgaacctgtacagcatgttactctactgawcagtagaggcaattgtaacacaatggtaagtattcatatatcttaacatctgaacatagaaaaagtatagtaaaaatacagtattataatcttatgggat

SEQ ID NO: 16370 - DNA, 201 bp, Homo sapiens
aggactgaaaactgcagactagctactctagacttctggtggctgagaacaagcctgcaggatggcttgacagctctgggtaaactgtctgagaacatcttcagcttgggcagaacagccttccaggaatgaagatgtcacagagagcagggtgctggagagggctttactctgaagtaggggcggccaatatttgatccc

SEQ ID NO: 16371 - DNA, 201 bp, Homo sapiens
tttagtagagacggggtttcaccatgttggccaggatgatctcaatctcttggcctcataatctgcccaccttggccccccaaagtgctgggattacaggygtgagccactgcgcccagccccagtagcattattcttcacagccaaagagtagaaagaacccaaatatccatcagctgttgaatgaatgaatggaatgtg

SEQ ID NO: 16372 - DNA, 201 bp, Homo sapiens
cccctgccagcaggaagccctgcaaccagaacccggccgcaagcgcatccccctcaccaggaccaccaccttctgaggagcccttcccctacccaccctgygtggccacctcccaaggggtgggcaccattcctacagccccgaagactgcatctcctgaatgctcacctaagctccaccacctgttccttccagcagccc

SEQ ID NO: 16373 - DNA, 201 bp, Homo sapiens
aacatatttagatataagcaggaccagaataacatacctagaacagatactgattttcttgcattcatgtaataatcatttaaaattcatatctgctttaygcgaatagatataaacatagagctaagtgctcctacaagatgaatttttagtaggctaaacagcacagctaaagtctcttatgaacctcatttccccaac

SEQ ID NO: 16374 - DNA, 201 bp, Homo sapiens
aataagctgtattgatggctgggtggatggaaagttgtgacagaagtcaagtgacatattaaaagtgtagaatctagatggtgttcgaatctaagcggtaraattctacctaggtagaatccacacagctgttcaccgtttgtaaatttttctagcaaaatattaggaaaaagactttgcttatggagtccaggctctttt

SEQ ID NO: 16375 - DNA, 201 bp, Homo sapiens
gtgccgtaggtgatcgagacggcggcagccgcggcgccgggctccacagccagtggcctgcaggtggctgggaagtggaactcgcagaggaagccatcggscttcacttcgcactgctgctcctcccagatcggctcgctgggcacagtggcctcagcagcggagacagcgacgcacaacgggccgcagaggggagcccca

SEQ ID NO: 16376 - DNA, 201 bp, Homo sapiens
cctcggccgctgtttggctgacggcagcacacaagcccttccttactgaagacagcactcgcttcccagcccagagagggcatcagcaggcacaagagacrtctggaagggggctttactatcttcccagatcttcctgccttttaaaagacaagaactgctctcctctttgttttgtcactacataggatttatggctct

SEQ ID NO: 16377 - DNA, 201 bp, Homo sapiens
gttaattcaccctgaatctgcccaggtcaatgttcaagactgtgcaccaggaaaggaaaacacttcatggagcaagaaacccagggctggcctagctatgkccctaacagagcactcactcctgcccagtgttgctggaaaatcaggggccgattgaaagcgccttccctgggttgtgtgacagtgagctctcaccactag

SEQ ID NO: 16378 - DNA, 201 bp, Homo sapiens
tttttcatgttgagcagtagaatataagagatgataatgaggaaatggaaattaaagacgtgtgcgtgtgccactccctgcagattcggtttataccatgsctccaggagtcacagagcgttggacacagcaggatgggtggtctgatcccagctatttgcagcccacacagtgatcaggggattctttattggtcacttt

SEQ ID NO: 16379 - DNA, 201 bp, Homo sapiens
tatgaaaacttcctctacttcaaaaaagatatatatagagaagaaaaaaacccaaccactaagaagcattgtattcaaatgcaagagacaatggtgggaaragccctctttgtcttgtttctgtccattgtggatgtttcttgtcactgttgtggaattatggtgagtgaaagagagggcgttaagaaggaagagaagaga

SEQ ID NO: 16380 - DNA, 201 bp, Homo sapiens
gattccagtccagtctttcaaaaaaatgtgggtgcccctttggaatggggagttcaaagctctgaggatggtggctggtgactctagtgtctctagggccmcctcactttcagcagtctgtcccaggtgtcggactatgggaaacaaaacagacagcgttggaagccatggcgcctctgtgcctgcacgtccccaccttgg

SEQ ID NO: 16381 - DNA, 201 bp, Homo sapiens
agagtttaattggtatatgaccttctagggacatttgactggcaagggaagaatgcttgaagtgagcatgtgtacaactccagtaaacaaactgtgctggyaggccactgagcatgtggacagcccatcccaagggaagaatcaggggagaaaggatgcaagaccccagaagtatgccaacacataaaaccccaagtgaaa

SEQ ID NO: 16382 - DNA, 201 bp, Homo sapiens
aatgacagagtttaattggtatatgaccttctagggacatttgactggcaagggaagaatgcttgaagtgagcatgtgtacaactccagtaaacaaactgwgctggtaggccactgagcatgtggacagcccatcccaagggaagaatcaggggagaaaggatgcaagaccccagaagtatgccaacacataaaaccccaa

SEQ ID NO: 16383 - DNA, 201 bp, Homo sapiens
ccatatagatttaaaccatgggttttgcagccgaagtagagacagatgttttctgggatcatatctcagattcccaagctaaagctattgttcaaggtgayggaaatatgtagggggcattaaaccattttgcagctgctagaaagctgtgttttcctgttttcctgatttagacaatggagaagctaagaagagaaataa

SEQ ID NO: 16384 - DNA, 201 bp, Homo sapiens
agcggctgggacaggtccagcagcagagacacacagcgcttggagatgcacgagttccggagctccttgtgccagttagagtaaggcgtgtcctccccccygcccacccagctgaagcccttcagcggcagactagggtccaggcacttgcccttctctcgctggagcccaatccagaacttgctcatcctcgccgtcagg

SEQ ID NO: 16385 - DNA, 201 bp, Homo sapiens
agggtttgactgtggccatctctaagaaagaaatgtagtcagatgattcaaaggaaaatgggtaaaagaaaaaaaccaaagctgcaagtttaaaaagtcartgctcaggaatgatgagaggaaagtggtcttggaacacacaggggtgaccactccttcatgatgtgtgtgtgttttgatagaggtcggtataattagaga

SEQ ID NO: 16386 - DNA, 201 bp, Homo sapiens
gacggtccttagcacaatgctaggcccacagaatatgctcaagcacatttcctagaaactgaagggcctgtacaggccaaaaggcctgtagcccaaaagcrgggtttgactgtggccatctctaagaaagaaatgtagtcagatgattcaaaggaaaatgggtaaaagaaaaaaaccaaagctgcaagtttaaaaagtcaa

SEQ ID NO: 16387 - DNA, 201 bp, Homo sapiens
agctagtaagtggtgaaacaaagattcaccggcctgtggtaaggatgaaagaattacaatgtggagtatgtctgagcccccattttgccacatactggcckacttggctaagttatttcaatctctggtgttctttcccaaaaactggagatataatatctaatatgtaggattagtgtaaaataaaactctttcccaaaa

SEQ ID NO: 16388 - DNA, 201 bp, Homo sapiens
ttttcttttgtgtgtgtgtgcagaaatggggtctcactatgttgtccaggctagtctggaactcctgggctcagacaatcctccacctcagcctccaaaastgctgagatcacatgcatgagccactatgcccagccaagcccagctttttagatgggagtttctgcttgatgtctgtggaggaggctggaccaactacct

SEQ ID NO: 16389 - DNA, 201 bp, Homo sapiens
tgaaaacaattccatttataatagcatcaaaaagaataacatacttgaggataaatttaacaaaagaaatgcaaaacatttgctcttaaaactacaaaacrttgctgaaagaaactttaaaaggcttaaataaatggaaagacaccctacgttcatggattggaagacttaatatgattaaggtggaaatatccccacaat

SEQ ID NO: 16390 - DNA, 201 bp, Homo sapiens
ctaaatacttaaaaaaaataaatattttagtcatccctagcccacgaggtcaaggtctgcccagaaggctgccgaccaataacgctcaccctcctgcgccyggtagtgaggacctgggacaaatcgcagtctgtgtcttcgttacaaaattgccatcattgcccagtggtccagtgacgtcacggaagaggccgaggctca

SEQ ID NO: 16391 - DNA, 201 bp, Homo sapiens
actacaaaacgttgctgaaagaaactttaaaaggcttaaataaatggaaagacaccctacgttcatggattggaagacttaatatgattaaggtggaaatwtccccacaatttatctacaaattagatgcaatctctatcaaaatctccgcttttttctttgcagaaatttacatattgatcctagcattcacatggaagt

SEQ ID NO: 16392 - DNA, 201 bp, Homo sapiens
ccaaggcaattgaaagaatagtctcttccacaaatgattctggaacaactgcatatctacatgtggtagggtgggacctctacctcacatcaaataaaaarttaaagaaaaatggtcaaaacacttaaatgtaagattaaaactagaaaatccttagaagaaaatataggtgtaaatctttgtggccttcaataaggcact

SEQ ID NO: 16393 - DNA, 201 bp, Homo sapiens
gcttattgtatgaggaaggatagaatacctatagctgtctaccttgacacagaactttggatctatcatctattggatttccatggagccaaaggaagctygggaatgcccagtgatctattcagggtcagtcatccagggtggcctactttgagagcaaagagaattttgtgtctagcagattcatgggacactaccttg

SEQ ID NO: 16394 - DNA, 201 bp, Homo sapiens
tatcccctcctctcaagaggtgttttctgagaaaagtggaggaccacagaaaatagcaagagagccccagaggctgcctgctgggcaatgtctctttctgraacatgtatctggctggacctggtaatctctgctcaggccaataggtggtgagcaagagatgaacaggcatttgggccatgggtcctctggcagttggtt

SEQ ID NO: 16395 - DNA, 201 bp, Homo sapiens
agggcagtgggacgcattgtctgttctccatagacaatagggcagactgcttcctccttgggactggtagttacgtttatgtttctgacaaccagctggcyactgaagaagcgtggagccaacagctgcaagggataattttggcagcatcacccacggtgcaaatttaaaactccagctggttctactgcaagcagaata

SEQ ID NO: 16396 - DNA, 201 bp, Homo sapiens
ccagccctgtgggttttagcaagctctccagggcattctgatgcacaggtttgagaaacaactggctcattgtatgtgaggcatgaatgaagtggcctccsaggctctgctcacatcctcactaccctcatctcttcctcctgggctttccaccttgggtcctggctctaccaactcttccttggatcctgaatctacagt

SEQ ID NO: 16397 - DNA, 201 bp, Homo sapiens
cagcccatgtacctgccggagagtgtcagaactcttctgctgctctcctctcccctgcactctggctttcaaaaggatgcttccatatgggtaggactccyctggaaactgggctaggatattaatcattcctgaacctctggctgttcttcaagggctgggaagcaggaggtggtgagaaatgaatggtccctgtgtgtg

SEQ ID NO: 16398 - DNA, 201 bp, Homo sapiens
gccccaagatcccccaaacaagaatttccatgcttcaaagtaacagcaaaaataaacaggagaataaagcacgtgtttgagcccagtggtttccatcagakgcacaacctgagctgtctggttgggttgctggctctccccccgtggtgggagtggtgtgcaagagaaagcaccacccagcaggagagggacccagcctgc

SEQ ID NO: 16399 - DNA, 201 bp, Homo sapiens
accaccaggaatgtcagacaaccatcagatgatggtcaggcagttgttaactgtctttctaaaataatttgttgcagccagtgccagggaaagcagtctcsctatcaatagaagaaacctcaaactggggatcagcagcttccagataagatctcaggagctgggtaagtgggctcaagcttgtgcattaagatgcaaaat

SEQ ID NO: 16400 - DNA, 201 bp, Homo sapiens
cgccaaaagcgccaccaccaggcacaggctcgcgatggagatgcctatgagcaagcccgaatgcacgagccccacggccggaggagtcaaggtggagccgrgcgtcgggctgggcgggggctcgccagagccgctgtcgccaccgtccaccttgccggagtcacagtcggtgccaatgtggcgggcaagggccgagtcggg

SEQ ID NO: 16401 - DNA, 201 bp, Homo sapiens
acttatggtataggagatatatatatataattgttacagtaggtagctagtcaggcctgagcatggcaggagagggctcctccaccaccaggaatgtcagrcaaccatcagatgatggtcaggcagttgttaactgtctttctaaaataatttgttgcagccagtgccagggaaagcagtctccctatcaatagaagaaac

SEQ ID NO: 16402 - DNA, 201 bp, Homo sapiens
aggcacaggctcgcgatggagatgcctatgagcaagcccgaatgcacgagccccacggccggaggagtcaaggtggagccgggcgtcgggctgggcggggrctcgccagagccgctgtcgccaccgtccaccttgccggagtcacagtcggtgccaatgtggcgggcaagggccgagtcgggcccgcagatgcactcgaag

SEQ ID NO: 16403 - DNA, 201 bp, Homo sapiens
ttgaggaaggtcgcggggcccgggtagagcgcgaagcagtcgtgctcgacgcactggctgccacccggctgcggctctgcgggtgcggggaaccccaggcyggccagggccagcgcgccaaggaccaggaccccaagcatgttacccaggcgcgccgcgtgcaggcgccggggaaagcgcgggcactgcgacagggccgtg

SEQ ID NO: 16404 - DNA, 201 bp, Homo sapiens
agattcggtttataccatgcctccaggagtcacagagcgttggacacagcaggatgggtggtctgatcccagctatttgcagcccacacagtgatcagggrattctttattggtcacttttttttctttctctctaccaattaatgttccttgttcttgatccacccctttgagccaaacaaccattgaaaagatggaaac

SEQ ID NO: 16405 - DNA, 201 bp, Homo sapiens
caatctgaagacaatcaagtccagactggatgtcagggtcccaggggtcatgtggtggatgattagagaccagagtttggaggagttatgccaaatccccrgaagcatggaaatcccccacctctgccgaatgttactggattgtgagctccctgccctgcagctggtcagtgaggctcccacaaatcagtactgacaaat

SEQ ID NO: 16406 - DNA, 201 bp, Homo sapiens
tgaggaaatggaaattaaagacgtgtgcgtgtgccactccctgcagattcggtttataccatgcctccaggagtcacagagcgttggacacagcaggatgrgtggtctgatcccagctatttgcagcccacacagtgatcaggggattctttattggtcacttttttttctttctctctaccaattaatgttccttgttct

SEQ ID NO: 16407 - DNA, 201 bp, Homo sapiens
cttttgtgggttacatcagtttccagcaggcacatggctattagggggactcagcctcttggggataaaaagcaaagcaacttggagagttcatggcgccrtggggctgcaggaaggaaggtagccctagccttcagccccagaactggctgcaggtgaacaatctgaagacaatcaagtccagactggatgtcagggtcc

SEQ ID NO: 16408 - DNA, 201 bp, Homo sapiens
aaggagccaggagtgatggggagccagtagtgatgggggagccagaagtgatgggggaggagccaggagtgatgggggaggagccaggagtgttgggggarccaggagtgatgagggaggagccaggagtgatggggagccagtagtgatgggggagctaggagtgatgagggaggagccaggagtgatggaggagctagg

SEQ ID NO: 16409 - DNA, 201 bp, Homo sapiens
gatgctagtaagcgttgggacgtgctgggagactcccctattcaggggacaaccctgacagatctgagcaatgatgacatttctgtccccagctgacaccyggctcaggagggacctggctcaggagggacacagactggcccatgtggcataagggaaagttccatatgcttctgggaaagtcccccttgctcttaaaca

SEQ ID NO: 16410 - DNA, 201 bp, Homo sapiens
ggtcctgctaacactgctctcggtatttaccttgccttttcttttctttccttttggaaggaaaggatatgctgtttcaggtgcagattagtgaaaatatrgaagtaatgttttctccattcaagctgatgagacccctgaatgaagaactattcacttaaaagaacacagaactatttcggtcagttcaagtagaagcct

SEQ ID NO: 16411 - DNA, 201 bp, Homo sapiens
ccagggcattctgatgcacaggtttgagaaacaactggctcattgtatgtgaggcatgaatgaagtggcctcccaggctctgctcacatcctcactacccycatctcttcctcctgggctttccaccttgggtcctggctctaccaactcttccttggatcctgaatctacagtttctacctgcatgggcacaagtatcac

SEQ ID NO: 16412 - DNA, 201 bp, Homo sapiens
acaggagaccagccgcagaccatatataaacgaatggatgtggctgtggtccaataaaactttgtttacagactttgaaattttcataattttacatgccrtgaaatatttttcttcttttgatttttttctgaccattaaaaaaatgcaaaaaagccatttttagctcacgcaccatacagaaacaggcagtgggccaga

SEQ ID NO: 16413 - DNA, 201 bp, Homo sapiens
ctttgaaattttcataattttacatgccatgaaatatttttcttcttttgatttttttctgaccattaaaaaaatgcaaaaaagccatttttagctcacgmaccatacagaaacaggcagtgggccagagtgggcctgcaggccatagttttccaaaccctgccctacaaacattaataaagaaaaaaacttagaagatgc

SEQ ID NO: 16414 - DNA, 201 bp, Homo sapiens
ccaagggcactttgggaggacctgcctaggacgtggacttccccgaagacaggatcgcaaggagagacagctggatcctgtccgcggccaaggtgcctggytcaggaaaccagcggagcgcgcttggcctcacaggacagtgggtgtggctggggtgacggggcagggtggggaagactggcctaacaccagcgccctctg

SEQ ID NO: 16415 - DNA, 201 bp, Homo sapiens; identical to SEQ ID NO: 3318

SEQ ID NO: 16416 - DNA, 201 bp, Homo sapiens
ctccagtgggtttagaatgcaccacgcaccagagaggagaagccaaagggtggatgcgatggtttccagccctggctttggcgtccagtgggaaccgggcygtctccccctgctttcccctttactgaactttagtgtggcttgtggtagaatgcagtcagttcaggctctgtggccacctgctgagtaaagactggaccc

SEQ ID NO: 16417 - DNA, 201 bp, Homo sapiens
accttcctgtttcccgtgggaacaaagtgggcggcaaatgcagggtgagatactgggtcacttcaggctccaacttgcagaagctgtttcagacccacaaygggagcaggctgcatcttttgcctactcaggataaaacgtgacactgctgcgtcatacagagatagttctgcatggtttcctaagaaaggcaaagccaga

SEQ ID NO: 16418 - DNA, 201 bp, Homo sapiens
gacagttcttcaaatgaaagttagctgggaactatccaggattctccctataccaagcttgtccaacctacagctcaagggcccatgaggcccaggatggytttgaatgcagtccaacacaaattcataaactttctcaaaacactatgagatttttttggtgattttttttttagctcatcactatcgttagtgttagtg

SEQ ID NO: 16419 - DNA, 201 bp, Homo sapiens
atagcctatgcatcttctatcgaaagtcatgacagttcttcaaatgaaagttagctgggaactatccaggattctccctataccaagcttgtccaacctayagctcaagggcccatgaggcccaggatggctttgaatgcagtccaacacaaattcataaactttctcaaaacactatgagatttttttggtgattttttt

SEQ ID NO: 16420 - DNA, 201 bp, Homo sapiens
cctgaactgtgagaagccaagtcctgtgttttagatacaataccatctgaattctgctctcactgctggcccatgttctgtggcttcagccgagtaattcmactctccagggctctttgtcatccatctgtgagagccagtccgggcagagaaggagaggagcagggcaagctgagaatgcagcccatgatgccgccccga

SEQ ID NO: 16421 - DNA, 201 bp, Homo sapiens
caggatgaaggtaaatcctgcatagaaatcttgtaattccagaattagtcaaacaaatttgaaatacacacatttaaaaatacttacattctcatttagcrttcatgaagtgattactgacatttacaattacatctgacatcacagagcaagcctttgcagggatctaattcaagcttaagccaaatctatgcaaagaac

SEQ ID NO: 16422 - DNA, 201 bp, Homo sapiens
aagagtttattaggataggcacataacagaaagctcaaaggacaacaaagctgcaccttcctaaaggctgaccctcaaagcaccattttgttagaactcaraggagaagctcgatctctgagccttccctcctcacagtttgggaaacatgcacaggatgaaggtaaatcctgcatagaaatcttgtaattccagaattag

SEQ ID NO: 16423 - DNA, 201 bp, Homo sapiens
tttgaaaggggagatggataaatgtaatgaccttgaaagcaagttctgccaggtatttcgagttgtcgtgaaatatattaaaacaagttcacaatcaatgkgtttaagagtttattaggataggcacataacagaaagctcaaaggacaacaaagctgcaccttcctaaaggctgaccctcaaagcaccattttgttagaa

SEQ ID NO: 16424 - DNA, 201 bp, Homo sapiens
ttcttctgctggtgtggtgcagggcacggatttcaggaagtttgtcaaattgtttattctatgagaatcaagagccaggatattgtgtcagccttgcctgwcagctgttgtttatatcacactcggctcctgtctctgggcttctttgcagggccagcttcgccttgctgggtgccctgccattctgctgtcagtggagca

SEQ ID NO: 16425 - DNA, 201 bp, Homo sapiens
tgatgtaattttttttccctgatcctttgatgtgggaacatgagaactcattaaggcagcaatttatactgtggtggtgagtgagagaggagccatgggcrggaaaagctgaccagagagcagcgagggatgggaaccagcccaggttttggatagaggaagcagcttcatcaccaccccctattttagaatgtcatcttt

SEQ ID NO: 16426 - DNA, 201 bp, Homo sapiens
ttacagccacttccaaggaaagcctggattgcaagagctctgggaaccggagacttcagagaagagggctttgaatggggagtgggggaggtggtgcacargacctgcaagacgctgggaggggtgatcggcaccaagggcactttgggaggacctgcctaggacgtggacttccccgaagacaggatcgcaaggagagac

SEQ ID NO: 16427 - DNA, 201 bp, Homo sapiens
cccacctggcttcaaccccaggaatgcgtccagcgtgatccagggcctgcagaacaggtgctggttctccctccccgtctacagctctggggatcggaggsgggggggcaattgtccagcccccaggcaacaggggaagggccttggccaacatctgggtgccagcagggcaggggtggggctctgaggggataagggctt

SEQ ID NO: 16428 - DNA, 201 bp, Homo sapiens
agtagtcctggagaggtggcctctgcgatgtgcccgcaggggcagcgtcctgcagatggtcctgcccctcctccccctaacctgtctgcaggcactgtccwcctggaccctgccccatgtgcaggagctggaccctgaggtcccttcccccttggccaggactggagaccctgtcccctctgtgggaatccctgcccacct

SEQ ID NO: 16429 - DNA, 201 bp, Homo sapiens
atctcaccccccacaccagagttcaccgttcctcgtggtaatgtgttgttaccgtcgagtcagagagtagtcctggagaggtggcctctgcgatgtgcccrcaggggcagcgtcctgcagatggtcctgcccctcctccccctaacctgtctgcaggcactgtccacctggaccctgccccatgtgcaggagctggaccct

SEQ ID NO: 16430 - DNA, 201 bp, Homo sapiens
tgttgttaccgtcgagtcagagagtagtcctggagaggtggcctctgcgatgtgcccgcaggggcagcgtcctgcagatggtcctgcccctcctccccctracctgtctgcaggcactgtccacctggaccctgccccatgtgcaggagctggaccctgaggtcccttcccccttggccaggactggagaccctgtcccct

SEQ ID NO: 16431 - DNA, 201 bp, Homo sapiens
ctgcgatgtgcccgcaggggcagcgtcctgcagatggtcctgcccctcctccccctaacctgtctgcaggcactgtccacctggaccctgccccatgtgcyggagctggaccctgaggtcccttcccccttggccaggactggagaccctgtcccctctgtgggaatccctgcccaccttcctctgggagtgggcactgga

SEQ ID NO: 16432 - DNA, 201 bp, Homo sapiens
ctggttttctggaaccccacgccaaggatcctgaatgccttctcagccagcgcttctgccctggcctcccccaagtcagtatgtgattctacaacctcacrtcaagtgggtcctgcattgcattcccacagctgcttggcgcctgttctcaccacttctccaatcctcttcctaggattgcctccaagaggaccccatatc

SEQ ID NO: 16433 - DNA, 201 bp, Homo sapiens
gcgatgtgcccgcaggggcagcgtcctgcagatggtcctgcccctcctccccctaacctgtctgcaggcactgtccacctggaccctgccccatgtgcagmagctggaccctgaggtcccttcccccttggccaggactggagaccctgtcccctctgtgggaatccctgcccaccttcctctgggagtgggcactggagg

SEQ ID NO: 16434 - DNA, 201 bp, Homo sapiens
ccccccgataagaccttcccctccaacaccccaccctcatccctctggcccacagtctatcctagtccggggtgccccggctcttatctatcttgcgcggscccaccctaaacttccacccccgctcctccatgttgtcatagtgctcactcccacaccagattcctgctcctcccaggaagcctcagtactttctcctct

SEQ ID NO: 16435 - DNA, 201 bp, Homo sapiens
ttttctcccgggttcgtagtctcatttccagatgatctccagtgtgtggacctcaaaatcctgcctaatgatgagtgcaaaaaagcccacgtccagaaggwgacagacttcatgctgtgtgtcggacacctggaaggtggcaaagacacctgtgtggtgaggcagccctgcccccagggtctggaagggctgagggagggg

SEQ ID NO: 16436 - DNA, 201 bp, Homo sapiens; identical to SEQ ID NO: 3335

SEQ ID NO: 16437 - DNA, 201 bp, Homo sapiens
ccaactcacataaccctggatgagggattctcctggcatatgctggcctctgggccacagaggtaatcatgtgattctggctgagccaatcacagtacccyagctgcagaccctgcaattggcccaaagatggacacatgaccaaagcccaaccaatcaagctctgccccaagactttttattaggaagctgtcaaggaaa

SEQ ID NO: 16438 - DNA, 201 bp, Homo sapiens
gtatttttagtagagacatggtttcaccatgttggccaggctggtctcaaactcctgacctcaggtgatcggcttcccaaagtgctgggattacaagcgtsagccactgagcccagcctcgatcatttctagaaccacccccacagacacccctggtcaccctacttgaactcctaaaaggtgtctcataacaactcatgt

SEQ ID NO: 16439 - DNA, 201 bp, Homo sapiens
tttccctagcctaggagccccttagccctccagattcttcctcagtgagcctctgatcctgtcccacccttggcgccttgatccctggtttccagaatccytttccactcccctaacccaccacctcccatcccccagccccagaccccaaatgacctgacgcccagatgcagtgtctgctccagacactgtctcctgtct

SEQ ID NO: 16440 - DNA, 201 bp, Homo sapiens; identical to SEQ ID NO: 3337

SEQ ID NO: 16441 - DNA, 201 bp, Homo sapiens
gggcgggaggaggactcagcacagggccacggccagtaacatgaagcccttgctcatatggatgagaactggggagagggggacaggggccccagagtcamccccagatacccctcttggtcaccctccaaagtcatctctgctgatacccacaagcagcccaacagacaaccccaaagtctggcacatcctcaaaatcac

SEQ ID NO: 16442 - DNA, 201 bp, Homo sapiens; identical to SEQ ID NO: 3330

SEQ ID NO: 16443 - DNA, 201 bp, Homo sapiens; identical to SEQ ID NO: 3331

SEQ ID NO: 16444 - DNA, 201 bp, Homo sapiens
aggggcctggggtctgggaggagggcatctatgctgccacaggattgacaggccagtggcattccccttggataacctcaggcaagactggggggctgagscagagaggaaggctctggcgcaggtcgcctggcagggcagagctgggctggacacccctctccaaggctgcctgggtctcttgggatctggttctgcttg

SEQ ID NO: 16445 - DNA, 201 bp, Homo sapiens
acatgagcctcctggagaaccacacccgccaagcagacgaggactacagccacgacctcatgctgctccgcctgacagagcctgctgataccatcacagaygctgtgaaggtcgtggagttgcccaccgaggaacccgaagtggggagcacctgtttggcttccggctggggcagcatcgaaccagagaattgtatgtggg

SEQ ID NO: 16446 - DNA, 201 bp, Homo sapiens
tgtcctccagaccctgacatctggtctccccagtccttccagggtcccccaaatttcaccagaaaaccctgcttcccaaactggcatgtgggatcccccayctggtatgggggggggtctgcaaatgtcccttcccacccagcacccccagctctcccaggaaaaacaccacaccctcccaccacatgctcctttccttgg

SEQ ID NO: 16447 - DNA, 201 bp, Homo sapiens
ggtgaggtcgggctgcagccctttttctcccgggttcgtagtctcatttccagatgatctccagtgtgtggacctcaaaatcctgcctaatgatgagtgcraaaaagcccacgtccagaaggtgacagacttcatgctgtgtgtcggacacctggaaggtggcaaagacacctgtgtggtgaggcagccctgcccccaggg

SEQ ID NO: 16448 - DNA, 201 bp, Homo sapiens
cttcccaaactggcatgtgggatcccccatctggtatgggggggggtctgcaaatgtcccttcccacccagcacccccagctctcccaggaaaaacaccamaccctcccaccacatgctcctttccttggggaagttccatcccgccccaggccccagcccttctctgcctgaattgttcctacacagctctggttttctg

SEQ ID NO: 16449 - DNA, 201 bp, Homo sapiens
ccacatgctcctttccttggggaagttccatcccgccccaggccccagcccttctctgcctgaattgttcctacacagctctggttttctggaaccccacsccaaggatcctgaatgccttctcagccagcgcttctgccctggcctcccccaagtcagtatgtgattctacaacctcacatcaagtgggtcctgcattgc

SEQ ID NO: 16450 - DNA, 201 bp, Homo sapiens
tcaccctgtccgagaaggactgccactcacgcctccctcctcctgagccccgtcccagtcctgaccgcaactgtgttctcagggccccaacctcccctcakattgccattcctggttcacaggaaggaccccaaaacctctcggaagcccacctctagccttaaccatagccctttcttttaccctttaaccaggaagccc

SEQ ID NO: 16451 - DNA, 201 bp, Homo sapiens
cagagacatgctaagacagaggccccgaggggagcagcacggaagtctagatacacctccagaaagccagagagcagggctggggttagggagggcccccrccccccaagccaacacctaccaatgccgaggcagaggaaactgaagacaaagtcggccatgttcaggcggaggaccactggccaggaggagagggccatg

SEQ ID NO: 16452 - DNA, 201 bp, Homo sapiens
accctttaaccaggaagccctgaaatctaactgtcccagccaagctggccccttccaaccccaatgtagggaccccaagtcacccccaaactcttcagtcsagatgctcttctttacctctcagacctggttccctaaagctgcatcctttcctgaacctcaaaagcccaacccaggtcctgtttccctagcctaggagcc

SEQ ID NO: 16453 - DNA, 201 bp, Homo sapiens
ccaagcagacgaggactacagccacgacctcatgctgctccgcctgacagagcctgctgataccatcacagacgctgtgaaggtcgtggagttgcccaccsaggaacccgaagtggggagcacctgtttggcttccggctggggcagcatcgaaccagagaattgtatgtgggggcagactgtgtagcccaaggcggggat

SEQ ID NO: 16454 - DNA, 201 bp, Homo sapiens
gtgcaccccactcccagccatggcaagtggctctctacgagcgtggacgctttaactgtggcgcttccctcatctccccacactgggtgctgtctgcggcmcactgccaaagccggtatgaaggcaggggctcagggtcctgagggagcctggttcggggggaagagctcctagatttgggggaagacggaggcagacgcc

SEQ ID NO: 16455 - DNA, 201 bp, Homo sapiens
gtggggagcacctgtttggcttccggctggggcagcatcgaaccagagaattgtatgtgggggcagactgtgtagcccaaggcggggatggggactcctgygtccaagggagaaagggccagggaagcaggtgaggtcgggctgcagccctttttctcccgggttcgtagtctcatttccagatgatctccagtgtgtgga

SEQ ID NO: 16456 - DNA, 201 bp, Homo sapiens
ggcttcaaccccaggaatgcgtccagcgtgatccagggcctgcagaacaggtgctggttctccctccccgtctacagctctggggatcggaggggggggggcaattgtccagcccccaggcaacaggggaagggccttggccaacatctgggtgccagcagggcaggggtggggctctgaggggataagggcttttaaaag

SEQ ID NO: 16457 - DNA, 201 bp, Homo sapiens; identical to SEQ ID NO: 3436

SEQ ID NO: 16458 - DNA, 201 bp, Homo sapiens
acaacaccgggataattttttgtgtttttaatagaggcggggtttcaccatgttggtcagtctggtctcaaactcctgacctcaggtgatctgcctgcctkggcctcccaatctgctgggattacagacatgacccactgtgcccggcctgatacataagttcttattatactttcctgccttttccaacatttctataat

SEQ ID NO: 16459 - DNA, 201 bp, Homo sapiens; identical to SEQ ID NO: 3347

SEQ ID NO: 16460 - DNA, 201 bp, Homo sapiens; identical to SEQ ID NO: 3350

SEQ ID NO: 16461 - DNA, 201 bp, Homo sapiens; identical to SEQ ID NO: 3351

SEQ ID NO: 16462 - DNA, 201 bp, Homo sapiens
tacaccaagaggctgagatgtctgggtccattttatgattagaaaaaaaaatcctgttcctttcagaaatagtgtgcactatttgggattctttagaaacwtccttggagaaaattaatgattcaagattgagaaaacatttatacaacctcaggccacactcttctctctcttgttattaaccattgcaccactgctatg

SEQ ID NO: 16463 - DNA, 201 bp, Homo sapiens
ctgatatccagattacaccaagaggctgagatgtctgggtccattttatgattagaaaaaaaaatcctgttcctttcagaaatagtgtgcactatttgggmttctttagaaacttccttggagaaaattaatgattcaagattgagaaaacatttatacaacctcaggccacactcttctctctcttgttattaaccattg

SEQ ID NO: 16464 - DNA, 201 bp, Homo sapiens; identical to SEQ ID NO: 3440

SEQ ID NO: 16465 - DNA, 201 bp, Homo sapiens; identical to SEQ ID NO: 3441

SEQ ID NO: 16466 - DNA, 201 bp, Homo sapiens
gaactgtgacccccaaattatcaatttgtcttgtgaagtcacttcatttaggaaaagcaatgtaaaagtaaaaattagtatttattgtgtgtactaggtgmtttgcatatgtcatttctttaatcctgtaggaaataatatgttctccaggaggtgacaatgtctatatgattagattcacagattacctatccaaatcta

SEQ ID NO: 16467 - DNA, 201 bp, Homo sapiens
ttaaggcttaccctattaacaccattttaacttaatcacctctgtaaagaccctatctcctgatacagtcacattcggatgctcaggaagttagggtatcrgtatcactatatgaatttgggagttgggggaggacacagtttagcccatgacagtcctgaatctcctttgctagatgcatgactgtgggccagtcacttc

SEQ ID NO: 16468 - DNA, 201 bp, Homo sapiens
taattttacagtttttggttcccctatattatataacataactgagagaaaaacaactatgaaattattttccaaagatgagttttatttatatttatcaygcttatttgatgtggttatggataaatttaatttacaagtgacatgcacctctgaaatgagaagactggtctatttggctccatttttttctaagcaaaa

SEQ ID NO: 16469 - DNA, 201 bp, Homo sapiens
ctggctttaggggtcttgctacagttttcccagactggaggtcttggggctggattctggttcttagcgaattcttgccaaacacctcccctttccccagyatccatttgttttgaaggttctttgcaggcttcttgccaataattgtcttaaaacaaatggagttgtttgcatacctagatggagtaaaatatttaggaa

SEQ ID NO: 16470 - DNA, 201 bp, Homo sapiens
tttcctcacccctgcgagaggttgcagtcatggtaacggctgttctgagaaattcagtgcccaaactggagggaggggaacacaaactcagcttcttcccragcttcagggcagggctggcaagttttgccttccccgccagcaagagccctggctttaggggtcttgctacagttttcccagactggaggtcttggggct

SEQ ID NO: 16471 - DNA, 201 bp, Homo sapiens
ctgacatcaactccaagggattggaattgaggaagactgttactacagttgagactcagaacttggaaggcctgcatcatgatggccaattctgccataarccctgtcctccaggtatgttacacaaaacatccagagattacagtgaaagtcacagttaggagtagcacatagtaatcatgactataataattttacagt

SEQ ID NO: 16472 - DNA, 201 bp, Homo sapiens
ttgcctccaagcaactagatgactgtttgctcatttaaacactggtgaacttcctgtgtaggtgacactttgctggccacttaagctaaagatatgagccrgacatatgcctggcatcaaggtatcagtccagaagcacagacagtcaaggaaagcaatggttattgtgtttcaacagcatgagaatagcatcagaagaga

SEQ ID NO: 16473 - DNA, 201 bp, Homo sapiens
ggtaaaactccttcaaacagagaaatagcctgaaaaaatcaaagctacaggcacagatagagcagcctggggaaaaatttagctttagctgcagagataakggagcaaggcctaacaaagaagcctttgttctttggataatcagcgggctcccaggaaaaagtttcctccccttttcagacatgtacatgatgggctcca

SEQ ID NO: 16474 - DNA, 201 bp, Homo sapiens
ttgctgtaatgagtggtgatatatttagtcctagaggaccaaagagaaataaaatggctttgattatgctggtttaagaaaatatatccgattaaacagargttaatatttgtgatgtttgatttagtaaaattataagactaccaaagaaaactagaagagcaaaataaccaaaatttatataaagaattcaatgttgat

SEQ ID NO: 16475 - DNA, 201 bp, Homo sapiens
ttcccatccctattcagcctataaagcaatgtttctcatccctggcagtgcattagaattgcttagggagctactaaaaatgtttcatgtttaggtcccayctcagggcaattacatcagagtctctgagtgaggaccttggtattggcctgatggagtaagtctggggtagagcctaacattctacatttttaacaagct

SEQ ID NO: 16476 - DNA, 201 bp, Homo sapiens; identical to SEQ ID NO: 3366

SEQ ID NO: 16477 - DNA, 201 bp, Homo sapiens
cactcttttagcttttgtcttgggagactttctgtctgttgacatgacttttaaaataatcttctcccccattgtatttatatctcattagcctacccccyctccccttgtgttttagaagagttttattgtctgtcatccctctatacttcccaccctgttacctgcccgtgtcctgttcaaacacttgctccttttttc

SEQ ID NO: 16478 - DNA, 201 bp, Homo sapiens
agaaaatatatccgattaaacagaggttaatatttgtgatgtttgatttagtaaaattataagactaccaaagaaaactagaagagcaaaataaccaaaayttatataaagaattcaatgttgataattcaaaggtttagaattttttccacctttcaaatactaagttgctgttatagatttactaccattattacccag

SEQ ID NO: 16479 - DNA, 201 bp, Homo sapiens
aaagcccatttttcttccaaatgcagaagatgtagattgtgtgatgaaggacatggtaagagtcttaaaatgcaattgaaagaggccaatcttggaatttyatgtagaaccatttataagacaatttgaaattggggcctactgtggtgctatgttgacacacaggaaagggaaggacaggtggctagggtaccgcagaac

SEQ ID NO: 16480 - DNA, 201 bp, Homo sapiens
cccagcactttgggaagctgaggcgggagcatcttctgaggtcaggagtttgagactagcctggccaacatggtgaaatgccgtctctactaaaaatacaraaaattagccatcatagtggtgcattcctgtaatcccacctactcgggaggctgaggcaggagaattgcttgaatgccggaggcagaggttgtagtgagc

SEQ ID NO: 16481 - DNA, 201 bp, Homo sapiens; identical to SEQ ID NO: 3452

SEQ ID NO: 16482 - DNA, 201 bp, Homo sapiens; identical to SEQ ID NO: 3453

SEQ ID NO: 16483 - DNA, 201 bp, Homo sapiens
atcacacatgaacctcttgagtctcctgatcaccaccggttgctaaaagtggcagcctctaagggccagctgagtaccctccctgagctacatcatgggcktggctatcacctggccattttcttggtctataggaattttttgaaattacttttgacagtttattttaagagctagtttaagctataggatttacgtgtt

SEQ ID NO: 16484 - DNA, 201 bp, Homo sapiens
tggccattttcttggtctataggaattttttgaaattacttttgacagtttattttaagagctagtttaagctataggatttacgtgttcagtttattacyaggtttaagtttatttttgtatccacttcatctctcttgtgtgtcactattttcctatcttcctttaactcttgaaatcttaagacagtcattccttatg

SEQ ID NO: 16485 - DNA, 201 bp, Homo sapiens
gaggtaaaatcctcttggccgggtgcgttggctcatgcctgtaatcccagcactttgggaagctgaggcgggagcatcttctgaggtcaggagtttgagaytagcctggccaacatggtgaaatgccgtctctactaaaaatacaaaaaattagccatcatagtggtgcattcctgtaatcccacctactcgggaggctga

SEQ ID NO: 16486 - DNA, 201 bp, Homo sapiens
ttggccgggtgcgttggctcatgcctgtaatcccagcactttgggaagctgaggcgggagcatcttctgaggtcaggagtttgagactagcctggccaacrtggtgaaatgccgtctctactaaaaatacaaaaaattagccatcatagtggtgcattcctgtaatcccacctactcgggaggctgaggcaggagaattgc

SEQ ID NO: 16487 - DNA, 201 bp, Homo sapiens; identical to SEQ ID NO: 3343

SEQ ID NO: 16488 - DNA, 201 bp, Homo sapiens
ctgtcatccctctatacttcccaccctgttacctgcccgtgtcctgttcaaacacttgctccttttttccttgggcaggtgaaaggaaagctagggactgmacagtcaatggggatgaaccagactgcgtgccctgccaagaagggaaggagtacacagacaaagcccatttttcttccaaatgcagaagatgtagattgt

SEQ ID NO: 16489 - DNA, 201 bp, Homo sapiens
gggaagctgaggcgggagcatcttctgaggtcaggagtttgagactagcctggccaacatggtgaaatgccgtctctactaaaaatacaaaaaattagccrtcatagtggtgcattcctgtaatcccacctactcgggaggctgaggcaggagaattgcttgaatgccggaggcagaggttgtagtgagccaagatctaga

SEQ ID NO: 16490 - DNA, 201 bp, Homo sapiens
ttgtttttctgcccttctctttcttcttttgccctttcttagcttgcactcccatggtgatttctgcttggtctcctgctggggttggtggtactcgttcycaccgcacagaacccggcgcctattattggccaagaaacttgagcagcctgttttgaaaagtccctcgctcagaaatgccagcttgcagatggctaatca

SEQ ID NO: 16491 - DNA, 201 bp, Homo sapiens
cttcttaaaatgtcaccagtcacattggattaaggcttaccctattaacaccattttaacttaatcacctctgtaaagaccctatctcctgatacagtcayattcggatgctcaggaagttagggtatcagtatcactatatgaatttgggagttgggggaggacacagtttagcccatgacagtcctgaatctcctttgc

SEQ ID NO: 16492 - DNA, 201 bp, Homo sapiens
aggcgggagcatcttctgaggtcaggagtttgagactagcctggccaacatggtgaaatgccgtctctactaaaaatacaaaaaattagccatcatagtggtgcattcctgtaatcccacctactcgggaggctgaggcaggagaattgcttgaatgccggaggcagaggttgtagtgagccaagatctagattgtgccac

SEQ ID NO: 16493 - DNA, 201 bp, Homo sapiens; identical to SEQ ID NO: 3464

SEQ ID NO: 16494 - DNA, 201 bp, Homo sapiens
ggctcggaagaacggcaccttttctttctcgaaaaagttatatgggggctgaatgagcttctggaggcttgtttaccgttttttattgtcacacagaaaargaaactgccttgtctcccttccgggaattctctctttaagactgtaagtcgctgcctgagtggtttcattttgttttgtttttctgcccttctctttctt

SEQ ID NO: 16495 - DNA, 201 bp, Homo sapiens
ctgttgctagattatcgtccaaaagtgttaatgcccaagtgactgacatcaactccaagggattggaattgaggaagactgttactacagttgagactcaraacttggaaggcctgcatcatgatggccaattctgccataagccctgtcctccaggtatgttacacaaaacatccagagattacagtgaaagtcacagtt

SEQ ID NO: 16496 - DNA, 201 bp, Homo sapiens
gcactttcaaaaatactcggttcaaatgtaaaataatattcgtaatattttaagacaaacctcctagaacttatatgtgtctttcttcccagagcagtctytatgggtgcctaaacaatactgcattattagatttttttcagtttataagccacacaagaaagttaacccatgtcatctctagaggcataaaaatagaca

SEQ ID NO: 16497 - DNA, 201 bp, Homo sapiens
gggacccgggccagttgccactgctggctctggcagcctgcttttattttgttatctggccccacccacatcctgctgattggtccattttacagagagcygattggtccattttacagagagctgattggtgcgttttgacagggtgctgactggtgcgtttacaatccctgagctagacacaaaagttctcaacgtccc

SEQ ID NO: 16498 - DNA, 201 bp, Homo sapiens
aaacaacgttgctgtaatgagtggtgatatatttagtcctagaggaccaaagagaaataaaatggctttgattatgctggtttaagaaaatatatccgatkaaacagaggttaatatttgtgatgtttgatttagtaaaattataagactaccaaagaaaactagaagagcaaaataaccaaaatttatataaagaattca

SEQ ID NO: 16499 - DNA, 201 bp, Homo sapiens
agttagagaacctgccttgtaagtcatcttgggaagcttttaggagttcatctaataggcttaagaaataagcacatgatgccttatgttttatttgctargaaaattttatgtacagttgtcccaggctctcccctggccacaagtgtctgagagtgcccctatgatgacaggctaggtaggcattggggaagcagctga

SEQ ID NO: 16500 - DNA, 201 bp, Homo sapiens
tttcttaaaccaacccaaagagcataaaatggaatatttatttatttttgtagcttaatttgtaatttaataatttttcttaagccaacctaacgaacatattgggctgtttattttcatttttaatgggccatatttacatcacaaaggacttgagaagtcttacaaatacaataaaatgataaaatatgaattaagaca

SEQ ID NO: 16501 - DNA, 201 bp, Homo sapiens
ggcactggcacggaacacaccctgaggccagccctggctgcccaggcggagctgcctcttctcccgcgggttggtggacccgctcagtacggagttggggragctctttcacttcggaggattgctcaacaaccatgctgggcatctggaccctcctacctctggtgagccctctcctgcccgggtggaggcttaccccgt

SEQ ID NO: 16502 - DNA, 201 bp, Homo sapiens
ttgacccaaagttagagaacctgccttgtaagtcatcttgggaagcttttaggagttcatctaataggcttaagaaataagcacatgatgccttatgtttyatttgctaggaaaattttatgtacagttgtcccaggctctcccctggccacaagtgtctgagagtgcccctatgatgacaggctaggtaggcattgggga

SEQ ID NO: 16503 - DNA, 201 bp, Homo sapiens
tttaggacttgtgatgaaaaataataaaataatttaaaacgataaaaagcaacataattttatatgttgtaccttgtacttccttataaggtacaacactrcaatagccttagtgtgtagttttctttttgctatgtatgtatatatatattcataaaagtggaaaaataacatttaataaatcctctttattttctggaa

SEQ ID NO: 16504 - DNA, 201 bp, Homo sapiens
tgccaattttgggtgggttacacttgtttaccacgttgcttacttcagaaatcaataaaattctcttcatgcttttattttacaggttcttacgtctgttrctagattatcgtccaaaagtgttaatgcccaagtgactgacatcaactccaagggattggaattgaggaagactgttactacagttgagactcagaactt

SEQ ID NO: 16505 - DNA, 201 bp, Homo sapiens
ttcaggcttgattttaaaaattgggcctatactcacagaaagacaaatactgcatgatctcgtttatatgtggaatctaaaagttttgaatccataaaagyagagagtagaatagtggttaccagaggctagttgggggcaaagttgggggatttagggagatattggtcaaaggatacaaaatttcagttaggaggaata

SEQ ID NO: 16506 - DNA, 201 bp, Homo sapiens
ctgcccaccattttcatagtctgcttataattagccgctataactaatagtttccaaactgattttctaggcttagaagtggaaataaactgcacccggayccagaataccaagtgcagatgtaaaccaaactttttttgtaactctactgtatgtgaacactgtgacccttgcaccaagtaagttttagtctttctctga

SEQ ID NO: 16507 - DNA, 201 bp, Homo sapiens
tgcttacttcagaaatcaataaaattctcttcatgcttttattttacaggttcttacgtctgttgctagattatcgtccaaaagtgttaatgcccaagtgrctgacatcaactccaagggattggaattgaggaagactgttactacagttgagactcagaacttggaaggcctgcatcatgatggccaattctgccataa

SEQ ID NO: 16508 - DNA, 201 bp, Homo sapiens
aaagaattcaatgttgataattcaaaggtttagaattttttccacctttcaaatactaagttgctgttatagatttactaccattattacccagattttcyattttactaaaaaataataacacagttcgttatgataaatcagtatagatctttaggctcaacacaaccctgctaccttttaaacttttttattatacaa

SEQ ID NO: 16509 - DNA, 201 bp, Homo sapiens
ttgggctaggtcatctataaagtcctttctgctctaaattgtaaatataatgagataccaacatttagtttaattgtttaaaattttagaagctaactggrtgctttgctggtgtcaacactcccctttacaaaaaaaaattcggccgggcatggtggctcacgcctgtaatcccaacactttgggaggccgaggcaggcg

SEQ ID NO: 16510 - DNA, 201 bp, Homo sapiens
cagttgttttgaaatttctctttccttctccactatgctccccctcactgaaactttaataataaaagtagcacacttattgggcatgtatttgttatgtkccaggttctgtgctaacagctttaagtgcattattccacgtattttcacaacaagcctgtgaggaagaggttatttccacttatagataaagaaactgag

SEQ ID NO: 16511 - DNA, 201 bp, Homo sapiens
atctaagttgcttccaaatctgtttatgctcattagtgttgtgatattcatatgtaatttgattgaatattgcataaattaatgaaatacaaatacagagraaagacagattttatttctaagaaaactaggttgagtgctttggagaattcaataaagatgagctgctaaaatgttgttgatgaattttgtgagggaaaa

SEQ ID NO: 16512 - DNA, 201 bp, Homo sapiens
aactaggttgagtgctttggagaattcaataaagatgagctgctaaaatgttgttgatgaattttgtgagggaaaaataaaagttaagtagtaggaaaaaycacaaaaatctctaaagccattcatacagattattggtatgtttatgttttcctttcatcaaaaacgaagggagggagggagggagggagggaggagaaa

SEQ ID NO: 16513 - DNA, 201 bp, Homo sapiens
cgattaaacagaggttaatatttgtgatgtttgatttagtaaaattataagactaccaaagaaaactagaagagcaaaataaccaaaatttatataaagawttcaatgttgataattcaaaggtttagaattttttccacctttcaaatactaagttgctgttatagatttactaccattattacccagattttccatttt

SEQ ID NO: 16514 - DNA, 201 bp, Homo sapiens
tatgggggctgaatgagcttctggaggcttgtttaccgttttttattgtcacacagaaaaggaaactgccttgtctcccttccgggaattctctctttaasactgtaagtcgctgcctgagtggtttcattttgttttgtttttctgcccttctctttcttcttttgccctttcttagcttgcactcccatggtgatttct

SEQ ID NO: 16515 - DNA, 201 bp, Homo sapiens
acattagcaaccaggatggaaaaacacaaatttgtaaatgatggccaggtttgcaagcaaaaattaaattgataaatggcagcacccccactaccagctayagttagactgatgaaaaatcctctaatgttcatgcctgaaatacagttaccacccttagcagcaaattagaggcaaagaagttctggaatttggacgttg

SEQ ID NO: 16516 - DNA, 201 bp, Homo sapiens; identical to SEQ ID NO: 3443

SEQ ID NO: 16517 - DNA, 201 bp, Homo sapiens; identical to SEQ ID NO: 3354

SEQ ID NO: 16518 - DNA, 201 bp, Homo sapiens
tcatccctctatacttcccaccctgttacctgcccgtgtcctgttcaaacacttgctccttttttccttgggcaggtgaaaggaaagctagggactgcacrgtcaatggggatgaaccagactgcgtgccctgccaagaagggaaggagtacacagacaaagcccatttttcttccaaatgcagaagatgtagattgtgtg

SEQ ID NO: 16519 - DNA, 201 bp, Homo sapiens; identical to SEQ ID NO: 3356

SEQ ID NO: 16520 - DNA, 201 bp, Homo sapiens
tatgaggtactttttgtttatcttattgtctcattggcaaccagcaactcctgttgcatttttgacatgggaatctatcagggtgtggttaataaagtacrtttccatggtaagtattctttaagaaaaaataaaccaagatttcatcagagacagaaattactgcaaactgtacttaccagtttctggtgatttgtataa

SEQ ID NO: 16521 - DNA, 201 bp, Homo sapiens; identical to SEQ ID NO: 3447

SEQ ID NO: 16522 - DNA, 201 bp, Homo sapiens; identical to SEQ ID NO: 3357

SEQ ID NO: 16523 - DNA, 201 bp, Homo sapiens
ggcggagcttgcagtgagccgagatcgcgccactgcacctccagcctggcaacagagcgagactccgtctcaaaaaaaaaaaaaaataaataaaaaaaaawaaaataaaataaaataaaaatctcactttctgtttctactgttctctcaagtacccctctgccttctgttacttctttgctgcattctgagaggaatggg

SEQ ID NO: 16524 - DNA, 201 bp, Homo sapiens
gattgtgtgatgaaggacatggtaagagtcttaaaatgcaattgaaagaggccaatcttggaatttcatgtagaaccatttataagacaatttgaaattgsggcctactgtggtgctatgttgacacacaggaaagggaaggacaggtggctagggtaccgcagaaccaggtgccgagctaactactggtctagaccttta

SEQ ID NO: 16525 - DNA, 201 bp, Homo sapiens; identical to SEQ ID NO: 3383

SEQ ID NO: 16526 - DNA, 201 bp, Homo sapiens
accagaggctgcgtgtttaaagcccgaagaaaactttgcttttctgaaagaatacacacacacacgcatatgtaaatattcatacatttatgtatatatayatattataatacctataagttaggtataacttatatttgtatatgatatatggcctaggaaattaaggcttattaaataaaatttataaatgcagatgag

SEQ ID NO: 16527 - DNA, 201 bp, Homo sapiens; identical to SEQ ID NO: 3361

SEQ ID NO: 16528 - DNA, 201 bp, Homo sapiens
tacttactaaaatagcatatatatttacatgtcataatttgctcatgtagtaaatattttgttttatcaaaaagaatatatgaagttattaaggaattcaygttcctaggaaacacagcagaaattaattttgctgtataggtgagcagagcagattaaactgcttatatttttaaaactagttataccattaacaattag

SEQ ID NO: 16529 - DNA, 201 bp, Homo sapiens
aacttccttggagaaaattaatgattcaagattgagaaaacatttatacaacctcaggccacactcttctctctcttgttattaaccattgcaccactgcwatgttggctgctttgaaaatctcatagtttttggacagcagtattagtaaagtgtaagaaaattgtcaaagcttggagctatgcttgttgaacttttgta

SEQ ID NO: 16530 - DNA, 201 bp, Homo sapiens
taaatgcagatgagtcaaatacaaagatcagacataactctatcacctaagtaatcattgtttacgttttgcagtttatcttccatttctcccctctaatmtgactcttttaaatttagttacacagaaattggttttgcgctcacgacatgcctaacatcaggcctttatccttaaagaagtttcaacactcttgtgtca

SEQ ID NO: 16531 - DNA, 201 bp, Homo sapiens
ttctcccctctaatatgactcttttaaatttagttacacagaaattggttttgcgctcacgacatgcctaacatcaggcctttatccttaaagaagtttcracactcttgtgtcacctcatgtgtctacagaaaatgtttgcttttatgccttcacggttatgttttcttagtagtagcaataaataaaatagatgcaaag

SEQ ID NO: 16532 - DNA, 201 bp, Homo sapiens; identical to SEQ ID NO: 3344

SEQ ID NO: 16533 - DNA, 201 bp, Homo sapiens; identical to SEQ ID NO: 3457

SEQ ID NO: 16534 - DNA, 201 bp, Homo sapiens
ctgttacctgcccgtgtcctgttcaaacacttgctccttttttccttgggcaggtgaaaggaaagctagggactgcacagtcaatggggatgaaccagacygcgtgccctgccaagaagggaaggagtacacagacaaagcccatttttcttccaaatgcagaagatgtagattgtgtgatgaaggacatggtaagagtct

SEQ ID NO: 16535 - DNA, 201 bp, Homo sapiens
ttctgaagaccatgggaaatctcttgcctatttagctcagtgatcatccaagatgggaaattcttgggctcagctgtgagggatcccaagtttatatgtamcactaatgtctcacaaatcaagaatccaagagaatcaagagactatagttcattccttatattaaattcttaggactgccaactgggtggctacagtttt

SEQ ID NO: 16536 - DNA, 201 bp, Homo sapiens; identical to SEQ ID NO: 3459

SEQ ID NO: 16537 - DNA, 201 bp, Homo sapiens; identical to SEQ ID NO: 3460

SEQ ID NO: 16538 - DNA, 201 bp, Homo sapiens
ccaggatggaaaaacacaaatttgtaaatgatggccaggtttgcaagcaaaaattaaattgataaatggcagcacccccactaccagctatagttagactratgaaaaatcctctaatgttcatgcctgaaatacagttaccacccttagcagcaaattagaggcaaagaagttctggaatttggacgttgtctctgagta

SEQ ID NO: 16539 - DNA, 201 bp, Homo sapiens; identical to SEQ ID NO: 3461

SEQ ID NO: 16540 - DNA, 201 bp, Homo sapiens
ttagccttgtctacacatatacataattgcatgtttaatttgagctatatatagtctgttttttgttcctttgcatgttacacaaacctttttctatttcyacataatttttatctcatattttttattggatacattatagagagagcatttattaaatgagctgggattactataatttttattatttattttttaatt

SEQ ID NO: 16541 - DNA, 201 bp, Homo sapiens; identical to SEQ ID NO: 3462

SEQ ID NO: 16542 - DNA, 201 bp, Homo sapiens; identical to SEQ ID NO: 3463

SEQ ID NO: 16543 - DNA, 201 bp, Homo sapiens
tgtgtgtccaaatttcctcttctttttttttaatttagaaatttatactgtctacaagctttatatagctttagttaaaaaaaagcaaaaaaaaaaaaaaatcaaaacaaaaacagtgaagccaagacactcttccaaagtctggacccttccggccttccaaatacaagagctctggaagttgtatataccaaatttcct

SEQ ID NO: 16544 - DNA, 201 bp, Homo sapiens
atgtgtgtccaaatttcctcttctttttttttaatttagaaatttatactgtctacaagctttatatagctttagttaaaaaaaagcaaaaaaaaaaaaaaatcaaaacaaaaacagtgaagccaagacactcttccaaagtctggacccttccggccttccaaatacaagagctctggaagttgtatataccaaatttcc

SEQ ID NO: 16545 - DNA, 201 bp, Homo sapiens
tgcattatcaagaaaagatgagtttagcaaaatgaagaaaaatagtcttatcaactagaaataagcaccattaaaatttctgtgtgttaaaagataatatrctgctgaaactttttttttcttgaaatgtccctcttttctttcacttttcattttcttaatccctaaccttctactgttgaattttctggaccaccgtta

SEQ ID NO: 16546 - DNA, 201 bp, Homo sapiens
cactaggcaggccgagtgcagctctgacagcaatgcaagagaaatattactatctccatcatatgcaggatgaaatttaggcttggagaaaacaacacttygttaaagattttatagctgctcaagatttgaccaaggcttttaaaacttcaaatgttcttttccttattacactgtttcttatcaggatttgtggacttt

SEQ ID NO: 16547 - DNA, 201 bp, Homo sapiens
tatgtgtgtccaaatttcctcttctttttttttaatttagaaatttatactgtctacaagctttatatagctttagttaaaaaaaagcaaaaaaaaaaaaaaatcaaaacaaaaacagtgaagccaagacactcttccaaagtctggacccttccggccttccaaatacaagagctctggaagttgtatataccaaatttc

SEQ ID NO: 16548 - DNA, 201 bp, Homo sapiens
ttttaaaataatcttctcccccattgtatttatatctcattagcctaccccccctccccttgtgttttagaagagttttattgtctgtcatccctctatasttcccaccctgttacctgcccgtgtcctgttcaaacacttgctccttttttccttgggcaggtgaaaggaaagctagggactgcacagtcaatggggatg

SEQ ID NO: 16549 - DNA, 201 bp, Homo sapiens
gtatgtgtgtccaaatttcctcttctttttttttaatttagaaatttatactgtctacaagctttatatagctttagttaaaaaaaagcaaaaaaaaaaaaaaatcaaaacaaaaacagtgaagccaagacactcttccaaagtctggacccttccggccttccaaatacaagagctctggaagttgtatataccaaattt

SEQ ID NO: 16550 - DNA, 201 bp, Homo sapiens
aagatatgagccagacatatgcctggcatcaaggtatcagtccagaagcacagacagtcaaggaaagcaatggttattgtgtttcaacagcatgagaatarcatcagaagagacttatgttccaggtgttacaaattatacagaaaaacttttcaactctgcctgaggagatggaggtgaagacatgaatgtgtctcatga

SEQ ID NO: 16551 - DNA, 201 bp, Homo sapiens; identical to SEQ ID NO: 3465

SEQ ID NO: 16552 - DNA, 201 bp, Homo sapiens
aataaagatgagctgctaaaatgttgttgatgaattttgtgagggaaaaataaaagttaagtagtaggaaaaatcacaaaaatctctaaagccattcatasagattattggtatgtttatgttttcctttcatcaaaaacgaagggagggagggagggagggagggaggagaaaaaaagaaagaaatgaaaaaggaagaga

SEQ ID NO: 16553 - DNA, 201 bp, Homo sapiens; identical to SEQ ID NO: 3467

SEQ ID NO: 16554 - DNA, 201 bp, Homo sapiens
agggtgtggttaataaagtacatttccatggtaagtattctttaagaaaaaataaaccaagatttcatcagagacagaaattactgcaaactgtacttacyagtttctggtgatttgtataactgagctttcaatttcaaaaattaaaaagttctctttagtgtaacatatttttgtgtctagtaattttacttcaaaaat

SEQ ID NO: 16555 - DNA, 201 bp, Homo sapiens; identical to SEQ ID NO: 3468

SEQ ID NO: 16556 - DNA, 201 bp, Homo sapiens
aagtattctttaagaaaaaataaaccaagatttcatcagagacagaaattactgcaaactgtacttaccagtttctggtgatttgtataactgagctttcratttcaaaaattaaaaagttctctttagtgtaacatatttttgtgtctagtaattttacttcaaaaataaaagagaattttctttaccatcaaacaacgt

SEQ ID NO: 16557 - DNA, 201 bp, Homo sapiens
ttactgcaaactgtacttaccagtttctggtgatttgtataactgagctttcaatttcaaaaattaaaaagttctctttagtgtaacatatttttgtgtcyagtaattttacttcaaaaataaaagagaattttctttaccatcaaacaacgttgctgtaatgagtggtgatatatttagtcctagaggaccaaagagaaa

SEQ ID NO: 16558 - DNA, 201 bp, Homo sapiens
ttagctcgatttagctaattatcttccaaaatatgtacataattatcttccaaaatatgtacataattcaagacatcatgttatataccataaatatatayaatttttttatttgtcgaataaaaataatacaaaaaaaccctgggcctatactgcccacaggtagtggccacaggcagagctggtcccaagcccctccct

SEQ ID NO: 16559 - DNA, 201 bp, Homo sapiens; identical to SEQ ID NO: 3469

SEQ ID NO: 16560 - DNA, 201 bp, Homo sapiens
tcagtttattactaggtttaagtttatttttgtatccacttcatctctcttgtgtgtcactattttcctatcttcctttaactcttgaaatcttaagacartcattccttatgatatttttcatccagccatccaaattatattaacttgtgccagctttagatactaatttagaaatatttgaaggaatacgtttgccag

SEQ ID NO: 16561 - DNA, 201 bp, Homo sapiens
gtttatcttatttcctgcataatatcaaacttctaaaaagttcctaggactcaataggcatttaataaacacctatcagataaatgaattttttaagagarcacattacataatgctttctaatagcaatacagtgacaaactttatttttaaagtaaattaatgcaaatatgtatattatttaaaattgtttgtttttaa

SEQ ID NO: 16562 - DNA, 201 bp, Homo sapiens
catcatatgcaggatgaaatttaggcttggagaaaacaacactttgttaaagattttatagctgctcaagatttgaccaaggcttttaaaacttcaaatgytcttttccttattacactgtttcttatcaggatttgtggactttggaaagtaaaatgaaaagtcagagcaatgtgagttagtttgataatctcagtggcc

SEQ ID NO: 16563 - DNA, 201 bp, Homo sapiens; identical to SEQ ID NO: 3474

SEQ ID NO: 16564 - DNA, 201 bp, Homo sapiens; identical to SEQ ID NO: 3475

SEQ ID NO: 16565 - DNA, 201 bp, Homo sapiens; identical to SEQ ID NO: 3476

SEQ ID NO: 16566 - DNA, 201 bp, Homo sapiens; identical to SEQ ID NO: 3372

SEQ ID NO: 16567 - DNA, 201 bp, Homo sapiens; identical to SEQ ID NO: 3373

SEQ ID NO: 16568 - DNA, 201 bp, Homo sapiens
tgttgaccagaagccttaccaataacacaaagtcaattaacacatgtgttatatgttatatgtatgatatactgtattcttacaatctaagaagctacagaagaaaattctattaagaaaattataggaaaatgtgtttactgttcattaagtggaagtagatcatcataaagatcttcatccttgtcttcatgttgagag

SEQ ID NO: 16569 - DNA, 201 bp, Homo sapiens
aatacacttccacctctctaataaaagtgacaacttgtcttgggcattagaaacttggaggcaactccagggctctccctggaaaatcaagatcttgaatmtgagaagtgctgacaaagccctcacaggatccccagcccaggggtaaaggaacaagatgtttaaaaatttgagccacttccattcagctttcactttctg

SEQ ID NO: 16570 - DNA, 201 bp, Homo sapiens
gaatgagagagcaaattcaatcgggcaaaaacaatgatattccgtaaacaataatgacataagcctaggaaatgttttaagaataaagctttggccgggcrcggtggctcacgcctgtaatcccagcactttgggaggccgaggcaggtggatccgaggtcaggagaccgagaccatcctggctaacatggtggaaccccg

SEQ ID NO: 16571 - DNA, 201 bp, Homo sapiens
tttttttaaaaaggctgacaacagtaaaaataagttagtgggagccgggcacggtggctcacgcctgtaatcccagcactttgggaggccgagatgggcgrgtcatgaggtcaggagatccagaccatcctggcttacacggtgaaaccccatctctactaaaaatacaaaaaaaattagccaggtgttgtggcgggcgcc

SEQ ID NO: 16572 - DNA, 201 bp, Homo sapiens
ggaaaatggtgtgaacccgggaggcggagcttgtagtgaaccgagatcacaccactgcactccagcctgggcgacagagcaagactccatctcaaaaaaataaaaaataaaaaaaataataagttagtgggatctggatataaagttttttattttatataaaggcaggttcaaacactattacaattgctacatttgtag

SEQ ID NO: 16573 - DNA, 201 bp, Homo sapiens
ttttgagatggaatcttactctgtttacccaggctggagtgcagtggtgtcatcttggttcactgcaacttccaccttccaggatcaagagattctcctgyctcagcctcctgagtagctgggattacgggcatatgccaccacgcctggctaattttcgtatttttagtagagatgcggtttcaccatgttggccaggct

SEQ ID NO: 16574 - DNA, 201 bp, Homo sapiens
tctttgcagttatggaacagtttgtatcttgcttggcgtggaggttgcccatatctgcacatgtgataaaatggcataagtagtatatacacacacggtaccaggccagctcctaatcttatgctatcattacgtgggatggaaccgttgggagaaatagggtgaagagcacccaggacatctctgtactgtcttatcaac

SEQ ID NO: 16575 - DNA, 201 bp, Homo sapiens
gatggcaagtgctcccgtggccagggagagatggataaagctggagagacagataaacaaaacagtcaagtctgttggcaggaagcgaagagggcctgagctctggtggagactggtccctggagcttccacagtttaaccggaagggagtagggcaagacagttgctgatggggataggtgtggagctttggtgatgggc

SEQ ID NO: 16576 - DNA, 201 bp, Homo sapiens
aaaataaagcaaggttgggctgggcatggtggctcacgcctgtaatcccagcactttggaaagccgaggcgggtggatcacctgaggtcaggagttcgagrtcagcctggccaacatggtgaaaccttgtctctactaaaaatacaaaaattagctgggcatggttgcgggcgcctataatcctggctactcgggaggctg

SEQ ID NO: 16577 - DNA, 201 bp, Homo sapiens; identical to SEQ ID NO: 3605

SEQ ID NO: 16578 - DNA, 201 bp, Homo sapiens
attaaataaaggaaaaagcaatgggtgaaattaattttaataatacattttatttaatccaatctgttcaaatatcatttcaacaaaaaatcgacatttgaaaaattcagatatcttaagtaattttatacaaaagtcttcaaactccaggatgtattattttacacgtccagcacatctcaactctaactcaccaccttt

SEQ ID NO: 16579 - DNA, 201 bp, Homo sapiens
ctcttgccacctcagttcatgaataataggtgtgaaaatgcttctcacattaggcagtaatactgataaacccatagaaatgtttcctttaaagaaggcattttttttttttttttttacatcttccaaaggttaaaagcactagttctggactgaaagagaaaaggaaatatttatagtaaaacaggaagggaatcttca

SEQ ID NO: 16580 - DNA, 201 bp, Homo sapiens
tcttgccacctcagttcatgaataataggtgtgaaaatgcttctcacattaggcagtaatactgataaacccatagaaatgtttcctttaaagaaggcattttttttttttttttttacatcttccaaaggttaaaagcactagttctggactgaaagagaaaaggaaatatttatagtaaaacaggaagggaatcttcat

SEQ ID NO: 16581 - DNA, 201 bp, Homo sapiens
cctcccacctcagcctctcaagtagctgggaccatgggcatgtgctaccatgcctgtttttgttttttttgtttttctttgtttttttttttttttagagrtatggtcttgctatgttgcccaggctggtctcaaactcctgggttcaagcgatcttgtctcctcagcctccaaaagtgctaggattacaggagtgagtca

SEQ ID NO: 16582 - DNA, 201 bp, Homo sapiens
aggagaccgaggtgggcagatcacttgaggtcagaagttggagaccagcctggccaacatggcgaaaccctgtctctactaaaaacaaaaattagctgggygtggtgatgggcgcctgtaatcccagctactcaggaggctgaggcaggagaatctcttgaatccgggaggccgaggttgcagtgagccaaaatcgtgcca

SEQ ID NO: 16583 - DNA, 201 bp, Homo sapiens
gtgcctgcttctattacaacactctctactcgcagactctgtcagctggagtttggaaatctttatatctgatttttctgtattttaatggtgatgtttctttttttttttttttttgagacacagtctcgctctgtctcccaggctggagtacagtggcacgatctcagctcactgcaacctccgcctcccaagttgaag

SEQ ID NO: 16584 - DNA, 201 bp, Homo sapiens
attagaaacttctgcagagattataaacctttagaaaataaagcattttatcctgcacaagaatattgacattcttaccaggaatccaactatccaagtgytttgttgttcctgcaataagtttgatttaaactctggaaaactgttttttaaaaaaattccatgtcgatcactagcatccctctcccactcccctctccc

SEQ ID NO: 16585 - DNA, 201 bp, Homo sapiens
agccccatttgttgcaaaaataaaaggtaatgccctttctcagaaacgtcttctagggaatttgacaaaatgttatgaaacccagaagtcataggtcctcyggaaaagctgaggatagcagcatttcatggcatctgtgacagcagcagtgccagacccgttgccattggcccacctagggcatggatgcatgtcgtgcac

SEQ ID NO: 16586 - DNA, 201 bp, Homo sapiens
ctgcaaggcagaacatatactaatttaccgttctgtgcaaaactggaaagaatattgacgctcagagctggagaccatatgctcttctcattacacatttwattttttaaaatatatttttaaattttgcaggtacacatccaagctaagaaagcccattgacatgatcctcttggtacaaataccacatgttcactggaa

SEQ ID NO: 16587 - DNA, 201 bp, Homo sapiens
ttgtgcacggcactatgctagcttctgtaaggaatagatatgtcaatggtgcccggcctccagagcttacagtgtggtaggaaagaagacaaccttggaaraaagatacaatgtgctaattctccagtggagcgaagatgttgtgtggtacacagatgagagattatccatcaggatgagggggaaggaggccgcttgtca

SEQ ID NO: 16588 - DNA, 201 bp, Homo sapiens
cacatgtgcctgtctgtgtgcacgtgtgtgcctgtctatgtgcgtgtttgtgtgtgtattgctgtcttataaatcgtcacatcagccctgttaggagggcmcttggcttactttacaggtgaggaaactgactcaggtttgtcagttgcctaaggtccaattaataacacagggcaaagccggtttcaaatcaggtctatg

SEQ ID NO: 16589 - DNA, 201 bp, Homo sapiens
gtgaggaaactgactcaggtttgtcagttgcctaaggtccaattaataacacagggcaaagccggtttcaaatcaggtctatgcacctcagaagataacgygtcagactccagcaaatttagaaaggcttcttcaagggagagtgccaggacaggttgactttagtcagtcctgatgaaggtgagtagaaaaatgaggtta

SEQ ID NO: 16590 - DNA, 201 bp, Homo sapiens
gggagagtgccaggacaggttgactttagtcagtcctgatgaaggtgagtagaaaaatgaggttagaaaagaaggggctggtgcaccaggaagcaccacgmcctcctgatgcaaaagggtcatccctggagacctcagggctcctgctctgctccctttcagctcttcgtgcgagaacctgagaagaggctgggcgtgagg

SEQ ID NO: 16591 - DNA, 201 bp, Homo sapiens
gttgttctcaacatctgtcccaagctccagtgatgttccaaggacccaacaggccagcctcaagcactctaattacttgtgacagaaccacatctaatacrtgggttagtcatttgtgataaaataaaaattttaccttgtttttagctatcagaactattaaaccatgtctcaccttccactgcagattaaaattgactt

SEQ ID NO: 16592 - DNA, 201 bp, Homo sapiens
ttatatctgatttttctgtattttaatggtgatgtttctttttttttttttttttgagacacagtctcgctctgtctcccaggctggagtacagtggcacratctcagctcactgcaacctccgcctcccaagttgaagtgattcttctgcctcagcctcctgagtagctgggattacagatgtgcaccaccacacctggc

SEQ ID NO: 16593 - DNA, 201 bp, Homo sapiens
atctcagctcactgtaacctctgccctgtgggttcaagggattctcctgcctcagcttcccgagtacctgggactacttgcgcacacaaccgcacccagckaattctttgtattttagtagagatggggcttcaccatgtcgcccaggctggcctcaaatgcctgagctcaggcaatccgcccacctcggcctcccgaagt

SEQ ID NO: 16594 - DNA, 201 bp, Homo sapiens
ttctttttgtttgtttgttttgtttgtttgttttgagacggagtctcactctgtcgcccaggctggagtgcaatggtgtgatctcagctcactgcaacctycgcctcccgggttcaagtgattctcctgcctcagcctcctgagtagctgggattacaggtgtgcaccaccacactcagctaatttttgtatttttagtag

SEQ ID NO: 16595 - DNA, 201 bp, Homo sapiens
gttttgtttgtttgttttgagacggagtctcactctgtcgcccaggctggagtgcaatggtgtgatctcagctcactgcaacctccgcctcccgggttcawgtgattctcctgcctcagcctcctgagtagctgggattacaggtgtgcaccaccacactcagctaatttttgtatttttagtagagacagggtttcacca

SEQ ID NO: 16596 - DNA, 201 bp, Homo sapiens
aaaaacagcacagaggggtttctttctccttccagtaggcttcccagcaaatcaaggatgactgcctgtagcacgccgctcctcacctagtctcaaaatastccagaaagttctccctacaccttattctatccagcacctgaaatgctgccagctaggatcttaggggacacagatcctcttaaaaatgcaagcactgct

SEQ ID NO: 16597 - DNA, 201 bp, Homo sapiens
tatttttattatatctttctgtgtatgttactataaacacactttagactgggcttctgggcacttaggcagttgtgcttctcttggtgccttttccccatttttttttttttttttgatttgcatgtatgacagttttcatgtcttacggggaaggctattgggaatcccactttgtagaagataggtatgctcctttct

SEQ ID NO: 16598 - DNA, 201 bp, Homo sapiens
atcaaggatgactgcctgtagcacgccgctcctcacctagtctcaaaatagtccagaaagttctccctacaccttattctatccagcacctgaaatgctgycagctaggatcttaggggacacagatcctcttaaaaatgcaagcactgctgagattcccttcacccattagggtggcttaggcagtaacaaagagaaaat

SEQ ID NO: 16599 - DNA, 201 bp, Homo sapiens
tttctgtccctcttatgagagatctccttaacccatttatgcctgaggttgcaactttttgaattttgaaatcagaccttggtgatgaccttgagcagtargatataaataactcccacatgcttagcgttccaataatggaacactaggcataaatgagttccgtgcagctgggatgctttaccaagacctgagccacaa

SEQ ID NO: 16600 - DNA, 201 bp, Homo sapiens
tttttattgtagtgaaaataaacaacataaaatttacaattttaaccactttaagtgtaaagtgcagtggcattaattagattcatgactgtttccagaaygttttcatgacccaagcagaagctctgtacccagtaagcagtaactctccatttccctctcctttcagtcccaggccacccccttctactctttgtctct

SEQ ID NO: 16601 - DNA, 201 bp, Homo sapiens
ggctgaagcgggtggatcaccttggggtcaggagtttgagaccagcctggccaacatggcgaaactctgtctccactaaaaatacaaaaattagccaggcrgggtggtgggcacctataatcccagctactcaggaggctgaggcaggataatcacttgaacccatggggcggaggttgcagtgagctgagaccacaccac

SEQ ID NO: 16602 - DNA, 201 bp, Homo sapiens
ttttttgtatatttagtagagatggggtttcaccgtgttagccaggatagtctcaatctcctgaccttgtgatacacccacctcggcctcccagagtgctrggattacgggcgtgagccaccgcgcccggcccctacacgcccactttttaagctcacagatctgttctcatcttgatgtgactctgtaatattcttccag

SEQ ID NO: 16603 - DNA, 201 bp, Homo sapiens
agagtgcctcaggaaagtgcatgccttctgtgaatctactatccctcttttgttttttgttgttgttgttgtcattgttgtgtttgtttgtttgttttgaraaggagtctcactctgtcgcccagattggagtacagtggaacgatctcggctcactgcaacctccatctcctgggttcaagtgatcctcctacctcagcc

SEQ ID NO: 16604 - DNA, 201 bp, Homo sapiens
agttggaagtgtgaggtcagcctgggcaatgtatcgagacccctgtctccaaaacaataaagggaaaaaaaaaagaaacaaaatgggcatttaggctgggygcagtagctcacacctgtaatcccagcactttgggaggccaaggtgagcggatcacctgaggtcaggagtttgagaccagcctgaccaacatggagaaac

SEQ ID NO: 16605 - DNA, 201 bp, Homo sapiens
cagctacctgggaggctgaggcaggagtagagtaagacaaagggtgaggaagtcagatgacattaaggcaattgtaagaaaagcaagtctgcataatattyggagtcactagcctacctcatcacatggctggaaataactttagatattatatttaaaatagaataattaatataagcagactgttgacagtctgcaggt

SEQ ID NO: 16606 - DNA, 201 bp, Homo sapiens
ttggaggtcatgtctttccttttcacaacaggaagggctggcaccttctgctctttcggtcctgacaactgtctgctcagagcatcagccaaacaaggccytgtcatcccagccaggaaggatgcgcggtgcatgggagtggcaggacatttgtggaaggagtacagccgaccccccagtttcctccagtccttgtcccca

SEQ ID NO: 16607 - DNA, 201 bp, Homo sapiens
cgcagggaaaggacgtgatggcagtggggattccctcttgctttgagcccttctgaatgcaagcagaaaaagaaacccttttatattactttttaattgamtataataacagaaacaatgaaaagaatgtgaccttgactttgcaactctatttcccaggcatattcctaacaacacctaagaaagctaggatgtaggtag

SEQ ID NO: 16608 - DNA, 201 bp, Homo sapiens
tagttgaaaatgaggactgagatacttgtacactaaactccgtggcagcattattcaccatggccaaaaactagaaacagcccaaatgttcatcagcagargaacaaacaaacaaaatggggcatattcatacaatggaatatcactcatccttaaaaaggcatgaaactttctgacacctgctacgacacagatgaacct

SEQ ID NO: 16609 - DNA, 201 bp, Homo sapiens
aaagcgagaaataaaaaaaagaatcaccaacttccctgcaagcattcaacaaatgcccatagtataaaaccaacaagaggagtcaaaccgcctcttctgcwtccccaccagccacactccgacacccccactgcgccccatctttctgtccctgatgcttgtcaaattgttccatcgtcagccccaccagagctcatgcta

SEQ ID NO: 16610 - DNA, 201 bp, Homo sapiens
aaggaaggatgaagagacagagggcatttttagggcagtgaaacttctgtgtgatccactgtaatggtggatccatctcattatccatagaatgtacagcktcaggagtgaacccaggccaggcacagtggctcgtgcctgtaatcctagcactttgggaggctgaggcgggtggatcacctgaggtcaggagttcaagac

SEQ ID NO: 16611 - DNA, 201 bp, Homo sapiens
gagtgaacccaggccaggcacagtggctcgtgcctgtaatcctagcactttgggaggctgaggcgggtggatcacctgaggtcaggagttcaagactagcytggccaacgtggtgaaaccccgtctccactaaaatacaaaaattagccaggcatgatggtgggtgcctgtaatcccagctactcgggaggctgagacagg

SEQ ID NO: 16612 - DNA, 201 bp, Homo sapiens
cgtttctgttcctagagaacgggcagatgtatatccagaaaaagcctaccatgtacccaccctgggacagcacttttgatgcccatatcaacaagggaagrgtcatgcagatcattgtgaaaggcaaaaacgtggacctcatctctgaaaccaccgtggagctctactcgctggctgagaggtgcaggaagaacaacggga

SEQ ID NO: 16613 - DNA, 201 bp, Homo sapiens
gtcagtgtgtggttttgggtgagtccagcagtgtcctctgcagaaggggaagtgaaaacatttgttcacatggatagtggacctatgtgaggttctggctrtccatgataaagcactggttaagtagacatggggcaccaaaaataatatcttttatagcccccaaacagcgtttgtcttttgtctttttccagggcgcaa

SEQ ID NO: 16614 - DNA, 201 bp, Homo sapiens
ccaggcatgatggtgggtgcctgtaatcccagctactcgggaggctgagacaggagaatcgcttgaactcgggagatggtggttgcagtgagccgagatcrtgccactgcactccagcctgggcagctgagcaagactccatctcaaaaaaatagaagagtgaacctgaggttcacttatggactttgggtgataataaca

SEQ ID NO: 16615 - DNA, 201 bp, Homo sapiens; identical to SEQ ID NO: 3599

SEQ ID NO: 16616 - DNA, 201 bp, Homo sapiens
agccaggaggcacctcacagagactggaagcacagagggaggtgggccagctggggcccgaggatccagacttggtgagactcacagaccttggcccactrccctcctccctcctccctcctcacccacttttctcccttcttcacatcagtactggtggcagcaccctgagctgaaggagaaaagttcatattcaacatc

SEQ ID NO: 16617 - DNA, 201 bp, Homo sapiens
tctataatctctgtatttataacacatgccttaaaataccaattgcatatatttcttttcttttggtttttgaattatcatacagtaaaattgacttttgscttggtgtagttctgtgaatttaagtctagacttctgtgaccactagaacaatcaagccggagaacagttctgtctttccccaaaatttgctcatgctgc

SEQ ID NO: 16618 - DNA, 201 bp, Homo sapiens
gcaaagtttgtgcaataaagtatctttgtggtattggattttcgagagccaccgttatcaatgggagagtgactgttgaatgctacaggcgtgtgcactcycccgtgggcatgaagagaggtccacgggctggctggattgggagactccggtcatttctgcaaggagagcgccacaggactgccttgttccctgggctgt

SEQ ID NO: 16619 - DNA, 201 bp, Homo sapiens
cagaattgtgaatctgtttctgtttagtgttctcttccagaggattgcattattcactgaatgtctgttgtctgaaatagaagttcccacagtagtttgtrtacgcatcatttaggaagataagtggtttttcctgttatgtatacaaataaccagtctgtgttaatgtctattatgggtgacatgaacagatccttctcg

SEQ ID NO: 16620 - DNA, 201 bp, Homo sapiens
attgaaagaaatgtctgatattgggatcattttcctaacacaatttccattttcattttctgtaaagcccccacaagagttgacagagttcctgaggtggsgatgagtgagccgtgcctctttctacagtggatgtagtggatgtggcttacagatgccttttacatttccagctgtagacagaaaatgccagaggccaca

SEQ ID NO: 16621 - DNA, 201 bp, Homo sapiens
gaatgaatgagtgaatggatgcatagtcactaaatcagaaatcgtggatactgtaatcatagaacattaggtcataaataccaaggatcctgaggaagaaraagaaagaatatctatgatttggacagccatttttccaattgtggaacattgtttagcatttcaaataatgaaaataaacacatatagaaggcttactat

SEQ ID NO: 16622 - DNA, 201 bp, Homo sapiens
gatgatggatgcaggcttgcagtaactatggaagccatcacagttcacttacacaaaagtgtttacggagagaccactgcaagagtgctgggaccagagcrtagagggaaaaaaagtcaaacaagtaagctgaaggaactcaggaagactgccttccctttagagcatctattcttgcagaagaaagtggcaataaacaaa

SEQ ID NO: 16623 - DNA, 201 bp, Homo sapiens
gcagtatccctaaatctgggaaaggttgtaaaaaaaaaaaaaaaaaaaaaaaaaaaaaaaaaagatgctatcttaaagatgcatttttttctggcatgtaraagttggaaacagactaaatatgtagctacagactttagtaacgcagatcgtagagctactgtcaataggatgtcatgcaagaatgacaaggaagcctga

SEQ ID NO: 16624 - DNA, 201 bp, Homo sapiens
tggttttgaaacttgaagaggatatatcgctcagcccagtcaaagaggagcgaaggattgagccagcaatccaacattgttttcaccctctaacaatatgycctatgatgaatctgtgttgtagaatttgaggaaagatgcttagtgtggtacccaccataatgagtacctggaatgttacagcaggtactcagagctggt

SEQ ID NO: 16625 - DNA, 201 bp, Homo sapiens
ataacagaggcataattttatgttgagaagcaaatatttcttttagagtaaacgttgaggtataatcggaagacaaattacattttacctaatggaggggkgaaactgggctagcacatgggcagtgtatcattatgaattttaaatttttaaaaatttatatgtatttaggaggtacaagtgcagatttcttttttcaat

SEQ ID NO: 16626 - DNA, 201 bp, Homo sapiens
ctatgtatggcttcgatttatattaagtgctacaaagatagtgaacaaggtgcaaggtggagagtaagcatgtggcctactgagactctgtggtccgggartctccccaacggagggaacattgaaactgacagctgaagagtgacagagctggttaggtgaagagcaggaggaaggaagctccttacaggctggaagacc

SEQ ID NO: 16627 - DNA, 201 bp, Homo sapiens
tgtaggcattgcctccatttagtgtctctgcaaacaccaactttgccatacgcagatcacggcctagataacaaaagtgaagatcatgaacttaatggctratttttcttctctttctttcttcccttaaactctgactaagaaatcaccatttgactgcagcaatttcgacaaagaattcttaaacgagaagccccggct

SEQ ID NO: 16628 - DNA, 201 bp, Homo sapiens
accctgctgagggagagtccaacgtgttccaggaactgaaatgggaccagtgtggtgacagctgcaagggctgcgcagactggaagcccacactggggaakgcaccaaggcctgggtcatgcggggtttctttggagcctggaaaaatgattgtattttgtgcaacttgtagtagaaagcccactttgggatgctgtagta

SEQ ID NO: 16629 - DNA, 201 bp, Homo sapiens
aaggggctggtgcaccaggaagcaccacgccctcctgatgcaaaagggtcatccctggagacctcagggctcctgctctgctccctttcagctcttcgtgmgagaacctgagaagaggctgggcgtgaggggagacatccgccagcaccctttgtttcgggagatcaactgggaggaacttgaacggaaggagattgaccc

SEQ ID NO: 16630 - DNA, 201 bp, Homo sapiens
aacctgtaagttgatattatgaagaaggtgaaccatgaaggagatgatggacagagaacagtggctgggaaatgagaccccaaggatggcaagtgctcccrtggccagggagagatggataaagctggagagacagataaacaaaacagtcaagtctgttggcaggaagcgaagagggcctgagctctggtggagactggt

SEQ ID NO: 16631 - DNA, 201 bp, Homo sapiens
ataaatgtctgtgatattatcttctcccaggatattttgatttcttgttcactcaaggggacatcatctttgggattcttttgttcctctacccctggagyagtattgtccgatagaaataaatagaatgagggctacatgtgtaattttacatttccaagtagcccacattaaataaaggaaaaagcaatgggtgaaatt

SEQ ID NO: 16632 - DNA, 201 bp, Homo sapiens
tcactcctcagcctcattcctgttaatttcctgtctgccttttggttgtgcagatcttgctgggtcagaaatacaaccactctgtggactggtggtccttyggggttctcctttatgaaatgctgattggtcagtcgcctttccacgggcaggatgaggaggagctcttccactccatccgcatggacaatcccttttacc

SEQ ID NO: 16633 - DNA, 201 bp, Homo sapiens
gtgaaaaacaggtcatgggccaggcaagatcaaggaggggcagcagagggcacttctgggcgagcagtacagtggcatcgcagaaggacaggtgggagggraagggataggctgcatcagctgcctttgaaaacgccatcgagcaatagtattgcagccatttataccataatatttcctacagaggacctcgtttagttt

SEQ ID NO: 16634 - DNA, 201 bp, Homo sapiens
taccaggaatccaactatccaagtgttttgttgttcctgcaataagtttgatttaaactctggaaaactgttttttaaaaaaattccatgtcgatcactarcatccctctcccactcccctctccctaccccgataagccttcacatttattttgagacagaaaagagaatggctgggctctgattctgactgccaagctt

SEQ ID NO: 16635 - DNA, 201 bp, Homo sapiens
tgcagttcagatctttaaaaatctgctagatttcatttcctgtctctctcacgctgtaaattgtagaaattgatgccactgtgtttgtgagccatgcaaasaattgaaaatcatttttttcctaaaatttggttaaaatccctagatgtccttgatgtggcattattaacagtgcttgtgtattttgcatatatggtcttt

SEQ ID NO: 16636 - DNA, 201 bp, Homo sapiens
ttttctataccattcctttaagtcatagaatcagatgagcttaggggctagaaggaagagggagcgatgggaaggcagtcgttggtcatgccctgggcctrgatcgcgggaatcagtcattcagaaagccccatatgttgggtgggtctcacagcttacagagaagccagctgaggtgtgcaggttaagaaacttgatcta

SEQ ID NO: 16637 - DNA, 201 bp, Homo sapiens
agatatctgtttgaggtcctgctttcaattctttggggtatgtacccagcagtagaattgtggggtcgtagggtaattctatgtttaattttttgaggaamtgccatattgttttccacagtggctggaccgttttacattcccaccagtggtagaaagggtcccaattattccacattctcagcaacgctgtcttttgtt

SEQ ID NO: 16638 - DNA, 201 bp, Homo sapiens
tgttgttcctgcaataagtttgatttaaactctggaaaactgttttttaaaaaaattccatgtcgatcactagcatccctctcccactcccctctccctaycccgataagccttcacatttattttgagacagaaaagagaatggctgggctctgattctgactgccaagcttatagatatcccagctctagagctgcgtg

SEQ ID NO: 16639 - DNA, 201 bp, Homo sapiens
caagtttcttaccttctctgtgcttcatttcctcgtctgtcaaaggaggatactaatagaagcgacttcaaaaggggtattctgaggattacgtgagataycacctatgtaatagatgatgcgtgtgacatatttgttaaccgcacctggcaggaactgctccctcctcttgccacctcagttcatgaataataggtgtga

SEQ ID NO: 16640 - DNA, 201 bp, Homo sapiens
ttgctacatgcagaaggcaagcatgccccgtcacgtacagttgctgaggctgcctgccttcttcaggcatgactgtagggcttgacaagtgacaatgatgrtttaaaatgcacacaatgccagtgttttcattatgatctctgttagttatgctaaggtatctgcaagaacatccaaagtcggggccccaggaatacacag

SEQ ID NO: 16641 - DNA, 201 bp, Homo sapiens
tgccccgtcacgtacagttgctgaggctgcctgccttcttcaggcatgactgtagggcttgacaagtgacaatgatggtttaaaatgcacacaatgccagygttttcattatgatctctgttagttatgctaaggtatctgcaagaacatccaaagtcggggccccaggaatacacagatttcaccttctgcctttctttc

SEQ ID NO: 16642 - DNA, 201 bp, Homo sapiens
tgtaacaagtgtttgttcatctaccctgcatgtactggaagagataaaagttggaaaatagatcaaaacgcacgtacactattatttttctcttcaaggcyggcagaaaaagcagccttggagtgggctcatcagtgagcaagcccctgagctgggaggtggaggttggatgcgtctgcattcccactcggtgttgggacc

SEQ ID NO: 16643 - DNA, 201 bp, Homo sapiens
acacctgactacatcgccccagaggtaggaatgcagtgacaggctgctcccacctcaccatgccctggccacatgccattgcttctttagcccctgaaaakcagaaggttttaaatatcttcattcaagatttgtacctgttttcttaagtatctcataaacgccaccatgcatgtgggtttctattattattttgtgggg

SEQ ID NO: 16644 - DNA, 201 bp, Homo sapiens
gtggatcacctgaggtcaggagttcgagatcagcctggccaacatggtgaaaccttgtctctactaaaaatacaaaaattagctgggcatggttgcgggcrcctataatcctggctactcgggaggctgaggtgggaggattgcctgagcccagaagtttgagactagcctaggcaacatagtgaaaccccatctctacaa

SEQ ID NO: 16645 - DNA, 201 bp, Homo sapiens
acaattacaagagcccgaccttctgtgaacactgtgggaccctgctgtggggactggcacggcaaggactcaagtgtgatggtgagtccagtgggggatgwgcatggcccgacgtggaccccctaggggatggagcaaggctttctggggaactggagggaggatgtagggggtaccacttccacacccagcccagacaag

SEQ ID NO: 16646 - DNA, 201 bp, Homo sapiens
gaatgagggaaaacttctaaggagacttgagccatgggaagaattaatgagggaaccagggaatgaatgaggaaagtggatggcaactggggcatccatcmccacctctgcagttcccagtagattctcagcatatgtgcaataaccaaatcaatgaataaatgcacttacctaagataaagagaagccagaccatggcaa

SEQ ID NO: 16647 - DNA, 201 bp, Homo sapiens
tggtcttgatggacgatgatgttgagtgcacgatggtagagaagagagttctttccttggcctgggagcatccgtttctgacgcacatgttttgtacattycagaccaaggtatggcttctgctccgacaaccctacctcccctctaacctgtctcagcatgataccttcaatggcgccctcattaggagacacgagtcat

SEQ ID NO: 16648 - DNA, 201 bp, Homo sapiens
ggaaggcggcacagcatcttccgcattctccccttcttcatcccaatcctgttcacatgtctggtggaacccagagcgacctctcagtggaggcaggaggrgttaggttttcaaatcattacctaaagcagacatcacaggaggccaacattagcctcaagaatccgttcctggccccaaaggacactgacacgcttttct

SEQ ID NO: 16649 - DNA, 201 bp, Homo sapiens
tagcgaaaaattggaaacaacacaaatacccaatgacagatttattgaataaattattatatggtcagagaaaataatactatataaccattttaaatgawgatgtaaatgcttaaacatcaatacagaatgttgtttatgaaatcataagtgagaatatatagtatttccttttaagcaagaacatttgcatgtataagc

SEQ ID NO: 16650 - DNA, 201 bp, Homo sapiens
agagaggaagttgagactgctaagaatttgccaatcagatacaccgggtgattgcacaaacatttcacccggaactttaaaagattctcctactttttttwaaaaaagcgaaaaaacttcactttacaatagcatgttgtttggtctttatatttttttggtagaacggagcctttgaagattttcaagtactcagataac

SEQ ID NO: 16651 - DNA, 201 bp, Homo sapiens
aggccttaaagaaagatgtggtcttgatggacgatgatgttgagtgcacgatggtagagaagagagttctttccttggcctgggagcatccgtttctgacrcacatgttttgtacattccagaccaaggtatggcttctgctccgacaaccctacctcccctctaacctgtctcagcatgataccttcaatggcgccctca

SEQ ID NO: 16652 - DNA, 201 bp, Homo sapiens
gcttagaacttcccaggggttcctgggcgttatttcatggctcttctgcctgcttcgtttcatttctttcctcgaatactctttcctttccgctccattcygttccccgctctctcctaccacctacatttcaagtgctcccctcccctttttcttttgtcccctctcctctccctcccctgccctggtttgttttccatt

SEQ ID NO: 16653 - DNA, 201 bp, Homo sapiens
gaataaattattatatggtcagagaaaataatactatataaccattttaaatgatgatgtaaatgcttaaacatcaatacagaatgttgtttatgaaatcrtaagtgagaatatatagtatttccttttaagcaagaacatttgcatgtataagcatgaaaaataatgaaaaactaacagttgttaattgggaggtaggat

SEQ ID NO: 16654 - DNA, 201 bp, Homo sapiens
taagcttctttgcacacacatgtgcaaatcagcagataagattaagactgcatgatgtcatagcacctggtgcctgcttctattacaacactctctactcrcagactctgtcagctggagtttggaaatctttatatctgatttttctgtattttaatggtgatgtttctttttttttttttttttgagacacagtctcgc

SEQ ID NO: 16655 - DNA, 201 bp, Homo sapiens
atgatgtcatagcacctggtgcctgcttctattacaacactctctactcgcagactctgtcagctggagtttggaaatctttatatctgatttttctgtaytttaatggtgatgtttctttttttttttttttttgagacacagtctcgctctgtctcccaggctggagtacagtggcacgatctcagctcactgcaacct

SEQ ID NO: 16656 - DNA, 201 bp, Homo sapiens
aggaaagaaacaaaggaagaagcttgaatcaccttttccaacaccccgagttgttgtttttgagatgtcttaattattcaaaccttgcttgtcaaagtaastgattaaataccacaagtgaatgcaaaaggcaacgattgatacgtgatatggataatgctttgttctgggaacatgttgggaatgacctttcttgggagg

SEQ ID NO: 16657 - DNA, 201 bp, Homo sapiens
cacttgttattaattagggtcatttggattaaattgttaaagtttttaaagttcctagatgagggatatatcacctatggaagggtgaaaatatgataaakccatttaggaagctacaaaatgtgaaaattcctgtggacttggattccgaagttcaagcccagctctgccgtttatcaacagggctctgaggcacccact

SEQ ID NO: 16658 - DNA, 201 bp, Homo sapiens
ctggtctcaaactcctgacctcaggtgatccacccacctcagcctcccaaagtgacgggattacaggcatgagccaccgtgcccagcccctctttgcttckaaaacatcaatcagctccatgtgatgactcctgctgttttatggtttgtataaatgtatggggtgcaggtgtcatttcgttacctatgtggattgcacag

SEQ ID NO: 16659 - DNA, 201 bp, Homo sapiens
ctgctataacaaaatctcacatactggctggcttaaacagcagaaattcatgttctcgcaggtctggaggatggaagttcaccatcaaggtgttgtctggsttgtttcttcccaggcccctctccatgctttgcaatggtcgccctctctccatgccttcatatcatcttcctcctgtgcatgtctgcatccaagtgttct

SEQ ID NO: 16660 - DNA, 201 bp, Homo sapiens
acccctgcccaggacagagagtaagagttacaggcagaggggctgggagctgtaaaaccaggggccctaatgggacggcaccgtctggggacatagatgtrcaggataattcatgaaatctgaacctgaatctgaatgaggctcaaatcaaaagaatcttcacaatgaattttctgtgtgctagatcaaaatgactttgta

SEQ ID NO: 16661 - DNA, 201 bp, Homo sapiens
tggagtgcagtggtggtgcgatctcggctcactgcaacctccacctcccaggttcaaatgattctcctgcctcagcctcccgcatagctggggttacaggygtccaccaccacacccggctaatttttgtatttttagtagagatggggtttcactatgttggctaggctggtctcaaactcctgacctcaggtgatccac

SEQ ID NO: 16662 - DNA, 201 bp, Homo sapiens
ctagtgttcctggattcacatcactgcccttgactcccacactcccaatatgcaccagttgaacattcttggtcaatatcactttgaaatttttcttttakgaaaaagaaaactgagtttcactttctattcatagaacacacaaagctctacttccggttatggcttcagggcatgagtgtgtgagttactttgaacaag

SEQ ID NO: 16663 - DNA, 201 bp, Homo sapiens
tctccttcaagagagtgcctcaggaaagtgcatgccttctgtgaatctactatccctcttttgttttttgttgttgttgttgtcattgttgtgtttgtttstttgttttgagaaggagtctcactctgtcgcccagattggagtacagtggaacgatctcggctcactgcaacctccatctcctgggttcaagtgatcctc

SEQ ID NO: 16664 - DNA, 201 bp, Homo sapiens
tttctaaaaataatgatttttaaaagagtagagcaaagttgtgggtttgccagccttaaccattccctgtgattgcctggatagacatgggccatatccgygctgaagggggccaggctcatggacttcccaacagattccaccccagagaacgcacaggctattagtcatgatagcgaatggccagaagaagcaggtgca

SEQ ID NO: 16665 - DNA, 201 bp, Homo sapiens
gtaggagcatgtgccgtggacacgttcccgccatggccgctcagcaaggatgtccatgcacttctgctgcttcacctgtggcagccctatgggaaatgccsggatgtatttctgagcaccggccttgcccttggctttcatatccatgcccacaccccctatctttgagatatttatttaatgcatttgtattatgcagat

SEQ ID NO: 16666 - DNA, 201 bp, Homo sapiens
gggccaggcaagatcaaggaggggcagcagagggcacttctgggcgagcagtacagtggcatcgcagaaggacaggtgggaggggaagggataggctgcakcagctgcctttgaaaacgccatcgagcaatagtattgcagccatttataccataatatttcctacagaggacctcgtttagtttccgagattgagcctct

SEQ ID NO: 16667 - DNA, 201 bp, Homo sapiens
ccacgggctggctggattgggagactccggtcatttctgcaaggagagcgccacaggactgccttgttccctgggctgtcctgcccctgtgcgggctggaygtggtgctataaaagatgattcaggagtggcacaggctgagggggactaggctggagaaggtggagggaagagggagcactccgtgccctcttcctgtcc

SEQ ID NO: 16668 - DNA, 201 bp, Homo sapiens
gagaaaatggtgtttacttatttatttttttttattttgagacacagtctcactctgacgcccaggctggagtgcagtggcatgatctcagttcaccacarcctccgcctcccaggttcaagcaattccccacctcagcctcccgagtagctgggactacaggcacccaccaccatgcccggctaatttttgtattttttt

SEQ ID NO: 16669 - DNA, 201 bp, Homo sapiens
ctgaaccccacctccagagttgagtcccacctcctacctcacttcccttccagcacgaggatcactaccagggagagccagggtcaacttcctcccagccrtggcactttaggctttcctccctatccgcaaggctctgtcttacctccagagagagttgtttagcaccagggggttcttccactcttgctcactatctgc

SEQ ID NO: 16670 - DNA, 201 bp, Homo sapiens
tcaccacaacctccgcctcccaggttcaagcaattccccacctcagcctcccgagtagctgggactacaggcacccaccaccatgcccggctaatttttgkattttttttttttttttttttttttttttagtcgagacggggtttcaccatgttggccaggctggtctcgaactcctaacctcagatgatctgcctgcct

SEQ ID NO: 16671 - DNA, 201 bp, Homo sapiens
catgaaaaataatgaaaaactaacagttgttaattgggaggtaggattataactgattttatttttattatatctttctgtgtatgttactataaacacaytttagactgggcttctgggcacttaggcagttgtgcttctcttggtgccttttccccatttttttttttttttttgatttgcatgtatgacagttttcat

SEQ ID NO: 16672 - DNA, 201 bp, Homo sapiens
gcctcaagtgatcctcctatctcagcctcccaaagtgctgggattacaggcatgagccctcatgctaacctatttgttgcttttaaagcattaatcatggrataagaaaaaggaataagttattcttctgctgtataacactctgtaaatgaagaggtcattcctaaaccatatcctggttttgttgttgttgttgtttgt

SEQ ID NO: 16673 - DNA, 201 bp, Homo sapiens
tcaaactcaaagtttgaggatggcccacctggaaacaccccaaaagaatgaagtcagagttgtaaaggagggaactttagggtttccatagggagagacasaggcatttttagcaggattacattttttcatacaaggctggtgcatagttccaggaacttggttacaggcagtgtttctttttgggaaagggacatttaa

SEQ ID NO: 16674 - DNA, 201 bp, Homo sapiens
agatggggtttcaccatgttggccaggctggtctcaaactcctgacctcaagtgatccacccacctcggcctcccaaagtgctgggatcacaggcatgagycaccatgcccagcctactctccctcctttgaaaccttgctgacaaactacctactctataaatcacgctcagatacactaaatcctacttgtcattcaga

SEQ ID NO: 16675 - DNA, 201 bp, Homo sapiens
ttggtctgtgaccctcccctcaaacagtcaccttctccctaaagttgccaccggctttaggaatcacctgctgttcccttccctgtgcaaccacagcaccyctacatccacctgaccaatccattgagcttctccccatcagggaccatggcttatccactcacaggctggagcagcagccctcagctccttcctgaataa

SEQ ID NO: 16676 - DNA, 201 bp, Homo sapiens
gattttttttttttttgcgacagtctcactctgttgcccaggcggctcaatacaacctccacctcctgggttcaagtgattctcctgcctcagcctcccargtagctggggttacaggtgtgtgccaccatgcctggctaatttttgtatttttggtagagatgggatttcaccatattggccaggctggtcttgaactcc

SEQ ID NO: 16677 - DNA, 201 bp, Homo sapiens
ctcaggctcccaaaatgctgggattataggcatgagccaccgcgcttggcctctgccttgatccttgatggcaaaatcgttcttctccatctccttgtctytcccccttaaaacttctgtcacttcaggaacctcttctccaccaccagtcttagagaaatatctgataaatagcatagagcagtttaatatgtgttgttc

SEQ ID NO: 16678 - DNA, 201 bp, Homo sapiens
ttatatttgtatttaccttttatgatgggattttggattcagcttttaaaaggcttatccatccctcaaaatgtgctcctcaaaatccaaacctctggacygtgtagtttgtatgtgcatacatttgtgctaattttatcacagagcagaacagatatttgacagatttattgtggagcctgcagttctcttgggagggtt

SEQ ID NO: 16679 - DNA, 201 bp, Homo sapiens
gggttccgcccagcccctcacttagaatcctccctttggcctttctcaaaccacactccttcctgtgaagccaagaggtcgtctctgttcctaaactactycccaggacctcggaattccatacctaaacagcctcaagcctgtgtagacatctccctaggttctgtccttgaaaggggcaggaggagactttcccgatat

SEQ ID NO: 16680 - DNA, 201 bp, Homo sapiens
tttcatttctctgtgatttaaaactaactacttagtttcttaaggaaccatcccgattcatcaggcttctaactaacctgagcacagaagcaaatatgtamcctttggaaaggaagcagtgaaatggactgcagacctcaagggtggtccccagggatggagcttgtagctgaggcatcttatggaaagcctgatgtggag

SEQ ID NO: 16681 - DNA, 201 bp, Homo sapiens
ttttctggagagggagtctacaaatctgatcttatttgcatgatatttgccaagttctcagtgcatttacaaaattaactgttattagtctgataaaaatmatgagtttatttctttaatgctataaacctgtcattcatcctataatatatgcacatttgccagccatttccttgtttactcaatatttgattagctgtg

SEQ ID NO: 16682 - DNA, 201 bp, Homo sapiens
tgccctgtggttgggtgatatgtaatttgaatttagccttggcttctattccatgaggaatgatgtcttttagcttacatggcattgttgaactcacagarcgaggcttattgattaaataactttctgatcgtagaaatctatgtttcattcagtttggcacagatacaggttttgatgctataaaccattttcatttga

SEQ ID NO: 16683 - DNA, 201 bp, Homo sapiens
aattatacaactgattttgttaaatctatcactttgatcttgtatttaatcatcattttttttaagacagggtctcactctgttgcccaggctggctttgkactcctaggctcaagtgaacctccagcctcagcttcatgaatagctgagattacaggcatgcacctctgcacccaacttaaataccatttctttaaaaca

SEQ ID NO: 16684 - DNA, 201 bp, Homo sapiens
ttctgtggtgaccaggcaaggagtctcactgtcagaccagaacaatgtttctactattacctcctatgccccacggcctcggttgggttcacatcaaaacrtaaaggttaattctgttaagaaaccacccaggtgagactttcagatgcaaattcatgcccagacgcaccgaaggtcctcacactttatggattactgatt

SEQ ID NO: 16685 - DNA, 201 bp, Homo sapiens
tcaaaaaaaatattaaagaactgaaactcaccagatcatggcatccagagactgaagcgccaggcccctggttcatcatgattgcttacttacccctcccragttcctgttttctcatacaaagttacatttcttccctgctatataaatccctagttttagttggtcatggagatggacttcagactgagctctcatctc

SEQ ID NO: 16686 - DNA, 201 bp, Homo sapiens
cattttcaattattaaaaataaattcatcacgcctgtaatcccagtactttgggaggctgagatgggcagattgcctgagctcaggaattcaagaccagcmtgggcaacatggtaaaaccccatctctactaaaatacaaaaaattagctgggcgtggtggggcgcacctgtagtcccagctactccggagggtgaggcag

SEQ ID NO: 16687 - DNA, 201 bp, Homo sapiens
tgaacgaaagggggcctgcggggagggaagaaggtggaaagtttttgtattcttggtaaaaaaaaaaaaaaaaatgcgtgaggaaacatgttttctggagrtggtatcctgtccacaggggagcataaccccttttctgggaatgtattggagcacggacgggggtgccattgctcaggcttctaaacaagccaagtttct

SEQ ID NO: 16688 - DNA, 201 bp, Homo sapiens
ttcactctgaagctgcagatgctgtgttatagggtgttaaagtctctacagtttctatcaatgctgttgcattcatgttttattgcttctgccaaaatacragtatttcaaggatgaagttcatgttctcccaccagctcttgtctaaaatccatgctcaatgagtatttactgtatgcaggttattactgaagagaggac

SEQ ID NO: 16689 - DNA, 201 bp, Homo sapiens
atggcaatatattctaacatgtattgacttgtcactatcggccgtttgctgtgctaagcactatatgtagatgattgcttgggtgctttgagaacatgtaraagggaaccaagtcctgattcggaggttcaggaaaggctttcagaggacaaggtatcgcgggtgggaatggaagatgtatgggaattagccaaaaggaca

SEQ ID NO: 16690 - DNA, 201 bp, Homo sapiens
ttgaaccttggttctccttcccccaggttttatgctgctgaaatcattcttggtctgcagttccttcattccaaaggaatagtctacaggtaaattttgckttgtggaaacaaatgctaagatatcggctttcctggctcagttaatttaatcattgcaccgagtgctgtgagacagcccatgtgatttcctgggagtaag

SEQ ID NO: 16691 - DNA, 201 bp, Homo sapiens
cttgcagagtttggcatttcctttcccccagccttaaaacatattcactctgctcagacctaccagaaggaacagctagtgaagagccaggtggagcaagygtccacccaagtcaagtggtgaaactgtggggtcagaagacctggactgagtttctaagccaccactgatgtaagcacagagtgattgccaaagtctcac

SEQ ID NO: 16692 - DNA, 201 bp, Homo sapiens
gtaattttttttggtctatctacaaaatcatagattaagaatctgttttataattttttaatcttcaggaaattgagaaatactcaccagaatattatttwaaaactcttagcagaatttttttaaatttttctttatatgtgtaaggcctgcaatgtatctaaaatatttttgtacctaggcactgactaaattgtgtgg

SEQ ID NO: 16693 - DNA, 201 bp, Homo sapiens
gcaccctgtcactttcaataagtatacaatcggcacatgctaagtgccctaagtgcctggcaccatcccattgtctggccagcaggtcaactggactctcscttgtgccccccgctcatctgctgggttgtaacacgcaagcatctagatgccacagggcatcccacctagattccccaggcttcctggggctcaaaaaca

SEQ ID NO: 16694 - DNA, 201 bp, Homo sapiens
aggcggaggttgcagtgagctgagatcacaccattgcactccagcctgggcaacagagcaacagtccatctcaaaaaatttaaaaagttaaaaaaaaaaarggggaagtaggaataaaaattaggagggactggagagagagagagacagagatcttagactggaagggaccccgtgaaacctaaacccacatgcctcggg

SEQ ID NO: 16695 - DNA, 201 bp, Homo sapiens
taagatatcggctttcctggctcagttaatttaatcattgcaccgagtgctgtgagacagcccatgtgatttcctgggagtaagctccacacataggtctsctgcccacaatgattacatggatgatgacttacaaccaaggaagacattccagtctcaacagcaggaaagtgctgagctcattctgtcctttatgctggt

SEQ ID NO: 16696 - DNA, 201 bp, Homo sapiens
gctttcctggctcagttaatttaatcattgcaccgagtgctgtgagacagcccatgtgatttcctgggagtaagctccacacataggtctgctgcccacartgattacatggatgatgacttacaaccaaggaagacattccagtctcaacagcaggaaagtgctgagctcattctgtcctttatgctggttctcacttga

SEQ ID NO: 16697 - DNA, 201 bp, Homo sapiens
gagggttgccctatttggagtcacacaactaaaggcttagaggaggtttgagaagtaagtattcttaagcagcctctttgaatgtaattttttttggtctwtctacaaaatcatagattaagaatctgttttataattttttaatcttcaggaaattgagaaatactcaccagaatattatttaaaaactcttagcagaat

SEQ ID NO: 16698 - DNA, 201 bp, Homo sapiens
aagcagaaaaacacctgaaggttttagtttacaataaactcaatattgggcattactgtgatgaaactatgaaaaatatggtgcaggatcttagtccaccrtggcaaaaggcaagaggatggtaatggagctctgggtgccgctgtaacctgcaccaatcagattgtctctctggaggattctggcttcattctgagccaa

SEQ ID NO: 16699 - DNA, 201 bp, Homo sapiens
aggcaagaggatggtaatggagctctgggtgccgctgtaacctgcaccaatcagattgtctctctggaggattctggcttcattctgagccaagtcagtcragaagaaaacggacaaattcaagatatttggaaggtagaggccagaatgtttgcccttcatccagtttcccccagtggccacatctcatgcagctgtggt

SEQ ID NO: 16700 - DNA, 201 bp, Homo sapiens
ttgtttgataaagactctggcagacctctgatttcctgggtaaaattattcagcagcaagttcctgtcattgccaaaggagttgtggccatctgagtcctrgaactatgtagctttgccctgtggttgggtgatatgtaatttgaatttagccttggcttctattccatgaggaatgatgtcttttagcttacatggcatt

SEQ ID NO: 16701 - DNA, 201 bp, Homo sapiens
tcaatttctttcctcttcaccttgcaacaccttggtgtggctgccttactctgatgtattcctgtctacagattttgggtgccgggtcttttccacggcawaccttccttcccgatttccatctgcttcttgcagaatccggcttccacagcttgcttctctctgcagcttcactcccttcttttcttttacgtgtgcttg

SEQ ID NO: 16702 - DNA, 201 bp, Homo sapiens
ctgcccatgcatggaagttatgttctttaagccttcttaggcaccaacaagaaaaaaaaatgagtttattttttgtgctcattaggttgcaggagaccctwgaaagtcatcatcaaatagttataactgaggataggtcaccagacaagtatgctggctttaaaactggcctgctgcataataagaaataagttgccttat

SEQ ID NO: 16703 - DNA, 201 bp, Homo sapiens
aaaactaggaattatacaaatttcccctttctttcttacccttcaaatccacccaaacaccaacaccttctataattggaccctctcatgtccattcactsccctaaacttgtgactgaattcagactctcccttgattccttctccaagctcaaacaaatccccttgatccagctccgcccagatctccaggtcctctcg

SEQ ID NO: 16704 - DNA, 201 bp, Homo sapiens
tggcgtcactcaccatctgccagaggaaccacaaaatcgacggcatcttcaaagatgatgtaagccctggtttgggtcaaatgtaaaaccacagagccggraagtatgcagatgtggaaagaagaatctagaacttccaatcttagagtattagaactaagaagaaccttaagattatattttattgacaataaaactggg

SEQ ID NO: 16705 - DNA, 201 bp, Homo sapiens
ctcctgagtagctgggactataggcacgcgctgccacacccagctaacttttgtatttttagtagagatggggtttcaccatgttggccaagatggtctcratctcttgacctcatgatccacccaccttggcctcccaaagtgctgagattacaggcgtgagccaccgcacctgggcttttttaaaaatcttctttatag

SEQ ID NO: 16706 - DNA, 201 bp, Homo sapiens
ttccagcatgtggcatgaatgtgcatcatagatgccagacaaaggtggccaacctttgtggcataaaccagaagctaatggctgaagcgctggccatgatwgagagcactcaacaggtaggagcatgtgccgtggacacgttcccgccatggccgctcagcaaggatgtccatgcacttctgctgcttcacctgtggcagc

SEQ ID NO: 16707 - DNA, 201 bp, Homo sapiens
gggtcaaatgtaaaaccacagagccggaaagtatgcagatgtggaaagaagaatctagaacttccaatcttagagtattagaactaagaagaaccttaagwttatattttattgacaataaaactgggcccaacccatgtgtttgaagccactttcaatgctttcacgtgattctcattggacgttacaggaccccatgag

SEQ ID NO: 16708 - DNA, 201 bp, Homo sapiens
ccatgagggctggcattttgtccctacatgtgtccccagccactctaacagggcctgacacataccaagttgtgaacaaatatgtgcagaatgattgtgtwagtgtttcagtaggggacacacttggtattatgtgcacagctagatttggggtgtcgcagagctgtcagtgacggctcaactgagacctgaaggggaagt

SEQ ID NO: 16709 - DNA, 201 bp, Homo sapiens
gggttcttcttttctttctgtggcttgagaactcatttttcattgctcagtaatattccattgacaactaatgatttgttatgttcttttgttttccttawaatgacagactccatggatcaagaattttagagtagggaggggtggtagaggttatcaagtcagatcccctcattttgcagcaaaggaaatggagctcca

SEQ ID NO: 16710 - DNA, 201 bp, Homo sapiens
taatgcaacttaatgcttttcttccctgtgtgataaataataacaatgtatgtgataaagttaatacataaggagttcttgctatatgccaggcacagggytaaatactttatatgaattctttcatttaattttaaatatgaacgatagctcccctttcttcttcagagcagaattcccaactctttccatcggctgtcc

SEQ ID NO: 16711 - DNA, 201 bp, Homo sapiens
aagtatggtcttctggggcaataagccactatgttcctttccttgcaccctgcaacacccccacccacacatcccagaaaagagcacaacagttcaggttsaaggtcaaactcctagctccatcaccttctgccgtaccatagccctgggggaaatgaagacagtgtttctcctctcactggtctttctactactagtttc

SEQ ID NO: 16712 - DNA, 201 bp, Homo sapiens
catagaatactatgtagccataaaaaggaatgagatccctgtcctttgcagggacatggatagagctggaagccatcatcctcagcaaactaacacaggakcagaaaactggacaccttatgttctcacttataagtgggagctgaataatgagaacatgtggacacagggaggggaacaacacacactggggcctgtcgg

SEQ ID NO: 16713 - DNA, 201 bp, Homo sapiens
ggagtcgaaagacaatagctaagtaaataacacacaaataaggtaaagtcaggcacctcaaatacagtgacttgaccactacacattctgtgtacgtaacraaataccacatgtgccccataaatatgcaaaatatgatgtatcaataaaaacaaacacacacaaaactcaaagaacaataaaacaaagacggtgaagagg

SEQ ID NO: 16714 - DNA, 201 bp, Homo sapiens
cccaaagtgctgggattacaggtgtgagccaccccacctatcaagggaagatattttcttaaggggagtatgtaataacaaccatgtccctggtttgttargaaggttataaactttgaaatatacccatcagtttcataaagagcaagacaggttaggaagaaatagtgttcattatacagactagagagctttcagctt

SEQ ID NO: 16715 - DNA, 201 bp, Homo sapiens
taacatgtcagggctttttctgggcgtttaaaatacaggggagaagagaaggagaaaggtactgaccctcgtcaagcctatgcctacttttttttggagtmgaaagacaatagctaagtaaataacacacaaataaggtaaagtcaggcacctcaaatacagtgacttgaccactacacattctgtgtacgtaacaaaata

SEQ ID NO: 16716 - DNA, 201 bp, Homo sapiens
ccttgtaggagaaaagactggagagaggccactgaatctcgttgtgtcattcaccctacctagtcctgctctgccagggtcatgctcaccttccagacccmcccaacagtgaagtcggactgaaaaatcccagaagtgggaattgggagacaaggttgagtgcattagggggatgtctaggattccccctgattcgaatat

SEQ ID NO: 16717 - DNA, 201 bp, Homo sapiens
ttctccctcctcagtgccttagagaaatgttagcctctcttgtgtgattctaagtcgatgctgccctgcagggtctttatgagtgttccgctgctgtctcwcctacaaacgtgtctgtaagcaccttcagggaggggactctgtggcctggggaaggccgactaggtgaggcagagaattaaaacacaggaacacacaact

SEQ ID NO: 16718 - DNA, 201 bp, Homo sapiens
acttcccagcttctgaggctgaaggagaacagatgaggcttgctctggcgtcgttcggtgaaaccactgttcctctctcgctgctttcccgggtttccttrtgcattttgagctgtgcatctgattctttgggtcaaagcaaggactgaaaaagagcagaacacaagaagagatcacaatgaggcaaggtcccggggctga

SEQ ID NO: 16719 - DNA, 201 bp, Homo sapiens
gagggagcactccgtgccctcttcctgtccatgggaaatgaaccatctgtgcctggtgtccaagtccttgacgttccagttgccctttgagagcacacctyaagcctgctgaattcttttaagaaccacctacaagatctgagaagtccgcccatgctttctgtcaactccggcctctttgaccttttcttttgccaaaga

SEQ ID NO: 16720 - DNA, 201 bp, Homo sapiens
agctggccaggcgcagtggctcacgcctataatcccagcattttgagtctgaggcagaaggattgcttaatgtcaggagttcatgaccagccttggcaacrtagtgagaccttgtctctacaaaaaattttaaaaattagccaggcatggcgatggcacacatgtggtcaagagtctgaggtgggaggactgcttgctcaa

SEQ ID NO: 16721 - DNA, 201 bp, Homo sapiens
aagccagaagtagagcctgtgacgttttacatggccagaaaaactcttgtgctgctgttgatattgttcttctgtttgtttagcaagtctgccttagagaracttcacagcacccctgggcctcacttagcactgatctgtctcccaggagtgggccccggggtggtggagggtcagggatggggttgccgtgcacatcag

SEQ ID NO: 16722 - DNA, 201 bp, Homo sapiens
agtggctcacgcctataatcccagcattttgagtctgaggcagaaggattgcttaatgtcaggagttcatgaccagccttggcaacatagtgagaccttgyctctacaaaaaattttaaaaattagccaggcatggcgatggcacacatgtggtcaagagtctgaggtgggaggactgcttgctcaagaggttgaggctgc

SEQ ID NO: 16723 - DNA, 201 bp, Homo sapiens
aacttcttggagtgtcattctctccatttgcaaagtgaagaaaattgtgatctctgatagcagtgatgctgcgagaaaggagcatgtgccagtgtgtgggstattgctgggtggagctggaggagtcagctgtgccagatcacataggacctgtaagcaggtgaaccatatacgttatcctccagatggggactgtttata

SEQ ID NO: 16724 - DNA, 201 bp, Homo sapiens
ccaacaaaaaaataccttctgcgtgcgtgtgtgtgtgtgtgtatttatgtgtgtctgttcacagatgcacccagctaagcccaaacacattacaaggtagwacagatgttcatccccaagagagtctgactgtcttgcttttaagtttagtgcctcaatcctattattccttctccattttgttttggctaataaagcaac

SEQ ID NO: 16725 - DNA, 201 bp, Homo sapiens
gagtgtcattctctccatttgcaaagtgaagaaaattgtgatctctgatagcagtgatgctgcgagaaaggagcatgtgccagtgtgtgggctattgctgrgtggagctggaggagtcagctgtgccagatcacataggacctgtaagcaggtgaaccatatacgttatcctccagatggggactgtttatagagtgaaag

SEQ ID NO: 16726 - DNA, 201 bp, Homo sapiens
acataagcgcctctcgtgagcccctctcaggctgcaatgagacaaactccctcgcctcctatggaattttatgttaaccaaattatattgattaatgtgasatttgcttcacttttgtttttcagggacctgaagctagataacatcctgttagacaaagatggacatatcaagatcgcggattttggaatgtgcaaggag

SEQ ID NO: 16727 - DNA, 201 bp, Homo sapiens
taaagcaacttgcccgcaactcatccttggagcagcagtcatgaattaacgaagattttttttccctcttttccattaaaaaaaattttatgtgccactaytatgtcctagggttttgtttttaattgtgggaaaatacacgtaacatgaaatttaccatctgaactatttttgtgtacagttcagtaatgttaaaaatag

SEQ ID NO: 16728 - DNA, 201 bp, Homo sapiens
atcctccagatggggactgtttatagagtgaaagagcacgttattaatcactaagcttgggtaacaggtacaaacccagattgtcctgggcagactgtccygtagagttgtcctgcgttaagtcatatgaaggagtttgatccttttctaagaacaggaggaaccctttaaatgctttatctaccaatgtatacaagtgcc

SEQ ID NO: 16729 - DNA, 201 bp, Homo sapiens
agaaggttttcatcttgaaaaaccaaaactctgtccccattaaataccagctccctattccccctccccacagctcctggcagccactattccacttcctktctctagaatttaactattaggttggtgcagaagtagttacggtttttgtcactgaaagtaagggcaaaaacttctgttaatacttaaggtaccttatgt

SEQ ID NO: 16730 - DNA, 201 bp, Homo sapiens
gtgaaagagcacgttattaatcactaagcttgggtaacaggtacaaacccagattgtcctgggcagactgtcccgtagagttgtcctgcgttaagtcataygaaggagtttgatccttttctaagaacaggaggaaccctttaaatgctttatctaccaatgtatacaagtgccattcaggttctctccagcgtttcagag

SEQ ID NO: 16731 - DNA, 201 bp, Homo sapiens
gccatctcaatttctttcctcttcaccttgcaacaccttggtgtggctgccttactctgatgtattcctgtctacagattttgggtgccgggtcttttccmcggcaaaccttccttcccgatttccatctgcttcttgcagaatccggcttccacagcttgcttctctctgcagcttcactcccttcttttcttttacgtg

SEQ ID NO: 16732 - DNA, 201 bp, Homo sapiens
caaaactctgtccccattaaataccagctccctattccccctccccacagctcctggcagccactattccacttcctgtctctagaatttaactattaggytggtgcagaagtagttacggtttttgtcactgaaagtaagggcaaaaacttctgttaatacttaaggtaccttatgtaagtggaatcattcagtatttgt

SEQ ID NO: 16733 - DNA, 201 bp, Homo sapiens
tgaactcacagcactcggcttgcactgcaaactcacctatacgttggcagctgtctcctcactgggcacttaattcatgaacaactaggagggaaagacarcaagacagccaggggtctgctctttggctctttgcatttttttttacggggtcttgctctgtcgcccaggctggagtgcagtggcacgatctcagctcac

SEQ ID NO: 16734 - DNA, 201 bp, Homo sapiens
tggcttacttcacttagcataatgttatcaaggttcactcacgtagcatgtgacaggtttcccttcaccttgaaggctgaataatattcctctgtgtggakgtaccacattttcttcaacgccttccctatccctcctccctaccctctgcccagaccctggcgactgccactctcagcttctatgagttcaacgtgttta

SEQ ID NO: 16735 - DNA, 201 bp, Homo sapiens
cctcacttcccttccagcacgaggatcactaccagggagagccagggtcaacttcctcccagccgtggcactttaggctttcctccctatccgcaaggctstgtcttacctccagagagagttgtttagcaccagggggttcttccactcttgctcactatctgccttcttccttccagcatgtggcatgaatgtgcatca

SEQ ID NO: 16736 - DNA, 201 bp, Homo sapiens
acttataagtgggagctgaataatgagaacatgtggacacagggaggggaacaacacacactggggcctgtcgggaggtgggattggagggagggagagcrttaggaaaagtagctaatgcatgtggggcttaatacctaggtgatgggatgatgggtgcagcaaaccaccatggcacatgtttacccatgtaacaaacct

SEQ ID NO: 16737 - DNA, 201 bp, Homo sapiens
cacctcctacctcacttcccttccagcacgaggatcactaccagggagagccagggtcaacttcctcccagccgtggcactttaggctttcctccctatcygcaaggctctgtcttacctccagagagagttgtttagcaccagggggttcttccactcttgctcactatctgccttcttccttccagcatgtggcatgaa

SEQ ID NO: 16738 - DNA, 201 bp, Homo sapiens
cacacactggggcctgtcgggaggtgggattggagggagggagagcgttaggaaaagtagctaatgcatgtggggcttaatacctaggtgatgggatgatrggtgcagcaaaccaccatggcacatgtttacccatgtaacaaacctgcacgtcctgcacctgtatcccagaacttaaaataaaaataaaaattaaagaaa

SEQ ID NO: 16739 - DNA, 201 bp, Homo sapiens
tccagtgggggatgagcatggcccgacgtggaccccctaggggatggagcaaggctttctggggaactggagggaggatgtagggggtaccacttccacayccagcccagacaagtcatgatcataagtatggtcttctggggcaataagccactatgttcctttccttgcaccctgcaacacccccacccacacatccca

SEQ ID NO: 16740 - DNA, 201 bp, Homo sapiens
aaatataaaaaattagctgggtgtggtggcacgtacctgtaatcccagctgctcaggaggctgaggcagggcaattgcctgaacccgggaggcggaggttkcagtgagccgagatcgtgccactgcactccagcttggtgacagagtgagactctgactcaaaaaaaaaaaaattaagtgctaccttccctggccaggcca

SEQ ID NO: 16741 - DNA, 201 bp, Homo sapiens
ttggtgctgatgttgatgccaacattgaaataaatcagcgtgtgctttattacaggggcctgaacaaacagggctaccagtgccgacgtaagtaagagggktttggttgcattaccatcattctttttatttagttattccttaggctatgaaaatcttaagctgtgatttttttcttcttttcagaatgcaatgcagcaa

SEQ ID NO: 16742 - DNA, 201 bp, Homo sapiens
tggtttgttagtttgtttgtttttgaggcagggtcttgttctgttgctcaggttggagtgctgtgactcaatctcggctcactgcaacatctgcctcccargctcaagcaattattgtgtcagcctcgagagtagctaggactacaggcatgcaccaccacacctggttaatttttatgtttttagtagagacagggtttc

SEQ ID NO: 16743 - DNA, 201 bp, Homo sapiens
gtccatatctaaaggtgagttttaggggatctgactgagaagtgttccgggccagctccctagaaacccttgggtgcactgacttcttcctggccagtgtygtctgcttggtcatcagtgtgttcctcccctcctgagttctctccatctttctgttcttctgttttcttgcagtaatcgaggacaggtggtcgctggcac

SEQ ID NO: 16744 - DNA, 201 bp, Homo sapiens
taaaataaatgcaatttctttcaccaaaaaaaaggcgaacattgctaagcataaatgagcacttccttttagaaatgaataaagtaaaactcaaccattakcaacttcccatagctagagctcgcagaggaaaatgttaacacatagcatcatgtttgaattttattattttcatagagaagaaaaccagcaagcaaaccc

SEQ ID NO: 16745 - DNA, 201 bp, Homo sapiens
agacagaggttgcagtgagccgagattgccccattgcactccagcctgggtgacagagcaagagtctgtcttagaaaaaaaaaaaaaaaaagaagcccctyagttcctgtctgaggctcacctcccctggggccctggaatccatttctttcttgttcttgggaatctcaatctcttatcttccctgtcacctgcattttc

SEQ ID NO: 16746 - DNA, 201 bp, Homo sapiens
gcagctaggaggttgagattcccccaccccgtcttcctccatatgtggccccaaagtaggaagttcctgctgctttggtctttgggtgaaaaacaggtcaygggccaggcaagatcaaggaggggcagcagagggcacttctgggcgagcagtacagtggcatcgcagaaggacaggtgggaggggaagggataggctgca

SEQ ID NO: 16747 - DNA, 201 bp, Homo sapiens
gattcgaaggttctactcctttcctctccagccctcacatcgggttcctccaagtctgagcctctttaagctcctaggaggtcccagcatcccctcatctygtggacgtctgctcaatctctgagctacttcctgtacatcttcagctcccaagatgtctcttgtcctctggaaagctcttcctgatcctccacatcagga

SEQ ID NO: 16748 - DNA, 201 bp, Homo sapiens
attgccccttttgccctcaaaaaccaaacaaaactggagctgtgttctccctcctcagtgccttagagaaatgttagcctctcttgtgtgattctaagtcratgctgccctgcagggtctttatgagtgttccgctgctgtctctcctacaaacgtgtctgtaagcaccttcagggaggggactctgtggcctggggaagg

SEQ ID NO: 16749 - DNA, 201 bp, Homo sapiens
tcagtgccttagagaaatgttagcctctcttgtgtgattctaagtcgatgctgccctgcagggtctttatgagtgttccgctgctgtctctcctacaaacrtgtctgtaagcaccttcagggaggggactctgtggcctggggaaggccgactaggtgaggcagagaattaaaacacaggaacacacaactgctgggacag

SEQ ID NO: 16750 - DNA, 201 bp, Homo sapiens
gaggggactctgtggcctggggaaggccgactaggtgaggcagagaattaaaacacaggaacacacaactgctgggacagaggccatctggcaggcacccrtcgttcctgtgaggagaactcaaatctcagaagctcatgcatttcgtagcagagtcaggagctacacatgaaaaacacacctgtgctccctcaactgggg

SEQ ID NO: 16751 - DNA, 201 bp, Homo sapiens
ggaggaatccatatggcagagggcagagaagcgaatggaaggggaggaagcaaagatggttcaggaagctggttggcgaaggaagggaggtaaggccatarcagcgggagaagccacggcagaagttgttagaggttgcaaaaccggagggtgtttataagcgggagtgggagacaggcagaaatcacaagaatggcaagg

SEQ ID NO: 16752 - DNA, 201 bp, Homo sapiens
gggactctgtggcctggggaaggccgactaggtgaggcagagaattaaaacacaggaacacacaactgctgggacagaggccatctggcaggcacccatcrttcctgtgaggagaactcaaatctcagaagctcatgcatttcgtagcagagtcaggagctacacatgaaaaacacacctgtgctccctcaactggggatc

SEQ ID NO: 16753 - DNA, 201 bp, Homo sapiens
gcgtgccaccatgcccggctaatttatgtatttttagtagagacagggtttcaccatgttggccaggatggtctcgatctcttaacctcatgatccgcccrccttggcctcccaaagtgctgggattacaggcgtgagccactgcgcccagccggaaacatcatactttctatggcacactagacactcagtaaatccaga

SEQ ID NO: 16754 - DNA, 201 bp, Homo sapiens
aataattcttagagtaaaaagtttggttgggtgcagcgactcacacctgtgatcccagcactttgggaggccaaggcaggaggatcacttgaggtcaggartttgagactggcctgagcaacctagtgagaccctgtgtctacaaaaaataaaaaagaaactagctgggtgtggtggtgcatgcctgcagtgtaactagtt

SEQ ID NO: 16755 - DNA, 201 bp, Homo sapiens
gcagggcttgtggaaagggagaatggggagttattgtttaatgggtgcagaatttcagacttgcaagatgtaaaagttctggagatgaatgcccaacaatrtgaatatacagaacactgctgaactatacattgaaaatgattaagatggtgaatttcagccgggcgcggtggctcacgcctgtaatcccagcactttggg

SEQ ID NO: 16756 - DNA, 201 bp, Homo sapiens
gatatgtggttcagagacgtttctggttgctttgacgccgccttgtgggcaagtctcggaaattgcatgtgtccctggcccagcaaattgagcaaagattktattaggtgcatcttatatttccttatcattctccctgggtctaccttcagatgattccttaaggcaaagcctattttttctaaattataaagtaaactt

SEQ ID NO: 16757 - DNA, 201 bp, Homo sapiens
agatgctcagaaagaggaaataaaatgttacagatgtctttgttcgtctgtagtgagctcagcgaggccatgaatttttaaatctagcacagggaaacgtrctacgaagagtctgtgatgcatgcattttcattcatgcattttaatctctatatgtttggaaaatacaaggatgataaatcagccagttctcatttattt

SEQ ID NO: 16758 - DNA, 201 bp, Homo sapiens
tgtaaaagttctggagatgaatgcccaacaatgtgaatatacagaacactgctgaactatacattgaaaatgattaagatggtgaatttcagccgggcgcrgtggctcacgcctgtaatcccagcactttgggaggccgaggtggccagattaccagaggtcaggagtttgagaccagcctggccaacatggggagagcgc

SEQ ID NO: 16759 - DNA, 201 bp, Homo sapiens
aaattataaagtaaactttagcatgtaaatatcgaggtaagagtagtgggtagcatttttatattggaaatcagtaacattgcaaaattctgtttgcaacwttattttcagaaacggggacaagtgcatcatcaaagcagatatttatcataacatttatagttgtcccataagacaaatcatcttgactttgctactttt

SEQ ID NO: 16760 - DNA, 201 bp, Homo sapiens
ctgtcccatattgtctctgattgtttatgtgctacttttgtcttcccaacagaattctatatcccagagaacagagggagcaggtgctactgttgagttgractgaattattttccaggcctggctgaaggaataatgagaccttacgtttctgttcctagagaacgggcagatgtatatccagaaaaagcctaccatgta

SEQ ID NO: 16761 - DNA, 201 bp, Homo sapiens
tgtcccataagacaaatcatcttgactttgctacttttcactggatctcacaagaagcttataagaagcgggccagatatgattcccgtttttcacaaacragaagggtgaaagggtcctcccaaaactacacaataagggattaagccagaagtagagcctgtgacgttttacatggccagaaaaactcttgtgctgctg

SEQ ID NO: 16762 - DNA, 201 bp, Homo sapiens
aaggcaaaaacgtggacctcatctctgaaaccaccgtggagctctactcgctggctgagaggtgcaggaagaacaacgggaagacagaaatatgggtaacrttgcataaagtgtatgcacataagggataagcatgatggtagccgatgactggctcagaactcccatgtcaatctgagggtgtgattacactggcctcgg

SEQ ID NO: 16763 - DNA, 201 bp, Homo sapiens
ttccttggcactccttcctcacccccatggggggctggcttcacatggcagcctttcagaacctttcccatattgacctagatccctcagagctggccagkcgcagtggctcacgcctataatcccagcattttgagtctgaggcagaaggattgcttaatgtcaggagttcatgaccagccttggcaacatagtgagacc

SEQ ID NO: 16764 - DNA, 201 bp, Homo sapiens
gcataaagctttagggagcaggaagaggcacttagtccatctgagaacaaagcttctccttcctagtgccggcagcctgagacacctggagacggggcagsctgtgtgtacctggtgggactgcacctgcatccacagttctcaccaccactcctgcccatgctgttccctttgggtcccacttcctgctccccatgacat

SEQ ID NO: 16765 - DNA, 201 bp, Homo sapiens
atcaagctacgaacctgctccgtcgcttttaaacctagacacttacatgttcagggctgttgtcacatcattgacttcggcctttcccaaaagtcaataasagaaacaaatgacaaatgactgaattttagcaactgtgattcagagatcattttagagtctactttcccaggtctcatcttacctgactttcacaacagt

SEQ ID NO: 16766 - DNA, 201 bp, Homo sapiens
gttagttttccttctaacaaacaggaccctcagctgcaggtctgttggagtttgctagaggtccactccagaccctgtttgcctgggtatcagcagcggtrtctgcagaactatatttattaatactacaaaaatatctatgcttcatcaaaataatgagattaaatgactttttaaaaatcttggttttggccaggtgca

SEQ ID NO: 16767 - DNA, 201 bp, Homo sapiens; identical to SEQ ID NO: 3609

SEQ ID NO: 16768 - DNA, 201 bp, Homo sapiens
accaaattatattgattaatgtgagatttgcttcacttttgtttttcagggacctgaagctagataacatcctgttagacaaagatggacatatcaagatygcggattttggaatgtgcaaggagaacatgttaggagatgccaagacgaataccttctgtgggacacctgactacatcgccccagaggtaggaatgcagt

SEQ ID NO: 16769 - DNA, 201 bp, Homo sapiens
gcagtgcagtggcatgatcttggctcactgcaacctccacctcccaggttaaagcgattctcctgcctcagcctcctgagtagctgggatcacaggtgcaygaccacactcacctaaatttttgtatttttagtagaggtggagtttcaccatgttggccaagctggtcttgaactcctgacctcaagggatctgcccgcc

SEQ ID NO: 16770 - DNA, 201 bp, Homo sapiens
catgatcttggctcactgcaacctccacctcccaggttaaagcgattctcctgcctcagcctcctgagtagctgggatcacaggtgcacgaccacactcasctaaatttttgtatttttagtagaggtggagtttcaccatgttggccaagctggtcttgaactcctgacctcaagggatctgcccgcctcggcctcccaa

SEQ ID NO: 16771 - DNA, 201 bp, Homo sapiens
ctaggttctgcagaaatacttatccttgcagatgtgtttggctgaaacccttgagatacaggcattcagtccagtccctggcctatatactgtaccaacgstgattctgcaagactctctcactgttggtttcctgcccagcagattgtcctgggcagtgtactagtctgttctcatgctgctgtaaggacatacctaata

SEQ ID NO: 16772 - DNA, 201 bp, Homo sapiens
ttgagatacaggcattcagtccagtccctggcctatatactgtaccaacgctgattctgcaagactctctcactgttggtttcctgcccagcagattgtcytgggcagtgtactagtctgttctcatgctgctgtaaggacatacctaatactgggtaatttataaaggaaagaggtttaactgactcacagttctgcatg

SEQ ID NO: 16773 - DNA, 201 bp, Homo sapiens
agaggtggaggaggtggaagggaggcaggagaggcaggcacacttggtgtaaatttgattgaaaaaatctacatattagtggactggtgcagttcaaatcyaggttcatcaagggtcaattgcacttaaaatacctacagaccagctctccccaacctgccctacccactgtccaccagaaatattgttgacttcttcact

SEQ ID NO: 16774 - DNA, 201 bp, Homo sapiens
cacaggatccccagcccaggggtaaaggaacaagatgtttaaaaatttgagccacttccattcagctttcactttctgactatgatccaaacaagcaatarcttagaaaactccctcaacaatcaattaaaggcacttttaatgaccaaacacagataaaatgaaaactaatctcaaaattaaccaatttttttaaaaagg

SEQ ID NO: 16775 - DNA, 201 bp, Homo sapiens
tcctgtttgtttgtttcttggtttgtttgttggtttgttagtttgtttgtttttgaggcagggtcttgttctgttgctcaggttggagtgctgtgactcartctcggctcactgcaacatctgcctcccaggctcaagcaattattgtgtcagcctcgagagtagctaggactacaggcatgcaccaccacacctggttaa

SEQ ID NO: 16776 - DNA, 201 bp, Homo sapiens
tcttcccttctacttctattcttagaccctaagactctgggtctccaagattatgagttctcacaagtggttcctgcttcttagccttcaatttccttgayatctctctatcatacaatgctgaaaacttcatttcttttcagcttgcctgatgtgatattgtccaggttttcctcttaatttttcagctgcctcttcttg

SEQ ID NO: 16777 - DNA, 201 bp, Homo sapiens
cctgaactccaagttctcaccatggcctgtggacagccccatgggcacacccacctcgtctgtcttctctaccccttgctcaactccacgcagcccatccsccttcccagaacgtgcttggcagctccgacctcacacccatgtttcggccgggaacgttcacctgccattgtctgtgtgactcagtcctctcctcgtgca

SEQ ID NO: 16778 - DNA, 201 bp, Homo sapiens
ggttaaacaacagacatttctttctcacagttttagaggcagaaagtccaagattaaggtccagcagtgtcagttcctgatgaggactctcttcctggctkgtagacagctgccttcttgttgtgtccttacagcagagagagagagagataaactctggtctctctttcatgtgagacttctagccctattggatcaaga

SEQ ID NO: 16779 - DNA, 201 bp, Homo sapiens
tgggtgattacaacattttcaaggattcttccccagggcagctgcttgtgggagagctgaggtctagaaaggaggagttgagagcaggaaaggaaccaagsctgaccccacccccatgccagcattttgatttatggaaccctgggagaagagtttctccaaaatgatacttcatggcctccagcagatccccctcaaaga

SEQ ID NO: 16780 - DNA, 201 bp, Homo sapiens
tccatttttccttttgacatcttcgatgatcaagatacctgctaaggatttgttcagaaatcagaattagttgtaaggcagttgcctgaacaactgaaagygtaatgaccccacagagagcactaaggcaacagaaagtacggcgaggtgggattattaggttggtgcaaaagtaattgtggtttttgccaatacttttaa

SEQ ID NO: 16781 - DNA, 201 bp, Homo sapiens
cccaggctcaagcaattctccagcctcagtcttccatgaagctgggactacaggtgcatgccaccaatgcccagctgatttttgtattttttgtagagacrggttttgccatgttccccaggcaggtctcaaattctggagctcaaagcaatctgcccgcctcagcctcccaatgtgctgggattacaggcatgagccacc

SEQ ID NO: 16782 - DNA, 201 bp, Homo sapiens
catgttgatcaggctggtcttgaactcctgacctcaggtgatccgcctgtcttggcctcccaaaattctgggattacaggcatgagccaccatgcccagcytttttttaaatttccattacttttaatggcaaaaactgcaaattactttcacaccaaattaataggatatttgatgagttttaatataattatcgttttt

SEQ ID NO: 16783 - DNA, 201 bp, Homo sapiens
atttgtttgaaaatgatgggaaactaatgatatagaacataaatatctcttcctttcatagaaagacatatctgaggagggactgaagagggaaggcaggytccaggtacaatctgtcagcactactgctggctgtcctctgcagcctggagctgctttcttgcacagactgtccaataaacttaaacaaacttcaactac

SEQ ID NO: 16784 - DNA, 201 bp, Homo sapiens
gctcaagtgatcctcccacctcaacctcccaaagtgctgggattacaggcataagctactgcacctggcccatacttactattttaattcacttttgagaycatttttgttggtgaaagctaatatttaatctctttattatactacttagtagaagtcttagcaacaaagcaaaacgctacccaactatgtgattttttt

SEQ ID NO: 16785 - DNA, 201 bp, Homo sapiens
tgaaggaggcaaacgtgttcggctaatgcataaaatacagtagatagactctcccagaatatggggttccaaaagaacgttgaggataaggagatctttgktgaccctatgcatttaaacattttaaatggcctttgtccccatcgttagcaggctgagctgttccatcaatggtgggtgggtgggtggtctgactctctg

SEQ ID NO: 16786 - DNA, 201 bp, Homo sapiens
ggatatagggcaagtcacttattccttttgcttccttttttttttttttttttttaaggagtcttgctctgttgcccaggctggagtgcagtggtggtgcratctcggctcactgcaacctccacctcccaggttcaaatgattctcctgcctcagcctcccgcatagctggggttacaggcgtccaccaccacacccggc

SEQ ID NO: 16787 - DNA, 201 bp, Homo sapiens
tgtgattttttttttactagttatcatctttcttctgtgcacattgtgaaaaagtttttttttatgtttcttttaacagcagtcacttttacctaagaaayctttctatctcataaagaaatgcaaaagctattggtgtagcttaatttgccaaaatttttctgaattgatgtttaccaaatttggctgagcagatgtaat

SEQ ID NO: 16788 - DNA, 201 bp, Homo sapiens
tggaagagtatgaaagataaacctagggatttaaaaatatagagactattgtaggcagggggaaattcctaaaaatttctcttatgttttctctgacttcmaatcaacttaaaaatgtaaatgaaaggtttgggttacatttaggaggggttgccaggcagtcaaggagactatgtcttagcaatgatcaacataggcagc

SEQ ID NO: 16789 - DNA, 201 bp, Homo sapiens
gtgtagcttaatttgccaaaatttttctgaattgatgtttaccaaatttggctgagcagatgtaattggaaaccattgaatgctttgtttctcattcccaratttactattgattaatctgtgttctttcttccacatgtgagaggttttgatacaagtgatgactattgttattttaattctgtgagactctcccccaac

SEQ ID NO: 16790 - DNA, 201 bp, Homo sapiens
gctgaataatattgagctccatttggggtttggatttaaacactgatgccttgcctttcagcagaatcgactctgtccagcacatggtagctgatattcakgaattctttttgttcagttccacaataatatgaaccacagtaggctcatttggtgctaatctgagcataataggcaatgttacagccagtcttcattgta

SEQ ID NO: 16791 - DNA, 201 bp, Homo sapiens
gatttccacatttgaataaggttaataaggaagacattaagttaaacctacaagccttagtcggtatcccaaggtgcagctgggagccccaggtttccccyactccatgtccaaagctgtctacttcttttcatcaggaccctgggtccctatacacggagaggagaggagggggagatatcaaagcaagacaggatggct

SEQ ID NO: 16792 - DNA, 201 bp, Homo sapiens
tagtagagatggggtttcaccatgttggccaggctggtctcaaactcctgacctcaagtgatccacccacctcggcctcccaaagtgctgggatcacaggyatgagccaccatgcccagcctactctccctcctttgaaaccttgctgacaaactacctactctataaatcacgctcagatacactaaatcctacttgtca

SEQ ID NO: 16793 - DNA, 201 bp, Homo sapiens
cttggaaaaaagatacaatgtgctaattctccagtggagcgaagatgttgtgtggtacacagatgagagattatccatcaggatgagggggaaggaggccrcttgtcatcaaagtgctagatcctctgaagctcggcttcctcagctgacaactgggatgatgaatttgtttctcttagaatttgtttgaaaatcactgag

SEQ ID NO: 16794 - DNA, 201 bp, Homo sapiens
acactgagaatactccaaaacttgtcttttctctctcttctggctttatgtggaaagtatgtttcctcaccaagacctctatacccttgttctcaaacaamttttaagcctaagaaaacaaattgtgtgttctctggggatgtgagcatcattcatttgcctgaattcccatctaagtttcatcccttcccttctatcaag

SEQ ID NO: 16795 - DNA, 201 bp, Homo sapiens
tcttcccacccctctctgacctcctgtttcattattttccccttcatcccagagttcacatgatcttgtacccactgtagctatcaggtctctgccttgattttttttttttttgcgacagtctcactctgttgcccaggcggctcaatacaacctccacctcctgggttcaagtgattctcctgcctcagcctcccaagt

SEQ ID NO: 16796 - DNA, 201 bp, Homo sapiens
aagatggaaatgtcattagtgagggacagagacaggaaggcaggtggtgttttcggtgagcagaaatgtctggactggagagggtcctaatgggaaatggwaggtcctgtgagtcagcgtcagactccagagagccttgaatgccagccgaggacccgaggatgtcagaactctccaagccctagagatcaccttgtctag

SEQ ID NO: 16797 - DNA, 201 bp, Homo sapiens
gaaattgtttatcttcactggggatgagggaagtaaggcacccaaatgcactcgttctgaggagtttttgctgaatgtattgcagatgagaccagagagamttgtgtagttggagtcaaacccctcttctgagtgtatgtagcatctcaagaatcaagtaggcgacatcctggtggggctctataagtccccacattagag

SEQ ID NO: 16798 - DNA, 201 bp, Homo sapiens
ctcttaaagtattaggcaaagtattatgtcccatctgtggaactgttagagggttactggaaatgctttttgtctggaagttggggttgccataaaacaartctgcggacactacagaaaagacttcagtcctacaatgtgtcctgggatgtggctggattcctgggggaggtttctacccacacagctcctcctttgtct

SEQ ID NO: 16799 - DNA, 201 bp, Homo sapiens
cacctcagcctcccgagtagctgggactacaggcacccaccaccatgcccggctaatttttgtattttttttttttttttttttttttttttagtcgagayggggtttcaccatgttggccaggctggtctcgaactcctaacctcagatgatctgcctgccttgacctcccaaagtgctgggattataggcttgagccac

SEQ ID NO: 16800 - DNA, 201 bp, Homo sapiens
ggaaactgtgggaatatatgagcgtcagaatcaacgtactgcagaaattcaagtgctaaaccacagaaaagccctcttttacaaagtaggaggaagagcaggggggaaaggtgatagggaggatcccttggggtggtaagaagaggaacagaggagttaggagtatcggaggacaggagaggaaagaatttcaagagagaa

SEQ ID NO: 16801 - DNA, 201 bp, Homo sapiens
cggtgagcagaaatgtctggactggagagggtcctaatgggaaatggaaggtcctgtgagtcagcgtcagactccagagagccttgaatgccagccgaggrcccgaggatgtcagaactctccaagccctagagatcaccttgtctagcccttcctttacacacgaggaaactgagactcagaaaacttatccaaggcgac

SEQ ID NO: 16802 - DNA, 201 bp, Homo sapiens
agtcacaagagaggtggtgcagaatcggtggagcaggagatgaagcaagtgggtcgtgaggcacaaggggaagggtaaagttgaagcagcgggtgagggcygggcgtcgcggcacccagcaccgagctggcaaaatgaaggaagaggcaagtttgaaagggaaggcagggagttctgtatgggacctggtgagtttggggt

SEQ ID NO: 16803 - DNA, 201 bp, Homo sapiens
atgttggccaggctggtctcgaactcctaacctcagatgatctgcctgccttgacctcccaaagtgctgggattataggcttgagccaccgcacctggccrgtgtttattttttaagtacacaaggagaactatatccctccattcttcttttggcctggaaaaactgggtaaaacgtaaagctaggatttatgtgcactt

SEQ ID NO: 16804 - DNA, 201 bp, Homo sapiens
agaattagttcccctgaaatgatctaatccatttaaaaagtagtcctccttgttgtattttctctaaagagctaaaaattggaactgtgactgggtatggyggctcacgcctgtaatcccagcactttgggaggccaaggtgggcggatcacctgaggtcaagagttggagaccagcctggctaacatggcgaaaccccat

SEQ ID NO: 16805 - DNA, 201 bp, Homo sapiens
ggggttggagaaggaaccccttttcccacccaacacaggtgtctctcaggactctgtctcttttttaagaaatgggaatccaaattctaaaataaagttayttcttccctctccttctaggtcttcctggcagaattcaagaaaaccaatcaatttttcgcaataaaggccttaaagaaagatgtggtcttgatggacgat

SEQ ID NO: 16806 - DNA, 201 bp, Homo sapiens
accagctagttctattcagaatggtgcatacaggtctatgggtgccaaccagagtttaaaacaaagggagaaattatttgcctattatctatactattacttttttttttttttttgagtcagagtcttgctctgtcgtccatgctggagtgcagtggtgtgatctcagctcactgcaacctctgcctcccaggttcaagt

SEQ ID NO: 16807 - DNA, 201 bp, Homo sapiens
gtctatgggtgccaaccagagtttaaaacaaagggagaaattatttgcctattatctatactattacttttttttttttttttgagtcagagtcttgctcygtcgtccatgctggagtgcagtggtgtgatctcagctcactgcaacctctgcctcccaggttcaagtgattatcaagcctcagcttcctgagtagatggg

SEQ ID NO: 16808 - DNA, 201 bp, Homo sapiens
gctggagtgcagtggtgtgatctcagctcactgcaacctctgcctcccaggttcaagtgattatcaagcctcagcttcctgagtagatggggctacaggckcccaacaccatgccctgctaatttttgtatttttactagagatggtgtttcaccatgttgcccatgctggtcttgaactcctgacttcaagtgatccacc

SEQ ID NO: 16809 - DNA, 201 bp, Homo sapiens
catgctggtcttgaactcctgacttcaagtgatccacctgcttgggcctcccaaagtgctaggattacaggcgtgagccaccgtacctggcctatactatyacttttaatgtctgtgtatgttttattagcaatagcaaaaacaacaaaaaaaatgacaatgtgagcattattgtttaaaatataagaacaagtactagat

SEQ ID NO: 16810 - DNA, 201 bp, Homo sapiens
gccctattggatcaagaccttaccccatgacctcatttaacccgaattatctccataaagcccttacctacagttacattgtgggttagggcatcaacatrtgtattttgagaggacgccattcagtccaaagcatgaggctgcactgcaaagcctgggccagcaaaacccactggaaaaaagtgagcacaaggcttagtc

SEQ ID NO: 16811 - DNA, 201 bp, Homo sapiens
ggatggatggatgggtgtggatggttgaatggatggacaaatgatggatgaatgatgaatggatgaacagatggttgaatggatggatgaatggatggatgtggatggatggatggatggatggatggataaatgatggataaatgatggatgaatgatgagtagatgaacagatggttggatggatggatgaatggatgt

SEQ ID NO: 16812 - DNA, 201 bp, Homo sapiens
gatggatggatgggtgtggatggttgaatggatggacaaatgatggatgaatgatgaatggatgaacagatggttgaatggatggatgaatggatggatgtggatggatggatggatggatggatggataaatgatggataaatgatggatgaatgatgagtagatgaacagatggttggatggatggatgaatggatgta

SEQ ID NO: 16813 - DNA, 201 bp, Homo sapiens
agcaagtgggtcgtgaggcacaaggggaagggtaaagttgaagcagcgggtgagggccgggcgtcgcggcacccagcaccgagctggcaaaatgaaggaaraggcaagtttgaaagggaaggcagggagttctgtatgggacctggtgagtttggggtccccttggagatttccaggagagagtcgaatgcgtgactttat

SEQ ID NO: 16814 - DNA, 201 bp, Homo sapiens
tagcccttcctttacacacgaggaaactgagactcagaaaacttatccaaggcgacgtgggtagtcagtctctcggatagctgtcgtgttatttccaccgygcagtggctttctaattgggtactttggaaccccaagtttccctagagagtcctcagcagtccccatatggtaagggggagagaggaagttgagactgct

SEQ ID NO: 16815 - DNA, 201 bp, Homo sapiens
attcagatctgactttggcaaaagcctttacgcagagtcaacagcttaactggtccagggccaggtggggaaatcatgagaacattatgatgaacaggacwccggggttttagttagttgacatttctatctgagttggcagtagaatgtaacgtctgcaaaagtcagttcattcatggtctgcatttatggaccttcagt

SEQ ID NO: 16816 - DNA, 201 bp, Homo sapiens
tggctctttacatcaaaaggcaaatgataggacacaatgacatttagtgtgcagcacctgtaagctgctgaaactggcttggggtctgcatttgcttatcragaaagaatgcctggaagcctggttccctgtccaatcagagttgcaggggtctgggttgtaaatcagagttaggaagagtctcaaacttcgcctgattat

SEQ ID NO: 16817 - DNA, 201 bp, Homo sapiens
agtcctcagcagtccccatatggtaagggggagagaggaagttgagactgctaagaatttgccaatcagatacaccgggtgattgcacaaacatttcaccyggaactttaaaagattctcctacttttttttaaaaaagcgaaaaaacttcactttacaatagcatgttgtttggtctttatatttttttggtagaacgga

SEQ ID NO: 16818 - DNA, 201 bp, Homo sapiens
gtgtcctaagacacttagtgcctagtagctctagtaactgtttgttgaatgaatgaatgagtgaatggatgcatagtcactaaatcagaaatcgtggataytgtaatcatagaacattaggtcataaataccaaggatcctgaggaagaagaagaaagaatatctatgatttggacagccatttttccaattgtggaacat

SEQ ID NO: 16819 - DNA, 201 bp, Homo sapiens
ggctctttacatcaaaaggcaaatgataggacacaatgacatttagtgtgcagcacctgtaagctgctgaaactggcttggggtctgcatttgcttatcargaaagaatgcctggaagcctggttccctgtccaatcagagttgcaggggtctgggttgtaaatcagagttaggaagagtctcaaacttcgcctgattatt

SEQ ID NO: 16820 - DNA, 201 bp, Homo sapiens
aaccttagaatccatcttagctgatgaaggggcaactgtcttggtctctcagatcacacgtgaatggagagtgaagatgagaccgactgaaatttagagtkcacagaggacagatcacacagcttagtcctgaggcaggctattccagcacatatttttgtctacagaaactctcatttctggttaaacacccagggaaat

SEQ ID NO: 16821 - DNA, 201 bp, Homo sapiens
ttccaccatgttttctgttttaaagaaccttaggctccttaaaatgccctataactcatggttacttcataaataaacatctagctgatgtaagaataacyggtaactactccagacacccaggggacctgttacttttctaagttaatgtttagactctcctgtttcttaatgcccttgacaggttttatttaagtttga

SEQ ID NO: 16822 - DNA, 201 bp, Homo sapiens
atgttgttgcaagtagagattttctcctttttcagggctgatactcccctgtgtatatatagcacagtttctgtatccatttatccactgatggacacttrgagtccatatcttggctattgtgaatgaagctgcaatgagcaagcaagtgcagctgtctcctctacatactggttttatttccgttggtaatttacccac

SEQ ID NO: 16823 - DNA, 201 bp, Homo sapiens
aagtatctgtaaagtgctcatataacgacatttcctaagggtaattgttaggtgttctttggtttaagggagaaactaactaaatccgtgctttaaaaaakataggtctgtacatttccatttatgtcctcactggcaaaagtcattaagctacatcagcaaaggcagaatgacctggctcacctgcgagacgggccacca

SEQ ID NO: 16824 - DNA, 201 bp, Homo sapiens
attattgtttttattatatatttttcttttcttttcttttctttttttaagacagagtcttgctctgttgcctaggctggagtgcaatgacatgatcttgrctctctgcaacctctgcagggagccaagcgattcccctgcctcagcctccagagtcgctgggattacaggtgccccccaccatgcctggctaattgctgt

SEQ ID NO: 16825 - DNA, 201 bp, Homo sapiens
gcatctcattcccagggcaagaatagttgttctcaacatctgtcccaagctccagtgatgttccaaggacccaacaggccagcctcaagcactctaattayttgtgacagaaccacatctaatacatgggttagtcatttgtgataaaataaaaattttaccttgtttttagctatcagaactattaaaccatgtctcacc

SEQ ID NO: 16826 - DNA, 201 bp, Homo sapiens
tttccacaattagttggaactatgatttttgtatcctgtatagcttgtgcctttgcaatttattttcttgggtcataaacagtgcctttcttacaaatttrtatacccatattatgtaagaatggcgtttacttacttctgttacactaaccatagctatttccctgggtaggtctttactgttaagtttggttattttct

SEQ ID NO: 16827 - DNA, 201 bp, Homo sapiens
atggatggatgggtgtggatggttgaatggatggacaaatgatggatgaatgatgaatggatgaacagatggttgaatggatggatgaatggatggatgtggatggatggatggatggatggatggataaatgatggataaatgatggatgaatgatgagtagatgaacagatggttggatggatggatgaatggatgtac

SEQ ID NO: 16828 - DNA, 201 bp, Homo sapiens; identical to SEQ ID NO: 3604

SEQ ID NO: 16829 - DNA, 201 bp, Homo sapiens
ggatggatgggtgtggatggttgaatggatggacaaatgatggatgaatgatgaatggatgaacagatggttgaatggatggatgaatggatggatgtggatggatggatggatggatggatggataaatgatggataaatgatggatgaatgatgagtagatgaacagatggttggatggatggatgaatggatgtacct

SEQ ID NO: 16830 - DNA, 201 bp, Homo sapiens; identical to SEQ ID NO: 3606

SEQ ID NO: 16831 - DNA, 201 bp, Homo sapiens
agggtgacaccagaaaaggtcagggtgctttaactctggctttgtgagttagtgatccctctagactcaaacagaattaaggaaatcttcagaaagtcccracagggcaaaaactcccgtaactgaagatgattcttagtgatttttcctgatttgtggagaaatgaagttttgtctaaaagacccaattggcccaggaaa

SEQ ID NO: 16832 - DNA, 201 bp, Homo sapiens
tcacgcctataatcccagcattttgagtctgaggcagaaggattgcttaatgtcaggagttcatgaccagccttggcaacatagtgagaccttgtctctamaaaaaattttaaaaattagccaggcatggcgatggcacacatgtggtcaagagtctgaggtgggaggactgcttgctcaagaggttgaggctgcagtgaa

SEQ ID NO: 16833 - DNA, 201 bp, Homo sapiens; identical to SEQ ID NO: 3607

SEQ ID NO: 16834 - DNA, 201 bp, Homo sapiens
gcaaagggcgcctcctaaagacaaatttgtaagtcatctacctgctaattcagcaacgtgacagatacggaacccagcaaatcatgatgtttacccaaccrtctcctttagataaaacttccaaactctgcaggaaattaggacttcattaatatctgtgaaattaatgcctgtcaaaagctcctaatttgtctctcttgt

SEQ ID NO: 16835 - DNA, 201 bp, Homo sapiens
acccagcaaatcatgatgtttacccaaccgtctcctttagataaaacttccaaactctgcaggaaattaggacttcattaatatctgtgaaattaatgccygtcaaaagctcctaatttgtctctcttgtggagtcaaagaacactggtatttagcatactggagatcccttttgtcttagctagatgaggtattacaggc

SEQ ID NO: 16836 - DNA, 201 bp, Homo sapiens
catacatatatttaaagacgtggcgtagggagagcttctaaaacctgcaaagccaaagctgcacagctcctgcaagttagcgatccactctaagtttttcwgttgttgtttctgtcttcttgcctctcatgaacttctgtttctgatttcaagagtaacctgctgggcaccatcagcctttgtttcagtgacctgcgattt

SEQ ID NO: 16837 - DNA, 201 bp, Homo sapiens
gttgtgtggtacacagatgagagattatccatcaggatgagggggaaggaggccgcttgtcatcaaagtgctagatcctctgaagctcggcttcctcagcygacaactgggatgatgaatttgtttctcttagaatttgtttgaaaatcactgaggcatctagcacagtgcctgcctctcaaagaacattggttggagtgg

SEQ ID NO: 16838 - DNA, 201 bp, Homo sapiens
ctatcatttttggacatttgggttggttccaagtctttgctattgtgaatagtgccacaacaaacagatgtgtgcatgtgtctttatagcagcatgatttmtagtcctttgggtatatacccagtaatgggatggctgggtcaaatggtatttctagttctagatccctgaggaatcgccacactgacttccacaatggtt

SEQ ID NO: 16839 - DNA, 201 bp, Homo sapiens
aactgggatgatgaatttgtttctcttagaatttgtttgaaaatcactgaggcatctagcacagtgcctgcctctcaaagaacattggttggagtggatgwtgtatcagtcgtaagaatcatgagtgatgtgaatgatgtatgatagggtgatcaatcctgaatatgacttgaacagaagagagagagctccctgtcaggg

SEQ ID NO: 16840 - DNA, 201 bp, Homo sapiens
tcatttttggacatttgggttggttccaagtctttgctattgtgaatagtgccacaacaaacagatgtgtgcatgtgtctttatagcagcatgatttctartcctttgggtatatacccagtaatgggatggctgggtcaaatggtatttctagttctagatccctgaggaatcgccacactgacttccacaatggttgaa

SEQ ID NO: 16841 - DNA, 201 bp, Homo sapiens
agaaagtttcacaaggaaaagggggtgaaagctgagccctgaaagataaggcagaatttaaagatgaggggagggaagcaggagtcgactaggggagggtrtctcatggcaagatggaaatgtcattagtgagggacagagacaggaaggcaggtggtgttttcggtgagcagaaatgtctggactggagagggtcctaat

SEQ ID NO: 16842 - DNA, 201 bp, Homo sapiens
ttcctatttctccacatcctctccagcatctgttgtttcctgactttttaatgattgccattctaactggtgtgagatggtatctcattgtggttttgaawtgcatttctctgatggccagtgatgatgagcattttttcatgtgtcttttggctgcataaatgtcttcttttgagaagtgtctgttcatatccttcgccc

SEQ ID NO: 16843 - DNA, 201 bp, Homo sapiens
ccagcatctgttgtttcctgactttttaatgattgccattctaactggtgtgagatggtatctcattgtggttttgaattgcatttctctgatggccagtsatgatgagcattttttcatgtgtcttttggctgcataaatgtcttcttttgagaagtgtctgttcatatccttcgcccactttttgatggggttgttttt

SEQ ID NO: 16844 - DNA, 201 bp, Homo sapiens
ctggacgtggtgctataaaagatgattcaggagtggcacaggctgagggggactaggctggagaaggtggagggaagagggagcactccgtgccctcttcytgtccatgggaaatgaaccatctgtgcctggtgtccaagtccttgacgttccagttgccctttgagagcacacctcaagcctgctgaattcttttaagaa

SEQ ID NO: 16845 - DNA, 201 bp, Homo sapiens
catgctgtttgcagcagtcaattgagttgaattagaattccaaccatacattttaaaggtatttgtgctgtgtgtatattttgataaaatgttgtgacttmatggcaaacaggtggatgtgtaaaaatggaataaaaaaaaaaaaagagtcctcttaatcgtttacttccccgcttgccccccacaagaacttgcttctgc

SEQ ID NO: 16846 - DNA, 201 bp, Homo sapiens
tatctgtgaaattaatgcctgtcaaaagctcctaatttgtctctcttgtggagtcaaagaacactggtatttagcatactggagatcccttttgtcttagmtagatgaggtattacaggcccaagatctccaggtatgttactgattctccttccaggtctttattatttcaaatagttttctttctttatacaaaggcag

SEQ ID NO: 16847 - DNA, 201 bp, Homo sapiens
gggggaggaggaggagaatcctgctatgaactgtgtatgaagcaaggtcttccaggacatttgacatcatctggtggaaccaaatcctgccatttaggacrctgatgcccagcaaagccaaggacttcctcatggacacacatttcgtgatggactctaaaccaggacccgatggcccaccggtgctctattgcactgtat

SEQ ID NO: 16848 - DNA, 201 bp, Homo sapiens
gccctatgtggttaagcctggttactttaaataagtctaggtagattaagactgcataatcttccaaccaactctaaagactgcttactgctgctttggcraatcttcagtggatattacaaagcatctataattagccattagaatccaaatttcagaaaacgtacttttgcactcactaaggtcttggctgaatgaaag

SEQ ID NO: 16849 - DNA, 201 bp, Homo sapiens
agcaggtaatgaaggaacaaaaagcagtgtaaagaagagagggactgggggcagggatgtgtgttattttatatagggttgtcctgcaaaggcctgtgagygagggacatttgcagatacaagaagaaactgactcagactttgagaacctcctgccagatgctcagagttcagattctggggttcccaaacctactattt

SEQ ID NO: 16850 - DNA, 201 bp, Homo sapiens
cgttgcataaagtgtatgcacataagggataagcatgatggtagccgatgactggctcagaactcccatgtcaatctgagggtgtgattacactggcctcrggtcaccaggctccctaccacttcctactggtgatttgataatggcgatggttattctttatgggctgtagaacacattgacatcttcagatctctttga

SEQ ID NO: 16851 - DNA, 201 bp, Homo sapiens
tttcattattccatttggaagcaggccccttaccatagctcttccatctccatttttgcctccatctttactccttattcacaagccagagaacaatggtrcatacatgccatgtcaaaagcacttttcttttcattaatctgttgaaactcatatgaaaatttatagttgttgcagcaatgcaagcttattttatcataa

SEQ ID NO: 16852 - DNA, 201 bp, Homo sapiens
attatttctgagggctctgttctgttccattgatctatatctctgttttggtaccagtaccatgctgttttggttactgtagccttgtagtatagtttgargtcaggtagcgtgatgcttccagctttgttcttttggcttaggattgacttggtgatgcgggttcttttttggttccatatgaactttaaagtagttttt

SEQ ID NO: 16853 - DNA, 201 bp, Homo sapiens
cccatggacataatgaccaataatgaccttcaagtcattctttcttattctttttggtctgttaatggcatagtgggatggtttaatagattaacaacagygctcagcttgtcttgaacttggatttgtcctttcttctccttatgtcactttatgggagatcctacatcatcccttaaaatgacactttgttccgccctc

SEQ ID NO: 16854 - DNA, 201 bp, Homo sapiens
gtatagtttgaagtcaggtagcgtgatgcttccagctttgttcttttggcttaggattgacttggtgatgcgggttcttttttggttccatatgaactttraagtagttttttccaattctgtgaagaaagtcatcgatagcttgatggggatggcattgaatctataaattaccttgggcagtatggccattttcacgat

SEQ ID NO: 16855 - DNA, 201 bp, Homo sapiens
ttgtaaaatggcaggcttactgcggatgcttaatctcttttaaaagtgctgtgtctagcgggaagaagagtgacatttactaatatggttgcaaattactkttgaagtttatgcacagctgtttaaaatccctctgagatcagtgccattgtttgatgcaggtgcttaccgcagaaggctcttgttagtcccttcctcctg

SEQ ID NO: 16856 - DNA, 201 bp, Homo sapiens
attcttcctacccatgagcatggaatgttcttccattggtttgtatcctcttttatatcattgagcagtggtttgtagttctccttgaagaggtccttcaygtcccttgtaagttggattcctaggtattttattctctttgaagcaatcgtgaatgggagttcactcaagatttggctctctgtctgttattggtgtcta

SEQ ID NO: 16857 - DNA, 201 bp, Homo sapiens
gtgagacaccatctcaaaaaaaaaaaaagaataaatctttgtaatatttaaaactttttatatctagatccaaattgacactccatctctaaatttttatrtgtcaaaaaaatctaattttaaaaaccaaagttatggaataacctaactagaaaattccttgttgatgacaaggaggagagcattcttttaagaaagctc

SEQ ID NO: 16858 - DNA, 201 bp, Homo sapiens
gaattacacagtattggtctacaaaatttcacttatgttatggagaggtgataaaaatctgttctaagggtgtagctacaggaataaaataaaaggaacartctaaaagaaaatactgttgcagagagatttcatggtagagtagatgaaatatctacagaatgcctgttaagtgtacatagttgaaatgctttataattc

SEQ ID NO: 16859 - DNA, 201 bp, Homo sapiens
gagtggtgagagagggcatccctgtcttgtgccagttttcaaagggaatgcttccagtttttgcccattccgtatgatattggctgtgggtttgtcatagmtagctcttatgattttgagatacatcccatcaatacttaatttattgagagtttttagcatgaagggttgttgaattttgtcaaaggccttttctgcatc

SEQ ID NO: 16860 - DNA, 201 bp, Homo sapiens
tttagcatgaagggttgttgaattttgtcaaaggccttttctgcatctattgagtaatcatgtggtttttgtctttggctctgtttatatgctggattacrtttattgatttgcatatattgaaccagccttgcatcccagggatgaagcccatttgatcatggtggataagctttttaatgtgctgctggattcggtttg

SEQ ID NO: 16861 - DNA, 201 bp, Homo sapiens
ttggtaagctattgattattgccacaatttcagatcctgttattggtctattcagagattcaacttcttcctggtttagtcttgggagagtgtatatgtcraggaatttatccgtttcttctagattttctagtttatttgtgtagaggtgtttgtagtattctctgatggtagtttgtatttctgtgggatcagtggtga

SEQ ID NO: 16862 - DNA, 201 bp, Homo sapiens
atatgtcgaggaatttatccgtttcttctagattttctagtttatttgtgtagaggtgtttgtagtattctctgatggtagtttgtatttctgtgggatcrgtggtgatatcccctttatcattttttattgcgtctatttgattcttctctctttttttctttattagtcttgctagcggtctatcaattttgttgatcc

SEQ ID NO: 16863 - DNA, 201 bp, Homo sapiens
taatttctgttcttttacatttgctgaggagagctttacttccaactatgtggtcaattttggaataggtgtggtgctgaaaaaaatgtatattctgttgmtttggggtggagaattctgtagatgtctattaggtctgcttggtgcagagctgagttcaattcctgggtatccttgttaactttctgtctcattgatctg

SEQ ID NO: 16864 - DNA, 201 bp, Homo sapiens
tgttgacagtggggtgttaaaagtctcccattattattgtgtgggagtctaagtctctttataggtcactcaggacttgctttatgaatctgggtgctccygtattggatgcatatatatttaggatagttagctcttcttgttgaattgatccctttaccattatgtaatggccttgtctcttttgatctttgttggttt

SEQ ID NO: 16865 - DNA, 201 bp, Homo sapiens
tagatgattgcttgggtgctttgagaacatgtagaagggaaccaagtcctgattcggaggttcaggaaaggctttcagaggacaaggtatcgcgggtgggratggaagatgtatgggaattagccaaaaggacaggggttcagaggtgagccaagtctgtcctgaaagtaagcagaaatgttgttgttcttgtcgttttga

SEQ ID NO: 16866 - DNA, 201 bp, Homo sapiens
tattgtgtgggagtctaagtctctttataggtcactcaggacttgctttatgaatctgggtgctcctgtattggatgcatatatatttaggatagttagctcttcttgttgaattgatccctttaccattatgtaatggccttgtctcttttgatctttgttggtttaaagtctgttttatcagagactaggattgcaacc

SEQ ID NO: 16867 - DNA, 201 bp, Homo sapiens
tgggattggagggagggagagcgttaggaaaagtagctaatgcatgtggggcttaatacctaggtgatgggatgatgggtgcagcaaaccaccatggcacatgtttacccatgtaacaaacctgcacgtcctgcacctgtatcccagaacttaaaataaaaataaaaattaaagaaaattacatacctatggcatttagtt

SEQ ID NO: 16868 - DNA, 201 bp, Homo sapiens
gggattggagggagggagagcgttaggaaaagtagctaatgcatgtggggcttaatacctaggtgatgggatgatgggtgcagcaaaccaccatggcacatgtttacccatgtaacaaacctgcacgtcctgcacctgtatcccagaacttaaaataaaaataaaaattaaagaaaattacatacctatggcatttagttt

SEQ ID NO: 16869 - DNA, 201 bp, Homo sapiens
atcccagaacttaaaataaaaataaaaattaaagaaaattacatacctatggcatttagttttctataccattcctttaagtcatagaatcagatgagctyaggggctagaaggaagagggagcgatgggaaggcagtcgttggtcatgccctgggcctagatcgcgggaatcagtcattcagaaagccccatatgttggg

SEQ ID NO: 16870 - DNA, 201 bp, Homo sapiens
cttctaactaacctgagcacagaagcaaatatgtaccctttggaaaggaagcagtgaaatggactgcagacctcaagggtggtccccagggatggagcttrtagctgaggcatcttatggaaagcctgatgtggaggcataaagctttagggagcaggaagaggcacttagtccatctgagaacaaagcttctccttccta

SEQ ID NO: 16871 - DNA, 201 bp, Homo sapiens
agggactgtgttcccaaagtttgttagttaggtggctgtttagggaaggaccacacctggttcctgtttgtttgtttcttggtttgtttgttggtttgttwgtttgtttgtttttgaggcagggtcttgttctgttgctcaggttggagtgctgtgactcaatctcggctcactgcaacatctgcctcccaggctcaagca

SEQ ID NO: 16872 - DNA, 201 bp, Homo sapiens
tctcttgggagggttaaatgtggggcatccaacatactataaatctccattgctgttaattaataatcactagtaacgtagtcttcttctcaccctcatgktagtaaacactgactgtgccctgtgatctcttagactttaatggccaattcaacccccccaatgctcaccactagtgtggcgtctgattcagacctgaga

SEQ ID NO: 16873 - DNA, 201 bp, Homo sapiens
cacaacagtcctgtaagttagagaatgcagtagtaattggaaactgaagcccagaggggctaattcatctgcccacatttccacagctaataaatgtctgygaaataaaactagagctagaattttctgtatccaaatgccatgcccttaccattgccaacagtgtgttgctgcatcatttgcaaaaactaaaattgttga

SEQ ID NO: 16874 - DNA, 201 bp, Homo sapiens
tctgcccttattctcagacaataagtactagcctttagtccagtttctcttttaccctatttattagcccactttctggcattaactctacctagcctggytcccatgataagcctttgtcagcactctgctctcattagttcccctttgccatggatagtctgatctccaaaccttgcattctcccctctcattctcccc

SEQ ID NO: 16875 - DNA, 201 bp, Homo sapiens
ataaactttacctctgacatcctcaactcttccttctctctgcagtttcttccttattcccaagacatactgcattatgcatcttccccaatcttgaacaycatctcttcttttttttcacctttttacctccttgagtttttttttctttccctaacacattcctttaaaaagtagtttatatttatcagtttctttttc

SEQ ID NO: 16876 - DNA, 201 bp, Homo sapiens
tcacagctgctcaggaaacttgtaatttgattgactacaaacaagtgataggttagaccacataaatagattagaatccattagtataaaagaaaaaaaaytgcaaaaaccaatgagctcattcaaaccagtaaatagagaaataaatatagtcaatacaaaaaaaattaaagaattctatgtttttacatttattctttt

SEQ ID NO: 16877 - DNA, 201 bp, Homo sapiens
atgtagaaattgtgtatataactatatatttatagtttataaaaatataaactatatgtagacatatatgtatataaacatatatgtatagatatatgtayaaaatatgtttaatatacatataaacatatatgatttttacagtaaaaacctgtatagggtccccataataattcactttcattccctgcatttaaaagt

SEQ ID NO: 16878 - DNA, 201 bp, Homo sapiens
ataaaagaggtgcatgaggaagccaggtctagtcaggaaaaatgcccatgggattttagtttctgcctcaatgggggggctattgggggtaagtgggaagraacagaagtgaaaggtatctttattacaaacagttttccagttttatagtcaaaacttcccccacctaatggcccaaccctgctggtgctactttttcca

SEQ ID NO: 16879 - DNA, 201 bp, Homo sapiens
atgcattttcattcatgcattttaatctctatatgtttggaaaatacaaggatgataaatcagccagttctcatttatttaattatcaaactttttaaaamgcagcttcaaatgaaaaacactctgttaatactcttggcaaatgatacaacagggctgctgatcagaaactgctctgtgatcttagggggttatgagatc

SEQ ID NO: 16880 - DNA, 201 bp, Homo sapiens
attgtgtgggagtctaagtctctttataggtcactcaggacttgctttatgaatctgggtgctcctgtattggatgcatatatatttaggatagttagctcttcttgttgaattgatccctttaccattatgtaatggccttgtctcttttgatctttgttggtttaaagtctgttttatcagagactaggattgcaaccc

SEQ ID NO: 16881 - DNA, 201 bp, Homo sapiens
attgaaactgacagctgaagagtgacagagctggttaggtgaagagcaggaggaaggaagctccttacaggctggaagaccctgctgagggagagtccaaygtgttccaggaactgaaatgggaccagtgtggtgacagctgcaagggctgcgcagactggaagcccacactggggaaggcaccaaggcctgggtcatgcg

SEQ ID NO: 16882 - DNA, 201 bp, Homo sapiens
ttgtgtgggagtctaagtctctttataggtcactcaggacttgctttatgaatctgggtgctcctgtattggatgcatatatatttaggatagttagctcttcttgttgaattgatccctttaccattatgtaatggccttgtctcttttgatctttgttggtttaaagtctgttttatcagagactaggattgcaacccc

SEQ ID NO: 16883 - DNA, 201 bp, Homo sapiens
gcaggaagcgaagagggcctgagctctggtggagactggtccctggagcttccacagtttaaccggaagggagtagggcaagacagttgctgatggggatrggtgtggagctttggtgatgggcacacaaaggcgcttcccttagactgcatgtgtcccccatggagtttgatggctggaggaaggaaaagagaaagcaac

SEQ ID NO: 16884 - DNA, 201 bp, Homo sapiens
agcctgctcaggagtatgattttctccaacaaaggggcaggttcagagaaggcgaagtggctgggtttttccagagtagaatttctcctaacatttagaascagaaggagataaacttgtgctaaccggtgattctgctaagactcaaagaggttaaagtagtttgttcatgtttgatcacctgtacgtggcagagctggt

SEQ ID NO: 16885 - DNA, 201 bp, Homo sapiens
acatgagatgggtttcctgaatacagcacactgatgggtcttgactctttatccaatttgccagtctgtgtcttttaattggagcatttagtccatttacrtttaaagttaatattgttatgtgtgaatttgatcctgtcattatgatgttagctggttattttgctcgttagttgatgcagtttcttcctagtctcgatg

SEQ ID NO: 16886 - DNA, 201 bp, Homo sapiens
ctttgctatgcaccttcccaaaggaactgttgaattagaaacttctgcagagattataaacctttagaaaataaagcattttatcctgcacaagaatattsacattcttaccaggaatccaactatccaagtgttttgttgttcctgcaataagtttgatttaaactctggaaaactgttttttaaaaaaattccatgtcg

SEQ ID NO: 16887 - DNA, 201 bp, Homo sapiens
ttacgtttaaagttaatattgttatgtgtgaatttgatcctgtcattatgatgttagctggttattttgctcgttagttgatgcagtttcttcctagtctygatggtctttacattttggcatgattttgcagcagctggtaccagttgtgcctttccatgtttagtgcttccttcaggagctcttttagggcaggcctgg

SEQ ID NO: 16888 - DNA, 201 bp, Homo sapiens
agcttagtttggctggatatgaaattgtgggttgaaaattcttttctttaagaatgttgaatattggtccccactgtcttctggcttgtagagtttctgcygagagatcagctgttagtctgacgggcttccctttgtgggtaacccgacctttctctctggctgcccttaacattttttccttcatttcaactttggtga

SEQ ID NO: 16889 - DNA, 201 bp, Homo sapiens
ctcaaatacagtgacttgaccactacacattctgtgtacgtaacaaaataccacatgtgccccataaatatgcaaaatatgatgtatcaataaaaacaaamacacacaaaactcaaagaacaataaaacaaagacggtgaagaggtaaagagaatttctagaacctggcctgtttttagattattaaatgtttcctttttt

SEQ ID NO: 16890 - DNA, 201 bp, Homo sapiens
gtttggctggatatgaaattgtgggttgaaaattcttttctttaagaatgttgaatattggtccccactgtcttctggcttgtagagtttctgccgagagwtcagctgttagtctgacgggcttccctttgtgggtaacccgacctttctctctggctgcccttaacattttttccttcatttcaactttggtgaatctga

SEQ ID NO: 16891 - DNA, 201 bp, Homo sapiens; identical to SEQ ID NO: 3598

SEQ ID NO: 16892 - DNA, 201 bp, Homo sapiens
cgggagaatttcttgagcctgggaggtggagattgcagtgagccaagatcatgccattgcactccagcctagcctggcagacagagtgagactctgtctcaaaaaaaaaaaaaaaaaaagatgaattttatgttatgtgctttttaccatgataagaaaagctacataattgcagtttttgtcattacttttaatggcaaa

SEQ ID NO: 16893 - DNA, 201 bp, Homo sapiens
gcttccctttgtgggtaacccgacctttctctctggctgcccttaacattttttccttcatttcaactttggtgaatctgacaattatgtgtcttggagtygctcttctcgaggagtatctttgtggcgttctctgtatttcctgaatctgaatgttggcctgccttgctagattggggaagttctcctggataatatcct

SEQ ID NO: 16894 - DNA, 201 bp, Homo sapiens
tgtgtctttatagcagcatgatttatagtcctttgggtatatacccagtaatgggatggctgggtcaaatggtatttctagttctagatccctgagaaatygccacactgacttccacaatggttgaactagttgacagtcccaccaacagtgtaaaagtgttcctatttctccacatcctctccagcacctgttgtttcc

SEQ ID NO: 16895 - DNA, 201 bp, Homo sapiens
aaacttcccttctcacttcatttcattcatttcatcttccatcactgatactctttcttccagttgatcgcatcagctcctgaggcttctgcattcttcaygtagttctcgagccttggctttcagctccatcagctcctttaagcacttctctctattgcttattctagttatacattcgtctaaatttttttcaaagtt

SEQ ID NO: 16896 - DNA, 201 bp, Homo sapiens
tttagttgaattagatcccatttgtcaattttggcttttgttgccattgcttttggtgttttagacatgaagtccttgcccatgcctatgtcctgaatggyaatgcctaggttttcttctagggtttttatggttttaggtctaacgttgaagtctttaatccatcttgaattaatttttgtataaggtgtaaggaaggga

SEQ ID NO: 16897 - DNA, 201 bp, Homo sapiens
ttcttccagttgatcgcatcagctcctgaggcttctgcattcttcacgtagttctcgagccttggctttcagctccatcagctcctttaagcacttctctstattgcttattctagttatacattcgtctaaatttttttcaaagttttcaacttctttgcctttggtttgaatttcctcctgtagctcggagtagtttga

SEQ ID NO: 16898 - DNA, 201 bp, Homo sapiens
acttaatacttagtcatgtcattttcaattattaaaaataaattcatcacgcctgtaatcccagtactttgggaggctgagatgggcagattgcctgagckcaggaattcaagaccagcctgggcaacatggtaaaaccccatctctactaaaatacaaaaaattagctgggcgtggtggggcgcacctgtagtcccagct

SEQ ID NO: 16899 - DNA, 201 bp, Homo sapiens
agtatactgaaagatagcattttactccaaattttttcccactgacagatttttatctttgtaatgagtttatatatatatatatatatctatatatatakatagatatatgtttctatttaacttttaagtatattctgtaaatatctttgtttcaataagtaataagccactggttataaaatattccattatagttac

SEQ ID NO: 16900 - DNA, 201 bp, Homo sapiens
aacactgagccatctcccactaaattatagtaatacaaatgctgtccaaacattttattaaatgaagaagtttgctatttcttatttcatttgctactgargaagagaatgcttgatatttttttcaattgatgagagtatattatacttctattgctttctatttatatggaatttgtccccatcaggttcagttatgtg

SEQ ID NO: 16901 - DNA, 201 bp, Homo sapiens
gctgacacatggtcctgcacagaaattctgtaacattagcttgagcatccatccctaaaccattgctgtgaactccaagtgcccagtaagaggctggcccrgttgtgaccgtcattgcctgttttctggtctttcctccaaggccaggatcgcagcagagcctaacctgccattcattattgatggagtttctcagaccta

SEQ ID NO: 16902 - DNA, 201 bp, Homo sapiens
gagctggtcccagcagcgccgcggcacagcttagaacttcccaggggttcctgggcgttatttcatggctcttctgcctgcttcgtttcatttctttcctygaatactctttcctttccgctccattctgttccccgctctctcctaccacctacatttcaagtgctcccctcccctttttcttttgtcccctctcctctc

SEQ ID NO: 16903 - DNA, 201 bp, Homo sapiens
taaaactccatccctctatgttcaatcctagctgacaacctcacttggtgtcacggtgatgcataagaaaatggagctggggctaccgaagttgaaacctracaccttctaaatagggcgaatgtgagttatgcgagttttgccgacaatgtggaatttggagcacaatcatgaaaaaaaaaaatcctttctatagtaaag

SEQ ID NO: 16904 - DNA, 201 bp, Homo sapiens
cagtacagtggcatcgcagaaggacaggtgggaggggaagggataggctgcatcagctgcctttgaaaacgccatcgagcaatagtattgcagccatttayaccataatatttcctacagaggacctcgtttagtttccgagattgagcctctagtctcgctcttcacaccgctgaagatgtgcggtagaggatcttgctg

SEQ ID NO: 16905 - DNA, 201 bp, Homo sapiens
cagttgatcgcatcagctcctgaggcttctgcattcttcacgtagttctcgagccttggctttcagctccatcagctcctttaagcacttctctctattgsttattctagttatacattcgtctaaatttttttcaaagttttcaacttctttgcctttggtttgaatttcctcctgtagctcggagtagtttgatcatct

SEQ ID NO: 16906 - DNA, 201 bp, Homo sapiens
attctgtcccatattgtctctgattgtttatgtgctacttttgtcttcccaacagaattctatatcccagagaacagagggagcaggtgctactgttgagytgaactgaattattttccaggcctggctgaaggaataatgagaccttacgtttctgttcctagagaacgggcagatgtatatccagaaaaagcctaccat

SEQ ID NO: 16907 - DNA, 201 bp, Homo sapiens
tctagttatacattcgtctaaatttttttcaaagttttcaacttctttgcctttggtttgaatttcctcctgtagctcggagtagtttgatcatctgaagmcttcttctctcaactcgtcaaagtcattctccatccagctttgttccgttgctggtgaggaactgcgttcctttggaggaggagaggcactctgcttttt

SEQ ID NO: 16908 - DNA, 201 bp, Homo sapiens
ttttaaaaatcttggttttggccaggtgcagtggctcacacctgtaatcccagcactttggtaggctgaggcgggtggatcatgaggtcaggagatcaagmccatagtggctaacacggtgaaaccccgtctctactaaaatataaaaaattagctgggtgtggtggcacgtacctgtaatcccagctgctcaggaggctg

SEQ ID NO: 16909 - DNA, 201 bp, Homo sapiens
tttagtagagacagggtttcaccatgttggccaggatggtctcgatctcttaacctcatgatccgcccgccttggcctcccaaagtgctgggattacaggygtgagccactgcgcccagccggaaacatcatactttctatggcacactagacactcagtaaatccagatgggattgcaatgcatggaagcagctccctgg

SEQ ID NO: 16910 - DNA, 201 bp, Homo sapiens
tcaggagaagagtgactgatctcagctggcccttcttctgtacctgggaagatgagcttgaaatcaacattgtcagttgagttcctaaaacagaactcagttttagaagttaagcttaggttgcagtcctagggttgcaatcggcataggcttgttttgtaggggaatgtggatcctgaaggatttaggggccagaaagga

SEQ ID NO: 16911 - DNA, 201 bp, Homo sapiens
aagtaggagaatcgcttgaacttgggaggcggaggttgcagtgagctgagatcgcgccactgcactccagcctggccaacataagcgagactctgtctccaaaaaaaaaaaaaaaaaaaaaaaactgagcatagtgtgaccatgacagcttgaggtttaaaaccaagaggcacattatgctatggaaggaacatcacgtgg

SEQ ID NO: 16912 - DNA, 201 bp, Homo sapiens
acttcaataattttaaagtcattagttgttgggactctgaaaatgtaggaatcctgttatgcatgacagatttccacggtgggcaacagtcacctagcacrtgcctggtagttcagctgtaatgtgggctaaaagctgatggaaagcctaacccctttttaaacagtatttctatgactggctgaactccgtggtggatgg

SEQ ID NO: 16913 - DNA, 201 bp, Homo sapiens
agtaggagaatcgcttgaacttgggaggcggaggttgcagtgagctgagatcgcgccactgcactccagcctggccaacataagcgagactctgtctccaaaaaaaaaaaaaaaaaaaaaaaactgagcatagtgtgaccatgacagcttgaggtttaaaaccaagaggcacattatgctatggaaggaacatcacgtggt

SEQ ID NO: 16914 - DNA, 201 bp, Homo sapiens
acaaatgagatcacacttaaagctgaaaatagtgagcctctaagagtaaagatcctttgtaattttaaagtacataggggccgggcgcgatggctcactcytgtaatcccggcactttgggaggccaaggcggatggatcacctgaggtcaggagttcaagaccagcctagccagcatggtgaaacccagtctctactaaa

SEQ ID NO: 16915 - DNA, 201 bp, Homo sapiens
aatcgcttgaacccaggaggcaaaggttgcagtgagccaagatcgtgccattgcactccagcctgggcaacagggcgagactccgtctcaaaaaaataaataaataaataaataaataaataaataaataaataacataacataacatcacataacataacatagtacatatcatgatggtgttttgcagctggggtagca

SEQ ID NO: 16916 - DNA, 201 bp, Homo sapiens
cctaacagatagactcagaccccgctatcgagctgtaggtagctcttagagatctttcatttctagatttgagtgctttggggttttttttgtttttgagwtggagtttctctcttgttgcccaagctggagtgcattggcatgatcttggctcactgcaaccactgcctcccaggttcaagcgattctcctgcctcagct

SEQ ID NO: 16917 - DNA, 201 bp, Homo sapiens
cttttcttttcttttctttttttaagacagagtcttgctctgttgcctaggctggagtgcaatgacatgatcttggctctctgcaacctctgcagggagcmaagcgattcccctgcctcagcctccagagtcgctgggattacaggtgccccccaccatgcctggctaattgctgtatttttgtagagagggggtttcacc

SEQ ID NO: 16918 - DNA, 201 bp, Homo sapiens
agtttctctcttgttgcccaagctggagtgcattggcatgatcttggctcactgcaaccactgcctcccaggttcaagcgattctcctgcctcagcttccrgagtagctaggattacaagcacccaccaccacacctggttaatttttgtagttttagtagagatagggtttcaccacgttggccaggctggtctcaaact

SEQ ID NO: 16919 - DNA, 201 bp, Homo sapiens
tgtataagaccttaccaataggaataacacttgataaataatattgtaatactctggtgatccagtctgatgcagtatccctaaatctgggaaaggttgtaaaaaaaaaaaaaaaaaaaaaaaaaaaaaaaaaagatgctatcttaaagatgcatttttttctggcatgtagaagttggaaacagactaaatatgtagcta

SEQ ID NO: 16920 - DNA, 201 bp, Homo sapiens
taaaaatcttggttttggccaggtgcagtggctcacacctgtaatcccagcactttggtaggctgaggcgggtggatcatgaggtcaggagatcaagcccrtagtggctaacacggtgaaaccccgtctctactaaaatataaaaaattagctgggtgtggtggcacgtacctgtaatcccagctgctcaggaggctgagg

SEQ ID NO: 16921 - DNA, 201 bp, Homo sapiens
agccaagcgggaagggggaagccccttatgaaactatactctcactatcataagaacagcatggggggaaaccgcccccatgattcaatcacctcccatcragtccctcccgtgacacatggggattataggattataattcaagatgagattctgggtggggacacaaagccaaaccatatcagccagtacagttgacct

SEQ ID NO: 16922 - DNA, 201 bp, Homo sapiens
aaacgtctgagtttttcaaagccgcctttgacttaatgggtctcctggatccagttctctttaccatctcaggtctccctgacatttgcttcctgagggcttttttttttttttttttgcatttggccttgcctttgaacttggtctaatgagccatgtggatcgagagtccttgtcagaaaagaaggaaactggttttcc

SEQ ID NO: 16923 - DNA, 201 bp, Homo sapiens
aacgtctgagtttttcaaagccgcctttgacttaatgggtctcctggatccagttctctttaccatctcaggtctccctgacatttgcttcctgagggcttttttttttttttttttgcatttggccttgcctttgaacttggtctaatgagccatgtggatcgagagtccttgtcagaaaagaaggaaactggttttcct

SEQ ID NO: 16924 - DNA, 201 bp, Homo sapiens
acctaaataatagtatcaatgatgtttaattccttgaataagagaaatacattcctcccattagtttaaatcatgacccaatgtaaattgaaaaagggtcytgtctgggcatggtggctcatgcctgtaattccagtactttgggaggccgaggtgggcagatcacttgagctcaggagttccagaccaggctaggcaaca

SEQ ID NO: 16925 - DNA, 201 bp, Homo sapiens
gaattcactgaacatgaggaagtgatgagaagtggtgaggaatgggttggggagatattctcggcattgccatttatttagaacagggtttctcagcctcmgcactattggttttgggggggtgcttgggggactagcctgtcatcgtaggttgttgagctgtatctctgacctcaccctactagataccagaagcacacc

SEQ ID NO: 16926 - DNA, 201 bp, Homo sapiens
tgtttctagttttattattattaaactgtgctgcaatgaacagtcttgtaagtatattttcttacactttccttatcactttaaagtcatttaatacacayttccttctataaagcttgtagaggtctcttatccaaattgctatggcgagatctgcttcataattcatattttataaaggtaataaagttacatgctgta

SEQ ID NO: 16927 - DNA, 201 bp, Homo sapiens
tttgtcatccaggctcgctgcttaagagatactgaacagatcttcagagaaggtccggttgaaattggtctcccatgctccatcaaaaatgaagcaaggcygccatgtttaccgacaccgggaaaaagaggtagctgtcctgatcagcagtctaatcactgtcagtcattaatctcaattaaccctaacctaatgcccttg

SEQ ID NO: 16928 - DNA, 201 bp, Homo sapiens
cgagaccatcctgactaacacagtgaaaccctgtctctactaaaaatgcaaaaagttagccaggcgtggtggcaggcgcctgtagtcccagctactcaggrggctgaggcaggagaatggcgtgaacccggaaggtggagcttgcagtgagctgagatcacgccactacactccagtccgggcgacagagcgagactctgt

SEQ ID NO: 16929 - DNA, 201 bp, Homo sapiens
cccaggttagaagggcccccctctctgaagacccccactccctgggatgctacaatccaatgatggaagatggcattagctacaccaccctgcgctttccmgagatgaacataccacgaactgggtactgagggtaccaggagggtgaccctgcaccctgggagggaggcgggaggaaaagctctgtcccgcctgccctct

SEQ ID NO: 16930 - DNA, 201 bp, Homo sapiens
agtgattcaaagtggagaaaagcaggactgcgttgggtgcagtggttcccgcctgtaaccccagcactttgggaggctgagatcggaggatcgtttgagcycaggagtttgagaccagcctgggtaacatggcaagaccctgtctctacaaaatgtttaaaaaactagctaggtgtggtggcacatgcctgtagtcccagt

SEQ ID NO: 16931 - DNA, 201 bp, Homo sapiens; identical to SEQ ID NO: 3665

SEQ ID NO: 16932 - DNA, 201 bp, Homo sapiens
gacctgtgcgccacatcctatctcctgtgacgctgcaggagcttccctggttttaagaggtgacatggtggagagaaagcacaggactgggggccacaggycctggcttctcatccaggctccgctgctccctgactgctgcctttctctgtgggcctcgtttcctccctgatcccaccaggtgaattgtaattctccaca

SEQ ID NO: 16933 - DNA, 201 bp, Homo sapiens
tccggctaatttttacatttttgtagagatggggtcttactatgttgaccaggctggtttcaaactcctgacctcaagtgacccttctgcctcagcttccyaaagccctgggattagagccatgagccactgtgcctctccctgtttcctctcatgctcctctctggccctgtctgctccagtgacttcccgaaaagcctt

SEQ ID NO: 16934 - DNA, 201 bp, Homo sapiens; identical to SEQ ID NO: 3655

SEQ ID NO: 16935 - DNA, 201 bp, Homo sapiens; identical to SEQ ID NO: 3657

SEQ ID NO: 16936 - DNA, 201 bp, Homo sapiens
aagtgacccttctgcctcagcttcctaaagccctgggattagagccatgagccactgtgcctctccctgtttcctctcatgctcctctctggccctgtctsctccagtgacttcccgaaaagccttccagaccagctggccccttcttccccacctcactgtcccctttcccattcacaccccttgctccaggccatctgc

SEQ ID NO: 16937 - DNA, 201 bp, Homo sapiens
aaaaatcagccaggcgtggtggcacctgcctttacccagctacttggggggctgaggccagagaaacgcttgagcctgggaagcagaggttgcagtgagcrgagatcacaccactgcactctagcctgggagacagagcaagactctgtctcaaaaaaaaagaaagaactccgtgagcatcccaaatgccacatccccata

SEQ ID NO: 16938 - DNA, 201 bp, Homo sapiens
agaggagaaagtccacatcccaaagatcctcccctggcacgctgggacttattcctgtgtggcagaaaacattcttggtactggacagaggggcccgggarctgagctggatgtccagtgtgagtagccacggagcctctggttctagggagagaagatggacacagggaacggggaaggcagatggggtgcagggcattc

SEQ ID NO: 16939 - DNA, 201 bp, Homo sapiens
gtggctcctctcttcacctgactgttccccagacccccagaccccctgcccaggtggcccctgagaactgctaagctcaaccgtgacatggatggggcccrgctgacccttgggctctccctgggggacccccttttcctgtccctggccacaccctcaccttatccacacccttctcctccctgctgccccgccggcttt

SEQ ID NO: 16940 - DNA, 201 bp, Homo sapiens
tgtggctcctctcttcacctgactgttccccagacccccagaccccctgcccaggtggcccctgagaactgctaagctcaaccgtgacatggatggggccyagctgacccttgggctctccctgggggacccccttttcctgtccctggccacaccctcaccttatccacacccttctcctccctgctgccccgccggctt

SEQ ID NO: 16941 - DNA, 201 bp, Homo sapiens; identical to SEQ ID NO: 3661

SEQ ID NO: 16942 - DNA, 201 bp, Homo sapiens; identical to SEQ ID NO: 3662

SEQ ID NO: 16943 - DNA, 201 bp, Homo sapiens
gggaggaaaagctctgtcccgcctgccctctttgtgccaggcccatgccaggcaccctgatacatgctctgcctcattcccactcggcaacaagcctctgrgtaagggccagtctccagaagtggacctgctccttcaagtcagcagcacacatgcccagtccgttcttatcacaaagatcaagagctcgtgatacacacc

SEQ ID NO: 16944 - DNA, 201 bp, Homo sapiens
gaaagtccacatcccaaagatcctcccctggcacgctgggacttattcctgtgtggcagaaaacattcttggtactggacagaggggcccgggagctgagytggatgtccagtgtgagtagccacggagcctctggttctagggagagaagatggacacagggaacggggaaggcagatggggtgcagggcattccggggt

SEQ ID NO: 16945 - DNA, 201 bp, Homo sapiens; identical to SEQ ID NO: 3649

SEQ ID NO: 16946 - DNA, 201 bp, Homo sapiens; identical to SEQ ID NO: 3651

SEQ ID NO: 16947 - DNA, 201 bp, Homo sapiens
cccctgcccgccatgcagatgcacccaggaggctgcgtgtgtccatgagcccgggggaccaagtgatggaggggaagagtgcaaccctgacctgtgagagygacgccaaccctcccgtctcccactacacctggtttgactggaataaccaaagcctcccctaccacagccagaagctgagattggagccggtgaaggtcc

SEQ ID NO: 16948 - DNA, 201 bp, Homo sapiens
catgaaagtaacacaagtttgtcaaagctgaaaagtccgtgaactaaactgataaaattcacttagaggtggtgggaataggccgggcacggtggctcacrcctgtaatcccagaactttgggaggccgaggcaggcggatcacaaggtcaggagatcgagaccatcctgactaacacagtgaaaccctgtctctactaaa

SEQ ID NO: 16949 - DNA, 201 bp, Homo sapiens
gtaatcccagcactttgggaggctgaggcaggtggatcacctgaggtcaggagttcgagaccagcgtagccaacatggtgaaaccctgtctctacaaaaartattttaaaaattagccgggcgtgatggtccatgcctgtaattccagctactcgggaggctgaggcaggagaatcgcttgaacctgggaggcagaggttg

SEQ ID NO: 16950 - DNA, 201 bp, Homo sapiens
ttctggatgtcatcaaggaggtctgtgtgacctaaggatcattgttctttgaaagagagacaagttcatttatcttgcaggcagctgccagggagtcaggwtgtaagttaaacaattatgagtgaattaatggttacctgctactgaaatgaccaaatgtaactaatcatgcatggaggaaggaaaggacaaagagaaaag

SEQ ID NO: 16951 - DNA, 201 bp, Homo sapiens
tgcaccctgggagggaggcgggaggaaaagctctgtcccgcctgccctctttgtgccaggcccatgccaggcaccctgatacatgctctgcctcattcccrctcggcaacaagcctctgggtaagggccagtctccagaagtggacctgctccttcaagtcagcagcacacatgcccagtccgttcttatcacaaagatca

SEQ ID NO: 16952 - DNA, 201 bp, Homo sapiens
tactcgggaggctgaggcaggagaatcgcttgaacctgggaggcagaggttgcagtgagccaagattgcgccattgcactccagcctgggtgacatactgwgactctgcctcaaaaaaaaaaaaaaaaaaaaaaaaagggtaggcatgaggcagactgtgaagctgagtggggaaacaaggtgaaggaaggggataaaatg

SEQ ID NO: 16953 - DNA, 201 bp, Homo sapiens; identical to SEQ ID NO: 3656

SEQ ID NO: 16954 - DNA, 201 bp, Homo sapiens
ggcacagagctcacaaaccgagcttcctgcagagctcaggcaggggacgccagcggatgacgatggcgatgcagcagcactagacagagctgcgggacctyggatgtcccatctgaccctcagttcctgcccctctgggacctggattccaaagttatcggatctcctgatctttccctctttctttctcaccatgtattt

SEQ ID NO: 16955 - DNA, 201 bp, Homo sapiens
caatcctcttccaacaaattacacgtggtaccacaatgggaaagaaatgcagggaaggacagaggagaaagtccacatcccaaagatcctcccctggcacrctgggacttattcctgtgtggcagaaaacattcttggtactggacagaggggcccgggagctgagctggatgtccagtgtgagtagccacggagcctctg

SEQ ID NO: 16956 - DNA, 201 bp, Homo sapiens; identical to SEQ ID NO: 3666

SEQ ID NO: 16957 - DNA, 201 bp, Homo sapiens
tctgccggcccggcccgcttcagcctctctctcctgctcttttttctgcccttggccatcacagccttctgctacgtgggctgcctccgggcactggcccrctccggcctgacgcacaggcggaagctgcgggccgcctgggtggccggcggggccctcctcacgctgctgctctgcgtaggaccctacaacgcctccaac

SEQ ID NO: 16958 - DNA, 201 bp, Homo sapiens
gcaggagaatcgcttgaacctgggaggcagaggttgcagtgagccaagattgcgccattgcactccagcctgggtgacatactgagactctgcctcaaaamaaaaaaaaaaaaaaaaaaaagggtaggcatgaggcagactgtgaagctgagtggggaaacaaggtgaaggaaggggataaaatgtcctctgaggagacct

SEQ ID NO: 16959 - DNA, 201 bp, Homo sapiens
ggctgtcagaggccagggaaggggacgagggttggggaacaggtggttagcacttcatcctcgtctccctcccaggttagaagggcccccctctctgaagrcccccactccctgggatgctacaatccaatgatggaagatggcattagctacaccaccctgcgctttcccgagatgaacataccacgaactgggtactga

SEQ ID NO: 16960 - DNA, 201 bp, Homo sapiens
ggcaacaagcctctgggtaagggccagtctccagaagtggacctgctccttcaagtcagcagcacacatgcccagtccgttcttatcacaaagatcaagasctcgtgatacacacccacgcctactccctccacgcacatttgcacgagctcctactgtgagctttgggcactggggaggccacaggttttacataagggg

SEQ ID NO: 16961 - DNA, 201 bp, Homo sapiens
acaagcctctgggtaagggccagtctccagaagtggacctgctccttcaagtcagcagcacacatgcccagtccgttcttatcacaaagatcaagagctcrtgatacacacccacgcctactccctccacgcacatttgcacgagctcctactgtgagctttgggcactggggaggccacaggttttacataaggggctga

SEQ ID NO: 16962 - DNA, 201 bp, Homo sapiens
ggccacagccagtttcctgacacgaggacacccgcctgggcttttggacccccgggtggaatgaaggagagaatgcggagaaaagcggcggtggaggctgrcgacagtggggccaggctaaccaccatgcggttttctcagggcgactatgagaacgtcattccagattttccagaagatgaggggattcattactcagag

SEQ ID NO: 16963 - DNA, 201 bp, Homo sapiens
gtgcctgtggtcccagctactggggaggctgaggagggagaatcacttgagcccaggaagtgaaggctgcagactgaactatgttcctgctactgcactcyagcctgggtgacagagcaagacctgggtctcaaaaagaaaaagaaaatgctgggactgggattataggtgtgagctgggcacagtggctcacacttgtaa

SEQ ID NO: 16964 - DNA, 201 bp, Homo sapiens
aacccggaaggtggagcttgcagtgagctgagatcacgccactacactccagtccgggcgacagagcgagactctgtctcaaaaaaaaaaaaaaaaaaaaaagaggtggtgaggtggtgggaatagaactttgcaatcattcagaaagcagacatccggcaatgagcatgaaagaaaagtagatcacagttcccaaggagg

SEQ ID NO: 16965 - DNA, 201 bp, Homo sapiens
gaggccgaggcaggcggatcacaaggtcaggagatcgagaccatcctgactaacacagtgaaaccctgtctctactaaaaatgcaaaaagttagccaggcrtggtggcaggcgcctgtagtcccagctactcaggaggctgaggcaggagaatggcgtgaacccggaaggtggagcttgcagtgagctgagatcacgccac

SEQ ID NO: 16966 - DNA, 201 bp, Homo sapiens
gtaggtgtgcaggaggtgacctcccgatcgtcaaagctgttgtgcccctcggctcatcaaatttctggatgtcatcaaggaggtctgtgtgacctaaggawcattgttctttgaaagagagacaagttcatttatcttgcaggcagctgccagggagtcaggatgtaagttaaacaattatgagtgaattaatggttacct

SEQ ID NO: 16967 - DNA, 201 bp, Homo sapiens
actttttaatttgttgtagaaatgggtcttgctatgttgccaggctggtcttgaactcctggcctcaagcaatcctcctgcttcaacctctcaaagcattrggattacaggcatgagtcaccgcacccggcctgatcttctgatttttcaagagacgatggaaatctagattttccagtgaaatctcccagcatgttaatg

SEQ ID NO: 16968 - DNA, 201 bp, Homo sapiens
tactacatatataacagctttgctgagatataattcacataccataaaacacacccatgtaaaatgtccaattgaatggttttgggtctattcactgaatkatgcaaccatcaccacaaccagttttagaacatttcatcaccccaaaataatctcacatccattagcagtcactcttcatttcctcttacctttcccacc

SEQ ID NO: 16969 - DNA, 201 bp, Homo sapiens
ccttccttccttccttccttccttccttccttccttccttccttcctttctctctttcttttcctcctcctcttcttcccctcctcctcctcttcctcctycttcttcttcttctgctttctccctctcctcctcctctttcttctccttctccttccttcttcttcttcttatagagacaaggtcttactctgtcaccca

SEQ ID NO: 16970 - DNA, 201 bp, Homo sapiens
ttacccggtatgaatggaaaccccatggcgcctgggaggagccatcgcttggggtgctgaagatccaaaacgttggctgggacaacacaaccatcgcctgygcagcttgtaatagttggtgctcgtgggcctcccctgtcgccctgaatgtccagtgtgagtccctgggctaggcagggggatctgggaggtggcccggct

SEQ ID NO: 16971 - DNA, 201 bp, Homo sapiens
ccatcccccaccacctcctctatcccttggcagaggcccgtgtccagttgctccatctcgaagcctccagcctgtggagtccctgaccctcacacatgtgyctttatttctcagttggaagaggacacagagccagcaggggcttcaggagaattccagcggccagagcttctttgtgaggaataaaaaggtaggatgggg

SEQ ID NO: 16972 - DNA, 201 bp, Homo sapiens
gctgcagagagaagtccaggatgccttccaggcaaaggctgccagggagagctggcccctcagttgattaaggtctctcctttctccacccagatagcccrgagaccatcggcaggcgagtggctgtgggactcgggtcctgcctcgccatcctcatcctggcaatctgtgggctcaagctccagcgacggtgagctcctg

SEQ ID NO: 16973 - DNA, 201 bp, Homo sapiens
tctcagagatgcagagtcctcagagatgcagagacctcccccggactgcgatgacacggtcacttattcagcattgcacaagcgccaagtggtaaggaggrtctccccaggtctccccagaggggctgtggaaggctggggacagggcctggcctcagtggtgggtcccacataggaaggagttgggtaggcatccgtggt

SEQ ID NO: 16974 - DNA, 201 bp, Homo sapiens
gctgcagtgagcctgtgatcatgccgctgcactccagcctgggtgactgagtgagaccttgtctcaaaaaaaagaatggattggccaggcatggtggcttrcgcctgtaatcccagcactttgggaggccaaggtgggcagatcacctgaggtcaggagttcgagaccagcctggccaacatggcgaaaccctgtctctac

SEQ ID NO: 16975 - DNA, 201 bp, Homo sapiens
ccgtctggcttcagcgctgtgccctgaacccctgcaccaaaccacagccaggccagagagccagggcagggtttctgttctcacacagatgcaggaaggaygcacaagcccccctttgattaatttaggacctgtgcagatgcccgggacaggtagcgggagaagaggaagcaggagggaaggggtactgtggacagctgg

SEQ ID NO: 16976 - DNA, 201 bp, Homo sapiens
attccggggtcctggagtcaagagcaaggagcagccagggtctcctgttcacaactgctgtctcagctcctagcatagggcctggctcatggagggtgctyggtagatgcttgtttttttgtgttttagttttttttgagatggagtctccctctgtctcccaggctggagtgcagtggcacaatctcggctcactgcaag

SEQ ID NO: 16977 - DNA, 201 bp, Homo sapiens
cctcccaaagtgctgaaattacaagcgtgagccaccatgcccggcctcaggaccccatttgacagacgtgtaaactgagacctgcagcccatgcccgtgcrcctctcagcagccgtctggcttcagcgctgtgccctgaacccctgcaccaaaccacagccaggccagagagccagggcagggtttctgttctcacacaga

SEQ ID NO: 16978 - DNA, 201 bp, Homo sapiens
atctttctctcccctctgcacgtcctcacctgcctgtcttccgtgggccgcgagcagaggccttgtacttacgggaaggaggaggcagtctgtttctgacycacaggaactgccactccggtgatgcacttgaggacagctactctgaaatcagttcccaggagagaacatttgatttccgagtaggagaggaggcaggag

SEQ ID NO: 16979 - DNA, 201 bp, Homo sapiens; identical to SEQ ID NO: 3667

SEQ ID NO: 16980 - DNA, 201 bp, Homo sapiens
tgtgtcacctgggtctggtctttgggttggaggctccaggaggctggctggaccacagcaacacctccctgggcatcaacacaccggtcaacggctctccsgtctgcctggaggcctgggacccggcctctgccggcccggcccgcttcagcctctctctcctgctcttttttctgcccttggccatcacagccttctgct

SEQ ID NO: 16981 - DNA, 201 bp, Homo sapiens
tcagaaagcagacatccggcaatgagcatgaaagaaaagtagatcacagttcccaaggaggcttagtgtggtcaaggcctttcagaggggatttcgggtgwgcaaaagtgattcaaagtggagaaaagcaggactgcgttgggtgcagtggttcccgcctgtaaccccagcactttgggaggctgagatcggaggatcgtt

SEQ ID NO: 16982 - DNA, 201 bp, Homo sapiens
agtagatcacagttcccaaggaggcttagtgtggtcaaggcctttcagaggggatttcgggtgagcaaaagtgattcaaagtggagaaaagcaggactgcrttgggtgcagtggttcccgcctgtaaccccagcactttgggaggctgagatcggaggatcgtttgagcccaggagtttgagaccagcctgggtaacatgg

SEQ ID NO: 16983 - DNA, 201 bp, Homo sapiens
ttcagaaagcagacatccggcaatgagcatgaaagaaaagtagatcacagttcccaaggaggcttagtgtggtcaaggcctttcagaggggatttcgggtgagcaaaagtgattcaaagtggagaaaagcaggactgcgttgggtgcagtggttcccgcctgtaaccccagcactttgggaggctgagatcggaggatcgt

SEQ ID NO: 16984 - DNA, 201 bp, Homo sapiens
ctgatacatgctctgcctcattcccactcggcaacaagcctctgggtaagggccagtctccagaagtggacctgctccttcaagtcagcagcacacatgcscagtccgttcttatcacaaagatcaagagctcgtgatacacacccacgcctactccctccacgcacatttgcacgagctcctactgtgagctttgggcac

SEQ ID NO: 16985 - DNA, 201 bp, Homo sapiens
cgggtcacaggctctgggcgtgccacgtctgtgggaaaagcagctcctcaggagaattagtgccttattcctaaagggaggcccagagcaagcaggggccrttgtcaccctcttcctctgcacccctgcacgcatgcaggggagaaggacgagtctggctgcagagagaagtccaggatgccttccaggcaaaggctgcca

SEQ ID NO: 16986 - DNA, 201 bp, Homo sapiens; identical to SEQ ID NO: 3659

SEQ ID NO: 16987 - DNA, 201 bp, Homo sapiens
cagctcctcaggagaattagtgccttattcctaaagggaggcccagagcaagcaggggccattgtcaccctcttcctctgcacccctgcacgcatgcaggrgagaaggacgagtctggctgcagagagaagtccaggatgccttccaggcaaaggctgccagggagagctggcccctcagttgattaaggtctctcctttc

SEQ ID NO: 16988 - DNA, 201 bp, Homo sapiens
aagagagagaggctgcccccgcagggctctcagtttgaaggagaggtgcagcacactcagaaaaaactcccggccaggagtggtggctcacacctgtagtrccagcactttgggaggccaaggctggcagatcacctgagatcaggagttcaagaccagccaggccaacatggtgaaaccccatctctactgaaaatacaa

SEQ ID NO: 16989 - DNA, 201 bp, Homo sapiens
aagagtcctaatttgcacagcctggggcctgggcactaccccgagctacttccttttccccagccctggggcccggagccagctttgtccttcccatctcygagggcatggactgctgctgccctgatgggcccctgtcctggccatgggacccctgtcttccacaggttgtcggcggcttccccagccaggcccaagtca

SEQ ID NO: 16990 - DNA, 201 bp, Homo sapiens
cttgctccccaagaagggctgactggggctctgtcccctgccccagggctcgaggtagtgtttacagccctcatgaacagcaaaggcgtgagcctcttcgrcatcatcaaccctgagattatcactcgagatgtgagtacaaagcccccctcaccagcccctgttcctggggagagaggcccagacaggattcctggggtg

SEQ ID NO: 16991 - DNA, 201 bp, Homo sapiens
agcagtgaagtccagactgggcacagtggctcacacctgtaatcccaatcctttgggaagctgagatgtagcaggacgaaccgcagacaaaactcctcagrcactgagttaaagaaggaaagagtttattcagccgggagcatgggtaagactcctgtctcaagagcggagctctccgagtgcgcaattcctgtccctttt

SEQ ID NO: 16992 - DNA, 201 bp, Homo sapiens
tcggaaacttggtggtgggcaaaagaactaagctggagcaatagcagtgaagtccagactgggcacagtggctcacacctgtaatcccaatcctttgggargctgagatgtagcaggacgaaccgcagacaaaactcctcagacactgagttaaagaaggaaagagtttattcagccgggagcatgggtaagactcctgtc

SEQ ID NO: 16993 - DNA, 201 bp, Homo sapiens
tctacaagaatgtctcagaggacctccccctccccaccttctcgcccacactgctgggggactcccgcatgctgtacttctggttctctgagcgagtcttycactcgctggccaaggtagctttccaggatggccgcctcatgctcagcctgatgggagacgagttcaaggtgagtgggtggggctgggctgctagggaat

SEQ ID NO: 16994 - DNA, 201 bp, Homo sapiens
gccccgctgggggaaactgggtacagctctttcctcagtttccccatctgcactctgggctgaatgctggggctcctcccaatctccctgaagctggaccygagcccagtagggacacacagggtccagccagcgtcctggcttcctccagggtcatttcatctacaagaatgtctcagaggacctccccctccccacctt

SEQ ID NO: 16995 - DNA, 201 bp, Homo sapiens
ggcaaatctctgcccctttgggctgcagcctcacaagctgtgtggcgttgggcaagtctatagaactcaggacaaatgggtgattaagtccaagaggactycaagattctcctggaagtagattaggaaaaaagataattagattgctcacatggctgggcactcatccatgtactgtactctcctatgcagtacagagca

SEQ ID NO: 16996 - DNA, 201 bp, Homo sapiens
cactcttcctgtctaggtcccatgggctctatctggctctgacacttgatgattagttatgagcatactttggcaaatctctgcccctttgggctgcagcmtcacaagctgtgtggcgttgggcaagtctatagaactcaggacaaatgggtgattaagtccaagaggactccaagattctcctggaagtagattaggaaa

SEQ ID NO: 16997 - DNA, 201 bp, Homo sapiens
tgcctggaaagcacctgctctgtctgccccagatctgcaaagagatcaacgtcatctctaacatcatggccgattttgtccagacaagggctggtgagtgygtttctgtctgcatgcctcagaagacagcagtgggagccagaaagccacctgctgcactatgtggccttgggactgtcactcttcctgtctaggtcccat

SEQ ID NO: 16998 - DNA, 201 bp, Homo sapiens
ccgtgttctcagctgcaaaatgggagtgataattcttacttcctgagctacaagagtcagggccaacagagccatgaacggtgcctggtacacactaggcrctccatggatgcacaggactggtcaggggctcattgtggtgcttgctgccttcaggcctgggtggatcaagcagctgttcacaaatttcatctccttcac

SEQ ID NO: 16999 - DNA, 201 bp, Homo sapiens
gggctgaatgctggggctcctcccaatctccctgaagctggacctgagcccagtagggacacacagggtccagccagcgtcctggcttcctccagggtcayttcatctacaagaatgtctcagaggacctccccctccccaccttctcgcccacactgctgggggactcccgcatgctgtacttctggttctctgagcgag

SEQ ID NO: 17000 - DNA, 201 bp, Homo sapiens
gcctcgggccggccttgctccccaagaagggctgactggggctctgtcccctgccccagggctcgaggtagtgtttacagccctcatgaacagcaaaggcrtgagcctcttcgacatcatcaaccctgagattatcactcgagatgtgagtacaaagcccccctcaccagcccctgttcctggggagagaggcccagacag

SEQ ID NO: 17001 - DNA, 201 bp, Homo sapiens
ataagctgctcctgcatctccaaggggagcgagagtaagtacaccaccctgtggcccccattcctgctcgtgcccatcctgttagtgtgtccacggccccytccaggctcaaccccacacagggcatgcttgtgggtggccaaacctgagggcagcaataccttcagtggggtcacttcctaccccctcccatcaatacac

SEQ ID NO: 17002 - DNA, 201 bp, Homo sapiens
aaccaaccctaggatatagattctgttatcatcccctttttacatatgggtaaactgagtcacagagaggttagaaaggaaaagctcatatctacggagtscatcctgcattccaagcaccacactaactcagagataaaactctagccaagctaagtaacttgctgaggacacacaactcgccactaagggatgggagta

SEQ ID NO: 17003 - DNA, 201 bp, Homo sapiens
tggtcaggggctcattgtggtgcttgctgccttcaggcctgggtggatcaagcagctgttcacaaatttcatctccttcaccctgaagctggtcctgaagkgacaggtgagtgaggctggctgactccctgtggtccagggccatgcccaggaggctggatccctttcctccctgcctttccctgagaaggtgccactccc

SEQ ID NO: 17004 - DNA, 201 bp, Homo sapiens
accaaccctaggatatagattctgttatcatcccctttttacatatgggtaaactgagtcacagagaggttagaaaggaaaagctcatatctacggagtgsatcctgcattccaagcaccacactaactcagagataaaactctagccaagctaagtaacttgctgaggacacacaactcgccactaagggatgggagtag

SEQ ID NO: 17005 - DNA, 201 bp, Homo sapiens
gactcactgcaacttctgcctcctgggttcaagcgattctcctgcctcaacctcccgagcagctggaaccacaagcatatgccaccactcccggctaatctttttttttttttttatgcatttttagtagagatggggtttcaccatgctggccaggctggtctcgaactcctgacctcagatgatccacctgcctcggcc

SEQ ID NO: 17006 - DNA, 201 bp, Homo sapiens
ttctgaggagtggactttactccacccaccctccaacttcctcatttcttttcaggcagtgctggagacctggggcttcaacaccaaccaggaaatcttcyaagaggtaactgccccctgcccctgtgtggggtttatctcacgtaccccaatcctgctctggcttcaagagcccccacacagccaataacaccaccaatg

SEQ ID NO: 17007 - DNA, 201 bp, Homo sapiens
gaaggaggcactgcctctggcctcctttcctgcctggaaagcacctgctctgtctgccccagatctgcaaagagatcaacgtcatctctaacatcatggcygattttgtccagacaagggctggtgagtgcgtttctgtctgcatgcctcagaagacagcagtgggagccagaaagccacctgctgcactatgtggccttg

SEQ ID NO: 17008 - DNA, 201 bp, Homo sapiens
accagggctgcccactacaaggatcccagcaaagcaccagctccttcctagagggcttattcggcttctgtcatcctctacagcagtggattgtggccccycccagggggtactgacaaaagctttggaccctctattacttaggatatagatttctgtaacaaagaaatccgaaataatagctgcttaaacacaataaac

SEQ ID NO: 17009 - DNA, 201 bp, Homo sapiens
cttcccttctgaactcaggccgtccagccttccccggctctgtgatgtctctctccctgcacatacacaactcacaatattgggcaggcccctgaccggcycttctcccttagccccttgtctgagtcctgttcctttgatgtcctatttctagtctttccatttctctctgtctctacctcctccccaggctaccattat

SEQ ID NO: 17010 - DNA, 201 bp, Homo sapiens
agccagctttgtccttcccatctccgagggcatggactgctgctgccctgatgggcccctgtcctggccatgggacccctgtcttccacaggttgtcggcrgcttccccagccaggcccaagtcaccgtccactgcctcaagatgcccaagatctcctgccaaaacaagggagtcgtggtcaattcttcagtgatggtgaa

SEQ ID NO: 17011 - DNA, 201 bp, Homo sapiens
gttcaaaagccagaattatagacccccaggactacagacagtgtcacagcatcgtctgggtgaggctagggttagtgtgcggctgggctcagggctgcccmatttgctaggatcgtggggttcccatgtgtcaggatccagaggctagggtatgatcaggatctctagctggggtcagggtcagagctctctgtgtcccct

SEQ ID NO: 17012 - DNA, 201 bp, Homo sapiens
caggggccctgagctaggagggttgctctctgcttcgggaagagccctggctcacagcaaatttggtttctctccccaggatatcgtgactaccgtccagscctcctattctaagaaaaagctcttcttaagcctcttggatttccagtatgtgctgcagagaagagagggggcggtcaactccgcaaacctctccctggc

SEQ ID NO: 17013 - DNA, 201 bp, Homo sapiens
ggtcacttctgtgctccagggaggactcaccatgggcatttgattggcagagcagctccgagtccgtccagagcttcctgcagtcaatgatcaccgctgtrggcatccctgaggtcatgtctcgtaagtgtgggctggaggggaaactgggtgccgaggctgacagagcttcccatttcaccttgtgggcccttcccaggc

SEQ ID NO: 17014 - DNA, 201 bp, Homo sapiens
ggcctgggagtcagcccagctcgcccctctctcctactgcccctcccttcagggcttcctgctgctgcagatggactttggcttccctgagcacctgctgrtggatttcctccagagcttgagctagaagtctccaaggaggtcgggatggggcttgtagcagaaggcaagcaccaggctcacagctggaaccctggtgtc

SEQ ID NO: 17015 - DNA, 201 bp, Homo sapiens
tccctccatctacttttatttagggcgagggaagcttcctgctctgactttctcatttatggtattctcccctgctttccagcagctgtgattgtcccaartcctgtcctctggttctctaggccagaaaaactatgatctaccagagctcaagaacttgaaagggccttttcccactgtcccttctcacagtgagagccg

SEQ ID NO: 17016 - DNA, 201 bp, Homo sapiens
agctccacctctgcccccggggcctagctgaggcctcctccaagctgagccacctactatcttccaaactcccaccctccatctggtgtcacctcctcccrgaagccctctgtatcagtttcctgttttctgccataaaaaaaatcactccaagtttagtggcttaacatgacacaagtttaccattttacagtttaaaag

SEQ ID NO: 17017 - DNA, 201 bp, Homo sapiens
acccactatgccaggagcctccctggcctgaagccagccctgaagccggctgccacactagcccagagagaggagtgccctgggagggagatgggctgagyggagctgtcatcaccccctcctgacctcgccttcaaggtcaagttctttggtgagaaggtcctagctgcattgcaaacagccaggtatagggatttgtgt

SEQ ID NO: 17018 - DNA, 201 bp, Homo sapiens
gctctgtcccctgccccagggctcgaggtagtgtttacagccctcatgaacagcaaaggcgtgagcctcttcgacatcatcaaccctgagattatcactcragatgtgagtacaaagcccccctcaccagcccctgttcctggggagagaggcccagacaggattcctggggtgactgggggctgttggggagacagacag

SEQ ID NO: 17019 - DNA, 201 bp, Homo sapiens
ccttcaaggtcaagttctttggtgagaaggtcctagctgcattgcaaacagccaggtatagggatttgtgtttgtctgagacccagaatcactggggttcragttagggttcagatctgagccaggttagggggttgagtcagggggtaaagattaggaggttggtgtatatttggtgttgggggtcactctatggccaaa

SEQ ID NO: 17020 - DNA, 201 bp, Homo sapiens
agacaggattcctggggtgactgggggctgttggggagacagacagaggggcctctaccagcttggctccctcctggtggcctgggagtcagcccagctcrcccctctctcctactgcccctcccttcagggcttcctgctgctgcagatggactttggcttccctgagcacctgctggtggatttcctccagagcttgag

SEQ ID NO: 17021 - DNA, 201 bp, Homo sapiens
tccagagcttgagctagaagtctccaaggaggtcgggatggggcttgtagcagaaggcaagcaccaggctcacagctggaaccctggtgtctcctccagcrtggtggaagttgggttaggagtacggagatggagattggctcccaactcctccctatcctaaaggcccactggcattaaagtgctgtatccaagagctgg

SEQ ID NO: 17022 - DNA, 201 bp, Homo sapiens
ccaacagagccatgaacggtgcctggtacacactaggcgctccatggatgcacaggactggtcaggggctcattgtggtgcttgctgccttcaggcctggrtggatcaagcagctgttcacaaatttcatctccttcaccctgaagctggtcctgaagggacaggtgagtgaggctggctgactccctgtggtccagggcc

SEQ ID NO: 17023 - DNA, 201 bp, Homo sapiens
tgactctggagcagacggatacatgtatgaatttggactctagacacgttctcgtgtgtgtgacaggtgtgagcgtcacaggagctgggccctcccgaggrattctgggatggtgccacagttaattcttgggtctgaggctccgtgttctcagctgcaaaatgggagtgataattcttacttcctgagctacaagagtca

SEQ ID NO: 17024 - DNA, 201 bp, Homo sapiens
tcatttcatctacaagaatgtctcagaggacctccccctccccaccttctcgcccacactgctgggggactcccgcatgctgtacttctggttctctgagygagtcttccactcgctggccaaggtagctttccaggatggccgcctcatgctcagcctgatgggagacgagttcaaggtgagtgggtggggctgggctgc

SEQ ID NO: 17025 - DNA, 201 bp, Homo sapiens
tgttctcagctgcaaaatgggagtgataattcttacttcctgagctacaagagtcagggccaacagagccatgaacggtgcctggtacacactaggcgctycatggatgcacaggactggtcaggggctcattgtggtgcttgctgccttcaggcctgggtggatcaagcagctgttcacaaatttcatctccttcaccct

SEQ ID NO: 17026 - DNA, 201 bp, Homo sapiens
gcaggcatcgtgtgccgcatcaccaagcctgccctcctggtgtgtaagtatcagtgcatctgtctgccctgccaggggtcttttcatggacacccactatrccaggagcctccctggcctgaagccagccctgaagccggctgccacactagcccagagagaggagtgccctgggagggagatgggctgagtggagctgtc

SEQ ID NO: 17027 - DNA, 201 bp, Homo sapiens
gacaaatgggtgattaagtccaagaggactccaagattctcctggaagtagattaggaaaaaagataattagattgctcacatggctgggcactcatccaygtactgtactctcctatgcagtacagagcagagctgggtttcagcccaagtcttggactctgctctgaaccaaccttctagaagggctctacctacccag

SEQ ID NO: 17028 - DNA, 201 bp, Homo sapiens
gagtcttccactcgctggccaaggtagctttccaggatggccgcctcatgctcagcctgatgggagacgagttcaaggtgagtgggtggggctgggctgckagggaatccagatggcatgtggtatgtgtgtgtgtgcacacgcatggggaggagggaggaaactcggaaacttggtggtgggcaaaagaactaagctgga

SEQ ID NO: 17029 - DNA, 201 bp, Homo sapiens
tctcacgtaccccaatcctgctctggcttcaagagcccccacacagccaataacaccaccaatggcaacaattataacagcgaacacagctcctactcggktgttcggcatggagtgaagcacttagtgtgtgtgacttccttcagtgctcacaccgaccctatgagtggggcggtcaaactgtccccattttacacacag

SEQ ID NO: 17030 - DNA, 201 bp, Homo sapiens
cacactagcccagagagaggagtgccctgggagggagatgggctgagtggagctgtcatcaccccctcctgacctcgccttcaaggtcaagttctttggtragaaggtcctagctgcattgcaaacagccaggtatagggatttgtgtttgtctgagacccagaatcactggggttcgagttagggttcagatctgagcca

SEQ ID NO: 17031 - DNA, 201 bp, Homo sapiens
acaaaataagtatttttttaaaaaatgtataaatgttgttttcttatagtacagacaggtcttgctatgttggccaggttggtcttgaactcttggcttakccagtcccccaccccaagcctaaaattagtatcttgactttatttgggatgatggtaacagtcaagggtcggttgtgggccaggtgcttttacaaacaat

SEQ ID NO: 17032 - DNA, 201 bp, Homo sapiens
gattggctcccaactcctccctatcctaaaggcccactggcattaaagtgctgtatccaagagctggggagtccttcttctgtggctggcgggtagagggrgggggaagggattgtctcaccagtgccgtccacctcttttcagcccttccaaggcagctgcccccaaaccctccaagcttcatgatgactggaggaagaa

SEQ ID NO: 17033 - DNA, 201 bp, Homo sapiens
ggcagacattgttcagggaccttgtctttgtcttaaagccaatctcctcctcctccccggccctgctaaacacgctccccaggggtggtctctgctacccscgcacattgggccttgagtcttggtaaatgtttctgagccaccagggggcgccagcggtgctggatgccacttcgccttttgcaggaaaactcccgccgc

SEQ ID NO: 17034 - DNA, 201 bp, Homo sapiens
ccagacccctgttcttggtttacctgcagaatattatctttgccaccccgcgggatggctcaacccactttcaggatgcaggtctcctaatagcaacctgwtatagcagaaagacccctgggctgggagtctgagacctagttctagcccagccctgaacctcagtttccctttctgtgaaacaagaatgttgaacttgat

SEQ ID NO: 17035 - DNA, 201 bp, Homo sapiens
taaatggttcctacaactacttgcaaggagaccactctgtgtggttgcaaagaacactttgagaagctgtgtgggaaagtttccttcctagcagggtagaytcagctaactgcaggtcatgtggccattgtggatgggttgggagctcaagtttggggcagaagggaattttttttggcagcagagtggcaagccctgccg

SEQ ID NO: 17036 - DNA, 201 bp, Homo sapiens
ataacctaggatcatctccccacctaccccaaggtccttaacttaaccatactttcatatgggtaacacgagttgagtgtggtacccagggtttgacatgytgggtaacatatttgcaggttctgtggattaggaggacattttgggggccatgattctatcttccaccctcgcctagacaaaattggaggctcactcctt

SEQ ID NO: 17037 - DNA, 201 bp, Homo sapiens
tttgaccttgaaatggtagaatatttatccctttgaggtgactcggatggtagactctcagacaccatagcacacgtgtgctgggggtattttggaccagrctctgctgagagctttctgctcccttccccacagagtatgttgagctgactgtgctttccttttgaacatctgcttgtccacatggcttaggtaggagag

SEQ ID NO: 17038 - DNA, 201 bp, Homo sapiens
aatgcttgtccaggccgtgcagcatctgccttgtgggtcacttctgtgctccagggaggactcaccatgggcatttgattggcagagcagctccgagtccrtccagagcttcctgcagtcaatgatcaccgctgtgggcatccctgaggtcatgtctcgtaagtgtgggctggaggggaaactgggtgccgaggctgacag

SEQ ID NO: 17039 - DNA, 201 bp, Homo sapiens
aatagcaacctgatatagcagaaagacccctgggctgggagtctgagacctagttctagcccagccctgaacctcagtttccctttctgtgaaacaagaaygttgaacttgatgattcccaattttccttttgaccttgaaatggtagaatatttatccctttgaggtgactcggatggtagactctcagacaccatagca

SEQ ID NO: 17040 - DNA, 201 bp, Homo sapiens
gatggccgcctcatgctcagcctgatgggagacgagttcaaggtgagtgggtggggctgggctgctagggaatccagatggcatgtggtatgtgtgtgtgygcacacgcatggggaggagggaggaaactcggaaacttggtggtgggcaaaagaactaagctggagcaatagcagtgaagtccagactgggcacagtggc

SEQ ID NO: 17041 - DNA, 201 bp, Homo sapiens
ttggtttacctgcagaatattatctttgccaccccgcgggatggctcaacccactttcaggatgcaggtctcctaatagcaacctgatatagcagaaagasccctgggctgggagtctgagacctagttctagcccagccctgaacctcagtttccctttctgtgaaacaagaatgttgaacttgatgattcccaattttc

SEQ ID NO: 17042 - DNA, 201 bp, Homo sapiens
tgacttcttcaggccttccctgccatcctcaaatctccagctgccccctcctgtctaccttccacttccctctccacacacaacctgcttaccagagagcwgagcagagccaccaacagaacttcccccccacgtcgctgctcccagtcgcaacccactcacccacacctgcgccttcctgcggccgttctcctgttctaa

SEQ ID NO: 17043 - DNA, 201 bp, Homo sapiens
gagtgcggtggcacaatctcggctcactacaacctctgcctcccaggttccagcgattctcatgcctcagcctcccaggtagctgggattacaggcatgcrctaccacgcctgactaattttttgtatttttagtagagacagggtttcgctatgtgggcccagctggtctgagactcctggtttcaagtgatctgcccgc

SEQ ID NO: 17044 - DNA, 201 bp, Homo sapiens
gctcactgcagcctcgaatcctgggctcgagtgatcctcccacctcagccctcctgagtagctgggaccacagacaaacaccaccacacctggctaatttwaaaaaaaaaatttccttagaggcggggtcttgttatgttgtccaggctgttctcaaactcctggcctcaagcaattctcctgccttggcctcctaagttg

SEQ ID NO: 17045 - DNA, 201 bp, Homo sapiens
gctcttgactggcctgggcagcatgtggataccatctgatagcggaggctgccctgaggtcatgtcgggtctccctgcagcctgtgactctggtagagtgyggaccgatgcccctgactgctacctgtctttccataagctgctcctgcatctccaaggggagcgagagtaagtacaccaccctgtggcccccattcctgc

SEQ ID NO: 17046 - DNA, 201 bp, Homo sapiens
tggtttgccctcccccatgccatctgctcctcctcctgccacctcagggaaggcctctcccacctccctgactaggtcaggtcccctcgtgccacagcctrgtgtgtctctcctttaaatactcctcagctgcagttttacgttctgttctgggatgccctggaaaatgctgggctcctgcagatatggcccgcagctcct

SEQ ID NO: 17047 - DNA, 201 bp, Homo sapiens
tggtgtgtaagtatcagtgcatctgtctgccctgccaggggtcttttcatggacacccactatgccaggagcctccctggcctgaagccagccctgaagcmggctgccacactagcccagagagaggagtgccctgggagggagatgggctgagtggagctgtcatcaccccctcctgacctcgccttcaaggtcaagttc

SEQ ID NO: 17048 - DNA, 201 bp, Homo sapiens
atatacgggctccaggctgaacggctcgggccacttacacaccactgcctgataaccatgctggctgccacagtcctgaccctggccctgctgggcaatgsccatgcctgctccaaaggcacctcgcacgaggcaggcatcgtgtgccgcatcaccaagcctgccctcctggtgtgtaagtatcagtgcatctgtctgccc

SEQ ID NO: 17049 - DNA, 201 bp, Homo sapiens
ggctcgggccacttacacaccactgcctgataaccatgctggctgccacagtcctgaccctggccctgctgggcaatgcccatgcctgctccaaaggcacmtcgcacgaggcaggcatcgtgtgccgcatcaccaagcctgccctcctggtgtgtaagtatcagtgcatctgtctgccctgccaggggtcttttcatggac

SEQ ID NO: 17050 - DNA, 201 bp, Homo sapiens
tctagaggaggccgcaggggctgggcaggaaggaggtgaatctctggggccaggaagaccctgctgcccggaagagcctcatgttccgtgggggctgggcrgacatacatatacgggctccaggctgaacggctcgggccacttacacaccactgcctgataaccatgctggctgccacagtcctgaccctggccctgctg

SEQ ID NO: 17051 - DNA, 201 bp, Homo sapiens
tgggggactcaggtctctccccttgatttggaaccagagcctgacaccttccctacccccaccctccatcccctggtgccctggggggatttattggagtrtatcaacctctccaacagcccctctaagagtcaggcttcaaagggtcctttcccactgccctgggaagatggaggtcttatttcggggtgaatggggggt

SEQ ID NO: 17052 - DNA, 201 bp, Homo sapiens
ccaccaacagaacttcccccccacgtcgctgctcccagtcgcaacccactcacccacacctgcgccttcctgcggccgttctcctgttctaacagaggacrgtccctcttcccttctgaactcaggccgtccagccttccccggctctgtgatgtctctctccctgcacatacacaactcacaatattgggcaggcccctg

SEQ ID NO: 17053 - DNA, 201 bp, Homo sapiens
atggctcaacccactttcaggatgcaggtctcctaatagcaacctgatatagcagaaagacccctgggctgggagtctgagacctagttctagcccagccmtgaacctcagtttccctttctgtgaaacaagaatgttgaacttgatgattcccaattttccttttgaccttgaaatggtagaatatttatccctttgagg

SEQ ID NO: 17054 - DNA, 201 bp, Homo sapiens
tcaagtatctttttagttcattaattctttttacagctgtgtcttatttgtttacttacccactgagattttcattttattttatttaattaattaatttrtttatttttgagacagagtctcgctcttgttccccaggctggagtgcagtggcgcaatctcagctcactgcaacctacgcctcctgtgttcaagcaattc

SEQ ID NO: 17055 - DNA, 201 bp, Homo sapiens
caagttcaaaagccagaattatagacccccaggactacagacagtgtcacagcatcgtctgggtgaggctagggttagtgtgcggctgggctcagggctgccccatttgctaggatcgtggggttcccatgtgtcaggatccagaggctagggtatgatcaggatctctagctggggtcagggtcagagctctctgtgtcc

SEQ ID NO: 17056 - DNA, 201 bp, Homo sapiens
aagttcaaaagccagaattatagacccccaggactacagacagtgtcacagcatcgtctgggtgaggctagggttagtgtgcggctgggctcagggctgccccatttgctaggatcgtggggttcccatgtgtcaggatccagaggctagggtatgatcaggatctctagctggggtcagggtcagagctctctgtgtccc

SEQ ID NO: 17057 - DNA, 201 bp, Homo sapiens
aaaaggctagaagtccaccatggccctccctgagctaagatcaagctgtcagcagaaccagattccttctgggggctataggggagaattaattccctcgytttctgcagcttctagaggcttcccccattccttggcttccctccatctacttttatttagggcgagggaagcttcctgctctgactttctcatttatgg

SEQ ID NO: 17058 - DNA, 201 bp, Homo sapiens
agcccctctaagagtcaggcttcaaagggtcctttcccactgccctgggaagatggaggtcttatttcggggtgaatggggggtagggtagaaaaatctcaaacaaaataagtatttttttaaaaaatgtataaatgttgttttcttatagtacagacaggtcttgctatgttggccaggttggtcttgaactcttggctt

SEQ ID NO: 17059 - DNA, 201 bp, Homo sapiens
gcagacaaaactcctcagacactgagttaaagaaggaaagagtttattcagccgggagcatgggtaagactcctgtctcaagagcggagctctccgagtgmgcaattcctgtcccttttaagggctcacaactctaagggggtctgcatgagagggtcgtgatctattgagcaagtagcaggtacgtgactgggggctgca

SEQ ID NO: 17060 - DNA, 201 bp, Homo sapiens
cagatagatagatggatagatagacagagtgatcaatagatttaggtatagatataacttggcacgtagtaactgtgcattaaatataagttgatattagwcttacatttattgcagttatatttgctacactttgttttgttgcactcatcctgtgaaataagtactgttacctctgttttgcaaacaaaaaaaccacaa

SEQ ID NO: 17061 - DNA, 201 bp, Homo sapiens
cactgcaacctacgcctcctgtgttcaagcaattctcgtgcctcagcctcccgagtggctggggttacaggggtgcaccactgtgcccagctcattttttkgtatttttagtagagacggggtttcaccatgttggccaggctggtcttgacctcctgacctcaaatgatcctcctgcctcagcctcccaaagtgccggga

SEQ ID NO: 17062 - DNA, 201 bp, Homo sapiens
actaccaggcttaggtcaggtaggcccaggcctggtttcgggtctggttccttggtttcgggtctggtctctaggcgttgggctacctgcctttagtttcrcttctctttctttttctgagtataaaacaatataaaacaatatgagagggtctgtctctcttctctcagagacaggagggtccctggaggccaggagttc

SEQ ID NO: 17063 - DNA, 201 bp, Homo sapiens
ctcgctcttgttccccaggctggagtgcagtggcgcaatctcagctcactgcaacctacgcctcctgtgttcaagcaattctcgtgcctcagcctcccgaktggctggggttacaggggtgcaccactgtgcccagctcatttttttgtatttttagtagagacggggtttcaccatgttggccaggctggtcttgacctc

SEQ ID NO: 17064 - DNA, 201 bp, Homo sapiens
ttccactcgctggccaaggtagctttccaggatggccgcctcatgctcagcctgatgggagacgagttcaaggtgagtgggtggggctgggctgctagggratccagatggcatgtggtatgtgtgtgtgtgcacacgcatggggaggagggaggaaactcggaaacttggtggtgggcaaaagaactaagctggagcaat

SEQ ID NO: 17065 - DNA, 201 bp, Homo sapiens
gtaacagagcctctccctggaaaactggacagaaggatcatttcagaggttcatggccactcctgaagcctgttcacaacccatgggctggatgatctagwggggcgggggactgggcagcagcttgttttcctgattttggcctccaggagccgatggtcaatggactgccctctgcaggggcagggctggtggtcagct

SEQ ID NO: 17066 - DNA, 201 bp, Homo sapiens
gccttcctgcggccgttctcctgttctaacagaggacggtccctcttcccttctgaactcaggccgtccagccttccccggctctgtgatgtctctctccytgcacatacacaactcacaatattgggcaggcccctgaccggctcttctcccttagccccttgtctgagtcctgttcctttgatgtcctatttctagtct

SEQ ID NO: 17067 - DNA, 201 bp, Homo sapiens
cacacctgcgccttcctgcggccgttctcctgttctaacagaggacggtccctcttcccttctgaactcaggccgtccagccttccccggctctgtgatgyctctctccctgcacatacacaactcacaatattgggcaggcccctgaccggctcttctcccttagccccttgtctgagtcctgttcctttgatgtcctat

SEQ ID NO: 17068 - DNA, 201 bp, Homo sapiens
gcaccacactaactcagagataaaactctagccaagctaagtaacttgctgaggacacacaactcgccactaagggatgggagtaggatttgaacccagcmttctctgaccccagaagctgagttcctagatactttactctcctgcttcccagggtggggctttttgtcttggccaacaccctctgtcaaggagctgtgg

SEQ ID NO: 17069 - DNA, 201 bp, Homo sapiens
tcttcctcatcctcagaagcacttgctcactctgctaaatcaaagtgaaacgcatgtttacagaatattggtccaaaagggtctcagcatctcccactacycagggtggcagagcctcgggccggccttgctccccaagaagggctgactggggctctgtcccctgccccagggctcgaggtagtgtttacagccctcatg

SEQ ID NO: 17070 - DNA, 201 bp, Homo sapiens
acacacagggaaacttagtgaatggcaaggctgggtttgagcccagctctattgcccccaaagataaggctccattccctgctccatttcccaggcatagrgacttgtagggggctggaaccccaggatcaactctgggctcagagggccccagcaataagtgactgttgattactcctgatcccaaagctgacttcaggc

SEQ ID NO: 17071 - DNA, 201 bp, Homo sapiens
actgcagggagataagaccctgcctagatagaatcttcgtggggaagaaggggctccaggaagaatggagggagggcctggcaggaggagagcgctgcccragcaaaggcctggccgccagaatagcaaatctcaagggaatagcaaatctcaagagagtgccccaaagggcctgagctatgagacaaaagcactggctgc

SEQ ID NO: 17072 - DNA, 201 bp, Homo sapiens
tgtccccattttacacacagggaaacttagtgaatggcaaggctgggtttgagcccagctctattgcccccaaagataaggctccattccctgctccattwcccaggcatagggacttgtagggggctggaaccccaggatcaactctgggctcagagggccccagcaataagtgactgttgattactcctgatcccaaag

SEQ ID NO: 17073 - DNA, 201 bp, Homo sapiens
agcaccacactaactcagagataaaactctagccaagctaagtaacttgctgaggacacacaactcgccactaagggatgggagtaggatttgaacccagmattctctgaccccagaagctgagttcctagatactttactctcctgcttcccagggtggggctttttgtcttggccaacaccctctgtcaaggagctgtg

SEQ ID NO: 17074 - DNA, 201 bp, Homo sapiens
gagagcgctgcccgagcaaaggcctggccgccagaatagcaaatctcaagggaatagcaaatctcaagagagtgccccaaagggcctgagctatgagacaraagcactggctgctattcttagagtttctttcccaggggatgttacaggagggggcccaatggagggtcaaattatcatcgcttttttatttcaggatta

SEQ ID NO: 17075 - DNA, 201 bp, Homo sapiens
cagtctctcctctctgatccttgcttcctaagggtcttcactgagccccacctctgaccaagtccccggcggcacaggcagcacagatcctctgctgtacytacaccaagaccccagggccaacgcttctcccattgtgcagctccacctctgcccccggggcctagctgaggcctcctccaagctgagccacctactatc

SEQ ID NO: 17076 - DNA, 201 bp, Homo sapiens
ttttctgccataaaaaaaatcactccaagtttagtggcttaacatgacacaagtttaccattttacagtttaaaaggctagaagtccaccatggccctccytgagctaagatcaagctgtcagcagaaccagattccttctgggggctataggggagaattaattccctcgctttctgcagcttctagaggcttcccccat

SEQ ID NO: 17077 - DNA, 201 bp, Homo sapiens
gagggcctggcaggaggagagcgctgcccgagcaaaggcctggccgccagaatagcaaatctcaagggaatagcaaatctcaagagagtgccccaaagggsctgagctatgagacaaaagcactggctgctattcttagagtttctttcccaggggatgttacaggagggggcccaatggagggtcaaattatcatcgctt

SEQ ID NO: 17078 - DNA, 201 bp, Homo sapiens
tcccactttacagaggggaacactgaggctggagggttgggtagctgtgtggatgcaggggagcggtgactcagggcaattcccccatcctgaggccctgygttgatcttttcctcctgcagccagcatcctttcagatggagacattggggtggacatttccctgacaggtgatcccgtcatcacagcctcctacctgga

SEQ ID NO: 17079 - DNA, 201 bp, Homo sapiens
cagggagataagaccctgcctagatagaatcttcgtggggaagaaggggctccaggaagaatggagggagggcctggcaggaggagagcgctgcccgagcraaggcctggccgccagaatagcaaatctcaagggaatagcaaatctcaagagagtgccccaaagggcctgagctatgagacaaaagcactggctgctatt

SEQ ID NO: 17080 - DNA, 201 bp, Homo sapiens
agtgccgggattacaggtgtgagctcccgcaccccgccggccctttctttcttttgagctgagctatgtatttaatgaaaccttttcttgtgtatccagcrgttcagtggtttcttggggcatgtgatctccttgagcccagtcccacaggctgtaatcgaaggtcctcaggccacactccccagccccgctggctgcctg

SEQ ID NO: 17081 - DNA, 201 bp, Homo sapiens
actcccgcatgctgtacttctggttctctgagcgagtcttccactcgctggccaaggtagctttccaggatggccgcctcatgctcagcctgatgggagaygagttcaaggtgagtgggtggggctgggctgctagggaatccagatggcatgtggtatgtgtgtgtgtgcacacgcatggggaggagggaggaaactcgg

SEQ ID NO: 17082 - DNA, 201 bp, Homo sapiens
agtgagctgagatcgtgccactgccctccagcctgggcaacagagtgagactgtctcaaaaacaaaaaaagaaaagaaaagaaaaagaaagtgacttctcrggtcctaaccccaaagccacaggtgctggggaactttcctcggttttcagaagagcagtagctaagcctggttcccgtgtcatccttgcctctccagtcc

SEQ ID NO: 17083 - DNA, 201 bp, Homo sapiens
tgttgtccaggctgttctcaaactcctggcctcaagcaattctcctgccttggcctcctaagttgctggggttataggcatgagccaccatgccaagcatrtgttctttcattcttatttttatttattatttatttatttacttatttatttttttgacacagagtctcactgtgttgcccaggctggagtgcggtggca

SEQ ID NO: 17084 - DNA, 201 bp, Homo sapiens
tccataagctgctcctgcatctccaaggggagcgagagtaagtacaccaccctgtggcccccattcctgctcgtgcccatcctgttagtgtgtccacggcyccctccaggctcaaccccacacagggcatgcttgtgggtggccaaacctgagggcagcaataccttcagtggggtcacttcctaccccctcccatcaata

SEQ ID NO: 17085 - DNA, 201 bp, Homo sapiens
ggagctggactccagggcttggcctcagcagagggggaggttgtgcaggcagagggttctggggccaccaaaggaggcccagcctgggaagtttgcagggktggggaccccagagctggccaagctcttgactggcctgggcagcatgtggataccatctgatagcggaggctgccctgaggtcatgtcgggtctccctgc

SEQ ID NO: 17086 - DNA, 201 bp, Homo sapiens
gtgggcagatcacttgagcccaggagtctgagaccagattaggcactgtgatgaaaccctgtctctaccaaaaacacaaaaattagctgggcatggtgggrcatgcctatagttccagttacttgggaggctggggagggaggattgcttgagcctgggagacggaggttgcagtgagctgtgatctcaccactgcactcc

SEQ ID NO: 17087 - DNA, 201 bp, Homo sapiens
ggtccctggaggccaggagttcaagaccagcctgggcaacatggggagacccctgtctctacaaaaataaaaataagtttaaaaatcagctgtgcacggcrgtgcatacctatagtcccaactactcaggtggctgaggagggaggatcacttgagcccaggaggttgaggctgcagtgagctatgatggcaccactgcac

SEQ ID NO: 17088 - DNA, 201 bp, Homo sapiens
acaaaaataaaaataagtttaaaaatcagctgtgcacggcagtgcatacctatagtcccaactactcaggtggctgaggagggaggatcacttgagcccargaggttgaggctgcagtgagctatgatggcaccactgcactccagtgtgggtgacagagtaggactccatctcaagaaaaaaatacagtccagcatttat

SEQ ID NO: 17089 - DNA, 201 bp, Homo sapiens
ggcctgagctatgagacaaaagcactggctgctattcttagagtttctttcccaggggatgttacaggagggggcccaatggagggtcaaattatcatcgyttttttatttcaggattacaccaaagactgtttccaacttgactgaggtaggtagtcttggatagactgggggaaataagtcctgtgggacctcctgcct

SEQ ID NO: 17090 - DNA, 201 bp, Homo sapiens; identical to SEQ ID NO: 3753

SEQ ID NO: 17091 - DNA, 201 bp, Homo sapiens
gccaagcatttgggagagctctgccccaacactgagcacctttctccatccccagcgtgaccagctaccagctctctgctggttactcacgatggccctckgtgacatcccaggtagagtgtggggaagggatgggtgggggatgtgtgtgcccatgtaatgctgtggccttctctgggtattatgtgtatgagtgtgttt

SEQ ID NO: 17092 - DNA, 201 bp, Homo sapiens
atgtaaacacactataacctacctttatagcaatcacagagttttggccaatgaaaggcagcccacttgtcaaaccttgtccaaataaggcaaacgccggsggtgtaaccaatccgggtgtttctgtaccttacttccgttttctgtgggtcactttccttttcctgtccacgaatattatcgaatcatgcagcagccccc

SEQ ID NO: 17093 - DNA, 201 bp, Homo sapiens
ccaatgaaaggcagcccacttgtcaaaccttgtccaaataaggcaaacgccgggggtgtaaccaatccgggtgtttctgtaccttacttccgttttctgtrggtcactttccttttcctgtccacgaatattatcgaatcatgcagcagcccccagagtcactctgaatctattctggttgggggcggggggcactcgatt

SEQ ID NO: 17094 - DNA, 201 bp, Homo sapiens
ctgggctaacagcccaagatagagaataaggagacagtaaaaaaaggaaacttagctgggggcggtggctcatgcctgtaatcccagcactttgggaggcygaggcgggtggatcacctgaggtcagcagttcgagaccagcctggtcaacatagtgaaaccccatctctacaaaaaaaaaatacaaaaattagcccatgt

SEQ ID NO: 17095 - DNA, 201 bp, Homo sapiens
aatccgggtgtttctgtaccttacttccgttttctgtgggtcactttccttttcctgtccacgaatattatcgaatcatgcagcagcccccagagtcactstgaatctattctggttgggggcggggggcactcgattcgaggttcattgtttgctcagtgaaactcaagttaaatttaatttgtttaaagtttttctttt

SEQ ID NO: 17096 - DNA, 201 bp, Homo sapiens
tgggctaacagcccaagatagagaataaggagacagtaaaaaaaggaaacttagctgggggcggtggctcatgcctgtaatcccagcactttgggaggctkaggcgggtggatcacctgaggtcagcagttcgagaccagcctggtcaacatagtgaaaccccatctctacaaaaaaaaaatacaaaaattagcccatgtg

SEQ ID NO: 17097 - DNA, 201 bp, Homo sapiens
acagtaaaaaaaggaaacttagctgggggcggtggctcatgcctgtaatcccagcactttgggaggctgaggcgggtggatcacctgaggtcagcagttckagaccagcctggtcaacatagtgaaaccccatctctacaaaaaaaaaatacaaaaattagcccatgtggtggcacaagcctgtagttccagctacttagg

SEQ ID NO: 17098 - DNA, 201 bp, Homo sapiens
tggccggccagcgggcgggctccccagccaggccgctgcacctgtcaggtgagggggaggagaggtttggctgccagattcaactggaaaggaaccagtcycagtccagccgcaacctgggagtgggaagctggaggcagcccagacctcctggagccctgcagtcctggggcagagacagaatcaggacacagctcgagg

SEQ ID NO: 17099 - DNA, 201 bp, Homo sapiens
ctgcagtcctggggcagagacagaatcaggacacagctcgaggtcagggccagaggctggagctgagggcctagagtgagagggggcaaggcaaggggggragaggaagagaggcaggattagagagaggaggcaggccagaaagaggagagcaggagagacccaaagagaaacagaaggcagatagagagggagtgagag

SEQ ID NO: 17100 - DNA, 201 bp, Homo sapiens
gctcacctttaattgagatgctaatgagattcctgtcgcttccatccctggccggccagcgggcgggctccccagccaggccgctgcacctgtcaggtgasggggaggagaggtttggctgccagattcaactggaaaggaaccagtcccagtccagccgcaacctgggagtgggaagctggaggcagcccagacctcctg

SEQ ID NO: 17101 - DNA, 201 bp, Homo sapiens
cccagtacacgattttgttctgtttttagtctttgcatttgtttgaggacagaaactaccagctgggaagtaagatggtagcaacacctaagcctgagtcmgcccacacctgtcaccaagttcctctaactgtcacctggacacctgtgctttccctatgccctcacccgatgcctccctttgctctgtgtgcctgcctcc

SEQ ID NO: 17102 - DNA, 201 bp, Homo sapiens
acacccggcctaaatgcaattaattttttttgtgtatttgttgtgtaccctgcaaccttgttcagtttgttagttctatatttgttttgttttggtagatkacatccctcaggccctgctactctggactttcatgatggagatggtaataggaattgtattaagaaggaatgtagggatttacagtgagctgtgtttaat

SEQ ID NO: 17103 - DNA, 201 bp, Homo sapiens
gtgatgttcctgttgagaacctttacccttcaaagtacacacagcaggtgaggcccaacctgattccgtggcagccactcccagccactgccctggctggycctgcaaagctggaggggttgtgtatgtgagagagagagagggaaactggggggtggtggaaagaggatggaggctctgtgcagagaactgctgagttca

SEQ ID NO: 17104 - DNA, 201 bp, Homo sapiens
cagctctctgctggttactcacgatggccctcggtgacatcccaggtagagtgtggggaagggatgggtgggggatgtgtgtgcccatgtaatgctgtggscttctctgggtattatgtgtatgagtgtgtttgacacaaccctatccctgtaagcctgaagcatatgggagtgaccttgatgacacccccattctttcct

SEQ ID NO: 17105 - DNA, 201 bp, Homo sapiens; identical to SEQ ID NO: 3752

SEQ ID NO: 17106 - DNA, 201 bp, Homo sapiens; identical to SEQ ID NO: 3759

SEQ ID NO: 17107 - DNA, 201 bp, Homo sapiens
cacatcctccctgcaccttcagtgcctgctttccctgcctcttcctgggctccgggtctgtgtccacagtgtcctgcgtggccctcgcgctgcctctggtygcccacattcctgcaactctgtgaccacagcaggggcgattacacattcctggcctggcagccaacagtgtaaaaaagaacagaatgtcctagggccccg

SEQ ID NO: 17108 - DNA, 201 bp, Homo sapiens
cagtcattggaggacaatttgtcaggcgtgcaggagggagggatccagggccactcctactcaggagagtggcagggaggtaaacaggttaatgagccccwgtgagtgaatcaccgggagcgcagtgaatgactcctaccgaggagatcggttgatgagctagaggaactggagtgaggcagagctgcccagggctgccta

SEQ ID NO: 17109 - DNA, 201 bp, Homo sapiens
gtccgccttctcaggtccagtactcccagttcacctgccctcgggagccctccttccttcggaaaactcccggctctgactcctcctcagcccctcccccygccctgctcacctttaattgagatgctaatgagattcctgtcgcttccatccctggccggccagcgggcgggctccccagccaggccgctgcacctgtca

SEQ ID NO: 17110 - DNA, 201 bp, Homo sapiens
agggcactcagggcccagagctcagccttgaccctgacccttgctctccccaatccactccggggctcatgaaggggaacaagctggaggagcaggacccyagacctctgcagcccataccaggtctcatggaggggaacaagctggaggagcaggactctagccctccacagtccactccagggctcatgaaggggaaca

SEQ ID NO: 17111 - DNA, 201 bp, Homo sapiens
tgccatgcccaccctcttcctttccagcgctggccacatcctccctgcaccttcagtgcctgctttccctgcctcttcctgggctccgggtctgtgtccasagtgtcctgcgtggccctcgcgctgcctctggttgcccacattcctgcaactctgtgaccacagcaggggcgattacacattcctggcctggcagccaac

SEQ ID NO: 17112 - DNA, 201 bp, Homo sapiens
cttccgttttctgtgggtcactttccttttcctgtccacgaatattatcgaatcatgcagcagcccccagagtcactctgaatctattctggttgggggcrgggggcactcgattcgaggttcattgtttgctcagtgaaactcaagttaaatttaatttgtttaaagtttttcttttaacaattaaataatgtacattct

SEQ ID NO: 17113 - DNA, 201 bp, Homo sapiens
aaactcccggctctgactcctcctcagcccctccccccgccctgctcacctttaattgagatgctaatgagattcctgtcgcttccatccctggccggccrgcgggcgggctccccagccaggccgctgcacctgtcaggtgagggggaggagaggtttggctgccagattcaactggaaaggaaccagtcccagtccagc

SEQ ID NO: 17114 - DNA, 201 bp, Homo sapiens
agtgaaactcaagttaaatttaatttgtttaaagtttttcttttaacaattaaataatgtacattctaataccacagtgcctggctcataataagtgctcrataaacgctagctatgcttgccattcttttaattataaataacgagcaagtctcttagaatgccaaacacaccttcaaccagagctacattttctcctgt

SEQ ID NO: 17115 - DNA, 201 bp, Homo sapiens
gcactgttgacctgcccaggtgcctgacctttacgtgcttgggtgtgtcctgaacttttgggtttcatcggtgctctttgccaatgttgggtctggaaacyggagcaggtggtaagcgtggagaagagaggagggcagggctgagtgcttttgtataccttttatttgtattcactcagccatgccacaccttgggaacac

SEQ ID NO: 17116 - DNA, 201 bp, Homo sapiens
tgtctgacttattttgcttaatgtttctggaattcttccctgtgttttttgcacgtatcagttcctttttattgctgagtggttttgatgagcctattctrgttgaggggctgcctgatttgagcatcgttctttgctcaagtcaactctgttaaatttaattttgcctaacgttcttcttttaacaattaaataatgcac

SEQ ID NO: 17117 - DNA, 201 bp, Homo sapiens
gaagggagagtggatttccatctcctaactcttttctaggattcccgcctctgccaactctgctctctctgcacccctaggtctgtccctgatgctgcgcrcagagcagaatgacttcattcccctgctgtccacagtgactggggcccgggtaatggtgcacgggcaggatgaacctgcctttatggatgatggtggctt

SEQ ID NO: 17118 - DNA, 201 bp, Homo sapiens
ggctcactgtagcctcaaactcccaggatcaggcaattcttctgcctcagtcttctgagtagctgggactacaggtgtgcaccaccacatctggctaattkttgtattttttgtagatacaaggtttcgtcgtgttgcccaggctggtctcaaacttctgagctcaagtgatccacccacttggccttccaaaattctgga

SEQ ID NO: 17119 - DNA, 201 bp, Homo sapiens
gaaagccctgagctagggaggccgtccctgcctgtggtccccagacgtggcgggcagaccctgcattccctgggcagtctggacaccaggctgtgctcagyagggctggcaggaaaaaaagcctggactgttgagagttgacatccctctaaccctgccatggtggttggatccttctcatcccaggtgggatggggccta

SEQ ID NO: 17120 - DNA, 201 bp, Homo sapiens
tcgtgttgcccaggctggtctcaaacttctgagctcaagtgatccacccacttggccttccaaaattctggaattacaggtgtgagccaccatgccccgcrgattaccattcttttaattagcagtaatgagcaagttttctagaatgccaaacacacaccttcaacacacctttgagttgcttcaggctttttggctatt

SEQ ID NO: 17121 - DNA, 201 bp, Homo sapiens
tggcagggaggtaaacaggttaatgagcccctgtgagtgaatcaccgggagcgcagtgaatgactcctaccgaggagatcggttgatgagctagaggaacyggagtgaggcagagctgcccagggctgcctacctgctgagggtcgccaccagcagagggagaggaggaaagtggacatgcaggactctgtgctgctttct

SEQ ID NO: 17122 - DNA, 201 bp, Homo sapiens
tttatagtaaatactaaagtcaggaggaatacattttccaacttggctcttcttttctaaaattttctagctattctagattgtttgcatttccagataartcttagaagcagtatgtcaatttctttaaaaatacctgctggggccgggtgcagtgagtggctcacgcctgcaatcccagcactttaggaggctgaggct

SEQ ID NO: 17123 - DNA, 201 bp, Homo sapiens
ccaggattcaaatacaaggaatttaattctggagtctgtgctctttttttttcttttggagacggagtttcactcttactggccaggctggagtgcaatgkcgcaatctcagctcatgacaacctccacctcccaggttcaagtgattctcctgcctcagcttcctgagtagctgggattacaggcatgtgccgccgtgcc

SEQ ID NO: 17124 - DNA, 201 bp, Homo sapiens
agtgaccatctgcaccctcaatccctacaggtcggttagtccctctgccccttccctggtgcctgcgcctggaagggtggtccagggtgctgaggtgctcrctgggcaggcagagcctcagacctgagggtgggaactgacacccctgtcccaggtagagctcactgctggcaaaatgaggagcctccagcttactggact

SEQ ID NO: 17125 - DNA, 201 bp, Homo sapiens
aatcacctcaggaggccgaggctgcagtgagccgagatcacgccactgcattccagcctgagccacagagtgagacacagtctcaaaggaaaaaaaaacartaataatgtttgtatatatttatgggccagactttttacaaatgaatctaaatcaaatgattctgctttaaattatttaattctcacaacacaccttgga

SEQ ID NO: 17126 - DNA, 201 bp, Homo sapiens
gatccacccacttggccttccaaaattctggaattacaggtgtgagccaccatgccccgcagattaccattcttttaattagcagtaatgagcaagttttytagaatgccaaacacacaccttcaacacacctttgagttgcttcaggctttttggctattataaataaaatggctatgaacattcatgtacaaatctttt

SEQ ID NO: 17127 - DNA, 201 bp, Homo sapiens
tcctttaaccctgctcccctcctccccttcattcattcattcattcattcattcattcattcctcactcaacaactatttattaatcatctcctctatctsctagatgacaggatctatgcaactaacccagagatgacacagagatgaatgagatgtggctcctgtcatcaaggagctcatgattcaatggggaactaac

SEQ ID NO: 17128 - DNA, 201 bp, Homo sapiens
agacggaaatgcaattaatttttttttttttttgagacggagtctcgctctgtctcccaggctggagtgtagtggcgcgatctcggctcactgcaagctcygtctcccgggttcacaccattctcctgcctcagcctcccgagtagctgggactacaggcgcccgccaccaagcccggctaattttttgtatttttttttt

SEQ ID NO: 17129 - DNA, 201 bp, Homo sapiens
cgggcgtggtggcacgcacctgtagtcccagctactagggaggctgaggcaggagaatggcgtgaacccggaggcggagcttgtgagccgagatcacggcmctgcactccagcctgggcaattgagactccgtctcaaaaaaaaaaatgtaggtctgttcataaagtgcctactacatacggttgttctagggattatttg

SEQ ID NO: 17130 - DNA, 201 bp, Homo sapiens
aaccagaaccccaccctttatctctggccagcctcttctccctcttctctttagtcctcctctgctgctcactggccgaagtcccctttccgtctttgccyggctcccgtcgctagctccaagatggcagggtagcagaacacagatcctctctgtgccgtgtggcacatgtgctgtgctacaacccacacagcctccctg

SEQ ID NO: 17131 - DNA, 201 bp, Homo sapiens
cagcactgccgctgccacactgccctgagcccaaatgggggagtgagaggccatagctgtctggcatgggcctctccaccgtgcctgacctgctgctgccrctggtgagaccagggacaaagggaagagtgggctggtgggcgaggcaccttccggctggcgtgggccctctccgggagggggccgagcctctcctgcccg

SEQ ID NO: 17132 - DNA, 201 bp, Homo sapiens
ccaaaggctggaagcatggatcttggtcttttttgtttttcttttttttgagatggagttttgctcttgttgctcaggctggagtgcaatggcgcgatctyggctgtctgcaaccttcacctcctggggtcaagcaattctcctgcctcagcctcctgagtagctgggattacagtcatgcgccaccacgcctggctaatt

SEQ ID NO: 17133 - DNA, 201 bp, Homo sapiens
agtggaatatcccggatcacctagttccaatctcctcattttacagaatcatcctacattttacagaggaggagaataagcttagaaacaatgacctgctygagaccgtacaaccagaaccccaccctttatctctggccagcctcttctccctcttctctttagtcctcctctgctgctcactggccgaagtcccctttc

SEQ ID NO: 17134 - DNA, 201 bp, Homo sapiens
ccctccctttgctctgtgtgcctgcctccccctcaacagaaagtccatggttcatctttatcttggcacttaggcgcttaggtcagctcagagcctcattkctcgcctgggttgttatacccaccactccaccctactgcgttcttttgcctccaaatcctcccttccttctgcaactacaggaacctttgtacttcaacc

SEQ ID NO: 17135 - DNA, 201 bp, Homo sapiens
accccaccctttatctctggccagcctcttctccctcttctctttagtcctcctctgctgctcactggccgaagtcccctttccgtctttgcctggctccygtcgctagctccaagatggcagggtagcagaacacagatcctctctgtgccgtgtggcacatgtgctgtgctacaacccacacagcctccctgttctgga

SEQ ID NO: 17136 - DNA, 201 bp, Homo sapiens
ccaatctcctcattttacagaatcatcctacattttacagaggaggagaataagcttagaaacaatgacctgcttgagaccgtacaaccagaaccccaccstttatctctggccagcctcttctccctcttctctttagtcctcctctgctgctcactggccgaagtcccctttccgtctttgcctggctcccgtcgctag

SEQ ID NO: 17137 - DNA, 201 bp, Homo sapiens
agccctgcagtcctggggcagagacagaatcaggacacagctcgaggtcagggccagaggctggagctgagggcctagagtgagagggggcaaggcaaggkggggagaggaagagaggcaggattagagagaggaggcaggccagaaagaggagagcaggagagacccaaagagaaacagaaggcagatagagagggagtg

SEQ ID NO: 17138 - DNA, 201 bp, Homo sapiens
atgttatttaatattgctgttgtatttctggttttccaattttctgttgccagcatgtagaaatgcaattaatttctttttgagacggaaatgcaattaatttttttttttttttgagacggagtctcgctctgtctcccaggctggagtgtagtggcgcgatctcggctcactgcaagctctgtctcccgggttcacacc

SEQ ID NO: 17139 - DNA, 201 bp, Homo sapiens
ttttccgaagtgacatcaccattgtacatccctagcagcagtataagaggttttcagtttctccacatcctgccagttcttgttattgtctttttaaatttttatttatttatttatttatttatttattatttattttgagaagactctcactctgttgcccaggctggagtgcagtggcacgatcttggcaaactacaa

SEQ ID NO: 17140 - DNA, 201 bp, Homo sapiens
tccagaaccctctgtcccatcgtcaatgtacctctcctctcacagatggtcaccctcctgtccaacctgggcagccagtggagcctgtggttcggctcctyggtgttgtctgtggtggagatggctgagctcgtctttgacctgctggtcatcatgttcctcatgctgctccgaaggttccgaagccgatactggtctcca

SEQ ID NO: 17141 - DNA, 201 bp, Homo sapiens
gagccctgcagtcctggggcagagacagaatcaggacacagctcgaggtcagggccagaggctggagctgagggcctagagtgagagggggcaaggcaagrgggggagaggaagagaggcaggattagagagaggaggcaggccagaaagaggagagcaggagagacccaaagagaaacagaaggcagatagagagggagt

SEQ ID NO: 17142 - DNA, 201 bp, Homo sapiens
attactctcacttccaccacccgatgtatggaaactgctatactttcaatgacaagaacaactccaacctctggatgtcttccatgcctggaatcaacaayggtgagaagctccctgcttgctccatggcgccctctgcttcagccactcacctgtacttaccttgagctcacctcctagagctgctgggaggggtcctgc

SEQ ID NO: 17143 - DNA, 201 bp, Homo sapiens
tttccgaagtgacatcaccattgtacatccctagcagcagtataagaggttttcagtttctccacatcctgccagttcttgttattgtctttttaaatttttatttatttatttatttatttatttattatttattttgagaagactctcactctgttgcccaggctggagtgcagtggcacgatcttggcaaactacaac

SEQ ID NO: 17144 - DNA, 201 bp, Homo sapiens
ttccgaagtgacatcaccattgtacatccctagcagcagtataagaggttttcagtttctccacatcctgccagttcttgttattgtctttttaaatttttatttatttatttatttatttatttattatttattttgagaagactctcactctgttgcccaggctggagtgcagtggcacgatcttggcaaactacaacc

SEQ ID NO: 17145 - DNA, 201 bp, Homo sapiens
ccctgggtcagcctcacgccctgcatgggcagggcccaggaaatgcttgttgactaaaaaaatgccagtgccagcaggccagggggaagcactggctttgkgcccacaccctgccccagagagcgccctacgaactcctgctgctccctgcactgctggatctgagggaagtggcctcacaggatgccttgggaagactgg

SEQ ID NO: 17146 - DNA, 201 bp, Homo sapiens
tccgaagtgacatcaccattgtacatccctagcagcagtataagaggttttcagtttctccacatcctgccagttcttgttattgtctttttaaatttttatttatttatttatttatttatttattatttattttgagaagactctcactctgttgcccaggctggagtgcagtggcacgatcttggcaaactacaacct

SEQ ID NO: 17147 - DNA, 201 bp, Homo sapiens
ttcatttagcataacgttttcaaagcttatccatgttgtagcatggatcagaacttcatttttatggctgaatactatgatattgtgtagatacaccaccttttttttttttttttttttgagacaggttctcactctgttacccaggctggagtacagtggcacaatcagacctcactgtagctttgatttcctgggctg

SEQ ID NO: 17148 - DNA, 201 bp, Homo sapiens
cattctttcctaggaatgggtcttccagatgctatcgcgacagaacaattacaccgtcaacaacaagaggtcagtcctgccctggtcccagccacaagaarggaatctttgggagggaaaatagacctaagaagagggatcgatatggttgattagaggaaggtccaggaaattcatcctctaccatttcttcccaccctc

SEQ ID NO: 17149 - DNA, 201 bp, Homo sapiens; identical to SEQ ID NO: 3794

SEQ ID NO: 17150 - DNA, 201 bp, Homo sapiens
accatcctgcacatgacctgctgccgtcagcgcctggaggagatcacgggccatctgcacaaagctaagcagctgggcctgaagaacatcatggcgctgcrgggaggtgtggagccagcactcccctacactctgggttctggctttcccggaggccacttggtagcctgaacttggttcctgaaatggtcctttacttct

SEQ ID NO: 17151 - DNA, 201 bp, Homo sapiens
gaggagctgaccagtgaagaaagtgtctttgaagtctttgttctttacctctcgggagaaccaaaccggaatggtcacaaagtgagtgatgctggagtggrgaccctggttcatcccctgcccctggcctgaccccagctgcaggccaggctgcggggctgtgacttccccatcctgtgccctcccctccatgctgtggac

SEQ ID NO: 17152 - DNA, 201 bp, Homo sapiens
aggaagcactccctgaaaggcagctgctgttactatcctgagttgacacctttctcccagggctgctggagttaacattatgttctgatctaaggcccacrggccctggagcagaaagacctgagtttaaggaccagctctactgtttactgtcagagtagccaacgtgctcaacttccctgaacccactttcctcacgtg

SEQ ID NO: 17153 - DNA, 201 bp, Homo sapiens
cctcccaaagtgctgggattacaggtgtgttttttgtttttttaagagatggagtctcgctatgttgcccaggctggccttgaactcctgggctcaggcawtccttctgcctcagccttcccagtagctgggtcactgtgatgatttgaattgaattctgtgatgtgtaagaagagcagcctgcaaggcaagcacagatgg

SEQ ID NO: 17154 - DNA, 201 bp, Homo sapiens
gccagcagtggcagtgagagctccaaagatagttcgagatgttccaccccgggcctggaccccgagcggcatgagagactccgggagaagatgaggcggcrattggaatctggtgacaagtggttctccctggaattcttccctcctcgaactgctgagggagctgtcaatctcatctcaaggtaaactcatgcaaggtta

SEQ ID NO: 17155 - DNA, 201 bp, Homo sapiens
cagagcaaagcagcttggccttccgcctggctcagagtcctgccctgggcttgggctgatgaaaccagcactccatgtagtttcatgaaggcctatggtcrtcctgcttgcctgaccgagcaaggcggctagtaagtttagtcattgaggaaaggggtcagagagttcacagagccagtaaggagcctatgggacatctga

SEQ ID NO: 17156 - DNA, 201 bp, Homo sapiens
actactacctcttctacctgaagagcaagtcccccaaggaggagctgctgaagatgtggggggaggagctgaccagtgaagaaagtgtctttgaagtcttygttctttacctctcgggagaaccaaaccggaatggtcacaaagtgagtgatgctggagtggggaccctggttcatcccctgcccctggcctgaccccagc

SEQ ID NO: 17157 - DNA, 201 bp, Homo sapiens
gcctttggggagctgaaggactactacctcttctacctgaagagcaagtcccccaaggaggagctgctgaagatgtggggggaggagctgaccagtgaagmaagtgtctttgaagtctttgttctttacctctcgggagaaccaaaccggaatggtcacaaagtgagtgatgctggagtggggaccctggttcatcccctg

SEQ ID NO: 17158 - DNA, 201 bp, Homo sapiens
gcaattcctcttcccctgcctttggggagctgaaggactactacctcttctacctgaagagcaagtcccccaaggaggagctgctgaagatgtggggggakgagctgaccagtgaagaaagtgtctttgaagtctttgttctttacctctcgggagaaccaaaccggaatggtcacaaagtgagtgatgctggagtgggga

SEQ ID NO: 17159 - DNA, 201 bp, Homo sapiens; identical to SEQ ID NO: 3767

SEQ ID NO: 17160 - DNA, 201 bp, Homo sapiens
ccagagaggagcacctgaaccccatgggcttggacttcctggggccccgctgggatttcttcgctgctctagctggcaggacacatcccggcctcttcttccacccattcccccatgtggctgaagacattccaacaatggggtgggcccataatagttagccctcagtcagttcccggagcacagccctgggagggggct

SEQ ID NO: 17161 - DNA, 201 bp, Homo sapiens
gccagagaggagcacctgaaccccatgggcttggacttcctggggccccgctgggatttcttcgctgctctagctggcaggacacatcccggcctcttcttccacccattcccccatgtggctgaagacattccaacaatggggtgggcccataatagttagccctcagtcagttcccggagcacagccctgggagggggc

SEQ ID NO: 17162 - DNA, 201 bp, Homo sapiens
agccagagaggagcacctgaaccccatgggcttggacttcctggggccccgctgggatttcttcgctgctctagctggcaggacacatcccggcctcttcttccacccattcccccatgtggctgaagacattccaacaatggggtgggcccataatagttagccctcagtcagttcccggagcacagccctgggaggggg

SEQ ID NO: 17163 - DNA, 201 bp, Homo sapiens
ctattggcaggttaccccaaaggccaccccgaagcagggagctttgaggctgacctgaagcacttgaaggagaaggtgtctgcgggagccgatttcatcaycacgcagcttttctttgaggctgacacattcttccgctttgtgaaggcatgcaccgacatgggcatcacttgccccatcgtccccgggatctttcccatc

SEQ ID NO: 17164 - DNA, 201 bp, Homo sapiens
tctgggcctccagaccaaagagttacatctaccgtacccaggagtgggacgagttccctaacggccgctggtgagggcctgcagaccttccttgcaaatayatctttgttcttgggagcgggagggcagaagaagtttgcatgcttgtggttgacctgggaggagtcaggggcagaatttacaggaatggcctcctgggca

SEQ ID NO: 17165 - DNA, 201 bp, Homo sapiens
ctcaggggtgctcccctgcttccggctccctctagccaatcccttgtctcaattctctgtccccatcctcacccaggcgtcccctaccctgggctctcagygcccaccccaagcgccgagaggaagatgtacgtcccatcttctgggcctccagaccaaagagttacatctaccgtacccaggagtgggacgagttcccta

SEQ ID NO: 17166 - DNA, 201 bp, Homo sapiens
ctcagagggcatcagatggaagaactcagcctcaggggtgctcccctgcttccggctccctctagccaatcccttgtctcaattctctgtccccatcctcrcccaggcgtcccctaccctgggctctcagcgcccaccccaagcgccgagaggaagatgtacgtcccatcttctgggcctccagaccaaagagttacatct

SEQ ID NO: 17167 - DNA, 201 bp, Homo sapiens
ggccaaggtgggaggattgcttgagcccagaagttccagacaaacctggacaagatagcaagaccccatctctaaaaaataaataattaattaaaaaaaawttttttaattagccagatgtggtggcttgcatctgtagtccaagctactcaggagactgaagtgggagatcacttgtgcccgggagttcaaggctacagt

SEQ ID NO: 17168 - DNA, 201 bp, Homo sapiens
agagatccccagaggagggtccaagagcagccccggctgcagtgctggctccccacggtggtacagatggatgtctgtgccatggctagctgggcacatcraaggctccagtctcagagggcatcagatggaagaactcagcctcaggggtgctcccctgcttccggctccctctagccaatcccttgtctcaattctctg

SEQ ID NO: 17169 - DNA, 201 bp, Homo sapiens
ctgctgaccctctttctaactgttcctacagcgaggctgtgcttgccacagttaggattcccctaactctcaatcatgatgtcttaactcacctgagatartaaacaggcaagcgctgtgaaaagtctgaagtgctgctctcacacaaaatgatagcgctgttgttgtgtcttacctctgtaatagtgattataacggcac

SEQ ID NO: 17170 - DNA, 201 bp, Homo sapiens
tgactgtcatccctattggcaggttaccccaaaggccaccccgaagcagggagctttgaggctgacctgaagcacttgaaggagaaggtgtctgcgggagycgatttcatcatcacgcagcttttctttgaggctgacacattcttccgctttgtgaaggcatgcaccgacatgggcatcacttgccccatcgtccccggg

SEQ ID NO: 17171 - DNA, 201 bp, Homo sapiens
tggagagccctgttaatcttgcctctgtgtgtgtgtgcatgtgtgcgtgtgtgcgggggtatgtgtgtgtaggacgaggcctttgccctgtggattgagcrgtggggaaagctgtatgaggaggagtccccgtcccgcaccatcatccagtacatccacgacaactacttcctggtcaacctggtggacaatgacttccca

SEQ ID NO: 17172 - DNA, 201 bp, Homo sapiens
cgagagatcatccagcccaccgtagtggatcccgtcagcttcatgttctggaaggtaaaggagccgggggcaagcttgccccgcccacctggaaaaccgtsgggagggattgggaccaagtcccaagcgtgtgctgaaggccacactggacccagccttcagggcacacccagctctgactcacccatgtcactgctgacg

SEQ ID NO: 17173 - DNA, 201 bp, Homo sapiens
tggcccaggtcttacccccaccccacatcccctcagggtgaaaacatcaccaatgcccctgaactgcagccgaatgctgtcacttggggcatcttccctgrgcgagagatcatccagcccaccgtagtggatcccgtcagcttcatgttctggaaggtaaaggagccgggggcaagcttgccccgcccacctggaaaaccg

SEQ ID NO: 17174 - DNA, 201 bp, Homo sapiens
tggccagcatcaagttctaacccacaacacggtctttttggagtagcatgaattcaggagaaatctggctgcatagtcaagccctcaccccttccatcctrtgcacgaactgtttcaagtaacagatgttccaggcagagccagccagagtgagctgttccttctctggagggtgatctggtatccctgaacgcctgttgg

SEQ ID NO: 17175 - DNA, 201 bp, Homo sapiens
tgctcttaaggagctcccagcctagagtgagggaggcagatcaatgtgtgaccaccagccagtgtaagtgggaaaatcaagttcaggagaggatgctgtcrggtccagaggagggatatctcacctgggaggccagggaaggcttctcagagggtcatctgtgggaatcactgaggacaaagaggagttggccaacaggag

SEQ ID NO: 17176 - DNA, 201 bp, Homo sapiens
ttaaccagactgccagatgaccctatgccctctgttggcctgtctgtgccctggtggctctgattacttgtttctgttttttgtttttgttttttttttttgagatggagttttgcttttgtcgcccaggctggagtgctatggcacaatcttggttcactgcaacctctgccttccgggttcaagcgattctcctgcctc

SEQ ID NO: 17177 - DNA, 201 bp, Homo sapiens
ctgagcccaggccgttccccttggcttcctccgtccacccaggctgcactgcagtgatggcgcgggaggcaccagctctgtggcctgtgtccagcagctgygggtctgaaggaatagccagagaggagcacctgaaccccatgggcttggacttcctggggccccgctgggatttcttcgctgctctagctggcaggacac

SEQ ID NO: 17178 - DNA, 201 bp, Homo sapiens
accacacacccattcactactgtgtgtttgcccattgctgtgcaagtgttttgtttgtttttaagtgtttgtcttattttcttaaccagactgccagatgrccctatgccctctgttggcctgtctgtgccctggtggctctgattacttgtttctgttttttgtttttgttttttttttttgagatggagttttgctttt

SEQ ID NO: 17179 - DNA, 201 bp, Homo sapiens
tagccctcagacctgtccagactgagaaactcacgtccccactcccctcaccctttgcttatggacgtgccaacgccacagttcattattccgcccacatkgctgccagtagtcctgataccttaggtgtctgcgaaagggcgtctggcagggctggggttggtgacaggcacctgtctctcccacaggcctacttagagt

SEQ ID NO: 17180 - DNA, 201 bp, Homo sapiens
gatgctgccatccgcaactatggcatcgagctggccgtgagcctgtgccaggagcttctggccagtggcttggtgccaggcctccacttctacaccctcarccgcgagatggctaccacagaggtgctgaagcgcctggggatgtggactgaggaccccaggtgagggcagtggcccagagatccccagaggagggtccaa

SEQ ID NO: 17181 - DNA, 201 bp, Homo sapiens
aggagttgagtacagtgaggagggtggaggaaggtgctgagcttagccttgtgccctgcccccatctccccaggcctccagcctctcccggctgcctgccrcccaaagagaaatcacaggggcggggcaggaatgcaaagtgttttctcagaacagctgaaacattccgaagagggaatggatggggagaatggtcaatac

SEQ ID NO: 17182 - DNA, 201 bp, Homo sapiens
tgcccctgaactgcagccgaatgctgtcacttggggcatcttccctgggcgagagatcatccagcccaccgtagtggatcccgtcagcttcatgttctggwaggtaaaggagccgggggcaagcttgccccgcccacctggaaaaccgtggggagggattgggaccaagtcccaagcgtgtgctgaaggccacactggacc

SEQ ID NO: 17183 - DNA, 201 bp, Homo sapiens
aaggctagttcctttcaattccatttaaaaaacaaaaaccagcaggtgtggtggctcatggcgtaatgggcctgcccaatgctttgggaggccaaggcagrtagatcgcttgagcccaggagtttgagacaagccctggcaacatagtgagatcccatttctacaaaaaaaaaaaaaaaattagccgggtgtggtggcaca

SEQ ID NO: 17184 - DNA, 201 bp, Homo sapiens
cctcacccaggcgtcccctaccctgggctctcagcgcccaccccaagcgccgagaggaagatgtacgtcccatcttctgggcctccagaccaaagagttasatctaccgtacccaggagtgggacgagttccctaacggccgctggtgagggcctgcagaccttccttgcaaatatatctttgttcttgggagcgggaggg

SEQ ID NO: 17185 - DNA, 201 bp, Homo sapiens
agtgccagcagtggcagtgagagctccaaagatagttcgagatgttccaccccgggcctggaccccgagcggcatgagagactccgggagaagatgaggcsgcgattggaatctggtgacaagtggttctccctggaattcttccctcctcgaactgctgagggagctgtcaatctcatctcaaggtaaactcatgcaagg

SEQ ID NO: 17186 - DNA, 201 bp, Homo sapiens
aacgatgctgccatccgcaactatggcatcgagctggccgtgagcctgtgccaggagcttctggccagtggcttggtgccaggcctccacttctacacccycaaccgcgagatggctaccacagaggtgctgaagcgcctggggatgtggactgaggaccccaggtgagggcagtggcccagagatccccagaggagggtc

SEQ ID NO: 17187 - DNA, 201 bp, Homo sapiens
tgtgaaggtaggccaggccccagggttcccacagagtaccaggcccttcgttgagcaaacacccagcacctagcctgggctaggcattgtgcaagacagasagatacaggcagaactggggccctgctcttaaggagctcccagcctagagtgagggaggcagatcaatgtgtgaccaccagccagtgtaagtgggaaaat

SEQ ID NO: 17188 - DNA, 201 bp, Homo sapiens
gtggactgaggaccccaggtgagggcagtggcccagagatccccagaggagggtccaagagcagccccggctgcagtgctggctccccacggtggtacagrtggatgtctgtgccatggctagctgggcacatcgaaggctccagtctcagagggcatcagatggaagaactcagcctcaggggtgctcccctgcttccgg

SEQ ID NO: 17189 - DNA, 201 bp, Homo sapiens
gtgtgctcctagaatatgatcggactttcgtgggtccctctgcctgacactgtggttggcatggatgatggaagggggagaagtatttagggtgggagacrggctggccagcagccgccacagcccctcatgtcttggacagggctaccactcccttcggcagcttgtgaagctgtccaagctggaggtgccacaggagat

SEQ ID NO: 17190 - DNA, 201 bp, Homo sapiens
ccctggcggctgagaccagcctgctgaaggaggagctgctgcgggtgaaccgccagggcatcctcaccatcaactcacagcccaacatcaacgggaagccrtcctccgaccccatcgtgggctggggccccagcgggggctatgtcttccagaaggtgtggtagggaggcacggggtgcccccctctcttgaccggcaccc

SEQ ID NO: 17191 - DNA, 201 bp, Homo sapiens
tgctgccatccgcaactatggcatcgagctggccgtgagcctgtgccaggagcttctggccagtggcttggtgccaggcctccacttctacaccctcaacygcgagatggctaccacagaggtgctgaagcgcctggggatgtggactgaggaccccaggtgagggcagtggcccagagatccccagaggagggtccaaga

SEQ ID NO: 17192 - DNA, 201 bp, Homo sapiens
tttccctcctgctgtcttaccaagtgctagaaagagacgaaccaaacctaaataatatgaagtttctgccttccagggactcgcagtcctgggtgtcgggrctaggtagagggaacagaaagggtctctggaggttgggtgagacccagtgactatgacctccaccaaccctgcagacccaataggtgaccagtgggaaga

SEQ ID NO: 17193 - DNA, 201 bp, Homo sapiens; identical to SEQ ID NO: 3788

SEQ ID NO: 17194 - DNA, 201 bp, Homo sapiens
ccctgcttccggctccctctagccaatcccttgtctcaattctctgtccccatcctcacccaggcgtcccctaccctgggctctcagcgcccaccccaagygccgagaggaagatgtacgtcccatcttctgggcctccagaccaaagagttacatctaccgtacccaggagtgggacgagttccctaacggccgctggtg

SEQ ID NO: 17195 - DNA, 201 bp, Homo sapiens
ttttttccctcctgctgtcttaccaagtgctagaaagagacgaaccaaacctaaataatatgaagtttctgccttccagggactcgcagtcctgggtgtcrgggctaggtagagggaacagaaagggtctctggaggttgggtgagacccagtgactatgacctccaccaaccctgcagacccaataggtgaccagtggga

SEQ ID NO: 17196 - DNA, 201 bp, Homo sapiens
actggtgggctgcttttttccctcctgctgtcttaccaagtgctagaaagagacgaaccaaacctaaataatatgaagtttctgccttccagggactcgcrgtcctgggtgtcggggctaggtagagggaacagaaagggtctctggaggttgggtgagacccagtgactatgacctccaccaaccctgcagacccaatag

SEQ ID NO: 17197 - DNA, 201 bp, Homo sapiens
caagttcaggagaggatgctgtcgggtccagaggagggatatctcacctgggaggccagggaaggcttctcagagggtcatctgtgggaatcactgaggasaaagaggagttggccaacaggagagaagggtattcctgggacagggcagaggacaggcagaggcagtgagctgcaccatctggggaaaccgggaacatga

SEQ ID NO: 17198 - DNA, 201 bp, Homo sapiens
agacctcctccatgatgatcgccagcaccgccgtgaactactgtggcctggagaccatcctgcacatgacctgctgccgtcagcgcctggaggagatcacrggccatctgcacaaagctaagcagctgggcctgaagaacatcatggcgctgcggggaggtgtggagccagcactcccctacactctgggttctggctttc

SEQ ID NO: 17199 - DNA, 201 bp, Homo sapiens
tttgagtgaggcggcccggacagccatagctgaggagcatggagccactgggagggggcagtgtcaccttttttggccttcttcctgtgtggaaatacagygcctccggcttgaacctgccactcaggtgtcttgatgtgtcgggggtgtggctgcctgccccctgatgctccctgccccaccctgtgcagtaggaaccca

SEQ ID NO: 17200 - DNA, 201 bp, Homo sapiens; identical to SEQ ID NO: 3791

SEQ ID NO: 17201 - DNA, 201 bp, Homo sapiens
ccgggcctggaccccgagcggcatgagagactccgggagaagatgaggcggcgattggaatctggtgacaagtggttctccctggaattcttccctcctcraactgctgagggagctgtcaatctcatctcaaggtaaactcatgcaaggttaaggtgggaggcgggagtggtggtgcctggggagcaaactgtcagccct

SEQ ID NO: 17202 - DNA, 201 bp, Homo sapiens
cgcagggagagtggaggccgggagtggaggcgcaggcagagggtattgagcccagacagcctcattgagtcaaggctgtccaggcagtgggactccagttrttcttggcccaggtcttacccccaccccacatcccctcagggtgaaaacatcaccaatgcccctgaactgcagccgaatgctgtcacttggggcatcttc

SEQ ID NO: 17203 - DNA, 201 bp, Homo sapiens
cgtcagcttcatgttctggaaggtaaaggagccgggggcaagcttgccccgcccacctggaaaaccgtggggagggattgggaccaagtcccaagcgtgtrctgaaggccacactggacccagccttcagggcacacccagctctgactcacccatgtcactgctgacgcagggtgtttatttctgggcaggggtgggaag

SEQ ID NO: 17204 - DNA, 201 bp, Homo sapiens
tggggagggattgggaccaagtcccaagcgtgtgctgaaggccacactggacccagccttcagggcacacccagctctgactcacccatgtcactgctgaygcagggtgtttatttctgggcaggggtgggaagtgatactggcagtgggccttgttctattccgggaaatgtcctgttgagcagagcccttggagagccc

SEQ ID NO: 17205 - DNA, 201 bp, Homo sapiens
agtgactatgacctccaccaaccctgcagacccaataggtgaccagtgggaagaggaggagggaggcttcaactacgcagtggacctggtgaagcacatcygaagtgagtttggtgactactttgacatctgtgtggcaggtgagtggctggatcatcctggtggcggggatggagctagggaggctgagatgcccagaga

SEQ ID NO: 17206 - DNA, 201 bp, Homo sapiens
ttagtgcccgcctaggagttgagtacagtgaggagggtggaggaaggtgctgagcttagccttgtgccctgcccccatctccccaggcctccagcctctcmcggctgcctgccacccaaagagaaatcacaggggcggggcaggaatgcaaagtgttttctcagaacagctgaaacattccgaagagggaatggatgggga

SEQ ID NO: 17207 - DNA, 201 bp, Homo sapiens
gaaatgtcctgttgagcagagcccttggagagccctgttaatcttgcctctgtgtgtgtgtgcatgtgtgcgtgtgtgcgggggtatgtgtgtgtaggacraggcctttgccctgtggattgagcggtggggaaagctgtatgaggaggagtccccgtcccgcaccatcatccagtacatccacgacaactacttcctggt

SEQ ID NO: 17208 - DNA, 201 bp, Homo sapiens
tgcttccggctccctctagccaatcccttgtctcaattctctgtccccatcctcacccaggcgtcccctaccctgggctctcagcgcccaccccaagcgcygagaggaagatgtacgtcccatcttctgggcctccagaccaaagagttacatctaccgtacccaggagtgggacgagttccctaacggccgctggtgagg

SEQ ID NO: 17209 - DNA, 201 bp, Homo sapiens
tcactgaggacaaagaggagttggccaacaggagagaagggtattcctgggacagggcagaggacaggcagaggcagtgagctgcaccatctggggaaacsgggaacatgagcaggaggaggcgggagtgttaagcaggggccaggcccgcagagatcatggttgtcctgctggaatttgagttttccctcaatgcaaggg

SEQ ID NO: 17210 - DNA, 201 bp, Homo sapiens; identical to SEQ ID NO: 3770

SEQ ID NO: 17211 - DNA, 201 bp, Homo sapiens
cagatggggcagcttttgttctgagaaattcgtgcccttactgaacttgggtctggctatttttggaacatggccagcatcaagttctaacccacaacackgtctttttggagtagcatgaattcaggagaaatctggctgcatagtcaagccctcaccccttccatcctgtgcacgaactgtttcaagtaacagatgttc

SEQ ID NO: 17212 - DNA, 201 bp, Homo sapiens
caccccaagcgccgagaggaagatgtacgtcccatcttctgggcctccagaccaaagagttacatctaccgtacccaggagtgggacgagttccctaacgrccgctggtgagggcctgcagaccttccttgcaaatatatctttgttcttgggagcgggagggcagaagaagtttgcatgcttgtggttgacctgggagga

SEQ ID NO: 17213 - DNA, 201 bp, Homo sapiens
ttggcaggttaccccaaaggccaccccgaagcagggagctttgaggctgacctgaagcacttgaaggagaaggtgtctgcgggagccgatttcatcatcaygcagcttttctttgaggctgacacattcttccgctttgtgaaggcatgcaccgacatgggcatcacttgccccatcgtccccgggatctttcccatccag

SEQ ID NO: 17214 - DNA, 201 bp, Homo sapiens
aagcagggagctttgaggctgacctgaagcacttgaaggagaaggtgtctgcgggagccgatttcatcatcacgcagcttttctttgaggctgacacattyttccgctttgtgaaggcatgcaccgacatgggcatcacttgccccatcgtccccgggatctttcccatccaggtgaggggcccaggagagcccataagct

SEQ ID NO: 17215 - DNA, 201 bp, Homo sapiens
tagcgctgttgttgtgtcttacctctgtaatagtgattataacggcacctcacatatactgagtattcggtttgtacaccaggcactgttctaagttctgtggaaccagctgccgtcatattctcctagtgttatggttttttgttgttgttgttgctttttttttttgagacagagtctcattctgtggcccaggctgga

SEQ ID NO: 17216 - DNA, 201 bp, Homo sapiens
atagcgctgttgttgtgtcttacctctgtaatagtgattataacggcacctcacatatactgagtattcggtttgtacaccaggcactgttctaagttctgtggaaccagctgccgtcatattctcctagtgttatggttttttgttgttgttgttgctttttttttttgagacagagtctcattctgtggcccaggctgg

SEQ ID NO: 17217 - DNA, 201 bp, Homo sapiens
gatagcgctgttgttgtgtcttacctctgtaatagtgattataacggcacctcacatatactgagtattcggtttgtacaccaggcactgttctaagttctgtggaaccagctgccgtcatattctcctagtgttatggttttttgttgttgttgttgctttttttttttgagacagagtctcattctgtggcccaggctg

SEQ ID NO: 17218 - DNA, 201 bp, Homo sapiens
tgatagcgctgttgttgtgtcttacctctgtaatagtgattataacggcacctcacatatactgagtattcggtttgtacaccaggcactgttctaagttctgtggaaccagctgccgtcatattctcctagtgttatggttttttgttgttgttgttgctttttttttttgagacagagtctcattctgtggcccaggct

SEQ ID NO: 17219 - DNA, 201 bp, Homo sapiens
gcccaggtcttacccccaccccacatcccctcagggtgaaaacatcaccaatgcccctgaactgcagccgaatgctgtcacttggggcatcttccctgggygagagatcatccagcccaccgtagtggatcccgtcagcttcatgttctggaaggtaaaggagccgggggcaagcttgccccgcccacctggaaaaccgtg

SEQ ID NO: 17220 - DNA, 201 bp, Homo sapiens
atgatagcgctgttgttgtgtcttacctctgtaatagtgattataacggcacctcacatatactgagtattcggtttgtacaccaggcactgttctaagttctgtggaaccagctgccgtcatattctcctagtgttatggttttttgttgttgttgttgctttttttttttgagacagagtctcattctgtggcccaggc

SEQ ID NO: 17221 - DNA, 201 bp, Homo sapiens
gcccccatcggtgactcagtgacctggtgactggattctcggccacctgggcgccgagacggcttccggctcctgccttttaaacctgcctccccggcgakcacctggagaagagcgctgggcccggggcactgcggtccctggcgcccactgcgtcccgctgcgcacgggggtccgccgggacctttctgggagtcgtag

SEQ ID NO: 17222 - DNA, 201 bp, Homo sapiens
aaggagctcccagcctagagtgagggaggcagatcaatgtgtgaccaccagccagtgtaagtgggaaaatcaagttcaggagaggatgctgtcgggtccaraggagggatatctcacctgggaggccagggaaggcttctcagagggtcatctgtgggaatcactgaggacaaagaggagttggccaacaggagagaaggg

SEQ ID NO: 17223 - DNA, 201 bp, Homo sapiens
gttccccttggcttcctccgtccacccaggctgcactgcagtgatggcgcgggaggcaccagctctgtggcctgtgtccagcagctgcgggtctgaaggartagccagagaggagcacctgaaccccatgggcttggacttcctggggccccgctgggatttcttcgctgctctagctggcaggacacatcccggcctctt

SEQ ID NO: 17224 - DNA, 201 bp, Homo sapiens
gagaagatgaggcggcgattggaatctggtgacaagtggttctccctggaattcttccctcctcgaactgctgagggagctgtcaatctcatctcaaggtraactcatgcaaggttaaggtgggaggcgggagtggtggtgcctggggagcaaactgtcagccctgaggctgggctgccctttaacccggcagaaaaaagc

SEQ ID NO: 17225 - DNA, 201 bp, Homo sapiens
ggggaggtgtggagccagcactcccctacactctgggttctggctttcccggaggccacttggtagcctgaacttggttcctgaaatggtcctttacttcytcctgggccccacgctgaggatccgcaggatcccatccccgccagtagtgtcagtaggcattgtgggtagtgagtcatcctgggcaccacacacaggcag

SEQ ID NO: 17226 - DNA, 201 bp, Homo sapiens
tccactgcccctgtgttttcagactccaggagctcattgttttgtgagtggcttatagtactctagccagctctctgaaccggatgctggttctgccattrgaaacaacacagaatatgactaataaagaacttcactagggggctgggtacagtggctcatgcctgtaatctcagcactttgggaggccaaggtgggagg

SEQ ID NO: 17227 - DNA, 201 bp, Homo sapiens
gggctgcttttttccctcctgctgtcttaccaagtgctagaaagagacgaaccaaacctaaataatatgaagtttctgccttccagggactcgcagtcctsggtgtcggggctaggtagagggaacagaaagggtctctggaggttgggtgagacccagtgactatgacctccaccaaccctgcagacccaataggtgacc

SEQ ID NO: 17228 - DNA, 201 bp, Homo sapiens
gaagcacttctgcaagtgctgaagaagtacgagctccgggttaattaccaccttgtcaatgtgaaggtaggccaggccccagggttcccacagagtaccargcccttcgttgagcaaacacccagcacctagcctgggctaggcattgtgcaagacagagagatacaggcagaactggggccctgctcttaaggagctccc

SEQ ID NO: 17229 - DNA, 201 bp, Homo sapiens
tgtggggcatggttccttccctgggaaggctaagttcagttctgttttttattctatgagaacaagtcacagctgcagctgggccccatgctctgccccargcccccaaccccgcggtgctccggcggcttcctgtccactctcggggcccttggggcctggcttgctccagggtcttgggctactggcagctcctctcct

SEQ ID NO: 17230 - DNA, 201 bp, Homo sapiens
gggaaggctaagttcagttctgttttttattctatgagaacaagtcacagctgcagctgggccccatgctctgccccaagcccccaaccccgcggtgctcyggcggcttcctgtccactctcggggcccttggggcctggcttgctccagggtcttgggctactggcagctcctctccttgggctcctggctgccaggcgt

SEQ ID NO: 17231 - DNA, 201 bp, Homo sapiens
gcggaagcacttctgcaagtgctgaagaagtacgagctccgggttaattaccaccttgtcaatgtgaaggtaggccaggccccagggttcccacagagtaycaggcccttcgttgagcaaacacccagcacctagcctgggctaggcattgtgcaagacagagagatacaggcagaactggggccctgctcttaaggagct

SEQ ID NO: 17232 - DNA, 201 bp, Homo sapiens
caagcccctcagcccttgcccccatccctcggacccaccaaactgcacacacagctcctcttaccgtagcctccgtttatgggccttgctttgggctttgsaggctctgggctcagggctggagtgcgctcttggtccctggtccctcgtccacaggggcaggcctgggacccagctactctgtccaggccactgtggcca

SEQ ID NO: 17233 - DNA, 201 bp, Homo sapiens
gggacccagctactctgtccaggccactgtggccagagctggaaggcagggcagagggaatgttccctgcaccctggaaaggggagttgagtcacaagagkttaaggtgggtccaggaaggcagctgctcttagtgcccgcctaggagttgagtacagtgaggagggtggaggaaggtgctgagcttagccttgtgccctg

SEQ ID NO: 17234 - DNA, 201 bp, Homo sapiens
gaaggcagggcagagggaatgttccctgcaccctggaaaggggagttgagtcacaagaggttaaggtgggtccaggaaggcagctgctcttagtgcccgcytaggagttgagtacagtgaggagggtggaggaaggtgctgagcttagccttgtgccctgcccccatctccccaggcctccagcctctcccggctgcctgc

SEQ ID NO: 17235 - DNA, 201 bp, Homo sapiens
gctccagcatccagcctgtgtgttctgtaatggaactgaccccctcccctgaaaacgaaggggccccggggctggcaagcagggaaagctccacggtgcgyggctgtggcacagacttctggaaggctggctgagtggaatgcagggaagagggcagtacctgggaaaggacccacccatcttcctgctgctgtaactgct

SEQ ID NO: 17236 - DNA, 201 bp, Homo sapiens
ccaatgctttgggaggccaaggcaggtagatcgcttgagcccaggagtttgagacaagccctggcaacatagtgagatcccatttctacaaaaaaaaaaaaaaaattagccgggtgtggtggcacacgcctgtagtctcagctactcaggtggctgaggtgggaggatcgtttgagccctggaggttgaggctgcagtgag

SEQ ID NO: 17237 - DNA, 201 bp, Homo sapiens; identical to SEQ ID NO: 3785

SEQ ID NO: 17238 - DNA, 201 bp, Homo sapiens
cccaatgctttgggaggccaaggcaggtagatcgcttgagcccaggagtttgagacaagccctggcaacatagtgagatcccatttctacaaaaaaaaaaaaaaaattagccgggtgtggtggcacacgcctgtagtctcagctactcaggtggctgaggtgggaggatcgtttgagccctggaggttgaggctgcagtga

SEQ ID NO: 17239 - DNA, 201 bp, Homo sapiens
ctccgaccccatcgtgggctggggccccagcgggggctatgtcttccagaaggtgtggtagggaggcacggggtgcccccctctcttgaccggcacccgtkggttccccagagcttagggcagagcagcctgcctctcctgggctcttaaattttgaatgagcatggattggagcggatgggagctcatgctttaagtcag

SEQ ID NO: 17240 - DNA, 201 bp, Homo sapiens
tctgggcaggggtgggaagtgatactggcagtgggccttgttctattccgggaaatgtcctgttgagcagagcccttggagagccctgttaatcttgcctstgtgtgtgtgtgcatgtgtgcgtgtgtgcgggggtatgtgtgtgtaggacgaggcctttgccctgtggattgagcggtggggaaagctgtatgaggagga

SEQ ID NO: 17241 - DNA, 201 bp, Homo sapiens
tcagtgaatgttggctatcaccgtgtgccaaactctggggataccccaggcaggacaccggtcctgtctcagggaactggggaaagagaaaggagacaggycttttcacccacagttacaacccagggtgctatgggagtccagctgataacggataaatcgtgggagttggcttacaaatatggcacatgcgtggcatat

SEQ ID NO: 17242 - DNA, 201 bp, Homo sapiens
agacctgtccagactgagaaactcacgtccccactcccctcaccctttgcttatggacgtgccaacgccacagttcattattccgcccacatggctgccartagtcctgataccttaggtgtctgcgaaagggcgtctggcagggctggggttggtgacaggcacctgtctctcccacaggcctacttagagtttttcact

SEQ ID NO: 17243 - DNA, 201 bp, Homo sapiens
ggctggagtgctatggcacaatcttggttcactgcaacctctgccttccgggttcaagcgattctcctgcctcagcctccagagtagctgggattacaggygcccgccaccaaacctggctaatttttatatttttagtagagtcgggatttcaccatgttggccaggctggtctcaaactcctggcctcaggtgatccac

SEQ ID NO: 17244 - DNA, 201 bp, Homo sapiens
gagtactacgcaaaaatttttttgtttcctggaggattttcaaaattcaaaatatcaagtcactttgagacatattgagtctgatgttaaaaaggaaatgwtctagagtcaactgaaacacacactttaagtacaagtgaggtcaggcctagagaaagattttgggagcatagtggcgacagtttaacttgtgaaggcaaa

SEQ ID NO: 17245 - DNA, 201 bp, Homo sapiens
gacctctgttgaagctccgtattgtccataggagttaagggatctttgactcactcactgaagcagagctgtgtctcacttacatagggctcccctgagcygaatttggtgtctggcacataagaggcgtttgataaatgattcttgattgaaattcaagcccttataggtaacagtgaagtgccccaccaacttggagta

SEQ ID NO: 17246 - DNA, 201 bp, Homo sapiens
ctatttggcagccttggccaggaatgcctactgctctccctagctaattcctgatcattaatactccagatctgaatcccctatgtgcagaggcccctcargctgggttttcaaattctcctctgtgctccatagcaccctgcacagcctctaacagcatttatcacaccctcttatggctgctggttacttggccatctc

SEQ ID NO: 17247 - DNA, 201 bp, Homo sapiens; identical to SEQ ID NO: 3979

SEQ ID NO: 17248 - DNA, 201 bp, Homo sapiens
atgtatcctaatcatgggaagggcaccttgggagaagttgcagatggctgacgtgctttctctagcattcagctaaaaaatgggatggtccatgattctgygttctctgtgttctgcaaaacaacattaagtagaaaacaaacagaagcagaggcacatttccttcttttgccacagaaacaatgccactgttgagtgcaa

SEQ ID NO: 17249 - DNA, 201 bp, Homo sapiens
tagtcaacaagcaatctgccacatgcaaagtattgcaagggaccaaaaaatataagctatatgtcccatctcatttactcttcataaccatcccattttayagtcagggaaactgtctggatttgaactcagaagaccatgataaaggcaaaatcagaagtcacttttagtcctgagtttctggggtctgagattcctcct

SEQ ID NO: 17250 - DNA, 201 bp, Homo sapiens
agtaagggacaaggttttttcaaacctatgaggcaggtggagatggtgtgctgcagctgtaggattccctggcctggggagaagtccacttatatgtctcygagtactacgcaaaaatttttttgtttcctggaggattttcaaaattcaaaatatcaagtcactttgagacatattgagtctgatgttaaaaaggaaatg

SEQ ID NO: 17251 - DNA, 201 bp, Homo sapiens
agttcactttgttcactgccctcgagcctttatccaaggctaaacccacatgctgtacctacttttggaattggtccaggaattttatacctgtgtgaatktggagaaactctctcagacacccatttggaaatgcattagtgtttttctcagtgagtcctccatgcttgctgttccaatggccctccaggtttgggccca

SEQ ID NO: 17252 - DNA, 201 bp, Homo sapiens; identical to SEQ ID NO: 3983

SEQ ID NO: 17253 - DNA, 201 bp, Homo sapiens
gtcccagaggagagaccgtgctaaagctaattactaagcagtacaaaaataatctctctctctctctttctctctctctctctctctctctctctctctctatatatatatatatatatatatatgtaattttttttttgagacagtctcactctgccgcccaggctggactgcagtgacacaatctcggctgactgcaac

SEQ ID NO: 17254 - DNA, 201 bp, Homo sapiens
tcccagaggagagaccgtgctaaagctaattactaagcagtacaaaaataatctctctctctctctttctctctctctctctctctctctctctctctctatatatatatatatatatatatatgtaattttttttttgagacagtctcactctgccgcccaggctggactgcagtgacacaatctcggctgactgcaacc

SEQ ID NO: 17255 - DNA, 201 bp, Homo sapiens
cggagataaagagtgcatataggccaggcatggtggctcatgcctggaatcccaacactttgggaggccgaggcaggtggatcgctggatcccaggagttygagaccagtctgggcaacatggtggaaccctgtctctacaaaacaaaaacaacaacaacaacaacaaaaattagctgggcatggtggtacaagcctgtag

SEQ ID NO: 17256 - DNA, 201 bp, Homo sapiens
attcctggtagggttctgacatatacctgccctggaccaatgactagggagctggctacagaggtggaggtgagcctaggaaagcagaaatacaaggagagggggaaaaaaaagtcaaatctcaaaatatctagccgcagacataagctcctctgacggtaatttcttgaggggggaaaaagttgctatttaaagctagga

SEQ ID NO: 17257 - DNA, 201 bp, Homo sapiens
ctagattgacacagtagttgcattcctgaaaaattcagtatatattaaaaccgtgcaaaaactattttgttagcatgtaacacaaagttaggttctgaggkaattttgagcaagtttttgacccttggggactttgggcaggacatcctacagctgtgtggatgctggctgattctgcatggtacgggactgtcatgcacg

SEQ ID NO: 17258 - DNA, 201 bp, Homo sapiens
aattatctattagggatcaagcattaacttgacacaggagcagccctggctcagctggaggcatccgcatgctgtggtgccccaggaacagaggcaccccygaaatgcaggctgtgtgtttgctgcagagacaccatggcccataactccccaagcataagtgagcagctctgctgtccaggcaatgaagtcaagaaaggg

SEQ ID NO: 17259 - DNA, 201 bp, Homo sapiens
gcattccctctatagcttccacctgaccacagccagcccaagccctgctcagaaccccaggcctgccagcgagcctgtgactggaattatctattagggakcaagcattaacttgacacaggagcagccctggctcagctggaggcatccgcatgctgtggtgccccaggaacagaggcacccccgaaatgcaggctgtgt

SEQ ID NO: 17260 - DNA, 201 bp, Homo sapiens; identical to SEQ ID NO: 3977

SEQ ID NO: 17261 - DNA, 201 bp, Homo sapiens
gcaggtcattttcaaagtcaagtgctgtattatgtatttttaagaatttaacttggctaaaactgtgctaccttaagggggctccaatcctttttttttcyttttctttttttttttttgttttagacggagtcttgctcttgtcgcccaggctggagtgcagtggcatgattttggctcactacaacctttgcctcctgg

SEQ ID NO: 17262 - DNA, 201 bp, Homo sapiens
ttagggatcaagcattaacttgacacaggagcagccctggctcagctggaggcatccgcatgctgtggtgccccaggaacagaggcacccccgaaatgcargctgtgtgtttgctgcagagacaccatggcccataactccccaagcataagtgagcagctctgctgtccaggcaatgaagtcaagaaagggaaccaaccc

SEQ ID NO: 17263 - DNA, 201 bp, Homo sapiens; identical to SEQ ID NO: 3980

SEQ ID NO: 17264 - DNA, 201 bp, Homo sapiens
cattttcaaagtcaagtgctgtattatgtatttttaagaatttaacttggctaaaactgtgctaccttaagggggctccaatcctttttttttctttttctttttttttttttgttttagacggagtcttgctcttgtcgcccaggctggagtgcagtggcatgattttggctcactacaacctttgcctcctgggctcaa

SEQ ID NO: 17265 - DNA, 201 bp, Homo sapiens
tattatgtatttttaagaatttaacttggctaaaactgtgctaccttaagggggctccaatcctttttttttctttttctttttttttttttgttttagayggagtcttgctcttgtcgcccaggctggagtgcagtggcatgattttggctcactacaacctttgcctcctgggctcaagggtttctcctgcttcagcct

SEQ ID NO: 17266 - DNA, 201 bp, Homo sapiens
gcctggggcccagtcacacctccctgaccccagtttcctctcccagtggcgctgctgggtgctgttccccgggactgcggcagagccctcctcgcgggccygacacggtgtccggccgcacggatgaccggtagagggcagcagcgcgctccgggtcggtcgggagcagggccttcctagtccagaaaccgcggcaggtcc

SEQ ID NO: 17267 - DNA, 201 bp, Homo sapiens
aaatggtacctacagtaatggtacccagtaatagtacctacaaaagactgggaggatgagggaagggagggagctcccagctgtgtggggaggagcatacrggcgagggtaaccccccatatggtattatagggatttgcgtctatttctgtcctccctccagactctagcctcatggttctcagacatgggtatgcatca

SEQ ID NO: 17268 - DNA, 201 bp, Homo sapiens
aaccagattatgtttttgaaagaacatgctggctgctggctggaaaatgaaagcaagaccagaaataagagagccagtgaggagtctccagtctggcccaygcaaagagatggcggcggcttacagtagggcagtggataggcttgggaggtggcaccaacaggacttgctgagggattggatattggggggatgtttaaa

SEQ ID NO: 17269 - DNA, 201 bp, Homo sapiens
attattagatgcctgagtttgaaactttgagtcaatccaggcatccatgcctacttctgatttgctgtagcttgtgtgccacagcctcccagtttctgtgraaaccccaccatacatcagccccagcacaaagcacaacctcgtcagagctagcccacctccagcaccgtgactgctccaggcttaatctctcctggtgtt

SEQ ID NO: 17270 - DNA, 201 bp, Homo sapiens
tagcttgtgtgccacagcctcccagtttctgtggaaaccccaccatacatcagccccagcacaaagcacaacctcgtcagagctagcccacctccagcacygtgactgctccaggcttaatctctcctggtgttgacacttttgccagtgatggtgtctcatgggattcatgctctttataaaccattgccttcttcctat

SEQ ID NO: 17271 - DNA, 201 bp, Homo sapiens
gccctcagagaaaaccctgagctgcggcgtggccgagacgggggcgtggcctggcaggtgggcgggcccttccgtgggcggggccgcgaggttttcaggakcccgagcgagggcgccgcttttgcgtccgggaggagccaaccgtggcgcaggcggcgcggggaggcgtcccagaggtgagcgccctgcagcggcagggga

SEQ ID NO: 17272 - DNA, 201 bp, Homo sapiens
aaatgatctagagtcaactgaaacacacactttaagtacaagtgaggtcaggcctagagaaagattttgggagcatagtggcgacagtttaacttgtgaargcaaatgtggtcactgatggaagaagcctgaagcagagaacaaggtcttggggaaacctggaagccatgggggtgggaaaaagaaaagtatctgttggaa

SEQ ID NO: 17273 - DNA, 201 bp, Homo sapiens
gccaaaggaagagatatttcaagaagaaataggtggccaaagctgcccaatgctaaacaaaacaaaacaaaacaaaacaaaacccacaaggagattcataraagaaagaggctgggtacagtagttcatgcctgtaataccttgggaggccaaggtaggaggattgtttgaaaccaatagttcaagaccagtctgggcaac

SEQ ID NO: 17274 - DNA, 201 bp, Homo sapiens
tacagaggtggaggtgagcctaggaaagcagaaatacaaggagagggggaaaaaaaagtcaaatctcaaaatatctagccgcagacataagctcctctgasggtaatttcttgaggggggaaaaagttgctatttaaagctaggatatatgtggttccatttttttcatcggtacattaataacatcattttccactatgt

SEQ ID NO: 17275 - DNA, 201 bp, Homo sapiens
ggaggattgtttgaaaccaatagttcaagaccagtctgggcaacatagtgagacccctccacccccacccccacacacaaaaattatctgggcatggtggyacatgcctatagccccagctactccagaagctgaggtgggatgatcacttgaaccccggagttcaaggctgcagtgagctctgatcgcaccacttcactc

SEQ ID NO: 17276 - DNA, 201 bp, Homo sapiens
ttttaattgtggtaaaatagacatataattttcattttataaaaaatgtccattttaataatttttaggcagacagttcagtgacattaagtacattcacyactgtttgtctccagaatgttttcatcatcccagactgaaactctgcccattaaacgctaactccccatcctcccctcccagcccctggtaacttctgct

SEQ ID NO: 17277 - DNA, 201 bp, Homo sapiens
actgtgcagcgccctctcaaaatatgtcaaagaaatgttctattttggggtaaaatatttaaatttctttcaggtcctgctatctgttgtgttgatatctttttattttattttattttattttattttattttattttattttattttattttattttattttattttattttatttttgagacagtctcactctgttgc

SEQ ID NO: 17278 - DNA, 201 bp, Homo sapiens
ctgtgcagcgccctctcaaaatatgtcaaagaaatgttctattttggggtaaaatatttaaatttctttcaggtcctgctatctgttgtgttgatatctttttattttattttattttattttattttattttattttattttattttattttattttattttattttattttatttttgagacagtctcactctgttgcc

SEQ ID NO: 17279 - DNA, 201 bp, Homo sapiens
tgtgcagcgccctctcaaaatatgtcaaagaaatgttctattttggggtaaaatatttaaatttctttcaggtcctgctatctgttgtgttgatatctttttattttattttattttattttattttattttattttattttattttattttattttattttattttattttatttttgagacagtctcactctgttgcca

SEQ ID NO: 17280 - DNA, 201 bp, Homo sapiens
gtgcagcgccctctcaaaatatgtcaaagaaatgttctattttggggtaaaatatttaaatttctttcaggtcctgctatctgttgtgttgatatctttttattttattttattttattttattttattttattttattttattttattttattttattttattttattttatttttgagacagtctcactctgttgccaa

SEQ ID NO: 17281 - DNA, 201 bp, Homo sapiens
agggaacaatattaatgtgttagggaagactattgatatgctggagaataatattaacatattcaagaatgtgaatttcacatttgcttatgtgcaatttyttgcatgtaaaggcagaaaactgcacccagctgtgccaaaacacaaaagaatacacaaaatacacctccaatattagtcagctacctcattctccatgtg

SEQ ID NO: 17282 - DNA, 201 bp, Homo sapiens
tgcagcgccctctcaaaatatgtcaaagaaatgttctattttggggtaaaatatttaaatttctttcaggtcctgctatctgttgtgttgatatctttttattttattttattttattttattttattttattttattttattttattttattttattttattttattttatttttgagacagtctcactctgttgccaag

SEQ ID NO: 17283 - DNA, 201 bp, Homo sapiens
ctattttggggtaaaatatttaaatttctttcaggtcctgctatctgttgtgttgatatctttttattttattttattttattttattttattttattttattttattttattttattttattttattttattttatttttgagacagtctcactctgttgccaaggctggagtgcagtggcatgatctcggcttactgca

SEQ ID NO: 17284 - DNA, 201 bp, Homo sapiens
gggcttgtgatcattgctttgatggaaataagatggtttttgaaagagtaacacggcaggggatttatttcaaatagtgtgtgcaggagaagtctcgctgkggaaacactgatgtgagatctcgccgcagtaagagcagagagaagagggttcacatgaaggaagcagcacttgcgaaggtcctgaggctggaaagagttt

SEQ ID NO: 17285 - DNA, 201 bp, Homo sapiens
tggggtaaaatatttaaatttctttcaggtcctgctatctgttgtgttgatatctttttattttattttattttattttattttattttattttattttattttattttattttattttattttattttatttttgagacagtctcactctgttgccaaggctggagtgcagtggcatgatctcggcttactgcaacctct

SEQ ID NO: 17286 - DNA, 201 bp, Homo sapiens
cttttcttttgagatggagtctctctctgtcacccaggctggagtgcaatggcacaagctcagctcactgcaacctctgcctcctgggttcaagcaattcycctgcctgagcctcctgagtagctaggatttcagacacgtgccaccatgcctggctaatttttgtatttttagtagagatggggtttcaccatgttggcc

SEQ ID NO: 17287 - DNA, 201 bp, Homo sapiens
tgtggtgggctctcacgcggccaagcctccccaacgggcgccgccccctgctccacggcgcccggtcccatcgaccacccaaggactgaagagcacaggcrcatggggtgggactggtgggcagctctgcccctagccctgacgcgggatccactaggcaaagccagctgggctcctgagtcaggtggggacttggagaac

SEQ ID NO: 17288 - DNA, 201 bp, Homo sapiens
attcttcattttatctattgagatcactttgaacttttatcccattttccaaaatgcagcctcctgcctgtgtgtgtcatctataaatacaaggtcattasctctgaggcccatttgaagccacaagaaattcactgagacagaaagtggctactttgtttgcattactcaatctcatcacctacaaaagaaacaaacact

SEQ ID NO: 17289 - DNA, 201 bp, Homo sapiens
cggccaagcctccccaacgggcgccgccccctgctccacggcgcccggtcccatcgaccacccaaggactgaagagcacaggcacatggggtgggactggygggcagctctgcccctagccctgacgcgggatccactaggcaaagccagctgggctcctgagtcaggtggggacttggagaacttttatgtctaggtaga

SEQ ID NO: 17290 - DNA, 201 bp, Homo sapiens
gaaattaaggctgcagtgagctgtaatcgcaccactgcactccagcctggacagcagagtgagaccctgtctcaaaacaaaacaatcacaaactatgtagrtggaaagaatacataggattcgcagaattcctggctttagtcatcagagtgcctgtaaggaatgtggaaaaagacctggaagctttacctctcggcactg

SEQ ID NO: 17291 - DNA, 201 bp, Homo sapiens
agcttgtgtgccacagcctcccagtttctgtggaaaccccaccatacatcagccccagcacaaagcacaacctcgtcagagctagcccacctccagcaccktgactgctccaggcttaatctctcctggtgttgacacttttgccagtgatggtgtctcatgggattcatgctctttataaaccattgccttcttcctatt

SEQ ID NO: 17292 - DNA, 201 bp, Homo sapiens
ccctctgagctatataactcttcctttaccttccaacagaggcctttcattacatttaaagcaaatggaatgcatagtaggcaccaaagatggaggtgctrtgcaaataatagacaccaagctctctgcaggtggggtccttgtgtgttttctcttcatagcacccagcacaatacttggaacataagccagacacgttca

SEQ ID NO: 17293 - DNA, 201 bp, Homo sapiens
cccacagcaccaggcagtgcacactggccaagactccgtggtaaatattgctggcctttatgttgagagggggaaaaaaaagcctgcctgtgaagatcatygcccagtggccatgctcctgtgaaaacacaattggaaagccatttcctaaggggcgagggtgggtctgggaccatgctgtggcttgggtgattggtggtt

SEQ ID NO: 17294 - DNA, 201 bp, Homo sapiens
catagcacccagcacaatacttggaacataagccagacacgttcattgagcaccatttctgctgcacccatgaaaaaaacactcaacccagacagatggtyagctccccgacaggacttaagcaagtgggccagtctctgtttattgtcgtacactcacacaatcacacagctgccaggcgagcactaggcacttatcaca

SEQ ID NO: 17295 - DNA, 201 bp, Homo sapiens
gggtgggtctgggaccatgctgtggcttgggtgattggtggttgcaggagtgagggtgctgccctgggaaggcgctgaggccctgttgggtgggaatcgayggctgcggctttctcccggaggagggagagcggtgttgttacctagtgttgggaacacatccgtccagcaccgtgaactgcaaacaagcagagtaaccct

SEQ ID NO: 17296 - DNA, 201 bp, Homo sapiens; identical to SEQ ID NO: 3973

SEQ ID NO: 17297 - DNA, 201 bp, Homo sapiens
aaggaatgttctgcttcagggaggattggccctggtctatgattgctgtcatgatgatactcagcaagtttccttagataacttcagagttaacaaggatktaaaaatgcttccatttcaaactcaccgttatacatatgcagaaactgaggacaatgaaagttagagttgtctaggatacccagactgtggctgaaggag

SEQ ID NO: 17298 - DNA, 201 bp, Homo sapiens; identical to SEQ ID NO: 3974

SEQ ID NO: 17299 - DNA, 201 bp, Homo sapiens
ccgcgggctcctccccctcggtccctgccccttttgcgccctctgctggtctctagggaaagcgcatctcctgaaatcagaagtcgcacccaagctgtccygtttccttagctcctagtaaagcgatatgacccatccatcccctcctcctcaaagcctcacatgaatcttctttgaggtactctctgatgcttcactctt

SEQ ID NO: 17300 - DNA, 201 bp, Homo sapiens; identical to SEQ ID NO: 3976

SEQ ID NO: 17301 - DNA, 201 bp, Homo sapiens
gcatattcaattttgttttgttcaaaggtcacagtgacaactaagtttgcagcgggattcaaatccgagctccacagtgtaataaatgtgagatcttagayaagtgcttaacctctctgagttaatcatctatcaaataatgaaaagcactataagccaactcttcaactttcaggacattgttcacccgaaacccgaaat

SEQ ID NO: 17302 - DNA, 201 bp, Homo sapiens
taagccaactcttcaactttcaggacattgttcacccgaaacccgaaatccaataactgtgcactgtcttctaacacagccataatttacctagatgtacygcttagaaatgtctcactctcatggtgaccttagttctatctgtccctagagagccgcaagaccattttgtctggaggttctctgctcactggacaatag

SEQ ID NO: 17303 - DNA, 201 bp, Homo sapiens; identical to SEQ ID NO: 3981

SEQ ID NO: 17304 - DNA, 201 bp, Homo sapiens
cagacgcgccaccttaagagctgtaacactcaccgtgaaggtctatagattcactcctgaagccagcgaggccatgagccccccagaaggaagaaactccraacacgtccaaacatcagaaggaacaaaccccagacacaccacctttaagaactgtaacactcaccgtgagggtccacgacttcactcttgaagtcagtg

SEQ ID NO: 17305 - DNA, 201 bp, Homo sapiens
ggccatctcagaatcaggtctgcaaacctgcaacttgtcgcatccagtcgggaaacttcacttcttttggtatttgactctagaacagttggcaccattgrccactcccaccttgaaattcattcaatgactcctatttatttattatttttattttttatttttggctctcactatgttgcccaggatggagtgaagtgg

SEQ ID NO: 17306 - DNA, 201 bp, Homo sapiens
tcaccgtgaaggtctatagattcactcctgaagccagcgaggccatgagccccccagaaggaagaaactccaaacacgtccaaacatcagaaggaacaaaycccagacacaccacctttaagaactgtaacactcaccgtgagggtccacgacttcactcttgaagtcagtgagaccaggaacccaccaatttcggacaca

SEQ ID NO: 17307 - DNA, 201 bp, Homo sapiens
acccttcctgactcctctctataaacagcagccaccacccgagccatggcacccccatctcctttttcccactttactttcttccattgcatttacctctrcctgtcagtacctatttcctcttccttttgttgtctatcacctcttccgtccaccagaatgtaagctccatgagggcaggcttggtccattttgctcaca

SEQ ID NO: 17308 - DNA, 201 bp, Homo sapiens
agtctgatgttaaaaaggaaatgatctagagtcaactgaaacacacactttaagtacaagtgaggtcaggcctagagaaagattttgggagcatagtggcracagtttaacttgtgaaggcaaatgtggtcactgatggaagaagcctgaagcagagaacaaggtcttggggaaacctggaagccatgggggtgggaaaaa

SEQ ID NO: 17309 - DNA, 201 bp, Homo sapiens; identical to SEQ ID NO: 3978

SEQ ID NO: 17310 - DNA, 201 bp, Homo sapiens
aagattttgggagcatagtggcgacagtttaacttgtgaaggcaaatgtggtcactgatggaagaagcctgaagcagagaacaaggtcttggggaaacctrgaagccatgggggtgggaaaaagaaaagtatctgttggaaaatagaatgatagaaagatagggaaaaaactaaggaagccaaaggaagagatatttcaag

SEQ ID NO: 17311 - DNA, 201 bp, Homo sapiens
aatgccgccctcttgctcagtgcctggaagaggcattggtgactccccgctaatgctaggggtagctaccgtgcaggagcagtcaggctcttgcagggccwatgtggtttcatcaattttctcctgcatttacccagcccctccgaattctgagaagtgcgtccaagatctcttggactccttgactcagttcacccttgt

SEQ ID NO: 17312 - DNA, 201 bp, Homo sapiens
tctgtgtatcgcaggcccagtttgtgcctggcccacagtatgtgcttagtaaatgtcttgtggatgagtgaagtatactgggaagcccagcctccctcatrgcaacacctgctgttattagactttccactggaggggcagggaggatgagggcctgagagagcaagatatccatggaggtgctgagtggtaagctgaaaa

SEQ ID NO: 17313 - DNA, 201 bp, Homo sapiens
ctgtgtatcgcaggcccagtttgtgcctggcccacagtatgtgcttagtaaatgtcttgtggatgagtgaagtatactgggaagcccagcctccctcatgkcaacacctgctgttattagactttccactggaggggcagggaggatgagggcctgagagagcaagatatccatggaggtgctgagtggtaagctgaaaag

SEQ ID NO: 17314 - DNA, 201 bp, Homo sapiens
ggggtacccggctgaagtgaagcaacattgtgtctcttcctgctgttttctccacctcccctcagcaaatcatgaatgaataaacaaacgaatgaatgaasaaacatagagttattataaggattaagtgaaggcagggtgcagtggctcatgcctgtaatcccagcatgttgggaggccaaggtaggaggatcgcttgag

SEQ ID NO: 17315 - DNA, 201 bp, Homo sapiens
gattaagtgaaggcagggtgcagtggctcatgcctgtaatcccagcatgttgggaggccaaggtaggaggatcgcttgagctcaggagttgaagaccagcrtgggcaacaaagcgagacccccatctctatatttttattttaatttagaataataaataaaatttttttaaaagaaaagattaagtgaaatgttttttaa

SEQ ID NO: 17316 - DNA, 201 bp, Homo sapiens
atggtcaggcccagcagttggaattctttttgaggccattttcccaagtctttatcacgtcacaagacttgctgtgtacatggcaaaaggaaggcccaacrgagccacattgggaagtgggccctggggagtctgctgagacactggttgctaagtgactgccctgtcttccatggcgcagtgattcaaagccaggcctca

SEQ ID NO: 17317 - DNA, 201 bp, Homo sapiens
gacggtgtttccagaacagtgcctccgttgttcattcccgtgcatcaggaagtttggctctgctgagtgttgaaagcaaaactctcctgtttatttgtctstgtatactaacagacttaaacagcagacagcactggaatgtccagttactgcatccagatgtgtttgtttcactcttaacattgtggaaaagaatgcaga

SEQ ID NO: 17318 - DNA, 201 bp, Homo sapiens
acattgttcacccgaaacccgaaatccaataactgtgcactgtcttctaacacagccataatttacctagatgtactgcttagaaatgtctcactctcatrgtgaccttagttctatctgtccctagagagccgcaagaccattttgtctggaggttctctgctcactggacaatagggacagtggaattgtcctcatcct

SEQ ID NO: 17319 - DNA, 201 bp, Homo sapiens
tccagaacagtgcctccgttgttcattcccgtgcatcaggaagtttggctctgctgagtgttgaaagcaaaactctcctgtttatttgtctctgtatactracagacttaaacagcagacagcactggaatgtccagttactgcatccagatgtgtttgtttcactcttaacattgtggaaaagaatgcagaaggcagatc

SEQ ID NO: 17320 - DNA, 201 bp, Homo sapiens
agccataatttacctagatgtactgcttagaaatgtctcactctcatggtgaccttagttctatctgtccctagagagccgcaagaccattttgtctggargttctctgctcactggacaatagggacagtggaattgtcctcatccttgtgcttgagtctttggaaaccaaatgaccccagaaatgtcatgaaagagatt

SEQ ID NO: 17321 - DNA, 201 bp, Homo sapiens
aaggagattcataaaagaaagaggctgggtacagtagttcatgcctgtaataccttgggaggccaaggtaggaggattgtttgaaaccaatagttcaagaycagtctgggcaacatagtgagacccctccacccccacccccacacacaaaaattatctgggcatggtggcacatgcctatagccccagctactccagaag

SEQ ID NO: 17322 - DNA, 201 bp, Homo sapiens
tcttcttcttaattagctttcctattttcccttaggaaaacaaaaagtcctttctcctgattcaccaaaaaataaaatactgactaccatcactgtgatgwgattcctatagtctcaggaactgaagtctttaaacaaccagggaccctctgcccctagaataagaacatactagaagtcccttctgctaggacaacgagg

SEQ ID NO: 17323 - DNA, 201 bp, Homo sapiens
gtggtatagaactcctgggctcaagcagtcctcccatcttggcctcccaaagtgctgggattacaggcatgagccaccatgcccagtcctgtcttcaaaakattaatggagaaaaatattgctggggtacttaagttgtgccaggtactacagggggatcctgcatgaatgaaactgagtgcctgcccctcaagacttaca

SEQ ID NO: 17324 - DNA, 201 bp, Homo sapiens; identical to SEQ ID NO: 3982

SEQ ID NO: 17325 - DNA, 201 bp, Homo sapiens
gtcactgatggaagaagcctgaagcagagaacaaggtcttggggaaacctggaagccatgggggtgggaaaaagaaaagtatctgttggaaaatagaatgmtagaaagatagggaaaaaactaaggaagccaaaggaagagatatttcaagaagaaataggtggccaaagctgcccaatgctaaacaaaacaaaacaaaac

SEQ ID NO: 17326 - DNA, 201 bp, Homo sapiens
ccaccagctcccaccttgagcccacaaatctaccttctgagccactgcagccccaggtagctccccaggcctaggctctctcttctcctttgtccatgctrtttggcagccttggccaggaatgcctactgctctccctagctaattcctgatcattaatactccagatctgaatcccctatgtgcagaggcccctcaggc

SEQ ID NO: 17327 - DNA, 201 bp, Homo sapiens
ctccagaatgttttcatcatcccagactgaaactctgcccattaaacgctaactccccatcctcccctcccagcccctggtaacttctgctctgcttcctrtctctgaatttatctattctagatatcttgtaagtggattcatgcaatatttgttcttttgtgactggcttattttactcagcataatgtcttcaaagtt

SEQ ID NO: 17328 - DNA, 201 bp, Homo sapiens
attcctgatcattaatactccagatctgaatcccctatgtgcagaggcccctcaggctgggttttcaaattctcctctgtgctccatagcaccctgcacakcctctaacagcatttatcacaccctcttatggctgctggttacttggccatctccctgctgggatggctccctgaaggcagtgattgagttaatccttga

SEQ ID NO: 17329 - DNA, 201 bp, Homo sapiens
tgctggtggagtcacctgaagactctgaacaaccctggatgcccaagccacactccacaccaactaaatttgtaattttttaaagtctcctggtgattccrgtgtgtagccaagtttgagaaccattggtttccatcagtgattctcaaatttgagtgtgtataaaattcacacaatggctaaggatacagattcctgaga

SEQ ID NO: 17330 - DNA, 201 bp, Homo sapiens
tcattaatactccagatctgaatcccctatgtgcagaggcccctcaggctgggttttcaaattctcctctgtgctccatagcaccctgcacagcctctaayagcatttatcacaccctcttatggctgctggttacttggccatctccctgctgggatggctccctgaaggcagtgattgagttaatccttgatgtatccc

SEQ ID NO: 17331 - DNA, 201 bp, Homo sapiens; identical to SEQ ID NO: 3975

SEQ ID NO: 17332 - DNA, 201 bp, Homo sapiens
cagcccttggagacctacctaggcaatttgtcactcaggcttcaagctgccagccgaggaggggagctgagaagactctataatgagatctttgcactgtwattaagtgccaggctttgttttacacctatctttcccgccttgcccgatcccaccgccaagctcctccaggcagtgagtggggagtgtcagctgctctgt

SEQ ID NO: 17333 - DNA, 201 bp, Homo sapiens
gaggtcccagaggagagaccgtgctaaagctaattactaagcagtacaaaaataatctctctctctctctttctctctctctctctctctctctctctctmtctatatatatatatatatatatatatgtaattttttttttgagacagtctcactctgccgcccaggctggactgcagtgacacaatctcggctgactgc

SEQ ID NO: 17334 - DNA, 201 bp, Homo sapiens
caaagatccaaaacttactaaaattcttttgtcttctttcccatggtcaggcccagcagttggaattctttttgaggccattttcccaagtctttatcacktcacaagacttgctgtgtacatggcaaaaggaaggcccaacggagccacattgggaagtgggccctggggagtctgctgagacactggttgctaagtgac

SEQ ID NO: 17335 - DNA, 201 bp, Homo sapiens
ggtcccagaggagagaccgtgctaaagctaattactaagcagtacaaaaataatctctctctctctctttctctctctctctctctctctctctctctctmtatatatatatatatatatatatatgtaattttttttttgagacagtctcactctgccgcccaggctggactgcagtgacacaatctcggctgactgcaa

SEQ ID NO: 17336 - DNA, 201 bp, Homo sapiens
aagaggctgggccagagatttctcaaggtcccaacttcaaccttggtgttctgtccgccttgatttacaaaatggtcttgatcttttccaattaaaattcyatttagtagagatacacagaaagtttgcaattcttccacaagaaaactgctgtatggcatagaaaaatatctacataatattttttgtttcttcttctta

SEQ ID NO: 17337 - DNA, 201 bp, Homo sapiens
caaccagggaccctctgcccctagaataagaacatactagaagtcccttctgctaggacaacgaggtaagtgcttctggtaaaaatgtgtcatagtgtgtstgtgtctgtgtgtgtatgatacatatataaatatatgcatatttgtacatatatatatacatatgtacaaatatacatacatataaggtctctctgtcgc

SEQ ID NO: 17338 - DNA, 201 bp, Homo sapiens
gaataagaacatactagaagtcccttctgctaggacaacgaggtaagtgcttctggtaaaaatgtgtcatagtgtgtgtgtgtctgtgtgtgtatgatacrtatataaatatatgcatatttgtacatatatatatacatatgtacaaatatacatacatataaggtctctctgtcgcccaggctgaaataaagcagtgtg

SEQ ID NO: 17339 - DNA, 201 bp, Homo sapiens
atatgtacaaatatacatacatataaggtctctctgtcgcccaggctgaaataaagcagtgtgatcatagctcactgcagcctcaaactcttaggcttaaygatcctcctgcctcagcctcccaaatagctcagactacaggtgcacaccagcatgcctggctaatttttctgttttttgtagagacaaggtctcactatg

SEQ ID NO: 17340 - DNA, 201 bp, Homo sapiens
aatttcggacacagtatgataaataagcaaatagacaagacaagtaagggcttgtgatcattgctttgatggaaataagatggtttttgaaagagtaacayggcaggggatttatttcaaatagtgtgtgcaggagaagtctcgctgtggaaacactgatgtgagatctcgccgcagtaagagcagagagaagagggttca

SEQ ID NO: 17341 - DNA, 201 bp, Homo sapiens
aataagatggtttttgaaagagtaacacggcaggggatttatttcaaatagtgtgtgcaggagaagtctcgctgtggaaacactgatgtgagatctcgccrcagtaagagcagagagaagagggttcacatgaaggaagcagcacttgcgaaggtcctgaggctggaaagagtttggaatgcgtaccatgtgtgtattcca

SEQ ID NO: 17342 - DNA, 201 bp, Homo sapiens
caattcaagatgagatttgggtggggacacagccaaaccatatcaaagagtaagggacaaggttttttcaaacctatgaggcaggtggagatggtgtgctrcagctgtaggattccctggcctggggagaagtccacttatatgtctctgagtactacgcaaaaatttttttgtttcctggaggattttcaaaattcaaaa

SEQ ID NO: 17343 - DNA, 201 bp, Homo sapiens
ttttttttcccttctgtcctccctccccgcgagtttcgggcgctggcttagagggttcccgctttctcaagggaaggggagctgccgagaccgcgctccgytccccagccgggccggatgcctcactgagcccaggtccgagtcagtcggggtaactcagggaaaggggagcctccgcctgggagtagaaggtcctttccg

SEQ ID NO: 17344 - DNA, 201 bp, Homo sapiens
tccaagcgtgctgcaaaggaactccaaggcgcccgcatcaccatcgccacccacccttcccagatggtgctgttttaaatacggatctgcagggctgaacrcagaactgggagatttattgcaaaatcccgggaggggcgggggggggtggtgtgcggaacggggaatggaggagcagaatttaaaggtgcaacgcttgct

SEQ ID NO: 17345 - DNA, 201 bp, Homo sapiens
gccttaaactccactagggcatcagagggagctgtaggcattattttctcctattttgatttatttaattaaattaaaaacattttttacaaatagttttyaaaatttcaggcctaatggaaagttttaactagtcttcctaagacagtatttccctctcccacagttagacactcaaagaaagcaggactcttcctctag

SEQ ID NO: 17346 - DNA, 201 bp, Homo sapiens
ccaaaggatccactccaaacttggaactttcctgaaaatagcatctcatttgggagcatgccaggaattggtgtctgggtcctttgtgtctttgcaccaaytcagaactctggatactagctctagaaactaagctgggatatattctgggtaagggagtagcatatctacttgggcatcttcctgatacatttatttcat

SEQ ID NO: 17347 - DNA, 201 bp, Homo sapiens; identical to SEQ ID NO: 4010

SEQ ID NO: 17348 - DNA, 201 bp, Homo sapiens
aagtcttctatggcctttggtttccttacctgtaaaacaggatggctcaatgaaattatctttcttctttgctataatagagtatctctgtgggaagaggraaaaaaaagtcaatttaaaggctccttatagttccccaactgctgttttattgtgctattcatgcctagacatcacatagctagaaaggcccatcagacc

SEQ ID NO: 17349 - DNA, 201 bp, Homo sapiens
tgcctgtaatcccagctctttgggaggctgaggcgggtggatcacctgaggtcaggagttcgagaccagcctggccaacatggtgaaactccgtctctacyaaaacttaaaaaatgagccaagtgtggtggcgcatgcctgtaatcccagctacttgggaggctgaggcaggagaattgcttgaacccaggaggcagaggt

SEQ ID NO: 17350 - DNA, 201 bp, Homo sapiens
ggaagactgaaggtaggagtaactaggaagcttaaataaacataaatataaaatgcttatagtgatagaattgacctcagccaattaaaattattaatagwaaaaacatgtcaatgtcaagcctactacctctgttctcacttgagtaatgaggattagtttatatttcccgacaagaatagatgggaattcaaatttctt

SEQ ID NO: 17351 - DNA, 201 bp, Homo sapiens; identical to SEQ ID NO: 4004
  misc_feature (1)...(201): n = A,T,C or G, or insertion/deletion polymorphism (see Tables 1-2)

SEQ ID NO: 17352 - DNA, 201 bp, Homo sapiens
tgcaagtcagcccgctcttgatgtctgtttatgtttagattccatcttttggaagatttcattcctctgcactatctcagtatctcagatgcttttgagamtgggtccttttcccctcctatgtttggccatggccaccccctcagggttgtgttgtgtttcacagctgctgtttgtagggttgacctttacaatgtacaa

SEQ ID NO: 17353 - DNA, 201 bp, Homo sapiens; identical to SEQ ID NO: 4005

SEQ ID NO: 17354 - DNA, 201 bp, Homo sapiens
attgctacaaagagaataaaatgcctaggaatacaacttacaagggatgtgaaggacctctttaaagagaactacaaaccactgctcaatgaaataagagrggacacaaacaaatggaagaacattccattctcatggataggaagaatcaatatcatgaaaatggccatactgcccaaagtaatttatagatccaatgct

SEQ ID NO: 17355 - DNA, 201 bp, Homo sapiens
cctctttaaagagaactacaaaccactgctcaatgaaataagagaggacacaaacaaatggaagaacattccattctcatggataggaagaatcaatatcrtgaaaatggccatactgcccaaagtaatttatagatccaatgctatccccatcaagctaccattgactttcttcatagaattagaaaaaactactttaaa

SEQ ID NO: 17356 - DNA, 201 bp, Homo sapiens
gttgatgagtgcagcaaaccaccatggcatctgtatacctaggtaacaaacctgcacgttctgcacatgtaccccagaacttaaaagtattattattattwtaataataataataataaaagaaatacaataaaatagaatgcagcatacagcagtgattctcaaacacattcagcatcagaattacccttgaatctttaa

SEQ ID NO: 17357 - DNA, 201 bp, Homo sapiens
catttccagagtcatcatccctgtacagaaaaatttttcccacatgatttcaccataaattcattaaatatgatgcttacttgataatttctccaggttctttttttttttaattatactttaagttctagggtacatgtgcacaacctgcaggtttgttacatatgtatacatgtgccatgttggtgtgctgcacccatt

SEQ ID NO: 17358 - DNA, 201 bp, Homo sapiens
catgatttggctctctgtttgtctgttattggtgtataggaatgcttgtgatttttgcacattgattttgtatcctgagactttgctgaagttgcttatcrgcttaaggagattttgggctgagatgatggggttttctaaatatacaatcatgtcatctgcaaacagagacaatttgacttcctctcttcctatttgaat

SEQ ID NO: 17359 - DNA, 201 bp, Homo sapiens
agagagctggatctgttggtttcaggacaagtctagaaataagaaatctgccttgagtgagtgagttggttccctctgttgctatttcaccattaaggacsaaaggaactcacaaggaccagagacatctggctgaaagcaatactagtgtgactggacatctactacctgccatagttggtcatatcgtttccagtatga

SEQ ID NO: 17360 - DNA, 201 bp, Homo sapiens
ttgtgtctctgtcaggctgtggtatcaggatgatgctggcctcataaaatgagttagggaggattccctctttttctattgattagaatagtttcagaatrgtaccagctcctccttatacctctggtagaattcagctgtgaatccatctggtcctgatggatttttttggttggtaggctattaattattgcctcaatt

SEQ ID NO: 17361 - DNA, 201 bp, Homo sapiens
tttctctctcgctgcacttaatgttttttccttcatttcaactttggtgaatctgacaattatgtgtctttgagttactcttcttgaggagtatctttgcrgcattctctgtatttcctgaatttgaatgctggcctgcctcactagattggggaagttctcctggataatatcctgcagagcgttttccaacttggttcc

SEQ ID NO: 17362 - DNA, 201 bp, Homo sapiens
ctttggctcatgctccgtgggttgtacccactgtctgacaagccccagtgagatgaacccggtacctcagttggaaatgcagaaatcacccgtcttctgcrtcactcacgctgggggctgtagactggagctgttcctatttggccatcttggaacctccctttccaagttctttattacagagtgggtcactgaaacttc

SEQ ID NO: 17363 - DNA, 201 bp, Homo sapiens
gagtctatgattttatgatggattttttttttttttacatacaaggatatgcatgggtcttttagtattcaggaatctgttcttcacttgacagtatttayaaattgtgtgtttccccctaaaaaaacttaaattgtgagaatgcttccatttactagaagttggttaatgattatgccaaataaggaaaataagacagaa

SEQ ID NO: 17364 - DNA, 201 bp, Homo sapiens
aaaattagccgggcatggtggtgggcgcctgtaatcccagctacctcctgctgaggcaggagaattgcttgaacccaggaggtggagattgcagtgagccragattgcaccattgcactccagcctgggcgacagagcaagactctgtcttgggaaaaaaacaaaacaaaacaagtgagaagggaatcaagtactacgtaa

SEQ ID NO: 17365 - DNA, 201 bp, Homo sapiens
tgtacctcataatttggtaattaattgtatatgcacttatataacaaaacattattgtgtgtctttgctgtatcagattctaggctggaagttgtagataygatgtttttgtctagaaaaatgttctagaatgtcctactcaggacagtctgttgactttaaagacacatttcctaaacagacacttcatgaggcagcccc

SEQ ID NO: 17366 - DNA, 201 bp, Homo sapiens
aggagaattgcttgaacccaggaggtggagattgcagtgagccgagattgcaccattgcactccagcctgggcgacagagcaagactctgtcttgggaaaaaaacaaaacaaaacaagtgagaagggaatcaagtactacgtaagatgtaatgtggaattttagggaaggaaggcagtgtatgctggagtaattagagaaa

SEQ ID NO: 17367 - DNA, 201 bp, Homo sapiens
ccccaaaaagatactttttttagacttgtattaagacaataaaaagtttaatcagcatgcttcatacctaaatatgcttcactttatagcaaagtttacawgactaaaactgttttgttgtaattctctgagtctcatgtgtttattaatgattttttctgctgtttattcatctgaattctactcattcttcaagaccta

SEQ ID NO: 17368 - DNA, 201 bp, Homo sapiens
agattttattctgacttgaaataaattttctaattagaaacttccaggtgagagcaaaggcctggaacaatattcctgagccagaggaggatcgagtttgwctccaggcctaacacttactaggtctatgaccttgggtcagtaatttaaattctctgtatctcaacctctcaacagggtattggtagggattaaatgtgt

SEQ ID NO: 17369 - DNA, 201 bp, Homo sapiens
gacaagccccagtgagatgaacccggtacctcagttggaaatgcagaaatcacccgtcttctgcgtcactcacgctgggggctgtagactggagctgttcmtatttggccatcttggaacctccctttccaagttctttattacagagtgggtcactgaaacttcatggaacaaattggaaattatcttcttaattaatgt

SEQ ID NO: 17370 - DNA, 201 bp, Homo sapiens
gtatttaaacctaggaaacatagagtggctttggtatttgtaggcttagtcatgtgtgtcctaaacgtcctcttaaacttctacttaaggcatagaattayttaatcctaaataattttatacttaagtgcctcactggatttccagaatatttacactgtaaagatttagaaaggtcatgaacccaattattgactatat

SEQ ID NO: 17371 - DNA, 201 bp, Homo sapiens; identical to SEQ ID NO: 4009

SEQ ID NO: 17372 - DNA, 201 bp, Homo sapiens
tttttaaatgtataacactagccttttaaattgtattgtgctactaaaagaaattgtgcctgcattcatcttacaacctgggaaccaacgcagagggtctstggggtagcggtatccagcttcatgccctctgtcctttattgctttctggttagcctgcgtatttcacatacattaaatattccacaataaactctgcca

SEQ ID NO: 17373 - DNA, 201 bp, Homo sapiens
ctagtaatcttttaaagcaaagtaatatgtaattgggaacgttgattttctaactgcatataaaaggcgacatgatattaaatgagacccctccctactgrctcaatatcctgcaaaatctctctctcccctttattattatcgaaaaatctatttttatatgagtttgttgtaaggtcaaaagccattttggtcttacaa

SEQ ID NO: 17374 - DNA, 201 bp, Homo sapiens
cttttttccttttttaaaagccattttaagtacttcagtcttgaatcaaatgatcccaaatattggacaccaacctagaaattgggttacctcctgggaastttatcgaagaagagagattttggttggagagggggttttgatgtttgatacttatatttactattttaatatttcattgttgttgttgctgctgctgct

SEQ ID NO: 17375 - DNA, 201 bp, Homo sapiens
ttccagggccataaagtcgttgtcttttttttcttctacttcattttgtaaaatgtgataaatgttggtaaatatagaccagtagtaagtattatgacackaaaagcattatgtatgtggaactattttaagttattacagaacattttctatttataaatgatataagcagaaagaaatgatttccagataaacaaggct

SEQ ID NO: 17376 - DNA, 201 bp, Homo sapiens
ctgggccctgccccacccctactaaatcacaatttcaggaggagggaccttcattttaacactcacccaggtgatttttatgctccgaggaggtccagggwctccaagttaagtacggtactgctgtcttattctttattctaaattttaaggtctgcacaaattggttgaactaatgagaagaaaattcagctttaaagc

SEQ ID NO: 17377 - DNA, 201 bp, Homo sapiens
tttttcatttttttcatgaagaatttaaaatttggctgtagaaaatctctcactccaaacatcacacagcctaaataggtgagtctcaaaaataagctaaygttcatctttcatctgattcaatgtcctgaaaccctttggtttaaatttgttaattcttctcatggcttttctcctagcaaaaccaactaataccacagc

SEQ ID NO: 17378 - DNA, 201 bp, Homo sapiens; identical to SEQ ID NO: 4006

SEQ ID NO: 17379 - DNA, 201 bp, Homo sapiens; identical to SEQ ID NO: 4008

SEQ ID NO: 17380 - DNA, 201 bp, Homo sapiens
tacctttgagagaaattatatcagtatataataagcacctgagaatatgaaagcacaaatccaatttaaatgtgaaaggtctacaacttgggattttaaakggagtacagaaaagccactgtttcttaaacaattttgttgagggggaaaacagtgaaagctaaatgttctattcaagagttgtttcttttgaaaataatg

SEQ ID NO: 17381 - DNA, 201 bp, Homo sapiens
ggagaattgcttgaacccaggaggtggagattgcagtgagccgagattgcaccattgcactccagcctgggcgacagagcaagactctgtcttgggaaaaaaacaaaacaaaacaagtgagaagggaatcaagtactacgtaagatgtaatgtggaattttagggaaggaaggcagtgtatgctggagtaattagagaaag

SEQ ID NO: 17382 - DNA, 201 bp, Homo sapiens
gagaattgcttgaacccaggaggtggagattgcagtgagccgagattgcaccattgcactccagcctgggcgacagagcaagactctgtcttgggaaaaaaacaaaacaaaacaagtgagaagggaatcaagtactacgtaagatgtaatgtggaattttagggaaggaaggcagtgtatgctggagtaattagagaaagg

SEQ ID NO: 17383 - DNA, 201 bp, Homo sapiens
agaattgcttgaacccaggaggtggagattgcagtgagccgagattgcaccattgcactccagcctgggcgacagagcaagactctgtcttgggaaaaaaacaaaacaaaacaagtgagaagggaatcaagtactacgtaagatgtaatgtggaattttagggaaggaaggcagtgtatgctggagtaattagagaaaggg

SEQ ID NO: 17384 - DNA, 201 bp, Homo sapiens
cctcaaagaacttacctttcagctgaagactgactagaatgagcaaatacggttaacaattaacaagtgagtaggccagctcggccaacatggtgaaaccmtgtctctactaaaaatacaaaaattagccgggcatggtggtgggcgcctgtaatcccagctacctcctgctgaggcaggagaattgcttgaacccaggag

SEQ ID NO: 17385 - DNA, 201 bp, Homo sapiens
gaattgcttgaacccaggaggtggagattgcagtgagccgagattgcaccattgcactccagcctgggcgacagagcaagactctgtcttgggaaaaaaacaaaacaaaacaagtgagaagggaatcaagtactacgtaagatgtaatgtggaattttagggaaggaaggcagtgtatgctggagtaattagagaaagggg

SEQ ID NO: 17386 - DNA, 201 bp, Homo sapiens
aaccattgttagaaaaggtaggagataccactgttccaacaaaaagtattgagtttggtgttgcacccacttaacttcaaggccttacaagtgagtagacagttagttagaattgcagaagtgccactcagagagcagggcttgcaatgtggggttggactttgtcaccattgtgttaattcctaattctatgcagatgct

SEQ ID NO: 17387 - DNA, 201 bp, Homo sapiens
accattgttagaaaaggtaggagataccactgttccaacaaaaagtattgagtttggtgttgcacccacttaacttcaaggccttacaagtgagtagacagttagttagaattgcagaagtgccactcagagagcagggcttgcaatgtggggttggactttgtcaccattgtgttaattcctaattctatgcagatgctc

SEQ ID NO: 17388 - DNA, 201 bp, Homo sapiens
ccattgttagaaaaggtaggagataccactgttccaacaaaaagtattgagtttggtgttgcacccacttaacttcaaggccttacaagtgagtagacagttagttagaattgcagaagtgccactcagagagcagggcttgcaatgtggggttggactttgtcaccattgtgttaattcctaattctatgcagatgctca

SEQ ID NO: 17389 - DNA, 201 bp, Homo sapiens
cattgttagaaaaggtaggagataccactgttccaacaaaaagtattgagtttggtgttgcacccacttaacttcaaggccttacaagtgagtagacagttagttagaattgcagaagtgccactcagagagcagggcttgcaatgtggggttggactttgtcaccattgtgttaattcctaattctatgcagatgctcag

SEQ ID NO: 17390 - DNA, 201 bp, Homo sapiens
gcagaaaaagaagcactagctgcctattccaaaatgtgtaaaacaccactcagctttttaaaagtaggataaactcagagcgcgcgcacacgcgcgcgcgcacacacacacacacacacacagagagaacatctctagtaaaaagaaaagttgagctttcttagctagatgtgtgtattagccagaaaaagccaaggagtg

SEQ ID NO: 17391 - DNA, 201 bp, Homo sapiens
ttcaccacctgacggtaaccttgggttggtccataggtatgttttcattttgcttgttcatccattttaattggcttcctagagcatgcttgtagatgtaragccaaatttagagtagagcaaccctctggcaaacaggaagagattaattttgtggtatgcttttaagggacttcccaggaaacttcaaaagcagaaaaa

SEQ ID NO: 17392 - DNA, 201 bp, Homo sapiens
cagaaaaagaagcactagctgcctattccaaaatgtgtaaaacaccactcagctttttaaaagtaggataaactcagagcgcgcgcacacgcgcgcgcgcacacacacacacacacacacagagagaacatctctagtaaaaagaaaagttgagctttcttagctagatgtgtgtattagccagaaaaagccaaggagtga

SEQ ID NO: 17393 - DNA, 201 bp, Homo sapiens
gagagctctggctggcatctggtgggtgcccctctgggacaaaccttccagaggaaggaacaggcagcagtctttgctgttctgcagcttctgctggtgayacccaggcaaacagggtctggagtggacctccaccaaattccagcagacctgcagcagaggggcctgactgttagaaggaaaactaacaaacaggaatag

SEQ ID NO: 17394 - DNA, 201 bp, Homo sapiens
gccctgagttctaacataaactttcttcatgacataaggcaagtcttctatggcctttggtttccttacctgtaaaacaggatggctcaatgaaattatcwttcttctttgctataatagagtatctctgtgggaagaggaaaaaaaaagtcaatttaaaggctccttatagttccccaactgctgttttattgtgctatt

SEQ ID NO: 17395 - DNA, 201 bp, Homo sapiens
tttcgtgtctctgggaggaaaaatgcttaacagtctaagtcttgtaaccttgaggtctttaacaacttaaataaacctcaaaagtgtcacgtcatcctctacacacacacacacacacacacacacacacactcaacttgtaagatgacatggtttcacctaaactgttgtggaaatgaatagcactttaaaaatggtgca

SEQ ID NO: 17396 - DNA, 201 bp, Homo sapiens
ttcgtgtctctgggaggaaaaatgcttaacagtctaagtcttgtaaccttgaggtctttaacaacttaaataaacctcaaaagtgtcacgtcatcctctacacacacacacacacacacacacacacacactcaacttgtaagatgacatggtttcacctaaactgttgtggaaatgaatagcactttaaaaatggtgcac

SEQ ID NO: 17397 - DNA, 201 bp, Homo sapiens
atttaatgagttgcttattttaattttacaactgctacctcagaagtatctcaaattatctttctttggctggtgtctttctctgctgatctgctactgckgtgtgtgtgtgtgtgtgtgtgtgtgtgtgtgtgtctgtgtgtgtgtgtgtatgggcgtgtgtgtctctgtgtgtgttttctagtgggaatttaacaagca

SEQ ID NO: 17398 - DNA, 201 bp, Homo sapiens
gctggtgtctttctctgctgatctgctactgctgtgtgtgtgtgtgtgtgtgtgtgtgtgtgtgtgtctgtgtgtgtgtgtgtatgggcgtgtgtgtctctgtgtgtgttttctagtgggaatttaacaagcagtgagtctcttaaatttacatgccataatctatgtcaagaacattgcgtactacttagcaataaaaat

SEQ ID NO: 17399 - DNA, 201 bp, Homo sapiens
ctggtgtctttctctgctgatctgctactgctgtgtgtgtgtgtgtgtgtgtgtgtgtgtgtgtgtctgtgtgtgtgtgtgtatgggcgtgtgtgtctctgtgtgtgttttctagtgggaatttaacaagcagtgagtctcttaaatttacatgccataatctatgtcaagaacattgcgtactacttagcaataaaaata

SEQ ID NO: 17400 - DNA, 201 bp, Homo sapiens
agaaaaagaagcactagctgcctattccaaaatgtgtaaaacaccactcagctttttaaaagtaggataaactcagagcgcgcgcacacgcgcgcgcgcamacacacacacacacacacagagagaacatctctagtaaaaagaaaagttgagctttcttagctagatgtgtgtattagccagaaaaagccaaggagtgaa

SEQ ID NO: 17401 - DNA, 201 bp, Homo sapiens
ggaggctgaggtaggagactaacttgaaccatggagacagaggctgtagtaagccgagatcatgccattgcactccagcctggcaaaaaaaaaaaaaaaaraaagaaagaaagaaagaaagaattgctcactgtaatgactttcatgccatggactcaactctcttggcagtctggtaaagcttatgtaaacccttctcat

SEQ ID NO: 17402 - DNA, 201 bp, Homo sapiens
tccaaaatgtgtaaaacaccactcagctttttaaaagtaggataaactcagagcgcgcgcacacgcgcgcgcgcacacacacacacacacacacagagagracatctctagtaaaaagaaaagttgagctttcttagctagatgtgtgtattagccagaaaaagccaaggagtgaagggttttagagaactggaggagata

SEQ ID NO: 17403 - DNA, 201 bp, Homo sapiens; identical to SEQ ID NO: 4007

SEQ ID NO: 17404 - DNA, 201 bp, Homo sapiens
gaaaactacaaattttgctattattattgttattacttcccaagtctcttattgatctgttagaaatagagctacacaggaaattgtaggacagttagtaygtggtagtgttatctgctttttaattattcaagtaaggttttattccattagaggaactcaagaagttggtcatggctgataattgctatctgtcaaatt

SEQ ID NO: 17405 - DNA, 201 bp, Homo sapiens
ggacacccctcccccagcctcgctgctgctttgcagttcgatctcagactgctgtgctagcagtgagccaggctccgtgggcatgggaccctccgagccargcctgggacataatctcctggtgtgccgtttgctaagaccattggaaaagcacagtattagggtggggagtgtcctgattttccaggtaccgtcagtcat

SEQ ID NO: 17406 - DNA, 201 bp, Homo sapiens
atcatgccattgcactccagcctggcaaaaaaaaaaaaaaaaaaaagaaagaaagaaagaaagaattgctcactgtaatgactttcatgccatggactcarctctcttggcagtctggtaaagcttatgtaaacccttctcataaaaatgtctaaatggggccaggcgcgacggctcacacctgtaatctcagcactttgg

SEQ ID NO: 17407 - DNA, 201 bp, Homo sapiens
tgaaccgtgacacttcagaagagctgggagctggggtagagcagtggctaggagaacatattcaattatatttcctcctgcattaagctacaagtaatgakcactttcctgtgctttacagttaagtaattaaaagaaattatagagtgggatgcaaaaataacccgaaggacaactggatgtgtggagccaccagttttc

SEQ ID NO: 17408 - DNA, 201 bp, Homo sapiens
ctgaggcacgagaatcacttgaatctgggaggtggaggttgcagtgagccgagattagccactgcactccagcctggatgacacagtgagactttgtctcaaaaaaaaaaaaaaattctaagtgaatgaaataaatgtataagattacaaaggaagccagtggcattgatgtacagttataaaaacatttaaaataatata

SEQ ID NO: 17409 - DNA, 201 bp, Homo sapiens
tgtgtatgacagacacatgtctccaacaactatatgttcacaaggactaagagccatccttttgggtccatcattcaacattgatctcacattcgtgttcrtatcagtatctttacagtgcgctcccagttacatctccctaatttcccttagtaggcttcacagaatttgcagtgtatgcaatggcagatgaccacatgt

SEQ ID NO: 17410 - DNA, 201 bp, Homo sapiens
agcagaaaaagaagcactagctgcctattccaaaatgtgtaaaacaccactcagctttttaaaagtaggataaactcagagcgcgcgcacacgcgcgcgcrcacacacacacacacacacacagagagaacatctctagtaaaaagaaaagttgagctttcttagctagatgtgtgtattagccagaaaaagccaaggagt

SEQ ID NO: 17411 - DNA, 201 bp, Homo sapiens
gttccccctggaacattgggttaggatcatattagaacataaccaaaaagaaataaagattcagacgaattcacaattaatttttaagccccacaaaagtkaaataggtagcattattttttcaagctgtgaaactttccctcattttagtaatagagaaaatgttcagattataaacttggaaactttgctcctaacata

SEQ ID NO: 17412 - DNA, 201 bp, Homo sapiens
gtcctttataatgtagtacaagtattttttttaaatgtataacactagccttttaaattgtattgtgctactaaaagaaattgtgcctgcattcatcttacaacctgggaaccaacgcagagggtctctggggtagcggtatccagcttcatgccctctgtcctttattgctttctggttagcctgcgtatttcacataca

SEQ ID NO: 17413 - DNA, 201 bp, Homo sapiens
ttaatgggagatctgttttccagatgactatacatgtggaaaggagaagttttttgagtgttttttttaaccccttttaaagaatggtttttcatttagtstctacatttgggggtaaaaggtcctctagggagacttttcaaaagtatttgaagtttgcatctgatttcagaggtgagttggaggcctatctgtgtatga

SEQ ID NO: 17414 - DNA, 201 bp, Homo sapiens
cctattccaaaatgtgtaaaacaccactcagctttttaaaagtaggataaactcagagcgcgcgcacacgcgcgcgcgcacacacacacacacacacacavagagaacatctctagtaaaaagaaaagttgagctttcttagctagatgtgtgtattagccagaaaaagccaaggagtgaagggttttagagaactggagg

SEQ ID NO: 17415 - DNA, 201 bp, Homo sapiens
tgatagtatagcagagaacttgtttacattctttttacattcatcttctaaaacctggggtgctctctctctctctctctctctctctctctctctctctstgtgtgtgtgtgtgtgtgcgtgcacgtgcgcgtgtgtgtagagggggagagagagagagagagaactgtgaactgtgaaatataacacagccagcagctt

SEQ ID NO: 17416 - DNA, 201 bp, Homo sapiens
gcctcttgtgtaagaggaggcctcggcttgagataacataggatagtaagcctcctagagaaatttctatatggaaacatggtctgctatgaagctagaartgagaggacattatatttgaccattatatttggcttcagagcttctcaacatggggcccaaagtcaaggtcccttgtttcattaagaggaggtccaggag

SEQ ID NO: 17417 - DNA, 201 bp, Homo sapiens
atagtatagcagagaacttgtttacattctttttacattcatcttctaaaacctggggtgctctctctctctctctctctctctctctctctctctctgtstgtgtgtgtgtgtgtgcgtgcacgtgcgcgtgtgtgtagagggggagagagagagagagagaactgtgaactgtgaaatataacacagccagcagctttg

SEQ ID NO: 17418 - DNA, 201 bp, Homo sapiens
ctacatcacactcatctaaactgcaagtttgacaagttgacatccaaaagaaaggctctcctaaataacctcgccacagaaatttgggtgacctttgtagytctggagaaagcagaggcaaaaatgaaacctaaaaattatttgtgggtttttaaaaaatgttttctcatggagtaaaggtctacagctgagttcttttca

SEQ ID NO: 17419 - DNA, 201 bp, Homo sapiens
ttcagaaagtgggtaaaaacagactcctccaagctaaaggagcatgctctaacccaatgcaaagaagctaagaaccttgaaaaaaggttggaggaattgcyaactagaataactagtttagagaagaacataaatgacctaatggagctgaaaaacacagcacgagaactctgtgaagcatacacaagcttcaataactga

SEQ ID NO: 17420 - DNA, 201 bp, Homo sapiens
ggaagcccatcagactaacagtggatctctcagcagaaaccctacaagcctacaagccagaagagagtgggggccaatattcaacattcttaaagaaaagwattttcaacccagaatttcatatccagccaactaagcttcagaagtgaagtagaaataaaatcctttacagacgagcaaatgctgagagattttgtcacc

SEQ ID NO: 17421 - DNA, 201 bp, Homo sapiens
aatgccccaattaaaagaccacagactggcaaattggataaagagtcaagacccatcagtgtgctgtgttctggagacccatctcacatgcaaagacacayataggctgaaaataaagggatggaggaagatctaccaagcaaatggaaagcaaaaaaaaagcaggggttgcaatcctagtctctgataaaacagacttta

SEQ ID NO: 17422 - DNA, 201 bp, Homo sapiens
taggctgaaaataaagggatggaggaagatctaccaagcaaatggaaagcaaaaaaaaagcaggggttgcaatcctagtctctgataaaacagactttaarccaacaaagatcaaaagagacaaagaaggccattacataatgataaagggatcaattcaacaagaagagctaactatcctaaacatatatgcacccaata

SEQ ID NO: 17423 - DNA, 201 bp, Homo sapiens
gaatctctgggacacagctaaaacagtgtttaggggaaattcatagcaataaatgcccacaggagaaagcaggaaagagctaaaatcaacactctaacatyacaattaaaggaactagagaagcaagagcaaacacattcaaaagctagcagaagacaagaaataactaagatcagagcagaactgaaggagattagagac

SEQ ID NO: 17424 - DNA, 201 bp, Homo sapiens
tctgtcaccactcctattcaacatagtattggacgttctagccagggcaatcaggcaatagaaagaaataaagcatattcaaataggaagagaggaagtcmaattgtctctgtttgcagatgacatgattgtatatttagaaaaccccatcatctcagcccaaaatctccttaagctgataagcaacttcagcaaagtctc

SEQ ID NO: 17425 - DNA, 201 bp, Homo sapiens
ttgaaaaaaaaaatgtatgcaggccgggcgcagtggctcatgcctgtaatcccagcactttgggaggccaaggcaggtggctcacttgagggcaggagtcygagaccagcctggtcaacatggtgaaaccccatcttaactaaaaatacaaaaattagctggacatagtggcgcatgcctgtaatcccagctacttgggag

SEQ ID NO: 17426 - DNA, 201 bp, Homo sapiens; identical to SEQ ID NO: 4018

SEQ ID NO: 17427 - DNA, 201 bp, Homo sapiens
atcagtagattagatgatttctaagttctagctgtaagctcctctggttcagcgccatggcaatgagaaagaatcaagggcaaggtcaggggaatggacgwgggaaggtgagagtggccagtaccccactcacggctttctgtgcctgcagagttcacccatgcagggcagggagggctgattgaagagcccacaggtgat

SEQ ID NO: 17428 - DNA, 201 bp, Homo sapiens
caactccactccatccactccactccgtccaacttcatcccatccactacattcaactccactccatccactctactccatctactaccttcaactctacyccatccatccactccactccatccattccatccaacttcatcccatctactacattcaactctactccatccactccactccatccattgcatccaactt

SEQ ID NO: 17429 - DNA, 201 bp, Homo sapiens
catcccacagcgggaggtggtcgataccactggcctcaaccagtcccacctgtcccaacacctcaacaagggcactcccatgaagacgcagaagcgggccrccctgtacacctggtacgtccgcaagcagcgagaggtggcgcagcgtaagtaatgaccctaccccgcatcttccctgggagggcccaggactctccccta

SEQ ID NO: 17430 - DNA, 201 bp, Homo sapiens
accccactcacggctttctgtgcctgcagagttcacccatgcagggcagggagggctgattgaagagcccacaggtgatgagctaccaaccaagaaggggbggaggaaccgtttcaagtggggcccagcatcccagcagatcctgttccaggcctatgagaggcagaagaaccctagcaaggaggagcgagagacgctagt

SEQ ID NO: 17431 - DNA, 201 bp, Homo sapiens
cagggcggaatgcatccagagaggggtgtccccatcacaggcacaggggctgggctccaacctcgtcacggaggtgcgtgtctacaactggtttgccaacbggcgcaaagaagaagccttccggcacaagctggccatggacacgtacagcgggccccccccagggccaggcccgggacctgcgctgcccgctcacagctc

SEQ ID NO: 17432 - DNA, 201 bp, Homo sapiens
gtttgcctctgcagtgtcctccagcagcctggtgctgtaccagagctcagactccagcaatggccagagccacctgctgccatccaaccacagcgtcatcragaccttcatctccacccagatggcctcttcctcccagtaaccacggcacctgggccctggggcctgtactgcctgcttggggggtgatgagggcagcag

SEQ ID NO: 17433 - DNA, 201 bp, Homo sapiens
ggatttttaacttttaaggagaaattggagaatttgagatgcagagtcaatatatgactgtagtattaggactctttcagtaacaggggacagaaccccarctcaaatggatttaaacagaaaagggaatgaattgactgaagcaatgtgaggagtccagggctgcttcaggcatggctagatcaaggggctcaaatgagg

SEQ ID NO: 17434 - DNA, 201 bp, Homo sapiens; identical to SEQ ID NO: 4026

SEQ ID NO: 17435 - DNA, 201 bp, Homo sapiens; identical to SEQ ID NO: 4028

SEQ ID NO: 17436 - DNA, 201 bp, Homo sapiens
tcaggaggctgctctgctcccccaggtcttcacctcagacactgaggcctccagtgagtccgggcttcacacgccggcatctcaggccaccaccctccacrtccccagccaggaccctgccggcatccagcacctgcagccggcccaccggctcagcgccagccccacaggtgagaggccctggctccaccccctccctta

SEQ ID NO: 17437 - DNA, 201 bp, Homo sapiens
ttgaacacaggttaagaaagtgatggcatgtgtgctgtgtgtttgtcatcagtagattagatgatttctaagttctagctgtaagctcctctggttcagcrccatggcaatgagaaagaatcaagggcaaggtcaggggaatggacgtgggaaggtgagagtggccagtaccccactcacggctttctgtgcctgcagagt

SEQ ID NO: 17438 - DNA, 201 bp, Homo sapiens
tattaccagctcccagcctggtgtggttgtacccacctgtaatcccagcacatttgggaggcaaaagtgggaggatcacttgagcctaagagttcaagacmagcctgggcaacagaaggagaccccatctctccaaaaaatacgaataaatgagccaggtgtggtgcagcaggtgtgtagtcctagccacttatgcccgct

SEQ ID NO: 17439 - DNA, 201 bp, Homo sapiens
agccttgtttgcctctgcagtgtcctccagcagcctggtgctgtaccagagctcagactccagcaatggccagagccacctgctgccatccaaccacagcrtcatcgagaccttcatctccacccagatggcctcttcctcccagtaaccacggcacctgggccctggggcctgtactgcctgcttggggggtgatgaggg

SEQ ID NO: 17440 - DNA, 201 bp, Homo sapiens
ctcagccttcaaaccccaatcttgaagtattctgatcctgcccatcaggcagcatcagggcactgagactcaggaaaacagtagccacggcaggagggggsggggacagaggatctgacgtccccaacaaaagccagactgcctgcatcctaatcctagctctgcccctttctagcttgagcaggtgattttatacttctg

SEQ ID NO: 17441 - DNA, 201 bp, Homo sapiens
ttccagatcttcccatggccgattccttctccttcagctccctgattgctccatccaaaagggggccccacccccgtcactctcttccactactgttgttyactttctctggttccctgtcaagacttgtgatcatctgatttgtttgttttctatctcctgccatgaaaatagaagctcttcaaggacaaggcccgtgtt

SEQ ID NO: 17442 - DNA, 201 bp, Homo sapiens
tagctgtaagctcctctggttcagcgccatggcaatgagaaagaatcaagggcaaggtcaggggaatggacgtgggaaggtgagagtggccagtaccccaytcacggctttctgtgcctgcagagttcacccatgcagggcagggagggctgattgaagagcccacaggtgatgagctaccaaccaagaaggggcggagga

SEQ ID NO: 17443 - DNA, 201 bp, Homo sapiens
gtccacggtaagtggtatgtggggacaagggacacgtgggaaggtgggagggttggggaggactgtcccagtgacagcagtcacctaaacctctttgcacktcagtttggttccattccattcatgccactccttatcactctacttcactctgttcattcatccattccactctatctcattccattcactctactcctt

SEQ ID NO: 17444 - DNA, 201 bp, Homo sapiens
ccctttctataaggttcctggacccggccctggcagctgtcatgacagccactgaggccattctgtgtcctggcattcaccccatgaggcgtgtccatgaycacccccattttacagatgagaaagtggacactcaaggaggggagggacttgcctcatctcccacagctaccagatggcagggccaggactcgaacccag

SEQ ID NO: 17445 - DNA, 201 bp, Homo sapiens
agcgtggtggacccgggccgcgtggccctgtggcagccgagccatggtttctaaactgagccagctgcagacggagctcctggcggccctgctcgagtcarggctgagcaaagaggcactgatccaggcactgggtgagccggggccctacctcctggctggagaaggccccctggacaagggggagtcctgcggcggcgg

SEQ ID NO: 17446 - DNA, 201 bp, Homo sapiens
agcctggcctggaggctcatgggtggctatttctgcagggcggaatgcatccagagaggggtgtccccatcacaggcacaggggctgggctccaacctcgwcacggaggtgcgtgtctacaactggtttgccaaccggcgcaaagaagaagccttccggcacaagctggccatggacacgtacagcgggccccccccaggg

SEQ ID NO: 17447 - DNA, 201 bp, Homo sapiens
gcctgtgtccacgtttgtcatgtgtgtgcgtctacaagtctctgtcctcatgaccatgtgtctgtgtccctgtgtcctggcataaatgaccatacctcacygtccctgagtctatgtgtaggcccctgggctccataactgctttcatgcacagtccccaccctcagagttgacaaggttccagcacccaggaccgcagcc

SEQ ID NO: 17448 - DNA, 201 bp, Homo sapiens
cagcaactcaagcagggaggcaggcactaagcataatacatcaattctgtggtacctcagaaggtgaagggtctatgggcaaattacagcagggtaagggrgactgatgttttctaagtttttgttttatgaagaaaaattaagcccagaaagcccttatttgcaggtacaattatgcagaagcccagtacataagataga

SEQ ID NO: 17449 - DNA, 201 bp, Homo sapiens
tgctgagcagatcccgtccttgccctctcccagggaggacccgtggcgtgtggcgaagatggtcaagtcctacctgcagcagcacaacatcccacagcggraggtggtcgataccactggcctcaaccagtcccacctgtcccaacacctcaacaagggcactcccatgaagacgcagaagcgggccgccctgtacacctg

SEQ ID NO: 17450 - DNA, 201 bp, Homo sapiens
acacagcaggagatgatgatagaggttggctgtcaatggatgcaggggaaaggggtgcctggcaggcattgcagtctgcatgtgtctctgggacaagtgtktttccgtgattgagggtgtctgcaggccagtgtgttcccatgtgaatgcacgtatctgtgtgtgtgcacgactgcttgtgtgagcagatccctagtgcgt

SEQ ID NO: 17451 - DNA, 201 bp, Homo sapiens
gaggcagaatcgcttgaacctgggaggcggaggttgcagtgagctgagattgtgccactgcactgcactccagcctgggcaacagagtgagtactctgccaaaaaaaaaaaaaagaaaaagaaaagtaatttggtggatatgccagctatcacataacactcccagcagggtttgagacagccccctgtgatcaaagcact

SEQ ID NO: 17452 - DNA, 201 bp, Homo sapiens
ctgattgaagagcccacaggtgatgagctaccaaccaagaaggggcggaggaaccgtttcaagtggggcccagcatcccagcagatcctgttccaggcctrtgagaggcagaagaaccctagcaaggaggagcgagagacgctagtggaggagtgcaataggtacaacggcgggcgggaaacagtgctggtttggtctggg

SEQ ID NO: 17453 - DNA, 201 bp, Homo sapiens
cagggccccctgacttggcaggaagaggagggcaaaggactccagagctgcaggggaggggcaaagagtcaggcatcccagacccagggcgaaggcaaccygacggggtggggctgggcctgacctgcccagggccccagatgggactgggggctttggggtgagggtgggggcaggggatgctttcttacctggctgagt

SEQ ID NO: 17454 - DNA, 201 bp, Homo sapiens; identical to SEQ ID NO: 4057

SEQ ID NO: 17455 - DNA, 201 bp, Homo sapiens
ggcggctagcgtggtggacccgggccgcgtggccctgtggcagccgagccatggtttctaaactgagccagctgcagacggagctcctggcggccctgctsgagtcagggctgagcaaagaggcactgatccaggcactgggtgagccggggccctacctcctggctggagaaggccccctggacaagggggagtcctgcg

SEQ ID NO: 17456 - DNA, 201 bp, Homo sapiens
ggctcagagagggggaatgacttgccagagccacttaaattagtggcaggtcccagtggagggctgtttcctgaccaccctgccccctcctccaaaccackggctctgggaaggagaggtggtgcccttgggaggtcttgggcaggggtgggatataactggggggcccagctgattccctccccttccactccaggcctg

SEQ ID NO: 17457 - DNA, 201 bp, Homo sapiens
acagaagccaagctggtgagtgtccttgcttgtaaggaaaacccaacctcatctttccttggcagggagattctggagcagtccctagggaggccctgtgkggaccccggccccccggacacagcttggcttcccctcgtaggtctcagcagctgggggccccctcccccctgtcagcaccctgacagcactgcacagctt

SEQ ID NO: 17458 - DNA, 201 bp, Homo sapiens
gacagcccttgctgagcagatcccgtccttgccctctcccagggaggacccgtggcgtgtggcgaagatggtcaagtcctacctgcagcagcacaacatcmcacagcgggaggtggtcgataccactggcctcaaccagtcccacctgtcccaacacctcaacaagggcactcccatgaagacgcagaagcgggccgccct

SEQ ID NO: 17459 - DNA, 201 bp, Homo sapiens; identical to SEQ ID NO: 4024

SEQ ID NO: 17460 - DNA, 201 bp, Homo sapiens
gcacaacatcccacagcgggaggtggtcgataccactggcctcaaccagtcccacctgtcccaacacctcaacaagggcactcccatgaagacgcagaagygggccgccctgtacacctggtacgtccgcaagcagcgagaggtggcgcagcgtaagtaatgaccctaccccgcatcttccctgggagggcccaggactct

SEQ ID NO: 17461 - DNA, 201 bp, Homo sapiens
ccccactcacggctttctgtgcctgcagagttcacccatgcagggcagggagggctgattgaagagcccacaggtgatgagctaccaaccaagaaggggcrgaggaaccgtttcaagtggggcccagcatcccagcagatcctgttccaggcctatgagaggcagaagaaccctagcaaggaggagcgagagacgctagtg

SEQ ID NO: 17462 - DNA, 201 bp, Homo sapiens; identical to SEQ ID NO: 4047

SEQ ID NO: 17463 - DNA, 201 bp, Homo sapiens
gacgtgggaaggtgagagtggccagtaccccactcacggctttctgtgcctgcagagttcacccatgcagggcagggagggctgattgaagagcccacagrtgatgagctaccaaccaagaaggggcggaggaaccgtttcaagtggggcccagcatcccagcagatcctgttccaggcctatgagaggcagaagaaccct

SEQ ID NO: 17464 - DNA, 201 bp, Homo sapiens
cggctttctgtgcctgcagagttcacccatgcagggcagggagggctgattgaagagcccacaggtgatgagctaccaaccaagaaggggcggaggaaccrtttcaagtggggcccagcatcccagcagatcctgttccaggcctatgagaggcagaagaaccctagcaaggaggagcgagagacgctagtggaggagtgc

SEQ ID NO: 17465 - DNA, 201 bp, Homo sapiens
cccttctgcagtaaggagccctgccccgtccccgctcccaggagagcctagaggggcccccctcagctcctaacgagccccccttctgagttgagtccccrtgaccttcagcctttagcctagttgctgggaagggggacagggcccatgagagcccaggggtccttgcttggaggtttgagcctccagcccctgaactgc

SEQ ID NO: 17466 - DNA, 201 bp, Homo sapiens
tgagcagatcccgtccttgccctctcccagggaggacccgtggcgtgtggcgaagatggtcaagtcctacctgcagcagcacaacatcccacagcgggagrtggtcgataccactggcctcaaccagtcccacctgtcccaacacctcaacaagggcactcccatgaagacgcagaagcgggccgccctgtacacctggta

SEQ ID NO: 17467 - DNA, 201 bp, Homo sapiens
agctgcccaatgggctgggggagactcggggctccgaggacgagacggacgacgatggggaagacttcacgccacccatcctcaaagagctggagaacctyagccctgaggaggcggcccaccagaaagccgtggtggagacccttctgcagtaaggagccctgccccgtccccgctcccaggagagcctagaggggcccc

SEQ ID NO: 17468 - DNA, 201 bp, Homo sapiens
gctccaacctcgtcacggaggtgcgtgtctacaactggtttgccaaccggcgcaaagaagaagccttccggcacaagctggccatggacacgtacagcggsccccccccagggccaggcccgggacctgcgctgcccgctcacagctcccctggcctgcctccacctgccctctcccccagtaaggtccacggtaagtggt

SEQ ID NO: 17469 - DNA, 201 bp, Homo sapiens
cagccccacctatggggagagacagcccttgctgagcagatcccgtccttgccctctcccagggaggacccgtggcgtgtggcgaagatggtcaagtcctrcctgcagcagcacaacatcccacagcgggaggtggtcgataccactggcctcaaccagtcccacctgtcccaacacctcaacaagggcactcccatgaag

SEQ ID NO: 17470 - DNA, 201 bp, Homo sapiens
tggcctcaaccagtcccacctgtcccaacacctcaacaagggcactcccatgaagacgcagaagcgggccgccctgtacacctggtacgtccgcaagcagygagaggtggcgcagcgtaagtaatgaccctaccccgcatcttccctgggagggcccaggactctcccctaactcataggtgggggctggaagcttcacca

SEQ ID NO: 17471 - DNA, 201 bp, Homo sapiens
gaggaaccgtttcaagtggggcccagcatcccagcagatcctgttccaggcctatgagaggcagaagaaccctagcaaggaggagcgagagacgctagtgkaggagtgcaataggtacaacggcgggcgggaaacagtgctggtttggtctgggctgcggcaaggccagggaaggggaaggtgactctaggtcctgtaaaa

SEQ ID NO: 17472 - DNA, 201 bp, Homo sapiens
gcagagctcagcttctcagaaccctccccttcatgcccaggacagggttcctctgagcctggcctggaggctcatgggtggctatttctgcagggcggaabgcatccagagaggggtgtccccatcacaggcacaggggctgggctccaacctcgtcacggaggtgcgtgtctacaactggtttgccaaccggcgcaaaga

SEQ ID NO: 17473 - DNA, 201 bp, Homo sapiens
ggggagactcggggctccgaggacgagacggacgacgatggggaagacttcacgccacccatcctcaaagagctggagaacctcagccctgaggaggcggyccaccagaaagccgtggtggagacccttctgcagtaaggagccctgccccgtccccgctcccaggagagcctagaggggcccccctcagctcctaacgag

SEQ ID NO: 17474 - DNA, 201 bp, Homo sapiens
acggctttctgtgcctgcagagttcacccatgcagggcagggagggctgattgaagagcccacaggtgatgagctaccaaccaagaaggggcggaggaacygtttcaagtggggcccagcatcccagcagatcctgttccaggcctatgagaggcagaagaaccctagcaaggaggagcgagagacgctagtggaggagtg

SEQ ID NO: 17475 - DNA, 201 bp, Homo sapiens
gcctgggactagggctgtcaggcacgtctgccacgtctgcccctctctcccctgcggccagccctctacagccacaagcccgaggtggcccagtacacccrcacgggcctgctcccgcagactatgctcatcaccgacaccaccaacctgagcgccctggccagcctcacgcccaccaagcaggtaaggtccaggcctgct

SEQ ID NO: 17476 - DNA, 201 bp, Homo sapiens
gcacgtctgccacgtctgcccctctctcccctgcggccagccctctacagccacaagcccgaggtggcccagtacacccacacgggcctgctcccgcagaytatgctcatcaccgacaccaccaacctgagcgccctggccagcctcacgcccaccaagcaggtaaggtccaggcctgctggccctccctcggcctgtgac

SEQ ID NO: 17477 - DNA, 201 bp, Homo sapiens
ttctgtgcctgcagagttcacccatgcagggcagggagggctgattgaagagcccacaggtgatgagctaccaaccaagaaggggcggaggaaccgtttcmagtggggcccagcatcccagcagatcctgttccaggcctatgagaggcagaagaaccctagcaaggaggagcgagagacgctagtggaggagtgcaatag

SEQ ID NO: 17478 - DNA, 201 bp, Homo sapiens
tccaacctcgtcacggaggtgcgtgtctacaactggtttgccaaccggcgcaaagaagaagccttccggcacaagctggccatggacacgtacagcgggcsccccccagggccaggcccgggacctgcgctgcccgctcacagctcccctggcctgcctccacctgccctctcccccagtaaggtccacggtaagtggtat

SEQ ID NO: 17479 - DNA, 201 bp, Homo sapiens
gtacagcgggccccccccagggccaggcccgggacctgcgctgcccgctcacagctcccctggcctgcctccacctgccctctcccccagtaaggtccacrgtaagtggtatgtggggacaagggacacgtgggaaggtgggagggttggggaggactgtcccagtgacagcagtcacctaaacctctttgcacgtcagtt

SEQ ID NO: 17480 - DNA, 201 bp, Homo sapiens; identical to SEQ ID NO: 4032

SEQ ID NO: 17481 - DNA, 201 bp, Homo sapiens
cccacgcggtgggggaggcggctagcgtggtggacccgggccgcgtggccctgtggcagccgagccatggtttctaaactgagccagctgcagacggagcwcctggcggccctgctcgagtcagggctgagcaaagaggcactgatccaggcactgggtgagccggggccctacctcctggctggagaaggccccctggac

SEQ ID NO: 17482 - DNA, 201 bp, Homo sapiens; identical to SEQ ID NO: 4033

SEQ ID NO: 17483 - DNA, 201 bp, Homo sapiens
ccttgctgagcagatcccgtccttgccctctcccagggaggacccgtggcgtgtggcgaagatggtcaagtcctacctgcagcagcacaacatcccacagygggaggtggtcgataccactggcctcaaccagtcccacctgtcccaacacctcaacaagggcactcccatgaagacgcagaagcgggccgccctgtacac

SEQ ID NO: 17484 - DNA, 201 bp, Homo sapiens
agccacaagcccgaggtggcccagtacacccacacgggcctgctcccgcagactatgctcatcaccgacaccaccaacctgagcgccctggccagcctcasgcccaccaagcaggtaaggtccaggcctgctggccctccctcggcctgtgacagagcccctcacccccacatcccccgggctcaggaggctgctctgctc

SEQ ID NO: 17485 - DNA, 201 bp, Homo sapiens
cggcaggcaaacgcaacccacgcggtgggggaggcggctagcgtggtggacccgggccgcgtggccctgtggcagccgagccatggtttctaaactgagcyagctgcagacggagctcctggcggccctgctcgagtcagggctgagcaaagaggcactgatccaggcactgggtgagccggggccctacctcctggctgg

SEQ ID NO: 17486 - DNA, 201 bp, Homo sapiens
cccagcaccccgttctcctctggaaggaaccagagtccccagttccttgcgtgccctctggtattttacacgtgcacaaatatgtagaaatcctcttttamctcacttcaaattattcataagtagcagcacagcagacacaccagataaactctgctccacctgggcacacagagcttcctcagcggggttttttcagtg

SEQ ID NO: 17487 - DNA, 201 bp, Homo sapiens
tccagtgagtccgggcttcacacgccggcatctcaggccaccaccctccacgtccccagccaggaccctgccggcatccagcacctgcagccggcccaccrgctcagcgccagccccacaggtgagaggccctggctccaccccctcccttactgtccctgcccccttccatgttggtcccaccccttctgttgctgtccg

SEQ ID NO: 17488 - DNA, 201 bp, Homo sapiens
aggtgggagctgctcccctttcctgtatggccacaggcaccccacctcaccagcaggcgccattagaggctgcccgttctacatccccatccgctggcgghctccccgtctcctggagaactgggtgggtcctgagctcgatgcctcccctctcctcagcagagctgacctagttactaattacccatgtgctttattatt

SEQ ID NO: 17489 - DNA, 201 bp, Homo sapiens
ctccagtgagtccgggcttcacacgccggcatctcaggccaccaccctccacgtccccagccaggaccctgccggcatccagcacctgcagccggcccacsggctcagcgccagccccacaggtgagaggccctggctccaccccctcccttactgtccctgcccccttccatgttggtcccaccccttctgttgctgtcc

SEQ ID NO: 17490 - DNA, 201 bp, Homo sapiens
agggatcggaaaacgccctgagtgaaaaaagtggggcctccagcgtcagggtcaggaaaggagccagggagagaggggcgggggacccctattgaaggcctgggccattggggaggttgaggctgggaagacggtacagaggcagaatgtctagtagaagctgtttcccgggagaagtcagtgtctgggaagaagccgggg

SEQ ID NO: 17491 - DNA, 201 bp, Homo sapiens
agggaggacccgtggcgtgtggcgaagatggtcaagtcctacctgcagcagcacaacatcccacagcgggaggtggtcgataccactggcctcaaccagtyccacctgtcccaacacctcaacaagggcactcccatgaagacgcagaagcgggccgccctgtacacctggtacgtccgcaagcagcgagaggtggcgcag

SEQ ID NO: 17492 - DNA, 201 bp, Homo sapiens
gagacagcccttgctgagcagatcccgtccttgccctctcccagggaggacccgtggcgtgtggcgaagatggtcaagtcctacctgcagcagcacaacawcccacagcgggaggtggtcgataccactggcctcaaccagtcccacctgtcccaacacctcaacaagggcactcccatgaagacgcagaagcgggccgcc

SEQ ID NO: 17493 - DNA, 201 bp, Homo sapiens
ctccccatcctgagtacccctagggacaggcaggtggggtgggtgtgggtgcctggtgggtggctagcagccttgtttgcctctgcagtgtcctccagcakcctggtgctgtaccagagctcagactccagcaatggccagagccacctgctgccatccaaccacagcgtcatcgagaccttcatctccacccagatggcc

SEQ ID NO: 17494 - DNA, 201 bp, Homo sapiens
ggaggacccgtggcgtgtggcgaagatggtcaagtcctacctgcagcagcacaacatcccacagcgggaggtggtcgataccactggcctcaaccagtccyacctgtcccaacacctcaacaagggcactcccatgaagacgcagaagcgggccgccctgtacacctggtacgtccgcaagcagcgagaggtggcgcagcg

SEQ ID NO: 17495 - DNA, 201 bp, Homo sapiens
cgctatggacagcctgcgaccagtgagactgcagaagtaccctcaagcagcggcggtcccttagtgacagtgtctacacccctccaccaagtgtcccccaygggcctggagcccagccacagcctgctgagtacagaagccaagctggtgagtgtccttgcttgtaaggaaaacccaacctcatctttccttggcagggag

SEQ ID NO: 17496 - DNA, 201 bp, Homo sapiens
cacaacatcccacagcgggaggtggtcgataccactggcctcaaccagtcccacctgtcccaacacctcaacaagggcactcccatgaagacgcagaagcrggccgccctgtacacctggtacgtccgcaagcagcgagaggtggcgcagcgtaagtaatgaccctaccccgcatcttccctgggagggcccaggactctc

SEQ ID NO: 17497 - DNA, 201 bp, Homo sapiens
tgtttgcctctgcagtgtcctccagcagcctggtgctgtaccagagctcagactccagcaatggccagagccacctgctgccatccaaccacagcgtcatsgagaccttcatctccacccagatggcctcttcctcccagtaaccacggcacctgggccctggggcctgtactgcctgcttggggggtgatgagggcagca

SEQ ID NO: 17498 - DNA, 201 bp, Homo sapiens; identical to SEQ ID NO: 4152

SEQ ID NO: 17499 - DNA, 201 bp, Homo sapiens; identical to SEQ ID NO: 4154

SEQ ID NO: 17500 - DNA, 201 bp, Homo sapiens; identical to SEQ ID NO: 4155

SEQ ID NO: 17501 - DNA, 201 bp, Homo sapiens
tacacaaggacaacagagaaaactgtccttctcactcccatccccagcaccccgttctcctctggaaggaaccagagtccccagttccttgcgtgccctcyggtattttacacgtgcacaaatatgtagaaatcctcttttacctcacttcaaattattcataagtagcagcacagcagacacaccagataaactctgctc

SEQ ID NO: 17502 - DNA, 201 bp, Homo sapiens
ctgttatctgctgtgatccaggaggtgtggccctgcctccccatcctgagtacccctagggacaggcaggtggggtgggtgtgggtgcctggtgggtggcyagcagccttgtttgcctctgcagtgtcctccagcagcctggtgctgtaccagagctcagactccagcaatggccagagccacctgctgccatccaaccac

SEQ ID NO: 17503 - DNA, 201 bp, Homo sapiens
ccaggtcttcacctcagacactgaggcctccagtgagtccgggcttcacacgccggcatctcaggccaccaccctccacgtccccagccaggaccctgccrgcatccagcacctgcagccggcccaccggctcagcgccagccccacaggtgagaggccctggctccaccccctcccttactgtccctgcccccttccatg

SEQ ID NO: 17504 - DNA, 201 bp, Homo sapiens
gtcagggttctccaggaacacagaaccaacagatttatttgaaggacttggcccgtgtctgcggggggctggcaggcctgaaatctgttgctggcagctcyggggagtgaattctgcagccttgaggcagaattccttctctgggaaaccggtttttgctcttacggccttccactgatgtaggaggcccacccatatttt

SEQ ID NO: 17505 - DNA, 201 bp, Homo sapiens
gaagaaaaacagagtttataagaaaaattagatgcctttaccctaaagcagccactggaattcccagactcttgtgtatccttccagagagattttctgcrtatagtagcaatagatatgttattttcttgctctttttctgattaatgggaacatactagacacactattttacatgttgtgttttgtctcttggcaata

SEQ ID NO: 17506 - DNA, 201 bp, Homo sapiens
ggttcctctgagcctggcctggaggctcatgggtggctatttctgcagggcggaatgcatccagagaggggtgtccccatcacaggcacaggggctgggcwccaacctcgtcacggaggtgcgtgtctacaactggtttgccaaccggcgcaaagaagaagccttccggcacaagctggccatggacacgtacagcgggcc

SEQ ID NO: 17507 - DNA, 201 bp, Homo sapiens
cccttccactccaggcctggcctccacgcaggcacagagtgtgccggtcatcaacagcatgggcagcagcctgaccaccctgcagcccgtccagttctccyagccgctgcacccctcctaccagcagccgctcatgccacctgtgcagagccatgtgacccagagccccttcatggccaccatggctcagctgcagagccc

SEQ ID NO: 17508 - DNA, 201 bp, Homo sapiens
ggcacaccgtctacttcctagggttataagatgtaagtggccagtcctcagcacggtgcctggctcacagtaaatcctcaagaaacatgagttctcagacttttttttttttttttttgagacaggatttcactctgtcgccaaggctggagtgcagtggcgcgatcacagctcattgcagccccgacctctcgggctcaa

SEQ ID NO: 17509 - DNA, 201 bp, Homo sapiens
ctggcctggaggctcatgggtggctatttctgcagggcggaatgcatccagagaggggtgtccccatcacaggcacaggggctgggctccaacctcgtcayggaggtgcgtgtctacaactggtttgccaaccggcgcaaagaagaagccttccggcacaagctggccatggacacgtacagcgggccccccccagggcca

SEQ ID NO: 17510 - DNA, 201 bp, Homo sapiens
gaggctcatgggtggctatttctgcagggcggaatgcatccagagaggggtgtccccatcacaggcacaggggctgggctccaacctcgtcacggaggtgygtgtctacaactggtttgccaaccggcgcaaagaagaagccttccggcacaagctggccatggacacgtacagcgggccccccccagggccaggcccggg

SEQ ID NO: 17511 - DNA, 201 bp, Homo sapiens
taccagatggcagggccaggactcgaacccaggtcccacctcaaagcccattctcttaaccattgccatcagtcagggttctccaggaacacagaaccaayagatttatttgaaggacttggcccgtgtctgcggggggctggcaggcctgaaatctgttgctggcagctccggggagtgaattctgcagccttgaggcag

SEQ ID NO: 17512 - DNA, 201 bp, Homo sapiens
tttctggcatcttttggaaaattggaaaaattcatattcccatataacagtgcaccaggcctcactgcatccactcacatcggctccaatgacccctggcrgtggggcggtcacctgagtttgtaatctatgatgccattgtcaggagtgggcactttggagtcaggtgggtgggctttgcagcctgcctttttgcaagct

SEQ ID NO: 17513 - DNA, 201 bp, Homo sapiens
ctcccgcagactatgctcatcaccgacaccaccaacctgagcgccctggccagcctcacgcccaccaagcaggtaaggtccaggcctgctggccctccctyggcctgtgacagagcccctcacccccacatcccccgggctcaggaggctgctctgctcccccaggtcttcacctcagacactgaggcctccagtgagtcc

SEQ ID NO: 17514 - DNA, 201 bp, Homo sapiens; identical to SEQ ID NO: 4019

SEQ ID NO: 17515 - DNA, 201 bp, Homo sapiens
gagctctagtgccaatcttaaggaaatcttttggtttcagacctttttggaatttgggactgggttaagagatttggggcctgtgtatgtctgtgtgtacmtggttgagagtgtatgcgtgtgtgtgtgttacatttttatctgagtcactgtgagaatatgtggtttatgtgcgttttcctagtgtctgtgtgtctcttg

SEQ ID NO: 17516 - DNA, 201 bp, Homo sapiens; identical to SEQ ID NO: 4069

SEQ ID NO: 17517 - DNA, 201 bp, Homo sapiens; identical to SEQ ID NO: 4070
  misc_feature (1)...(201): n = A,T,C or G, or insertion/deletion polymorphism (see Tables 1-2)

SEQ ID NO: 17518 - DNA, 201 bp, Homo sapiens
cagggagagaggggcgggggacccctattgaaggcctgggccattggggaggttgaggctgggaagacggtacagaggcagaatgtctagtagaagctgtytcccgggagaagtcagtgtctgggaagaagccggggtgggtcctgggtcccaggcctccctggggtgccccatgttggtggccacagcaggaacctgagc

SEQ ID NO: 17519 - DNA, 201 bp, Homo sapiens
gggggcccagctgattccctccccttccactccaggcctggcctccacgcaggcacagagtgtgccggtcatcaacagcatgggcagcagcctgaccaccytgcagcccgtccagttctcccagccgctgcacccctcctaccagcagccgctcatgccacctgtgcagagccatgtgacccagagccccttcatggccac

SEQ ID NO: 17520 - DNA, 201 bp, Homo sapiens
cgtggccaagggagaaactgggacccagagttccttcctgggtgtcctcccgggtcctttctgtccctgatcagctcaaaccccagcgtgtttcttttttkttgttgttgttgttatttttgagacggagtctcactctgtcggcccggctggagtgcatggcgcgatctcggctcactgcaagctctgcctcctgggttc

SEQ ID NO: 17521 - DNA, 201 bp, Homo sapiens
caattcaattcatttcaattcaactaaattcagttaaattcagttcagttgtcttctactgagcacctactgcatgtcaggtatagcactaggcagtgggrggaatggagctaataaatgcagtcccagccttcaaggaactgggagcagctgacccagggcttggcaaaaggtagaaacaaaggcagatttgctggctgc

SEQ ID NO: 17522 - DNA, 201 bp, Homo sapiens
gccactgccctcagccttcaaaccccaatcttgaagtattctgatcctgcccatcaggcagcatcagggcactgagactcaggaaaacagtagccacggcrggagggggcggggacagaggatctgacgtccccaacaaaagccagactgcctgcatcctaatcctagctctgcccctttctagcttgagcaggtgatttt

SEQ ID NO: 17523 - DNA, 201 bp, Homo sapiens
actgccctcagccttcaaaccccaatcttgaagtattctgatcctgcccatcaggcagcatcagggcactgagactcaggaaaacagtagccacggcaggrgggggcggggacagaggatctgacgtccccaacaaaagccagactgcctgcatcctaatcctagctctgcccctttctagcttgagcaggtgattttata

SEQ ID NO: 17524 - DNA, 201 bp, Homo sapiens
acgtctgccacgtctgcccctctctcccctgcggccagccctctacagccacaagcccgaggtggcccagtacacccacacgggcctgctcccgcagactrtgctcatcaccgacaccaccaacctgagcgccctggccagcctcacgcccaccaagcaggtaaggtccaggcctgctggccctccctcggcctgtgacag

SEQ ID NO: 17525 - DNA, 201 bp, Homo sapiens
caacatggcaaggttcctcctctaaaaaagaaagaaaggaaagatgataggaaagggaggaaagataggaaagggaggaaagataggaaagggaggaaagrtaggaaagggaggaaaggtaggaaagggaggaaggaaggaaggaaggaaaagaaaagaaagaaaaagaacgagagaaagaaagaaaggcaatacacattt

SEQ ID NO: 17526 - DNA, 201 bp, Homo sapiens
gaggtgggaggactgtttgagcccccaggggttcggctccaacctggacaacatggcaaggttcctcctctaaaaaagaaagaaaggaaagatgataggaragggaggaaagataggaaagggaggaaagataggaaagggaggaaaggtaggaaagggaggaaaggtaggaaagggaggaaggaaggaaggaaggaaaag

SEQ ID NO: 17527 - DNA, 201 bp, Homo sapiens
cctttctgtccctgatcagctcaaaccccagcgtgtttcttttttgttgttgttgttgttatttttgagacggagtctcactctgtcggcccggctggagygcatggcgcgatctcggctcactgcaagctctgcctcctgggttcacgccattctcctgcctcagcctcccgagtagctgggattacaggcatgcaccac

SEQ ID NO: 17528 - DNA, 201 bp, Homo sapiens
ggggaggggaggcatcaggcagcctggctctaggatcagataaacatgtttgccacagagcaccaggctggactttgtactgcccttccttctgagctctvagcagggagatgaaggagagaggatcctaggagccccggaaagaagggagagagagaagctggggagaggcctgcgggggtggggtggtcctggcaacat

SEQ ID NO: 17529 - DNA, 201 bp, Homo sapiens
ggaatcacgcagacccaagttcaaatcccagtctgcctgtttcagtgctgctgtattgagctgtatttatctgtaactttttgtttgtttgtttgtttttygagacagagtctcactctgttgcccaggctggaatgcagtggcgcgatctcggctcactgcaacctctgcctcccgggttcaagcaatcctcctgcctca

SEQ ID NO: 17530 - DNA, 201 bp, Homo sapiens
acgcagacccaagttcaaatcccagtctgcctgtttcagtgctgctgtattgagctgtatttatctgtaactttttgtttgtttgtttgttttttgagacrgagtctcactctgttgcccaggctggaatgcagtggcgcgatctcggctcactgcaacctctgcctcccgggttcaagcaatcctcctgcctcagcctcc

SEQ ID NO: 17531 - DNA, 201 bp, Homo sapiens
gcatggtggtgtgccataatctcagctactgaggaggctgaggtgggaggactgtttgagcccccaggggttcggctccaacctggacaacatggcaaggktcctcctctaaaaaagaaagaaaggaaagatgataggaaagggaggaaagataggaaagggaggaaagataggaaagggaggaaaggtaggaaagggagg

SEQ ID NO: 17532 - DNA, 201 bp, Homo sapiens
gcctctgcagtgtcctccagcagcctggtgctgtaccagagctcagactccagcaatggccagagccacctgctgccatccaaccacagcgtcatcgagaycttcatctccacccagatggcctcttcctcccagtaaccacggcacctgggccctggggcctgtactgcctgcttggggggtgatgagggcagcagccag

SEQ ID NO: 17533 - DNA, 201 bp, Homo sapiens
gtttgttttttgagacagagtctcactctgttgcccaggctggaatgcagtggcgcgatctcggctcactgcaacctctgcctcccgggttcaagcaatcytcctgcctcagcctcccgagtagccgggattacaggcacctgccacaatatctgacttattttttatttttattatttttttcgtagagatggttttctc

SEQ ID NO: 17534 - DNA, 201 bp, Homo sapiens; identical to SEQ ID NO: 4096

SEQ ID NO: 17535 - DNA, 201 bp, Homo sapiens
cttgctgagcagatcccgtccttgccctctcccagggaggacccgtggcgtgtggcgaagatggtcaagtcctacctgcagcagcacaacatcccacagcrggaggtggtcgataccactggcctcaaccagtcccacctgtcccaacacctcaacaagggcactcccatgaagacgcagaagcgggccgccctgtacacc

SEQ ID NO: 17536 - DNA, 201 bp, Homo sapiens
ccgggttcaagcaatcctcctgcctcagcctcccgagtagccgggattacaggcacctgccacaatatctgacttattttttatttttattatttttttcrtagagatggttttctccatgttggccaggctggtcttgaactcctaacctcaaaagacccgcccaccttggcctcccaaagtgctgggattacaggtgtg

SEQ ID NO: 17537 - DNA, 201 bp, Homo sapiens
agcacaacatcccacagcgggaggtggtcgataccactggcctcaaccagtcccacctgtcccaacacctcaacaagggcactcccatgaagacgcagaakcgggccgccctgtacacctggtacgtccgcaagcagcgagaggtggcgcagcgtaagtaatgaccctaccccgcatcttccctgggagggcccaggactc

SEQ ID NO: 17538 - DNA, 201 bp, Homo sapiens
aggagaggaggagagaaaatttatatggctcaggcagtctgatcccttctgttcccccacagggagacccacagcagagacatgactcacaggtggcatcrggtccctttgagtctctctggtgggagaatctcaacccacagagtaggattccagtgttcacatgcatttttggtactatgaggcctctgaatgtcaacc

SEQ ID NO: 17539 - DNA, 201 bp, Homo sapiens; identical to SEQ ID NO: 4046

SEQ ID NO: 17540 - DNA, 201 bp, Homo sapiens
cggtggctcacgccagtaatcccagcactttgggaggccgaggcaggcagatcacaagatcaggagatcgagaccatcctggctaacacggtgaaaccccrtctctactaaaaatacaaaaaaattagccgggcgtggtggcgggtgcctgtaggcccagctacttgggaggctgaggcaggagaacggcatgaacccagg

SEQ ID NO: 17541 - DNA, 201 bp, Homo sapiens
tgtcaggcacgtctgccacgtctgcccctctctcccctgcggccagccctctacagccacaagcccgaggtggcccagtacacccacacgggcctgctccygcagactatgctcatcaccgacaccaccaacctgagcgccctggccagcctcacgcccaccaagcaggtaaggtccaggcctgctggccctccctcggcc

SEQ ID NO: 17542 - DNA, 201 bp, Homo sapiens
aaaaaaagaaaaagaaaagaaaaaccagccgcctgttctggtgctgcagggaaacaggcctggccacagccaagggtgcagattttcaggaagcatttttwaaaaaatatatatatatacacacatatatatatatacagagagagagaagccactgaggcccacagaatttgcatcattttattccttgtccaaggtcac

SEQ ID NO: 17543 - DNA, 201 bp, Homo sapiens
ctggtacgtccgcaagcagcgagaggtggcgcagcgtaagtaatgaccctaccccgcatcttccctgggagggcccaggactctcccctaactcataggtsggggctggaagcttcaccatccccattacacagacaggtagatggaaaggaagtcagtgggattcaacctgcatttattacctattctgcgccaggcact

SEQ ID NO: 17544 - DNA, 201 bp, Homo sapiens
agtgagccgagatcgcgccactgcactcgagcctgggtgacagagtgagactccatctcaaaaaaaaaaaaaaaaaagaaaaagaaaagaaaaaccagccwcctgttctggtgctgcagggaaacaggcctggccacagccaagggtgcagattttcaggaagcatttttaaaaaaatatatatatatacacacatatata

SEQ ID NO: 17545 - DNA, 201 bp, Homo sapiens
tgtaggcccctgggctccataactgctttcatgcacagtccccaccctcagagttgacaaggttccagcacccaggaccgcagccccacctatggggagaracagcccttgctgagcagatcccgtccttgccctctcccagggaggacccgtggcgtgtggcgaagatggtcaagtcctacctgcagcagcacaacatcc

SEQ ID NO: 17546 - DNA, 201 bp, Homo sapiens
ggacagggttcctctgagcctggcctggaggctcatgggtggctatttctgcagggcggaatgcatccagagaggggtgtccccatcacaggcacaggggmtgggctccaacctcgtcacggaggtgcgtgtctacaactggtttgccaaccggcgcaaagaagaagccttccggcacaagctggccatggacacgtacag

SEQ ID NO: 17547 - DNA, 201 bp, Homo sapiens
ccctgtgtcctggcataaatgaccatacctcaccgtccctgagtctatgtgtaggcccctgggctccataactgctttcatgcacagtccccaccctcagrgttgacaaggttccagcacccaggaccgcagccccacctatggggagagacagcccttgctgagcagatcccgtccttgccctctcccagggaggacccg

SEQ ID NO: 17548 - DNA, 201 bp, Homo sapiens
gggcttacaaaatgcgctaagctcattttttcctcctccccatctctgaagtctgaaatatcattagccccatttcacagatgcggaaactgaggcacacrgaggttaagcaaagaatcaaggccaggtctaaagcccccacactgagaagtcagctcccctccagatgtggagatgaataccacaaccttgcatgccctg

SEQ ID NO: 17549 - DNA, 201 bp, Homo sapiens
aaaaaccagccgcctgttctggtgctgcagggaaacaggcctggccacagccaagggtgcagattttcaggaagcatttttaaaaaaatatatatatatayacacatatatatatatacagagagagagaagccactgaggcccacagaatttgcatcattttattccttgtccaaggtcacaggacaagcagagtcccac

SEQ ID NO: 17550 - DNA, 201 bp, Homo sapiens
ctgcccctttctagcttgagcaggtgattttatacttctgagcctcagtttcgtctgcagggtagagatgacaatagcccttgtccacagggttaaatggyatggcacttgtagagtaaacatgtagtaactgcaatatacagcagttattattagtgatcccattttacagatgagcaaattaaggctgagagaggcagt

SEQ ID NO: 17551 - DNA, 201 bp, Homo sapiens
cagcaggtctccttcgtccatccatccatcatccatctacccacccacccaccaatccatccatccattcatccaaccatccatccatccatcatccatcyacccacccacccaccaatccatccatccattcatccaaccatccatccatccatcatccatctacccacccacccaccaatccatccatccattcatcca

SEQ ID NO: 17552 - DNA, 201 bp, Homo sapiens
tccattcatccaaccatccatccatccatcatccatctacccacccacccaccaatccatccatccattcatccaaccatccatccatccatcatccatcyacccacccacccaccaatccatccatccattcatccaaccatccatccatccatcatccatctacccacccacccaccaatccatccatccattcatcca

SEQ ID NO: 17553 - DNA, 201 bp, Homo sapiens
tccattcatccaaccatccatccatccatcatccatctacccacccacccaccaatccatccatccattcatccaaccatccatccatccatcatccatcyacccacccacccaccaatccatccatccattcatccaaccatccatccatccatcatccatccacccatctatctgtccatccactctaccctaccatcc

SEQ ID NO: 17554 - DNA, 201 bp, Homo sapiens
accaccatgcctggctaattttttgtagttttagtagagacgggggtttcaccatgttggccaggctggtctcgaactcctgacctcaggtgatccacccrcctcagcctcccaaagtgctgggattacaggcgtgagccaccatacccggcctgggtccctgctttctcagagcccatggttaagtgggaaagtgggaga

SEQ ID NO: 17555 - DNA, 201 bp, Homo sapiens; identical to SEQ ID NO: 17475

SEQ ID NO: 17556 - DNA, 201 bp, Homo sapiens; identical to SEQ ID NO: 17476

SEQ ID NO: 17557 - DNA, 201 bp, Homo sapiens
gcattcctaaagtaggtgtcaaggatacaacctgtttgagtccatatgggctgctataacaaaataacataaactgggtagcttataaacaaaataaatgkatttctcacattttggaggctgagaagtccaagatcaaggcaccagcagattcagtgtctggggagagccctcttcccagtacagatggcgccttcctac

SEQ ID NO: 17558 - DNA, 201 bp, Homo sapiens
gggtaccctctcgttgcagcagtgaggacagtgacgaggagtggcggcggtgccgggaggcagctgtgtcggcgtccgacatcctacaggagtcagccatycacagccctggaacagtggagaaggaggcaaagaagaaaaggaagttgaaaaagaaagccaagaaggtggccagtgtcgactcggctgtcgctgccacca

SEQ ID NO: 17559 - DNA, 201 bp, Homo sapiens
ctgctgccctcatcaccccccaagcaggcagtacaggccccagggcccaggtgccgtggttactgggaggaagaggccatctgggtggagatgaaggtctygatgacgctgtggttggatggcagcaggtggctctggccattgctggagtctgagctctggtacagcaccaggctgctggaggacactgcagaggcaaac

SEQ ID NO: 17560 - DNA, 201 bp, Homo sapiens
taagggagggggtggagccagggcctctcacctgtggggctggcgctgagccggtgggccggctgcaggtgctggatgccggcagggtcctggctggggaygtggagggtggtggcctgagatgccggcgtgtgaagcccggactcactggaggcctcagtgtctgaggtgaagacctgggggagcagagcagcctcctga

SEQ ID NO: 17561 - DNA, 201 bp, Homo sapiens
ccctcatcaccccccaagcaggcagtacaggccccagggcccaggtgccgtggttactgggaggaagaggccatctgggtggagatgaaggtctcgatgaygctgtggttggatggcagcaggtggctctggccattgctggagtctgagctctggtacagcaccaggctgctggaggacactgcagaggcaaacaaggct

SEQ ID NO: 17562 - DNA, 201 bp, Homo sapiens
agtcccagtggctcttccagctcctggattctgcggttgccccatgagcctcccacccaggtgcccacccatccccaccagcttaccgatgaccagggtgsaggcacctgtgttggtgaacgtaggacccagggaggcaggctcaccaggcccgatggtcatgaccccaggaagtgaggccatgatgaggttctggggctg

SEQ ID NO: 17563 - DNA, 201 bp, Homo sapiens
atgagtcccagtggctcttccagctcctggattctgcggttgccccatgagcctcccacccaggtgcccacccatccccaccagcttaccgatgaccaggrtggaggcacctgtgttggtgaacgtaggacccagggaggcaggctcaccaggcccgatggtcatgaccccaggaagtgaggccatgatgaggttctgggg

SEQ ID NO: 17564 - DNA, 201 bp, Homo sapiens
  misc_feature (1)...(201): n = A,T,C or G, or insertion/deletion polymorphism (see Tables 1-2)
gctatacctgcaaactgaacccagccatgggcacagggctcagccagctccaaggacaaggtgtcccccccaccctggggacaaggcatttccaagccccmcctccctctccaagttcaaggactgggctggcaaacccagactgcccatgagaccctgatggtgatgaaggcttgctcgagagttgggccaaaaaannnn

SEQ ID NO: 17565 - DNA, 201 bp, Homo sapiens
ctgggttcgagtcctggccctgccatctggtagctgtgggagatgaggcaagtccctcccctccttgagtgtccactttctcatctgtaaaatgggggtgrtcatggacacgcctcatggggtgaatgccaggacacagaatggcctcagtggctgtcatgacagctgccagggccgggtccaggaaccttatagaaaggg

SEQ ID NO: 17566 - DNA, 201 bp, Homo sapiens; identical to SEQ ID NO: 17484

SEQ ID NO: 17567 - DNA, 201 bp, Homo sapiens
cggacagcaacagaaggggtgggaccaacatggaagggggcagggacagtaagggagggggtggagccagggcctctcacctgtggggctggcgctgagcyggtgggccggctgcaggtgctggatgccggcagggtcctggctggggacgtggagggtggtggcctgagatgccggcgtgtgaagcccggactcactgga

SEQ ID NO: 17568 - DNA, 201 bp, Homo sapiens
ggacagcaacagaaggggtgggaccaacatggaagggggcagggacagtaagggagggggtggagccagggcctctcacctgtggggctggcgctgagccsgtgggccggctgcaggtgctggatgccggcagggtcctggctggggacgtggagggtggtggcctgagatgccggcgtgtgaagcccggactcactggag

SEQ ID NO: 17569 - DNA, 201 bp, Homo sapiens
ggccatctgggtggagatgaaggtctcgatgacgctgtggttggatggcagcaggtggctctggccattgctggagtctgagctctggtacagcaccaggmtgctggaggacactgcagaggcaaacaaggctgctagccacccaccaggcacccacacccaccccacctgcctgtccctaggggtactcaggatggggag

SEQ ID NO: 17570 - DNA, 201 bp, Homo sapiens
ctccctgccaaggaaagatgaggttgggttttccttacaagcaaggacactcaccagcttggcttctgtactcagcaggctgtggctgggctccaggcccrtgggggacacttggtggaggggtgtagacactgtcactaagggaccgccgctgcttgagggtacttctgcagtctcactggtcgcaggctgtccatagcg

SEQ ID NO: 17571 - DNA, 201 bp, Homo sapiens
gtgttaggtcagtgtctctcaaccttggcgctactgacatctttgactagcatttgtcgtgggggtctatccttcttcccattataggatgtttaccaacrtccctggcctctacctactagatgatagtagcactcaccccaccagttgtgacatccaaaaatgtctccagacattgccaaatgcccctgatggccacca

SEQ ID NO: 17572 - DNA, 201 bp, Homo sapiens
tctactccctctccccgggttgcttttcctgaacagggcttggggggcacctttggcatacaggaagggaggttagggaaagcacccagggcattgctgcrtctgcctcgagggcattgctgagagccttgttctctgctgtgcacagtggcatctccatctgcactcaccagacacatgcttcctggccttgtgcctcta

SEQ ID NO: 17573 - DNA, 201 bp, Homo sapiens
ggaccaggagctcctgagggcagaggcggggcagcttcagcacctggcacctgggaggaggggctggcatctgggggtgctgactctgctcctttgttttytttgtttgtttgcttggttgggtttttttgttattgtttcttttttaaatttttttattttgtgtcttcttaaaattttttttttgtttctctttatctt

SEQ ID NO: 17574 - DNA, 201 bp, Homo sapiens; identical to SEQ ID NO: 4194

SEQ ID NO: 17575 - DNA, 201 bp, Homo sapiens; identical to SEQ ID NO: 4196

SEQ ID NO: 17576 - DNA, 201 bp, Homo sapiens
tgctgccctcatcaccccccaagcaggcagtacaggccccagggcccaggtgccgtggttactgggaggaagaggccatctgggtggagatgaaggtctcsatgacgctgtggttggatggcagcaggtggctctggccattgctggagtctgagctctggtacagcaccaggctgctggaggacactgcagaggcaaaca

SEQ ID NO: 17577 - DNA, 201 bp, Homo sapiens
aagccaggagagccctgcctgccttccctgttagcttcggcctccctgggctcaggcgttagagccccaggctctggcacagagtagccacccaggaaatkcctgtgtgagtaggtgatggggtcagtacaaatggcatgtgggtcactagctggaaggagttggggcaggaaggagtggcccggtgggtacattggtgac

SEQ ID NO: 17578 - DNA, 201 bp, Homo sapiens
gtggttggatggcagcaggtggctctggccattgctggagtctgagctctggtacagcaccaggctgctggaggacactgcagaggcaaacaaggctgctrgccacccaccaggcacccacacccaccccacctgcctgtccctaggggtactcaggatggggaggcagggccacacctcctggatcacagcagataacag

SEQ ID NO: 17579 - DNA, 201 bp, Homo sapiens
ttttctcctcttctgtcttggtgggttccctggaatagccaagcagactccagtcaggaccaggccaaggcagtggccctgtcaggcagctggagaaatcrtgagctcagcgggagggaaagccctcttggcggcagctttggatgtttactgcttttgagcacctgtcttgggccagacacctcacttgatcatagttgc

SEQ ID NO: 17580 - DNA, 201 bp, Homo sapiens
catggaagggggcagggacagtaagggagggggtggagccagggcctctcacctgtggggctggcgctgagccggtgggccggctgcaggtgctggatgcyggcagggtcctggctggggacgtggagggtggtggcctgagatgccggcgtgtgaagcccggactcactggaggcctcagtgtctgaggtgaagacctgg

SEQ ID NO: 17581 - DNA, 201 bp, Homo sapiens
ctcgatctcttgacctcgtgatccgcctgcctcagcctcccaaagtgctgggattacaggcgtgagccaccgcgcccggccttgactccatcttaaaagtkcatctatctggagttcacccacttctcaccacatcaattactgcagcagactccgtgttcctgcctttgccccaacagtctcacgctgcacagcagccaa

SEQ ID NO: 17582 - DNA, 201 bp, Homo sapiens
tagagacagggtttcaccgtgttggccaggctggtctcgaacttatgacctcaggtgatccgcccaccttggcctcccaaagtgctgagattacaggcatragccaccacacccagcctagattacattcttgagtgcgtctagtaatagccaccaggagttgagaattttctttttgcccctgttctaaacactttgtat

SEQ ID NO: 17583 - DNA, 201 bp, Homo sapiens
tctatcttatgtactgggcttctgcataattgtacctgcaaataagggctttctgggcttaatttttcttcataaaacaaaaacttagaaaacatcagtcycccttaccctgctgtaatttgcccatagacccttcaccttctgaggtaccacagaattgatgtattatgcttagtgcctgcctccctgcttgagttgctg

SEQ ID NO: 17584 - DNA, 201 bp, Homo sapiens
atggtgagtggttatacttaatagaagctatcatttattaagcacctaatgtgtgtctggaggtgggcgaaacagttttggtatattcttttttttttttytttttttgagataggaactctctctgccacctaggctggagtgcagtggagcaattatagctcaatgcagcctcaacctcccggacccaagcagtcctcc

SEQ ID NO: 17585 - DNA, 201 bp, Homo sapiens
gtgattctcctgcctcagcctccctagtagctgggattacaggcgcctgccaccacgcccagctaattttttgtatttttagtacagacagggtttcaccrtgttggccaggctggtctcaaactccagacctcaggcaatccacctgcctcggccttccaaagtgctgggattacaggtgtgagccaccgcgcctggtct

SEQ ID NO: 17586 - DNA, 201 bp, Homo sapiens
tctcaaccttcaaagtgctgagattacaggtgtgagccactgtgctcggcttctagttttttttgtttgtttgtttgttttttggggttttttttttttttgcatttttttttttttgagatggagtttcactcttgttgcccaggctgcagtgcaatggcacgatctcagctcactgcaacctctgcctcctgggttcaa

SEQ ID NO: 17587 - DNA, 201 bp, Homo sapiens
ctaaaaagcagcagcagctggaattccaaggccaagtcctgcaggactggttgggtctggggatctatggcatccaagacagtgacactctcatcctctcraagaagaaaggagaggctctgtttccagccagttagttttctctgggagacttctctgtacatttctgccatgtactccagaactcatcctgtcaatcac

SEQ ID NO: 17588 - DNA, 201 bp, Homo sapiens
cacagcagccaaagatgttctgtcaaaacccaggtcagtttatgtcccttctctgctcatttccagagctcctcctcctcaaagtccaggtcctcccattrgcccacgtcagggcccttcatgatctggcccctctgagttctccatctctgctgctcccggtttactgggcaggctctggtcacactgacctccttgctg

SEQ ID NO: 17589 - DNA, 201 bp, Homo sapiens
gggctctgcagctgagccatggtggccatgaaggggctctgggtcacatggctctgcacaggtggcatgagcggctgctggtaggaggggtgcagcggctrggagaactggacgggctgcagggtggtcaggctgctgcccatgctgttgatgaccggcacactctgtgcctgcgtggaggccaggcctggagtggaaggg

SEQ ID NO: 17590 - DNA, 201 bp, Homo sapiens
agcttgcaaaaaggcaggctgcaaagcccacccacctgactccaaagtgcccactcctgacaatggcatcatagattacaaactcaggtgaccgccccacygccaggggtcattggagccgatgtgagtggatgcagtgaggcctggtgcactgttatatgggaatatgaatttttccaattttccaaaagatgccagaaa

SEQ ID NO: 17591 - DNA, 201 bp, Homo sapiens
ttttgtttttgtttgactctgccccattgaatcttaggtttccgccttttcttcacatctgtccctggaggccgtgagaaggaagagtctccccaaccccsccgaaagcgacagccctccagctccaggtgagaactcacacctctcctcacgtcccctccttttttctcctcttctgtcttggtgggttccctggaatag

SEQ ID NO: 17592 - DNA, 201 bp, Homo sapiens
gtgggagctacgcctatgccatcaaccccaacagcttcatcctgggtctgaagcagcagattgaagaccagcaggggcttcctaaaaagcagcagcagctsgaattccaaggccaagtcctgcaggactggttgggtctggggatctatggcatccaagacagtgacactctcatcctctcgaagaagaaaggagaggctc

SEQ ID NO: 17593 - DNA, 201 bp, Homo sapiens
  misc_feature (1)...(201): n = A,T,C or G, or insertion/deletion polymorphism (see Tables 1-2)
atccattgacagccaacctctatcatcatctcctgctgtgtggggcacagggcgctcaccgtgggggctctgcagctgagccatggtggccatgaaggggntctgggtcacatggctctgcacaggtggcatgagcggctgctggtaggaggggtgcagcggctgggagaactggacgggctgcagggtggtcaggctgct

SEQ ID NO: 17594 - DNA, 201 bp, Homo sapiens
gtggccatgaaggggctctgggtcacatggctctgcacaggtggcatgagcggctgctggtaggaggggtgcagcggctgggagaactggacgggctgcarggtggtcaggctgctgcccatgctgttgatgaccggcacactctgtgcctgcgtggaggccaggcctggagtggaaggggagggaatcagctgggccccc

SEQ ID NO: 17595 - DNA, 201 bp, Homo sapiens
gcagcagtgaggacagtgacgaggagtggcggcggtgccgggaggcagctgtgtcggcgtccgacatcctacaggagtcagccatccacagccctggaacwgtggagaaggaggcaaagaagaaaaggaagttgaaaaagaaagccaagaaggtggccagtgtcgactcggctgtcgctgccaccacccccaccagcatgg

SEQ ID NO: 17596 - DNA, 201 bp, Homo sapiens
gctgagattacaggtgtgagccactgtgctcggcttctagttttttttgtttgtttgtttgttttttggggttttttttttttttgcatttttttttttttgagatggagtttcactcttgttgcccaggctgcagtgcaatggcacgatctcagctcactgcaacctctgcctcctgggttcaagtgattctcctgcctc

SEQ ID NO: 17597 - DNA, 201 bp, Homo sapiens; identical to SEQ ID NO: 17524

SEQ ID NO: 17598 - DNA, 201 bp, Homo sapiens
ttgccatgttgcccaggctggtctcgaactcctgggctcaagtgatcctcccttctcaaccttcaaagtgctgagattacaggtgtgagccactgtgctcrgcttctagttttttttgtttgtttgtttgttttttggggttttttttttttttgcatttttttttttttgagatggagtttcactcttgttgcccaggct

SEQ ID NO: 17599 - DNA, 201 bp, Homo sapiens
gagacaggatctcgctatgttgcccaggctggtcttgaactcctggcctcaagccatctgcccaccttagccttccaaagttctgggactacaggcgtgcmccaccacacctggctaatttttgtatttttttttagagacagggttctgtcatgttgcccaggctggtcttaaactcctggcctcaagctatcctcccgc

SEQ ID NO: 17600 - DNA, 201 bp, Homo sapiens
ttcggaaagtagtaacagcagtagcgatgcggaggagctggagcggtgccgcgaggcggcaatgccggcttggggcttggagcaacgcccgcacgtggcarggaagccaagagccggtagggtactatgtttggggagactggctgaggggcgtgggatcttcccctggagcctgagaggatggatggtgaggagagagtc

SEQ ID NO: 17601 - DNA, 201 bp, Homo sapiens
cgcgcctctcctctcacgtgacgtcatgaaggaggcttgataacggcggtgttctccacaatcctttgcggtggttcaagatggcggcgcccagtggcacwgtgagcgattcggaaagtagtaacagcagtagcgatgcggaggagctggagcggtgccgcgaggcggcaatgccggcttggggcttggagcaacgcccgc

SEQ ID NO: 17602 - DNA, 201 bp, Homo sapiens
ggaggtcacaaggctgctacgcccagaagccagtattggaagccaggttggcctcactcccaagcctgaactcactacctgcctctctctgcggccacctyctggtgacctggaccaagggaggacagcgagaggcagctctggggctgtgtcctgactccagctaacccagggtaccctctcgttgcagcagtgaggaca

SEQ ID NO: 17603 - DNA, 201 bp, Homo sapiens
ctggctgctgccctcatcaccccccaagcaggcagtacaggccccagggcccaggtgccgtggttactgggaggaagaggccatctgggtggagatgaagrtctcgatgacgctgtggttggatggcagcaggtggctctggccattgctggagtctgagctctggtacagcaccaggctgctggaggacactgcagaggc

SEQ ID NO: 17604 - DNA, 201 bp, Homo sapiens
attgacagccaacctctatcatcatctcctgctgtgtggggcacagggcgctcaccgtgggggctctgcagctgagccatggtggccatgaaggggctctrggtcacatggctctgcacaggtggcatgagcggctgctggtaggaggggtgcagcggctgggagaactggacgggctgcagggtggtcaggctgctgccc

SEQ ID NO: 17605 - DNA, 201 bp, Homo sapiens; identical to SEQ ID NO: 17541

SEQ ID NO: 17606 - DNA, 201 bp, Homo sapiens
ggtgaggagagagtcactgggactcggcttccttccccgagagacctccagggactgggtgtagtgcagattgaaagcatgggcaggtgcagtagggaggktatttcattattccagtcggggaagctgaggtacccaaatgtcttttgattctgcctccttgggtctatcctcactgccccacactgggaaggctgccgt

SEQ ID NO: 17607 - DNA, 201 bp, Homo sapiens; identical to SEQ ID NO: 4199

SEQ ID NO: 17608 - DNA, 201 bp, Homo sapiens
atggggtttcaccatgttgaccaggatggtctcgatctcttgacctcgtgatccgcctgcctcagcctcccaaagtgctgggattacaggcgtgagccacsgcgcccggccttgactccatcttaaaagtgcatctatctggagttcacccacttctcaccacatcaattactgcagcagactccgtgttcctgcctttgc

SEQ ID NO: 17609 - DNA, 201 bp, Homo sapiens; identical to SEQ ID NO: 4201

SEQ ID NO: 17610 - DNA, 201 bp, Homo sapiens
actgtggaaatataggtcactattttatttatgtaacctctagagacagctcttaaatccagtgatgaactcgtcactcaaaccactttaattttagggtrgcatctactttgacttatttttctgacaattaattcaaaccaagacactatggcaggatctggggatacagaggtaaaaagaggcagaccacgtattcaa

SEQ ID NO: 17611 - DNA, 201 bp, Homo sapiens
ttctgagacagaatgatgggccagagccccgcagcctgaatcccacagggttcccctcaattggagaaagtagaggaggtgtttaggaaggcagctgcatwtcagcctgtgggagcagttttcctttgtgactctctggcttcaggctgaacagggcctgcttggcattgcactgagtcacagagatgtttctgcagtaga

SEQ ID NO: 17612 - DNA, 201 bp, Homo sapiens
ccacccaggtgcccacccatccccaccagcttaccgatgaccagggtggaggcacctgtgttggtgaacgtaggacccagggaggcaggctcaccaggccsgatggtcatgaccccaggaagtgaggccatgatgaggttctggggctgctggttgaggcctggggatgtctgctccaagctgtgcagtgctgtcagggtg

SEQ ID NO: 17613 - DNA, 201 bp, Homo sapiens
ggctggagtgcagtggcgtgatcttggctcactgcaacctccgcctcctgggttcgagcgattctcctgcctcagcttctcaagtagctgggactacaggygtgcaccaccacacccagctaatttttgtattttttagtagagatggggtttcaccatgttgaccaggatggtctcgatctcttgacctcgtgatccgcc

SEQ ID NO: 17614 - DNA, 201 bp, Homo sapiens
ggtgcccaccaccaggcccagctaatttttttttatatttttattagagacagggtttcaccgtgttggccaggctggtctcgaacttatgacctcaggtratccgcccaccttggcctcccaaagtgctgagattacaggcatgagccaccacacccagcctagattacattcttgagtgcgtctagtaatagccaccag

SEQ ID NO: 17615 - DNA, 201 bp, Homo sapiens
catctccatctgcactcaccagacacatgcttcctggccttgtgcctctagagaaatgtggtttatttttatgttagagagcctgtgaaggctgaagcttytcttgatgacagtcatcatctgcatcgtcatcatagctaccatttgctgagcagctacttgtggctaggccgtgtgccacaagtgcttgatatccatttt

SEQ ID NO: 17616 - DNA, 201 bp, Homo sapiens
ctctgctgtgcacagtggcatctccatctgcactcaccagacacatgcttcctggccttgtgcctctagagaaatgtggtttatttttatgttagagagcytgtgaaggctgaagcttttcttgatgacagtcatcatctgcatcgtcatcatagctaccatttgctgagcagctacttgtggctaggccgtgtgccacaa

SEQ ID NO: 17617 - DNA, 201 bp, Homo sapiens
gtattcccattttatagatgagaaaaacaaaggctcagggagagaaagtgacttgcccggcatcacacagcttggtggcagagccaggactcaactgaacygtctccctctgtaatactgtttctgttccctgacggtacctcaccttcatcacactgtagtcatgatggaagagatgctcttcttccaagtgattatgtg

SEQ ID NO: 17618 - DNA, 201 bp, Homo sapiens
aagaacattatcatgtgggtcctgttgttacctttatcctccaggtgaggaaacaggctgtcagcaaggagacaggtgtgcctgaagtcacatcatcatcrcagctaccatttactgagcaactgtttgtggccaggctctgtgctaagtgcttgatgtccattttctcatttaatccttctgatgaccctgagaggtagg

SEQ ID NO: 17619 - DNA, 201 bp, Homo sapiens
caatctacatacctccacgtgtccttgcagactgcaagccagagtagtatattcaaggctctgagaattcctgtagtgaagagacctgtgtaactgtttarcccagcattttccaaacttgtttggccacagtgcctttgtttcatggaaaaccagtcaacaacctgcggaacaggtctggggatacactggtctagatct

SEQ ID NO: 17620 - DNA, 201 bp, Homo sapiens
atgagccttcccaaagtgtgaaccagctattcttctgagacagaatgatgggccagagccccgcagcctgaatcccacagggttcccctcaattggagaawgtagaggaggtgtttaggaaggcagctgcatttcagcctgtgggagcagttttcctttgtgactctctggcttcaggctgaacagggcctgcttggcatt

SEQ ID NO: 17621 - DNA, 201 bp, Homo sapiens
cttctgagacagaatgatgggccagagccccgcagcctgaatcccacagggttcccctcaattggagaaagtagaggaggtgtttaggaaggcagctgcakttcagcctgtgggagcagttttcctttgtgactctctggcttcaggctgaacagggcctgcttggcattgcactgagtcacagagatgtttctgcagtag

SEQ ID NO: 17622 - DNA, 201 bp, Homo sapiens; identical to SEQ ID NO: 4203

SEQ ID NO: 17623 - DNA, 201 bp, Homo sapiens
cccctttgggtcacccaggggtgagacaaagcctggaaggggcgggaggtaaggagcaaggcatgaagaatctggagactcagactatgtcacgtcttgcrttccctgcccgcctcagacctgtgccacagggcgtgcccactgtgtgtggctagagtgccccatccctgatgcccccgttgtcaccaacgtgactgtgaa

SEQ ID NO: 17624 - DNA, 201 bp, Homo sapiens
cagccacttcctgcttaagacaggggtgttgacacatccctctggccagtttcacagaccccctagtctcctgtgagccactgcttgaggaagaccccccmcacacacacacacactcttgaggataggtcattttcagaactagcgtgagctacatattatgaaagaaacataactggcagagatatagcaatgcccact

SEQ ID NO: 17625 - DNA, 201 bp, Homo sapiens
gaacctgggaggcagtggttgcagtgagccgagattgtgccactgcactccaccctcagcaacagagcaaaactccatctcaaaaaaaaaaaaaaaaaaaacctcatatacacacacatccgtatttatctccattgtaggggaagaaaaagaatgggactatcagccgggcatggtggctcacgcctgtaatcccagcac

SEQ ID NO: 17626 - DNA, 201 bp, Homo sapiens
gtctctactgaaaatacaaaaattagccgggcatggtggcgcatgcctgtaatcccagctactcgggaggctgaggcaggagaatcgcttgaacccaggargcggaggttgcagtgaggcaagatcacaccattgcactccagcctgggcaacaagagcaagactgtctcaaaaaaaaaaaaaaaaaaaaaaaaggaaaaa

SEQ ID NO: 17627 - DNA, 201 bp, Homo sapiens
gtggtgcaatctcggctcactgcaagctccacctccagggttcacgccattctcctgcctcagcctcttgagtagctgggactacaggtgcccgccaccaygcccggctaatttttttgtatttttagtagagacgggctttcaccgtgttagccaggatggtctcaatctcctgacctcgtgatccgctcacctcggtct

SEQ ID NO: 17628 - DNA, 201 bp, Homo sapiens
atccccggggtttctgatggcccaaggcttgtcctctaagatggcatttcagggccaacccctgcctctttctgctccagccacccctctggtatgggacrggttgccagggtcctaagcatccttgcaggaacttgctgtctgcatccccaaagatggattctgggcaggctgggagcaaggcaagagccctttccctcc

SEQ ID NO: 17629 - DNA, 201 bp, Homo sapiens
tcccaaagtgctgggattatgggcatgagccaccatgcccagcctcaatcagtcttttttatttatttatttatttatttatttatttatttatttatttwtttttttgagacagagtctcactctgtcacccaggctggagtgcagtggtgcaatctcggctcactgcaagctccacctccagggttcacgccattctcc

SEQ ID NO: 17630 - DNA, 201 bp, Homo sapiens
ggaaattgctcctgagcatcaacgtgacgaacacccggacctcggagcgctccggggaggacgcccacgaggcgctgctcaccctggtggtgcctcccgcyctgctgctgtcctcagtgcgccccgtgagtgcccgccggccggctcagagcccaagcagggctccccgcgtctttgcatccccatatccatgtcctgtgc

SEQ ID NO: 17631 - DNA, 201 bp, Homo sapiens
ggcctcccaaagtgctgggattatgggcatgagccaccatgcccagcctcaatcagtcttttttatttatttatttatttatttatttatttatttatttrtttatttttttgagacagagtctcactctgtcacccaggctggagtgcagtggtgcaatctcggctcactgcaagctccacctccagggttcacgccatt

SEQ ID NO: 17632 - DNA, 201 bp, Homo sapiens
tacagtctcacccctggcctgggttagtggggggagctgcaagctggaaagggggacccaggagctctggcttctgaccacaccaccaagctgggactgarccccagcccccaggctccccagccctaaagccctggtccacgagtgctgctggtgaggatagcccagcgcccccctgatggcccgtccccacctcctccc

SEQ ID NO: 17633 - DNA, 201 bp, Homo sapiens
tttctcctccaggtgcgactagaggacggggcctggctgtcccaagatgggcttttctcacctaggagaccccaggggcggggcctagttgatccgggagkgccctgggggcggggctcttggctgagtcctgggctcctgctctcaggctccagtacagcagagacgtccggaaattgctcctgagcatcaacgtgacga

SEQ ID NO: 17634 - DNA, 201 bp, Homo sapiens
ggcggggcctcatggcaaggcgagcccagggacagggctttagcgggaacaggtgggatggtcagaaacggggctttctcctccaggtgcgactagaggayggggcctggctgtcccaagatgggcttttctcacctaggagaccccaggggcggggcctagttgatccgggagtgccctgggggcggggctcttggctga

SEQ ID NO: 17635 - DNA, 201 bp, Homo sapiens
cattgactcggagctggtggaggagctgccggccgaaatcgagctgtggctggtgctggtggccgtgggtgcagggctgctgctgctggggctgatcatcmtcctgctgtggaaggttagtagcccagcccactcctgctccgggacctccaccagcacactcaccagcccttcctccaacccacgtctccccatcctggt

SEQ ID NO: 17636 - DNA, 201 bp, Homo sapiens
atccatggagagaagctgggactgcctgggttggccaccttcggctattccctcagtgggcagatggatgtggatgagaacttctacccagaccttctagygggaagcctgtcagaccacattgtgctgctgcggtgagccaggaggccagtgaataagggtctttctcttcttcatctttgtctgcacagattcccatct

SEQ ID NO: 17637 - DNA, 201 bp, Homo sapiens
aacagggagagggcgagtccagggtcatagcatgggtgtgtgtgtgtgtgtgtgtgtgtgtgtgtgtgtgtgtgtgtgatttgcgtgtctttgcatggatrtgtatgtgtttgtccccagccaaaatgacctttctcgtgtccattattctgttatgtgtccattactgtcccacctccatgcctttccccagggtgttcc

SEQ ID NO: 17638 - DNA, 201 bp, Homo sapiens
tagggggtgccatctatgtcttcatgaaccaggcgggaacctccttccctgctcacccctcactccttcttcatggccccagtggctctgcctttggtttwtctgtggccagcattggtgacatcaaccaggatggatttcagggtatgagccagcactcctcccccagcacccctcctccagcacccctcctcccagcac

SEQ ID NO: 17639 - DNA, 201 bp, Homo sapiens
agagctgaggtttctattgaggtgactgatgtcagaggggctatagttagccagctttggtgcccacccccctctgccagggccctggtctcttgtccccygtgactccagcatccttcttacccctagggtaaatcaccggctacaaagcttctttggggggacagtgatgggtgagtctggcatgaaaactgtggagga

SEQ ID NO: 17640 - DNA, 201 bp, Homo sapiens
acccctcctcccagcacccctactgactgagcaccagctgcacatcaggcttgacagggcccacagatgagacaggatggggccggacctggggagctcgmagcagtactagagagaggatgtgcagatgtgcagaggaagcacagaggcaagctcagtgggcctcctggaggagcttgcatgccactgtgcagccaaggc

SEQ ID NO: 17641 - DNA, 201 bp, Homo sapiens
ggagctcgctgtgcccgatggctacaccaaccggactggtgctgtgtacctgtgcccactcactgcccacaaggatgactgtgagcggatgaacatcacartgaaaagtgaggggaaggggctggggaggggtgctgggtcagaggtctggcaggggggtaccgcagagagaatggcctggaggagatagaaggcttgttc

SEQ ID NO: 17642 - DNA, 201 bp, Homo sapiens
cttgcacccgggaggcggaggtggcagtgagccgaggttgtgccactgcactccagcctgggtgacagagcaagaccctgtctcaaaaaaaaaaaaaaaaagaaagaaaaaaagaaattcctgggtccctggagggagggctggaggcatgctagaccagtcctgatgccacaacaaatcggaacaacaatgctcacatta

SEQ ID NO: 17643 - DNA, 201 bp, Homo sapiens
catgggcagggcagcagcagcaacaagggggcaacacttccattacaggcgtgcccaaggcccggcctcccactgaggcccggaccccttagtgtcactgtagaaaattcccaacctccacctccagccagatctgagcccccgctgtagagtgactctagctgccagcgctcccaccctgaccccagtgatcacctggta

SEQ ID NO: 17644 - DNA, 201 bp, Homo sapiens
gtgatagagcatctgggaataaatataacaaatatgcagcaaaaacttgagaaatgattagaaaaaagtcaatattgtattatcaagttgtcagatcttccacccaaattattccagtctcagtaggattcaggaaacttgaaaaagaagttcccaatcttgaatctgagttgcatctagaagaataaatataaaattgct

SEQ ID NO: 17645 - DNA, 201 bp, Homo sapiens
acatgggcagggcagcagcagcaacaagggggcaacacttccattacaggcgtgcccaaggcccggcctcccactgaggcccggaccccttagtgtcactgtagaaaattcccaacctccacctccagccagatctgagcccccgctgtagagtgactctagctgccagcgctcccaccctgaccccagtgatcacctggt

SEQ ID NO: 17646 - DNA, 201 bp, Homo sapiens; identical to SEQ ID NO: 4204

SEQ ID NO: 17647 - DNA, 201 bp, Homo sapiens
gaatgaacaaataaatgaatgatgcgcatttgtgtgtggaggggaggcctggctgacagatcctttggggtgctgtttaaggatgctacttggtgggagggtgatggggtgggaaagcttagggtcggaggtaggctcagagaagtgtcaagtgttccccttgacccaccccactcccaatccaggattacagagactttg

SEQ ID NO: 17648 - DNA, 201 bp, Homo sapiens
aggtgctctgattcatgatccttccggtgcccacagatgaccctggccatcacattattgaggacatgtggcttggagtgactgtggccagccagggcccygcaggcagagttctggtaagtgggtgctcagtgttggctcctccacctctacccggctctcccctcatctccagagctgggaggaaagaagagggcagca

SEQ ID NO: 17649 - DNA, 201 bp, Homo sapiens
accatcaacatggagaacaagaccacgtgggtgagtgcgcatgttcactaggacagcagtctccagccagagcttgagagtacagggcatcttttaagagsacactgacgcacttcagccatatggttctcaatcttggccacacggtaagagtatctggaggagttctggtgtctggactgcacccagagcaattaaccc

SEQ ID NO: 17650 - DNA, 201 bp, Homo sapiens
tacattatagatttataatatatattagattatacattatagatttataatgtatattagattatacattatagatttataatgtatattagattatacawtatagatttataatgtatattagattatacattatagatttataatgtatattagattatacacatatagatttataatatatattagattatacatatt

SEQ ID NO: 17651 - DNA, 201 bp, Homo sapiens
gaacccaggaagcggaggttgcagtgaggcaagatcacaccattgcactccagcctgggcaacaagagcaagactgtctcaaaaaaaaaaaaaaaaaaaaaaaaggaaaaaagaattgttaaagaggatgtgttttataaatggcaaaatgctcaccaataaaaggggttattactatccttgttgggtgggggtgggggt

SEQ ID NO: 17652 - DNA, 201 bp, Homo sapiens
tatattagattatacattatagatttataatatatattagattatacattatagatttataatatatattagattatacattatagatttataatgtataytagattatacattatagatttataatgtatattagattatacattatagatttataatgtatattagattatacattatagatttataatgtatattaga

SEQ ID NO: 17653 - DNA, 201 bp, Homo sapiens
tgtctcaaaaaaatatatatattatagatttataatatatattagattatacattatagatttataatatatattagattatacattatagatttataatrtatattagattatacattatagatttataatgtatattagattatacattatagatttataatgtatattagattatacattatagatttataatgtata

SEQ ID NO: 17654 - DNA, 201 bp, Homo sapiens
gcctctctccagaagggcctcggtttccttttgcccagtacagaggcgagagctagggcctggacgtgtgtgtcccactgtgacccgccctcctgtacatycctccaacagtgtgcaagtggagctgtgctttgcttacaaccagagtgccgggaaccccaactacaggcgaaacatcagtgagtgctggggtgcagcgta

SEQ ID NO: 17655 - DNA, 201 bp, Homo sapiens
cccagttttgtccctgcctctctccagaagggcctcggtttccttttgcccagtacagaggcgagagctagggcctggacgtgtgtgtcccactgtgaccygccctcctgtacatccctccaacagtgtgcaagtggagctgtgctttgcttacaaccagagtgccgggaaccccaactacaggcgaaacatcagtgagtg

SEQ ID NO: 17656 - DNA, 201 bp, Homo sapiens
tagaaatttgattcttggggccagcatttgccctctctacccaacctcattaaaaagcaaaattccttgtaagaggtaatggatgaagtcgggggcagtakagtatagtggttcaaggtgggagctctggacggcctggttcaaatcccagctatgccagtgcaggggtggggatgggctctggaaagggggacgcattta

SEQ ID NO: 17657 - DNA, 201 bp, Homo sapiens
ggaggctgggtgcaagggtggagagaggagagcccttagtcgggctgaattcaggtaagagcctgctttcctgccttggtttccccacaaccaccaccagrcgccaataagagatcagaaggtaaaccactgatccaaggctgcagagactgaactgtcacaaggtccagcctccaggagctgagagctctggtctttcag

SEQ ID NO: 17658 - DNA, 201 bp, Homo sapiens; identical to SEQ ID NO: 4212

SEQ ID NO: 17659 - DNA, 201 bp, Homo sapiens
tcatttgacttaggagaaaacagagcctcaggaggttacctgcctgtccaagatctgaattttatgggaggcagagctaggactgaagccgctgaccacarccgtgtctttaagaagacaaactccaggcagatggttgtcagacagctagacatgcctaaacaaaagcagctgtgataacagctttctctgtggtgtttg

SEQ ID NO: 17660 - DNA, 201 bp, Homo sapiens; identical to SEQ ID NO: 4214

SEQ ID NO: 17661 - DNA, 201 bp, Homo sapiens
gcactttgcacggccacctcttggtgagattgttctgcccacctactcctcatttatttatagggaggctaggaggggctgcagctcccaaacccctcccytggcctcctgacatcccacctttagaaatttgattcttggggccagcatttgccctctctacccaacctcattaaaaagcaaaattccttgtaagaggta

SEQ ID NO: 17662 - DNA, 201 bp, Homo sapiens; identical to SEQ ID NO: 4215

SEQ ID NO: 17663 - DNA, 201 bp, Homo sapiens; identical to SEQ ID NO: 4216

SEQ ID NO: 17664 - DNA, 201 bp, Homo sapiens
aaggtttggtttgaatgaagactgacgacaccacccaaacaccaagagagtatgaaaaggtttattatttacataattgaggtctccagggggagcagggscagtctttcaagcaggtcccagatgtgttgggagagccaggaaggagactggcctgggtttttattgtggttgaggggtgagggttccctcaggaagggg

SEQ ID NO: 17665 - DNA, 201 bp, Homo sapiens; identical to SEQ ID NO: 4218

SEQ ID NO: 17666 - DNA, 201 bp, Homo sapiens
catatgggcgcggtgttcttgctgagccaggaggcaggcggagacctgcggaggaggcaggtgctggagggctcgcaggtgggcgcctattttggcagcgycattgccctggcagacctgaacaatgatgggtgagaatctagggacatcctctggggccagggagagcgatgggcgggggaaggcttacctaagccaggt

SEQ ID NO: 17667 - DNA, 201 bp, Homo sapiens
ccatgtccagaataattctacactcccatttccacccctagggaaggaggggagcagtagagaccctcctcctgggaactagcctgtttcctcctgagcamcccttccaggataacaaatggacccattcccaacattgtggtcagggtagactgcccagtcttcctggccattccatccactgtctctgcagctgccctc

SEQ ID NO: 17668 - DNA, 201 bp, Homo sapiens
gttccctatccccaagctatctcccaaactcctctgacccctctcttggcccagtgtcctcaggcctccactttccctggatcatccttttcttaacaacracaatcactatcgttaccgttactattccccctgtaaagcaggcagaaatggaggaatcagcaaccccggggctaaggtgttgtccctaccattttataa

SEQ ID NO: 17669 - DNA, 201 bp, Homo sapiens
accagcacactcaccagcccttcctccaacccacgtctccccatcctggtcctcccttccatctcacccccacccttcctccctgtcctctccaccttctmccaccagcttacagtctcacccctggcctgggttagtggggggagctgcaagctggaaagggggacccaggagctctggcttctgaccacaccaccaagc

SEQ ID NO: 17670 - DNA, 201 bp, Homo sapiens
gggctggacatggtagaggaaaccagaaaccggtggtgacttatactccctactctccctccctcaatccctgtgaaggaaacagctacatgattcagcgyaaggagtgggacttatctgagtatagttacaaggacccagaggaccaaggaaacctctatattggtgagtacagtagtggtagcccatcaagtggtagag

SEQ ID NO: 17671 - DNA, 201 bp, Homo sapiens
aagctatctcccaaactcctctgacccctctcttggcccagtgtcctcaggcctccactttccctggatcatccttttcttaacaacaacaatcactatcrttaccgttactattccccctgtaaagcaggcagaaatggaggaatcagcaaccccggggctaaggtgttgtccctaccattttataagagctcattgtgc

SEQ ID NO: 17672 - DNA, 201 bp, Homo sapiens
caggcacaggctttttccagtcccaggctgccccctactggcagcaggacaaacagcaggtgcctgggcccagctaggataggaagggtgaggatgggccyaagcaggctgacacagggctgagtcctcctctccccgctccagttctctgtggacattgactcggagctggtggaggagctgccggccgaaatcgagctg

SEQ ID NO: 17673 - DNA, 201 bp, Homo sapiens
gcaaggagtgggacttatctgagtatagttacaaggacccagaggaccaaggaaacctctatattggtgagtacagtagtggtagcccatcaagtggtagrggggaagggggcttagtccctggtggaaaggtgaggccagagtgcagttgtgactaatggcatttagttaaactagcacacacggattggccggcacctg

SEQ ID NO: 17674 - DNA, 201 bp, Homo sapiens
tctcccaaactcctctgacccctctcttggcccagtgtcctcaggcctccactttccctggatcatccttttcttaacaacaacaatcactatcgttaccrttactattccccctgtaaagcaggcagaaatggaggaatcagcaaccccggggctaaggtgttgtccctaccattttataagagctcattgtgctaagga

SEQ ID NO: 17675 - DNA, 201 bp, Homo sapiens
ccttcatcgaggtcagtgcctgggtctgaaggtctctcctaccatccaccctgagggggagaacaacagggagagggcgagtccagggtcatagcatgggkgtgtgtgtgtgtgtgtgtgtgtgtgtgtgtgtgtgtgtgtgatttgcgtgtctttgcatggatgtgtatgtgtttgtccccagccaaaatgacctttctc

SEQ ID NO: 17676 - DNA, 201 bp, Homo sapiens; identical to SEQ ID NO: 4227

SEQ ID NO: 17677 - DNA, 201 bp, Homo sapiens; identical to SEQ ID NO: 4228

SEQ ID NO: 17678 - DNA, 201 bp, Homo sapiens
tcctggtgctcatatgatgccaccaggatgtgatttatctcaagcacttaactctgtgttcttcgtgttgcctccattctttgataggcattcttttcgtrgtgccaagatgaatgcaacagcttcagctttatcttctttgaccttcaagttctatagtcccagtagatatctgactacaactcattagctctgactatt

SEQ ID NO: 17679 - DNA, 201 bp, Homo sapiens
ccagataggcacataaactcagtcttagaatgtgttgctttgatgtcaggtttttctcttgccttgatagttccacatggctggggaagcctcacaatcayggtggaaggcaaggaggagcaagtcccatcttacgctgatggcagcaggcaaagagagaatgaggctgtctctctctctctctctctctcttttcttttc

SEQ ID NO: 17680 - DNA, 201 bp, Homo sapiens
gggtgacagagtcagatcctgtctcaaaaaggaaaaaattgatgtaatgtttacatacagtgaaatgtacagatttcaaacttcaatgaatttttacaaaygtatgtacctgtataaccaaagatatatcttaaaatcactccagaaggtgcccttgtaaccccttctaatcatttgccaccccataagccaccactgctg

SEQ ID NO: 17681 - DNA, 201 bp, Homo sapiens
cacctggcctctgaccccactgaacaagaagacgtggtcacatccagggtacactggaaaatctccctgctctggctggggcctgcagagcttgaggaagyttagaatgtccaaagtccaaactctgcccccgccttggttctgccctcctgacccagcctacctacctggacttaacctcaactccatcttgctcttgca

SEQ ID NO: 17682 - DNA, 201 bp, Homo sapiens
tcctcccttccatctcacccccacccttcctccctgtcctctccaccttctaccaccagcttacagtctcacccctggcctgggttagtggggggagctgyaagctggaaagggggacccaggagctctggcttctgaccacaccaccaagctgggactgagccccagcccccaggctccccagccctaaagccctggtcc

SEQ ID NO: 17683 - DNA, 201 bp, Homo sapiens
atcagactggaaagaaagagtcaataatgattccgcaacccttttgcctggtgaccttgagcaagatatttcccctccctgggccaggtttcccccaaaasgggttggacctggatctagtgctctttcccactgctgctggcctgtgagaagcaacttgatatggtagagggagaagaggcttggaggtcccatggccag

SEQ ID NO: 17684 - DNA, 201 bp, Homo sapiens
gggggcttggtcagaagtaaacaaagaaggaagaagatcccctttgcagtaagaggaattgaggttagatgacacttagaatgccctcgggggtcaaatayaggaaaaatactgaagagccaaggaaagggagcagaactgagaaaaatggccttgttctttttttatctgaggcttagccagggctctttttcctgtcct

SEQ ID NO: 17685 - DNA, 201 bp, Homo sapiens
aggagctgggggtctcctggcaccaagaatctgtaaatgtatgttgaataaataacaagttgttccaagtggggcttggggagtctgaacccggacccacytccgtccctatccccaggctcctggctggtgccccccgggagctcgctgtgcccgatggctacaccaaccggactggtgctgtgtacctgtgcccactca

SEQ ID NO: 17686 - DNA, 201 bp, Homo sapiens
gtgctccctgcttcccactcccggggcacttccttctagtgtcttttttccttgcctgccttaccctacactgggcacttctggagggcaggagctggggrtctcctggcaccaagaatctgtaaatgtatgttgaataaataacaagttgttccaagtggggcttggggagtctgaacccggacccacctccgtccctat

SEQ ID NO: 17687 - DNA, 201 bp, Homo sapiens
ctcggagctggtggaggagctgccggccgaaatcgagctgtggctggtgctggtggccgtgggtgcagggctgctgctgctggggctgatcatcctcctgmtgtggaaggttagtagcccagcccactcctgctccgggacctccaccagcacactcaccagcccttcctccaacccacgtctccccatcctggtcctccc

SEQ ID NO: 17688 - DNA, 201 bp, Homo sapiens
ccatgttatccatgtgcctggcattatatgagcttggcccaaagagtgtgtctgaaatgcatagctgtgaggttgggggacgtgtgcatgagtgaaaggawgtcagacccctttgggtcacccaggggtgagacaaagcctggaaggggcgggaggtaaggagcaaggcatgaagaatctggagactcagactatgtcacg

SEQ ID NO: 17689 - DNA, 201 bp, Homo sapiens
ggggctggtgggcctggggaccctggtcctaggtctggagtggccctacgaagtcagcaatggcaagtggctgctgtatcccacggagatcaccgtccatrgcaatgggtcctggccctgccgaccacctggagaccttatcaaccctctcaacctcactctttctgtaaggacactatcagggatatttcatttgcatgc

SEQ ID NO: 17690 - DNA, 201 bp, Homo sapiens
acaaaattagccaggcgtgatggtgcgtgcctgtaatcccagctactcgggaggctgaggcaggagaatcgcttgaacctgggaggcagagctggtggtgrgccaagattccaccattgcactccagcctgggcaacagagcaagactctgtctccaaaaaataaaataaaataaaataaaataaaaagaatgggaatata

SEQ ID NO: 17691 - DNA, 201 bp, Homo sapiens
atttctttattcatgtatttatgtatttatttatttatttattttttgagatggagcctcactctgtggccaggctggaatgcagtggcgtgatcactgcragctctgcctccctggttcatgccattctcctgccttggcctcccaagtagctgggactacaggcgcccaccaccacgcccggctaatttttgtattttt

SEQ ID NO: 17692 - DNA, 201 bp, Homo sapiens
gagaggctgaggcctagagagacttgagtggcctccccaaagtggcacagcttgtcaggggctggaacgtgggtctcctgattatctcacccattgtcacrtccactatggacctgtgagcttcccgccacgggcaatatgtatgtatagagagaaaggcaggatatcaaggcagaatggagggaggttcagccatgagaa

SEQ ID NO: 17693 - DNA, 201 bp, Homo sapiens
gcagggcccggcccgtcatcaacatcgtccacaagaccttggtgcccaggccagctgtgctggaccctgcactttgcacggccacctcttggtgagattgytctgcccacctactcctcatttatttatagggaggctaggaggggctgcagctcccaaacccctcccctggcctcctgacatcccacctttagaaatttg

SEQ ID NO: 17694 - DNA, 201 bp, Homo sapiens; identical to SEQ ID NO: 4217

SEQ ID NO: 17695 - DNA, 201 bp, Homo sapiens
gaattttatgggaggcagagctaggactgaagccgctgaccacaaccgtgtctttaagaagacaaactccaggcagatggttgtcagacagctagacatgyctaaacaaaagcagctgtgataacagctttctctgtggtgtttggggagaagacacttgtctctaacggcccttagaacaggatttgttcctgacctctg

SEQ ID NO: 17696 - DNA, 201 bp, Homo sapiens
cacgtctctgtgctgatctgcccgagaggtgatggtgtccattggtgtgctctggggctctgggagagtgagatgagggctggggagagggcaggtagagraagacttgtgggaacacagcaagcgctaaataaacagaagccgcctttgtgggatattgacattgtcattgttccagctgggaaaacttcacctgaacca

SEQ ID NO: 17697 - DNA, 201 bp, Homo sapiens
cccaactctggcctggggcaggcaggaggcactgatatctgtctggctctgttgtctctgcagggcccggcccgtcatcaacatcgtccacaagaccttgrtgcccaggccagctgtgctggaccctgcactttgcacggccacctcttggtgagattgttctgcccacctactcctcatttatttatagggaggctagga

SEQ ID NO: 17698 - DNA, 201 bp, Homo sapiens
gtgtccattactgtcccacctccatgcctttccccagggtgttccttaaccctggaatgctcatttcccctcttttatctctgcgtgtaaacccctatttygttttcaaggtccctgtcagatgcttcaccatcagtgagctcttttctggcttttccagctgaaaatgacctctcttccaatggccacccacctaacttt

SEQ ID NO: 17699 - DNA, 201 bp, Homo sapiens
gcccatcaagtggtagaggggaagggggcttagtccctggtggaaaggtgaggccagagtgcagttgtgactaatggcatttagttaaactagcacacacrgattggccggcacctgtatgccaggccctgttccaagctcccaagatgcaaagttcttgacttcaggatgctcacagtccagtgtccaggcagaactggg

SEQ ID NO: 17700 - DNA, 201 bp, Homo sapiens; identical to SEQ ID NO: 4221

SEQ ID NO: 17701 - DNA, 201 bp, Homo sapiens
gattatgatattcatttgacttaggagaaaacagagcctcaggaggttacctgcctgtccaagatctgaattttatgggaggcagagctaggactgaagcygctgaccacaaccgtgtctttaagaagacaaactccaggcagatggttgtcagacagctagacatgcctaaacaaaagcagctgtgataacagctttctc

SEQ ID NO: 17702 - DNA, 201 bp, Homo sapiens
acaagaactatgctgcatattggaggctgacctcacactcccatttccctcctctcctgtgtaggtggcaggacctcctggtgggcgccccctactacttygagaggaaagaggaagtagggggtgccatctatgtcttcatgaaccaggcgggaacctccttccctgctcacccctcactccttcttcatggccccagtg

SEQ ID NO: 17703 - DNA, 201 bp, Homo sapiens
aatagtgtgcatcccctccttccccatgacatcacccccgccaggccccatatgccactctctgcctccctgacccttgtggcagatggagctgctcatcrcctttgaggtcatcggggtgaccctgcacacaagggaccttcaggtgcagctgcagctctccacgtgagtgacctcgaaaagccagtctgggtcagggct

SEQ ID NO: 17704 - DNA, 201 bp, Homo sapiens
tgatgtcagaggggctatagttagccagctttggtgcccacccccctctgccagggccctggtctcttgtcccccgtgactccagcatccttcttaccccwagggtaaatcaccggctacaaagcttctttggggggacagtgatgggtgagtctggcatgaaaactgtggaggatgtaggaagccccctcaagtatgaat

SEQ ID NO: 17705 - DNA, 201 bp, Homo sapiens
gtggtagaggggaagggggcttagtccctggtggaaaggtgaggccagagtgcagttgtgactaatggcatttagttaaactagcacacacggattggccrgcacctgtatgccaggccctgttccaagctcccaagatgcaaagttcttgacttcaggatgctcacagtccagtgtccaggcagaactgggccatggctg

SEQ ID NO: 17706 - DNA, 201 bp, Homo sapiens
aaaggtgaggccagagtgcagttgtgactaatggcatttagttaaactagcacacacggattggccggcacctgtatgccaggccctgttccaagctcccmagatgcaaagttcttgacttcaggatgctcacagtccagtgtccaggcagaactgggccatggctgctggccatctggagtctactttcttgccctactt

SEQ ID NO: 17707 - DNA, 201 bp, Homo sapiens
gaagagggcagcaggggggtccacggcgcgtgtgtgctggggcctgcacacatgtcccttcctgtggctgtgtgtccctcgctctctgcactcctggggarggggtgagtatcctgtgctctcccaaacccccgcacggcctgagttctctgactcatccacttcctccgcatgcctacactgggtgctcagccttcgtgg

SEQ ID NO: 17708 - DNA, 201 bp, Homo sapiens
gaagacacttgtctctaacggcccttagaacaggatttgttcctgacctctgacttccagagccacccagcctctctcatggtctgctttgtggcccaggrcctgcagggattagaagacatgtggggtcaaggaacaggaagctgacctggatggaagttgaacagtgatctttgctctctgcctggctcctgagtcctc

SEQ ID NO: 17709 - DNA, 201 bp, Homo sapiens
cccaccccagcctgctgtgcctaagctagggttccctatccccaagctatctcccaaactcctctgacccctctcttggcccagtgtcctcaggcctccaytttccctggatcatccttttcttaacaacaacaatcactatcgttaccgttactattccccctgtaaagcaggcagaaatggaggaatcagcaaccccgg

SEQ ID NO: 17710 - DNA, 201 bp, Homo sapiens
tagctgctgctattattattaccgtcattgtaattattattttaataatggtcctttcattaagaggacagggtcatctggagatggcagagcagcaagtyccttaatctctctgttactaaccccttctagaccaagagcctgaaccccacagtctctcatccttccctgctttccctttgctgagatctctaagccact

SEQ ID NO: 17711 - DNA, 201 bp, Homo sapiens; identical to SEQ ID NO: 4229

SEQ ID NO: 17712 - DNA, 201 bp, Homo sapiens
ctatcgttaccgttactattccccctgtaaagcaggcagaaatggaggaatcagcaaccccggggctaaggtgttgtccctaccattttataagagctcaytgtgctaaggattttatatacatcatctcaatgacttctcacagcagccctgtgatacaacagctatgattaagtccattttacagatgaggagactgag

SEQ ID NO: 17713 - DNA, 201 bp, Homo sapiens
gcagggctccccgcgtctttgcatccccatatccatgtcctgtgcaggtgttgtcgtctgccacgtgcccacctcctctggtctgggccttcttgggggcmttagcgtctctgctgcttggagaatccggctctcaagctctagggcttctgaccttgcaccacagaggagggaggacaagccctactttgacccgaccct

SEQ ID NO: 17714 - DNA, 201 bp, Homo sapiens
ggagaaccacactgaggtgagtggggctggcgcctggactggaagaccaggggccagaagggcggtggggcgagagggcactggggggggtggtgcggccytcacacctccggccaccccccaggtccagttccagaaggagtgcgggcctgacaacaagtgtgagagcaacttgcagatgcgggcagccttcgtgtcaga

SEQ ID NO: 17715 - DNA, 201 bp, Homo sapiens
gcccacctactcctcatttatttatagggaggctaggaggggctgcagctcccaaacccctcccctggcctcctgacatcccacctttagaaatttgattmttggggccagcatttgccctctctacccaacctcattaaaaagcaaaattccttgtaagaggtaatggatgaagtcgggggcagtagagtatagtggttc

SEQ ID NO: 17716 - DNA, 201 bp, Homo sapiens
agcccttcctccaacccacgtctccccatcctggtcctcccttccatctcacccccacccttcctccctgtcctctccaccttctaccaccagcttacagkctcacccctggcctgggttagtggggggagctgcaagctggaaagggggacccaggagctctggcttctgaccacaccaccaagctgggactgagcccca

SEQ ID NO: 17717 - DNA, 201 bp, Homo sapiens
ccctactggcagcaggacaaacagcaggtgcctgggcccagctaggataggaagggtgaggatgggcctaagcaggctgacacagggctgagtcctcctcyccccgctccagttctctgtggacattgactcggagctggtggaggagctgccggccgaaatcgagctgtggctggtgctggtggccgtgggtgcagggct

SEQ ID NO: 17718 - DNA, 201 bp, Homo sapiens
ggccagtgaataagggtctttctcttcttcatctttgtctgcacagattcccatctgtgtccatgtttgcgctagctccttggaagcctgggccccaactstggcctggggcaggcaggaggcactgatatctgtctggctctgttgtctctgcagggcccggcccgtcatcaacatcgtccacaagaccttggtgcccag

SEQ ID NO: 17719 - DNA, 201 bp, Homo sapiens
cagttctctgtggacattgactcggagctggtggaggagctgccggccgaaatcgagctgtggctggtgctggtggccgtgggtgcagggctgctgctgcwggggctgatcatcctcctgctgtggaaggttagtagcccagcccactcctgctccgggacctccaccagcacactcaccagcccttcctccaacccacgt

SEQ ID NO: 17720 - DNA, 201 bp, Homo sapiens
accttcggctattccctcagtgggcagatggatgtggatgagaacttctacccagaccttctagtgggaagcctgtcagaccacattgtgctgctgcggtragccaggaggccagtgaataagggtctttctcttcttcatctttgtctgcacagattcccatctgtgtccatgtttgcgctagctccttggaagcctggg

SEQ ID NO: 17721 - DNA, 201 bp, Homo sapiens
gggaagggtcaggaaggatggggagggctgcagtttcagctgccacagggccggcctctggggagatggctaattcgggcagcaaggctggcatagagctsggatccaggcatcccagagctgcccccaccccttctctggggctcagaggtggagcaggcaccctccccacctgcctcccggccggggataggaggggaa

SEQ ID NO: 17722 - DNA, 201 bp, Homo sapiens
tgcagtgagctgcgattgtgccactgtcctccagcctgagcagcagagcaagaccttatctcaaaaaactaaataaatatcgctactttctctctttctcktatcaaaagtcatgggcactttttcatgttgatatatataggaccatcattttagaggatgaagggtattttcttgtaaaagaccatgcttgtaaaagac

SEQ ID NO: 17723 - DNA, 201 bp, Homo sapiens
aaatgtgtcacctcctgcccacattctatagtggcagcccctgagttctccatttctgggtcccagatagacatttccccccgcatttttttctctctctstctcttgttgttgttgttatattccaaaaaggattttgattttattgcttcacacacagaagagttctggttaaggcttgccttgctcctggtgctcata

SEQ ID NO: 17724 - DNA, 201 bp, Homo sapiens
tctcaaaaaaaaaaaaaaaaagaaagaaaaaaagaaattcctgggtccctggagggagggctggaggcatgctagaccagtcctgatgccacaacaaatcrgaacaacaatgctcacattagctatggcttcatatcagaacacctttttgtagaatagacctatttgttcctctagcaaccctggaggtcagcaggagag

SEQ ID NO: 17725 - DNA, 201 bp, Homo sapiens
gcctgggtgacagagcaagaccctgtctcaaaaaaaaaaaaaaaaagaaagaaaaaaagaaattcctgggtccctggagggagggctggaggcatgctagrccagtcctgatgccacaacaaatcggaacaacaatgctcacattagctatggcttcatatcagaacacctttttgtagaatagacctatttgttcctcta

SEQ ID NO: 17726 - DNA, 201 bp, Homo sapiens
aatgctattgatttggatgataaattggtagattcttttaggagacgaagttttcagtatctattaaaatttaaagtgcccatttccttagatccagtacmtgagaatatattgtaaggagctaataggacaagtatacaaagataaatatatggggatattttagataattatttataatggcagaaagttggaaacaat

SEQ ID NO: 17727 - DNA, 201 bp, Homo sapiens
agcatgggtgtgtgtgtgtgtgtgtgtgtgtgtgtgtgtgtgtgtgtgtgatttgcgtgtctttgcatggatgtgtatgtgtttgtccccagccaaaatgrcctttctcgtgtccattattctgttatgtgtccattactgtcccacctccatgcctttccccagggtgttccttaaccctggaatgctcatttcccctct

SEQ ID NO: 17728 - DNA, 201 bp, Homo sapiens
gaccctgtcttgccttttcttctgcagatattgctgtgggagctccgtttgaaggcttgggcaaagtgtacatctatcacagtagctctaaggggctcctyagacagccccagcaggtacagagagacggggatgggtctgctgcccccaccagccgagatgggccttccttgctttccttcacccaacccttccctgtag

SEQ ID NO: 17729 - DNA, 201 bp, Homo sapiens
accatccaccctgagggggagaacaacagggagagggcgagtccagggtcatagcatgggtgtgtgtgtgtgtgtgtgtgtgtgtgtgtgtgtgtgtgtgwgatttgcgtgtctttgcatggatgtgtatgtgtttgtccccagccaaaatgacctttctcgtgtccattattctgttatgtgtccattactgtcccacct

SEQ ID NO: 17730 - DNA, 201 bp, Homo sapiens
tgatgctaatgtgcagccagggctgagaaccactgcattagcttccttgatctgcacaacgcctccatgaagagtagggctgggactgcctctctattttrtggctgagaggctgaggcctagagagacttgagtggcctccccaaagtggcacagcttgtcaggggctggaacgtgggtctcctgattatctcacccatt

SEQ ID NO: 17731 - DNA, 201 bp, Homo sapiens
gcttgggtgggaagagggagcctctgggattctgctgggctgggccctgaaggcaggagtggacgagaaatggatacggtctaggctcagcttcccggctrcgcagtgcgttctgtgaaggacggactcatttctacattgacagtcttagcctttgataccagaagtcgcagcacttagggggaaaaatgctttttggta

SEQ ID NO: 17732 - DNA, 201 bp, Homo sapiens
ggcagagttctggtaagtgggtgctcagtgttggctcctccacctctacccggctctcccctcatctccagagctgggaggaaagaagagggcagcagggrggtccacggcgcgtgtgtgctggggcctgcacacatgtcccttcctgtggctgtgtgtccctcgctctctgcactcctggggagggggtgagtatcctgt

SEQ ID NO: 17733 - DNA, 201 bp, Homo sapiens
ctcgcaggtgggcgcctattttggcagcgccattgccctggcagacctgaacaatgatgggtgagaatctagggacatcctctggggccagggagagcgawgggcgggggaaggcttacctaagccaggtgaggggagtggaggatttgcagttgtgcggctgtctgcatgttgtttgcagaggtttgcagtcaggcttta

SEQ ID NO: 17734 - DNA, 201 bp, Homo sapiens
attattgaggacatgtggcttggagtgactgtggccagccagggccctgcaggcagagttctggtaagtgggtgctcagtgttggctcctccacctctacycggctctcccctcatctccagagctgggaggaaagaagagggcagcaggggggtccacggcgcgtgtgtgctggggcctgcacacatgtcccttcctgtg

SEQ ID NO: 17735 - DNA, 201 bp, Homo sapiens
gagaaggggagttgggagggctgccctgtgggtggagggcccaagcgggacccactcctgccctctggagactttgggcactgaagtatgggtgaggtgcwctgattcatgatccttccggtgcccacagatgaccctggccatcacattattgaggacatgtggcttggagtgactgtggccagccagggccctgcaggc

SEQ ID NO: 17736 - DNA, 201 bp, Homo sapiens
agagttttacagtatgtgattatatctctattttagcatattttgtaaagatttaaggagattaataaagttatatatagaatgccttattgctgattctyactgatactggtgtgcataaaatacagggctgagatttttctccagcagttttgagtttagcctgttgattttagccttaaaatcttttctttttcctct

SEQ ID NO: 17737 - DNA, 201 bp, Homo sapiens
gactctcaagatgcagtttgtataagggtcatttcttccaggaagagtttctgatgttcttggcaaattcatcatcatctctaacacatcagttgtttgtktatatgcttctttactaactgcatttatgcactgaatagtagtaattcatccctattgatatgtgcagttaagcctagattagtttactctgaggatttg

SEQ ID NO: 17738 - DNA, 201 bp, Homo sapiens
atttatttttaaatcctcacgtggtgtatcagcctttgttttatatttctagcaattaaatgtttaaattcaaaaccaaaaataaatgagaattaactaarcagtcttattcatatttgaattattattttttttaatggatacagcatctcgctgtgtcactcaagctggagtgcagtggtacagtcagggctcactgca

SEQ ID NO: 17739 - DNA, 201 bp, Homo sapiens
attctttccaagaaagaaaataagtggttattgggaatccatatattctcagaatcagatcttctttttgtctccccaccctctttggcctttggtacttygtattaacattagtaattgtacacattctctgtctccatcttttttcttttgagtacagctagagcattttcaaatgattgagggttaatacttagcagt

SEQ ID NO: 17740 - DNA, 201 bp, Homo sapiens
aggtcctggaatctgaccattctgattagccactcctgatggtgtaggaaaggaaagaatttgagcttcagaaggaaagctacagtttttttttgtttttyttccacatactcactcaccctcacgcccaactaaactatgaaagttcctggggaaaagtgatagagaacataaaatgagagctctggttaccattctatt

SEQ ID NO: 17741 - DNA, 201 bp, Homo sapiens
ccttttggcctaataaatcactacagagagtcattttgaggttccagattgataactggtttgtgagtcttaagaacaatgtcctgtgaacataccatcarttttgagagcttgattcctgcagaatatttatttacatgtaacttatcttaaatacagttttcttttttactacatgaacactggaacttagtactatta

SEQ ID NO: 17742 - DNA, 201 bp, Homo sapiens
ggtctcgaactcctgacctcaagtgaaaaagggatacacttttacataaaagtaaactttcttgattgtagatgatgtcaacaggcagattttcaaggaaratatctaatgtgttgggagggagaggtagagttactgagtagggggaaaaatgggtcagctagacagtaatagttgtataatgtggttttacatttattt

SEQ ID NO: 17743 - DNA, 201 bp, Homo sapiens
ccagtattcattttttcagctaaattcccactccatctcccaactcccatattatttagaagaaaatcctagacatctcattctatctacaaatgtctcartgtatattctgagagagaaggactcccaaaaataattttaaaaaataaattttgaaattattactaaaatttcctaaaatataaattggcaatctgtttt

SEQ ID NO: 17744 - DNA, 201 bp, Homo sapiens
tgatagtagcattgggcactatgagatttgaaaatgactgcaacatagattctcatcttcaggcttatagatagatacatgtgaagtcaattaactctaayacttggtagactaaatggaccagtatataaggaactctgaggaagaagtgcttaattctgtctaggccaattaaagaaagattctggaggaggtaacatt

SEQ ID NO: 17745 - DNA, 201 bp, Homo sapiens
agaatgaagtagtaatttgtcatattttcattcatatgttgttatgtgggccataggaaagttggcagatccatgaatttcaattttattatatatttctwgtcaagaatactttattagtacaaagcatatcatgtattttgattagaagtcttagagaaattaagatcttaggaaaatattaaaattttatttggggta

SEQ ID NO: 17746 - DNA, 201 bp, Homo sapiens
gcaactctgtttaaatcttaattctgttaagtaattctcgtcaactttgaatgaattaccagcttccctaagcctccatttcttcatccataaaatggaawtattaatacttgtacctaatttataagattgtgaagattaaatgagatcatgtgtataagacacttggcacaatatgtggcaagtatttctattcagtaa

SEQ ID NO: 17747 - DNA, 201 bp, Homo sapiens
ctccatccctctattttgagcctatatgtgtctttgcacatgagatgggtctcctgaatacagcacactgattggtcttgagtctttatccaatttgccartctgtgtcctttaagtggggcatttagcccatttacatttaaggttaatattgttaggtgtgaattcgatcctgtcattatgatgccagctggttatttt

SEQ ID NO: 17748 - DNA, 201 bp, Homo sapiens
cactgctttaaatgtgtcctagagattctggtacgttgtgtctttgttttcattggtttcaaagaacatctttatctctgccttcatttcgttatttaccyagtagttactcaggagcaggttgttcagtttccatgtagttgtgtggttttgagtgagtttcttaatcctgagttctaatttgattgcactgtggtctga

SEQ ID NO: 17749 - DNA, 201 bp, Homo sapiens
tgaccagtgatgatgagcattttttcatatgtctgttggctgcataaatgtcttcttttgagaagtggctgttcatatcctttgcccattttttgatggggttgtttgcttttttcttgtaaatttaagttctttgtagattctgggtattagccctttgtcagatggatagattgcaaaaattttctccgattctgtagg

SEQ ID NO: 17750 - DNA, 201 bp, Homo sapiens
ggagacagaatatattctttattatttctccttatgtactggctttttaaataatgaatttccttgctatctaccttcagtagggactaatttttttttttctagtttaagtaatattaggagctcatgcatttgaacatattttctattttattttatttgtattatacttttaagttctgggttacatgtgcagaacgt

SEQ ID NO: 17751 - DNA, 201 bp, Homo sapiens
agctttgtgtgcttgaccaatctacttagtctcagtaatttaagattatttataaaattggaaagatctagtttcttcctaagtcttttttctcatattgyattccacttcacatttttcactctgtcaatactggactacttttagttccccaacattccctactggtttacatcagtgtgcctttcttcgtaatagttt

SEQ ID NO: 17752 - DNA, 201 bp, Homo sapiens
gcaaagcattgaaaaccaagttctctgactgaagaaataattagatgaaaacataggaactatacaatggtaacattttaattgtcattcttttttatttwttagttggaatatttttgtaaaagaaactttctcatctctactatttggttaccctttgtattagtccattctcacgctgttgtaaaaaactgctcaaga

SEQ ID NO: 17753 - DNA, 201 bp, Homo sapiens
attgtgctgctgcactccagtgtgggcgacagagcaagactctgtctgaaaagagaaagaatttaatcagtatgatttctcaaggaaagtgaatgattatrcaagtcacagtaagtcactctcttatctcagcattctataaactactttctaatacaatacactttttatgtttcttcgtcattaaatagctgtgattct

SEQ ID NO: 17754 - DNA, 201 bp, Homo sapiens
aaagataaatgcattttcgttgaattttgtggcagtgtaaaataagacaagatgagacgtaatttttaaatttttcagactgatttgctacttgtttagayacctgccacactactaaattatctttcagtgaatgctagaaacttacatatagttgtgaatttattattatttaattatctggaggctgttgttcacctc

SEQ ID NO: 17755 - DNA, 201 bp, Homo sapiens
aaattacttgttcacagccacaaaatttgtggcagagccagaactagaacctaaaaccaaaagctgtgattccctctcaatgcttttacccttttttttttctgagatggagtcttgctctgttgcccaggctggagtgcagtggcatgatctcggctcattgcaacctctgcctcccggggtcaagcggttctcctgtct

SEQ ID NO: 17756 - DNA, 201 bp, Homo sapiens
gtgattatatgagccttcagccagtcatagtctttttgctggtggagggttttttttgttttgttttgtttgtttttgttttgacggagtcttgctctgtygccgaggctggagtgcagtggcacaatcttggctcactgtaaactccacctcccagattcaagcaattctcctgcctccacctcccgagtagctgggatt

SEQ ID NO: 17757 - DNA, 201 bp, Homo sapiens
ggacaagattgtttattttagttcatcaacaaaaatttattgaaatagcactgtcaggaattatggaatgtgtaaggcagtttctattcttaaggaactawaatctagccaggagaagagtggaaatacataaaatactaataaagtcagcatgtcttacacagtacttaatacagttttatgtatacatacacacagtag

SEQ ID NO: 17758 - DNA, 201 bp, Homo sapiens
ttagttaagataaccatataagattttttcaatccttcatcatccccaggatccagaattatatattcttaacttcattttttatttttttaaaaacatawctgaatatagctgaataattactaggttctcagtctctcttatacatatctttgctctttctttctgaaaaggattcaggaatgtagttcccccctgcct

SEQ ID NO: 17759 - DNA, 201 bp, Homo sapiens
attctctctaatcacctacttttgtttcttgtactttatgacccttcagcaatattaaatgttctctatttgatatactactcctcttttaaaaaaaaaaattgttttaaccttcaccatttctttatccttaatgacatagatcaggtttctcctagaagccttgctcttacttaggctactccctaatctctgagctcc

SEQ ID NO: 17760 - DNA, 201 bp, Homo sapiens
gatgtctaataagtatttaaaagttctatgaatatttggaaatcgggggcagagaataggctcgtatattaggtataaacaactaatatgcaagtatgaaraaaatgtcattcaggctggcgatctccttacctccgttttgccattctgattatgctgtatatgatgtatacttttgtgtctttctgctttcccacagtt

SEQ ID NO: 17761 - DNA, 201 bp, Homo sapiens
ttgatcttaatgtttcacagacttaccagcgttataggccagtatcaacttcaagttcaaccactccatcctcttcactttctactatgagcagttcactstatgcttcaagtcaactaaacaggccaaatagtcttgtaggcataacttctgcttactccagaggaataacaaaagaaaatgaaagaggtaagaatacca

SEQ ID NO: 17762 - DNA, 201 bp, Homo sapiens
gaggggaggaaattagtaaaccatccccatctgacacctctcattgccttatcacgcagactccagcccccaccaggctggagtggaagggagattgtctrgcttttaaagttgtaattttgaagcatattgatgtatactgtattttaagttttactgttaaaatcatatgagatacgttaagatgaagaggaacattgt

SEQ ID NO: 17763 - DNA, 201 bp, Homo sapiens
agcttcatcctcaggctgatgtacctcatagggataggattatagttggcttaggatagacagggcctatcactgaactgttgcagccattttgctaccarcatgggccatgtgtcatctcacctaaacctagtaactgctataccatgagaaaaaggaagaatggatgtagataaataaataaggtgcaatgtatgtgca

SEQ ID NO: 17764 - DNA, 201 bp, Homo sapiens
agatatttctgaatatctttctatatattttaatcttttttatctttaaaaagatatttttactttggaaaattaatcttaaaatttggggaacaagggcrttatgctaaatgaaataagcaagttacaaaaagacaagaactgtgtgattccacttattttatttgggtatcatagaaacagaaagtagaacctttgttg

SEQ ID NO: 17765 - DNA, 201 bp, Homo sapiens
aggctgagaccagatcatgcagtgccttataggccattgtaagatttttcgtatgctaagaacactgggaagccattcaagagtttttaatttgtgggtgraaatggaatggttggcctatgaaaattatgagattttcattttgaaaagttaattttagctcctatatataaaacagattagagggtgatcagggaatta

SEQ ID NO: 17766 - DNA, 201 bp, Homo sapiens
agcagggataaggaagaaggagtgttaagaaagacgaaaagcattagaaaaggggaaggtcttggattttatcctggatttgaaatatttcaggaaatacrtcatttgccttttaactttactataagcaatgtagaagtataatgataaatacagctggtactccgtctcatttttgggaatgcaagagagagtgatggg

SEQ ID NO: 17767 - DNA, 201 bp, Homo sapiens
aaaacagggagttcactttgggcaaatttaggacaacagttagtgaaagacaataaataaaattaaaaaccacacacacacaagaaaattttaagcctttragaaatctcttgaacttagcttgttttccatacttaattgtaaaaactaaaatcactgatttaatagtccttgaatagttctttaaaactttaacctctc

SEQ ID NO: 17768 - DNA, 201 bp, Homo sapiens
catttatttgtgtatttaatctgactgtcttactagactataaactttttgaagggcaattctgtgtttctttttgtttacctttatattcctggtatgtracatagtgccagatgcatactagacactccataaatattggttgaattaatgaatacgtttgaaataccagcaaggaatgtacataagcagttcataaaa

SEQ ID NO: 17769 - DNA, 201 bp, Homo sapiens
tagcatagttaattgattacctcttaccacactgtccttcataaaatctttatcacattgtgaattaatgaaccagtgcatagtaagtatattgtacccayagaattagaagttcaagatttagatatttcattattaaattgtttggtttgttattagaccattattgaatggctttgaagattggagacaaatcttttg

SEQ ID NO: 17770 - DNA, 201 bp, Homo sapiens
gaagttcctatctgagatgtgaagattgtaagaagagtaggttttatagggaaatattagggcttcattttcaggcatgttaaatttgttttgcgtgttaratatccaaactgttgaatatgcgagtctgcagttacaaaatggatatgtaaatttgggaggtgttcatttatagataacagtgattgctaacgggcacag

SEQ ID NO: 17771 - DNA, 201 bp, Homo sapiens
ttccattttatctttctagttgtcttttaaagctaaaatatgtttattgtaaattgaaatcatgagcagatgagttttagtagagctaaaagaaggacagrgtctgcctgttcttaataatcttagggtgattggaaaatatatcaaaagacattttaattttcttataatctttttcacagggtctttcttgtagatgac

SEQ ID NO: 17772 - DNA, 201 bp, Homo sapiens
ataaaataaaggttgttgtcaatatgtagttagaagggcatactaacataatttatgcaactctttgcattgtattaaaatgtgtttctgttttagcttgwtgatgactggagtatctgctttctactgctcagaaaaatagatccgactccttggaatatgttttttgctttgttttgttcttaaaagattgtcattttc

SEQ ID NO: 17773 - DNA, 201 bp, Homo sapiens
ccttagagatactgtgggtttggttccagactaccacaaaaaagtgagtcacacaattttttttggtttctcagtgcatataaaagttgtgtttatgctayaccgtagtctattaaatgtaatgtagcattatatctttaaaaaatcataatgctgtagtacataccttaatttaaaaatgctttattgctaaaaacaaat

SEQ ID NO: 17774 - DNA, 201 bp, Homo sapiens
ctgaaattgtcttaccatattccttttgatataatcatctatttttgtatttgtcttctgtactagatggtgtcttgaactttctatttctagctgtttamtgactaaggtatcacaaatgtctgttttccaagcacaatatcctgatcataatttaatcttacccctttccttactgttttcaaaatcacttctctacac

SEQ ID NO: 17775 - DNA, 201 bp, Homo sapiens
ctgttaccttatttcacagatctgcattttgaatttttttgccctggcttatccaaacaggaaaggcaaagaagttttattaaacaattgaatgaaagttrtatttattgttctagcaggtgcaaagcattctgctgtaaatattgcagggtggaaaggatggctaacacacagttcataacttcaggaagcatatagttt

SEQ ID NO: 17776 - DNA, 201 bp, Homo sapiens
aaactgtcttcacacagccatttattattggtaattgttctgcatttacattcaagaaaaacttgaaggtaaaccatgtcagataagattttgaaagtgtwtttgagccgttctgcttctttccttatatggttcagtaaactgaccaaatttagtcagaaatttaagtcagcaagtcttgtttttcttaatgtgctacat

SEQ ID NO: 17777 - DNA, 201 bp, Homo sapiens
cagctcgccctctgcgggctgcacccactgtccaaccagtcccaatgagatgaagcaggtacctcagttggaaatgcagaaatcacccgtcttctgcatcratcttgctgggagctgcagaccagaactgttcctatttggacatcttggaagtaactcccgtttgaacatattgatgtgtttcagtccactgcagctatt

SEQ ID NO: 17778 - DNA, 201 bp, Homo sapiens
ttataattttacgtttatccgttaacattagagatacttatctttagactttaccagcatcctttttaactaattattttaaaagtattattaatttggtkgtaagacaattttacatcgtcaggaatttctttaaattcaacctaaaacaggtctatctttcttcatcaagtctactcttctcattgatgttcctgtttc

SEQ ID NO: 17779 - DNA, 201 bp, Homo sapiens
ggcgtgagacccgccgagccaagcacgggaggggatcttttggtctgctggttgcaaagaccatgggagaagtgcagtatttgggcaggagtatactgctyctccaggtacggtcactcacggcttcccttggctaggaaagggaaatcccatgaccccttgcgcttcccaggtgaggcaacaccccgccctgcttcagct

SEQ ID NO: 17780 - DNA, 201 bp, Homo sapiens
caagcccagcaatggcagatgccctttccccccgccaagctcccacattgcaggttgatctcagactgctgtgctagcagtgagcaagggcgtgagacccrccgagccaagcacgggaggggatcttttggtctgctggttgcaaagaccatgggagaagtgcagtatttgggcaggagtatactgctcctccaggtacgg

SEQ ID NO: 17781 - DNA, 201 bp, Homo sapiens
tggtgattatataggtgttcactgtaaaattctttcaactttgctatatgtttgcacattttcatacaataaaatgcgaaggaaaagaggaatagtatatrtggaaggtagcataaggaaattttaaaaatgtttttatttaagtagatcttaggatgtagaaggatggaaaagatttgttttggttgagggagggtgtga

SEQ ID NO: 17782 - DNA, 201 bp, Homo sapiens
cagcaataaaagggaatgaactacttgataaccacaacaacatgaatgaatctcataaacattttgctaaaagaagcctttcacaaaataaagatacgttstaagattccatttacatgaagttttagaatggccactcatttattgtggtggaaaaaaaaacccagaacagtagttgactctgaatgggagagacagacc

SEQ ID NO: 17783 - DNA, 201 bp, Homo sapiens
tgcactccagcctgtccagcctggacaacagagtgggactctgtcttaaaaataaataaatttataaataaataaatacatacatacatacatacataaakgaataaataaaccagcactttgtgtacaataagcaatttaaagcaagctgctttttttcctgatattggctaaatatggataatattgatgtgttttagc

SEQ ID NO: 17784 - DNA, 201 bp, Homo sapiens
ccactgcactccagcctgtccagcctggacaacagagtgggactctgtcttaaaaataaataaatttataaataaataaatacatacatacatacatacahaaatgaataaataaaccagcactttgtgtacaataagcaatttaaagcaagctgctttttttcctgatattggctaaatatggataatattgatgtgttt

SEQ ID NO: 17785 - DNA, 201 bp, Homo sapiens
tctcggctcactgcaacctccgcttcccaggttcaagcaattctcctgcctcagcctcccgagtagctgggattataggcacgtgccaccacgcccagctrttttttctatttttagtagagatggggtttcaccatgttggtcaggctggtctcgatctcgtgacctcgtgatccacccgcctcggcctcccaaagtgct

SEQ ID NO: 17786 - DNA, 201 bp, Homo sapiens
gtctctaccaataaagagaaaagaaaagaaagaaaaagaaaagaaatctctagcatggtaatattagaaataatgcatattttctgttattttactgatastttttttttccaaataacatttttactatggctccctctatgtcagtattttctgaccttattagtgttttggttgtttatctttgcattgttatgctgg

SEQ ID NO: 17787 - DNA, 201 bp, Homo sapiens
tttagagacaaattgtaggaaacttcataccatggatactgggggtgggggggaagaagtcccttatatacccttaaggtagggactttgattctttttttctttaaatctccttttgtatcggcattttgttttagtaggtacacaataaatatttaatgattaaaaaaaattggacacaatgtaaactaatattttgaa

SEQ ID NO: 17788 - DNA, 201 bp, Homo sapiens
cactcctgatggtgtaggaaaggaaagaatttgagcttcagaaggaaagctacagtttttttttgtttttcttccacatactcactcaccctcacgcccarctaaactatgaaagttcctggggaaaagtgatagagaacataaaatgagagctctggttaccattctatttctaaacattcattgcactctttattattt

SEQ ID NO: 17789 - DNA, 201 bp, Homo sapiens
agagaacataaaatgagagctctggttaccattctatttctaaacattcattgcactctttattattttaatacaaatcctgttttctctttgctttactyacgaacctgtgttttactccacttgaatattgtgatttaatacctattaaaagagaattactgtggtcacccctgaacttttttgcacttatctctttta

SEQ ID NO: 17790 - DNA, 201 bp, Homo sapiens
atatgtttattacagaaactttaacaaaagaagacaatattaaattatctgtaatctgtcatgcagagatagctgatattttgatactttttttttctaayatacacatgatgcagacacattcatactctgacaagctcacctaacctcctttttctgcttgtcaaatgcagataaattacaaagtagctaatccactct

SEQ ID NO: 17791 - DNA, 201 bp, Homo sapiens
ttttaaaaaaattattgccatttgccctgtctcctcaaaagtaaatattaaacgaataataatttttattatttattagaataactctggttagactgttrttttgtatagtttttacttgttaatcatgagtactgccacattatcagacaattattattttttggttctcaagttataatttcggattgggcatgttta

SEQ ID NO: 17792 - DNA, 201 bp, Homo sapiens
tctgcattgtaagatcacatctgtagaatgtgtctaggtttttagatttgtttgctgttcagcagatcttagcaatgacctgccaagggaatggcttcatwtaacaaagttagttctacagagaaaaacaaacctgtgttccaatttctttttctagaattgttaacaaatttatacataaacatgcatacattctcacac

SEQ ID NO: 17793 - DNA, 201 bp, Homo sapiens
cagacagtaatgagacctgcataacatttattttctccaaaaagttttcttataacttatttccattcacatattgagttttcctttatttcgctatatcrctgttaaatttcatagcatttttctacttacttgcttatctttttttcttaattgggcatcctgtggacaagattgtttattttagttcatcaacaaaaa

SEQ ID NO: 17794 - DNA, 201 bp, Homo sapiens
taagtagaagcttttgtttccctgaaactaaaattttcgcattagtatatttattgagtgtatttattgattaaacccctctagctgagtttgtgaaccayatctgataaacgatagaattcagcaaggaaacctttctctgtatctgccttccaccctgtctccagagtgcagacagtaatgagacctgcataacattta

SEQ ID NO: 17795 - DNA, 201 bp, Homo sapiens
ccctggctcaagcaatcatcccaccttagcctcccaggtagttaggactacaggcaatgccaccacacctgtttaattttcctttttttttttttttttttggtagagacggggtttcaccgtgttgcccaggctggtcttgaactcctgggctcaagtgatctgcccatctcagcctcacaaagtgttagaattacaggt

SEQ ID NO: 17796 - DNA, 201 bp, Homo sapiens
ggagaagaaattatatttgacttaaggtagtagaatcaggacattttagataaatcttaaagtaggtagtactccacctgagagaagaagggcttgtaaamcttgttgaaagggagagaagaaaaacaatatgagcaagtggggataatatggaatactttcgcaggaaaaatgaattgttccatttgattgatttatagg

SEQ ID NO: 17797 - DNA, 201 bp, Homo sapiens
ccccgtgacaagaggaaacataggcttaaatttataagaagaaatttagtgaggataaatgccaagtcctgttctttatatcagaaaatcagttacttagragtaacatgctgatttaaaagctgtttatatataaaaaaacactggaattttttagagcactcaaaagtatgaacaataatatgttgtctgacgtgtcat

SEQ ID NO: 17798 - DNA, 201 bp, Homo sapiens
gtactgggattatagggatgagccaccacgcctgacctcaaagagcatttattaacatttgccattcagtagtttcatggaaacagtttggaaatactatgataattttttttttaagtaactttactctcagaagggctccatactgacagttgtttcaggaggcagattaaaaattcaggtgttcttatttctgcccta

SEQ ID NO: 17799 - DNA, 201 bp, Homo sapiens
ctgaggtcgagacaggcagatcacttgaggtcaggagttcgagaccagcctggccaacatggatgaaaccccatctccactaaaaataaaaaaattagtcrggcgtggtggtatgtgcaggtagtcccagctactcaggaggctgaggtgagagaatcacttgaacccgggaggcagaggttacagtgagctgagatcgcg

SEQ ID NO: 17800 - DNA, 201 bp, Homo sapiens
tgatgtcaaactgtggttttctgaaagctattctctggaagaggaagtttattactataataaaatagaggcttggggtatacctttatgtcttatgtatrcagtctgttctcttaagatgaaatagctgtatcagaaaatagtgttccatttggatcagacataactattccattgagctttatacattgctgttttgta

SEQ ID NO: 17801 - DNA, 201 bp, Homo sapiens
tctaaatattttcagtctcatgtgtaatcaggaaatacaaattaaagcaatgacaacatgttttatcttcatgatgttgggaaaattttttaaaaattgtkaatttcaactgtctatttaagtgcacatctattaagagaataatattaaatgaaggtatgaaccagacatactatggaatatttttcaggtgttagaagg

SEQ ID NO: 17802 - DNA, 201 bp, Homo sapiens
aacatagtgccagatgcatactagacactccataaatattggttgaattaatgaatacgtttgaaataccagcaaggaatgtacataagcagttcataaawggagaaatacaaatgccagtaaatatatctaaatattttcagtctcatgtgtaatcaggaaatacaaattaaagcaatgacaacatgttttatcttcatg

SEQ ID NO: 17803 - DNA, 201 bp, Homo sapiens
tgtggcaggccatcacctgaggtcgggagttcgagaccagcctgaccaacatgaagaaacctcgtctctaccaaaaatacaaaattaccccaggtgtggtrgcgcatgcctataatcccagctactcgggaggctgaggcaggagaatcacatgaacccaggaggcagaggttgcagtgagctgagaacacgccattgcac

SEQ ID NO: 17804 - DNA, 201 bp, Homo sapiens
ttttgtcggcacataacatactataaagtagatcttctgcggttaaagtaagcatctcccctactttatattttgtgatcaaaaagcatatttctataaayatctgaattttcccccatacttaggggaaaaattataccttagggtatataatcttagtactgaaattactttatcttcttgattagtattcctaagtgt

SEQ ID NO: 17805 - DNA, 201 bp, Homo sapiens
ttgttactatgaaaacagggagttcactttgggcaaatttaggacaacagttagtgaaagacaataaataaaattaaaaaccacacacacacaagaaaatkttaagcctttaagaaatctcttgaacttagcttgttttccatacttaattgtaaaaactaaaatcactgatttaatagtccttgaatagttctttaaaac

SEQ ID NO: 17806 - DNA, 201 bp, Homo sapiens
tgcagcagcttcctgtggatatcttgatattgcagagtaagccagttctgtgttttcattttattctaatactgtttgacagacctgaatgtttattgaartgataaagataaatgagtgaactcttatattactttaattcatgaaaattattctttccaagaaagaaaataagtggttattgggaatccatatattctc

SEQ ID NO: 17807 - DNA, 201 bp, Homo sapiens
agcaatttttaagtgacggtaataggtgacaaaacataggctttttctattttcttagcgggcaacttggaataactgtaatagaaaatgactttgcagcratagcttccccttaacaatgaaaagacttgtaagctatctcaaagttgccttggttgtgtgtggaagatgcatagccttattttgaataatgttgtagta

SEQ ID NO: 17808 - DNA, 201 bp, Homo sapiens
ttcctatatcagaagacattgtgtaaaagccttattaaatgcttctgtttcattttcaatttaactatattagattatatacctgcttttctcctagcttytgctttcatattaagtcatttcttccattactgaaatcttgtttgtttttattggataatctgattccaagtttagaacttctatgttttaaaggactgt

SEQ ID NO: 17809 - DNA, 201 bp, Homo sapiens
gtaactatgagaatatcttcataaccttcgggtagggaaaagatttttaaacaggacacaaaaagattattacccataaaggaaaagattgtgtgtgcatrtgcgtgtgcacatgtgtgttttaaacaacaaaatacacagatgcatcacaaaagaaaatattctattggtaataaacatacaaaaagttattcaatctca

SEQ ID NO: 17810 - DNA, 201 bp, Homo sapiens
tgcctgtttgtctcattaagtagtttgatggaaatgtgatcaaaatggcagtttgtgcagtgtctatgagatgtcactgtgcttctctcaaaactttaaamtattctacagagcccccgtgattttgttgtgacactctggagcactttggtgcacattttaggaactgaggaatgcttagacactattgatagcaattca

SEQ ID NO: 17811 - DNA, 201 bp, Homo sapiens
tggggcttctggaatgaattagaatcaggtactatatgcaactcaagaagttctctaagtttctcattattgtttctaacaaatccagatttttttttttwatagaaaaccagattttttgttttcccagtttaaaaaggcagaaaataaggtcacttccagagtttacattctggtctagttatctagagagatttatct

SEQ ID NO: 17812 - DNA, 201 bp, Homo sapiens
agaaatgatttttaaaaaattattaataccctatgcttgtggcaactagttagttgctgtattcaccaatctatatagttaactgtggttgagtatagaawttctagaagtgaagttgatgaagtgatctaaagataacagaggttgcatttttagggttgttggaaagcccttaaaatagcataaatatttgtacataaa

SEQ ID NO: 17813 - DNA, 201 bp, Homo sapiens
catcagtattacaaatcctatgtgtgtgcgcgtgtggtcatacaaggcaaagttaaagtcttttttttatgacgatgataaattagtcttgtttgggcgastgaactcaagaggtggttcaaataaatgtcatatttttcattgtatcttcagtgcctagtacagttactggctcatagtaggtattcaataaatagtggt

SEQ ID NO: 17814 - DNA, 201 bp, Homo sapiens
ttttaaagtatgttaggacaggtatgttataatatcaccgaaaatagtgggaggcagttattcaaccttagctacattaacataggctggagaagacattrgaaataaaggcttaaggtgtaaaagactaaattgaggagaaatctgtagggtctaacagtgtgtcatccattactcagggcaccctttatcttcctccag

SEQ ID NO: 17815 - DNA, 201 bp, Homo sapiens
aattatctgacaaagattataaagccagctatcttaaaatgcttcaacaagcaattatgaatgagcatgcctgaaacaaatgaaaaaatagaaagtcttarcaaagaaataaatagaagaaccaaatagaaattttagagctgaaaaatgcagtaactaaattaaaaacttcaatggatgataggctcagtagcagaatgg

SEQ ID NO: 17816 - DNA, 201 bp, Homo sapiens
tagtaattcatccctattgatatgtgcagttaagcctagattagtttactctgaggatttgaggatgattaggatacattgagttctaaatttttaacctytgttggaaatagtagaacaaagaatgtcagattacagtatcatttctaggcatttaacaattttacatttggtctgtagcgtaatagaagccaagtgaat

SEQ ID NO: 17817 - DNA, 201 bp, Homo sapiens
gattaaaattagaagaataagttttcctttttattctttctgccacaagattcttttttaaaataatgactgtttttataaaaggcagtttaactctagcrtatactggatgatttgttaaggtgatgatagcccaaaatccttccgaatgctcatttttatcagcataatctcttttagcaggttgggcatggtggctca

SEQ ID NO: 17818 - DNA, 201 bp, Homo sapiens
gacctgcacagttcaaacttgtgttgttcagcagtcaactgtactctggttctataagtgttctctgagaaatgtgagctaggtggtgtaatttgatgaarcgttaatgattgaacttcccaagaaatattgattatcagaggaaagtctttatgttgtgttgcagggctctgtcatatctttgcttgtttgactctttaa

SEQ ID NO: 17819 - DNA, 201 bp, Homo sapiens
tagctattggatatttatttgttttttgagacagagtctcactctgtcatcaggctggagtgccgtggcaccatctcggctcactgcaacctccacgtccygggttcaagcagttcttctgcctcagcctcccaagtagctgggactacaggtgcacaccgccacacctggctaattttttctttttgtattttagtagag

SEQ ID NO: 17820 - DNA, 201 bp, Homo sapiens
tggacctgcacagttcaaacttgtgttgttcagcagtcaactgtactctggttctataagtgttctctgagaaatgtgagctaggtggtgtaatttgatgragcgttaatgattgaacttcccaagaaatattgattatcagaggaaagtctttatgttgtgttgcagggctctgtcatatctttgcttgtttgactcttt

SEQ ID NO: 17821 - DNA, 201 bp, Homo sapiens
attaagcagccaattgcttaataaaacattatattgtagggtgttataggttcaaagaaatagagagcaagtgaaaaatgtagagggaagaacttgtaccrctggaatgagctactttatgctgtttatataagagtcttttcctcttcagagcttgttaaatgataataatattctgcagcaaggttttcgtcataagga

SEQ ID NO: 17822 - DNA, 201 bp, Homo sapiens
actttacaaagttgtttgaaggctgttaggtatactaagcaggaaagtaatagctatagtaaaacatgaatagaattagtgaagaaaggtattttaataayatagcagctggaagaaagattaaccaagccatgcatgaattgattacaatataaagtgttaaaatagattttcagacacgaatttcactattttaggttt

SEQ ID NO: 17823 - DNA, 201 bp, Homo sapiens
acaaaattttttaaccagagtatatacatggattaaaaacaaaattcatgtgcagtagtttgttcagtcacatgctatattatctactctgtatgccttttaattgctttagaagtttattagatttttttcagattatctcatgctaaaattagaacttgttcccagtgacttttaaagattggatcattacccaattat

SEQ ID NO: 17824 - DNA, 201 bp, Homo sapiens
tatgggaactacaattcaagatgagatttgggtgagaacacagccaaaccatatcattagtagtggtaacatttctcaaattatctaggtatgaaaattaytgtttaatatttttaagttttttaatcattcttttggcttttcttattccagtacatttgatcaataactagttatgcttaaataaattgcctttgaaag

SEQ ID NO: 17825 - DNA, 201 bp, Homo sapiens
taacatttacatttgcaagtaatagttctagagtgcaggagaagtttgtgaattgtgtgtttgcatgcataaatacatacatacatatgtacatacacacrtacgtaatcttttggctcaaggattgctttgggcgctgcttcctgccagcagttttggtactttactctgttagtttctcttaacatccttcctgtttat

SEQ ID NO: 17826 - DNA, 201 bp, Homo sapiens
ttgtagaggtggagtcttgctgtgttgctcaggcaggtcttgaactgctggcctcaagtgatcctcctgccttggcctcccaaagcactgggattacaggygtgagccaccatgcctgaacagatttatttttataaacagtaataaagttaggttaagcccagatagtgaaagtaggcaattgtagagtgaactttcatc

SEQ ID NO: 17827 - DNA, 201 bp, Homo sapiens
gagttctttacttcctttttggacttttcctgctcaacagaagacttagatctcttcatagaaaaaaaaacccagataattgtgcatttatctttaactayacttaatgattaggctctggagttaattgatatggaatatgaatgcctcctcagtcactatcaaggagtataaccttggcaagttgtttaacttttctag

SEQ ID NO: 17828 - DNA, 201 bp, Homo sapiens
gtttgatgctgtaagtgttctatttactgaagaagttatgggggttttttggtcagtgatttatattgatcttcagaattctgtgcttaagtttcaagtgrtttgtgttagaaattaagaagttagggctttttactttccactttcccttttcaaatcagtaatactaacttttttagccactagctatattctgtattt

SEQ ID NO: 17829 - DNA, 201 bp, Homo sapiens
atttaacatatattaaaggtctcttctgtgccagacactactaagtgctgagaagacacatttttgagcaaaaatataccaacagtaccctcatagagtcracagtaaaatgaaattagccatttgggaaatgcaaatcaaacccacaatgagatactagttcacacctactaggatggctttaataaaaaagagaacaag

SEQ ID NO: 17830 - DNA, 201 bp, Homo sapiens; identical to SEQ ID NO: 4309

SEQ ID NO: 17831 - DNA, 201 bp, Homo sapiens
tagattaaatgaactaagggctactgcagaaagattaatttggtagtaggggtaaataggttaggacatggctgctagcaacctatttcagtagttcaccktagagataaaaatatcccttccattctctctgattttgtttgatgctgtaagtgttctatttactgaagaagttatgggggttttttggtcagtgattta

SEQ ID NO: 17832 - DNA, 201 bp, Homo sapiens
catcttttgtatattcatttaacatatattaaaggtctcttctgtgccagacactactaagtgctgagaagacacatttttgagcaaaaatataccaacartaccctcatagagtcgacagtaaaatgaaattagccatttgggaaatgcaaatcaaacccacaatgagatactagttcacacctactaggatggctttaa

SEQ ID NO: 17833 - DNA, 201 bp, Homo sapiens
tcttcacaagtagcatagttaattgattacctcttaccacactgtccttcataaaatctttatcacattgtgaattaatgaaccagtgcatagtaagtatrttgtacccatagaattagaagttcaagatttagatatttcattattaaattgtttggtttgttattagaccattattgaatggctttgaagattggagac

SEQ ID NO: 17834 - DNA, 201 bp, Homo sapiens
tatggagtttacaatctagtagaggtagaacataggtataaataagaaaattgtggctattgatattattgataatgtgatagagtactaggaattacttkaaaaggatgactaggagggccttcctgaagaagaaacatctgcattgagatttgtttaatgagaaggaatcagcatgcttagatctgggggcagagcatt

SEQ ID NO: 17835 - DNA, 201 bp, Homo sapiens
gttggtgatgtaaattggtacaattgctttgtaaagatgtttggtattttcttataaaagtcagtgtatacctgctgagaaattccactccttatgtttasccaagagaaaaagaaaacatacgttctaagaagacttattcatagcaacttcattcttagtagtcaaaaactagaaatagcccaggtgtttatcagtggt

SEQ ID NO: 17836 - DNA, 201 bp, Homo sapiens
ctaatttcagtgccatggagaatgactcttatttctgaaattccttcagcacacagatattttcatacaaattggccttcctgccaatgccttgccttgayaccttgagttgggggtgccactaaggcctatcctataaccttcacttaattaatcgtaattattattacacatactaattaaagtcagtcagtttcctaa

SEQ ID NO: 17837 - DNA, 201 bp, Homo sapiens
  misc_feature (1)...(201): n = A,T,C or G, or insertion/deletion polymorphism (see Tables 1-2)
tcagcttctgtctcacataaatttcacatacattgccttagagttgtatgtttttacagtagttattgtatcataaccactgtaaaaaatgttatccaacntctttatataaaattatacagaattactgaaggcattttatgatttattgacttttgaccatcaccatccccccttgtttcctacgtagggccaaacagc

SEQ ID NO: 17838 - DNA, 201 bp, Homo sapiens
tgctttttttccccatttgtgctggagatacaatatctcaatttcaaggcagaaactgtatggtgaaatgaaaagtgctccggcctgggaacgataaggtytgaattacccgaattttattactgactctgccactaactatacgacatctttccataatttgtttcctctttctgagccatgatttctttgtatataaac

SEQ ID NO: 17839 - DNA, 201 bp, Homo sapiens
tttagatctttacattttttactaagacattaacctatgtagtaaaagtgttttatcctgaaactgtaaaccataattttaaatatattatctgtaaactkattgtttccaatttaaggactgatcagctttacaaattcttttttcttttcctaaaaaataaaataaacacagtttccaaccacagctacaaaaatttct

SEQ ID NO: 17840 - DNA, 201 bp, Homo sapiens
gaaattgcaaagtacacatattttaggcatgtttgcttcttgcttttctgcttctgtcactgtaatatgattgcatctttgtgtgagttttgtttttcttytctgtacagtcttcagtcttgagtattgattcactctaagttttacatgaactcaaaaagtagtttgaatatgttatgtagcatcttcccagaaagtcaa

SEQ ID NO: 17841 - DNA, 201 bp, Homo sapiens
attatctgacaaagattataaagccagctatcttaaaatgcttcaacaagcaattatgaatgagcatgcctgaaacaaatgaaaaaatagaaagtcttagmaaagaaataaatagaagaaccaaatagaaattttagagctgaaaaatgcagtaactaaattaaaaacttcaatggatgataggctcagtagcagaatgga

SEQ ID NO: 17842 - DNA, 201 bp, Homo sapiens
cttataccatacacaaaaataaattccagttggattgtagatctaaatgtgaaatacaaaagtaatagatactctggaaggtaactatgagaatatcttcrtaaccttcgggtagggaaaagatttttaaacaggacacaaaaagattattacccataaaggaaaagattgtgtgtgcatgtgcgtgtgcacatgtgtgtt

SEQ ID NO: 17843 - DNA, 201 bp, Homo sapiens
ctaaaattacaaaagactgatgatatcaaatgctgagaagggatgtggagaaacgagaattctcatacactgctagtgtaagaagtatgtgagatttctartgtattcaaatatatttaaaatttgtttatctcttgcttggttgtacttatgcagtagcaatggaaacgtactctatggattaacatacattttaaagct

SEQ ID NO: 17844 - DNA, 201 bp, Homo sapiens
actccatttgcgtaatatctttctgtcactttttgtcactgtgagtgtgggtttgacccgataatctccaaccgcctccccttttccataacatttttccwtatctgcaaatgccttaaatcggtgaagccaaagtctttaaaatatcaagcattaaaaatttgtgttatgttttcttcactctcatttcttatttatcaa

SEQ ID NO: 17845 - DNA, 201 bp, Homo sapiens
tgagctcccaggagctcaaggttatagtgagctatggttgtgccactgcactcctcactggatacagtgagaccctgtgtctttaaaaaaaaaaaaaaaaagtgtcacctaattcaaaattatccatcttttcagagaacctccactatatccttgattttgatctccattccatttctcttatcattgttaaccacagcc

SEQ ID NO: 17846 - DNA, 201 bp, Homo sapiens
tttttgttttatttattgttttttttgttttgttttgagatggggtcttgctctgttacccaggctgggagtgcagtggtgtgaacacagctcactgcagyttcgactgcctggccttagtgattctcccacctcagccttttgagtagctgagactacaggcgtgtgcccaccacaactggctgacttttaaaatcatta

SEQ ID NO: 17847 - DNA, 201 bp, Homo sapiens
gcatttttaataaagtttctagtatattgaaaatggaaaactaaccgtgaaagtactcatgttgacacatctgttaaattgatgcgataatgttatccccyatatgtcacccacaggcagatttttgttttatttattgttttttttgttttgttttgagatggggtcttgctctgttacccaggctgggagtgcagtggt

SEQ ID NO: 17848 - DNA, 201 bp, Homo sapiens
gacctcttagggtgaaaaaaatatgagcaattttgaaatttgggtgtaggcgagagataatagacctgtattaataattataatttgggggccaggcgcgktggctcacacatgtaatcccagcactttgggaggctgaggcgggcggatcacgaggtcaggagatcaaggccatcctggctaacacggtgaaaccccgtc

SEQ ID NO: 17849 - DNA, 201 bp, Homo sapiens
ggtcttgaactcctgacctcaggtgatctacccacctcgggctcccaaagtgctaggattacaggtgtgagccatcgcacctggcctataccatgtacatytttactcgctcatcacattgtattccttaggattgttccttagaaatcttatctgcaatcttatgttttgctcaaaataacatgccatttaaatgattgt

SEQ ID NO: 17850 - DNA, 201 bp, Homo sapiens
cccaacaccttgagaggcctaggtgggaggattgcttgaggccaagagttatagaccagcttcagcaacatagctaccccatctctaccaacaacaacaamaaaatcagctgggcctggtggtgcatgccagtaggcctagttacttgggaggctgaggtgggaggatcgtttgagcccaggagtttgaggctgcagtaaa

SEQ ID NO: 17851 - DNA, 201 bp, Homo sapiens
aaaagcttatatcaaccacttacttttataatacttacaatgtaaaggtagccattattacaatcaaaacatttattaggtggctgggtatggtggctcaygcctgtagtcctagcactttgggaggcctaggcaggcggatcacctgagctcaggaatttgagatcaacctggccaacatggcaaaaccccatctctact

SEQ ID NO: 17852 - DNA, 201 bp, Homo sapiens
acattgctattcattgattttgtttccattttctaaaaaataaaccttttattgaagtatggcatgtttagaaacataattcatacatgtatagcttaatrgattagcacaataggagcatatctatgtaatcaccactcagaatgatgaataaaaacagcagtgtagattgcccccatgttctccctctcaatccctatc

SEQ ID NO: 17853 - DNA, 201 bp, Homo sapiens
tgaatgctttcaccacttctaagcagtaaaaaagcctttctctacctatgcaccccaacccccagcacccaggggtattagtagaggctacatgggagcaktagcttctcagccagagacatgtcagtggaggtggagtggagagtcaggattcccacccagcccaggggaatcaagaagctgccccatctgtagtgtaaa

SEQ ID NO: 17854 - DNA, 201 bp, Homo sapiens
agccatatatggggtgtgctggtagggcaccagtgcccacactgctgctgttctaatgctttttctgtagttgctgcctctgtgcttcctggcaacacttytgtggtctgactttgaggtgtcataaccaagaccatctttcatgtgcctcagctacagtatgattgcaagctgtgactgagcattttctatagccaggta

SEQ ID NO: 17855 - DNA, 201 bp, Homo sapiens
taatatgaaatccttttgcttttaaaatacaaatttgatctacttctaagggagccattttaagcatctttgtaaaatatgtgatcctctcgtcagtaaarggaatacttttgtgtagtcttcttaagatgtgaagtgtaaaagagactggaagcaattaattttgagttgcttgttagcaaatagtttgattactatgta

SEQ ID NO: 17856 - DNA, 201 bp, Homo sapiens
gaatagttctttaaaactttaacctctcaaaagatcgtagaatacctaaaatgtataacggggttaattgttgattgttttttgaatattcatttactttytggttttgatcaagtgttctaaatttcattgtcaagagaaaagttttaggaacatcacaacccacaaatatgcttttgaaaatcgaatattttgctttta

SEQ ID NO: 17857 - DNA, 201 bp, Homo sapiens
tttttatttgggtgaagtttatttaaggcatatcataactcgtaaaattttaaaaccatggtgttgagaatgaaggaaacttttggcattaaaaatgatartgtaattatataagatgaatcttcaaatttctttcaagtgtactttacacgttttagtgtgaaacagattttgaaagacgattattactgtaggaggtca

SEQ ID NO: 17858 - DNA, 201 bp, Homo sapiens
gtgaacccaggaggcaaagcttgcagtgagccaagatcgcgccactgcactctagcctgggcgacagagcgagactccgtttcaaaaaaaaaaaaaaaaaagtagcatttgaataaagaaaactcactagatcattgcctggggttttgagagggagatacatggagtaaacttaataaatttaaacagcatagaagatag

SEQ ID NO: 17859 - DNA, 201 bp, Homo sapiens
cagttttactgtgttggtcaggctgatcttgaactcttgaactcaagcagtccacctatcttggcctcccaaagttctgatattacaggcatgagcgaccrcatctagccaactgtgggtttgtttaaaaaaaaaactatcttaagcatgaaaactgagaaaataaatacctaaaatagaattgaggtgttataaaaagtg

SEQ ID NO: 17860 - DNA, 201 bp, Homo sapiens
gataaagatagcatgaaattagataaatataaaagaagtaggttttttttaacttgaagttcaaaggaaacagaatagtaaaagacaataaaaatcagaaygtttaagattgtaatgaaaggagggataaaaataataaaaagctacctgttttaaaagacagtaagagagtaacattaaaaaagcaaatctaagataaat

SEQ ID NO: 17861 - DNA, 201 bp, Homo sapiens
ttctcctgactcagcctcccaagtagctgggactacaggcacctgccactatgcctggctaattttttttttttttttgtatttttagtagagacggggtktcaccattttggccaggctggtcttgaactgctgacctcaaatgatctgcccatctcaccctctcaaagtgcttgaattacaagtgtgagccaacgcacc

SEQ ID NO: 17862 - DNA, 201 bp, Homo sapiens
agtacaactacagtctttgcattatattcagatcttttaccacttagccttatcctgttttataacttacagatactgtctaccactggttgactgactgwttgtttattccatgaacttttaaaatcagcagtgtctgtgctcagtgaggttcttgccagttgatttggtacttgaactcttatataatcttcaaaatta

SEQ ID NO: 17863 - DNA, 201 bp, Homo sapiens
gtacaactacagtctttgcattatattcagatcttttaccacttagccttatcctgttttataacttacagatactgtctaccactggttgactgactgtytgtttattccatgaacttttaaaatcagcagtgtctgtgctcagtgaggttcttgccagttgatttggtacttgaactcttatataatcttcaaaattat

SEQ ID NO: 17864 - DNA, 201 bp, Homo sapiens
tttagctatacagatattttaggacttaaaatatgactattatttacagttctttactagagagaaaaccaacagtatataacattttacatataattaatatattttgaagctgaagattaagcatgcattatgtttttcaaaataatgtcatttgaagtcagaaccacattagtttatatttaagtttatattacaaat

SEQ ID NO: 17865 - DNA, 201 bp, Homo sapiens
attagaaccactttttaaatggcacatcaatttttattactttcaacagctacttcaaatatccttccggattcttaataaacttgggctttttatacatytaaatgggtagcacatgaattttccaacaaagatcttttggcaataaaccaaagatgacagtgtgtaaattaatatgtctactgatcagtttattagaaa

SEQ ID NO: 17866 - DNA, 201 bp, Homo sapiens
agaaccagttttctgaactaattttaagcaataagtaagagttaattgatgaaattgaggcaactaagatcttgcgtgagaaattacctggtcatcttagrgttaattgtctaaggaggtgaatgctaagaatagtgtcatatattctagttttagagaaacagattccaaaaatttcagggttgtagaaagaaatatgat

SEQ ID NO: 17867 - DNA, 201 bp, Homo sapiens
tggtttgtgagtcttaagaacaatgtcctgtgaacataccatcagttttgagagcttgattcctgcagaatatttatttacatgtaacttatcttaaatasagttttcttttttactacatgaacactggaacttagtactattagcacactataaaatattaagccataagcaactttgactctacagggctgtatattg

SEQ ID NO: 17868 - DNA, 201 bp, Homo sapiens
tgtactgtattcttactataaagctagctagagaaaagaatgttattaagataatcataaggaagaaaattgtatttactactcattaagtggaagtgggycatcataaaggtcagaattctcttcgtcttcacactgaggaggaagaggagggattggtcttgctatctcagaggtggtggaggtggaaggaggcagaag

SEQ ID NO: 17869 - DNA, 201 bp, Homo sapiens; identical to SEQ ID NO: 4308

SEQ ID NO: 17870 - DNA, 201 bp, Homo sapiens
gtttctgtctggatgcttttattcaccatctcttcaacttggaggcaaattctgctctatcctttgaatcagttaaaggtccttaagcatatgaaaaaaartgctcaacttcattcataattaagtgcaaataaagctacaatgagttacacttttacatctgtcaagtggcaaagatcaaaacatttgacatcctgttga

SEQ ID NO: 17871 - DNA, 201 bp, Homo sapiens
cgcgtgtggtcatacaaggcaaagttaaagtcttttttttatgacgatgataaattagtcttgtttgggcgagtgaactcaagaggtggttcaaataaatrtcatatttttcattgtatcttcagtgcctagtacagttactggctcatagtaggtattcaataaatagtggttgaattaattgccttccttaacgttccg

SEQ ID NO: 17872 - DNA, 201 bp, Homo sapiens
gaatcagttaaaggtccttaagcatatgaaaaaaaatgctcaacttcattcataattaagtgcaaataaagctacaatgagttacacttttacatctgtcragtggcaaagatcaaaacatttgacatcctgttgacagggtgtaggaaaaggcactcttactagtagaaatgacaattgagcaaattcaatcaaagtaac

SEQ ID NO: 17873 - DNA, 201 bp, Homo sapiens
tataatattgttttgtgtttttttcatatggtaggaattgttatacatcttttttcactcaaaagttatgttttttatatttgtccataaatctatttctrtaacttgatctgcattttttttttttagctattgtatagtattctattaaatatgtctgtttccattctgatgaacatttaccttattctcaaactcctg

SEQ ID NO: 17874 - DNA, 201 bp, Homo sapiens
ccttatgtcactctaaattttatttactccttatctgtcattcgatatttcagtagatctttatgtgatagtaaaagaattgtgagccaggctttgtggtrtgcacctgtaatcccagctacatgggaggctgaggtagaaggatcgcttgagtccaggagttcaaggctgcagtgagtcatggttgtggcactgcacagc

SEQ ID NO: 17875 - DNA, 201 bp, Homo sapiens
tagtaatagtatcttaatagttttcttattttcctttgcataactttgtacaaagctccatagtgaaaaacgggacaagaaatctccactaattgaatcamcagcaaatatggacaataatcagtcacagaagacctttaaaaagtgagtaaaatattcaagtacatttgttatttttgttaatgagttggcatagtggcc

SEQ ID NO: 17876 - DNA, 201 bp, Homo sapiens
ctatttcagtcagcctttttggttaaccaagcaaatactggttctgattgcattaaacagaagggccttattggagccataatttcttggagagaaggcawtagtggaatatggagagggtagcagataagactgggcaagtcagctggggttacaacgtaaaggatttgtatgccaggctgagtttgtcctttgatggtg

SEQ ID NO: 17877 - DNA, 201 bp, Homo sapiens
ggctaattttttgtgttttagtagagatggggtttcaccatgttgcccaggctggtcttgaactcctgagctcaggcagtcctcccgccttggcctcccaragtgctaggattacaggtgtgagccactgcgcccagccagaaacagttctttaagtaaaatatcctcagccagcctaagtggttagtggatctcgacttt

SEQ ID NO: 17878 - DNA, 201 bp, Homo sapiens
ttttagctatacagatattttaggacttaaaatatgactattatttacagttctttactagagagaaaaccaacagtatataacattttacatataattaatatattttgaagctgaagattaagcatgcattatgtttttcaaaataatgtcatttgaagtcagaaccacattagtttatatttaagtttatattacaaa

SEQ ID NO: 17879 - DNA, 201 bp, Homo sapiens
gatctcgactttttcagtaaagttggagggatgtaaaaaatccatcttagccctgcatggagctttttaattgtctagtctatttcattctttattcaagytctttccttttcaggtaaaacttaatttatttatttctttgttttgtcttatttaatgtctgaaaaactactttgttattattttaaactctgcatctta

SEQ ID NO: 17880 - DNA, 201 bp, Homo sapiens
tttttagctatacagatattttaggacttaaaatatgactattatttacagttctttactagagagaaaaccaacagtatataacattttacatataattaatatattttgaagctgaagattaagcatgcattatgtttttcaaaataatgtcatttgaagtcagaaccacattagtttatatttaagtttatattacaa

SEQ ID NO: 17881 - DNA, 201 bp, Homo sapiens
ttttttagctatacagatattttaggacttaaaatatgactattatttacagttctttactagagagaaaaccaacagtatataacattttacatataattaatatattttgaagctgaagattaagcatgcattatgtttttcaaaataatgtcatttgaagtcagaaccacattagtttatatttaagtttatattaca

SEQ ID NO: 17882 - DNA, 201 bp, Homo sapiens
ataactgttatgtttataagatatatctatgctattttatgtagcagtacatttacttctattgttataaaaatattttttaaagaaaatttctaactattctttcactgaaagaacatggaatcatctgtcttcctgttaaactgacccatctctcactatatgttcctctttatctctaatattatatctgaccttaaa

SEQ ID NO: 17883 - DNA, 201 bp, Homo sapiens
tataactgttatgtttataagatatatctatgctattttatgtagcagtacatttacttctattgttataaaaatattttttaaagaaaatttctaactattctttcactgaaagaacatggaatcatctgtcttcctgttaaactgacccatctctcactatatgttcctctttatctctaatattatatctgaccttaa

SEQ ID NO: 17884 - DNA, 201 bp, Homo sapiens
ttataactgttatgtttataagatatatctatgctattttatgtagcagtacatttacttctattgttataaaaatattttttaaagaaaatttctaactattctttcactgaaagaacatggaatcatctgtcttcctgttaaactgacccatctctcactatatgttcctctttatctctaatattatatctgacctta

SEQ ID NO: 17885 - DNA, 201 bp, Homo sapiens
tttataactgttatgtttataagatatatctatgctattttatgtagcagtacatttacttctattgttataaaaatattttttaaagaaaatttctaactattctttcactgaaagaacatggaatcatctgtcttcctgttaaactgacccatctctcactatatgttcctctttatctctaatattatatctgacctt

SEQ ID NO: 17886 - DNA, 201 bp, Homo sapiens
gttgattagcacatatattgtatgttacatatattatgtactgtattcttactataaagctagctagagaaaagaatgttattaagataatcataaggaagaaaattgtatttactactcattaagtggaagtgggccatcataaaggtcagaattctcttcgtcttcacactgaggaggaagaggagggattggtcttgc

SEQ ID NO: 17887 - DNA, 201 bp, Homo sapiens
agttgattagcacatatattgtatgttacatatattatgtactgtattcttactataaagctagctagagaaaagaatgttattaagataatcataaggaagaaaattgtatttactactcattaagtggaagtgggccatcataaaggtcagaattctcttcgtcttcacactgaggaggaagaggagggattggtcttg

SEQ ID NO: 17888 - DNA, 201 bp, Homo sapiens
cagttgattagcacatatattgtatgttacatatattatgtactgtattcttactataaagctagctagagaaaagaatgttattaagataatcataaggaagaaaattgtatttactactcattaagtggaagtgggccatcataaaggtcagaattctcttcgtcttcacactgaggaggaagaggagggattggtctt

SEQ ID NO: 17889 - DNA, 201 bp, Homo sapiens
cgatattgattctttctgtccatgagcatggaatgtttttccatttgtttgtgtcctctcttatttccttgagcagtggtttgtagttctccttgaagagrtccttcacatcgcttataagttgtattcctaggtattttattctcttagtagcaattgtgaatgggagttcactcatgatctggctctctgtttgtctgt

SEQ ID NO: 17890 - DNA, 201 bp, Homo sapiens
tttttccatttgtttgtgtcctctcttatttccttgagcagtggtttgtagttctccttgaagaggtccttcacatcgcttataagttgtattcctaggtrttttattctcttagtagcaattgtgaatgggagttcactcatgatctggctctctgtttgtctgttttggtgtatagggatgcttgtgatttttgtacat

SEQ ID NO: 17891 - DNA, 201 bp, Homo sapiens
aaacattaaaagcatctatacagaatcatcttatagccatataaaaaattttataatagtttttgtttactacaaatattttatgtttgttcaagtaaagsttattttatattatagtgctggaagaagataattttaatcataactccttttgtaagttccttctatgcagcagtctagagaagataaatttggacaata

SEQ ID NO: 17892 - DNA, 201 bp, Homo sapiens; identical to SEQ ID NO: 4322

SEQ ID NO: 17893 - DNA, 201 bp, Homo sapiens
tagacgcagctaggtctttacccctccttagaaagagatggagctgtaaccagaaatcccttaaaaggtaaggaccagtaatcaggctgagctaagctcaygggtagtacgagacaggcttaaagcactgaaggaagaaagaagagaacccaagcgtgagagaaagcaaaacaaaacaagtaaagagaggaagaaaaacat

SEQ ID NO: 17894 - DNA, 201 bp, Homo sapiens
aaaagcacttttagatttccttgattaaagaggaaccatcagttttagatcagtaataatagttgtttatccattagaaaattgcatagctactgttaagkttttagttacattgcattcatgcattcaagttttaaatcttaaatttctttttattttcttcattttaaaagtacagaagtcagattctatttgtgcatt

SEQ ID NO: 17895 - DNA, 201 bp, Homo sapiens
atttccttgattaaagaggaaccatcagttttagatcagtaataatagttgtttatccattagaaaattgcatagctactgttaagtttttagttacattscattcatgcattcaagttttaaatcttaaatttctttttattttcttcattttaaaagtacagaagtcagattctatttgtgcattttattgtcagaagc

SEQ ID NO: 17896 - DNA, 201 bp, Homo sapiens
agtttttagttacattgcattcatgcattcaagttttaaatcttaaatttctttttattttcttcattttaaaagtacagaagtcagattctatttgtgcrttttattgtcagaagctttgttgtgtatctttattatcttaactatttatttcagcatatatatagagacaagtctagaagctccctgaaaaactgactt

SEQ ID NO: 17897 - DNA, 201 bp, Homo sapiens
gcctactgagtaacagggatcacaggcacctccaccacacctgactaattatatttttagtagagatgggttttcaccatgttagggtattctcgaactcytgaccttgtgatccgcccacccaaagtactggggttacaggcgtgagccactgcacccagcactggctctctatcttttgggtatttggctaagtaatcc

SEQ ID NO: 17898 - DNA, 201 bp, Homo sapiens
ggctttacttcaagatcactagtcagagcaagtaagatttttccccaaatctctacaacaaaggtattccaaagtttcttaagttagttcaactatctcaytattaacatcagggactgataaaacccacacttggccagaaatgtatttgattaagtattcagaatcttctcttgtagccctgctttagacaaaagagaa

SEQ ID NO: 17899 - DNA, 201 bp, Homo sapiens
ttttgggtatttggctaagtaatccctttcctactacagtcaaatgattacggtaaacttcctgtgttcaattttctttttctttttctcacatatagccracatttatggcaatgtagttctcaatttatacctaatgccctaactgaaaagaaatactttataacctctgttagtatagtgggccagtaatctctttgc

SEQ ID NO: 17900 - DNA, 201 bp, Homo sapiens
gcagttgattagcacatatattgtatgttacatatattatgtactgtattcttactataaagctagctagagaaaagaatgttattaagataatcataaggaagaaaattgtatttactactcattaagtggaagtgggccatcataaaggtcagaattctcttcgtcttcacactgaggaggaagaggagggattggtct

SEQ ID NO: 17901 - DNA, 201 bp, Homo sapiens
ttttctttttctttttctcacatatagccaacatttatggcaatgtagttctcaatttatacctaatgccctaactgaaaagaaatactttataacctctkttagtatagtgggccagtaatctctttgctgtaaaagttcttattcaaaatcactcttgattctgtaattaagctaatataataacatctgcttctaaat

SEQ ID NO: 17902 - DNA, 201 bp, Homo sapiens
aggcaatgatatgaaaatcatatgggggacttattaagaatatagatcagcagggcccatctctccatatgctgattgagtagtactggggtgagctgggsaatctatttttaaaaaacaagcccttcagatggttccgttacggaggcaggattagaaacagctgtattagatattgttaggaaataccagatttgttct

SEQ ID NO: 17903 - DNA, 201 bp, Homo sapiens
gcatctcccctactttatattttgtgatcaaaaagcatatttctataaatatctgaattttcccccatacttaggggaaaaattataccttagggtatataatcttagtactgaaattactttatcttcttgattagtattcctaagtgtcctcccaaaggtttttactagtttcagcttatactaatatttactagtgta

SEQ ID NO: 17904 - DNA, 201 bp, Homo sapiens
cttctgcaatgcaaatattggcaactatatgaagaaaattattctgtgtattattcaatatataaaattattcttatatgtatgtgaaaggaagaccagcrcttagcaaaatctactgcaccttttattaatatattgcttctaattcacttgagcttctaatatcaatctttcttattcccactcattagtaaaagcagt

SEQ ID NO: 17905 - DNA, 201 bp, Homo sapiens
agcatctcccctactttatattttgtgatcaaaaagcatatttctataaatatctgaattttcccccatacttaggggaaaaattataccttagggtatataatcttagtactgaaattactttatcttcttgattagtattcctaagtgtcctcccaaaggtttttactagtttcagcttatactaatatttactagtgt

SEQ ID NO: 17906 - DNA, 201 bp, Homo sapiens
gctatctttttttttttttttctttttgaggcagtcttgctctgtcacccaggctggagtgcaatggcacgatcttggctcattgcaacatctgcctcccrggtttaagcgattctcctgtctcagcctactgagtaacagggatcacaggcacctccaccacacctgactaattatatttttagtagagatgggttttca

SEQ ID NO: 17907 - DNA, 201 bp, Homo sapiens
tatggtaggaattgttatacatcttttttcactcaaaagttatgttttttatatttgtccataaatctatttctataacttgatctgcattttttttttttagctattgtatagtattctattaaatatgtctgtttccattctgatgaacatttaccttattctcaaactcctgggttcaagtgatcctcctcagcttct

SEQ ID NO: 17908 - DNA, 201 bp, Homo sapiens
caatcactgtcatgagtttttttctgtaatcttctagttcatttttatagtcttacatatgtgtattcatatgtaacatataacaattataatattgttttgtgtttttttcatatggtaggaattgttatacatcttttttcactcaaaagttatgttttttatatttgtccataaatctatttctataacttgatctgc

SEQ ID NO: 17909 - DNA, 201 bp, Homo sapiens
gcaatcactgtcatgagtttttttctgtaatcttctagttcatttttatagtcttacatatgtgtattcatatgtaacatataacaattataatattgttttgtgtttttttcatatggtaggaattgttatacatcttttttcactcaaaagttatgttttttatatttgtccataaatctatttctataacttgatctg

SEQ ID NO: 17910 - DNA, 201 bp, Homo sapiens
aaggcaatcactgtcatgagtttttttctgtaatcttctagttcatttttatagtcttacatatgtgtattcatatgtaacatataacaattataatattgttttgtgtttttttcatatggtaggaattgttatacatcttttttcactcaaaagttatgttttttatatttgtccataaatctatttctataacttgat

SEQ ID NO: 17911 - DNA, 201 bp, Homo sapiens
tccttcctctagaagctttgtcctagaagggcacccccctgtatgaggtgtctgttttcttctgctgggaggtgtctcccagccaggctgcacaggggtcrgggaccctgttgagtaggcagtctgtccgtttacagagattgaatgctgtgctgggagagccactgctctcttcagagctgttaggcacagacgtttaag

SEQ ID NO: 17912 - DNA, 201 bp, Homo sapiens
aaaaactctttcctgtgagggtgtgggggaatttgctttgttttgagaaattttaaagatacagaaaagtataataaacaaacattcatattccaacaacctcgacttaagactttaactactgtgacatttaatcatatttacttcaatttcttaaatgaagttaaaacattatagatgtcttttttggtcacccaccct

SEQ ID NO: 17913 - DNA, 201 bp, Homo sapiens
ttttaacagagattcttcaagtttgcgaacaagtagttcatatacaaggagaaaatgggaagatgatcttaaaaaaaatagctcagttaatgaaggatcarcgtatcataaaaggtaataatactattcttaagcggtttttatgtattcatttataaaaatatgaggcaatttgtttggagccctcagtttaacatcatt

SEQ ID NO: 17914 - DNA, 201 bp, Homo sapiens
atctcagtagtttgggagtccaagtctggaggattgcttaagctcacgagttcaagaccagcctgggcaacatggggaagccctgtctttacaaaaaaaayacaacaattagtaggtgtggtagcgcacacctgtagtcccagctactcaagaggctgaggtgggaagatcgcttgagcctgggtaacaggcttcagtgag

SEQ ID NO: 17915 - DNA, 201 bp, Homo sapiens
agaagtcaagtatattttcctaaaaccctgaaattgttttatctttttattctgctaagttcctctataacttcttttcgttttagtttcctcatcttttmtttttcaagatactattaagctataaaaatataaattttaatcaaaatatttttcttttaaaaatcaagattttaaagactgctttttatagtgaggagc

SEQ ID NO: 17916 - DNA, 201 bp, Homo sapiens
gtatttgctgtatgctaggcattgtgcacaaaggaaacaggaaaatatgccctctagtgttggtctttgtatctaccaaaatgaatgacttactgcattasgttatatgtggtaggcagtcagtaaaaattattcatgaaagaatgaccctgaagttcaatttattttgtatccctaatgactaaactccagaagaaattc

SEQ ID NO: 17917 - DNA, 201 bp, Homo sapiens
ttcttgcttttctgcttctgtcactgtaatatgattgcatctttgtgtgagttttgtttttcttctctgtacagtcttcagtcttgagtattgattcactstaagttttacatgaactcaaaaagtagtttgaatatgttatgtagcatcttcccagaaagtcaaagctttaaattaagagcttgtactctaaggataaag

SEQ ID NO: 17918 - DNA, 201 bp, Homo sapiens
ttcaaaatgttttgttaggtagtggggcacatacagaaagtgtctgcctttgagtttccagtctgttcggggatacagaatgaatggatctgaaatgactktagtcatttagaacatttttttctgtttaattaagcaccacatataagtgccatcattttattccggtcaagcagaattgggagaaaaaagggatacact

SEQ ID NO: 17919 - DNA, 201 bp, Homo sapiens
tattattattttttcaaatgtgcctttgtaacatttacatttgcaagtaatagttctagagtgcaggagaagtttgtgaattgtgtgtttgcatgcataartacatacatacatatgtacatacacacgtacgtaatcttttggctcaaggattgctttgggcgctgcttcctgccagcagttttggtactttactctgtt

SEQ ID NO: 17920 - DNA, 201 bp, Homo sapiens
tcagcccacatactcctagttgtgtattagttgtttatcatagataggaaataggagctaattagttcatttactgggttttacccacattagaaaaaaaraggccacttgccctctgggcaaatagtggctttgtgtgaattaggacggaaaaaacctttcaccaagttaaaggctccttgagtggatttcatcccacct

SEQ ID NO: 17921 - DNA, 201 bp, Homo sapiens
agtagagttggggttttgctatgctggccaggctggtctcgaacttctgacctcagatgatctgcccaccttggcctaccaaagtgaaacattgcttcctraatgtgataattttgcatatgacaacagatagtactttaattttatttttaactcatttaaaccacattgcccagtaaagttattttataaattagattt

SEQ ID NO: 17922 - DNA, 201 bp, Homo sapiens
tccccatttctatttcctccccttctcaaaatgaatactcatatatgtcctcaagaataacgtttttataatttcattagagtgttttacttaaaagatgraatctataaaatctcatatatccaatagcaggtcctagataagcaaggagttatatcactagaaaacagtttttttttttttttggagatggggtctcac

SEQ ID NO: 17923 - DNA, 201 bp, Homo sapiens
ttataacagttttgtccatgaagtggccctcaagcatcatcatgggggctttaacaagccctgttaacctgctaattatagcaaatgttggcaatagatakgaaagaaatgatttttaaaaaattattaataccctatgcttgtggcaactagttagttgctgtattcaccaatctatatagttaactgtggttgagtata

SEQ ID NO: 17924 - DNA, 201 bp, Homo sapiens
ttgtgaactgtctatatctggtgcttctctttcttcctgaatccaggttttagtgagccagaagagggtctaaaacccaaatcttaacacctatgaaaagraggagcaaaaataaaataaaaaataaaacccgaattattttgataattaatttgtgtagcacttttgctgttcaggtatagaaaaagttagacaataata

SEQ ID NO: 17925 - DNA, 201 bp, Homo sapiens
agaaaaactactttgaatatgattgcttttgttctaaaattctttcaactctctaattattactattttttaatcagttgtgattttccagtaagttgaayttaagtgtcagtcacctattctctgtgaccttttggcctaataaatcactacagagagtcattttgaggttccagattgataactggtttgtgagtctta

SEQ ID NO: 17926 - DNA, 201 bp, Homo sapiens
tttctattttagtttgtcttctttattcattgttccttttcttaaaatacctgcaaacgttattttgaagcaacataaaagagttctttaatgcctgtttycaggaagaaagagaaaaactactttgaatatgattgcttttgttctaaaattctttcaactctctaattattactattttttaatcagttgtgattttcc

SEQ ID NO: 17927 - DNA, 201 bp, Homo sapiens
cagcattgtacatgcacatctgtaaatgcaatcttaattgccatatttatgcaatctgtgtaccaatttggacaaatgtttatatattttacataaagctstctgtatgcagaatctgagaactagtttttttatgataataagtgggtaaaaattaataacagtgagtttcagggtagttgctttgtagcacaagatttc

SEQ ID NO: 17928 - DNA, 201 bp, Homo sapiens
tgagtccaggagttcaaggctgcagtgagtcatggttgtggcactgcacagcagtgggcaacagaaggagaccctgctcaaaaaaaaaaaaaaaaaaaaaacccgaaacaattgtgcctcatatttacatagaatttaaaggttttcagccttttttacacatattacctaatgcaattcttttaacgaccctgtgaaatt

SEQ ID NO: 17929 - DNA, 201 bp, Homo sapiens
acagatctctagggcaggggcagaatgccactggtctctttgccaaagcataaaaagagtgacctttgctttagttcccaacaagtttctcatctccatckgagaccaactcagcctagacttcattgtccatatcactatcagcattttggtcaaagccattcagtaagtctctaggaagttccaaactttcctacatct

SEQ ID NO: 17930 - DNA, 201 bp, Homo sapiens
ttaaaacactaaagacaaatgtaaaaaataaaatgttatccaaaatttcgggactggactttgctccatttaaaagtttaacatccttttaaatatctctrtacaagtatgtaattttctataaatggggtcatacctaattttctggtttataaccagttttgaaacattatgtattttaagaaacatttctgtgttaaa

SEQ ID NO: 17931 - DNA, 201 bp, Homo sapiens
caggctcaggagttaggcaactctgtttaaatcttaattctgttaagtaattctcgtcaactttgaatgaattaccagcttccctaagcctccatttcttyatccataaaatggaaatattaatacttgtacctaatttataagattgtgaagattaaatgagatcatgtgtataagacacttggcacaatatgtggcaag

SEQ ID NO: 17932 - DNA, 201 bp, Homo sapiens
gcctcaggaaacttagaattatggcagaaggcaaaggggaagtgtgcacatctttgtatggccagcaagaagagagaaagagagcaaagagggaggtgctscacactttcaaacagccatatctcgtgagaactctgtcagcactaagacagcactaagaggatggtgctaaaccattagaaaccaccctcatgatccagt

SEQ ID NO: 17933 - DNA, 201 bp, Homo sapiens
aataccaaattttgaaaacactttgctttcttcatataatcctttggattagggtttcctaaataataattcaacagtaaaggaacagcatcctaacttgygattcatcgaacctaaacagaaagaatatgaaggttgagaatgagaaaagtagaaaacagaaatagaatatggcctgctgttgatactaatatttttata

SEQ ID NO: 17934 - DNA, 201 bp, Homo sapiens
ggatggataaataaatatgcatttatgtcttgtatgattaaataaatgcattatttatgcatatgtgttatattttatgattacctatttcagtcagcctwtttggttaaccaagcaaatactggttctgattgcattaaacagaagggccttattggagccataatttcttggagagaaggcaatagtggaatatggaga

SEQ ID NO: 17935 - DNA, 201 bp, Homo sapiens
tttactggatctaagtactaaggtaggaagaaaaatcaaaggtggtgctaatgatgataaatagctaacgtttaccaagtgcttactgtgttttttttttyactgttctaagtcctttagataacataatttcagtcatataaaaatgtactacttcccacaggtccttatgcataaacctccaaaactgcaaaaaatgaa

SEQ ID NO: 17936 - DNA, 201 bp, Homo sapiens
tatgtgttttctacctgttaatgcctgtcatatgcaaaaccagaatattgttgctaagataacaaagttgaatactttggaaagactcaatggcagtgccytaaaaggatggttgttttttaattagatgggggtgagacaactcaaagactgaaagaaaaaaagaactagaaggattgtgtactcaaattgctttgctgt

SEQ ID NO: 17937 - DNA, 201 bp, Homo sapiens
acctgtgtgaaaatctgtttttttgtttgtttgtttgtttgttttctttccaaggaatcttagaataactatggcatatttttcctaattaatagccacasaagtagcttctaataccccagcttttgttctgaaggaaatctagatgtctgttttcaatatctccagggtctttcaaagtgaaattttcatattccagat

SEQ ID NO: 17938 - DNA, 201 bp, Homo sapiens
gtgtatatgtgccacattttcttaatccagtctatcattgttggacatttgggttggttccaagcctttgctattgtgaataatgccgcaataaacatacrtgtgcatgtgtctttatagcagcatgatttatagtcctttgggtatatacccagtaatgggatggctggaaaaggatgagcataatttttgcctctgcga

SEQ ID NO: 17939 - DNA, 201 bp, Homo sapiens
ggtgtatatgtgccacattttcttaatccagtctatcattgttggacatttgggttggttccaagcctttgctattgtgaataatgccgcaataaacatamgtgtgcatgtgtctttatagcagcatgatttatagtcctttgggtatatacccagtaatgggatggctggaaaaggatgagcataatttttgcctctgcg

SEQ ID NO: 17940 - DNA, 201 bp, Homo sapiens
ctttaaaatatatccagtatctatttctcattacctttttccatctctctttgatcctgagcactgttgtttttttttttttttctttcttttttttttttaaagacagagtctcaccctgttgcccaggctggagtgcagtggcacgatctcggctcactgcaggctccacctgccaggttcatgccattctcctgcttc

SEQ ID NO: 17941 - DNA, 201 bp, Homo sapiens
ccaacagaatcctaagatttctgttggctcagctttaaaatatatccagtatctatttctcattacctttttccatctctctttgatcctgagcactgttktttttttttttttttctttcttttttttttttaaagacagagtctcaccctgttgcccaggctggagtgcagtggcacgatctcggctcactgcaggctc

SEQ ID NO: 17942 - DNA, 201 bp, Homo sapiens
tctttgcacatgagatgggtctcctgaatacagcacactgattggtcttgagtctttatccaatttgccaatctgtgtcctttaagtggggcatttagcccatttacatttaaggttaatattgttaggtgtgaattcgatcctgtcattatgatgccagctggttattttgcccattaattgatgcagtttcttcatagt

SEQ ID NO: 17943 - DNA, 201 bp, Homo sapiens
ttagaagtttattagatttttttcagattatctcatgctaaaattagaacttgttcccagtgacttttaaagattggatcattacccaattattggggttwattataaaattattttcaaatgaagaaaatattttttgttcataacttcccttttctgttttcatgctttcaatctttgtctctttacctgtcttatttt

SEQ ID NO: 17944 - DNA, 201 bp, Homo sapiens
cctatgtagtaaaagtgttttatcctgaaactgtaaaccataattttaaatatattatctgtaaacttattgtttccaatttaaggactgatcagctttamaaattcttttttcttttcctaaaaaataaaataaacacagtttccaaccacagctacaaaaatttctcccaaagaagaagagagaaaagatgagtctcct

SEQ ID NO: 17945 - DNA, 201 bp, Homo sapiens
gacaaatgtaatttatacagaattataaatactggaaagatcagatgtatttgcctaaaacataaattatgggactatactccgttaaaggaatctattaycttacttgagaatttataatagaactgtattaaggagcaggcttattttgtttattatgattcaagaaactttctgaagtttaaaaaacataggaacaca

SEQ ID NO: 17946 - DNA, 201 bp, Homo sapiens
ctggaaagatttttgccctactgttgatagtgtttatctctgggggagggaacataatagtaggagaggaataaaggagttcctttttccctctgtggacrtgtactttttttaaaaaactattttataattagaatatttttatatagtcgaagtatgaaggagctaaattggttaggaacataaaggaaaagacccatt

SEQ ID NO: 17947 - DNA, 201 bp, Homo sapiens
cttaagcggtttttatgtattcatttataaaaatatgaggcaatttgtttggagccctcagtttaacatcattttaaacaaatatgtgtttttattaaatrcgagtttttgttgtttaaaacttactctaaacacaggatatatatttaaagataggtgataatttgttatgcctattatataattaagcttcaaatatta

SEQ ID NO: 17948 - DNA, 201 bp, Homo sapiens
aggcaatttgtttggagccctcagtttaacatcattttaaacaaatatgtgtttttattaaatacgagtttttgttgtttaaaacttactctaaacacagkatatatatttaaagataggtgataatttgttatgcctattatataattaagcttcaaatattatgaaatgttttttggattgttacatatttaaaaggaa

SEQ ID NO: 17949 - DNA, 201 bp, Homo sapiens
tgtcactttggatatactttatttcatcaaatctaagacattactcattttaaaacaccattgtgttacctactactgaaaaaaaggaaaggtgctaccarttaaactataatgcatcatcaattgtaagccattttctggttttggaaatattaaaatgtgggaggaaatgtacaatttaaaatattaatcattatatga

SEQ ID NO: 17950 - DNA, 201 bp, Homo sapiens
ctactactgaaaaaaaggaaaggtgctaccaattaaactataatgcatcatcaattgtaagccattttctggttttggaaatattaaaatgtgggaggaartgtacaatttaaaatattaatcattatatgaaaccagttttggcttttaaacatggaaattttgactctcttcctcaattaatggaaattagtagtatta

SEQ ID NO: 17951 - DNA, 201 bp, Homo sapiens
tgatgggtaataatgctctggtaaatcagtctttttttttttttttgagatggagtttcgctcttgttgcccaggctggagtgcaatggtgcaatctttgytcactgcaacctctgtctcccgggttcaagtgattcttctgcctcagcctcctgagtggctgggattacaggcatgtgtcaccacgcccagctaaatttt

SEQ ID NO: 17952 - DNA, 201 bp, Homo sapiens
ttgtggttatatgtgtacatacacatgtggacatatgtatgtgtgtatatatacatgtacacattttgaataatatgttcacagattaaattctagagatrgaattacagatacttttttgttgtatattctcttttttgagagacagagtctcactctgtctcccaggctggagtgcaatggtgtgatctctgctcacta

SEQ ID NO: 17953 - DNA, 201 bp, Homo sapiens
catcactcagaaaagtataatgtaagcattggtaagtttgatttccagttgacagaaaaatgcttcagaaaaagagacaaactttcccttccccccattcyctacttttccaaatattcagatgcctaaaccttccacccatgctagagctgttgctgcctaaccaccttctgggcacaatggcatggaaatacataatca

SEQ ID NO: 17954 - DNA, 201 bp, Homo sapiens
tccccttccttcatcccttctgtttgtttttgaaatgctgcatctctaacctgacagttccttctgtccactcacctcaaggatggctagaaatcttatayccagaccgcttacttcctgaacacagtggcatggaaacacataatcatgatgtaatcatgagcctgtacataagccagctactctgttgggttcaggttg

SEQ ID NO: 17955 - DNA, 201 bp, Homo sapiens
gaggcctgtgtgttcactccctaaagagttccctccctggcttatctattttcctcaaacatctcaactaggtcaggccctgtcattaaaaaacaagtggrtctcccctagtttcccggctaagaagatctggcctctgccttaggccctgactagggggccccgtgctgcaataactggttgtgcagcccacccagccta

SEQ ID NO: 17956 - DNA, 201 bp, Homo sapiens
cctcaggctcccaagtgctggtgctagctgtggtaggcaggggcggggtgatcctcagttctgcagtggaatgcttggtgggggtggcaatggctgtgctktggtcctactgctggggagggcggggttgctttcagtggcagcaaccacagacaggtggttggagagcacatgcttcagccccaggtggcagctataagc

SEQ ID NO: 17957 - DNA, 201 bp, Homo sapiens
gattaaattctagagatagaattacagatacttttttgttgtatattctcttttttgagagacagagtctcactctgtctcccaggctggagtgcaatggygtgatctctgctcactacaacctccacctcccaggttcaagtgattcttcttctgcttctgcatcagccttccaagtagctgggattacaggcacatgcc

SEQ ID NO: 17958 - DNA, 201 bp, Homo sapiens
ttggagtagcattgtttttttttttttttttcctttggttattgatgggtaataatgctctggtaaatcagtctttttttttttttttgagatggagtttygctcttgttgcccaggctggagtgcaatggtgcaatctttgctcactgcaacctctgtctcccgggttcaagtgattcttctgcctcagcctcctgagtg

SEQ ID NO: 17959 - DNA, 201 bp, Homo sapiens
gagactgaggaaatgtatagagccttttaaatccttacatattactgataagaaaatgcaagccctttaacttttgtggtaaatggtgcaattaaggtgtktatacttatttataaaacatagcaggctgggtgccgtggctcacacctgtaatcccagcactttgggaggccgaggtgggcggatcatgaggtctggagt

SEQ ID NO: 17960 - DNA, 201 bp, Homo sapiens
ttttcttcttgttcatagtgagtaaatttggtaattctgttgatctgttctcaggttcactgattctgtcctttgtcaccttcattttactattgaacccrctaagtttatatttgttgtactttttagttttataatttccatttggttctttttttaatttctcaaaaaatacggaatgcgtcacgactttgcatgtca

SEQ ID NO: 17961 - DNA, 201 bp, Homo sapiens
cctgggctcaagcgatcctcctgcctcagcctcccaaaaggctgggattataggtgtgagccactgcacctgtcccttatttttaattttaagcaaaaagrggactgactctgaagttcaagaagtcatcaagaaatgctgatgggttacttcagaattgtttcagattaaaggacagcctggtgtcactctgtgactatg

SEQ ID NO: 17962 - DNA, 201 bp, Homo sapiens; identical to SEQ ID NO: 4330

SEQ ID NO: 17963 - DNA, 201 bp, Homo sapiens; identical to SEQ ID NO: 4331

SEQ ID NO: 17964 - DNA, 201 bp, Homo sapiens
ggcattagttagattctcataagaagcacgcaatctagatccctcacatctgcagatcacaatagggttcacactcctatgagaatctaatgccgccactsatctggcaggaggcagagctcaagcagtaatgcttgcgcatctgctgctcacctcctgctgtgcagcccgattcttaacaggctatggactgttactggt

SEQ ID NO: 17965 - DNA, 201 bp, Homo sapiens; identical to SEQ ID NO: 4334

SEQ ID NO: 17966 - DNA, 201 bp, Homo sapiens
aatggctgtgctgtggtcctactgctggggagggcggggttgctttcagtggcagcaaccacagacaggtggttggagagcacatgcttcagccccaggtrgcagctataagcagagtagcctttcctcagggcacttttaagtgtgttgtagccctgctatcgtgggcagcagagttgctgccaatggcagtcagctgtg

SEQ ID NO: 17967 - DNA, 201 bp, Homo sapiens; identical to SEQ ID NO: 4335

SEQ ID NO: 17968 - DNA, 201 bp, Homo sapiens
gtatgcggccctactcttcctgtgttgtttatactcttacatcaaggagttacattttcctcattttacgttgagggaactgaattaggataggttaagtracttgtctaagatcattctttttgtaagtggcagaactggaaatcagctgtcagattcttgtagaccatgccttttggccacaggacactgactcttcac

SEQ ID NO: 17969 - DNA, 201 bp, Homo sapiens
tttacttaaaccctggcagggctcctgcacccatagaggagttattataatgatccaaagcaaatatgaggttctaatagggtgacacagcaataacaggrtctttttgaagaaatgggatttaatctggcattgggagactggaaattcatggcttcacttatttattctgcccaagtagacttttgttgacacaaagaa

SEQ ID NO: 17970 - DNA, 201 bp, Homo sapiens
tgaatatataaaaagcacaaaaagtaatacggcaatcatctaatgaccaaacattaaaatcaaacatgctaacattttacataatttgcttcaggtctctgaaaagaattgtagatataaccaaagcaccgtcccctactccttcctcctgcctgtcatctcagaagttgtccggaaattgctgctgcttgttctcattca

SEQ ID NO: 17971 - DNA, 201 bp, Homo sapiens; identical to SEQ ID NO: 4333

SEQ ID NO: 17972 - DNA, 201 bp, Homo sapiens; identical to SEQ ID NO: 4337

SEQ ID NO: 17973 - DNA, 201 bp, Homo sapiens
gaataattgggggaagaaagagaacaaagttgatctaaattagtagaacatctgaaatagtaaatttggtttaaaatatttaatgttatcattttcaagayatagaaatgtaatattttctagagcttgaactctggaggcagcctctaagaacagaaactctgggatttttctgctttccagtactgtggccttgagcca

SEQ ID NO: 17974 - DNA, 201 bp, Homo sapiens; identical to SEQ ID NO: 4340

SEQ ID NO: 17975 - DNA, 201 bp, Homo sapiens
gataaaaggtattgctcacttggctaggatggtagcagtggagaagtggttttacctggcttttcagcacctgaatggtctgtaagaatggcactagcatwcaagtcatttcaatgtggactttccaaggtacagttgcaggatgagagttagagtctgttgtacggtatggaacttgtacgtgcgcaatacacactactt

SEQ ID NO: 17976 - DNA, 201 bp, Homo sapiens
gtttacattcttggttgttattgatatgtgagggattattcctgtcattttgttaattgatttttggttgtttcatgtatcctttttcctttctttcttaytgtttatcattgtggttttgtggttttctttagtggtaacatatgaattctttctcttcctcatttgtgtgtttgctctaccagtgggttttacactttt

SEQ ID NO: 17977 - DNA, 201 bp, Homo sapiens
ttgagacttttttatgtggtctattctgggaactgttccatgtgctgatacaaagaatgtatattctatagcagttggatgaaatgttctctaaatgtctrttaggtccatttttgtgtaaagtgtagtttaaatccaatgtttatttgttaatttttttcccaatgctgagagtggggtgttgaggtcaccaaccattat

SEQ ID NO: 17978 - DNA, 201 bp, Homo sapiens
gtgcgcactactatgccttttttttttgtagagatggcatctcactttgttgcccaggctggtcttgaactcctgggctcaagtgatcctcccaccttgamctcccaaaattctgggattacgggcatgagccactgagcccaacgtggtatattatctttttgatgtgttattagattcagtttgctgatattttgttga

SEQ ID NO: 17979 - DNA, 201 bp, Homo sapiens
ttcttatgagaaagtgtattcatatcctttgcccactttttaatgagattatttgcttttttttttttttaactcttgacttgtttgagttccttccttgkatactctggatattataccttgtcagatgaatagttagaaaatattttatcccattcaaccagttgcctctcattctattgattgttttaaaacatttag

SEQ ID NO: 17980 - DNA, 201 bp, Homo sapiens
tacagggtacatgtgatattttattacacacatagaatgtgtcatgatcaagtcaggctattcaggctattcatcacctcatgtacttattatttctgttragatatgttgggaacacatccatgtgttcctatccatatcaatgtgttgggaatgttttaagttctctcttcttgctgtttggaaatataccatacattt

SEQ ID NO: 17981 - DNA, 201 bp, Homo sapiens
gggcaataccaatggctggtttttaagcatgatcttgtattaagctgcttttgagtgagtactggatcttaataattatttttagttgtgaaatacttatytggcataaatcatgtgctaccttagaaattagtatttgtaaattacaaccctatggcgtataggtactgttattgatttgttatccttattttccagttg

SEQ ID NO: 17982 - DNA, 201 bp, Homo sapiens
gaggcagtggttgcagtgagccaagatcatgccactgcactccagcctggatgacagagtgagactcagtctcaagtaaaataaaataaaattcaagatayaattcggtttctacagtagcccccaaacaagacaaaacttttagcaaactttctactcttctgcctcctcttcttaccttttacttaagaaaaatcaaga

SEQ ID NO: 17983 - DNA, 201 bp, Homo sapiens
ggttaatggcctaggttggtagctagctagccagatccttgttctttctttcacttattttttttattcattcaacaaatgtttatagagcacttactatrtgccaaaaattttgttaggtaataatagacacagtggagtaaaaatagtctgatgacagaagtaaacaataatcacattataaataaaaataaattacac

SEQ ID NO: 17984 - DNA, 201 bp, Homo sapiens
tataaatattgtaaataataagcaaatatattcttatcaatgatgttgaagaataagtaaacatgttataaagcattttcactccacactttaaaaaatawgctgcatctaatctaagtatattttacttgtagaacattgtcaaagggtcacctactctttggaggttacgttgggtcctccaaaaagaaaaaaaattct

SEQ ID NO: 17985 - DNA, 201 bp, Homo sapiens
ctctcccacagccacacagctaggaagtataggaacggggattcaaggtcaggagctgggattcaaggttgggcacttgggtttcagaacccatgtgtttktcccctccatgttattctacttccctttaatcaaaacaactagcagcacatgctgtatttagttataacatttgaacagcaagcagtgtgtgctattaaa

SEQ ID NO: 17986 - DNA, 201 bp, Homo sapiens; identical to SEQ ID NO: 4332

SEQ ID NO: 17987 - DNA, 201 bp, Homo sapiens
taaaaatcaaatatttgaccttgaaaataagtccacgatatcacccaggataccaaataaaaagtaaagtgttaaaaatacaaatgaaaaattaagagacrtcaaggatccatcaatttttaaatgtagattcccaaatatccaacattcattgtaaaagaagtctcagatgaacagaaacaatggaaagaaaattactca

SEQ ID NO: 17988 - DNA, 201 bp, Homo sapiens
atgctgtatttagttataacatttgaacagcaagcagtgtgtgctattaaattgaaacactgtgatctcatttgtttctgttgaaactgcctagctgtgcygactgggctttgtttccctgggcagagaaagcttttaagggagcaatcttttcttccttttgcttctgatgaccctcatttcatccacccttttccactg

SEQ ID NO: 17989 - DNA, 201 bp, Homo sapiens
aagcgattctcctgcttcagcctcctgagtagctgggattacaggtgcccaccaccatgtctgactaatttctgtatttttagtagagagggggtttcacyatgttggccaggctggtctcgaacttctgacctcaagtgatccacccactttggcctcccaaagtgctgggattacagatgtgagccactgtgccctgga

SEQ ID NO: 17990 - DNA, 201 bp, Homo sapiens
ctctcacttcttctcaggcatattataccctcccaatttttaattcctggtgtattttctactctttcaatatttagctgctaattttcatgaaatatagmgttcttatccagaatcctcttagtataggattttaaatctgaactagaccttatgtataagttagtccaatttcctcatttcacagatgataaaattgag

SEQ ID NO: 17991 - DNA, 201 bp, Homo sapiens
gaacccctgatctaaggcaccattctgttattctgtttccttttgatcagcagtgaagggccatgtctggcatgtatggaagaaatgacgaatggctgggktcatgagacctgattgctgttctctagccggtcctagcttcacagtttgaccacctgtgaatcctttagtctgggattcatcgtcatttacttacaaaga

SEQ ID NO: 17992 - DNA, 201 bp, Homo sapiens
aaaaaaaaaaaagtgtggaatgctaagtaaaaaatgtgatgtagtgtagttgcaaaggcgttagctgtattctaattccagatttgccacttactcgttgrattgactttgggcaatccacttaacctttacgacaacttctttatctgtaccacgaaggacttcgctacgtcagtgtttctccaggtgtggtccaagggc

SEQ ID NO: 17993 - DNA, 201 bp, Homo sapiens
ttccattagcctcctctttgcccagaccattaattgatacttatcgtctctctgcatgtgcttgtgaatgtatacatatgtgagaaaaacataaaaaatayatagtaggcttctgcaggtttatttattgatacataatatttgtacatgtttacagggtacatgtgatattttattacacacatagaatgtgtcatgatc

SEQ ID NO: 17994 - DNA, 201 bp, Homo sapiens
agatcttttgggacttaatacataaaacaagtcagtaattacagataaagttggagcccttttactccttcctaattccattagcctcctctttgcccagrccattaattgatacttatcgtctctctgcatgtgcttgtgaatgtatacatatgtgagaaaaacataaaaaatatatagtaggcttctgcaggtttattt

SEQ ID NO: 17995 - DNA, 201 bp, Homo sapiens
ttttttttttgagatagtctcgctctgtcacccaggctgaagtgcagtggcatgatcacagttcactgcaacctctgcctcccggtttcaagcgattctcstgtctcagcctcccaagtagctgggactacaagtgtgtgccactacacctggctaatttttatatttttagtaggatgggatttcaccatgttggccagg

SEQ ID NO: 17996 - DNA, 201 bp, Homo sapiens
agtctcatgagatctgatggttttataaagggcagttcccctgtacacactctcttgcctgcggccatgtacgatgtgcctttgctcctccttcaccttcygccatgattgtgatgcctccccagacatgtggaactgtgagtccattaaacctctttttctttctttctttttttttttttttttttttttgagatagtc

SEQ ID NO: 17997 - DNA, 201 bp, Homo sapiens
gggtgggtttttcccatgctgttctcatgatagtaaataagtctcatgagatctgatggttttataaagggcagttcccctgtacacactctcttgcctgyggccatgtacgatgtgcctttgctcctccttcaccttctgccatgattgtgatgcctccccagacatgtggaactgtgagtccattaaacctctttttct

SEQ ID NO: 17998 - DNA, 201 bp, Homo sapiens
tgatatggtttgactgtgttcccacccaaatcttatcctgaatcgtagctcccataatcctcatgttgtgggagggacctggtgggaggtaattgaatcaygggggtgggtttttcccatgctgttctcatgatagtaaataagtctcatgagatctgatggttttataaagggcagttcccctgtacacactctcttgcc

SEQ ID NO: 17999 - DNA, 201 bp, Homo sapiens
ataaaaataacaatctcaatatagccaacacctagattcagtaataacattttgacacagttgcttcacttgctccttttttgggggatgaagtattttargatccctagcattgtcatcttttaaaaaatccccttatgttaatatgcatatctaaaaaataatttgcttaaataaccacactgccatcatcacacttag

SEQ ID NO: 18000 - DNA, 201 bp, Homo sapiens
gtgtggcttacctctttggggaagaagagggagacactgtttttctagtttgttctggttggaaacgatcaccatggaagctaaattactccttatgtctkacattctctgtactagggtcagtatgcggccctactcttcctgtgttgtttatactcttacatcaaggagttacattttcctcattttacgttgagggaa

SEQ ID NO: 18001 - DNA, 201 bp, Homo sapiens
tgagaaaagggcatgaatatgaacttctcttttcagttttgaggacaactgaatttgggaataatgctatcttatttatgtttttgtttcttgggcagggkgaaattctataacttcgtattacagagaagtttctaattatggtgatttggattttataatgagctttttggaaaagtacttattggactttgtatgagt

SEQ ID NO: 18002 - DNA, 201 bp, Homo sapiens
catgccaggcacttgggtgcatcagtcgtactcctagaaggcataatgcagtgccatgcccaacctggtatcctataaacgttcaagaatgtgtgcatggrtgaatgaattgcatggtgaaggtaaacaacatatgtgactctttagcgtttaggcttgacagatttgttataacttattttgagatcacacaataaggtg

SEQ ID NO: 18003 - DNA, 201 bp, Homo sapiens
atgagtttatattcagtgaggctggtttgagagaatcccgtgtggctggctgtgttgaggtctcgtcctccagagaagtttggtgtttgctagtgttaggyggtgagtgggaggagcatggggatatcaccaactcaggaccttggtttgtgttaatttcttctcctgagggttctcagacttgacaggtagtctaagttc

SEQ ID NO: 18004 - DNA, 201 bp, Homo sapiens
gtagaacagtgggagtggagaaagaacaaagaaatctgtaattggttataatcaattagttgtacacgtccctgcactcagaccagccattaccttctctmataataagcttttagatgcactatcccccattaaagggagtggcgagtgtataaaggatcctctcaaagagatgaatctgggggctttactttcctgtgg

SEQ ID NO: 18005 - DNA, 201 bp, Homo sapiens
ttacatttcactgtagagaaagtctttcttatgtgtgtttctaaagtttctactaatttagtttttcttttcactcattagattttgcagcacagaagtcytaaaattttgattagtcaagttttatcgatgctttttggtcatatttagaaatattcccctcttcagagcttataaatatattttttcattttcttctta

SEQ ID NO: 18006 - DNA, 201 bp, Homo sapiens
ttttttttttaaactagggttagaatcttttgatctagtgtatgaacatgttcatagttagtagtttttgccaaactgtttttcaaagctattgtactaarttttactttcactagcactgtaggactgacctcactgactcttgacattttccaacttggtaatttttgccaacctgatggaaataaattggatctcact

SEQ ID NO: 18007 - DNA, 201 bp, Homo sapiens
gatgttggaatttcatcttagatgatgtatagaagtttgctaagtaagcctaggcaaaggaattatttctattagatattctttataccctgaattgaatraaatattcaattacttttcttgtattgtaattagtatttcacttagctatgacaatagccgttgttaggcatgtacatcttgtataaatccttagagtgg

SEQ ID NO: 18008 - DNA, 201 bp, Homo sapiens
tataaggaaagggattaatttatttttatttttatttttattttttgagatggagttttgctcttgttgtctaggctggagtgcaatggcgcaatctccasctcactgcaacctctgcctcctgggttcaagtgattctcttgcctcagcctcccgagcagctgggattacaggccaccacacccagctaattttttgtat

SEQ ID NO: 18009 - DNA, 201 bp, Homo sapiens
ctgctatttttgatatgcggtggccttagctgtggagcgagaggccgataattgtgatcactccggaaatcctgggaagccagaagtgggagatgggtgtkgtgaggtggcgtggctagggagaccccatcgagtgggtgtgttataagacctgggcgaatccctgtggctgccactctcctgagaatgttccctaggcct

SEQ ID NO: 18010 - DNA, 201 bp, Homo sapiens
tttaatgaagaaaggaagtgaaaagagataaaaagaggcctgtctctgcatactgtactaggcatcttccatgtcagtatcagcattctgccttcctcgayaagactctcagcctgggaaagaaggaaaccaagaattatcctcacaaccagaattgttctagagattttgtggaaacacatttattaaagactgatatag

SEQ ID NO: 18011 - DNA, 201 bp, Homo sapiens
ttagaaaaacttttggttttgtttgttactctattcattgggtaacaaagagcatttttctaatcaaggctgcctaatactacatataaacgaattaataygaacaaatagcttgtgattgtttcaaacaataatagggaagaaagcttgcattgtcacgcctgctgggattgctgtttagttagttgaaagatatgcctt

SEQ ID NO: 18012 - DNA, 201 bp, Homo sapiens
agaaggtaaaaataatttagatatagcatcttcttaggcaagcataataagcagctcactcagtcaccttagcctggtattgtctggcacatcaacttgcwttcttttccagtgaattcagggaccttgtaaagataaatccacattcaagtgtgaaaggcctgaaaatccttttctaaggccaaaacaacaattttttag

SEQ ID NO: 18013 - DNA, 201 bp, Homo sapiens
agcttctactgatgtcttctctcttattatcagttttgcccaagttcaaagaaggtaaaaataatttagatatagcatcttcttaggcaagcataataagsagctcactcagtcaccttagcctggtattgtctggcacatcaacttgctttcttttccagtgaattcagggaccttgtaaagataaatccacattcaagt

SEQ ID NO: 18014 - DNA, 201 bp, Homo sapiens
ttaatgaatttaacattgatcttaaaagaagtctttgttagcttaatggtcccagcctttgaaatagacctgggttcaagttctgactttcgataatagtkttattgagcaagtttattaattaaccttaaccagggtagttgcattattctcaccgtattttgggaatagtggcagcctctgatggttggggaactaagc

SEQ ID NO: 18015 - DNA, 201 bp, Homo sapiens
aatggataatgaaagtcctagaacatacattcttaacatagttatattgccccaagaggacaaaaattgggttttgggagatgaaaaaaatccctccagarcttatacctctatccaacaaaatcttattccttagtatttagttttttctcattagaaaaaatttaaatgtaattaatttttctccttaaggatcactaa

SEQ ID NO: 18016 - DNA, 201 bp, Homo sapiens
gaggggtttacgttctttgcaactcgaagcatcatttctgatttcctgatacagattgaaaaaatgagaatgaacataggaggcacacatatgaattgccraatttagccaataaaaataattgcatgggatatacttatactaaaaaacaaatacttcttttttatttgaaattaaaatttaactgggtatcttgtgttt

SEQ ID NO: 18017 - DNA, 201 bp, Homo sapiens
ttttaaaatgaggatgtctacacagctatatattactccaagatatcgtatggaggaaaaagaaagcaagacgcaaaatagtacttatgggaagataccaytaaaattctaaaacaagactgtgtatttttagggagaagtatatggtacattaatggaaatggataatgaaagtcctagaacatacattcttaacatagt

SEQ ID NO: 18018 - DNA, 201 bp, Homo sapiens
tagaaagacttaatgaattcaggaatgtggacatgattgaaatactattcagtcattttatttatttcttttttttttttctgagacagagtctcattctrttgcccaggctggagtgtagtggcacgatcttgtctcactgcaacctccaccttctgggttccagcaattctcctgcctcagcctcccaagtagctagga

SEQ ID NO: 18019 - DNA, 201 bp, Homo sapiens
agtcactctggagggtaattcaacagtatctattaaaattatacacttctgcacatgccctgctcctgtcttggaatctacattagaaaaccactcacacrtgagcccaaggagtgtataaggaatgtataaagatattcattgaagcattggttgcaaaccaagaagtacaaaattttgtgaatatccaatagtagaaag

SEQ ID NO: 18020 - DNA, 201 bp, Homo sapiens
gtggtactcctttgtatattggtccagtctgagaggaaaggccaagctataaattgaggagctggaatcagtgagtttctgaactaaagcaaaagaggctstatttagacattctttaaaaggtgtgtgtgtgtatatgtatgtgtgcgtgtgtataaaacgatcagacggtagagattagagcactggctttgtttaatt

SEQ ID NO: 18021 - DNA, 201 bp, Homo sapiens
catacaatcactgggggaaatgtgtactctcgtaaattctctgtgggaaagtaaattggtacagtcactctggagggtaattcaacagtatctattaaaaktatacacttctgcacatgccctgctcctgtcttggaatctacattagaaaaccactcacacatgagcccaaggagtgtataaggaatgtataaagatatt

SEQ ID NO: 18022 - DNA, 201 bp, Homo sapiens
aattttcatacgactaaaatctttgtgtatgtcaaagatttgtgtatgaaggcttaacttattgattagttttttaacataccaaattgcagtaactaaaycatctactattgtgagttatttttcctctcacgtttacttttccttagccttattttacagctaaattttataaaaaagatttgattcatttttgaatca

SEQ ID NO: 18023 - DNA, 201 bp, Homo sapiens
tttgtcccaaattgagtataactttgagcaagaatcttaatctctctgaatttcagccccttcatctgccaaatacagaaaatatattttggtgaggatcrtattggataatgaatgtgagagctctttttataggaagtgccacacaaatgtaagttatgaatgttttcgcagctgctacttatagagcagtgacccaaa

SEQ ID NO: 18024 - DNA, 201 bp, Homo sapiens
acatgttaattgtgtgacctagagcagtatatttgacccttctgagcttctattcccatctataactgggtagagtactgtctcccaaatgaggagattgytgagaaaattagatttgttcaagtgcttagcatgctgcctggcacatgctgcggtgaatgtaatgttctcatactttacctgtggctcacatacatgaaa

SEQ ID NO: 18025 - DNA, 201 bp, Homo sapiens
gctgggatgttggattcaaacctatgaaaattcctcaacttaagagtatttggacagatagcacagaagtcgtggcttttagaccttagcttttccctacyggctttctgtttgcattaagctagtatttgacacttgatgtctagggattcttacctcctttggccaatggtacttcacacccatatgctagtcctttta

SEQ ID NO: 18026 - DNA, 201 bp, Homo sapiens; identical to SEQ ID NO: 4336

SEQ ID NO: 18027 - DNA, 201 bp, Homo sapiens; identical to SEQ ID NO: 4338

SEQ ID NO: 18028 - DNA, 201 bp, Homo sapiens; identical to SEQ ID NO: 4339

SEQ ID NO: 18029 - DNA, 201 bp, Homo sapiens
tatcattatcaaagtctactgtctgtccttcctcttttttcctccgtcttagaccagggagcatagtagatgaacatcatgcaggccagcacactgaggcyacgtgtaagcaggtgggaagattatgtgcatgaaacagacagtcgcataccacttttggttacaaacacttgccctggatgagagcaggaattgagacca

SEQ ID NO: 18030 - DNA, 201 bp, Homo sapiens
agacaggcactagtgctgaggactgcccctctctccaaggaaaacacttcccaggtggagcctttttttgtggcaggatcccctttgctagtgctgcaagycacctgctgtttctcattggaggaagggagtcttaggcttggtgagtaaggagagtgctttcctgtcttcttatggtcagcaggtgtattagtctcatgc

SEQ ID NO: 18031 - DNA, 201 bp, Homo sapiens
aatttcctttaattaaactgagataagatcttgctctgtcacctatactggagtacagtggctagatcacagctcactgcagcctcaacctcctggtctcmagccatcgtcctacctcaccctgttttttgttttgttttgttttttgttttgttttttgaaacagggttttgctctgtcacacaggctggagtacagtag

SEQ ID NO: 18032 - DNA, 201 bp, Homo sapiens
ctagtcccttttcttctctaagcctcaattttttcttctgcaaataggtggggttggacggggtgctatctaatcacttgacggtattatggtagtctacytttatccgaagcttcactttccacagtttcagttacctgcagtcaaacttggtccaaaaatattaaatgaaaaatttcagaaacaaacaattcacaagtt

SEQ ID NO: 18033 - DNA, 201 bp, Homo sapiens
tatgtcacatagagcaagataatgtgaattataaatacataagagggagaaaggaaaaatgaaagtaggagtgggcaaaaaataatgccaggaataataartacatgagaaggagaaaggaaaaatgaaagtaggagtgagcaaaaaatagtgccaggaataagttcagtgtaaaacagtgcaccttggggttcctgtaat

SEQ ID NO: 18034 - DNA, 201 bp, Homo sapiens
caaactgttggggaaatgactgctccaaagctcagcatccagtggcctttcatgaaatcccagtctcgcatctttccctctgctgttgttagtaataacgycatatgacatatttgtttggtggatctcatccatttctatttcgctttccttactctaagctaggtgcctctatttaccttttaggcaactctctatatt

SEQ ID NO: 18035 - DNA, 201 bp, Homo sapiens
tagctgggtatttcgtttttttatccttttacttttaatctatttgtgtcttcatgtttaaagtatggttcatgtagggagcatatagttgtgtcttgctyttttatccagtctcataatctatgccttttaattgagttgtttagaccacttacatttaatgagtgtatatatatgtgttttcatatggttatgtttaaa

SEQ ID NO: 18036 - DNA, 201 bp, Homo sapiens
ctgcctcaaactgttggggaaatgactgctccaaagctcagcatccagtggcctttcatgaaatcccagtctcgcatctttccctctgctgttgttagtartaacgtcatatgacatatttgtttggtggatctcatccatttctatttcgctttccttactctaagctaggtgcctctatttaccttttaggcaactctc

SEQ ID NO: 18037 - DNA, 201 bp, Homo sapiens
atcgtgccattgcactccagcctgggcaacaagagtgaaactgtcccaaaaaacaacaacaacaacaacaacaacaacaacaacaacaacaacaaaacaaaccagaaagattctatcagactgctccaaaatagtgtttcagctcacagtttatatacaggttcagtgcatataaaatcacatcaaagtttgggtgcaaga

SEQ ID NO: 18038 - DNA, 201 bp, Homo sapiens
tctcctctgtaaaataactgaatagtatctgcctcaaactgttggggaaatgactgctccaaagctcagcatccagtggcctttcatgaaatcccagtctygcatctttccctctgctgttgttagtaataacgtcatatgacatatttgtttggtggatctcatccatttctatttcgctttccttactctaagctaggt

SEQ ID NO: 18039 - DNA, 201 bp, Homo sapiens
gatcgtgccattgcactccagcctgggcaacaagagtgaaactgtcccaaaaaacaacaacaacaacaacaacaacaacaacaacaacaacaacaaaacaaaccagaaagattctatcagactgctccaaaatagtgtttcagctcacagtttatatacaggttcagtgcatataaaatcacatcaaagtttgggtgcaag

SEQ ID NO: 18040 - DNA, 201 bp, Homo sapiens
agcagctctctgcctcagcctcctgagtagctgggattacaggcgcctgccgccacgcctggctaaatttttttttttttttttttgtatttttagtagasacggggtttcaccatcttggccaggctggtcttgaactcctgacctcatgatccacccacatcggcgtctcaaaatgctaggattacagacgtgaaccac

SEQ ID NO: 18041 - DNA, 201 bp, Homo sapiens
gcaggtgcatgccaccacacccagcttactctttttttgattagcaaactaatgcatattcattaaggaaaaaaaagaaaatcatttagaattttaccttycataattaaccaaaatattaagttgaatatactgtttctttctagtcctttgctaattaatagtttattcaattcatataatgcataccactttatagat

SEQ ID NO: 18042 - DNA, 201 bp, Homo sapiens
agatcgtgccattgcactccagcctgggcaacaagagtgaaactgtcccaaaaaacaacaacaacaacaacaacaacaacaacaacaacaacaacaaaacaaaccagaaagattctatcagactgctccaaaatagtgtttcagctcacagtttatatacaggttcagtgcatataaaatcacatcaaagtttgggtgcaa

SEQ ID NO: 18043 - DNA, 201 bp, Homo sapiens
tataatgcataccactttatagattctttaaaagattgtcttgagcatttattatgccattaagtaatctttgaaagtgtgatttttctacccaaagttcrgtacattcatatgatgaaatatataatcattagacatttacgttttcttttttttttttttgctattataataacattaagataaatatctcttatgatt

SEQ ID NO: 18044 - DNA, 201 bp, Homo sapiens
aagatcgtgccattgcactccagcctgggcaacaagagtgaaactgtcccaaaaaacaacaacaacaacaacaacaacaacaacaacaacaacaacaaaacaaaccagaaagattctatcagactgctccaaaatagtgtttcagctcacagtttatatacaggttcagtgcatataaaatcacatcaaagtttgggtgca

SEQ ID NO: 18045 - DNA, 201 bp, Homo sapiens
ttgttttaggtatttggtgtggcactcagtaattagcaaggtcattgtcacttggcatggctgcccttgccaggagccagctgggagtgtctttttcccaygtgttttctgtggtagtcatcatggccacctgtcaaccagaagtaaatgcagccagaggttacttgcttggctggcctctgaagccaggagcccttttaa

SEQ ID NO: 18046 - DNA, 201 bp, Homo sapiens
ccaagatcgtgccattgcactccagcctgggcaacaagagtgaaactgtcccaaaaaacaacaacaacaacaacaacaacaacaacaacaacaacaacaamacaaaccagaaagattctatcagactgctccaaaatagtgtttcagctcacagtttatatacaggttcagtgcatataaaatcacatcaaagtttgggtg

SEQ ID NO: 18047 - DNA, 201 bp, Homo sapiens
agattttttagggaatatcagtttagtaaaacttatttttttgtaagcggactccttttgtatcagaattcctttcctttaaaaaatatttttatatttaytattattttttaagtagagatggcatcttgctatgttggccaggctggtctcgaacccctggtctcaagtgattgtcctgccttggcctcggagagtgtt

SEQ ID NO: 18048 - DNA, 201 bp, Homo sapiens
ctcctgtctaactgtaaatatgtatcctttgatcaacatcttcccaactccctctccccacaaccaccccagcctttggtaaccaccactttgctctctayttctgtgggaaaaacttttttagattttgaattaccactttttaagcatcctgtttttgtttgaataagtgcaatatattcttctcgatgttactattgt

SEQ ID NO: 18049 - DNA, 201 bp, Homo sapiens
tcgagtgttagctgccctcaaattaaaaatatctagtagcattcctctgaattcactgtggcaccccaaggttcctgggggcacagtttgggaaccagagycttacagtatttctggtttctggctttacttcagttttgttttctttcatctcattgactcttcttccccagttcctacttttatttcttggttccagct

SEQ ID NO: 18050 - DNA, 201 bp, Homo sapiens
tcttagtattctgggaaaagacgtctatagtgtgacttttaaaatagcaggacatattttgtccttcaaatatattgttattaataagattttttttttttgagatggagtcttgttctattgcccaggttggagtgcagtggcacaatcttggctcactgcaacctccacctcccaggttcaagtgattctcctgtctta

SEQ ID NO: 18051 - DNA, 201 bp, Homo sapiens
ctggagtacagtagcgatccttgcttactgcagcttcaaactcctgggctcaagggattctcccactttagcctcgtgtgcagctaggactatagtcaagygccgtaacgtctggctaattaaaaaaaaaaaaatttgttgttgttgttgagatggggtctcattatgtttcccaggctggtctgggactcctggcctcaa

SEQ ID NO: 18052 - DNA, 201 bp, Homo sapiens
tgggttaaacatttcctggtttattggaggcagatttccttgggccagcaagcattgaaactcccacagtggtgtcatgtgatggttctccagcgaagcaytttggatatggtgacagctgctttagtttaagtatctggaacatctaatgtgggagaacttggctaagtgatgtgagaagttaagagaggagtctgaagt

SEQ ID NO: 18053 - DNA, 201 bp, Homo sapiens; identical to SEQ ID NO: 4328

SEQ ID NO: 18054 - DNA, 201 bp, Homo sapiens
accagcctgatgacatggaaaaaccccatctctacaaaaaaacaaacaaacaaacaaaaaacaaaagttagttgggcatggtggtgcatgcctcttgtccsagctacttggaaggctgagttggaaggatagcatgaggcctgtaggtggaggctacagtgagctgtgatcgtgccactgtactacagcctgggtggcaga

SEQ ID NO: 18055 - DNA, 201 bp, Homo sapiens
atcttactgtcttttttatgatacagcaaagtgaagactgaggatcctgagtgtgcatagtgcatgcatgttatgcgttatatgtgtatgcatacatatgkgtatatatatagttttacaagtttaaaataatatcagtgacttgaaaattgtaagggcttaccagataatctctttgtaggccttggagtagcattgttt

SEQ ID NO: 18056 - DNA, 201 bp, Homo sapiens
agtcatcaagaaatgctgatgggttacttcagaattgtttcagattaaaggacagcctggtgtcactctgtgactatggtaatggcatagtagggaatacwgcttcccactttgctatctctaggttaggagaaccaataacagttcacccaaaatatccacatttcttggaggcttatcctttgcgtattcactgaagaa

SEQ ID NO: 18057 - DNA, 201 bp, Homo sapiens
ctctaggattttgggggagaaactttatcttaaattattctaggtatgaaatcatttacaaatgtaatttttattttaacatggtgggagtgagaaatacrgaccactaaagatgctcacatccttatccctggaacaaaaagatacttttcagatgtgactaagttaaaggccttgagatagggaggttttatgctggat

SEQ ID NO: 18058 - DNA, 201 bp, Homo sapiens
ccattttatctaaattgttgtatatctgtaatagttttctaaagtttttagaataaatttgtcctttccaggtttcagcattgatggtttcttctttcctyctttattgcttttcattcatctattctgttttggagacgaaggctttaaaatctttacccacgtagcttcccccagctacctctgagaagtctgttttat

SEQ ID NO: 18059 - DNA, 201 bp, Homo sapiens
aagtctagctaattaacaaatgcattacctcacatagccaccatttgtttgcggtaagaacagttaacatccactcccttggcattttccaagaataccaygtatcatcattatctatagtcactgtcctacacgatggatctgaccttattcctcctaactgcaatagatctcctgtctaactgtaaatatgtatccttt

SEQ ID NO: 18060 - DNA, 201 bp, Homo sapiens
aatagccatattaatatttttgtatattttataccatttgataactcttactaggaattagtagaagaaaataacatctctctctctcaatagttaatacscaactcttcattttcccttttgctttggttaccagagagctcagagtaaaattttgcactcagttttgaaatacctatttcccttgcttactttaatcca

SEQ ID NO: 18061 - DNA, 201 bp, Homo sapiens
taaacaacaaaaacaaatgagaatttgtaaaatataaaaatcatagtaacttagcatccataataaaatctctattagtgtttgtaagtaccaagtctttycccctccatatttagacatataatttattcaattattgattagaaattataggtaaaaatcatccaaatcatgcaaattctgaaaaactagaaatagcag

SEQ ID NO: 18062 - DNA, 201 bp, Homo sapiens
ccaccatttgtttgcggtaagaacagttaacatccactcccttggcattttccaagaataccatgtatcatcattatctatagtcactgtcctacacgatrgatctgaccttattcctcctaactgcaatagatctcctgtctaactgtaaatatgtatcctttgatcaacatcttcccaactccctctccccacaaccac

SEQ ID NO: 18063 - DNA, 201 bp, Homo sapiens
aatagaattctaggttgtcaactgccttcctcattgcttcattgtcttctagctttcagggttgctgttgaaaagtccagagactttctgattcctaatcytttgcttatgagcttccctacctgctttttgatattttataggacctttttaatatccttacagttaaaaaaacacaactcatgatgacagatgctgtgt

SEQ ID NO: 18064 - DNA, 201 bp, Homo sapiens
tcacatggaagtgtgttgcctgtgatctgaatttttattcctaaataaattagagattaaaatctgtggtttccagttcaagggtagggtaccaaaaaaawttgtctgatgtgggtttttatgtcattaagaaaggcggcaacagctaagtattattggcttttcccttttcttggttgcactggtccttttcccttatct

SEQ ID NO: 18065 - DNA, 201 bp, Homo sapiens
taggtcatgattttgactaggccattattcagtgttaataggatgatgaccttgttaatgctgttcatacctgagccatgtagaattctatgaatcctttycctcttctgcaaattttttgttctatttaaactaattgttcttttgatgtttgcttagttttctatgtgctttttactcattcagtcctaaatgctcttg

SEQ ID NO: 18066 - DNA, 201 bp, Homo sapiens
gttttcttccaatgatgagatgctataaattttatgaacaacatacttaaaatagctttaagacactctacacgaattcgaggctgaaataagactagttaaactataatcagtcaattgattattaaaaccaagcacagacttacacccactacatacacttatgctcacaaatgataaatgccaggatagtttggattg

SEQ ID NO: 18067 - DNA, 201 bp, Homo sapiens
cccacatcctctccagcatctgttgattcctgactttttaatgctcgccattctaaatgatgtgagatggtatctcattgtggttttgatttgcatttctstaacgagcagtgatgatgaacattttttcataagtttgttggctgcataaatgtcttcttttgagaagtgtctgttcatatcctttgcctactttttgat

SEQ ID NO: 18068 - DNA, 201 bp, Homo sapiens
ccgtgagccgctgtacccggccaagaacattttaaagtttttttcataccttagcttatatttgaaaagaagttattttatcttccaactacaaagttatyacaatattgacaatatacacactcagcactagttaatctgccctcaacaaccttaaaaaaaaaaaaaagactttattttggcctatccaaaagaatgaat

SEQ ID NO: 18069 - DNA, 201 bp, Homo sapiens
ccatttagccaggacggtctccatctcctgacctcgtgatccgcccgcgttggcctcccaaagtgctgagattacaggtgtgagccaccatgcccggctgygattttacatttctgtttgttttgtggaactctcaacgtctctttggcatcaggaaagccagacttcattttgtttcatgtgtgacattgtttataattt

SEQ ID NO: 18070 - DNA, 201 bp, Homo sapiens
agttttcttccaatgatgagatgctataaattttatgaacaacatacttaaaatagctttaagacactctacacgaattcgaggctgaaataagactagttaaactataatcagtcaattgattattaaaaccaagcacagacttacacccactacatacacttatgctcacaaatgataaatgccaggatagtttggatt

SEQ ID NO: 18071 - DNA, 201 bp, Homo sapiens
aacatatgtgtgtatgtgtctttatagtagaatgatttataatcttttaggtgtatacccagtaatgggatggctgagtcaaatggtatttctagttctaratccttgaggagttgccacactgtgttccacaatggttgaactaatttacactcctaccaacactgtaaaagcattcctattttccccacatcctctcca

SEQ ID NO: 18072 - DNA, 201 bp, Homo sapiens
aagttttcttccaatgatgagatgctataaattttatgaacaacatacttaaaatagctttaagacactctacacgaattcgaggctgaaataagactagttaaactataatcagtcaattgattattaaaaccaagcacagacttacacccactacatacacttatgctcacaaatgataaatgccaggatagtttggat

SEQ ID NO: 18073 - DNA, 201 bp, Homo sapiens
atgtccctgaaaaggacataaactcatccatttttatggctgcatagtattccatggtgtatatgtaccacattttctttattcagtctatcatttgatgkgcatttgggttggttccaagtctttgctattgtgaacaatgctgcagtaaacatatgtgtgtatgtgtctttatagtagaatgatttataatcttttagg

SEQ ID NO: 18074 - DNA, 201 bp, Homo sapiens
ctattgcatgctacatgtgtgtatacatgcatttaaatgtatatagtagtattatataattgatatcatactcaaggttcccttatcctttaaatttaacrtctaacattttaccataaggttatatcactgtatacttacctgtttgtttgattttagtcattcatgttattaccatgattttcatattgataatttgat

SEQ ID NO: 18075 - DNA, 201 bp, Homo sapiens
gaagttttcttccaatgatgagatgctataaattttatgaacaacatacttaaaatagctttaagacactctacacgaattcgaggctgaaataagactagttaaactataatcagtcaattgattattaaaaccaagcacagacttacacccactacatacacttatgctcacaaatgataaatgccaggatagtttgga

SEQ ID NO: 18076 - DNA, 201 bp, Homo sapiens
gcccatttttttcccattatgatttgatttattttccccatttgatttttttaatgggatttcttttaatttttaaagcttattaacttaaacctgttttkcacttatcatttacttcatagttttcctggaatttgtcacacttttttaaattatggtaaaatacacataacataaaatttaccctcttaaccatttaaa

SEQ ID NO: 18077 - DNA, 201 bp, Homo sapiens
attgacagaagtgagaagtaagacactcagaagtaagcaagagaggaaaagaaggcacactcgttcaatttttcttctttctcagggtagtcagtgtttcrtttttgatgataacgtatggaaaaatagctaaaatctacatctaaggaatttaaaccattcatatccatttacatcttcataattccagaaatttattct

SEQ ID NO: 18078 - DNA, 201 bp, Homo sapiens
attgcaataaagtgagtcacacaaattttttggtttcctggttcatatgatagttatgtttgtaatatagtctattaaatgtgcaatagtagtatgtcttwaaaaagtatgtgcataccttaatttaaaaacagcttatttctttaaaaatgctaacagtcatctgagccttaagtcataatcttttgaaaatattttttc

SEQ ID NO: 18079 - DNA, 201 bp, Homo sapiens
ttggttattttggtaagtgtcaggatagcattcctctccatcaggaccacttctaaagtgaaaactatacagctgggaatacagtctttgaaattaagacrgtgtttacttatataagttttggccagtttctccagcttctagaatacctgacctggcccatcatgacctgataaaatacatgtaaaaaggcgcaattgt

SEQ ID NO: 18080 - DNA, 201 bp, Homo sapiens
gataactgctcattgcagccttgaactcctaggctcaagcaattctcttacctcagctacctgagtagttgggaccacagatgtgcaccaccatgcctggytaatttaaaaatttttttgtagagacagggtctcgctatgttgtccagcctggtcttgaacacctgggctcaagtgatctttctgccttggcctctcaaa

SEQ ID NO: 18081 - DNA, 201 bp, Homo sapiens
aaatttcaaatagccagatatacaagacctttgtgaccttggtcatcttatcttctgctacttctgtttctgatgttacaataaataaccacacttcttcwtcctttttttttttttttttttttttttttgagatggagtcttgctctgtcactcaggctggagtgtggtggtgtgagcttggctcactgcaacctctgc

SEQ ID NO: 18082 - DNA, 201 bp, Homo sapiens
ttgtggagacagagtttcactatattgccctggctggtctcaaactcctgggctcaagcaatcctccggccttggcctctcaaagtgctggaattacaggyatgagccaccatacttggctgaaaattacttctcatgttagaaacatgcacttactcttagaatgaaatatttttcaagactcatctgtggttggaagag

SEQ ID NO: 18083 - DNA, 201 bp, Homo sapiens
cctagctttaccatcaactgagaccaacccagattcaattctgcttttgtggactaccaggatactgagtgtgtatgtgtgtgtgtgtgtgtgtgtgtgtgcgcgcgtgcgtacatgcatgtgtgtgtttgtgtttgttaaaacaataacaattcggcaagcataggataaggcattggttttcactgtttactgtcatca

SEQ ID NO: 18084 - DNA, 201 bp, Homo sapiens
cagtgttcctgaaaataaaaaaatctgatcgcctgccctcctttatccattactaataaacagacaaaccaaaagccactaccaagtagtgaaatggatakagctaaaaatcaaatatttgaccttgaaaataagtccacgatatcacccaggataccaaataaaaagtaaagtgttaaaaatacaaatgaaaaattaaga

SEQ ID NO: 18085 - DNA, 201 bp, Homo sapiens
tttcctactttgtatacaaacacatcagaaaaccatctttcaaggataactttcttatgttgaggcagttttaaatcacaatcattcaagcactcagtatygattttgattcattctcccaaaggtgcttgaattttaagctacttgaaaccttaaataatggaagatgtctctgttaagagaactctctgctgttgaaca

SEQ ID NO: 18086 - DNA, 201 bp, Homo sapiens
tcctagctttaccatcaactgagaccaacccagattcaattctgcttttgtggactaccaggatactgagtgtgtatgtgtgtgtgtgtgtgtgtgtgtgtgcgcgcgtgcgtacatgcatgtgtgtgtttgtgtttgttaaaacaataacaattcggcaagcataggataaggcattggttttcactgtttactgtcatc

SEQ ID NO: 18087 - DNA, 201 bp, Homo sapiens
tgcactctagtcagggcaacagagccagaccctctctctaaataaataaataaataaataaataaatactttatttaataaatgaagcaaaacaaaaagawcactgatcacagatcaccataacagatataataatgaaaagtttgaaatattgtgaggattaccaagatgtgacacagacaccaagtgagcacatgctgc

SEQ ID NO: 18088 - DNA, 201 bp, Homo sapiens
ttctgcctcagcctcctgagtggctgggattacaggcatgtgtcaccacgcccagctaaattttttttttttttgagatggatttttgctcttgttgctcmggctggagtgcaatggtgcaatcttggctcactgcaacctctacctctcaggttcaagcaattctcctgccgtagactccggagtggctgagattacagg

SEQ ID NO: 18089 - DNA, 201 bp, Homo sapiens
atcctagctttaccatcaactgagaccaacccagattcaattctgcttttgtggactaccaggatactgagtgtgtatgtgtgtgtgtgtgtgtgtgtgtgtgcgcgcgtgcgtacatgcatgtgtgtgtttgtgtttgttaaaacaataacaattcggcaagcataggataaggcattggttttcactgtttactgtcat

SEQ ID NO: 18090 - DNA, 201 bp, Homo sapiens
acttccttcatccttaagttggccttcaaagcatatatatccaatgtcactccatagaaactttggttttacaagtaaatatatagttcatttactttatrtgatatatttgttatgttttgtatttgctgactatatgcattttatgtggaaaagcattttaatttaaaaagtttcattctagaagaaaatcagctgttt

SEQ ID NO: 18091 - DNA, 201 bp, Homo sapiens
tgcagtattcagtttctttcctgctctctcgatgttactccaagtcaggagttctcatgactccactgaactgtcatcagtgtcctccttgccactaaatwcattttttcagttttcaggtattttttacttttctcattctctccagtatccagtctgttagccatacatatcagctgtatggtcaaaatgtgtctatga

SEQ ID NO: 18092 - DNA, 201 bp, Homo sapiens
cgcttcaacctgggtgacggaggttgcagtgagccaagatcatgccactgcactccagcctgcgtaatagagcgagaccccttctgcaaaaaaaaaaaaawaataaaaaaaagcaaaggcatattttgttttaaatgcatttcattgtccagtgtacccaaccatccatatatgacctagcacttctcaaggacaaattat

SEQ ID NO: 18093 - DNA, 201 bp, Homo sapiens
tccctaaagagttccctccctggcttatctattttcctcaaacatctcaactaggtcaggccctgtcattaaaaaacaagtgggtctcccctagtttcccrgctaagaagatctggcctctgccttaggccctgactagggggccccgtgctgcaataactggttgtgcagcccacccagcctagtggccaggccccagtg

SEQ ID NO: 18094 - DNA, 201 bp, Homo sapiens
caaagggtgtgtttgtctggcttttgatacatattgccaaaatcatccttcagggacaggatgagatttttccatactgaaacccctgatcacagtgctcraaagtgcagcaacttcattaaactgaatattataaatttagaaagattatcaatgtgttgggggcaatggcattttatttttaaaattagattatttaat

SEQ ID NO: 18095 - DNA, 201 bp, Homo sapiens
cccatttgctatcatgagaacagcacgggcaagaccctcccccatgattcagtcatctcccatggggtcccttccgcaacacatgggaattatgggagctrcaagatgagatttagatgggaacatagagccaaactatgtcaggtaggaaggcaggattcaggaaaataaaattctctgtctgattaaagagttcactaa

SEQ ID NO: 18096 - DNA, 201 bp, Homo sapiens
gtttattatttgcaggtgtagaagctcttaagttttagtttgtagtgtttctaaaagtgaggcattctcttgaactgtctttgatgatttgatgttcatayattatgtctgctgtgaatttggaaagcactgcagaatcactttttcaaagatcagaggaatgtgggatagaataaattaagtttctggctaatatttggt

SEQ ID NO: 18097 - DNA, 201 bp, Homo sapiens
gtgggtatttgtgcttgtgacatttgctggtatatggtcacagtgtaatgatgtatgtgtaagttcagaagcagcatagaggaggtggtgattaatctggrtggggaataggacccataaaaggcttcattgaaaggctgtgactggaaagatgagtagatatttgccaggcatagaatttggacaagggagggtattcca

SEQ ID NO: 18098 - DNA, 201 bp, Homo sapiens
agcaagacagttcagacaagcagctcactgctggctctgtccaagcatagacattccacattctttgtggagtgctgaattagatacttttcaggatgttycctatgaatattacttcatgcaaaaggatatttttgataagaactgagtagcagtaagttcaaggttattaagctcaatactgcatcctctctttgtggt

SEQ ID NO: 18099 - DNA, 201 bp, Homo sapiens
aagaatgggtaaagattagaattctcttgagacttttttttttttttttttttttttgtgacggagtctcgctctgtcacccaggctggagtgcggtggcrggatctctgctcactgcaacctccacctcccgggtggttcaagcgattctcctgcctaagcctcttgagtagctgggattacaggtgtctgcccccacac

SEQ ID NO: 18100 - DNA, 201 bp, Homo sapiens
gatatagttttaatttactgtaggactagtggcagtgagtctcatattgctgtcatataaaaggtaaaccttccagaagaactttggaaatttcagtagcytaaagaccacgctttgagaaactcgtaaaggtttgtcatagaggttttaaaagtctgatcaaataattttaagctttagttgcctactaaaaagtaggat

SEQ ID NO: 18101 - DNA, 201 bp, Homo sapiens
tgggggaagttgcagatatagttttaatttactgtaggactagtggcagtgagtctcatattgctgtcatataaaaggtaaaccttccagaagaactttgraaatttcagtagcctaaagaccacgctttgagaaactcgtaaaggtttgtcatagaggttttaaaagtctgatcaaataattttaagctttagttgccta

SEQ ID NO: 18102 - DNA, 201 bp, Homo sapiens
attttaacaaggacaaggcttatttcaattctttaggttatttttctttagcagattaaagtagttttatcggttatcaagcatttgttgagcgtttactrtggcttctcttgataggtggtcctggggagataggaaggaaatggtgcaaatttcaacaatacccactggggtgaacaaaaaatccctgaaacaccccat

SEQ ID NO: 18103 - DNA, 201 bp, Homo sapiens
tctgtaatcagcatatgataaggatggtgtgttcttactaagagaataacacaactgaaacagaattgccttttgttaaggggatgctttgccttcttggwctacgattgtggggagaaggattattgtcaactaagtgaggcattcattctgtacccactatttattgtagttccacagagaactgcttgctttactttc

SEQ ID NO: 18104 - DNA, 201 bp, Homo sapiens
ttaggagtggaattgctggatcatatgaaaatgctatttaatattttgaggaactaccagattttcacagtggctgcaccttttatattcccaccagcaaygtataagggttccaatttctccacattcttaaccaacacttgttattatgtcttttaaattatagccatcctagtagttatgaagtgtgaatttggcttt

SEQ ID NO: 18105 - DNA, 201 bp, Homo sapiens
aatcctagctttaccatcaactgagaccaacccagattcaattctgcttttgtggactaccaggatactgagtgtgtatgtgtgtgtgtgtgtgtgtgtgtgtgcgcgcgtgcgtacatgcatgtgtgtgtttgtgtttgttaaaacaataacaattcggcaagcataggataaggcattggttttcactgtttactgtca

SEQ ID NO: 18106 - DNA, 201 bp, Homo sapiens
tcactccctatttatcctcttccaaactcctgaaaaacacgaatctactttctttctcatagatttacctatcttggacatttcatgtaaacaggcttatrgatttgtggccttttttgattggcttttcacttagaaaaaaatgcacaatactgcatgttgtagtatgtatctttctttctttttttgttgctgctcaat

SEQ ID NO: 18107 - DNA, 201 bp, Homo sapiens
tatgctggatgcttgctttggagaaatatgcagcatctaagttatatataatccacattttataaaaacccattggatgagggtgatattattttaaaaarattttaaagggctaaggaatcatatggaagatgaattcaattttaatgactacaccaagtttaaggaatattttataagaaatgggcttatgtgaaagag

SEQ ID NO: 18108 - DNA, 201 bp, Homo sapiens
gcgtgagccacggcaactggcctaaatcttttaagactttatatcatagtttgcagtttgacaacacttggaattaattttttttatcctttcagattcascaaacatggaaaaatatgattatcttatgtttatatgctggatgcttgctttggagaaatatgcagcatctaagttatatataatccacattttataaaa

SEQ ID NO: 18109 - DNA, 201 bp, Homo sapiens
gtagttctgatgcataagaacttttccagcatgctaagggggttgaaaggtactgtattagtttgttttcacactgctgataaagacatacccgagactgrgcaatttacaaaagaaagaggtttattggacttatggttcaacatggctgggaggccacacaatcgtggaggaaggcaaggaggagcaagtcacatctta

SEQ ID NO: 18110 - DNA, 201 bp, Homo sapiens
ctggtcttgaactcctgacctcaggtgatccacccacctgggcctcccaaagtgttgggattacaggcgtgagccacggcaactggcctaaatcttttaaractttatatcatagtttgcagtttgacaacacttggaattaattttttttatcctttcagattcagcaaacatggaaaaatatgattatcttatgtttat

SEQ ID NO: 18111 - DNA, 201 bp, Homo sapiens
gaaataatccccaaataatgaaaattcaacaatacaaagtgatgcagagacaatgatccttgacaacagtagtatagatatctgctcattaaaaaaaaaaatcaaaggccttattttagtctatatctagttatttttttctacttttcaatgtttctccctatctttctagaattagttctccagttgtctttttccttt

SEQ ID NO: 18112 - DNA, 201 bp, Homo sapiens
tcttttctattataggtgtttaatgctatggttttcctctttggcactggtttagtgacatcccacaaattttgatatgttttgttttcctcttcatttarttcaaaatattcaattcaaaagattttttaattacctcctttgacttctttgatttataaggtatatacagatacattacttagtttccagcatttgatg

SEQ ID NO: 18113 - DNA, 201 bp, Homo sapiens
ttacaggtgtctgcccccacactcagctaatttttgtatttttagtagagacagggtttcaccatgttggtcaggctggtcttgaactcctgacctcaggkgatccacccacctgggcctcccaaagtgttgggattacaggcgtgagccacggcaactggcctaaatcttttaagactttatatcatagtttgcagtttg

SEQ ID NO: 18114 - DNA, 201 bp, Homo sapiens
aacagaggtcatagtgagccgagatcacaccactgcactctagtcagggcaacagagccagaccctctctctaaataaataaataaataaataaataaatwctttatttaataaatgaagcaaaacaaaaagatcactgatcacagatcaccataacagatataataatgaaaagtttgaaatattgtgaggattaccaag

SEQ ID NO: 18115 - DNA, 201 bp, Homo sapiens
tttgagacttttcttcttttctattataggtgtttaatgctatggttttcctctttggcactggtttagtgacatcccacaaattttgatatgttttgttktcctcttcatttagttcaaaatattcaattcaaaagattttttaattacctcctttgacttctttgatttataaggtatatacagatacattacttagtt

SEQ ID NO: 18116 - DNA, 201 bp, Homo sapiens
actgggtatatatccaaaggattataaatcattctactataaagacacatgcacacgtatgtttattgcagcactatttacaatagcaaagacttgaaacmaacccaaatgcccatcaatgatagactggataaagaaaatgtggcacatatacactgtggaatactatgcagccataaaaaaggtgagttcatgtccttt

SEQ ID NO: 18117 - DNA, 201 bp, Homo sapiens
tctttctcttgctctttctcccaaatctgcagcaacttcctccactgaagtcttgaacccttcaaagtcatccatgagggttggaatgaacttcttataarctcctattaatgttgatattttggcctcctactatgaatcatggatgttcttaatggcatctagaatggtgaattctttccagaaagttttcaactaact

SEQ ID NO: 18118 - DNA, 201 bp, Homo sapiens
tgaatcagttggttttttcagtttatatttttgcttatggatatctaatagttccaccatgattttaaaattgtgacttcatatttaaaagtggagaaaakgctatactacactgtcttaatcatttattatacttttaatgtctctgacagggacaatagtaatgacccctctttcaattttattattagtcatttatat

SEQ ID NO: 18119 - DNA, 201 bp, Homo sapiens
gaggttttaaaagtctgatcaaataattttaagctttagttgcctactaaaaagtaggatgcagtacaagtttgtcctttacttggtaaaaaaaaaaaaaagtctttttctaattaagaatttattttcaccttagataattttattggcatgcctttttgcatgcaagatagaaaaaagacaagtttattcttagttttc

SEQ ID NO: 18120 - DNA, 201 bp, Homo sapiens
atttttttagataggatcttcctctgtcacccaggctggagtgcagtggcacagtcttggtgcattgtagcctctacttcccaggctgaagcaatcctcccacctcagcctcccaagtagctgggccacaggtgtgaaccaccatgcctggcttttgtattttgggtagaaatgacatctcgctatgttgcccaggcttgt

SEQ ID NO: 18121 - DNA, 201 bp, Homo sapiens
ggtgggaggccctgttctctattctgttttgtcttcaatgcacgtttctggagagctacacgttgtcacagagtcaggggctttgggaaagtatgttgacragcagaaatgagcaaatatgtcttcttacatttgttactttggctcacaggtatcttatctaaggaaactttgcttacgcaaagtacacaatgattttct

SEQ ID NO: 18122 - DNA, 201 bp, Homo sapiens
gggaatgctcctggaaggttaggatctggaaggatcctgggagataaaccaagcctagaagaggtaaaaaagggatcaagaggctttctatctccagtttygctactcctgggtaggtcaaagtgcctctctttttacatctggaaaataagaataagaactgatatctggttggtaattctagttttcatttactatgtg

SEQ ID NO: 18123 - DNA, 201 bp, Homo sapiens
ttagaatggaatctctagcccttctccttggacactgtttgcgtcatgaaaaaaactgtaatatggagacgctgtctccagcaagaaatttatggctatayttcaatagtttgttcaaatttagaccatgccagcttctatagttgatgaaagcctgaatatccaaacactatctccattaataaaatctcaatgttccca

SEQ ID NO: 18124 - DNA, 201 bp, Homo sapiens
aacaacaacaaaacaaaccagaaagattctatcagactgctccaaaatagtgtttcagctcacagtttatatacaggttcagtgcatataaaatcacatcraagtttgggtgcaagagtctatctagttatagattacagaagtgtaatcactaaccctgtcaggtgttctcttatgtgtaggaaaaggcaaggactaggg

SEQ ID NO: 18125 - DNA, 201 bp, Homo sapiens
attttcttcccctatgcctaggtggttctctttgaccaacccttaactgccctgattctgaaattctgctctaattgaaggatattcctgggtctttggarggagaaatggttcaggggcagaggaaactttttttccccccatctcaggagcacttaactgactgcctgctatataccaggctttgtgctagttttacta

SEQ ID NO: 18126 - DNA, 201 bp, Homo sapiens
tgtatacctatgtaacaaacctgcacgttctgcatatgtaccccagaacttaaagtataataataataataataataataataataataatataataatawgaccttgaaaacagatatgcaactcactgctgagatcctttacttttctatcttccctagacaactttaatccctaagtaatattcccatgacgtctcag

SEQ ID NO: 18127 - DNA, 201 bp, Homo sapiens
tccagagggccaggaagatggaagaaaacaagcaacagaggatgcttggaggagaaaaattcttgagctgggagctcatttcctcttttttttttttttttcctttcctcaagggactcaataatacttcccccacctcagatcaatctcttgttacctttattatttaaagcttgtgagtttgcttagctaatgcactag

SEQ ID NO: 18128 - DNA, 201 bp, Homo sapiens
gcacgtgtatacctatgtaacaaacctgcacgttctgcatatgtaccccagaacttaaagtataataataataataataataataataataataatataawaataagaccttgaaaacagatatgcaactcactgctgagatcctttacttttctatcttccctagacaactttaatccctaagtaatattcccatgacgt

SEQ ID NO: 18129 - DNA, 201 bp, Homo sapiens
aagtaatctttgaaagtgtgatttttctacccaaagttcagtacattcatatgatgaaatatataatcattagacatttacgttttcttttttttttttttgctattataataacattaagataaatatctcttatgattccttcctcacagagtaatgaatcataatgacttattgttaaatgttcttcagaaagcttgt

SEQ ID NO: 18130 - DNA, 201 bp, Homo sapiens
tttacaggttgcctagttacaatagtaatatacccaggtagccaaaaattcaatgcgatttgatagtggatctcattcaaagggatatttgccataaggtygttataattaagcagctacaactcctgcctctcaggactttttttaaggctaagttccagtgaaaacttcccgcattgccaagtcaatcctaagccaaaa

SEQ ID NO: 18131 - DNA, 201 bp, Homo sapiens
taagtaatctttgaaagtgtgatttttctacccaaagttcagtacattcatatgatgaaatatataatcattagacatttacgttttcttttttttttttttgctattataataacattaagataaatatctcttatgattccttcctcacagagtaatgaatcataatgacttattgttaaatgttcttcagaaagcttg

SEQ ID NO: 18132 - DNA, 201 bp, Homo sapiens
ctatataagctttaaatttggacctgtgccttctttttcatcatcttttctcctttttcttttagttcacagccatgaatgaaccacagtgcttctacaaygagtccattgccttcttttataaccgaagtggaaagcatcttgccacagaatggaacacagtcagcaagctggtgatgggacttggaatcactgtttgta

SEQ ID NO: 18133 - DNA, 201 bp, Homo sapiens; identical to SEQ ID NO: 4342

SEQ ID NO: 18134 - DNA, 201 bp, Homo sapiens
taaaccaaggagaaagtctgaagatagaactttaaaaaaccactgttatttccaggtaaaatatttaatttccaaagaaggttagcatatgttaaaagctwaatcttgttctgcatttgttggctacatttatatgaatttttatatggaagttcctatccagggtatttattagtcattttggaagtttttatccagggt

SEQ ID NO: 18135 - DNA, 201 bp, Homo sapiens
atgtgtctccctgaaattcatatgttgaaatctcagtccccaaggcgatggtattaggaggtgattaggtcataagggctccgccctcatgaatgagattmggggccttataaaagagaccctacagtcggtgtgttgactcacacctgtaatcccagcactctgggaggctgaggcagaagatttgcttgagctcaggag

SEQ ID NO: 18136 - DNA, 201 bp, Homo sapiens
gctgaatcaggaacattacatgactttctttggaggggaaggaagccagtggttagttttaggtataaaagagatcttcaagcacggtctttttaacttcytgtttctgtattatttcaggaaatagaggcagctttccctacattagattgttagcacagaataacagtagaagggttcagaaatgaagctaaaaggaaa

SEQ ID NO: 18137 - DNA, 201 bp, Homo sapiens
ctggaattgaactcagtgggctttagtgatcctcctgcctcagcctcctgagtagctagaactgcaggtgcatgccaccacacccagcttactctttttttgattagcaaactaatgcatattcattaaggaaaaaaaagaaaatcatttagaattttacctttcataattaaccaaaatattaagttgaatatactgttt

SEQ ID NO: 18138 - DNA, 201 bp, Homo sapiens
tatttattttttttgtagagatggggtctcaccatgtggaccaggctggtctcaaactcctggcctcaagcaattctcctgcctcaggcccacagactgcygggattacaagtgtgagccaccatgcctggctcccttcatattttaaagagaagttacacctacagcgctttcgacttttgatggacacatctttctaga

SEQ ID NO: 18139 - DNA, 201 bp, Homo sapiens
actcaggagactgaggcaggagaatggcgcgaacccgggaggcagagcttgcagtgagccgagatcgcaccactgcactccagcctgggtgacagagcgasagtccaactcaaaaaaacaaaaaacaaaaaaaaaccagttctgatgacatgttaattgtgtgacctagagcagtatatttgacccttctgagcttctatt

SEQ ID NO: 18140 - DNA, 201 bp, Homo sapiens
tggggtggaggaagccatggttcatcatataaaaatgtaaaagcaataagcacagtttcttcagtatcctgggccttgaaaagggaggatggggtaggggracgagagagaaggaagaagttggggtcaagggagtactttttctttcttgaataggaaacctagcatgtttatattctgaggactgggaaatgaggagag

SEQ ID NO: 18141 - DNA, 201 bp, Homo sapiens
tgtgagagctctttttataggaagtgccacacaaatgtaagttatgaatgttttcgcagctgctacttatagagcagtgacccaaattaaaaaaaaaaaaaagtgtggaatgctaagtaaaaaatgtgatgtagtgtagttgcaaaggcgttagctgtattctaattccagatttgccacttactcgttggattgactttg

SEQ ID NO: 18142 - DNA, 201 bp, Homo sapiens
agtcacatggaagtgtgttgcctgtgatctgaatttttattcctaaataaattagagattaaaatctgtggtttccagttcaagggtagggtaccaaaaawaattgtctgatgtgggtttttatgtcattaagaaaggcggcaacagctaagtattattggcttttcccttttcttggttgcactggtccttttcccttat

SEQ ID NO: 18143 - DNA, 201 bp, Homo sapiens
cttttttatttgaaattaaaatttaactgggtatcttgtgttttatctggcaactataacacacacacacacacacacacacacacacacacacacacacattattggctgggaaatacagcattttagatagcaatcaattctatattacatggattttctcctttgtcttataggcttccatattatcctggagttcaa

SEQ ID NO: 18144 - DNA, 201 bp, Homo sapiens
agaactagccagcaagggtactatattgtgttttaggtgtcatccttgaaggatagaataaatcagctgtcgtgttctcagtgaaaagtggaaagaagttktaaaggatctgcaaaatagaattatgagacagaggaaagaaagaaacagacaatctgatctctatcttcatcggccaggtaagatttgaagtgtttaaag

SEQ ID NO: 18145 - DNA, 201 bp, Homo sapiens
tcttttttatttgaaattaaaatttaactgggtatcttgtgttttatctggcaactataacacacacacacacacacacacacacacacacacacacacacattattggctgggaaatacagcattttagatagcaatcaattctatattacatggattttctcctttgtcttataggcttccatattatcctggagttca

SEQ ID NO: 18146 - DNA, 201 bp, Homo sapiens
ggagtttctccatgttggtcagggtggtatcgaactctcaatctcaggtaatctgcctgcctcagcctcccaaagtgctggattacaggcgtgagccaccrcgtccggtggaaagggattcatttctatatgtcagattaacatcctatggagaagaagaagggattgacagtgacgtgtatgtgtttcaggatctgaaag

SEQ ID NO: 18147 - DNA, 201 bp, Homo sapiens
tcatgagaattcccctcctttttctttccctttctcttttttgacacacccacatccattcacatctacctacacaccaagtccacgtataatttgatgtkcgagatggtgcttcatttctatgacatagtatgaaattactattgtgttccagcagctgttggctcgaattatactctgtaaatttttatcccgaatgaa

SEQ ID NO: 18148 - DNA, 201 bp, Homo sapiens
atgttactatttttcattccacttggtttttatattaagtttgtgctctctctctcctctcctctctctctcactctctgtgtgtgtgtgtgtgtgtgtgtttgtgtgtgtgttcagttatattcactgagtcagggcacctctggaatctactctttgacaagaactatctggatgattctgggcaagttactttccctg

SEQ ID NO: 18149 - DNA, 201 bp, Homo sapiens
tatgttactatttttcattccacttggtttttatattaagtttgtgctctctctctcctctcctctctctctcactctctgtgtgtgtgtgtgtgtgtgtgtttgtgtgtgtgttcagttatattcactgagtcagggcacctctggaatctactctttgacaagaactatctggatgattctgggcaagttactttccct

SEQ ID NO: 18150 - DNA, 201 bp, Homo sapiens
tgcccagccaatatttttttctaggttctcttttagtttttcaaatgcagctctcaacactggacttgtattgctgtgtataattggctttttttttttttaaggctggagtcggtccagatttagaattcttagaacttgaaaggatccctaaaaattatatcatccaactcccacatcttacaaatgaagagaccgaga

SEQ ID NO: 18151 - DNA, 201 bp, Homo sapiens
gaaaaatgaaagtaggagtgggcaaaaaataatgccaggaataataaatacatgagaaggagaaaggaaaaatgaaagtaggagtgagcaaaaaatagtgmcaggaataagttcagtgtaaaacagtgcaccttggggttcctgtaattttcttgggtaggtttggcactctagcagtcatcttgaaaaaagaaaggtcct

SEQ ID NO: 18152 - DNA, 201 bp, Homo sapiens
aggttactgcagtaacctggtaaagacagtggaggagaagacccaggaagcatcccagctcaatggcacaggtcatagtgcagggctcacctctgacatgmtggattgtgtagagatgactgatgggaacttaggaatgagctgtcatggtcagatgtagatcccacttatgtaagataggtcaagatggagagacttaac

SEQ ID NO: 18153 - DNA, 201 bp, Homo sapiens
agtctgatttaaatcttttgttttagtaggcagtcatcccatttaggtttagcaagaaaatcctggcctaattttgtgggccgtgcatccaatgacaattrcattttcagagactttgtggtgctattttggtcttcttggtttatctggggctgctagggttcctcctggcgtctgctggtgctacctgaaggggtggag

SEQ ID NO: 18154 - DNA, 201 bp, Homo sapiens
gttgggtaatttttcattctatcctggaatttggctatgctgttaggagactcagagtctgatttaaatcttttgttttagtaggcagtcatcccatttargtttagcaagaaaatcctggcctaattttgtgggccgtgcatccaatgacaattgcattttcagagactttgtggtgctattttggtcttcttggtttat

SEQ ID NO: 18155 - DNA, 201 bp, Homo sapiens
aggatggctgctttaaaatctttgtcaataagttcttcttctgtttcatctctgggttagtgtcagttgtcatttcacagtcaagttgtgattttcctgayttttggtttgttgggtaatttttcattctatcctggaatttggctatgctgttaggagactcagagtctgatttaaatcttttgttttagtaggcagtca

SEQ ID NO: 18156 - DNA, 201 bp, Homo sapiens
tcactgatttgtctctaccacacagctggcttctgaggcttataatgggcaattaggacaggaaggagttacttaagttctttttaaggtaacattaattrgattcatctcttaccacatggtgagggtcatggttattacatttaccattttgggtttggtgtttaacctctttattgtggattggttggtcctggacat

SEQ ID NO: 18157 - DNA, 201 bp, Homo sapiens
atgtttgacaggttatagcctctttaaatgcccttggaatccattaacgcatgtttcatagagttcacacagggtaaagtggtactttggtcagaacatgstttgctgaatgtcactgatttgtctctaccacacagctggcttctgaggcttataatgggcaattaggacaggaaggagttacttaagttctttttaagg

SEQ ID NO: 18158 - DNA, 201 bp, Homo sapiens
aaaaatgccatctaacaatcccatttttattgatcccattgtaattgtaaatgtttgacaggttatagcctctttaaatgcccttggaatccattaacgcrtgtttcatagagttcacacagggtaaagtggtactttggtcagaacatggtttgctgaatgtcactgatttgtctctaccacacagctggcttctgaggc

SEQ ID NO: 18159 - DNA, 201 bp, Homo sapiens
gccagcagcaaatgactactgaacttggactattaacctgccaagttcttgttttaattttgacctttgtataatatcttgtgtattccagtgtgcaatgtactgaatgattcacatacttttgtgcctctttgggttgtttttcaggttgaaataatcattttgaggctataggagctagtgtttcagtgtacatttgcc

SEQ ID NO: 18160 - DNA, 201 bp, Homo sapiens
caaggcctctggaggttgtgaatgggagcagaacaggcagtttggagtttaatcatgattgtggtgtcaaagggcagattggcagaaaggagcatgggagrtatcaggctggtgtgaggggagcccagagggctgactatggtatttaggctgggcattgtgagaattgaccttggatagggctggtgaacaggaaagaat

SEQ ID NO: 18161 - DNA, 201 bp, Homo sapiens
aattatatataattatatattatatattatgatagataaataaacatatattattctgttttaaactgtctcaatcctttttaaagtgattattataaatwttgtaaataataagcaaatatattcttatcaatgatgttgaagaataagtaaacatgttataaagcattttcactccacactttaaaaaatatgctgcat

SEQ ID NO: 18162 - DNA, 201 bp, Homo sapiens
aagagatccgaaagaatggctcggatcattcaagtggtggttggtaagagagagagaaggatgggaaggatgggagtttggggggcttcttgcctgatgtycatcaacttctccatgatggatgtgcaaactggggagttcctttaggggatttaaggcttggaagaggcgccgagagaaatggcagcactgatggcttct

SEQ ID NO: 18163 - DNA, 201 bp, Homo sapiens
tgaaaagtttagacttttatctaacgtgcactcataagcccttaaaacatgtccagtggggaaacagcttgatcaactttgtcttttttttttttttttttgagatggagttggggtcttgctttgttactcaggctggagtgcagtggcatgatcttggctcactgcaacctccacctcccgggttcaagcgattctcct

SEQ ID NO: 18164 - DNA, 201 bp, Homo sapiens
tctacttctacctagaagtaacaaatgtgtgtttttatttctactgattgttttttaacacactgttatataaggcgatatagtctgaatcatatttttartagcctgataataatccattaagctgttaaactgttcattcaaccattgccctatttttacacagttttatttcctttgtacttgctgttttaaaaagta

SEQ ID NO: 18165 - DNA, 201 bp, Homo sapiens
taagttttataaccctatgaagaacaattatttagaatcatgttctgtgggttttaatgcttgctgccagggtcttgtatttattgtgtgtgtgtgtgtgtatttatttttttcttttctcaagagttaaatactatatacactttctctacgaaggaagtgtagatgaaatgtagatggcattctttctgaatactcaca

SEQ ID NO: 18166 - DNA, 201 bp, Homo sapiens
atatatactgtgaaatgagtactattaagtatcgtcaccatgctgtacgttagatccccagaacttactcataactggaagtttgtaccctttgaccagcrtcttccctttcccccatcaactcagcttttcttaccagtatattaaatcatttgattcaaatacatttcaacattatttttttgtaattcaatatattca

SEQ ID NO: 18167 - DNA, 201 bp, Homo sapiens
gccaccaagcccggctaattttttgtatgtttttttttttagtagagacggggtttcaccatgttagccaggatggtctcgatctcctgtccttgtgatcygcccgcctcggcctcccaaggaactttttaatggcagcctaagctaatacaacattccactaatttgggtagggaataaaagtaactctgtccagtagcc

SEQ ID NO: 18168 - DNA, 201 bp, Homo sapiens
ttaagttttataaccctatgaagaacaattatttagaatcatgttctgtgggttttaatgcttgctgccagggtcttgtatttattgtgtgtgtgtgtgtgtatttatttttttcttttctcaagagttaaatactatatacactttctctacgaaggaagtgtagatgaaatgtagatggcattctttctgaatactcac

SEQ ID NO: 18169 - DNA, 201 bp, Homo sapiens
actagaaacaggttgggtgtgaaggggctggggtcatggggttagggtaggttcaaggtagacaaagccaggaagaggcacagagcatgtagatgcctggyctagaattccataaaaggcattctggatagccctaagagagaagtggtgtagacaaaagtctaaagctcccaggagaaatttattttcagagttggaagc

SEQ ID NO: 18170 - DNA, 201 bp, Homo sapiens
tacaaaattgtcattctatgtattgcttatgctttcctcctattttgcactctgtttttctccagtaatacaaaaagttgccattctgctttagtgtattwttcagttcagtggtttttgaatcagcatatttaactttatttttgaaaacttgtcacatttaaatcatctcatttttacttgagtaataagagaaaatta

SEQ ID NO: 18171 - DNA, 201 bp, Homo sapiens
cctagagctaaagcatttaactcattatcttcactctgtgggatccatttgggagaggtattcaggagctttataggttcacacttgctccccagtacctstgtgtcacaggaggatatacactggttttcagttgcatgtcagaggtggaactgacttggatgtctttgaattgctgttgaatctggagatgctagggta

SEQ ID NO: 18172 - DNA, 201 bp, Homo sapiens
ctttttttctctctttcaatttgttagagtggttaattatgtaaccacattttttaaatgttaaatcatctttgcattctggaggaaaccctatttagtcrtaagaaattgatatacatacaacccatttagtcatatatacacacaccccatcttctgtgtgtttgtgtgtatcttgaagatacatatttgatttacttg

SEQ ID NO: 18173 - DNA, 201 bp, Homo sapiens
tgatatgaatgttttgaaagtgaatgcttaaatatgacaattagtgtacatgtttgatagctacttttcaataagttagggaaattaattatcttctaatyatagattgtcagaatatcatgaaagtgtattaaaaattgccaagcacattttccatgtcttttgagatgatcattggctttttttctctctttcaatttg

SEQ ID NO: 18174 - DNA, 201 bp, Homo sapiens
tttgtttataggtgtcttgcattttctgtgtaactgattatattatgtgtggttaaaaataaggttttttaaaaatttccagtttttttttttttttttttagacagagtcttactgtgtcacccaggctggaatgcagtgatgctatctccgctcactgcaacctccgcctcccaggttcaagcaattctcatgcctcag

SEQ ID NO: 18175 - DNA, 201 bp, Homo sapiens
actttggctttgattctgagtatgtgaagtagtgtagtctccatataatttctttggctgtaaatgcatcagtagtgtctgtaatttttttttttttttttgagaccaagtttcactcttgttgcccaggctggagtgacatggcacgatcttggctcaccacaacctctgcctcctgggttcaagccattcttctgcctc

SEQ ID NO: 18176 - DNA, 201 bp, Homo sapiens
accatgttgttatgtgaggtgaagtgtttcctgaatgcagtttttcatatctcaattgcttatcaaactctttgtgttttgctcaaaataataatcatcamtgtctcataattgcttgattttagtaacgtccaaaataaaattttaagttgactatcgttaaattttttctgattttctcaggaaatgagtatttcattt

SEQ ID NO: 18177 - DNA, 201 bp, Homo sapiens
ccttgagccagttatataaactttctgggtctcagttccttcatctgtacaatggggatattagtttctatgtcatatggctactgtgaaaattcaataarttattactggtaaagcatataggacagcactatgtgggtagttgttgaataaaaataaaacatagatcttgtcattgaaaatcacaatttccaaacaggc

SEQ ID NO: 18178 - DNA, 201 bp, Homo sapiens
ctaattccttgaggctggaccaaatccatgaccccagtccaagcctgcatccaccaaagccagcgccatttaaatctgaagatgcaaatgcccttctgggrttgctcctacttccgctctgcctgattacacatatgtagcctgcctgattacacatatggggcccattaggtgaggtgtaatgggacacagtggtgccca

SEQ ID NO: 18179 - DNA, 201 bp, Homo sapiens
cttacaccttttaaattttaacatgggaagaaattataaacaacaaatgacagtgtttgaattctctcacttttgagcaaagtcaagcagcttaagtatgwgagaataaagatattcccttctgttgcccagaaggagaaaaagatcattttatttaaaatctagctattgagatgcatgttccttgtgtctaatcaagtt

SEQ ID NO: 18180 - DNA, 201 bp, Homo sapiens
tcctggtggcatttagaatggaatctctagcccttctccttggacactgtttgcgtcatgaaaaaaactgtaatatggagacgctgtctccagcaagaaayttatggctatatttcaatagtttgttcaaatttagaccatgccagcttctatagttgatgaaagcctgaatatccaaacactatctccattaataaaatc

SEQ ID NO: 18181 - DNA, 201 bp, Homo sapiens
aaaggagggggaggggggcgcagaatttccatatgattggttttagatgttgatttcggaggcctgtactgtgagtcactgaaattattggattgagtctygaagatccaaacacagagtgttgggactgtgtggttgggcttaatcctagtacaaaaaccagttcctttcagtgaagaagataaaggagaggaatccagg

SEQ ID NO: 18182 - DNA, 201 bp, Homo sapiens
gtttgaatggagcttgacaagtcaattactttcaagtttaagttcctcctctgggaaatagcacaaatagcacacatgacaccacttcataggatgtgctraagagtaactggcttaatgctgttaacctcccaaccttgttcgtatgacagtgctttctgaggctgaaaatctgatcttcccaggtttgaccagttgctc

SEQ ID NO: 18183 - DNA, 201 bp, Homo sapiens
aagctctgcagactattgtaatgtgtggctagggttgagaatgtatgctggactggacaaatttcaaatagccagatatacaagacctttgtgaccttggwcatcttatcttctgctacttctgtttctgatgttacaataaataaccacacttcttcttcctttttttttttttttttttttttttttgagatggagtct

SEQ ID NO: 18184 - DNA, 201 bp, Homo sapiens
atgacagacctcagtagatactggctattgcatgctacatgtgtgtatacatgcatttaaatgtatatagtagtattatataattgatatcatactcaagkttcccttatcctttaaatttaacgtctaacattttaccataaggttatatcactgtatacttacctgtttgtttgattttagtcattcatgttattacca

SEQ ID NO: 18185 - DNA, 201 bp, Homo sapiens
tcaaggaagaacaacccacggatctgttttgaatatcctccaccccatgttacttgtaatattggcaaatcaggggacaatataaccacttttgttcagcrtgctgtgagacagtttcccatgacacaaattgccatgagcctatttagatgtaattaaggcatttccattagatgtcttgcaggtacctcaaactaaaca

SEQ ID NO: 18186 - DNA, 201 bp, Homo sapiens
ttttcaaaaatgctgttttaaaggaattgatgttgttaggttgaaggctaaaggatggaatgttatgtatttaaatgtatacttagtttttaaaaagtttktgccaggaatattagtcatctgttaaagaatgtatcatctagtactttctttttgaagttttctttaattttggctacagagacattactcttctctgag

SEQ ID NO: 18187 - DNA, 201 bp, Homo sapiens; identical to SEQ ID NO: 4326

SEQ ID NO: 18188 - DNA, 201 bp, Homo sapiens
tatgtaagcaaagttcaactagttaggaaaaagtcattctagaaaaaaagactgtaattgtgagaccagatggtaagcattattcagctgatgaggttggrtagatttgagggaaggtgtggtaatatgatctcgatctgcagctgtgacctgttgttccaaaacagcctcattcctccctgccttttgcgtctgcattcc

SEQ ID NO: 18189 - DNA, 201 bp, Homo sapiens
tatatatactacaatatctttgtagacatattatctgtgatgatttttatgaaattgtaggtatgatagtgcagatagtgttttacccattttagagatgrtaaaacagattcagagagatgacgtgaattactgaaggaaattaagtatttgctagaccccataccctaacctaggacttgtagtttcaatgctggtgct

SEQ ID NO: 18190 - DNA, 201 bp, Homo sapiens
gatttcctagctaactatgtagtatgtgtgtaccttaatagcagaaatcacaacgtaactacagagatgaactaaaatttgattagattctgggataccaygctgcctgacctgagggaataaacaatttagggaaaacagaaaaagcaacttaggcactcatttattttctcccttgattcccaccgcaggtctctgaga

SEQ ID NO: 18191 - DNA, 201 bp, Homo sapiens
gccccgtaggctctgatgtggtttggtagctggctgtaggtcaattgatgtgttctaaattctacaggacttcttcagttcacaactccagggagcattaygtccatcataacctgccctaatggcatgcctttcatgtggctggccattagcttctgtctgtggcggtctccctgcaatgtgggtgggcttgtcctccac

SEQ ID NO: 18192 - DNA, 201 bp, Homo sapiens
gaatggcagtgttgaacaccaaactagatggagtaaaattggtatcagggtggaaataatatagaacaataatactgtggagatacctcaggtaaattatrtagtttcaatagtcaggaaaaaagattttttaattaatctgggttattcttttagaaaaagcgttaatctcaaaaagccatccacatacacccccattat

SEQ ID NO: 18193 - DNA, 201 bp, Homo sapiens
ttctagagtaccagtagatgagaactacttatttagagtggcagagcatgctatagaaacaaaatatgagtaattctaactgtagttatgttatattagcrtagtgagatagtaacattaatagaattccttagtggaatttcttaatgcttcagttcaatctaaattagtattaatactttaaggcaggaaatctgtccg

SEQ ID NO: 18194 - DNA, 201 bp, Homo sapiens
ggagagtgacttagtgcaaattgatttatgcttgttttgtacaagctggactttagggaagcagtgtggaggaagaggaattggttaagagcctgttgcarttggcagataaaaggtattgctcacttggctaggatggtagcagtggagaagtggttttacctggcttttcagcacctgaatggtctgtaagaatggcac

SEQ ID NO: 18195 - DNA, 201 bp, Homo sapiens
aggggcaggtcacacaggcacaggcaatgtttggcaatgtgtaggtccaagtaggtactaggcacaggtgctcaatgctagtactagaaacaggttgggtstgaaggggctggggtcatggggttagggtaggttcaaggtagacaaagccaggaagaggcacagagcatgtagatgcctggcctagaattccataaaagg

SEQ ID NO: 18196 - DNA, 201 bp, Homo sapiens
tgcatgggcccttcttgaactggtgcagcatgtgcagcatgacatcactcaagagttcttgtcagagtgataatgaatgtctggctattgtaaacgggaayaagaaaactatttccagctgtgtgacaaccaagacgacaaaaagcattgcagagaatattattgccacaaggaccctgcttcatctgggtctcagacgac

SEQ ID NO: 18197 - DNA, 201 bp, Homo sapiens
tttttttaatttgttgttaaatatcttcttaagctgattattatatggaaaccagccaggactccaggctcctgatctgagacaaggcaggggcaggtcayacaggcacaggcaatgtttggcaatgtgtaggtccaagtaggtactaggcacaggtgctcaatgctagtactagaaacaggttgggtgtgaaggggctgg

SEQ ID NO: 18198 - DNA, 201 bp, Homo sapiens
tgtataatgacaagcaaaactgtatttaagttctacttatgatggtgatatacatatatactgtgaaatgagtactattaagtatcgtcaccatgctgtaygttagatccccagaacttactcataactggaagtttgtaccctttgaccagcgtcttccctttcccccatcaactcagcttttcttaccagtatattaaa

SEQ ID NO: 18199 - DNA, 201 bp, Homo sapiens
tagctgggaatagagtgatgagtaaagcagtcgttatcactggtggcatgaagcatagagtctagtgggatggagcatatgaaccaaaaaaaaaaacatcsaaatgtataaatactctgcatgataaattctgtgggggaaaagagcaaaagcgattaaatggggaacctcatctgactttgggggtgattcaggatttcc

SEQ ID NO: 18200 - DNA, 201 bp, Homo sapiens
tttcctatgataatttgttcattttcattttaaaaagtactggttataactcatacattttgaaaacacttatctagtcatgaactgcagtttgaaagacrctgatctagtctgttgctgtgctgtctaaaatcaggttcattcatttttcaacatccatttgttaaatacagtatcggttattttgctagtagctgggaa

SEQ ID NO: 18201 - DNA, 201 bp, Homo sapiens
cactttggctttgattctgagtatgtgaagtagtgtagtctccatataatttctttggctgtaaatgcatcagtagtgtctgtaatttttttttttttttttgagaccaagtttcactcttgttgcccaggctggagtgacatggcacgatcttggctcaccacaacctctgcctcctgggttcaagccattcttctgcct

SEQ ID NO: 18202 - DNA, 201 bp, Homo sapiens
tggtaattccctcagcttttgcttgtttgggaaatacattatttattctacatttatgaaggataactttgctgggtatagtatctttactggcagttttktttgtttgtttgtttgtttgtttttttcctccttcagcacttcgaatgaatgtgtcatcccatcccattctctcctggcctgtacaatttctcctgacaa

SEQ ID NO: 18203 - DNA, 201 bp, Homo sapiens
gactaggcacagaaaagtaaaggttcaaaggctagggcaagatgactgacttttccagatttagcacaatctgttctctggtcactttgagacgctgtcartttagtttcatgcagctgatatcttggagaacttctgtgtccttacgtttggctgaggacactaaattttttttttttttttttttttttgaggcagagc

SEQ ID NO: 18204 - DNA, 201 bp, Homo sapiens
gtctcttcctttaggtctaataatattatacatctagttgtttctgtgtttggtgtatatgtttagaattgttacatcttcctggattgattcctttatcrttatgtaatgaccctctttatctctttttactgttttaatttaaagtccattttatctgacatgtgtataggtacttgtgttcattcttggttttcattt

SEQ ID NO: 18205 - DNA, 201 bp, Homo sapiens
atggggatagggaggcaaggaggaagtattacataacctcaagatgtggaaagacactgagtaacacatattggggcagagtgaggggtgcgatgatggayggaggactgggcttttattccattacaatccgtgtaacttatggctgctacgttttaagacactattgcctgtttactcaaattatataaaggttgtaga

SEQ ID NO: 18206 - DNA, 201 bp, Homo sapiens
tcttccttgacccaatggtcattcagtagtattttttttaattccatgtatttgtatagtttccaaagttactcttgtaattgatttgtgtttttttttttctattgtggtctgaggagataattggtatgatttttatttaaatttgttgagacttttttatgtggtctattctgggaactgttccatgtgctgatacaa

SEQ ID NO: 18207 - DNA, 201 bp, Homo sapiens
cccaaccccccgacaggcccccatgtgtggtgttcccctcccggtgtccatgtgttcgccttgttcaactcccacttatgagtgagaacatgcagtgtttsgttttctgttcttgtgatagtttgctgataatgatggtttccagcttcatccatgtccctgcaaaggacacgaactcatcctttttttatgccctaatct

SEQ ID NO: 18208 - DNA, 201 bp, Homo sapiens
tgtttattgatttgcatatgttgaaccatcattgcatccatgggataaatcctacttgatcatggtgcatggtgcatggtgcattattattattattattwtttttttttttttgagacagagtatcactctatcacctaggttggagtgcaatggcataatcatagctcctgggctcaagggttcctcttgcctcagcct

SEQ ID NO: 18209 - DNA, 201 bp, Homo sapiens
gcgagaaaccggtgggaggttatcttattgtgttagagcagtaggaaaaggtaggagggggaagtgagaggtccagagggccaggaagatggaagaaaacmagcaacagaggatgcttggaggagaaaaattcttgagctgggagctcatttcctcttttttttttttttttcctttcctcaagggactcaataatacttc

SEQ ID NO: 18210 - DNA, 201 bp, Homo sapiens
tgctttgtatagtatcagccttttgatagatacctgacgtatgttagttctttcccttttccccatgattagtctggaagttcttttttttttaaattttrttattattacactttaagttttagggtacatgtgcacaatgtgcaggtttgttacatatgtatacatgtgccatgttggtgttctgcacccattaactcg

SEQ ID NO: 18211 - DNA, 201 bp, Homo sapiens
gaaaatacaaaaatcagctgggtgtggtggcgtgcacctgtaatctcagctactcaggaggctgagacaggagaattgcttgaacccaggaggcaaatgtkgcaggttgcagtgagccgagatcgcactactgcactccagcctaggtgaaacagtgagactctgtctcaaaaaaaaaaaaaaaaaaaaaaaaaaaagtga

SEQ ID NO: 18212 - DNA, 201 bp, Homo sapiens
caagaagtacaaaattttgtgaatatccaatagtagaaagacttaatgaattcaggaatgtggacatgattgaaatactattcagtcattttatttatttcttttttttttttctgagacagagtctcattctattgcccaggctggagtgtagtggcacgatcttgtctcactgcaacctccaccttctgggttccagca

SEQ ID NO: 18213 - DNA, 201 bp, Homo sapiens
atgttcagtgtattgtccttctgcagttactgatttataactttaatagtaacagatgtagctttattactaggaagcttattgagatcatgggacatttwgacccattgttttgattaaactttgaggacatttttgtactatctttataaatatggatatttaaatcagaattacagtaacattgatttttattgagaa

SEQ ID NO: 18214 - DNA, 201 bp, Homo sapiens
gcctcctgggttctagtgattctcctgcctcagcctcctgagtaggtgtgtgccaccacgcccagctaatttttatattttaagtagagatggggtttcamcatgttggtcaggctggtctcaaattcctgacctctaatgatctgcccccactggcctcccaaagttttgagattacaggcctgagctgctgtgcccagc

SEQ ID NO: 18215 - DNA, 201 bp, Homo sapiens
gggattccactcgttagtttgtatatttatccagaaattcatcctctagtcattcattcaatcaatgatgtagaatcccagcaggattctataaactgtcmtctatcaggattatgagactatcaggaatatgatgttcatacaatcttccaaagccaggcttgaattgtctatatgggagcaatgataagtggtttttca

SEQ ID NO: 18216 - DNA, 201 bp, Homo sapiens
cagcacctgaatggtctgtaagaatggcactagcatacaagtcatttcaatgtggactttccaaggtacagttgcaggatgagagttagagtctgttgtasggtatggaacttgtacgtgcgcaatacacactacttaatgttaaggagagtacaccagagggaaggcagctttggcattctcttgggcacaggaaagtag

SEQ ID NO: 18217 - DNA, 201 bp, Homo sapiens
caaagcaccgtcccctactccttcctcctgcctgtcatctcagaagttgtccggaaattgctgctgcttgttctcattcatgtgcttgcacttttattatrtatctgtgcactcatttaaaaaaccctcacacttaaaaataatttggccaggtaatacaggttaaaattataggatacaaattctgaaccttcaaaagtg

SEQ ID NO: 18218 - DNA, 201 bp, Homo sapiens
tttccttgcttttgcttctgtcttttcttttccttccttttgataaattgagttttcttttcaaactgttttgttcttccttcctttttaaaaaatttttstttgtttctttagtggtttgagtggtacatccaatatctatttttaatagtggctaactttaaattttaaaaacgtactttaaaaaattcaagatatagg

SEQ ID NO: 18219 - DNA, 201 bp, Homo sapiens
taaaaatagtctgatgacagaagtaaacaataatcacattataaataaaaataaattacacctgtgataacttctaccatggagtgttttatagtgctgasagcatattacaaagggatttttgacttaatcagggaaggcatcccagaagtagcggtaagtaaagtgtgagtaggaattagattgcgaggagagcaggta

SEQ ID NO: 18220 - DNA, 201 bp, Homo sapiens
gtgcacattatgtaaaagaaaacaaatcttactgtcttttttatgatacagcaaagtgaagactgaggatcctgagtgtgcatagtgcatgcatgttatgygttatatgtgtatgcatacatatgggtatatatatagttttacaagtttaaaataatatcagtgacttgaaaattgtaagggcttaccagataatctctt

SEQ ID NO: 18221 - DNA, 201 bp, Homo sapiens
tatcctttcagattcagcaaacatggaaaaatatgattatcttatgtttatatgctggatgcttgctttggagaaatatgcagcatctaagttatatatawtccacattttataaaaacccattggatgagggtgatattattttaaaaagattttaaagggctaaggaatcatatggaagatgaattcaattttaatgac

SEQ ID NO: 18222 - DNA, 201 bp, Homo sapiens
cttctggagcagagaagataggtagagttactcattataggcaggtttcattgtaggagtattcagtgaggacccccgccttggaagtctgtaatcagcakatgataaggatggtgtgttcttactaagagaataacacaactgaaacagaattgccttttgttaaggggatgctttgccttcttggactacgattgtggg

SEQ ID NO: 18223 - DNA, 201 bp, Homo sapiens
acttctctatttatgcttatttaagttatttacagcttttaaaataaagaatactgcaaatctttgcacatgcataattgtattgtgtgtaaatatatctrtaggataagtttctatcagcgatattgttgcagtttatttagacagctttagaactgattgacttttgcttaggatttacgggctagtcagaatttgctt

SEQ ID NO: 18224 - DNA, 201 bp, Homo sapiens
gacctgagcatatagtatgcgtccttaagaatggaatcttatgtgcttgattttttgctttttagttgtattattgatatattcatttatgtcacatagarcaagataatgtgaattataaatacataagagggagaaaggaaaaatgaaagtaggagtgggcaaaaaataatgccaggaataataaatacatgagaagga

SEQ ID NO: 18225 - DNA, 201 bp, Homo sapiens
agttgacagtctggggctctggtaaggcgggggttcatctgtcaaagtgagccagcttactcagctagatactgtatggcatgattacttagggtaatgtmttttttgtcttgtttagttcccccatgatttgtgcagttttgtaaataagttgagaagtaaatagatttcatgatataattttaagacttcactcccaag

SEQ ID NO: 18226 - DNA, 201 bp, Homo sapiens
tgcctcccaggttcaagcagctctctgcctcagcctcctgagtagctgggattacaggcgcctgccgccacgcctggctaaatttttttttttttttttttgtatttttagtagacacggggtttcaccatcttggccaggctggtcttgaactcctgacctcatgatccacccacatcggcgtctcaaaatgctaggatt

SEQ ID NO: 18227 - DNA, 201 bp, Homo sapiens
ttccttccttccttccttccttccttccttccttccttccttccttccttccttccttccttccctccttccttccctccctccctcccgccctccctccytccttccttccttccttccttctttccttctgttttaaaattttactttaagttccgggatacatgtgcagaacatgcagtttcttacataggtatacat

SEQ ID NO: 18228 - DNA, 201 bp, Homo sapiens
tctttccttctttccttccttccttccttccttccttccttccttccttccttccttccttccttccttccttccctccttccttccctccctccctccckccctccctccctccttccttccttccttccttctttccttctgttttaaaattttactttaagttccgggatacatgtgcagaacatgcagtttcttaca

SEQ ID NO: 18229 - DNA, 201 bp, Homo sapiens
ttttcccaagccagacttccatggcaccaacttggttttctgcagtggcacttctgtcttttgtagttttaaatttttagtttctgcagtgatttttttttatttccttaaaaaattttaaaatcaaacttgtaaatgtttataatttaaaaatgtataggtagatactttatttggcaaacaatgttagctatcactttt

SEQ ID NO: 18230 - DNA, 201 bp, Homo sapiens
aattcatgtagagccagctgaatgggtgactggagttttattactcaaatcagtctccccccaaatttggagactgaagtttttaaagaataatttcgtgrgtagggggccagggagtagggagtgttattggtggcactggagatgaaattattgggagttgaaatattatataaacatatatattatataaacatatgt

SEQ ID NO: 18231 - DNA, 201 bp, Homo sapiens
gcatatttttttccaaccaaatgcagatcagaaatatagtattcatggtatgcgaaccccacaggtatggagggccaactttatatatatatatatatatacatgtaggttccacagggctgtctgtggtgtaactgcccaatgggttctccttacctactccccaggtggaactgatttatcaagacaggagacttgcaa

SEQ ID NO: 18232 - DNA, 201 bp, Homo sapiens
tgcatatttttttccaaccaaatgcagatcagaaatatagtattcatggtatgcgaaccccacaggtatggagggccaactttatatatatatatatatatacatgtaggttccacagggctgtctgtggtgtaactgcccaatgggttctccttacctactccccaggtggaactgatttatcaagacaggagacttgca

SEQ ID NO: 18233 - DNA, 201 bp, Homo sapiens
gtagggtgtgtgtgttggtcaactagttggctgatttcaaagtcagaatgtccagcaggtgatatcaaacatttgcacttagatgagtttccaccaccaarcataggaaggttttggagtggagcaggtgtaggccccagctctcagggctttgcctacttagaactctgtttagtattaccttaattgtggttgatcagg

SEQ ID NO: 18234 - DNA, 201 bp, Homo sapiens
gctatttaatattttgaggaactaccagattttcacagtggctgcaccttttatattcccaccagcaatgtataagggttccaatttctccacattcttaaccaacacttgttattatgtcttttaaattatagccatcctagtagttatgaagtgtgaatttggcttttgtttccctaatggctaaaggatatccagtgt

SEQ ID NO: 18235 - DNA, 201 bp, Homo sapiens
atgatctccaccttcccgtattcaaagccaccattatctcttgtctgatttactgcgtgagtttctagctgctcttcttgtatccacacttgctcttccasagtctccaaatattattcccctctaaaatgtatcttacttattttgtattttgttgattgtctttctcatttatcttagaacctaaactcaatgaaggca

SEQ ID NO: 18236 - DNA, 201 bp, Homo sapiens
ttcaggtattttttacttttctcattctctccagtatccagtctgttagccatacatatcagctgtatggtcaaaatgtgtctatgatctccaccttcccrtattcaaagccaccattatctcttgtctgatttactgcgtgagtttctagctgctcttcttgtatccacacttgctcttccacagtctccaaatattatt

SEQ ID NO: 18237 - DNA, 201 bp, Homo sapiens
tttagtagagacagggtttcaccttgttagccaggatggtctcgatctcctgacctcgtgatctgcccgcctcggcctcccaaagtgctgggattacaggygagagccactgcacccggccaatgtgttaacaatagttttgtaaaacatactaattcatgcccatagccacttttctattctcttccagtgaaactgctt

SEQ ID NO: 18238 - DNA, 201 bp, Homo sapiens
ccacttcagtaggaacaagaattctggtctactcgaagttcttctctttgtaaattagtccattgataatctggttattttactttagtttgtgtacattkggtttttagtatttgtcttcactgccagattgccaggtttgtgagggcaggcaggattgtaatgattgtttgttttctccacgttgccacattgcctgtc

SEQ ID NO: 18239 - DNA, 201 bp, Homo sapiens
tatgtttaaatctatcatcttgcttttgtctattgtcacatttgttctattttttggatttggtatactttatgatttcattttatcttcttgttggattrttagccataattctttattttatttttagtggttgattcagtgtgtgcagtaggctttaatttattgtaggcaacttttaagtgacatcgtaccccttta

SEQ ID NO: 18240 - DNA, 201 bp, Homo sapiens
tgccttcaaaactgaagaccagagccgtagtgaattcactacagtaaatgccactttattcagctatgtgggagccaaacctagcgacacctttatgttcyatgccttctaaaatacaacagcctggaaaactcctggctacaatgggtgctcagtaaataatatgtttgttttacttccatttattctgggaatgattac

SEQ ID NO: 18241 - DNA, 201 bp, Homo sapiens
aggtcaggagctgggattcaaggttgggcacttgggtttcagaacccatgtgtttgtcccctccatgttattctacttccctttaatcaaaacaactagcmgcacatgctgtatttagttataacatttgaacagcaagcagtgtgtgctattaaattgaaacactgtgatctcatttgtttctgttgaaactgcctagct

SEQ ID NO: 18242 - DNA, 201 bp, Homo sapiens
accatggtgactgtcaccagtggtgacgaaagtggcaggagtcagataagtttaagaccatagttttcttattcactctgatgaaagatttaatttggctrctgtcctattagcaaatctatatgtgcttctcttttcagtttacttcaacaagcatgttgttgagtgccaattgtgtgctaagggataagagaaaaaatt

SEQ ID NO: 18243 - DNA, 201 bp, Homo sapiens
aacattatattatacaaattaagaagtaggattttttcctttttttaatgaaacacattacaccaagttgggaagggttaacattgtcctacatataatakaagacagagaatggaccagcaatgtagtcagaaggttgattctagagttccagggatcttagaagtcccaaacataagcagggagaattttggctttaga

SEQ ID NO: 18244 - DNA, 201 bp, Homo sapiens
gggaaaataattccatagaacataagagactgaggaaatgtatagagccttttaaatccttacatattactgataagaaaatgcaagccctttaacttttrtggtaaatggtgcaattaaggtgtttatacttatttataaaacatagcaggctgggtgccgtggctcacacctgtaatcccagcactttgggaggccgag

SEQ ID NO: 18245 - DNA, 201 bp, Homo sapiens
caactatgaaaaaagatagccatttcaaatacctagaaatttcatagtaaattgaagcttcctaatgatttcacagtgtgaagaagagaactcatcctaartatcctatattctgattcttgatgtgtaacaaaatgtagccagtatttccattcttaacattccattcttaacattaattctccagagcaatcatttgtg

SEQ ID NO: 18246 - DNA, 201 bp, Homo sapiens
tagactgaatgtggtcatggctttacttaaaccctggcagggctcctgcacccatagaggagttattataatgatccaaagcaaatatgaggttctaatasggtgacacagcaataacagggtctttttgaagaaatgggatttaatctggcattgggagactggaaattcatggcttcacttatttattctgcccaagta

SEQ ID NO: 18247 - DNA, 201 bp, Homo sapiens
gaccactgagaatcactgtttcctaggggttgagagtttagatctggagtaagataggccagagtttgaagttcacatcctggctccttgcttacgagttscatagtcccaaataactgacttaacctctctgagtcttggtttcagaattaacaaagtaagaatcatagggcctttctcaagtggttgtgagcattagat

SEQ ID NO: 18248 - DNA, 201 bp, Homo sapiens
ttgccaggaaaagtcgacacctatacctgaaacataacgagaatataattttctatggtgttttacagtctgtaatggcctggttgaggtttcagaatgtcttcaggtgttttttgttattgttacagcagtagaattcacaggcagctgtttcatctggaaatgtatagttctgtttttgaggggtttacgttctttgca

SEQ ID NO: 18249 - DNA, 201 bp, Homo sapiens
ttgggagacgatgaagggttccccaagatcaaatgaacaccaattccttataggcagagtcctcacataatgtatcatccaaactgagatgcttttgggartgaaaacaggcactaactgttgggaatctgggataacaggagtaaatcaagactgtttagggcaacctaggatgaatggtcaccctcctccaaggctctg

SEQ ID NO: 18250 - DNA, 201 bp, Homo sapiens
ctccctcccgccctccctccctccttccttccttccttccttctttccttctgttttaaaattttactttaagttccgggatacatgtgcagaacatgcagtttcttacataggtatacatgtgccatggtggtttgatgcacctatcaactcgtcatctaggttttaagccccgcgtgcattagtaaccctgtgttcttt

SEQ ID NO: 18251 - DNA, 201 bp, Homo sapiens
tcctccaaggctctgctctctgtttgttcttttttttgttttagagccagggtttcaccatgttgcctaggctggtgttgaactcgtgagctcaagtgatmtgctcacctcagcctcccaaagtgttgagatttcaggtgtgagccaccatgcccagccaatatttttttctaggttctcttttagtttttcaaatgcagc

SEQ ID NO: 18252 - DNA, 201 bp, Homo sapiens
actggcaggacaaggatttgaacctaggcagttggattccctagcgtactgtacttgtaactactatgcagcactgcctctcttcctccttttcttaaaaraagaaatgtatgtgctttatttgaattctgactcaaccaaccaaactgttaaaagttataagaaaatcaggggattgtgaacttaccgaatatttgatga

SEQ ID NO: 18253 - DNA, 201 bp, Homo sapiens
gaaaggatccctaaaaattatatcatccaactcccacatcttacaaatgaagagaccgagacccccaggttaattgagaacttcaggtcttagttagctcmtgatccaagccaggatccaagtttcctgacttccactaaggtgctatttttactgcccctgccttgttcagtcccatccacactttccatcttcatcttt

SEQ ID NO: 18254 - DNA, 201 bp, Homo sapiens
gttagctcctgatccaagccaggatccaagtttcctgacttccactaaggtgctatttttactgcccctgccttgttcagtcccatccacactttccatcwtcatctttttttgggaacttcagccatgtatttatgtggctagccaggattaggtgtaaacattgtggctgtgaaggtaactggttctcaaaggaagagt

SEQ ID NO: 18255 - DNA, 201 bp, Homo sapiens
tgatgctttttgtttttcttgaggtttttataattctctgtttgtccttgacttttgatagtttgattattatgtgctggagaagacctttttgggttgtwtctgtttggggatccctgagcctcctatatctggatgtctaattctcttgctagacttgggaaattttcagctgttattttgttaaataggtcttctttc

SEQ ID NO: 18256 - DNA, 201 bp, Homo sapiens; identical to SEQ ID NO: 4327

SEQ ID NO: 18257 - DNA, 201 bp, Homo sapiens
ggagtctcactctgttgcccaggctggagtgcaatgtcgtgatcttggctcgccacaacctctgcctcctgagttcaagcgattctcctgcctcagcctcytgagtagctgggactacaggcgtgtgccaccatgcctggctaatttttatatttttagtagagatggggtttcactatgttggccaggctggtcttgaac

SEQ ID NO: 18258 - DNA, 201 bp, Homo sapiens
tgagattacaggtgtgagccagcatgcccggcccatcatctaggttttaagcccgcatacaataggtatttgttctaatgctctccctccccttttccccmactcccagacaggccctggtgtgtgatgttcccctccctgtgtccatgtgttctcattgttcatctcccacttatgagtgagaatatgtggtacttggtt

SEQ ID NO: 18259 - DNA, 201 bp, Homo sapiens
taccaggatactgagtgtgtatgtgtgtgtgtgtgtgtgtgtgtgtgcgcgcgtgcgtacatgcatgtgtgtgtttgtgtttgttaaaacaataacaattyggcaagcataggataaggcattggttttcactgtttactgtcatcagaaatgccagagatgtgtatttaaatgcagagttttcagcctgctcacagtgtt

SEQ ID NO: 18260 - DNA, 201 bp, Homo sapiens
tatgtgtgtgtgtgtgtgtgtgtgtgtgcgcgcgtgcgtacatgcatgtgtgtgtttgtgtttgttaaaacaataacaattcggcaagcataggataaggyattggttttcactgtttactgtcatcagaaatgccagagatgtgtatttaaatgcagagttttcagcctgctcacagtgttcacaattcagataatttgg

SEQ ID NO: 18261 - DNA, 201 bp, Homo sapiens
tgctcaggctggaattgaactcagtgggctttagtgatcctcctgcctcagcctcctgagtagctagaactgcaggtgcatgccaccacacccagcttactctttttttgattagcaaactaatgcatattcattaaggaaaaaaaagaaaatcatttagaattttacctttcataattaaccaaaatattaagttgaata

SEQ ID NO: 18262 - DNA, 201 bp, Homo sapiens
atgacttattgttaaatgttcttcagaaagcttgtgccaatttatcacaaggggattgggagtcttttgtcacattcatgacaatattggattttttttartggcactatgttacaaccatttgtgttatctttattcatgatgataaacattagcaaacctaaaaaagagatggaaactttttaaggatttagaaaccaa

SEQ ID NO: 18263 - DNA, 201 bp, Homo sapiens
aaagtgttgggattataggcatgatccaccacgcccggcctggtaagtcagtcttaaccttagttacttcaccctaagacagagctgggtagaaatcagawgacaagaattaggaaaaaaggaagaggcagtgacccatcttaaggtttagactgtattgtttgattgcgagtaaattaaagcctttccttttttgtatgc

SEQ ID NO: 18264 - DNA, 201 bp, Homo sapiens
gccctgctaacactttgatttttgcctagcaaggactcacatcagatttctgacctctagaattataagataataaatttggattattctgagtcacaaarttttgtgataatttgttacagcagaaatagaaaacgaatacaaataagtgagttatttttaagagggttgctatttgtctcatataactttttatgtaaa

SEQ ID NO: 18265 - DNA, 201 bp, Homo sapiens
gctcagcctgggggagttcttggctctgcccaggaaagaattcaagagtgaaccaacagtgaaagaaagcaagtttgttagcgtaacagtgtacagccaartgaccactccaaaggcagagcagggctatctcataggcagggtagcacagaacagcactaatggattgctggctagttatatttatacccattctttttt

SEQ ID NO: 18266 - DNA, 201 bp, Homo sapiens
acatcttacaaatgaagagaccgagacccccaggttaattgagaacttcaggtcttagttagctcctgatccaagccaggatccaagtttcctgacttccrctaaggtgctatttttactgcccctgccttgttcagtcccatccacactttccatcttcatctttttttgggaacttcagccatgtatttatgtggctag

SEQ ID NO: 18267 - DNA, 201 bp, Homo sapiens
ccatctccattcaaatattttttctcagaagaaacgtttaaacagaaacagaaaccaaaaataccacatgaacctaacagagttccttttgaagtgtggayagaggaaccagaacatgaagctcttattttaggtctgttgagagtgattcaggccttgtctggccgagactcttgttcatccaaatatgaatgttggaaa

SEQ ID NO: 18268 - DNA, 201 bp, Homo sapiens
agtcttcctaaaattatagaattagcgttagggaaacatgggtcccagtggtgcagtataaatgatgatgatgtaaaagatgtcattgaagagtttggctrtctaatattgaaaataccagaattaccagtcaaactcattcatttttcttacagcctaaattgtgaaacttttgcattgtggtttctgtattacatattt

SEQ ID NO: 18269 - DNA, 201 bp, Homo sapiens
ctggccacatgggtggtcaaaagtaggatgtgcttagaaagaagttgtttttctttccattttctattattaagtatttaaaaactgtgatgtagtcacaytgtttctgcattgatactgtgctttcctttctccctcccacagccctcagtaacccagacgtttattcttctatctacctaccttcacttcctatcaccc

SEQ ID NO: 18270 - DNA, 201 bp, Homo sapiens
tttctattattaagtatttaaaaactgtgatgtagtcacactgtttctgcattgatactgtgctttcctttctccctcccacagccctcagtaacccagaygtttattcttctatctacctaccttcacttcctatcacccaagggtttctgccttttaggttttctttagactgagatactgtctccctagcctttctgc

SEQ ID NO: 18271 - DNA, 201 bp, Homo sapiens
taacgttcatgatttggtggccataaagtaaaatcaggagaaataacccttctaagtactgagtccaaagagacatttctcatttgggtattgctctgtgwtggatgcatcagctatgatgtgatgttctggagagctctacattctttatggcacattcagtaccatgtcccataaagtcatgccatatcatttctcagt

SEQ ID NO: 18272 - DNA, 201 bp, Homo sapiens
ctttgccaagatccatcagagaaatcactatctatggcagctctagctttacaaaatatacttattaaataagacttgaaagtcaaaattactccttgatycatgggctgcagaatggatattgggttagcagtcatgaacacaacattaatatccctgtacatgtccatcagagctcttaggcgactaggtacattgtca

SEQ ID NO: 18273 - DNA, 201 bp, Homo sapiens
gaaggcttaacttattgattagttttttaacataccaaattgcagtaactaaatcatctactattgtgagttatttttcctctcacgtttacttttccttrgccttattttacagctaaattttataaaaaagatttgattcatttttgaatcaaatcaaatttattctaatatgtaataaactttattgcgtgcagtttg

SEQ ID NO: 18274 - DNA, 201 bp, Homo sapiens
ctatgaaagtcttaggtggaattttctctctgcacttattggtcagttatgttgtgaaactaacctgctctaaaaataacatttgggccagatgtggtggytcatgcctataatcctagcactttgggaagccgaggcaggtggatagcttgagcttaggagtttgagaccagcctgggcaatatgatgaaaccctgtctc

SEQ ID NO: 18275 - DNA, 201 bp, Homo sapiens
aaaagctgactttggtggcagttctttatactgtcttctcaaattaagagggtcctctattcaggaatgtttcctgcataacgaatagacattccttgaarcatgatgaccccccacccactgcatttgaatgtagagcaacatcttacatggaaacagtgatagtataggaaacacaaaataacgtcaaataaactctaa

SEQ ID NO: 18276 - DNA, 201 bp, Homo sapiens
gccacctatgcagacttggaataggatagcatggtaaactgaggaagaagtgagagcatgttaagttggtggaccatgattggcatcagccaattttcatrtagttcctttagttccaaggatttgttatagttgatctaaaaggatgccgaatgaacagcagtaaataggtgaccctgctttgcttattggtgttcccta

SEQ ID NO: 18277 - DNA, 201 bp, Homo sapiens
ccgaatgaacagcagtaaataggtgaccctgctttgcttattggtgttccctaccagaggtgggaaagaaatgaataattcctctaagtggaaatggtccrtgctccagtaggtttatgctacatttgaagtgtcttccttctgtcacttcctctcctctctactctggggtttgtgagagcttggagtgtgtcatacaat

SEQ ID NO: 18278 - DNA, 201 bp, Homo sapiens
ggtttcttgagctcactgtttttgctattaaatattttcttccttcctccagaaattctgtgtttgaggattttatgtatcccttgtgaaataatccccarataatgaaaattcaacaatacaaagtgatgcagagacaatgatccttgacaacagtagtatagatatctgctcattaaaaaaaaaaatcaaaggccttat

SEQ ID NO: 18279 - DNA, 201 bp, Homo sapiens
cattactagcttttgaagatgacaggtagccatgagccaagagatgtgggcagcctctagaagttggaaaagacaaggaaacggattctcccctagagctyctggaaagaaacagagctttgccttcccggtgattttagtcctgtgagacctattttggacttctgacctctaggactgtaagagaataaatttgtatat

SEQ ID NO: 18280 - DNA, 201 bp, Homo sapiens
ataaaagatgaatacatacctttaaagtcctccaagttacccagcctcggagattaaaataaattttatttccaagatatctctatttttcttcctccccrctaactagcttcttaagttcccatgtgaatattgtcattcatttccttaattattaaacatgttttgttttaaactggtaaataatgtttaataaaggtt

SEQ ID NO: 18281 - DNA, 201 bp, Homo sapiens
agctcactgcagcctcgaactcctgagctcaagtgatcctcccacctcatcctcccaagtaattgggactacaggcgcaccccaccatgcccaccttatttatttatttatttatttatttatttattttcatagagatgagggttccctgtgttgtccaggctggtcttgaactcctgagctcaagggatccttttgcct

SEQ ID NO: 18282 - DNA, 201 bp, Homo sapiens
tgagatcatgccactgcactccagcctgggcgatagagcgagactcagtttcaaataaataaataaacatcaaaataaaaagttactgtattaaagaatgrgggcggggtgggaggggtggggagaggttgcaaaaataaataaataaataaataaaccccaaaatgaaaaagacagtggaggcaccaggcctgcgtgggg

SEQ ID NO: 18283 - DNA, 201 bp, Homo sapiens
aaaattttttgattttttttttttttgagacagagccttgctctgtcgcccaggctggagtgcagtggcacgatctcagctcactacaagctccgcctccygggttcacgccattcttctgcctcagcctcctgagtagctgggactacaggtgcccaccaccacgcctggctaattttttttggtatttttattagagac

SEQ ID NO: 18284 - DNA, 201 bp, Homo sapiens
ccactaaaaatacaaaaaattagccgggcgtggtggtgggcgcctgtagtcccagctactcgggaggctgaggcaggagaatggcgtgaacccaggaggcrgagcttgcagtgagccgagattgcaccactgcactccagcctgggcgacagaatgagactccgtctcaaaaaaaaaaaaaaaagaaaaaaatctttacag

SEQ ID NO: 18285 - DNA, 201 bp, Homo sapiens
ctcaagtgatctgcccgccttggcatcccaaagtgctgggattacaggtgtgaaccaccacacctggcctcaatatagtggcttttaagtgctaaggactragattgtgttttgtcaggaagaggccagttgtgggtgaagcatgctgtgagagagcttgtcacctggttgaggttgtgggagctgcagcgtgggaactgg

SEQ ID NO: 18286 - DNA, 201 bp, Homo sapiens
gtgccaccacacccaggtaatttttgtatttttggtagagacgaggtttcaccatgttggccaggctggtcttgaactcctgacctcaggtgatccacccrcctcagcctcccaaagtgctgagattataggtgtgagccaccacacctggcctcaggaagtatttttatttttaaatttatttatttatttgagatggag

SEQ ID NO: 18287 - DNA, 201 bp, Homo sapiens
aatggcgtgaacccaggaggcggagcttgcagtgagccgagattgcaccactgcactccagcctgggcgacagaatgagactccgtctcaaaaaaaaaaaraaaagaaaaaaatctttacagtggattacataacaattccagtgaaatgaaattacttcaaacagttccttgagaatgttggagggatttgacatgtaat

SEQ ID NO: 18288 - DNA, 201 bp, Homo sapiens
cgcctctactcccagaaggccgcggggggtggaccgcctaagagggcgtgcgctcccgacatgccccgcggcgcgccattaaccgccagatttgaatcgcsggacccgttggcagaggtggcggcggcggcatgggtgccccgacgttgccccctgcctggcagccctttctcaaggaccaccgcatctctacattcaaga

SEQ ID NO: 18289 - DNA, 201 bp, Homo sapiens; identical to SEQ ID NO: 4412
